United States Patent Application Publication US 2020/0157537 A1 - sequence listing, part 11

SEQ ID NO: 21702 - DNA, 1158 bp, Mus musculus
caggatgatgccctccaggtccatcctttttgcctaggaatttcataaattcattctttttaatagctgagtagtactccattgtgtaaatgtaccacattttctgtatccattcctctgttgaggggcatctgggttctttccagcttctggctattataaataaggctgctatgaacatagtggagcatgtgtccttcttaccggtggggacatcttctggatatatgcccaggagaggtattgcgggatcctccggtagtactatgtccaattttctgaggaactgccagactgatttccagagtggttgtacaagcttgcaatcccaccaacaatggattgcctctttctccacatcctcgccagcatctgctgtcacctgaatttttcatcttagccattctgaaagatgctgatgctgatacaccccaggactacataagaagtagtgctttcgagattacaagtcaaatactgtggctctgatgaagaaaaggggccttttagtaacgtggaacagaaaggtgttcaacaagctccaggttgcttaggttctgagaagtgttgtgcttgtgtgtgttgtgcttgtgtgtgttgtgcttgtgtgtgtgtgtgtgatctgtgagaagtgtgcttgtgtgtgttgtgcttgtgtgtgtgtgatctgtgagggcgtaaatactgcttcctgaataggccagcactgtgttgtaaagctcccttcgtggattttaaaaacagattgtctttgtttttatttagggtatgtgtgtgtccaccgaggcagtggagggtgtcagatttcctggagctgaggttacaggtggttctgagccactggatgaagagctgggcatccccagctgctggctgtctctctagctccctcatacgggtttcagtgtcctccctaagtaatttttcatagtagctattgtgtaaagttaactgtaaatttgtgactgttttcttcagactcagggtttaggaactgccttgaagatcctcttctctgaaaaggaaatccaaaaccttccggagaacagcccatccaaaggcttccagctcactcggcaggaaatcgttgctcttttaaatgcttttggaaggtaagcggagacctgattccctccaggtttcaacatacggcaaagg

SEQ ID NO: 21703 - DNA, 1219 bp, Mus musculus
aaccttcatctgcctccatgtttggatgcagatagcttactagtgtcttcttttcccctaagccttatctggttcacccctcaaattctgattttctataacctgagtggagcatatgttctgaactttagcctcctcagaactggagttcagagactcactttcttcagctcatatgagcctcaaaattcttccctctcaactcttgtttacataactgttacccatgactctgacacccactagtcactcgccgatcatggtcttccttcaagaccctaactgaagcataagagtgcatgcattcagataaacagggtcttctcaggcctgctgtgcgagtctctaacagatacctaactctttggacaaataaatggaggggactctttttttctttttttttttttgtggtttttcgagacagggtttctctgtgtagctctggctgtcctggaactcacttggtagaccaggctggcctcaaactcagaaatctgcctgcctctgtctgcctcccaagtgctgggattaaaggcgtgcaccaccatgcccgccagctcgtcttacaagatgacctctgactccatggtggtgtgctggacctctatgaatgttcccatttagcaagaactcagaactacccaaggtagctgaaaagaaaatctaagatgatctttacgttctaacagttaagttcaagaggttaaaagtacctttaatctaagattgtagttgtaggtagaatgcttgcccatgtgtccagttccccgcactgcataaagtgggcttggcagtttatacctgtggtcccagcacttggaagttgggagacaaagagaagaatcagaagttcaaggccatccttggctatatagggactttgaggatagtctgagacactaacgaccctgtaagtaaagaaagggaggggaggagggacccacaacagaaaacagttctgcattgctaggaggagttttttcaaagctcacgtggaatcatgaaaatctatagtatctaggaaaactaaaatggggcaggggaaggagagcgtgtagtcagtttgaacacaataataaattccaaatcaccaataacgtgttggtgacacattaaggaaagaaagcgtttccccttggtgtcatttaaccaagagtaagctcagattttattttctatttcatgttccctgtgtcttctgtcttcatcctctgtg

SEQ ID NO: 21704 - DNA, 1148 bp, Mus musculus
ttgggggggtgggtaggaatggtcacagaagcctttttcgctctttcttgactgtgagtctgcagccattgatatgactacaaaagtagcttctatatttttatagaataaaaacattcaaaatgtaacagtgggagtctagacagcagtaggatcactgttctccttcagtgaactgtcctttggacgttgcagttctctgaggctttcagatatgcataagggtcacttttaccccatctcaagttttccttggatattctgctttggaggaatcccacataacctaaaagtcctctttctgctatcttattcagttttactttacttgcaccataccagatactttccaagccatattcacagtgcaatacctgttactcagattctcttatgtctttcccacttctgtgctgtagccaaggcaggatctgagaggttctaatgagaaacacaatgtttctccctgcaactctcatactattatcatgcatatactcacacaattggtgtctttaccaggcacagataaattgagagctgatgacatgctgctggataagtctggacatttgaagttagcagattttggtacttgtatgaagatgaataaggaaggtatggtacgatgcgatacagcagttggaacacctgattatatctcacccgaagtattaaaatcccaaggtggtgatggctactatggacgagagtgtgactggtggtcagttggggtatttttatatgaaatgcttgtaggtgatacacctttttatgcagattctttggttgggacttacagtaaaattatgaaccataaaaattcacttactttccctgatgataatgacatatcaaaagaggcaaaaaatctcatttgtgccttccttacagacagagaagtgagattgtgcagaaatggtgtagaggaaatcaaatgtcatctcttcttcaaaaatcatcagtgggcttgggaaacgcttcgagacactgtagcaccagttgtgcctgatttaagtagtgacattgatactagtaattttgatgacttagaagaagataaaggagatgaaacatttcctattctaaaagcttttgttggcaatcagctaccttttgtaggatttacatattatagcaatcgtaga

SEQ ID NO: 21705 - DNA, 1141 bp, Mus musculus
ttataaacttaatgttttgttgatagtagtgaattttgtcggttgattactctttttaagctggcttgaagttttcttttttctttgctttttattttttaaagagttgcaagtattgccatgtgatgggaacgggccactctaagataaaaagcccaccaagtgaaagccagtgaccttgccctgtacaccagcgggttctgtagtgcccatttagaatgtaaggaaaggtggaaattttgcactttgtctatttttattttaaatgtggagattgtttggaaatgtcacttatcaccactgcagttagatgctattatttaaactattcgcttaaggggggaaaatcttcatttccacttgctgaacttttcttaactatgatttgttccaagcttaggacacacactagtacagtgtgttctacgaagttgaaagaaatggttgttagaatgaattccttcagtaagggaagtattctgaagttggtactcactggattaatttttaaatacgttagggtgtgttggtgtgtgcatagtgacatcaccatgacatctgaggactgtggagactgtgggactgtttggtgaccctggtgatgaatctgtaggaggctgtctgcccgttctgtcaccggtgcttgggggaattcaagcactgcttacattgtgagattgcttgtgacaaaacacttgctgtttgtctgtgtctcatcacctgctgtaaaaatctagcactcgacagcaagcctgactgaaacgattgtacctggtgccataacaatgtgaagaggaagtattttcattggtggcctgtatattcctttagtggcatccatgttagactaaaatggcccatgctcagtacccctcttgttttggattatgtggaggatcagccaaacaagataatcaattttgaaacttgccaactcagatgttggcccctgtattttgtgtatgaaatgctgtgctgtgtctctcgacctgcctaggtgccaccatgtgtaaggagggacaactgtgctggtcttcctcagcactgcttctcagcagtttgcagcctgaagttcctgcaggagcccctagtagtcaccaaaaggctcagaccagatacacgctgtgtacaccaagaaact

SEQ ID NO: 21706 - DNA, 1138 bp, Mus musculus
ccaaggtagctgaaaagaaaatctaagatctttacattctaacagttaagttcaagaggttaaaagtaccttgaatctaagattgtagttgtaggtagaatgcttgcccatgtgtccagttccccgcactgcataaaatgggcttggcagtttatacctgtggtcccagcacttggaagtggggagacagagaagaatcagaagttcaagaccacccttggctatatagggactttgaggatagtctgagacactaacgaccctgtaagtaaagaaagggaggggaggagggacccacaacagaaaacagttctgcattgctaggaggagtttttccaaagctcacgtggaatcatgaaaatctatagtatctaggaaaattaaaagggtgcaggggaaggagagcgcgtagtcagtttgaacacattaataataaattccaaatcaccaataacgtgttggtgacacattaaggaaagaaagcatttccccttggtgtcatttaaccaagagtaagctcagattttattttctatttcatgttccctgtgtcttctgtcttcatcctctgtgtgctacacgagtctaaatctgtgcctgcctgaagactgtcttgtaaatctatccccactgtgtgttcatctgtcacaaagggctttgttctctattgagcagcccagaaagcataacatggagaaggaatgagggataacagaaatctttaacagcgttttacaagggattattaaatcggactccaattaaccacaaccggcccagaaaacagtatctcaaacactattgtttatcgagcaatatttaaatgttgtgttcaacattcatggtggatattcgctgtaggagattgctttcaacttctgtgtttgctgttttcagcaaatgacacccattcgttactgttggtcagagacacggagagcacaggacttaagattacagctaggcacagggaaacccaagggtaagtaagggtgactgttaacaccggtttcttaaaagctgagcacacagtaggatagcatcttaagtcaaaagtgacttcagggtctactaaccttgcctgtaagatccatcaaaagttccactccagtctcttggagaggaccaagggctaata

SEQ ID NO: 21707 - DNA, 1149 bp, Mus musculus
atacgtggtctaatagtttaaagctttggggaaagtttccacaaatcttacctctgaaggtccctcttgtgagtgccacgtggtgggctcctttcaccgccactcaagcattccaagttcaggagaagcagagtaccatggtctgtacgtaacaggctcaacagcagcagcagcagcagcagcagcagcagcaatttctcgtaaactctgtcctaagcctggtccttcttcatctgaaagcactactacaagcactccagtaacaagtggatactgttaagatgtagttgctgacactattaaacctcctctgctgtgtgtgtagccattttgtagagttttcttcagcccggtgtaactgaatactcactacctcagtacctcagtaggatgcaaggactgtgccttctttgactcagccagtgcttgctatagtcaggctacaagccaagaggtccccacagagtattaacaataaatacttctggccttcaagctctaaaggattgcagactcctgacagcttttctgtaagacatgcctgtcatttgtatgaggctgacacggggctcactgcctgttatttttagatagtgttctattaaaagctatgtgtatgagaaagtaggctctgcctacgtggcggcagcatccccatatcagccagagagtgttccagacagtggtcctcttgtgccatctccgtgctgtcctgggaaaacgctggaacaacgtggccctcctggaggccggatgctctggcttcttctggtcctataggtcacagagccacgcccactttctcccattttgttatatttaagattgggagcccagtttccagtgggttgtaatggggtcttcgttgtacagaggacgacgtggaggaacttgcgcagccccgccccacaccctgcctttgggtttgagtaaacatctgggttgcaagccatttaaaattgcttctttgccagggtgaattctggcaaagcctacacaaatcgcctgtacgatagcactgtataaaagtttatctgtcaccatacctgcaatgatttggctgttgcagccagtgcccacagctcctgtgtccttgtctctagcagggcggtacctgtcagcagccaagggcaaggcttgctggaaagc

SEQ ID NO: 21708 - DNA, 1135 bp, Mus musculus
gaacaattatcactagagtgaatatattataagaaccaaaaattgaaatttgtcattcttaaccaattatttcctaagatactgacaagtgtcatctcgttcattgtttgctacagttctgtgaggtcagtataattaagctctcatggttccagatctgtgggagtcccttttctgggtaagcagcgtggctggccccggggcctacatacctcgatgccagagcacatgggaactgcctcctttgaaaattcacttgcagactggactgtgtcctttttggggtgggcacttacacatggtagcattcacaatggtgtgtgtatgctcaagacagtaaacaagctgtgcctggtgccttcagccagatccagagtctggatcagagctaggaaagggaggacgggaagcatcttgcggccctcagcccctcctctccctgtgcacctggatctacccaaggctcagaaagtcgtgcttgccttttgctctgtgtaacagtgaaagtccttcgaaatgggggaagtgctctgaaaggaccttggtttggaaataaagagctgagatagaacacattgctgtctcagagaggagggaggagagaccccctgatcagataacaagacaaggtagccagtaggggaaggcatagatgtcaagtcagactctggaagcaagccaacataaagatttctcagggtcaagagctctcctcctagagtctgagctccacctcttcctaaagcttctctcttatctaatctagctgccccacactttcaccctgtaaccccactggagtgctggagcgtccctaaccactacttgccagaagttactgagagggcagtactcgccctgtaccgagagcaagaaaagacccttttctatgatagaggaaactgaaaggtgtttttcagttccaatgatatctcagggatcgctcttgaggacttttataggtgtttactcaaccctgacaacagcccaaatagaaaattgctaatgtcttcctgttgcacagacaaggaacttgagacatagacattatctatccaaaacgcacgataatatcccaccttaggggtcacttttttttaattttatttttttttatttttttttatttctttgg

SEQ ID NO: 21709 - DNA, 1225 bp, Mus musculus
gggaggcagaagcaggcagatctctgtgagtttgagaccagcctggactacaaatttagttttaggacagttaggactggtacacagagaaattctgtctcaaaaaacaaaaatcaaaccaaccaaccaaccaaaaaccccaaaccaaaaaaattaagtaggttttacttcatgcaataaaaagaacatagtggtgaaatgactctctggtccctcatgagacagggcatataaactgtgaatagtacaagctggaggcattgagagtgtttggtgtcctgggacccaccctagagggtaagctcttcatggtgttgtgtctatttagattcagtctcactaaatagtccctgcctgtatgagttcttggataaccacccatggcattgctgccctcctggacagcagcccttgccaagggtagacacatgccacacctttcagatggacataggttactgatctcctcctgcctgcttggtaagtgggggctgcttgtgggctgtggcctattctcaagatgccttccttgcctctaggagcagcaacgctgggcaccagggtgtgtgggtgtttgagattggaagtcctgctaccgccaagggcgtggtgtctgcagatgtgaacctggacctggacgacgatggagcagactatgaagatgaagattatgacctagtaacctctcaccttggcctggaggatgtagccactccctccccctcccacagtccaagaaggggataccctgacccacacaatgtacctaggatcctctctcctggctatgaggctacagagagaccccgtggagtccccactgagaggaccagatctttccagctgccagcggagaggttccctcagcatcacccccaggtcattgatgtggatgaagtagaggaaacaggagttggtaagacatccattttacgagttggaacatgtatttgcctgcttggtttctagacaggagttggctagtgtagggtgggtcatgtgccccatgaggtgactttatgggggcggggcatatagcctgagggagcagagactgaatgctttcacaggagagcaatgggtgcttaggccccatgacttctcagtgacccagtgatcttttaggattagagatttggttttggacacggtgggagtatgcctcatttcatgatttctcataatgtattctattttaaagagagtcagggccagggagagatgg

SEQ ID NO: 21710 - DNA, 1102 bp, Mus musculus
gaactgtacacacacacacacacacacacacacacacacactaaataagtaactaaaaattctcaattggccataagttgtccagcttttctttataatcataactgcagaaaggtagtttattttaaagatttgcttacttttactctgggaaccaaacctggatccttgcaagagcagacttctgcttcttccaatgtgtttttgtcataccttggtaactcattcagcaggaaacacacacacatcacttagaaaaagcaaactgagggttggatcctaagttatgtaaagggcaaaaaccaatatctattctatattactttaggtatgtagaaaagtgtgtcttcaaatggatctcttctctgaggagaatgttttctatttgtctatgttccatgaggtttaaaaactctgcctttttatcgacaacttactgcagatattgatgagtgttcagagcagccttcccgctgtgggaaccatgcggtctgcaacaacctcccaggaaccttccgctgcgagtgtgtagagggctaccacttctcagacaggggaacatgtgtgggtaagtgctgcaagaaaatctcctggggaagctagctctatgggaaaggccccgttacaggttttgatcctggtggggaagcagataccagttcctgcggacagagaggggctggttacaaggggcatgagaagacctccttagacagtcgtggctgccaggatcaaagagtgtccttataaaatatacactaccacatgctggcgatacatcatcccacctgctgtcagctttctgtggtgcttgcttcttatacatttgctcggcccattttcagcatacatttaatggcaattgaagctgttaggcttcattctctgtgtcattagcagccatggaattcatggccgagcacctttatgttcttagctgtcttagattgaattctacctgagttacatcagaagggatatcccacttggtagcattccgtttatagtcttaatttaataaaccacaagccaaaacatagcttttaaggcttcctaggctacattgattttattaattcattaggccaattatgttcttgat

SEQ ID NO: 21711 - DNA, 2584 bp, Mus musculus
tcaggaatacatgtacttgcctgtcttatttatgataaagaaacaaacagcagctcaacttggctccttgagcccacaaggaggtaaatggggagcctgctgtaggtaccaagtcagtcagaggtaagactatgatgctgatttccatcttttccaggccacaattactgctcagtgaataatggtggatgtacccacctctgcttgcccactccagggagcaggacctgccgatgtcctgacaacaccctgggagttgactgcattgaacggaaatgatgtcaagaattccttgttccctctccaagtatttcatagtaacactctacttgaagtgacttgatccagactgaaaagtgtcctgcagtggaatgaccaccaggcccagatctagcctagcctgagctctcacaacctctccttaaccttccctagaacaattacctttagctcagtaatgggaaaatctctaccctaacatgagggcaggacacacacacacacacacacaccctttgatctcagtctttagacaagtttataaagttctggataaaaagccaagggtagtggtacatgcctgcaaccctagcacttgggaggcagaggcaggagaatcaggagttcaaggccaattatcttgtctgtatagcagggtttagaaataacccgagttacgtgagtcccttccaaaaaaaaaatcaggataaaaattatgtgtccattctagagccataggacttcttcctaattctagactctcccatggtaagcagagccttagcgacctaaggaggctacttcttggtggcattacaaactcagatattacccagtttctcaacataccacccagatccagcttaggcaaggtcatactttttctcttggttatgctcccatctaactactctcctgttgtataccttcattctgcccaagactgctttcagtgccttctctgccatatgatcaaaacccaaccatattccagggattcatggtatttggtagatggtaaaaagcaacccctcccaaattacaaagtcctggcatttcagcagtggccattgataatcacataggtaagtcaaggaaaagtcctgagagagggatttgaagtcaagatgtttgaagataggagattattatcttgatgtgtcttgaattgtagcaaattcttcttctttgccaaagtacctgtattagtttctggtctatgacgtcatgggaatcttcagcccactcctggtaccagttttcaagtcttctcatggagagtcatctggagctcaggttggggtaggactttgacaaagtagtgtccagtcatagtccctcacctttagaattgtgtctctgtttctccctctctctgtggccctttctgactagatcctcatctgaagacacaatctaggaagatctagttgggcatttctagtagtggttcggatccttatttgatcatcagtatagtttgagggactgttgctgccttccatgtttctgtctgtgatttgtttcaaaaatatccgctggccagatgcatagctactctcctgtctgttttgaggtgtctgtgttattgattccattctagggacaacagtataaacttagtaatcatttgttcttttctttttaaaaaacaaaacaacccttgtcccctctctcttccttctatctactattatctatcacctatctctctacttatctgtcatctatctctatctatctcctgttttccactgcttcctagacactcaaaggattaataattttggattggaagtcaagcatcagaagttcggtttgcatggtgtaaggtgagggcacagacaagactcaggcagaactattacaagtggtggataaggatggagaacagggatggaaaatcccagaagaaacagcagtggagaggcttaaaggcagctaaaactaaaagccttaaacaacttcagagaaaagtggcacatttgccaaaagaatgtttatccttgaagacataaaagaacttggcctgatgtttttcttggggaacagagccccctacctccttttcttctactttcactgtactcagcccccaaccctatctcctacctccacctcgacctgcttacattggactgggaatctaaattgggagggagtctttacttaaataattggaatttaaatcacaaagtttagggaacgtgtgactctttcatgcaccctcataaagtacccctagttttttttgtcatgttcctcatgatatatatcttttataacttttattcatttttactagattccttctaaaatgttttacatggtaaattgttaagctgtggaaaccactgaaggtgcttattaatggttctccagatgtatacaagtattggatgattcctcaagtttacagctgtacaaatattagtgcagaaaaaaaataattaaaatacaactgttaaaaataaaatcttattttgatgtgtttttgctgttttgttccacaacggggtgttgcagtgttgatgcccagacttgacctcagactctcaatcctcctgcctcagcttcttgggaa

SEQ ID NO: 21712 - DNA, 1144 bp, Mus musculus
ttgagctgcctcctttgtgatgggcagagttggaggtgggaaagatcctcatttctttttaactctgtgtttgctctgcaaacctgtcacacaacatagtgttaatagtggtaatgtatgctaccttattacatttccatacctagagaagcactcaaagcatatcatgaaactgttcaatacagacgttttattgataagatcagctcttggttttgatatttggagctgttaactaggagtgagaatgcaaaacaggtgtgtccttatgacagggtagcagtggaggtagagagaactaggtggttctcatttggcctagggtcagtaggagactcctagatgttcaaaagggctggggatctggacactggtgggaagtcaagaataatgtcaaaagaggtggaggagaatggaagagaaaactagccatacatggagcacacaattgaaaatccctggttctgtgtcctgcagtacttggaggaggagtatcgcaagggagctcgagaggatgaccccatgcctcctgtgcaaccctaccactatggctcccactactccaacagcggcaccgtgctccacttcctggtcaggatgccgcctttcactaaaatgtttctagcctatcaaggtaaggatgtcttttgtaactaccccaaagtcatgctgtatcgttagaacaaaaaacctcgactagcttcttaaaaactagccctaaccaagcccaagaaaaggaattctacttaagtagttactaaaatactcctttaaaaaaatggtagtcaaatcttgctcctgtctaagattttagctttagatagtgtctacatttacaaaaatgcagttgagttttaaaaattaatatataattcacaaactataaaatttgccagttaaattatattcagctcatttaatattttgtgtagccctggctgtcctggaactctacctgcctctacaatctgggtgctaggattaaaagttgtgtgccaccatacccagctcaactctcttttaaaggcttgcgacccagtaattatttcaaagcataatggttttgtagcttgtgtaatttttttgtataaagatctgttatgggaaagtattagtctttataatactagttaatagagaacat

SEQ ID NO: 21713 - DNA, 1178 bp, Mus musculus
gaaagacaacacacgtgcctctgtgcgcgcttccccagcctccgtgggcctgagagtaaagccctgccctcattccataatggcgtggaaggctgggtctgcacacactagccaattaaagtcagaatcttgatgctttttcccaaaaggttaggctgaatcaaagatcagggtctctgttctcctccgttttcaaaaagaaagagcagaacttaaattggctaattatttatctaaaatactaaacattatattttaaaagcatgtcccctatactcagcacacccaataaaaggaaacagaaaataggacttttcaggattcagaaagcaagttcttagtaggagcctctgcacccaatatatccggaacctctgaacagaacgtgagctctgctgctgcgtcactctcggccggctttgctgttgtcctctctgcccaaaggagagccaggggcacgagcttcagggactgttgcttccttcacatcctagctcctcataggcttctacttaaagtccataacactaggtatcagcgcccttggctcagtgactttcaaatataatggtaagtcttttagcacctgccgtaacagtccgtctgacagggctctgaactgtctgcactgggaagctccacacagcacctacagtgtaagcagtgtgatggaggcacagcagctaggaaagtgtgaaggaaggaaagcgagtgtgcagacagaggcagagtaagttacgtgttcctactaagctacgctctgagactcctggggcaggcactgtggcatgtgacagcagccccgctctggaactctgggactactgggctcttactcaaggtgctgctttgatggctttgaaaactattgtgtaggctcagaactatatcaccgtgggggagaagcatgtgttgctgcctataattgacttgtgcatttgttatggaaatctaattcatattatgtttacagaactacttttgtaacttccagactttgtaaaacattctgcttatatccacgagatgcaattccagagtctctgctgtggagacaggcacagggagagcattaggtcccattgacacgggccacctgtcactcctaaagtccacttcagaacagagacaacattactcctactcacgttgaagtgactgatttgtttttaaaaatt

SEQ ID NO: 21714 - DNA, 1660 bp, Mus musculus
actttttaaaagttaagtagcccacagcagatgttaactgtgctcagatttagactactgtttctactccatgtttacatcttcacatagtgaatgcagtaaggtgtgaaaacagaaagggcagagaaatcaatagtaatcaaagcctttattattctattaatatacaaccaaatggtcttttcccaacaaaacataacatcatttgtgagggcaaaggttttgtttctggtgtatacattccagtcgttaaactcttacggttggactgttaccatcgcactagtaggcaatctccattttccacagaataaaactgtaatggctgtaggtcattttctagttcaatttctctgcccggcatctaaaattaaaatcaagtagggagcagtaagaccgatctgatggtgcatgctatccatgccaccctccaagggcaggtgaggtgtgaagtcaaaggctgcctccatttagagcctgttatgtatggctcacagtactgtagaggactaagcttagctttgtgtttttgcttagcaacttaccttggaactttcgtaggacaacagaagttctgacacaggaactttgagaagacgtgacaacagtccctttaccttttgaactgtcatggagtctgtcaaagaaaagaaacttttaagtgacaactacatgtagaaacagctcaggagaggcagccattgatggaaggcttgagtcattctaccaggtgatcttttaacaaagtgggaaatggagccagtgtttgacccaagaggtcttgacagtgaggtgccataccatttcagtagcatttactatttcttcctcaatcggaataaccagaaataattatctcaccgaagaggacacaatctaggcctttgtgataacttcctaaggggttgctgaagttccctggagtgggggccttgcggggcccctcccagcacgagcatccagtcaccatcaggatgtgcacacatgaccactaggtgtgggaaaggaactctgaagaacaaatgcgctggtccgtcaagaacacactaggaatttctttccaaagacaggttgtggtatatatggatattttgattaagaatattagtttctctgaagctttagctgaaagtacagcaatagtgtggtgtcccacaattatcacaatgtagtcaattatttttctataaattgtttttataaatgctgtgtttttatgcaacttgtgataataaatattctctattttagaataaactagccttttcctatttttgactcacttcaacagctgtagtaccctgaatgtgcctaaccaaattcactgtgtctggagagaatggattggagcccatactgaatgaggagggaaagggagggggcaaagcaggttgagtgccagcatggctctgcttccctagtatggccgaacatgactactccacactccagcagtgtggttcctgctgtgcttcacctcctcaagccatggacagcataaaccttccttacgctacctgagtattttttcagagcaacaagaaaaaagttaatacacattgttaatttgtcattatatattacataccacagtaagagaaattagatttctagtttaaaaaaaaaaataagagaaattgtgagaaattggctgtaaact

SEQ ID NO: 21715 - DNA, 1317 bp, Mus musculus
cataggtatacaaacatgcacaatattcagacacataagatatttaatttttatttttttaaaaacaaagttgaaactatcaggaatcacataacgtaggtcataaatgtcagacactaagtgtgacagctcttcctacgaccccacgtgctctgggcttgtcaataaaaaagactgatcttccaagaaactatctgctttctaactatatgacatggagggttctcagtccatagatgacaattcaaaacaagtctctttagctaactgactaaaaagaccaaagaactgctgtttttccctaaatgataatgccaagagtacctcagttttgtctctgaagacctgtgtcaaagtctgaaaagacagaaagaatgcacaggcactcttccacccaacttgtttgtttcaatgcttgacaccccacaaattgtcctttttaacaaaagaggctccacttagtgaagttcaattcacaacctggttccattgtttttttctggtttgtttgtgttttttcttgtaacatttttctaccccaaactgattagtatctgtgattaatgtttctttgaaggaagaaaataatagaaaaggtgtttgtggagtacatgagtaatgccagcattccattggtagagtcaggaagatcagaagctcaaggttatactcagctatatataagtttgtgaccagtctgaactacaggggacattgcatcaaaagaaaagaaaaagaaaaaactgatatatattttttttaatttcttgagacaggtttcactcactatgcagttctagctggcctagaactcaagggtccatcagcttggcttctgcctctttgagagctaggatcaaatgtgtgtcctaccatgcctggcaaagactctgtaagtcaatttatttccttgcctaattaaattaattttggcctggtacttaatagtgaattaaggacctttttagagtcattttgtctatccaataatcaaaatctcgttctttatttggtctatggttcccaaatgttaattcagaagagacccaggaagctggagagatggctcagaggttaagaacactggctgctcttccagaggaccctggttcagttcccagcacccacatggcagttcacaactgtctgtaacttcagttccagaagatctaataccatctcacagacatacatgtaagcaaaatacaaatacacattaaaaaaaaattatctgaagagacccagaacatgagtagctgagttcatttaataaaatgactttatttgcttagatttgtgctacaataatgcttttcc

SEQ ID NO: 21716 - DNA, 1149 bp, Mus musculus
tatcagaaataaaaatatataatcactaaagaaaatattgttaaacaggtaaaaataaatatttagttggattaattaaaaacttgaaaaaagtgaatgctttcagtataaacagtcagatattaaatctgatttttctgaaccctcaaaatgtgaggtggctaaatccacttatactatttaatgggctcattcatctttattatgatttttttatctgaaataataatttccttattaaaatcagggttctagagagatggattggcagttaagaatggttgcttccctttcaaaaggaccagaatttagtcctaagcacccacattgggcgattattgtaactccagctccagcggatctgatggcttcttttggcttgcatgggcatcggctatcactcctctacacatgcagatagttagcacatacatacatacatacatacatacatacatacatacatacatacatacataggtgagtaagtaaataaaataaattttaagattaaggaaatcattctgagaccgggaggaggagggtgtgctttccacaggcttttcctgtttaactggtttgattttccttagctacagtgcttaagttactttctaaattagttttaatgacaaactttcatttgaggaaggaaatgagaagactgattacctcactgaaaagatattcattgctagccactttcctatcttactgtaatttgagttacgcatttctcactgaatcttctagaaacacgttttctttagttgccaattaatatctctgccttgttattttgatggtgacttgattattttaaggatacttgcattgtaacttttaaaaaattcttctatgtataacattttaaaattaaatgtatttcagccacagaaaaaaataaactgtaaataaatggtgggctcaatatggtggtacatgcctttaatgctagaggcatgcagatctgtgaattctagaccagccagggctatatactaaggctgtctcagaaaatgtatggtggtattaataagaaaaccttcattgtaatattaggtgtaactttgatctgattattttaagttttgacaggtctgttatattgctacaaagtattcatttaagcagatgaattgtaggatg

SEQ ID NO: 21717 - DNA, 1133 bp, Mus musculus
tagaacacctgccatagacacctggatgaacagggagatatatgccatgggagtagtagactactgtcattttaactctacatttaactcagcgcttaagttgatcaggttgtttttgctgggtattgctagttgatctaggaagcagcaacataaaagatatgaaaaggagagctgcagtttcatctgcacagtcaaaacaggacataaaaagtatggaagacttctttaggttaatctaggccttcaaagaatgtgcatttagtttaatgatagtttagtagcagtttagtgatagccctttgcaaatatcactacgaatcccttttctctacacttggtacactgtgacctttctgggggaaaaatagagaataggtgggtgagtggttgggtgatggtaggtaggtcaatgggtggaaagattcattgtactaatatcttcttgtgggaggtagggcattgtagaatgcttatctggctggataagtcatgttgccccccacccctcttattttttagcttctgaaagttcggctgaagacagtgagcaggaagatgagagatgtactcaggacgtagataacattggcaaagacgaatcaaaggtggaacattcaacccacagcagaaatgaactgatttcaaaagaggaacagagtagtccatctttgctagaagaaaacaaagtccatacagatttggtaatagccaaaacagtgtcaaaatctccagaaagattaagaaaagatatggaagcaatatcggaagatactgattttgaagaggaagatgaaatcacaaagaagagaaaggatgttaaaaaggacacaacagacaaggctttaaagccacaaacaaaacgtgggaaaagacggtattgcagtgcagatgaatgtttgcagactggatcccctggcaagaaggaagacagaaccaagagtaaagagccgctctgcacagaaaacagtagtaacagctcctcagatgaagatgaagaagaaaagtccaaagcaaagatgacaccaaccaagaaatataatggcttagaagaaaagagaaaatctctgcggacaactagtttctattcaggattttcagaagtagcagaaaaaaggataaagcttttaaat

SEQ ID NO: 21718 - DNA, 1140 bp, Mus musculus
taagtgcactttttttatgaagaaaaagtacaacgaactgcttttcctcaagcaataattgtttccaacttgtctgggaattgcgtgtgtctggtaacttgaaggccttccactgtggcagaggaggcttttcactgcctgtagagacgacacagtaggcagagaaaaggtgggccagaacatgtgagaagacttactgtatatgtattcccttgtattttgttaaagctggaacatttgatatttttccattcatttattaaaaatatgaacctattttcatttgtacaagctaattgttttttaaagcaagtcactttagggtgactttaattgtataagtcaagcacatgtaacaaattcaagacttgcagttagttaacaggatattattagacatcatcctggtaaccaaatattaaagattctctttaaaaatgactgaacatgtttacaggtttgaattaggctaaaaggtctgtggtggcttttcacaccccttcaaattgaaatgggactactgtactttgccatttttctataaatcagtatttttttttaattttgatataatacattgtgtgaaaaaagaaaatggctaataaactgtattaaatcttaaacaatgtataaagattgtacttagccagttcaaagtgtatatttattcataatgaattataacagttatatttttgtgttttcttgtaaatgtttcttttcccttaaatacagataattcatttgtattgcttattttattatgagcttacaacaaaaagacttcaggaacaaactgttagaatggttcaaggttgtttatatgacctgcctcacaaagatggttattattttaagtataagtagctagttgggtagtaggcctatacaattcaatgccttgtataaactgcagaatgaacgccaagctgttttcacttgtattgactttatgttgtatgattccaatctctgtttggcacttgtatttaattccccacctttgtaatacatttgtatattgcggatgtgttcattgaggctatttaaaacctggcgctgttaatacacagtacttcactgtacagaccgttttactgttttaattgtgattctgtgtgctttttttgaatgaggctg

SEQ ID NO: 21719 - DNA, 1099 bp, Mus musculus
cttaacttaaggttaaatataaatagtggtaatataactaaggtcagagctgcatctccctcattaatgagagaagagccttcactgtaagtccttagagcaaacaagtacttggggcatttaaacccatttcctttgtggaagtatgatgcatgattttaattggattttccctaggcatcgtaggataaaagacacttaggataatagactgtttgtgaatgtccttatcattatgaagaagtaggcagttctatggtttaaatgtaattgaaaagattttgatcaacattacataaaatttagaaatagctttattttagaatatttgttgacatgctgtactgtttctctacttactgtcacaatacatccgtagcttactaaggagacagtaacattttaagacatgggaaggtgacaccttggtctagagttactcgtgtatttattgtatatctgtggtgtgggtatgagcacgtgtgtttattgggtaccagtgatgtatcacttgaacccagagcttgcctgttgactaactagtctagctagtttgctctggaaatcctgtgtctaccttctgagtgctgggactaaaagctgccccacatttgtgtgggtgttctgtgtccatcctccaggtctcacatttgcactacaggtgctttagctgctgagccttaccccctgcagtgcccttctatttaagacgtgtgttgaggaactagagagatggctcattggttgagaccagttgttgctcttgcagagaatttgggattagttccaaatacccacacggtagctcataatcatctacagctccaatttcagaggagctgaaaccctcttaacctttgcgggcattaggtaagcacatatggacaacatacaagcagataaaacacaaaatattaaaaaaattactaaaggtcttgagtattattaataatctctctagattcgccttgatgtatttgagtccagcacagtattaatcataaggctttgtttggttttttttcgggtttttttttttgttgttggttttttttgttttttgtttttaattatctgactgcaaagaaattagaacagt

SEQ ID NO: 21720 - DNA, 1275 bp, Mus musculus
gaggccgttcttccaccactgattaagactggggtggcaggtgttaggggtaatattcatttagccttctgagctttctgggcagacttggtgactttgccagctccaacaaccttcttgtccacagctttgatgacacccacagcaactgtctgcctcatgtcacgaacagcaaaatgaccaagtagaggatagtcagagaagctctcagcacacgtgggcttgccagggaccatatcaacaatggcagatcaccagacttcaggaatttggggccatcttccagcttcttaccagaacgacgatcgatcttttctttaagctcagcaaacttgcatgctatgtaggcagtgtgacaatccagaacaggagcatagccagcactgatttggcctggatggttcaggataatcacctgagcagtgaagccagctgcttccattggtgggttgtttttgctgtcaccagcaacattgcctcgtctaacatctttgaccgacacgttctttacattgaagcccacattgtccccaggaagagcttcactcaaagcttcacctgcaaagatggcagtgccagtggcaccacgctgctggaagctttggattgtatcctaccactaactcgtccaactgacaagcctctgcgactgcccctccaggatatctataaaattggaggcattggcactgtccctgtgggccgagtggagactggtgttctcaaacctggcatggtggttacctttgcttcagtcaatgtaacaactgaagtcaagtctgttgatatgcacttccatgatttctaattgtgtcttcttgaaataccatttttcatctgttcatcctacagtaacatcttttctttatagtgaggggttgtggtaaatatttaacatcaatttggagtttctacctctctttagatcattaagttcccagataaaagactcacaggctttatatttagagtaagccttcagagcactacagctgggcaaatatctatcctctatgcgattatgtctacttccccgccactaaccctaaaatatgacttgctgtgttctgcctgggctgctcttacactcactggccagccctcgtggccagttctcacgatcccatactccatagcatcttctgtccccaacttctctttcctcctgtggtcctgtctcagaccccaagcccagaaaccaaattcccatctacctctcttctgcccagctacaggtcgaaggcatctttattcaaccaatagtcttaaattaag

SEQ ID NO: 21721 - DNA, 1648 bp, Mus musculus
ccagtgagtgtaagagcagcccaggcagaacacagcaagtcatattttagggttagtggcggggaagtagacataatcgcatagaggatagatatttgcccagctgtagtgctctgaaggcttactctaaatataaagcctgtgagtcttttatctgggaacttaatgatctaaagagaggtagaaactccaaattgatgttaaatatttaccacaacccctcactataaagaaaagatgttactgtaggatgaacagatgaaaaatggtatttcaagaagacacaattagaaatcatggaagtgcatatcaacagacttgacttcagttgttacattgactgaagcaaaggtaaccaccatgccaggtttgagaacaccagtctccactcggcccacagggacagtgccaatgcctccaattttatagatatcctggaggggcagtcgcagaggcttgtcagttggacgagttagtggtaggatacaatccaaagcttccagcagcgtggtgccactggcactgccatctttgcaggtgaagctttgagtgaagctcttcctggggacaatgtgggcttcaatgtaaagaacgtgtcggtcaaagatgttagacgaggcaatgttgctggtgacagcaaaaacaacccaccaatggaagcagctggcttcactgctcaggtgattatcctgaaccatccaggccaaatcagtgctggctatgctcctgttctggattgtcacactgcctacatagcatgcaagtttgctgagcttaaagaaaagatcgatcgtcgttctggtaagaagctggaagatggccccaaattcctgaagtctggtgatctgccattgttgatatggtccctggcaagcccacgtgtgctgagagcttctctgactatcctctacttggtcattttgctgttcgtgacatgaggcagacagttgctgtgggtgtcatcaaagctgtggacaagaaggttgttggagctggcaaagtcaccaagtctgcccagaaagctcagaaggctaaatgaatattacccctaacacctgccaccccagtcttaatcagtggtggaagaacggcctcagaactgtttgtctcaattggccatttaagtttaatagtaaaagactggttaatgataacaatgcatcataaaaccttcagaaggaaagaatgttttgtggaccttttttttttttttttttttttttgtgtgtgtgtgtgtgtgtgtgtgtgtgtggcagttttaagttattagttttcaaaatcagtactttttaatggaaacaacttgaccaaaaatctgtcacagaattttgagaccattaaaacacgttcaatgagaaaaaaaaaaaagaaagaaatcatggaagtgacactgttctattacaaagtagatttcaaaacaaaattaattagaagagataacagtcatttcagtcaattaagatcattaagtattaaattctaaacctgtatgccaaatttcacaaaatgaatattacctacaaaatagtttccactgactatttatactctatttatattctaaacactctaatgtacagaagtaccacagcacaataatggatgaatttaatatgcaatgttaatcagcaatggacagatctttctg

SEQ ID NO: 21722 - DNA, 1143 bp, Mus musculus
gctcctccgagtggcggaaattagagggacggggcgggggtgggggcgcgcgagggaagaaggagccgggaaggagagcagagtctgaccacatctgtgaaaacttggggaaggagggcggggaggaggaggagcgcaggagcgcgcggaggggagcgcgaagggcgcgcgcggcggagctcaacttttgcaaccggggcgctcggcctggacgggcccttagtcgttgaaaagtcgacttgacggtcggggggctcctttctttctctttctcctcccacccgcggttgaaccaaatcagaactgtcactcagggccggtgactcagagggatcagattacaggatccctgaaactgatgcgcgggctgcagcggcgggagggagcggaccgggccgcaccgccggcgcccgcacactcgtccgcccgcccgccgctcccctcctcgcccgctcgccccgtcgccggcccacgccacaccatgcccgccggggccgcacgctgggatcagtcaggccatccacggtagcccgagtccgcctgccgctccgccggcgcaggtctgtggatttgggacctgacagccaaagccgcaggtacgtcccgcctgaagttctttgttttgcgggccccgcagccctccctgtcgagcttcccggcggcgtcggagcggcttgtgtgcgctcgcgccttcccgcgctctcggggatcgggtctcggctctccggactgcagagctcctgccccagggcgcgcggaccaagtttgcagcggcggcgtccgtgcctacttctcgccaagtgctgcgcagagctccgggagtccggagctgcggctggtcctcgcgcccccgcaagccgcagcttggcttgcgcgcagcgcctggggatgcgccgagccgccgctgccccgctctccagggtcccgccttcacttctgagggtgggggtgcggggtgagcggatggagggcgcgcctccgcggtgggagaggaaaagtgaaagttgtgccatctgtgcgtgatttggaactctgtctcttcctttccagaggtagagcagaaagaaagaaaagagaaagaaagaaaagtagccgtggcccttgcggtaaccaagaggccgaatttgcacagagcagagttgg

SEQ ID NO: 21723 - DNA, 1099 bp, Mus musculus
agctctgtgccagctgttccacattttccagctgccacttcagtttgaaatgatggactgtcgtcctcaagtaaaagaactctttagtccgaggtatggagggccggccgctgtgcaaatacaggggcagtgccattagccccgctggtattattagttccaaaaacacctcgtgcccttcttttcctctccttctcctcctcaattacagcttttcacagcccagtacgtgcactctgctgaacattcaagtgattaaccccccactcccctttctaaatgattttgtgcagaacttggatgaggccggcaggctggttagctagcttgcttctcttttctttctttctttctttctttctttctttctttctttctttctttcttccttccttccttccttccttcctttctttctttctttctttctttctttctttcttttcctgaaatatgtgtctggtggaaataacttctagaaaaagagttgcagcttgagagcattgggcatggctgggggaaggggaactgtgctctgccatctgaaataatctcattttagtctattttaggggaaacctttccttcgttctcatgtcacaagcttgcactgtttgatgtcttcacgagttatagactgaattcttcaagaactggcctaaagtattaattttgagtatttatgtaattgctctgtaatttgaataggtgccttattgattgattcctgtaattatttcatttgggttttaaattaaaaattaataatagtctgacagtttcttaattacacgtgtcaagattattttgaagcaggaaaatgctgttttaaaatagtgaaataacctcagaatcacttcatttttctaaggcagcgcaatagaggatatattaaagcagtggagattggttttaacaatgtaaactgtgcagagtatctacagaatttgtttatgttaggaaatattggctttaacaatctggtccacgagctctgtggccagttagattatagtcagaccttaaaacaaacatgaaataacatttaaattagctgaaattgcatatttatacagagcagagagtttattttacacta

SEQ ID NO: 21724 - DNA, 1149 bp, Mus musculus
acctcaacaatttgtaaggagtccacctaagaaatgtcttagagatggaaagctgatatttttttaatcagggcagcagggctgctaaagtcaaaatgtcgccagcatttttccatcactccacaattagcatccccccaaattaaatttaaagttgcattcatcagcaatccttggctttgagacccagggctcgcattgtcagatgcagatgaaaacagctgcccttgtccatgtgaggcctcagaatacagacgagtgtgctgtgagtgaggccttgcatccttgagtgtatatgactccgttcatctggaatacatcccggggagctttgggctgtcgagttttattttagtaagtttcattttgggaaccagaaagggggttgaaagttattgcacttaatgttgttgtgacttcacttgctcctattcagtttgttcagatgtcagtgccagaacctttgtcaaaatggattcctcgggaggggcctagtaggtttcagatatttaggagatctctgtacctaaccatcatccttaagactgtgtgtgtgtgtgtgtgtgtgtgtgtgtgtgtgtgtgtgtgtgtgggtgtgtgtgtgtgtgtgtgcgtgagcgtgtgcgtgtgcgtgtaatgactttcttgctgggatgtttaaattgtgttttagtagtttcatattttttaatgggcaagggactctgcttaaaagtagataggtgcccctcaacattcctacccatagtgcacatccaacccttgagctgaggttcagaaggaagttaacattgccttaagactggtgacatcgtttttggtcagaaattacagcctcaggtcctaaatgcaaagaaccaactcaggattgcaggaagggtaatttgggagcgttcagagatttgagttcagcatttgagaaaagaaagtgcaggccctgtggtggcccacagctttagatcatctaggtcagtcagctacttggagaagacactgagtgtggtttctttgtcatttgaaaggtttcttcctcgagtgttctttttctgtacatagaagtccaagcacatggacacatgggttgacagttcccgtatttaataaatgataaacaaataaatattctacatacctgaggggccacacatc

SEQ ID NO: 21725 - DNA, 1177 bp, Mus musculus
agcccagccattctaagttcgttgttttactttttaaattttttgagattgtaatgtagttatagtgtttctccctttcctctctccaaaacctccctgtgcctctcctgctctctgataaatgcatggtctctgtgttcattaactgttactgcatgcacatagggtaggaagctcaagaaccccaaagacaaacctatgtgagttcatttctcaccattgtcaatcaggctgcataaatcctgaaactagaaggcaaactgttcattgcaatggtggtagtcatgagtaaattagcctgctgagctgggccaagtgtgccgatgtggaaggagacagtggggaagtgtagagacatgggttaacactaggacttacttcatgtttacttgatctgtgaacctcagtgttttttgaggcagggtttcactgtgtagccctggtactcactttgtagaccaggttggtctcgaactcacagagatatgcctgaccctgaccctgaccctgaccctgaccctgaccctgaccctgaccctgcccaagtgctgggattaacagcatgaggtgctaccacctggccttatctataatttttaaacacttgatttagcggctgaactccttatctctagtgtagattgacagtgccctcatgctttgttcaaaatgattatctttttgtttgaccaaccgtatggtatctatgcaccagaacatgctttcaagtaggagaaataaagtttgatatttatctaaacatctatttccatgatctgtttttgagaattggggctatccgattgacatatacatttataattagtgtgatggtttcagccataactgccccattttagaatggatctcttaccacacattgacttgctctgtagccaagagtgacctctatctcctagaatactgagatttcacacacacatcacatctatgcttgctttatgcagctttgggcatagaatccagtgctgtctgtatgttaggtatgcactccaccagctgagctaaatccccaacccctggctataatcacttaatccttgtcatttaggttttttccctcaacatttttcactattagaactaattaacatctttgtctaaaatgtttgttcctaatgtttattgttcccttctgctataatctttaaagcaa

SEQ ID NO: 21726 - DNA, 1190 bp, Mus musculus
cagctctgctctaccgtgcagaattattccggtcagttctatgaccaaaccatgggcttcagtcagcaagacaggaaagctggctcgttctccctctcagatgccaactgcctgctccaagggaatggcactgaaaactctgagttactctccccaggtgctaaccaggtaacaagcacagttgacagctttgagagtcatgacctagaaggtgtgcagattgattttgatgccatcatagatgatggggaccataccagcctaatgtcaggggccttgagcccaagtattattcagaacctttcccacagctcctcccgtctcaccactccgcgggcatccctcccattcccatccctatccatgggcaccaccaacatggctatcggggatatgagttctttgctgacctcccttgcagaagaaagcaagttccttgcagttatgcagtaggcggtaggcaaggaggaccacaaacacaaagactgaaatgacttgggatttttttttcttttttaagttctgtgtgtattttagcaatctcatctcacctgattgggatgtgtctcaagtatattccttttatggaaaaggactctgaaaaaccctaaggtattctaggggaggaactgtcttccatttcagtttgaatcagtattgtgacattcaaatcacccttgtttttttgttttttgtatttttttaaacctgtaagcctgccctcttttgagtgaaccaatgtaaatgtatactgcgcatgttctttcttttagaagagaagtcatcaagttaaaagatttggcctgcttctctgctaacccaggaactaggaattggtgggcttgtgaccaaggggtaacaggtccacctttttaaagtttttctttacagtactcagtgacttgcttttatgtgtgtatgtgtattttttattcccacactgagtacaagaattgaatgaatagtgagcttgaagattatttgtgggtgcactatagttagtataaatagcaggttttcacgtgtcctccaccttgattcaattcagggcatacttttaacagcttcacaaaagtggaaatgtggggatcctggaaatgaagtagtttgatgagggtttttatagggggtaattcttatgtaagtacgcatcccgtgggtatgtctatatggtcagctctccattatct

SEQ ID NO: 21727 - DNA, 1422 bp, Mus musculus
ttacttggaggactgttttttggacttgctataattattcattagtcccacctctttcctcattgtcataggtaactgagaattgaattgactatacatagctctaagtaggtatttaagcagcccacaactggatacatcactaccgtttattaaattcactacagcaagagaatatgtcctttctaagtgccctattataaaggaaagatgtgtaaaacctagttataaaaggcaaaactcacatacattgacatcagaaataaattactttaaccagttttagcactggagagcatgaaagttgatgtttagtagccatgtgaatttcagataccattagtccttaccattggactagggcttttgttttgtattcagattttaaagatttacacagtgcagctgctcttcacatgtagatcagatatgagagtcatactgtgtgtacacagagttcagggattatcttagcatactactttaaaaccgtaaacaattaaagtgtttacccatcagccccaacatggaatttccccaaggctgttattgaccgggttgtgtgacttctcctcttaaatcctgcctgtaaatttaggagtaggaaggcgaaacccagtaggtgttaggtaataggaaggatgctatgaccagccaatttcacttaggcctgttttctctcttttggagcccaaacttcaccagggaagaaactttgccatgtaggatgacgttgtggctaagctagctttctgatagatgtccccaggaccagtcaaaccatctgtaagttcaccgtgccctgcagccttctcccagaggttccttataaatcaaaggacagcccacaagaaaggggaattactggtctgagttcaggagagtaaataaagcaaggcttctttttgcctcaaacaggtcacagtgtcatcacaaaatgggtgatggaatccctgaatttcatttatcaaaagtcttttttgttttttaatctctggtttgggtctgacctggcatgccttattatttggccaaatctctttattacttttgatttcaaagaaggggttcaggaattcttccttcctcagcaagaagaatgagcttggtttctggtcacacccattgcctcctgcagcagagacctctctaggtggaggccttgcatgtgaccttgatgttctcaagtgcagtgattttccatgttagcggtccctcctaggaatgcagtgcacagagccagcacccctgccttcttaccttctgcttttgactttttcattgttttcttttttcattgtttttttttttcatccttatttttcaagctattgcctttagatttttggagttgatgtttccactcactatctgacctttcttgatatgaagatttcaggatacagatttaaaaaaaaaaaa

SEQ ID NO: 21728 - DNA, 1213 bp, Mus musculus
agtccttggctcttgtatttaggagaaacagctttggctctctcatgtcacacacagctgctttttaatgaaagtacaggctcatacatggtactcttgtttaatgtctgtgttaaatggtttggtgtttgtttgtttttttccataatttttctaaagaattaaagaactcacttccctgctcctcacgtgttggcttgtcctgagccacgggttttgattcttgcaatgtatgtgccttattttatgtttctcttgtcgatgagaaggaccagttgttgttgttgtccagtcagcactcagaggctgcatgcccagacagtgtcaccaggaagtgaacacaggactgtggcagtctgcggtgttgggtgacccgatttcctgtgttgtttgaagctaataggagggtgttctcctctgacaagttacgcttgtatatcctgcagatgtgtaaaataaactgtgttccttttcgccaccattttttagattttttaaagaagaaaatgtgtaatcctttttaaagaacaacacaatgtaaatacattcaagtattgtagacgtagagttgggatgtgatggcctcgggccttccttggaaaagcctgtggctgctcagtgctcctaagccatgagaatggcagcccagaaacatgaactctgccttggctttcagaaccacttagtccttttataacaaagaaaaaaataaataaataataaaaatgtttcttacagtgtcaataaaaaaaactttgtactgaaatattctactggatttcttttatttaattcctgtttttaagaaaaggacacgttctcaagaaaactccccaggctatagttgactccccagtgagtccatgggaaggagacttctgatggtaatgtggagggcactattgcaaaccagtgtgaacagcaaaggagacaacatttctgaatgtagatagtcactggaagctgtgttaaagtaagcctccatgggctggtgagatggctcattggttaatggcactggctgttccagagagttgagctttgattctcagcacccacatggtagcacataaaggcatgcaactctagctccagggttatattagacttatgttagaggtctctagagagacagagatcatagagatcgtgtgtgtgtttgtgtgtgtgtatgatttattaaactggcttacaagctgtggtctagctaatc

SEQ ID NO: 21729 - DNA, 1177 bp, Mus musculus
atagttctacatccatttttttgtatttttgttaagatattgaaacttaaaatcactggaagtcacttaatatgatttatacttctttattcacaaaaggccagaataaactatatatatgcagttcagtgctctgcccaaatttctctatatttggagcattgtaggcttactttctcttgaagcaaaagaaggtggtatgttgattttcattgtgataaaatgccaaaggaaaaccaaggagggactttggttcatagtttctaaagttccagtggaagttcagctggatctattagttggtcttgaggtgaatcaaaatatgtctgcggatatggcaaaagctgttcacctttggcaaccaagctgcagaaagacaggaggaggccagggataagaggagcctttctagagcaactttgcctgtctctacctcccagtgataacatcatgtgacccattaaggtattagtccacttaggaagtaaataccctgacaatctcatcacttccctgtgaccagacaagccttcaacacatgacccatttgggcagacacttcatatccataccacaacaaatgactaatagtaatctcaaatgacttccatgacaacgaaataaatatatatttgactccatcaaaccaaagaagacaaatgataatgcaagtttactgtgtctgagacagtaaggcctaattatcttgactcatagacacatttttttaatattttttattagatattttctttatatacatttcaaatgctatcccgaaagttccctataccctccccccagccctgctcccctacaagaagctcactccagcttcttggccctggtgttcccctgtactgaggcatataaagtttgcaagagcaaggggcctctcttcccagtgatggccgactaggccatcttctgctacatatgcagctagagacacgagctgtgggggtactggttagttcatattgttgtatggacacatttctaatctgaggaagagttctatgaactttagcttactttgcctggctggagtacaaggaaagggatgctatgtatatatacctgtattaatagagctaaaacttggaggagtattcctgagttatttaaagtcaagtcttgaacagtacagtatgtttaaaaaaattgtcgacattct

SEQ ID NO: 21730 - DNA, 1123 bp, Mus musculus
tttacaactcggaaattctgatgcactgtaactacataacttttatcatgtgtgtgtgttgcttggctttctgtggacatgttcactggaaggtgcagcgctctgagagatttttgtcgactatttgtcttctagtatttgtcttctgttagatggacatgggtatcagaatctgccaattccccatttgtactttattccagtttaatttttgccgtgaactgtacaaaggagcacccgtcagatggatgtgttggcttgctttctcaggtgaggatagtggtgttagcctatccacctgtttgattggagctgtttagaatgtcccatgggtctcagtttttctagtctttttttttttctttagtgatagctttagtaattattacaggtaacctttcattattactttagctcaagttatggaaataacattcctgctttcatcagttgttttggtggtatgtaaatagctcctttctggacaattcttgccctagaagggctttgttcggatagaactgctactatgctgggttggagcattacaaaaagaactgaaccaaaataactacaaagcagtagtcctggtgggccgtatctgtagcctgatctctagcaatagaagagattcttgcataatttttagctaaattttctggtgttcgcaaccccaaacatgctgacctgatagagaatttggttgaggtgagatagcaaactcaagcgtgaagtttgcagaatgaacgtggagtgagtgtgtttggccacattgctaccttacacattaagctactagccctatacaaagtcaatattaagggaagtgaagggggaaagttggaatgccagaataaattggctatttcttgatattcacaagaaaactgtctccttttgaaggtggcctggctagaagcagaagtcttttctgactgttacctacactccaagtggaaattttccatttttaaaaagctagattatctagcatcactcagtgaaataaaatgaaggaaaaagaaaacccttgctaagaatctactccctgtactcaggaagtggaggcaggagaataaaagtctaaggttgtactcagatacatcatgaattcaagggcagc

SEQ ID NO: 21731 - DNA, 1101 bp, Mus musculus
gatggtgcacctttagtcccagcatttgggaggcagagatagacagatctgagttcaaggccagcctggtctacagttctagtttctggacagccaggtctacacaaaaaaaatggaacctataaacagacaaaaaatactgcataggatactatataaaaatttaaatatatccactttcattctactttaaccacatacttgctccccattcattttgtagtaaaattcatgagttttagaaacaattttttaaaaagatgtttcagttcttacatacctttagccatttccagaacaattctgcagctatatttgggtggaatcttaaataagtttctttaagatcaagaatgggttttgctattcatataaccaacattttgtagcaagtttgttacacaaggaagaaaaatggcaagggggaggaaagagtggtatttactgccagataggactgtaagacaaatagaagtcagagagtcagaactgttagcattatagaaaacttgctgagttaccagaaacatgcaaaagaccaagcaaccatgaatgggtgagatctctactagcagtttgctttcccagggttggtaaggtagctcagtacacaaacacacttgtcatgaagcttgatttgagatctctctatggaagcacaggagggagagtgccaactcctacatggtgtccctctgacccccacttgtacacacaaattaacttaaactcagcataatttactgttactatggaaaaagactgaaataattacccatttcagtagggcaaaacattaagacactaaagaaaaaaaaagaatgcattttgaccgagcaattcctgtggactattcctgtactgaatcattcattcatttataaagtgaaaaaatacaaatgtgtctcagttacaattcctgttgctgtgatagtaatctgacaaaagcaatttcagaaaagattcatttgggcttagaatttagggtgcagtccatcatggccgggaagtcaggaagcagggactcaaaatagctggtcacatttcatctatgggaagaagaaagcaatgtatccttgtgtccagtaactacccctttta

SEQ ID NO: 21732 - DNA, 1811 bp, Mus musculus
ccttccacagggccagagagtactcatcccttgccagcaaagatgcacaactataactatggtggtaacttacaggaaaatccaggtggccctagcctcatgcatggacagacctggacttctcctgcccaaggacctggatattcacaaggatacaggggacacattagcacatcagctggcagaggtcgaggcagagggttaccatactgagtatctgtttttcctcaggcacatcatttttatctggaaagacttttctagctgcaatttcaggcagcaatccaagagacttgaataatattaattcaacaacagctttatttttatgtggaaagggtcttgcatacaatagtgaaaaaaacaaaacaacaaaaaaaatctttgcttaaattcatgctgttcttaaaactagctctattgattgtacatcgtcacagattttagttaacaattttattttgtattcttgcagttttaagtggatgctaacattagggacataatgtttttatggccctgtggcagatcttctgaactatgcacacttgtgcttttttttgtaagtttggaccaacttttatgtaaacaagctccccttccccccatgccccccatcccccttccagttttacaacaatcagaaagggcactgatttatttggtattttctttttacaaagctacctttagtcgaaggtcactgtcagtctttgcacctgctttcagtgttattgtgaaaggtgtactttgtgctcatttcagaaaaataaaacacaacctttctcttgatgcaacagttttatataaaaaatggtcaacattatttttgttttgtttttttcaggttaccataatacaggaaaattcattcaaatgaaatagtggtttttatatgaaaactatgggtagggtggggaggggttgagtaagtgccttaacaggtaagcttaaggtctgcggatgaaatgagccttcacaccactgtctttctaagggagtctgtactgtgctgacggggcagggagcttctccgctctcaggagttgcttggtcagttctgttagctccattccctctgcctgcctgtcacactgtccctttctgcctgtcttttggctgtgttgacttccactgttaccttctcttggtaggggtgtaagaggaaaagaaagggagaactcagaaccttatgttacttctgggaagtactaaaacttttttttatcaattaagtggttgaaagtagtagctgaatgagaattttagagtgctcctttctttctggctgtcatactgacccagtttctatttggagggcaggagttttgaagcaagtatgtataacaattcataaataaatacatatggtacataacaaatgtattgaagtccacagaaggagggtggcaaacaccttattttaagttatataattttaagaaaatgtcaacttaagtagaaacatgtcctagatctaatttagtaaagcaaacagaaaactcaaagagaaaaccttccctcttcctttcaattctgtgaaatttactataatttctgccagattagagcagtgctattctattagaatcaaccaagaaagaataactctgatgttgtcaagtcgcactatgtttacgttcacacacacacacacacacacacaaaaaaccaaaattctatttctgaaaaggaaccaaaggtaaatagccagcatcaccttcatcattcgtagataagagactctggggaaccgccctcgcgtgccgactgacaatttcaattgttgtagtacctttcccattggatac

SEQ ID NO: 21733 - DNA, 1113 bp, Mus musculus
caacagtttgtgccagaaaatataaccaagtgaggggagggggagtggggaggaatggaagacttctcctttctgagataacagtgatggcctgttgctgccctaattgttacatttcttagggaagttggttttttatttatttatttttggtttgtttatttgtttgttttaaatccaggtttatctttgggcattcacaggccagagaaaggaggaatattttaaagaaaattgtcatctggtattttactcactgacagcaacttcagaaacactaatattaccattttgaaattaagtaaaattgtttcatttcagagatttaaattagcactctacaaagtttaatttggttactgactaaatgttaaattatttttcatcagacgatctgccaaatcccgaagcagaagcccatattcatctaggcactcaagatctcggagcaggcacagattgtctagatcaagaagtcgtcattcaagcatttctcctagcacactaactctgaagagtagcttggcagctgaattgaacaagaataaaaaggcacgagctgcagaggcagcaagagctgcagaggcagcaaaagctgcagaagctgctaaggctgctgaagcagctgccaaagctgccaaagcctcaaatgcttctacacctaccaaggggaacacagaaactggtgccagtgtctcacagacaaaccatgtgaaggaagtcaaaaaacttaaaactgagcatgcaccttctccttcaagtggtgggaccgtcaaaagcgacaaagcaaaaacaaagccaccgcttcaagtaacaaaggtagacaataatttgacagtagagaaagccaccaagaaaacagttgttgggaaggagagtaaacctgctgctacaaaggaagaaccagtttccactaaagagaaaagcaagccactcacaccaagcacaggagccaaggagaaggagcagcatgtggctttagtgacctctacgttaccgccattacctttgcctcccatgctgcctgaagataaagatgctgataggtaagtccagacaaatttgaaattagtaactcttcaaagaaaaagtctgcttattttgctgtttttt

SEQ ID NO: 21734 - DNA, 1192 bp, Mus musculus
tttttttttttttttttttttttcgagacagggcttctctgtgtagccctggctgtcctggaactcactctgtagaccaggctggcctcaaactcagaactccacctgcctcagcctcctaaatgctgggattaaaggcgtgtgccaccactctgagggtagtcctgcctcagcctctggaaccaccagcattaaaggagtcagctactttaatataactgttttctcctacccattctagcccatggtttattagggaagttttttaactatgtagttaaatacttttgtctcttttgtaaggttgattataaacattgtgatacattgtgattcaatgcctttaatgatctaaccccattctatctctactcttatttttcaaacacttttctttttctttttcttttaagatttatttattattacacataagtacactatagctgtgcttagacacaccagaagagggcttcagatctcattttagatggttgtgacatgtggttgctgggatttgaactcaggacctccagaaaagcagtcagtactcttaccggctgagccatctcaccagtcccacttttattttctgtatctccctgataactgttcttcaagcttgaagaaacactgacaacctttttttccatatttgctgtttaccttgcattcacaaacttagtctcagctcttaacatcttgattgttcactcctctgcatgctcattttttcctctgtgctccttactgcacttttgttttatttttgctgtagatctgttaaaagtaccctgattctaccttagttaattggctgactgcatttgtttgtccttactagctggtaaactaaaggacgaatttacaaaatgtatttggtagtagtggtttaattccttaagatctcctcccctctttctctttcacagagtaaagaaaaccaatttgtacaggtaccatcatgaaacttgctagccattttggttcacatattctctaggattgtggaagtaattgtgatttatagggagagactttagtgggtaaaaatgtactgtacatttttgaatttggtttgaaagagctgattctggaaaattatcctttgaccttcattcacatgcccacagcctgagtgctccacacttaaacacacagacaataaaaactgttatttagaatcccccag

SEQ ID NO: 21735 - DNA, 1806 bp, Mus musculus
tatttcataattgcctacatttatcacagtcctgaatgtagcgtgtaagcttggtttttttttggggggggggcagtctttctcaaactgttaatcaagaggtaagatgggggcggggaagaaatgaccatttcctctggtgtttattataaagcttaaattttatattattttaaaatgtcttggtcttctactgccttgaaaaatgacaattgtgaacacgatagttaactgtactactttttaagctgttgttatgcaaatcttgaagaagttactggcatggttgttgcatatagtaaaactgagagtaattcacctgtgaatctgcatattaattacctgatgattaacttagaaaagagatgggaacttattatacatggacatttttgaatatgccttaatttagaaactgaaaaataatccagtgacatcattctgggtgtgttctcactagctcgcggggccacttgctgcccatgtgacgaataacagaagatcttatcttgccaggccgtggagagctacaagaaagattcctgagaaatgtccaactgctaggagtctgaccaaattacagatgtgtgccatactctggttcttagagttccagagctccttcattggttttaataaactctaaggtagttaaagatgaagggccagcatatatttatatgataagtttagattatgagcgtgagtaccaattaagtttgaatgaatgccccttttatgtagagtgctggtccccagtcattgctgtctgcaagtgatgcgcatttaagtgtttaatctcctgggagcagggcacagggaagactatgaggagagctaatgtggtctgtacaaggacactggaggaagtatgtttgctacctgtaagttctaaatgtgtactcctgaggttacagtttgggtgttaggagaagtctttgtagtctctttatgttcataatgaatactgtatcaatatttcctaacatgaagcagtcaaacatgtatggcacatactgaccagacgtcagtctgtgatgtttccgctgcaagaattcaagcatgctgttaggaatgtaatttcaatgggaagtaaaccactattaggttttttttcttttcctctgtggggctaagacacttgattaaacagtttttcttgttgcacagtcctaatttcataaggtcaaggagacactcaggcattccaggaaacaaatgtgtacatgatgttaccagaaacaggcattcaggaactctactgtctagatactacattcagcttaccataaatatttgtccttgaagggtttgatttaatattttcacagactaggccatgtgcaaaattagagttccctgtgtaaccccagccagcaggcccagcatggctgcgtgcactcattgcagtcttgttgaaccagggtcctaaccactaacattgcaatttgctttgagaccttccctgtcctgggtactaggtgctatgaagccagctgacagaagcatcacatgtcttgggctgatgccgctacccggttcatttatttgcaatttgagccatttaaagaccaataaaattccttttctataaatgtctgtggtgttcattgatgtttacagcgtgatagtcttactttaccacctgagtatcttgagcagaggtttacaaacagctgaatcttgagccatatgtttggagaccttggtgttagggcagatttcagggtggtgttggtgttcaagtttaagtcactgctgggcatgggaggctgctgtgacagctgctggcagatgggctctgtg

SEQ ID NO: 21736 - DNA, 1314 bp, Mus musculus
agcggaagggacttgtgccccagatcaggcccgggtagcctgcttccctatgtaccgcagtctcaagttccgcgcgattggattggggcaggcgctgtgttccactcaccagaggtcttaggatcccgtggggagtcccgtgtgggcccttgcgggtgttgggcaagactctgctggcaaggtagcccggggctcgagtcttgccactagccattgttaaacacttacaatgatgctgtggaatatgcttcctatagggatgttggcatttcggactaggtccttgttttgcaccgaaacattatcttgggggtttctttgttctttgtttggctttctggattacgcatttgaggacttgttacccgtaatctggtaacagacttgaaagtaacgctgtttaactactggaacctggtagattgttttttatatatgaaactagtgatccactagttcatctctttagtctgtaaccatcctagtttttgagaatattataactaacatttgccttttcaaagcttaagttttagagcccaaatataaatttctagaatctgtagttgggccctgatcagacaattttagagtcagtgtttccacttatcaaacgcacaccaaatggtagaaaatcgctgaagtttaagacgtatcattaagatataaagtctgtttgtctgtgtgtctgtcttctgtctgtctttttttctctctcactttttttttaatccaaaagttttttttttttttttttcagcatccaaagtataaatcccaaggcctcagtggaacagattgttactcatttgatgctcagggaaaaccattagatgataatacatcgaattgctcctatattgcggaattgtttggctgggtggtggtgacacatgcctgtagtactagcacttgggaggcagaggcagggagatctctatgagttcaagatcagcctggattatggagcgagttctaagacagttaaggctacacagagaaaccctgccttgaataccatccccctccccgaaaaagaggaatgtgtgagacatgaaattctgagtacacgatctctattgcttgtctgttatcagtgtgctgttacatagtggcattgctgtaggcatcgtacatttaaagcaagtgtgcccatctttaaaaacattatacagtctcctttcagggactcggttcagatcatgaactggccacttctcagaactctcagaaaacaaagctttcattttaaaacttccatatctgaagtgagttttctccacttccacaccaaacccaacagtggaagaaagg

SEQ ID NO: 21737 - DNA, 1130 bp, Mus musculus
cttggtgtcagaggagaaccatgaggggaagaagagtacaaaaagtgtggtccttagagctagccaattgaagtttaaaatagcccaaataaaacctcatacataataactcagggttatcaataaataaattttaacaacatagaggatagacaactgctcagcttttatactgtttaagtcttataaatatctaaaaaataaatggtctaaggcaagataaattcctggagacatagtttctacaacacagaggttgctagggggacctctgatgccctctatcttctgtgtgtgcaagcaaagacatatacccatacaccacacacaaaaggctgttggcttagggggagaaactctcttgctttttcaaaaagttctagagtagttcaaccagaaacagtaaaggagaatctacttgactgttgccttttgctttgctttctatgctgggaggcagccaggtctcatgaagaggccctaggtgaatgtagatgggaaggcaagggtgccctgcagctgtgaccagagtgtcatggcctgagattgcatctgaagtaagttacttatggcactgacacatctagatctttttaagcaaatatggaaggggggctttcctgacacttaagtcattagaactactaaggccaccaaattatgatttgcagagtaagtagccagctgaattaatctacaagcatctttatttgcagccatgcaccacttgctggggatagattttgagaaatgtaaccccggggagttccattaaacaaatataaaaatatataaagtgtttatgatgtcacaaagagatggggccttatgggaccatattatatctcatttttggccaaaacataactaggtggcacaatgactatctgccaaagtgcttgctaactgctttcatggtaaacccagataaagaccaaattgtgattctcaccctattcacagtaaggtttttattgctttgtgctctagtctaagacctaggggaaatagttacatgtgtgtgtgtgtctttaacttaatttttttaaattattcccaagtttggccagtagatgaaataaacatatgctgttcataaactaccagtcaagactttgctgtctagaaat

SEQ ID NO: 21738 - DNA, 1147 bp, Mus musculus
catagaaggaccagtactctcaactaatccagacctctgagatctctcagacactgagccaccaaccagggagcatgcactagctggtctgaggtccctgacacatgtacagcagaggacggcctgctctggcctcactgagagaagcacctaaccctggagagacttgaggccccagggagtgaggatgcctggcaggggttgtagggtggaggggtgaggacattctcttggagacagggaaaggaggaatagaatgaggaaccttgggagggcagaccaggagaggggcaatgactggactataaaaagtaaaagtaatttgaaaaaaaagaataaaaagatatagactggcaaatttagttagaaaccatgatcagtcctagttaggattaatactacaatgactaaacaccatgtctaaaagaacttggaaaggaaagtgtttatttgccttatacttccttatctctgtttatcaataaaggaaatcaggatagaaactcaaacagggaagcaacctggaggcaggagctgacacagaggacgcggaggagagctgcttactggcttgctccttagggcctgctcaggctgcttccttatacaacacaggaccagcaaaccaggggtatctaactcagtgatttcagccttgattttgattatgtcctgtcttctactcctctttggtatacttgctactttttattctagagattcaggtgtacttttaaattgctgatatgagaactttctaatttctttatgatgttgcttagtgctatgaactttcctcttagcactgctttccttgtgtcccataaattttggtatgttgtgccttcattttcattgaattctacaaagtctttaatttctttctttatttcttccctgacccagagatctttgagtagagtgttggtcaatttctaccagtgtctatgttttccagtatttctgttgtttttgaagtccagttttaattcatggtgttctgataggatacattgtgttatttcaatttttttttttttatatctgttgaggcttgctttgtgacctaatacctggtcagttttggaggaggacccatgaagtactgagaggaaagttttaagatgtctattgctagtagattgga

SEQ ID NO: 21739 - DNA, 1105 bp, Mus musculus
gggatggtgcaggccacctcagcagtggggaactcttccttggttacttttaacttttctgggaatatcttcatccgcggctttaggattggacgctgtgccactcataagtgccgtcattctgtacattttcatgaaacaatcgcagaataagacaggattaggtggttgcttatggcaagcttttagaactgaggtcgtgtttgtgccaaaatgacaaattcaaaacaagtatggctagcttgttcatttgtattacctaagaaacataagtagaatgagccttctctattgtttttcccctaggaaagagaatactgtgcaagacctagactggacatcatccagccacttccggagacttgtgaagagatctcctccgatgctttgacagtcagaggctttcaggagaatgaatgtagggattaccacttaggtgagacagcagagatgtgcttgtgtgccgtgttctgcttattcccttcagctcatccaaaggggaattgaaatacaggtactgacaggacgttagacagtacccgtgccggcctctgccagtgagagccagggtactagattcataaagactgcatatcctatcagagtgctcatagcaaaaaggaatgttagacataggacaggaaccaaggtgagaaatttgttctttttttgttgtgttttgtgtgtgtgtgtgtgttgttccatcagaccagctagtcagctagtttgctgtgctgggaatcaaacccttggctttaaacatgctaggaaatcattggcacccagcatatcccagccctatctgtttaagttacatttaacttgatatcaaacagcatgactctgtccaagccttatgttcctggaaggtttgcagtggaggcaaacctaagcggcagtgaagtccttgtgttgggagctgaggactaagacatggaaaaagtctcatcctgtcacagggactgtggaataagtgggtgactacactaatcacgactcagaagcaaaaggaaaactggaactctttagtcctgcctaaaaagtccattgttatatctttgtaaaatgcacttaagaaaaagaaagactttaagctctttagaat

SEQ ID NO: 21740 - DNA, 1176 bp, Mus musculus
tgatggacttggaggcaataactaactaactaactaaataaataaataaataaatggaaagaaaacccccaaaacaacaaacaaacccccaacccttttatgccaaagttgggtttttgttagtgtttttcgaaatgaacagaacgagcaaactagaacacctttacatacaaaggcagacagcttttggatattacccatatgtttaaaacatcttcggttacttacaataccaaatacaatgtaatgcttataaacagtttcacttttgtttagggaataaataaaaaaaaaggaaaagtgtacatgtttaagacagggcagcttttccttaggactgctgatgcgaggttgcatggatgcagaacaaggtagcgtcaatccatggatgcagaacccaggaactaggcaagatgaagaggagcaagtgtcttgtgtaaaagaattaagagataggatggtgggttgtaattgtggttgctgtgattccatcttcctttttcatttggcagcggatggctgacaacttaccatgctcggcataggcaggcactccttgtggaacatgtgccggcagtggaagaccaccacgctgaagggcttcgctgcatctgcaaggggcagtgacagaaggagcagaactcagtgcaccaggcagatcaggaaaggttaaaccagcctgagagaatttcctagcaacaggctccatttgacagggcttctttacaacaggccctggagtggggaggagcctaagcacagagcgggtgtagaaccacctgcctatgaagtacaattgacaggctactttcctggcctcagcatcacttaccaagataactaatgcagcacaatttcacagcaaatgtgatgtttatttgaaaaagtagaatatgtgtgtccctgtatgtgtcctgagcatgattccaactaccacagactgaaactgccaagatctctcgctgaggccagaggcagaactcggttaggaccccaggctctctgcacttaggacacttctgtttagtcaggtcctctcatctgctctgctgtgtggctggccagatgagctctgctaagacctactgcccaccacaggggaagctgaggatcgaactttacaatctgccacccctttcatggaaaggccacctaaagcgctgtggtttacagacg

SEQ ID NO: 21741 - DNA, 1281 bp, Mus musculus
gggcttgaactcaggccctcatgtttgtacttcactaactgagcggtctaaccgcctcgcttgtgtcctttgagctgcagagtcatagaagcatgtgtcctgtctgagctaaagcatcctctacggagccgggaacgatgctccatcacttcagagccctcggctccctggatgatgacagaatcacatttctgaatgtaaaggtagacattttttaacccatgtttttaaactgtttgcagaatgctcctgcacaatactgcaacatctgtagtgctaagaaccgtgggcctggaagtgccatcctggagatgaagaagtaggcctgcctgcctgcccaccctttgccactctccactgagtgactgctggaccacagcagctgtgtcaacgccagtgctgttgagtgacgtgttcagggctcctcggagctccccgtcagttgttttctccagaccttccttccagaagctgctccttgtcaccgatggagaagtcgaagctcttcccatgccatgaaatattgcattgctaatcagtatttcatgatttgtttatttggcttatttagttagcaaaagagttcaaagtgacttcgttataccctagttacacccaccaggcatgaactgcactactgagaacactgccagctacagtcggccaaaagttctgctggtaacagttctggcatgcctggctacactgtttgtcatcagctgtgggtagcctcctaaagcgcatttagaggtaaaaattaaaattaaaggtaaaatgctgagaactgacactccttcagtgacatgtgggaagaccattagctggggtactatagccttatgtttgctacctacgcgctgactagctcagttatctgccccatcaggtcatcaatatttgttgaatgaataaatgttgcccttctcattgtgaatcctttattgtgttgcaagcagacaagtgctctttaaggaatagaggtgagttttggcactgacaagctgtggttgataagtaggaggaagccagggaccctgtcagagttaagtgagactctccaaagaagggccaaggatagatttaaggtgtatctcactgcctggaagggttggcaggagtgtgcctcactgccttgactttttgttgttcttaatgtttccagtttgatgtcaaggttcggcttggtaagttttgtcacttcccttgctattcggagcaggtgcacggccagaaaaactaaatggaactcctgaaggggaggatgggtggtgccaggtccac

SEQ ID NO: 21742 - DNA, 1327 bp, Mus musculus
gagcatgtatgcaaaaactatacgaagaggggaaagagcaaattaaggaaagagtccttactctgtttcctgcgttcatagcggtctgtttgtgctttgtctaacagtgaacactggtacttgattctcctcccaccaagtctaaagtagccttctccagaccagactttgacttctttgcatcaagtgtgtggtgtcgagtggttgccctgcagatgtgatgagttatcctgtagtgagacatcatcttactcccttgcccgaattgtgagctcctgctctcttgccctttcaagtttactgcgtttaaaactgaacagctgcaaacgttcttaacggtcttctccaatcacctctatatacacatgtacggacacacagtcgcacaagctagtcccatgcctgctggacctatgtgtatgcagatggctacatatacatagctgatcccttccctttccactgtagctcttctcctctaagtgtcattgatacacgcattgctcttatttgtcggcattacagctgcagttttgccttggggcaaaaccattcatcccattgccaaaacagttgacagtgtctgtgtgtgttgtgtgcagttttcaggatgatataacagatagcgcgtccacgctgctgcccctttggaaagagcagggcctggttatgtagctgcccagctgctcagtccagataaatacatggactagcaactatgcagtcatcattcctgcctttacgtgattggctggacgagggggcaaaagaacctatttataaaagctcctatatacttccacgttctatttatgcaactcatcttcacagatcattctaaaatgaacgaggtgatgtatgctgtatcagaaaccatctgtaacagttgtgttctcagtgctgtgtcattccaaataaacctttggtaatctccaagttacatgggttctttttcaagagtggttttttttttttcttctttttgaattcttgttccagttggacaagctacttgaagcaatttatattggagttgttatttgtgcagatgtgtacccgttccacctctgggttgtgttctgtggccctgcctcacttccctatcactccatcccagtcattgctggtcaccagtgcttcctggaagccagcaattactagagcgcaaataacagctgtgggagatctccttctattgctggctgtggacactcagtctgtgaatcactggcaaccatagatgcacaatcagcctcacgacagcttcatctttagtcacttttctttctggcatttttatgttcataaggacataaagaagtagctc

SEQ ID NO: 21743 - DNA, 1194 bp, Mus musculus
cacagcataaagtggggagctgagctcagacccacccaggtgtcccccagggacgtgtgcagctccccacaggagcctctcataggaaaactgtgagctcgagcatggaggacgccggtgagtgtcttcacaggacaggtaagtcactgaacatccagagacagtagcaagcagaggggcagcagtgcttctggggaagaggctatcagactggctcaccaagcaaggcaaggctgataggccgctggcccagccactgccacagcagatgagccctgtgtctgtgacactgtcagcacacagcccagcccagcacagcagctggacacacaagagacaaaactgtcagcatgaaattaccagtgtttatgttaaagcctttgaagtaaagccgtgtgttgtcctgccagtgtccttcatgtgtctctgtcacagcctgcccgcagtaccgtgaggaaactgacaggcagcacagaacttggctctggccactgctcactgtttcttcactctttctctaagtgtgaagaacctcactgcgagtcatccaaggaagacagctgaagtggtggctctgcttgctgctggatgctgaggagctagtgagtttatttatggtgatacctcatggacatcgctccacctccactcaaaccatccctgcctgcggccactgggtcatgctgtgctccttcctctagtctgtgagtttcggtctgacctgataatgaataactcggtcttgtgctgcatctgaatcaaaagactgcttaatatattgaaataacaattttgtagtaagtgagagatacctttttgtttcaattctcagaatgtattttttttttttggtttcatgtctcagatttcttttgtatttcttttttaactccttacatttcacttgtgtttttaaactcatgcacatgtgctctttatacagttttaaaataataaatccaacgtatcaaaatgatgattgtgtgttgtctgtattatatgtttgtccaggagtggtgggttataaaaggaagagggtgtggcctgggtgcatagaaactcttggcctgtgttttgtatgactctcttgggacttcttgttctgcgctagggtctgatgtgctgcacacaaacaacctgcaaaggctgtggctgcttttgctccgccttttcctgcacgtttacttccttagg

SEQ ID NO: 21744 - DNA, 1099 bp, Mus musculus
agggaaaggaagttttaagagggaggcttggacaatcttagtatttacacgtgagatgaaatgaagagtcccgtgtgctgctctgtgtgcaagagtactgaccgctctgctgaaccttcatgtcttttctagtgggcaaccaggcttccaaaatagcactgacctgggaggcccccaagtaaggccaagaagtctctgctactctaatcttttacgtattaaatgcactaggctagtagcccttgcctttcctttcctgaaactctttcaacacaactgtgtctatatgactacggctcatgcttccaaggtcagctcacatgtgacctctgtgagctgttccctcgcctgaattcattgcatcttacaccttggcatgccttgctcacaatactcattatgctgtgtgggatttcctgattactagaagctgacctctgctatcctgggtaagaacgccctgagtacgggtaccatgctctgtttactttaggatctccagcaccaagcaagtgcctggcacatagtctgtgcccttaacatttgtagaaaggagctcaccagctctgtcagtgtttagtttcttcatctattaaacagggttggtttttctggttgctagggagacttatagtaatacaacttactattctagattcttcttatcgctgtgttttatttgccatgtatcatcttttgttatcaagagaagtgtatgatgcttgctttatgccatagccatctatattgtaatttatctatacaattaaacaaatttaatgaaccctatgaattattctttgatgtgtttgtttttgtaagaaatatggaggaactgaattataaagaaaataaaatccttctgtaataatcaaataaagtacttcccataatcaaaaccaaattggttatcttcagagcctattaagtctcatcttttataaagttcggctttcagttgcctgggtcagaaggaagcttcaaaggcagtactgatctgttttcctgagtcagtccttaccactaatcaggatcccaggtaacatcacagtgcagttcttatagccaccacttctatgcatctcctcaactaccacta

SEQ ID NO: 21745 - DNA, 1189 bp, Mus musculus
gtcagctgtggcaggtgtacacctttttctgaacttgaccttagatgtaaaagagcgtttgagctggtctacattcaatattggcatttttactagcataattttcttattaaaggaaaggcatattcttttcacttagtggatgaggaaaacgaggttccatggagtaaagaacctgaccaggtcaccagagtggtgagaactagggctggaagcccaacctcctacttggttttaactgcaaagaattccaatgaatgcttggcaatcagagaatcccagaagtcatgaggaaatgaggcccactttctcactccaatagattaaaatattacctaagtatttataccttgaattttacagaacaccccctttaaagattgatgattaagcctgggacattgtatccattgtgctactattgaacaatttgttgtcctgtttggggccatacaaagtcatagcaagccattgtcaggatttccttattaatctaaatgtatgaaatgaatttggaaggtccaagctttggtgtctccccttggcgccgtggtcctgctggtcctatgcgctggcaaatcctttcttgctgcaaggatgaaggaatgtgctcttcggttctgtgggagaaggcacagctgctgagtggccagatggatcttttcctttgctgttattttaatgaaagatgtgttgagacgatgtcttccaaatttctttacaaatacttaatagcattataagcactatttgaaaataacctttcgttaacaaattcaagatggagaaggctgaaggacttttcattcgggtccctgggtggagccttacagtccttgtgctcaaacatacccatagcatggttctctctttattctgtggacattgctttcacgtgtgcattttcccaccaaagggagccacccacccatgtgcattgttttttatttacagacctattttaaaagcctacaaagatacttgtggccaacttcccatgtcagttgatctatagctacatctccatctgaatgtttatgccatccaaggctatactatcctccctgtgagtgctcatggttattgcaacagttcacttagagttgacatatgtccaccaggaggacaaggatccttttggtttctctctaatccagctcctcctctaaaggaaaattgtataaaacac

SEQ ID NO: 21746 - DNA, 1102 bp, Mus musculus
tagagtttttatattgtactcaactttcttattaactttcaacttttgaagtaaagaggaaagacaaagtaaacacttaaattcaaatatggcttgagaaaacctattttagcattttctctggcattcagagtctaaattcctgagtgggcatgtaggtttctgtcagggtggctaacctggctccctctttaccctcgacatctgggacatgggatcatcacccccttctcttcccccttcgtcttcctcctctgccccgatttgatgattgagcaaggagcgaagagagagttctcggttgactgtgaagtgctcgtgtgcaggcgatgatcttcatcaggtcgtgcacacacagaccaggagacacggcatatctggccggaaagccagctctgctgcgccgcattctgcagttcataaacgttcagctttgtggtttgtttgttcatgtttgcaagggtaatgctacatagggtttctggaattacaagaaaatgtttgtcctcatgagattggactgtgaacagaaacttgacagtttaaaaggacattatacctagcatatctccattacaaatagaggaaaataacttatgttattctgggctttttcttagcacttacttcactttatactatccgtgaaataacatgtgaactggaaacaagcagagtctattcctgttgcctgtttgagtagatttcagattgtgaagtgagcctgcaggtttgcccagccctgaagggaagggagatgcaggcctattgagaaagcctgctgtgccatagaagcccttctcgaaatccttctctccaagtgcccctccagcatcacctgggcatggctctcctgatctcagcttgctctgccatgtgaggcatcattctccttgaaacaccatagcattttacctttgtctcctttgttctactcctgatttcttgataactcttggttttgttttgttttgttttttatttgtttttgaatttttttgttggtttgttcctttttttgttttgttttggtggtcctgtttttcttgaaatggtttgtttatacttaaaaaatataagatttttttaaaaagaaaaacaa

SEQ ID NO: 21747 - DNA, 1194 bp, Mus musculus
tcaccagcatttgtttgttcttccattgtcattacttgtgggaatatgactttcctgctgcgatagatgtgagaatttccgggtcaacttagaggagtttgaaacagagtccctacttttagagattaagaacatatttctctttgcaacagacatgtataacagtaatggctaattatgtctagttttagggtctggacaggtatagtttagcctgtaaccgttgtaacatgactctaaacaaggctccagccctttgctcaaacccactctcctggttctaaggatcataactatctaagaatttggtgtgctacttctgtggccttgggacatagataacatctaaacttctaacttcatttttctccctgttaccttctgtctgaatgtttgtcacctctattttgttttgtttccaaattctgttttgtgttatctttaaccactcatggttgaaaagaaaggaaagcaggaaatgggctgaagcctgagccaggcactgccctggcatagttacctcatccacaggtcatttccctctgtggtgccttccatctttcctttaccatccaatgtgtccccgttgaaccccgatcagcaaggtgcatttgtctgaacatcattgtctgagtaggcatgattcaaagaagcctgagagcgaagaagccattaattcacttgcaatcacagccacagcctcctctgtgtacttcacttgattatgagagactttgctattcaggtgcaaatcaccccagagaaaggaggccttccccactcaagtcacaagaggagacttaaatcaatagcctttcaaagtggctgtggccactctgccctggatcagcgtgactcttcatgtgctgtgggggcaggccagccaagcaagtctctgtgttctgtgttaggacactcactcctcgtggaaggctacctcaccatccgtgatatagattaacattggttcaagaattagtgtcagagaggggtcaagcatagaaaagacacgggattttaatttcccataatactctgcttttcccctgcttattaaagaaaagcatatttcaagatgaatgcataaacacatacatgaatttattgaaatataagtacacagatacatagatatagataaatagtaaatagcatatgtattcattttcttttcctactaccacaaatgactgc

SEQ ID NO: 21748 - DNA, 1128 bp, Mus musculus
tacattcagagaagagaccactcagatgaatatcaacacagtaccctaattgtttaatatcattattattatttatttgttattattgttatcatttatcattgttgtcattattaacattaccattactcgtgagatttagagactaggtttgctagcattattgattgagggagggaggaaggaaacacctttatgttgtggaatcatagattagcagtttctttccattgcagattctgcctcaggaggaacagtccttgtcatgtgaagcagtgctatctgggaatcagtacatggattccaggttttagcaatcttccttaaagatttgtagtcttagtgatccatattacaacaaagaatcccaagtctaaatagctgagccaactgtagattcagtctgattcccattccacaaatggtttcccaggtatacagccagtttgcactgaagtgacattaaagtgcatattggcagaatgccacggtgtgtgacttccacagtaataaatggctggaaggaggcaaggtaatgcaagatttcaatggtggtgcactctgaaaggaaggaagccagagggtctgggaattagtggtggagctacaggggggaaaatacagctctattacagcacacacttgcctcttcttccttcccattgcctgcctgagatgattgggccgagtttaaaaataaatgaagtgtattcacgttttccttcagaattttgctttgaagggattctgtaaaggaaaaagatggagtacttacatgagcagaatgcagcaatcaagacatgaaagcataggccttgtagatagcaggtgtacccttacatggggagagacacatgcttccaattaaagccagtcgcacaggtgagcatgttgcttctgtacaatgttaatgattggataggtgatgctgacatgatgacatttttgaatgggttctgctctcatttgtacctttctactgccatctttatggactgaactatacagtgacggggactgaattttcaatagaaacttaatgtcaacttttagtgctgactagagatgcgattccacacacacccaggctatcatttatgttgatatgcttttcacattttattttag

SEQ ID NO: 21749 - DNA, 1146 bp, Mus musculus
atcatgaatcaacatcaactaaacatgtggtactagcaggggggctggtagtatggtgaaaggatctagggatttaaaatcaagccactttcctgataaagtttgcacaatgtgaactggtggactttggttaagtttgactctttgaatccttcattttttacaatatagacagtaataattgtattccccactttcccagatccaaaccatgctctaaatggcagagatgcaaacaaggactcagaacctgcagcaccaggttcagatctccactctgatgttcactacagagtgatttgtatctaatggtgttatctttctgagcgcaactttaaaatgaggtgagggtggtttgtggcttagtggaagggcatagccctggattaaatcccaaacacaaataagtaaatgcatgaagtggctgtaagtagtagttggtgttgtgccattctttgaacagtgcgacacataagtagttcacatatgctatgtcaggtggcactgagagcacactgcccacagtcatttccccaccacatgtgtctaactctcaagctttcttagaagcttctgggtcactttaaaatgtggaacaacatatgctatcatatcccgaaaggattatacatggcattatctaatgctgcttccctcaaagggaaccttgtactggctcctcacagagccaagaagaaagcccttgaggccccaggagagagcaaaatggatgatattaggtagaatggtagttcaagtttgttttttcttgtggttgtgaaaataaattcttaaattggagaagaaaatgactgcatggtattctgaaaacaaaagtaccatccatggttattgaataggatgtgatttgtgattgatctgtttgattgaagctagggcatgtcttatcattcaagatgagaggcaactattccaatcctttgttcattcacttaaagtgttatatatatatatatatatatatatatatatatatatatatatatatatatatataatttgtgtatgtgtgtgtagtcattgtacatttagtcctaccttgggtagaaataagatcctaaattcaatcaaattggtaaaatcaatgaatgactattgctgatacacgctgttggcaacaatctg

SEQ ID NO: 21750 - DNA, 1105 bp, Mus musculus
tgttaaggactttcacacatttgttattaatggctgttgctttcatgtttatcaagcttacgaaagaaggtgggggtgggggtgggggtgggggtgggggtgggggtgggggagggggtgggggtgggggtggggggaatctgtgaagtctgcagctggtcactcaaatgatttctgttacccaacaagaaactacattcctggaagctgggatgatcctcttggaaaggggtggcccatccatccgaagcacatgttttgcactgtgttggtccttcagttggctatcccattcctcactctgtctttggatcttccccaaagctctggtgaatctgaacatattgaacccgaggaactgctagcgtcttcccgacaagcgtctctagaaacaaccagaccttgccaaactgccatgagtgaaattgaaaacattcaatgaggaaaacatatctctgcattattttgaagttattcaaatcaccagggttaaatggatgcatctagtctggactatagccatggaatacaaactcactggggttccagctgcaattcagcaccagccgctgtgcaccacagcttaaatgctaatagagtgacgtcagagccatttgggcttcctggatactagcaaggatttcaggaactacgctagtaatttagtcccagtttgtcagagaaataagtagagggaacacttggggcatagcacagtgcctgaatggagtacggaagccctgtctcaagctgctatattcaaatcgtagagccgtgttgcatctgtagaactggacgtggaagacagatctggttcccagcatgaagcccttctgttgctggcacttttcaaaatggctttctcctcctctattattttaagacagagtactagacaggtcttcccatgctagcaaacttctgaccccattccttcctttagaagaaagagcagccccatcagaccctacaatctagttcaattggggtttccaagttggagtcaccactttatagacacagaaatgggggggggggagtgcaatcctctcttcatttttaacatgctctatgggtaaccagctcatgaattctacctatatct

SEQ ID NO: 21751 - DNA, 1175 bp, Mus musculus
gtggtgggattcgaacccacgcccccgaagagactggagccttaatccagcgccttagaccgctcggccacactaccgttgatgtagagttttgaaccatggcaaaaaacctccacttagtcgcaataaaacattaaaagaaaaaaaaaaaaaaaaaaaaccggttggcagcggtgggattcgaacccacgcccccgaagagactggagccttaatccagcgccttagaccgctcggccacgctacccccgtcgagggctgcttacgtctcgtctttctggaggatccataacagtccagactcctttgcacgcggctctctgcagcgagctttcattgtgcactctatgcgctaatgcagaagcgcaggctctgttctggcgttgtatcatgaggcttcgcagcaaaagctcttttaggtgctatcatatcatcactaagaaactacaactatgaaacgttaaaaaaaaaccagcgctagtaacagcaggaatacgtgattacggaaactctgacaacgggtgcctccttagcgcagtaggcagcgcgtcagtctcataatctgaaggtcctgagttcgaacctcagagggggcaacctcagcttttattttttttttaatacattaaacctttaattttaattcctacgaagagaattgagttcgtgtgtacggagacccaaaaactactaatgaaatggaacgggtagttttatttgtgtaatataatggtctgttagaaagttataaaatagcgatttttcttttctttttttttttaaagaattaaacacgtgaccagtgtgttggactacacctataatattccagcattcgggaggcagaggcaggtggatctctacaagacgatttccgaagcccagactttacaattaaacttactaatttttcaccatccatactattggagccaggagaattttcaggtgcctttcaaatgcacttggcattggttattacataaataccaaggccaggaaactccctgcccagggtgtaaaagaaagggaagccagagagcgagtatgaaaggtgtaagatatgtgtaattgccggtttggtcctttaaaccattcttctggtattgcttattatcggatcatttcatccaactcctcacgatactccatgtcaaaaacgaaacaaaactaaa

SEQ ID NO: 21752 - DNA, 1110 bp, Mus musculus
gagtgtgcaaaaattcaaccaggagattaagtctggatatccagggctctttgggggaaagcaaactgcatggaggtcagaaaaaaaggcaaaatgtacactacctacctctgatcactttttgtgttttgtgagatggagtctcacataacccaggttggccttgaatttagctttttacctcatttcccaagtgctaaagttgcaagctgtttaaaactttattggagccgggcttggtggtgcaagcctttaatcccaagcacttaggaggcagaggcaggcggatttctgagttcgaggccagcctggtctacaaagtgagttctaggacagccagagctatatagagaaaccctgcctcgaaaaaacaacaacaacaaatctttattggaacttttaactacttgaattagagaagaggcaaccttgtcataagaattggaggagggaggacctggtgtggtggcacatactcagcttcccaacatttatgaggctgactctaaattgctatgagttcaaggccaagctaaggctacagagtagccccgtcacttgggaagtagaggtaggatcaggagtttaagccttattgggccacatgagaccttgtctgaggaagaaaaaaagtttgaaagaatatcctgtgagaaaatgagcaaaactcacaaaaagacaagctgcagaaacataaaattgacccatgaatgtaagcaaactgaccagcatttacaaaaaaggagggaatgccagctaaagctacactaaggtgtcccatattagatagtgggaatcaaagttttcagaccaagtatgaaagtatatagcaaaatgattgtttcaacattgtatctctctctctctctctctctctctctctctctctctctctcggatattgacattgtgatattgcaaacaatctaacttctaaacctaaaagattgatttagtcagctaaacacccaccccacagaatactgtgcaacttttaaaaagaagaaaggtaactagtagaagcattaaatagttctgcatccccatattaccagtgcagaggtaggggactcaatgccacattaaatctagactacactgcatagctag

SEQ ID NO: 21753 - DNA, 1183 bp, Mus musculus
tgggaagtaaaattgtattactttcattgttatccatacagaggcaatcagctaatctaaccgtaaatttttaggttctgagtcagggtcttactatgtaacactgaccatgcaacatgggctggtctggaactcctgaagataacttctgcctcagtctccacgtgtgccaccatgcttagttccaagagaatttttttacataatcagttcaccgtgtgtctgatatataatgagtacagcctctggtgggcatctcctacagtgttctggggaagtcagtgaaataccaggtagtcttgagtgggctcttctggccctcagatgacacccccccccctttgtttctacagttgatgtaaccctggacccagacacagcctatcccagtctgattctttctgataatcttcggcaagtacggtacagttacctccagcaggatcttccagacaaccctgagcgattcaatctgtttccctgtgtcttgggctctccatgtttcatcgctgggagacattactgggaggtagaggtgggagataaagccaagtggaccataggtgtctgtgaagactcggtgtgcagaaaaggtggggtgacctcagccccccagaatggattctgggcagtgtcattgtggtatgggaaagaatattgggctcttacatccccaatgactgcactacccctgcggacccctctccagagagtagggattttcttggactatgatgctggtgaggtttccttctacaatgtgacagagagatgccatacctttactttctctcacgctaccttctgtgggccagtccggccctacttcagcctaagctactcgggagggaagagcgcagctcctttgatcatctgccctatgagtgggattgatgggttttctggccatgttgggaatcatggtcattccatggagacctctccgtgaggaagtgaacgtagaccacaagtgctgttgcctgtaatcctaccccaggcacaagggatcttgtcctgattcctgtccatcaaaattgggtgtccttaccatttccgtgcccctacagtgagagacaagatgtccatccatggtctctactgcattttcccttcccttgcagattgtgagatgtaatgaaaagtattgctatttcccagaaataaaaactagattcctcctgtg

SEQ ID NO: 21754 - DNA, 1231 bp, Mus musculus
cgacaatctttgcgggggggggggggggggaggtccttgtgctaataaaaaaaatataaaattctatcagtacaaagttgattaaaatttgcaaataggtatgcctactctctaaacttagccccagatacaccagagtttaaatactgaacattcactgctctgccctgagtggcatttggccgtcaaatgtcgctttcgtacagcgtccctgacctctagagtgaattctgagggccaaagacacgaagcggcaaagaatagggctgctgaccctgttttccatctttcttcataatcttggcgaaccagacagatggagagcacagacgctctgtcttcaaaacatttacatccagttttatacatggacatttcctcccttcttttcctcggtcaaatattcttccattttactccacaggaaacttttgtcagcgtttccaacaaatcttgagaatgctgctgcagctagggtgctggggcaatctctatatcaggaatatatgtgcggcactttctcgtgtgtcaggatggccgagtggtctaaggcgccagactcaagcttagcttccctgtctggggattctggtctccgtatggaggcgtgggttcgaatcccacttctgacacagtactctttttctttttttttttttctttctcacctcagtatcgaaaaatacatatcgacttgatcacatagttaagaaatatcgaaccacatattcttaaaaattgattttgaaaacgttctaataggagcacccgacactaacagtagaagcggaagcgcggctatggttttgaggacgggagagtggctttgcggtactgtctgcccgctgcgggagacgactgcggaccgcgaaaaaactgatcctggaggtctggtcaccgaatatcacctacaccgccgcggttggccacgcgcctagcccacgagtgccgcaaccctgaagcactgcgatctccacagcgcctccttgcgggccacgggataaataatcatttcaccgccttagtccaaactcctccttccaggccaaacagaatccgtgctaacagcttgccctgttttaggcaaggctctcttacgagcgcacctgtcatcaacaactcgataggttttgttgttggtttggtttggtttcatactattctctgatatgttttcactcaatatttgttggatcgtaagttgaacattgatttcgtttttcctcatata

SEQ ID NO: 21755 - DNA, 1197 bp, Mus musculus
gaactcttggtatttaaggatgactgtgaactcttggctcccttgcctccacctctgatttcattttctccatccttcctaaactcactttgcaagtttactggttgtttgtttgtttgtttgtttgtttgtttttttccagtcttatgccaacttcgcaagttcacacaagctttctttaaagctcgccggctgcgtgcggatcctttctgatttccaccctccaaacattctcacctccctccctcctctgcagcacaaggtcccctgagttctggctggacatccctgtggttgtcgggtcacagaaaatttagcagcgttcacacgaaggatcattgagctacctatctgcttacagcttcccgaacctactttttcgaagtctttgtaaattttgattccaaattaggaacttttatgttaagctgaatttttgttatctctatagtgaagccctgcccatatctggtcacatttcatttgactcttacgtattcacccctccctaccacttggccgcgtggcctaatggataaggcgtctgattccggatcagaagattgagggttcgagtcccttcgtggtcggtgtgcttttacatttttcttgcttaattggtgtactcactttctggaaatgtgaaatgtattttccttcgtgtaggtattgtactatggcatgactgctggctcgtgcttaaagaacccttgtttaactgtgtagttgaggagtgggggtgggggtggggagtactgtatactacacaaacaaaaaggcaaaattagcccagggtttcctaaataagacctgaataaggactctaaattacttgctaacacagaaggaagacatctcaccagtccgtaactttggacaaagaactacagtcaactaaggaatgcggagggcaggagaaatagtcttccttggggaaatgaccccaattggttatccaatgtctagtggttagccctgaaataatatgcataaaagtatcattctttggactgagcagcttgtaatttatgtatttagaagcgtgcgagtgtgtgaaaaattaaagaaacggaggctatgaatttgtccagggctgagtggaggagtacatgggaagatttggagggaggagagagaaaggaaaatagatgtaattatattttaatttaaaaacactctcaaggatctcctttcctg

SEQ ID NO: 21756 - DNA, 1585 bp, Mus musculus
acccacactggggaaaagccctacgagtgtgatgactgtgggaaaaccttcactcagagctgcagcctccttgaacatcacagaattcacactggggagaagccataccagtgcaacatgtgtcccaaagcctttaggcgtagctcacatcttctgagacatcagaggacccatactggggataaagatttttttgttccagaaccttactgggaaagtcagagtagggtggaaagccattgggaaaatattgaaactcctgtgtcttatcaatgtaatgattgtgagagaagtttcagtaggattacaagccttattgaacaccaaaaagtacacactggtgagaagccctttgagtgccaaacctgtggaaaaggcttcacccgaccttcataccttattcaacatcagagaagacacacggggaagaaaacttctgtcacagtgacccctgctgtacattccgaagttggtgttcaactgtcattgaactgaagccactctgtagttcttaatgactgcagaagtcataggctggggctctatttgataatgtacattctcagatattaggaatctggctaagacttatcttctacattctagaaggtgactaggaaaaaaaaattaatttcatagaagagttgtctacaagagtcctcacccattggaactaaatgggcttcctgactgtcaaattgccttcccttgtcctgcacttcatatctcttgagggaatggttatgctttgggggtgttgctctgatccttcattaggctattgggcccttcacatgtggtcagacttggaactcttatgtcctgctttgtgccttgtatacaggtgctaatagacatttattaaatatactggtgagatttcctacatagctctaaaaacccattatctggaaattctcaccaaaaccatttgtatatctttttaaaaaaaatgatgttttagattgaatcaatgtagaactgctttgtttttgttttttgccaagtaccccaacttggcagggcagaggtgaaggtgaggttactgtgctaaaatcctttaatcctttacctaatttaggaattctgtgagagtgccttaaacagctttcttagcattaaatcattgtgaatgtgccacccatggaattccactaatattttttttcttgttaattttgttactcttgagagaacaaaaaaaaaaaaaaaagaaagaaaaaaaaacctttcctactcatgtagtgtgaaaatgagtttcagaataaagtgatcaatgtctaaggctcagcctgttggttcttacttgggtggttatcttgggtctaaccaagagctcctgcatctcataaccactgcgctaagacagtccatatgatacagcagagttactaaaggatctggtacgtgtgggacaagagttggccggagcttcactactgagtaagtaagcagcagttggtctcttgatgtgctgtgttccacactgcttagtatagggaggggggtttcataagttacactccataagcagtgacattgctagctcgctgtgtccttgtatgacaagattcctaaggaagaa

SEQ ID NO: 21757 - DNA, 1209 bp, Mus musculus
caaggctggacgcgaaaacggagagatttcattggttacacattggttaccaatggcgccctggttttgaaaatcccttgttttgattggactgttagtacatgacgtatggtgattcaggttcggcatagccgtaagtttgtttaaaatgcagccagaacagtcattaacttttagttatcctttttcaacttagttcacttcatcctctcagtatgcctgagcccgccaagtccgctcccgccccgaagaagggctccaagaaggccgtcaccaaggcccagaagaaggacggcaagaagcgcaagcgcagccgcaaggagagctactcggtgtacgtgtacaaggtgctgaagcaagtgcaccccgacaccggcatctcctccaaggccatgggcatcatgaactcgttcgtgaacgacatcttcgagcgcatcgcgagcgaggcttcccgcctggcgcattacaacaagcgctcgaccatcacgtcccgggagatccagacggccgtgcgcctgctgctgcccggggagctggccaagcacgcggtgtcggagggcaccaaggcagtcaccaagtacaccagctccaagtgagctcgtttaactcacactcctaactcaaaggctcttttaagagccacccacactttcctctggaaaagctgttgcacatgcgtggttattgatgacgcttctcttgccttggacctaacaaggcataaggtaaaatgccaaaagatgcagtaagcagtttgcgtttggaagttaagggttaatggacagtcaggctttgcctctccggtcagttgaaatataattcgcagcagcctgtagtttttatttacgagtgtgcactgtatcctgaagctttaaattaagcattaactggtattcacaccccaaccaaccaacctttcattcctcctaactgaaaagtatgctgcgtaagcacaggccagttgtcctgcgtggttgtgggtatttatcgtacaagcgaaaatggaacctgagtgtaaattcacgagaaagtatgcttcagagaagccatcttcaagactgatttgaatgtccatggtcctaagtccagctgcaagcgtcaaaactgcatttaaagccagtgggccccagcatgaccgctgagttggaggtgaattaaaagcgtggggtagccccccaatattagtgggacttccatgcaccatccagg

SEQ ID NO: 21758 - DNA, 1213 bp, Mus musculus
gggattttcttttcaatgaggaaattgcacacttggttaaaccatgttcagactgcgaaaacaaaaggactcaccagccaattaagttgatctggcagccattttgaccaatcagaactcggccgtctgtataaattttggtggttgaagctttccctccatcactttgctttggaagctcgggtgttaccatggctcgtactaagcagaccgctcgcaagtccaccggcggcaaggccccgcgcaagcagctggccaccaaggccgcccgcaagagcgccccggccaccggcggcgtgaagaagcctcaccgctaccgtcccggcaccgtggcgctgcgcgagatccggcgctaccagaagtcgaccgagctgctgatccgcaagctgccgttccagcgcctggtgcgcgagatcgcgcaggacttcaagaccgacctgcgcttccagagctcggccgtcatggctctgcaggaggcctgtgaggcctacctcgtgggtctgtttgaggacaccaacctgtgcgccatccacgccaagcgtgtcaccatcatgcccaaggacatccagctggcccgccgcatccgcggggagagggcttaaagttcgtctttctgtgtttttcaaaggctcttttcagagccacccaaacctacacaaaggtgctgttgacttataggccaattggagttttttcttggaacggtagccaggttctaacagtttttcttagctgagggatgctctttagagtgtcttaagttggtgagtattctgcaaaatccaatatacttaaactgaacattacctctaatttccccaaatgcacttactgttcggtttcttgaaggatttttaattattttgccagcaatataaggccggcggagtcaattataggcacttaaattcatggtttcctatgtcttatacatggaattgctggaagcattttaactgctcagctatccagtcccaagagaacctgagttagttttgtataccagaagtcccctggttaaatggttggatgggtggagaaacatgaagaaaaccatagggaagacgtatagcccagaacaacccaaagtgctacaaccagcttcttggcctatgagggctgcctataattctaacatttccttttcaccaaagtgttcagctttttatggcccagtgacctatgcaccattcctgtcactttgcaagagaag

SEQ ID NO: 21759 - DNA, 1180 bp, Mus musculus
ttggctttctgtattttgtgcaatcagtgtactgattgtgcgctcgattctccaaactcttaaaagggcgtgaggagctagttccctcagaaagcacagacagggaaacaaaaggcgccctttttctttttggtaagtcttcccctcccccacggccgcgggcgcaacttcccgcctcctccctgcaggttctcatttcggtccgcccgctacagtataaaaagacggcgctcaggctcccggtcagcatctctgttctgagctgtcctgagtgcagtcatgtctggcagaggtaagggcgggaaagggctcggtaaaggtggcgctaagcgccaccgcaaagtgctgcgcgacaacatccagggcatcacgaagcccgccatccgccgcctggcccggcgcgggggagtgaagcgcatctccggcctcatctacgaggagacccgcggtgtgctgaaggtgttcctggagaacgtgatccgcgacgccgtcacctacacggagcacgccaagcgcaagaccgtcaccgccatggacgtggtctacgcgctcaagcgccagggccgcaccctctacgggttcggcggctaagctgctcgcttacactatatttccctaaaggtccttttcaggaccaccacatcttttacagaagagctgacgcttgttaactgagaactggagtgaaaacggctcgtaacaggttgtccaatcagaacgaacatgtatgtgcttaatttgcatgcggaacaatgctaggaaagctgaatagtcctgtcaagtggtgagttcactaggtgttcacatggtttcactctttttatttgttctaggcagttttattatacttgcccatttttctgcttccacctcttaaggatgcttccctacttaagtcatttcataccttgcgacagaccacttaagttcaggatttgtacattcagttgtgtagaatgaggttgatctggctttataaactatgctgtctcggatgcaataaaattctgaataaaactgccaatatgggggaggtgtgaatttctgaattgagtttttataagccataaaactttaattaataaatcataaaacggccaagagtcaacagttaatgaaggtacactgttactacgtttacacttccacataaatgtcaatagaaacaatttaagttgtc

SEQ ID NO: 21760 - DNA, 1204 bp, Mus musculus
ggggttacgggttgttaaggggccgcttggctttctgtattttgtacagtcagtgtactgattgtgcgctcgattctccaaactcttaaaagggcgtgaggagctagttccctcagaaagctcggacagggaaacaaaaggcgccctttttctttttggtaagtcttcccctcccccacagctgcgggcgcaacttcccgcctcttccctgcaggttctcatttcggtccgcccgccgcagtataaaaaggcggcgctcaggctccctgtcagcatctctgttctgagctgtcctgagtgcagtcatgtctggcagaggtaagggcgggaaagggctcggtaaaggtggcgccaagcgccaccgcaaagtgctgcgcgataacatccagggcatcaccaagcccgccatccgccgcctggcccggcgcgggggagtgaagcgcatctccggcctcatctacgaggagacccgcggtgtgctgaaggtgttcctggagaacgtgatccgcgacgccgtcacctacacggagcacgccaagcgcaagaccgtcaccgccatggacgtggtctacgcgctcaagcgccagggccgcaccctctacggattcggaggctaagtctttgtcttttatttctgctacaaaaggcccttttcagggccacccacttaattctttgaagcgctgtactcatgtcagaagggttagaaagtcctcatgaccaagaatacaagtaatgtctctgacatgggtgacctactttgtaatggtcagctttcacatttttgtgtaaagtgaactaattggtgtatcagagagttttaacacgtcaattagtaaatgccattttcctggctttgtgcttaagacatgatcttttctgtgatctcacttatcggtataattgacagtattacatcacacacacacacacacacacacacaccagctggttctctagctctctagtacagatatgccatagagggggggggggggcttttgagttttaggagtagtgctggagattgaattcattctgtagatacaacattaccagcatcccataaccttctgtttgccattgctggcctcaaacctgtgatctttctgcctctgcctcagaagtagccagtattgctcccagatcatgcttcagagctgattgtttttccctcccagcaactctgatttcagagtcgctg

SEQ ID NO: 21761 - DNA, 1074 bp, Mus musculus
ggggcgggagcggacttagcgggttcaggcatggtaggaactgaccaaaagcctaaagatacagaaagaaaagaaatgtaaagtgtgtctgcacaggctgccttttaaacaaacttgtggctatagctatcgcgaattagcagtcgtcatccaccaaatacccaatcatagcaagggcttttcaatgcaactctgttattggtctaggtgcaatgcttctatgtaaccaatgaaattcctactttttcatgccctgcattgactataaatactgtcagctttgccttcaaaccacttactgagcaggcttatattctaggttctaccatgtcaggaagaggcaagcagggtggcaaggctcgcgccaaggccaagacccgctcctcccgggccggcctgcagttccccgtgggccgcgtgcaccggctgctccgcaaaggcaactactcggagcgcgtgggcgccggcgccccggtgtacctggcagccgtgctagagtacctgacggccgagatcctggagctggcgggcaacgcggcccgcgacaacaagaagacgcgcattatcccgcgccacctgcagctggccatccgcaacgacgaggagctcaacaagctgctgggccgcgtgaccatcgcgcagggcggcgtcctgcccaacatccaggccgtgctgctgcccaagaagaccgagacccaccacaaggccaaggggaagtgaggcccttgatagaaagcaaccctttccaaccaccaaaggctcttttcagagccacctacaaaaacacttggaggagttgtgctactttggatcattattgggctaatgagtgcaacactgagataatgtgaacctaaccctagttttattaatgcctttagaattgttgcatccaacctatttatacaagccagtgtgaaatttaatttactgacctataaatactagtagctattactacgttttaatgtttcaggccacgaagtttgcttgtatcttcctgtagtgcattctaggaggaagagcaagttacagcttagggactacttagttccctcagcatttacaggatga

SEQ ID NO: 21762 - DNA, 1167 bp, Mus musculus
gccagctgcaggtggcgcgggataatgcgcgtcttcttgttgtcgcgggccgcgttgcccgccagctccaggatctcggccgtcaggtactctagcacggctgccaggtacaccggggcgccggcgcccacgcgctccgagtagttgcctttgcggagcagccggtgcacgcggcccacggggaactgcaggccggcccgggaggagcgggtcttggccttggcgcgagccttgccaccctgcttgcctcttcctgacatggtagaacctagaatataagcctgctcagtaagtggtttgaaggcaaagctgacagtatttatagtcaatgcagggcatgaaaaagtaggaatttcattggttacatagaagcattgcacctagaccaataacagagttgcattgaaaagcccttgctatgattgggtatttggtggatgacgactgctaattcgcgatagctatagccacaagtttgtttaaaaggcagcctgtgcagacacactttacatttcttttctttctgtatctttaggcttttggtcagttcctaccatgcctgaacccgctaagtccgctcccgccccgaagaaggggtccaagaaggccgtcaccaaggcccagaagaaggacggcaagaagcgcaagcgcagccgcaaggagagctactcggtgtacgtgtacaaggtgctgaagcaagtgcaccccgacaccggcatctcctccaaggccatgggcatcatgaactcgttcgtgaacgacatcttcgagcgcatcgcgagcgaggcgtcccgcctggcgcattacaacaagcgctcgaccatcacatcccgggagatccagacggccgtgcgcctgctgctgcccggggagctggccaagcacgccgtgtcggagggcaccaaggctgtcaccaagtacaccagctccaagtgagttcctttaactcacactcctaacccaaaggctcttttcagagccacccacactttcaactaaaaaaggctgttgccctgtattcactttggggttcctctaactcactcctgaaacaaaggctctttttagagccactcactttattggaaggatgtgcactttgtgagataattgcttagaaatctaaagacttatggaaggtgtcaattccagaggttcatgactaga

SEQ ID NO: 21763 - DNA, 1661 bp, Mus musculus
agtctggagccaaccaggcactctagcctgtgttatttgctacagacacaaacaacgtttttgcacaaaccaaaagaactattagttctactcttgcacaaattaaaggcggcatctttgtacaaattctcttaagtaatgttccttgcatacttcgtaaaagttaacagaaatatgcaagtaactctcacgatgcgctctgcttggtggatttttttgtaaacactggaaggatttttaaaaatatttttagtcagttgcgcgtgattcaaaaaagcacacacaggtacgtgaaaccgaaggctgttctcccttggaactccaaactgccaatttctgtgttattattttcggcagtaagtaaaaatttggggactaacaaacacaatttgggattgtaaccttgagtcgccgcgggcagagggcggtggattggccgctccaccaatcacagcccagcaccggcttatataaaccaggagcctgagcaaaggagcatcgcaaaatttgctcttcgcgttagatttcttttagttttctcgcaactagcaagctttttgttctcgccatgtctgagactgctcccgctgagaccgcggctccggctcctgtagagaagtctcccgccaagaagaagacaacgaaaaaagctggcgcggcgaagcgcaaggccactggccccccggtgtccgagctcatcactaaggctgtttctgcctctaaggagcgcggcggcgtgtccctgcctgcccttaagaaggcactggctgctggtggctacgatgtggagaagaacaacagccgcatcaagcttgggctcaagagtctggtgagcaagggtaccctggtgcagaccaagggcaccggcgcctctggttccttcaagcttaacaagaaggcggcttctggcgaggccaagcccaaggctaagaagaccggggctgccaaggccaagaagcctgcaggtgctacccctaaaaagcctaagaagactgcgggggcaaagaagaccgtgaagaaaactccaaagaaagcgaagaagcctgcggcggctggagtgaagaaagttgccaagagtcctaagaaggccaaggctgctgccaagcctaaaaaagcagcaaagagcccggccaagcccaaggcggtgaagtctaaggcatccaaacctaaggttaccaagcctaagaccgctaagcctaaggctgccaaggccaagaaggctgtttccaaaaagaagtaggtttgcttgcgacagcaacaaagccccaaaggctcttttcagagccacctagagagctctgtgaatgtagctgtacacacttatgctttccatggtctgtctcgattgggacagttaactggaacccttatctgccacgattcctgtgctcacaatctacaaggtaagactccgttacgatggctgttaggtactatggtcacctggtgacctttgtacgtgagccataactgcacacattcatttccctacctccatgtgctagctggttgagcctgcgtgagtatggaagcactggtaacattaactttgttagggtgaagtgaggcttccacacagtagccaacgcagggcgcgaaaaagatcgaattcattggctgtatgctaaagtatcacctaaaccaatggtacggtgttttat

SEQ ID NO: 21764 - DNA, 1103 bp, Mus musculus
tgacctaccacagtccttgcctagcttgcccaaagccctgggtttgatcacggcctgctggcacactcctcctgtgccaacaaaagaggagcaaaagcagggggacctctaagcttgaggtcaacctggtcctggtgtacatgtagcatgtggtgggaccttcctgtaatctcagtactgtggagcaggaggctttccaaaacccccatgtaactacaccgtgtcccccccccacccccacccccgcctacccaccccccccacacacacacacacacaggtggctttcctttgcatatcaaggaaaagcaaagatttatttgtaacattggaggtaatcatgaaaaacgatttcttaaaatgtagaaaaagctttcagtattataatcgccataggccaaggaatctttaacgagtcagcataggtttatgctcttgaatagagaatgatccgaaatgatccttagggatctgctatcagtactgggatggctgagtggttaaggccttggactttagatccaatgggcggatgcctgcgtgggttcaaaccccactcccagtattagtgaccgtactgcttgactgtctgctgtggtgcttttggagtttatccaccccatgaaggagtattatttttgcatttatttacttacttttataatacatcctggtagcacgggctggcttccctatttccctagatctcccaagcatagggcaatagtggctccatcttcacaggcagtggtttgccagtgggtttcaacaacagtcttctcaggtttccaacatgaggaaaactaatccaccagtattggtttttctgagcttttaacattccaagaggattggccaaacccttgcacatgttgtctgtatggaaatgtactccggttctctgaactttgctgacccagaattccctgaatgaagaaaaggccaggacccttgatgggaccttgctaaattaaaatatttaataaaagttttactgttagcctttgccccattgttcctcagagggaacctatatccctatattagggtaactgtatattgagggaaagaagcaattgaactttctaggggctatttaatac

SEQ ID NO: 21765 - DNA, 1181 bp, Mus musculus
tagatattaaaaagatcagaaatactaatcacaaccaaagaactttctcttaaaatggctgcatatcgtagctggattgaaggagcgaccttccgttggcaaaggccttttgcggaagccagaggaaagaatcttgtctcatccatcgcagcgtcaaagccgcacctgcggctgtgtagttccaagtgagagccgcatctttggaagtctcaagcggagcaaagaaagccctttcttaggcgcggttcatctggtttaaggaaaaacaaaacaaaaactcaaaaaaaatttgaatgatacagcacttcttgaggctgaatcccaaacaagataagtcagtgcgattacttacttcaaaaattaaaggtcaaagaagagagaaagaatggaagggagggagggagggagggggggagggagggagggaggagggaggaagcaaagaagagaaaaagcaagcaaataagcaagccagccagccagctagccagccagcctgtctgagatcttttataagaagtaaggaaagccaacgctggcgacctggccggttagctcagttggttagagcgtggtgctaataacgccaaggtcgcgggttcgatccccgtacgggccagtaaactgcttagattttacaactggaaatgtaggactctgtcctctacagttctattctctctataaacacagttcatcccaccaaaccttattaagataccggaacttgaatgaagtgaagttgttcactcaccacttttgtcaaatatcattataaagcctttcagatcactttgtctgtctttctctagctggaatttccacatcactcattgcctatttgtactcattactggcacctggcttttcttcacttccactagacctggacatggtatgtttgttccgttattgttctagaatgctctcctatctgatagctccaaaccttgagcatcaccagtaagcatcatcccttttccttatttttgctttcatcttcatatcagcgagagtaataatttattccttgagaattgaagctctgggcaattctcatgttttaactgttagatcttaagtgctggcatataatagatagagtccatatgttttttgctgtatgaaggacaataggcacatatgcaggcaaaacacccataaaaataaaaataaaataa

SEQ ID NO: 21766 - DNA, 1237 bp, Mus musculus
caaacaaacaaacaaaactccaaaagaaacactagcccaagggttaaatctttctttatccgggttcagtgtgacaaaaggaaggagataacatttgtttagagaagttgttcaaagtgggtcacatttggaaccatgtctgtttttttaaactttaaaaattttttgtggtttagcccaagctaactgcttttcattatctcttgtagtctgcttgctttctcttgcttgcccagcaacaaacgttgtgtaaaagactgtttactgcagacagcgggcatttctttccagagtagaagtgcctcccgggctactgtcagctaataaatcgagactttcccattctctctcattgggtttgggcacagtgtccaggccattacaactgtaattctggttccctgtactgattgttttatgtttctctgtctgagggatagaaaaagagctgtgccgttaataagcagtcttcctgactccagctttgggctctttcctgtgtctgtgtgtccgtccgtccatctgtctgtctcttctttttgtcccagatcctcctcctggggactgtctagaacactgagacagctaatcaaactgttgttaccgagccgaaatagctcagttgggagagcgttagactgaagatctaaaggtccctggttcaatcccgggtttcggcaaaggttcattttgtttctcattcattgttccttttcctttgttaaagtccctgttgcataatttcactgttatcatagaaaaagactttcgatttttaaaaaatcattctccttttgaaaaaattggatattttctttatttacatctcaaatgttatcccctttcccagtccccccaccctgaccccgaaaatccttttgggtatacgaagctaagttgctcctcagtttccagtagtcccaagaatgaaaataagaaaaaaaaaaagtaatacagtgcatttattcgtttgaaagtagatttagtaaatgcatgtataagattcagggaagggagtagggttcaggggtagtctcatatgctaggctctgggttctgttcctaggaccatcttggtttcccgggtctcttcgtaccaagaagtaaagccacagcttttgctatggggtagcccaaacctatatgctaatgtgtgcgaaagttagaggctccgttcctcaataccgcaagtctctgaggatttactttgaaccaacttgaaagaaatatgagttat

SEQ ID NO: 21767 - DNA, 1227 bp, Mus musculus
tagcaaatttaacgtctataattagggtctccagaaataaaaggaagcagatgtgtgtcacagagacacactctctgaaatgatcctctgaagaaggtcagacaggagaagctactggtgtgcacaggactccgtcctttgtgcgcgctgcacaaaagaggaatggcgatcctcaggtttccttaaagagcgccagatcaggaagctctgcgatacagaattggcttttcaggtaagatgactgtggctcaggagggaaattcagggagcagggaagcgaccttggtaatttccagactgcggaggcaggcgggctctgcgtcttgtacctgatctagagatcagcatctggatccagcaggtgcgcaggaatgctgtgagtctgtccatcagctttcgccttccacaaaacccattgggtgaatgctggtcccagttgaaccggggaaaagtcacgtggacatttccagattcttgaatactctacaaaggaaggatgctttgtgcaccaggcgcgctcccgagcatccctctgtagagtgtgcacagcctttacagagaaagcatgctccagtggcgcaatcggttagcgcgcggtacttatacagcagtatatgtgcgggtgatgccgaggttgtgagttcgagcctcacctggagcatgttttcttccctttccgcctcaaacacgctaggaaatgcatttttccttccaagaaaacaagaaatggtaatattttccatggtgcgaacacataaagtccttcgataaagggcatctgatccatataaaatgtagaaataaaaccaggattcaagaggtataggttaaacctatacgccaatttctagaaaagcacaaagaggctcgtcctttccccttaccccactccatcacagaacaggattcttcagcttttgacgtctgagtccgtacctggtaacaccatcactggtcttatgttctgctatttttacaaggcttgtcgtgaggcctaaatctacaattgtgcttagtccagccttaccacctgttttagaaaagcctgccttgataacaacccctgtagtggagaggttgaggcaggaagattgccgggagctgacggccagtctgggatacaattcggagttcaaggccagcctgggatacagagtgagataaacttaatcatcccagttccatcccttgtcagcttgggtcgtataaacatctccataaaacata

SEQ ID NO: 21768 - DNA, 1187 bp, Mus musculus
aagtgtgtgtgtgtgtgtgtgtgtgtgtaaatatatgtatatatgaatataactcaatggtagagcatttgcctagctccgagttgaattctccgtacaccaagaaagaaaggaataatggaaaaaaaaaaaaaaatcatgagagcaattgcatgtcacagacttcctaaagcaaagcagtgtgggagtgtgagaaggaagtgacaattagactttctgaatgtatagggagaacggagcgtatcaaaagtccagtacccaggctgagaccaaagtggtatgagagggaggatctgtattctaaattttcagtcaaaagcaatataataccactgctaatgaagtatatgttcttagaaaggtttttggctttggctttcttaactagattgcaaagacacgttactctttttaggcgacaactttgaaagaaagcataaggtgaaccctagaaaaaagatacaaatttcagaaaatggatacaaaaggataaatcgaagtttatgccttgatatacaaatgggaaagccataccttatatagcagagtggcgcagcggaagcgtgctgggcccataacccagaggtcgatagatcgaaaccatcctctgctagtttgcattttccttccctttacattgccagtgaaatcttgtccaaagggtttgagagcaatcagaaaggaaaagaaatggtactggagaaacagaaaactgggcgatacagaaatcttcaactttttaaagaatcacgacaccacagaacaccacagtgtcttattttctctattgcaggttctgtgaccatctctgcctctcgtccataccttcttgactgtaaactaacactggagaggctctggctctggctcactctcatagcttgcactaggccctgaactcagtctggagtactagacccaaaaccagattttaaaaatgtaacaaatataccgaagcttggttagagcttcggggttaagtaagctttcagaaaactggcaagtctgaaagagcatggagaacgaaggactggaaccgcctgtccccgccacgacttcccgcgacttctgcaaagctggaaaaggagcaggagtgggtcataacctaagagctcctctgagggtctatcaccttgcacttggtcatcccctctcccgagataaatacatgataattgtgcaactca

SEQ ID NO: 21769 - DNA, 1192 bp, Mus musculus
cgccttactcagttcattccgttcatccatgtcagatatcacaggccttcagttcacatcccctttcccagatcgtcaaataaagttagggatatcaaaatctgtagaagagaagtgacaagagtatcaggatcagggtggaaaatgccaacgagaaggggcaataaagctgcgaatttcattgccagaaagagagagcgctaccggattggccgaagtgctactgggttcttagaactcttgcctcggattcaagaaatttcacatcatagcaccgactccggcactcggatccaggatatcctaactgcaaaccacagcctcccagggaagggctgtccaagtgtgtgtcacttccctactttcccctcctcctaccactctctccccacagtttcacttcttattttcagtaggttcaaaccttccattccagtaccctgggtacaactaggatctggctcattttcttaacaatcgattattccgacaggctagagcgtgtgtcaggatggccgagtggtctaaggcgccagactcaagcgttcgcttcctctactgagggttctggtctccgtgtggaggcgtgggttcgaatcccacttctgacacagttgctttttattattattatcatcttgcacctttcgtaatgaaatctctgttttgctgattgtatcagctaggaaagactttctttaattccgttttctgactttgagccatctagcttttttttttttttttaacacgatattttgacccgttgtttttctgtcttgtgcccttgaactcaagctaacccttttgcctcagctatctatacagctggaaatgtctttaatatgctttggtttcttagtgtttagttctgattattccttctggccatttgttacagttttgcacatgatcgattcaatcacataattcatcagttctgagttccttcttgtccgggtgtgtgtgtgtgtgtgtgtgtgtgtgtgttgcattctttcaattgacttccatttgattttaggcaacgctggctgatatgtgggggtgccccgctattttgtgggttttcgctctcttatttatagactgttccacccctctgtctgtccttcttaagtctcatttattttcttctgtcgttgtgctgttttggtgaagactgtgctaaacttcttttagattatgataa

SEQ ID NO: 21770 - DNA, 1064 bp, Mus musculus
aattaaaatcaatgtttgattaatgagtcagaagaaaagcagtatctagggctggggtaacgaaaggtacgctttatttttgttaagacgaaatatatatgtacaccatatagccaagttagtcccaagctgacaattgccttgtctcagtatcagtgctgggacacaggaatgagccaccacccgcggcctgacagtacttcattgtgaggtcgtctgggttctggtgagggaattgaagcctccagtcgtcggaagatgctgtcctaggacactttcactctccattacgaggctggacagagacttcagccttccgtattttcccttacacagcacaagattctgttcctttttgggcttttagagccttgcaaatctggcagccctttgctttttttttttttttttcaatctttcagctactgaaatttaccttcatagattttaagatatagctctattcatgtagtcgtggccgagtggttaaggcgatggactagaaatccattggggtctccccgcgcaggttcgaatcctgccgactacgggctcttttaaatctcaaacttgttgcatctacactgatctctattaagaggatttccaggtctggcgatgtatttcaggtctggctagtgtatcatgaggttcacttccattttctttctttttttttttttttaatgctgcaccttcgccgcagtctcttttcggtgaagctcacattctggtctagtctttatttcctgtcttacatgtttggttagaagcttcaggtactgcacggtttataatttcattttaggataggaactagtgcacaacaaaggctgaaacaaggacttttttttctttttctttggcctttcctattcctatcgaatactctcagagccagccgacccatcacgcaggcgcagcgatcgttgacttggcagcgaacgaagcaattccaggcttgggcgccggtcacatggcatataataaataccggaaacaatactgtactcagaggctaagggaacttcagaaacttccagtactgtccctgaactacttgc

SEQ ID NO: 21771 - DNA, 1134 bp, Mus musculus
taaatatttatcctcagtttttttttgtttgtttgtttgtttgtttgtttttaagtatgaggccaaaacaaagaaacaaacctaagatctcagtcgtttgtgagtcgagaactaagtaggacagataagtagggcggtaggggaaggttagcactcataccatgaatccagtaaagagagcgcggagttgaaggacagcagaaagattttcgttgtagggtggaaagcaagtgtagtacagagaaacgaggaggattgaggatagagaggtacaggtactacgatgggatcatcaaatgcgaaagtgtcctttcagaggaagaaaatgattgcatgtgagaattccttaagtagtcttttaggttggaaactggtagcaccacacggattacacattcaaaatttaagacggccatcaaaataagacttaaaaatgaagggaagaaaaaaattcccgtggcagagaggacgaggtggccgagtggttaaggcgatggactgctaatccattgtgctctgcacgcgtgggttcgaatcccaccttcgtcgtctccatattttaaattacccaaagcaatagtcggtgattcctatgctccacgtttttcaaattcaactccttgtgtatccatcacagaaaccacaacacttaccagctgtggaactttcaacaatcacagcacaccatttctcatctgctatgaaggctttgatttgtacctcactacagcaccactaacctagtgggagattgtattgtacctttctctactttcagcctcgatgtcacaggaaagtgcttgggaatcccctttgttttgtttcagtactagatggtagataaacacaagacttcacagcttctttaagttacttaacaggaacttcaagatttattttcaaaattccattaaaagtttccttttaactttatgcttagaagaaatttcaaatttatggacgatgttgtaagaaaaccacatatacttttatgagaatttacctacttgttctttctctcccacaggcccttgctttctggcttgctctgccctttcttgttctctctgttgctttttgaaacacacccaaccctggtgccaaaaacaaacaaacaaacaacaaaatagtaac

SEQ ID NO: 21772 - DNA, 1194 bp, Mus musculus
agtattcagtcgaacttcttttatattttaaagacagctctctaggtaaatccggaatgctgggatctaaaggcttgccaccacttctgactcagcttaattttcaactgcactctgggctttcaaattgctgcacgaattgagatcgtaaaacgtaaaatacttaactttgtgatgcacacctgtaattccagaactccaggaggctgaggcagaagaactgccagtcagggctacagaacgatactatttgtaaacataaaaatttaaagaaagaggtggggaaagaaggaagaagaggaaagagtggatttttgttttactctattattctgtcaacgggctggcagtaggggttgtttcatgtcagaggaaccaactgcgtgtgttagtaatggaaattgcaaggtgaaaagacgagtttctgtaacacaagtggtttaaattgttcaaatcaaacatttgttgaatttacttagcttgaaactagggctataattaatttaaggttacagctaataataactagagtagaacttcatccctgtggcgggccagtggcgcaatggataacgcgtctgactacggatcagaagattctaggttcgactcctggctggctcgaccatgtctctttttaatacaaaggagaaactttcttgtattcagatccgtaagaaaaacatattaagtcttgaaaatctgactcttactatatctttgtcttgtatgtcagtgaacagcatacaaacagaaaaggactatctatagacatcacccaatagggtatgtggaaaacactgtgttgaggaaaagaagtcagtactgcatgttgtaattaaaatgaattgtccagaccaccaaacctagagttaggatgtatcaccggttgccaggtgatggagaaagataattttgaagtcaggaaacaacgacggcgttgtaacacatgtacacgaaaaaccagtaaattgaacagtttaaaaggctgaacttttttgaaaatcagagtatcagaggaaaaaactaaaaattgatcaatattttattggctcatccgcaaccacccgtccccgcccggagccgggctccacagttggctatacttctgtctctgagcacttccgggagtggtgagagtagggacagagactgactcgagaaagcgggctgagaaacttacatatttgaaac

SEQ ID NO: 21773 - DNA, 1387 bp, Mus musculus
ccaagtggatctcgaagttcgagaccagcctgttctacaaagctactatcacattagatacattaaggcgactgtcacaagataaatgagaacagaaataacagcagtttaaatggttcacgtactaaaacactgtagaggttttttgtttttttgggttttttttttagctgtgtgattccattagtgatttttctcactatcttattgattcattaaaagatattccaagtatccgcaaataaagggagaatgacgagatctgcttcttttccacttacatcctatacagtctttttcttgtttaagaatgtgccacattaaaaggtggaagaaacttgttcttatataaaatgaatgagccgctaggctcctgggctgctgagcgcccctcccccgcccgcaggcacttccgcctgacgtttctgttttcactccggtccgcaagttccctataagagggaccggccttctccacaaagccatctgcttcgtcttagagcagtacaatcttgtcttcatcatgtctggtcgtggcaaaggaggaaaaggcctgggcaaaggcggcgccaagcgccaccgcaaagtgcttcgggacaacatccagggcatcaccaagcccgccatccgccgcctggcccggcgcggaggagtgaagcgcatctccggcctcatctacgaggagacccgcggtgtgctgaaggtgttcctggagaacgtgatccgcgacgccgtcacctacacggagcacgccaagcgcaagaccgtcaccgccatggacgtggtctacgcgctcaagcgccagggccgtactctgtacgggttcggcggttaagctgctcagtttcttccaatgctacttaaaggccctttttagggccaccacaaaatcaaaagagctaagttgcttttcagtgttctttttgtcctggaactctgtagaccaggctggccttgaactcagaagcctgtctgcctttgcttcccgagtgttgggattaaaggcgtgcgccacaagacctggccagtgttaagcttttgtagaactatttactgcagacttaggggaatcccaatagagccttctgcttgggacagaaggttaattttctcgggggatgaaaatagtgtatgaactcaaactagatgtttggtttggctggattgggctgtatggaggttctgtttacattaaaagtattctatgctaaccaatggaaaacagctggttttttacccttatcttgaaaattgcatcctcgttcagtccataattgggattacaaaggcaaaaccactgggtggttttgcacgcatttagttccagtaggcagacacaaggctgggctggtctatacagagaactacactgagaaactcctgtctt

SEQ ID NO: 21774 - DNA, 1187 bp, Mus musculus
gcctgggaaaagacgccagggatcaagtcctaataagaagaaaacagcggattctgagtactgtctactctaatccagcgaccacttttccaggaactagctccccggagatctgcggcgagtcaccggggtggaaatccgcacaggtcacgggctccagggggcgctgcgggcagcgaggcatggcccacctctgtctcgcccgcctagccacgcccaccaccgtcttctgcaccgccacatcctccgacctctactcggagggaccgcccaggatgctccttccggatgttcccgtccagatcacgacttttctgaatgcagcgaaagcacgcacatcccagttccttttgttgttgttttttgttgttggggtttttcgcccctcacattttcttcctttctaggtcattcctctacgcacaagccatatgtccacgactgctcccagtgagcactaccttgtggcccggcgcctctaaactctgaccgagccacgtggctccttctgcatgctctgacgaggtggccgagtggttaaggcgatggactgctaatccattgtgctctgcacgcgtgggttcgaatcccatcctcgtcggtctgggtcttttatttaagaatgaagatctatacgtaattgtaaattcaagtctagtcagagattttacatttaactatgaacccaattctcatttgcttctatcagcgtggtttcagcatattaagtcttactatgctctgtttggcttttaaccattgtgtttcgcttggtgtcacctgtgagcgaagtgtctggatgattgttttaatgcactttctcctggtgaattcgttcctgaccaccgtaagaaaaactaaaaaatcgaggtgagaacagagagaagagaaagaagggcaaggaaaggagacccagatgaagctgaagtccgttctttccctcactctattactttagtttcatttttggcattttcattaagtccctcttttagaaatcaacatgactacgagcactgaaaaatgaaagatcagagcgcgtacacacacgagaaccatcataccagactggaatcattactgcttagatactttgtacataatgaaacataggctgtattttcacatgtattttggaggatctactaagagtggctagcatcttgcaaattccattttctaatcat

SEQ ID NO: 21775 - DNA, 1162 bp, Mus musculus
gactatcaagttatggacaaattaagactggtaaaggaaaccctgtatggagtagtagaaacagaagaaggaaaactagtcctcccacgggaagaaggacacaagtatgttatcaacttggattacttgacccacttgggggccaagaaattaaaaggtgtggttaggtcctccaactactgttataggactctgacttggcagaagaaatagtcaaagctgcaaggcctgtgctatgactaatacgggacacttcgtatatactcctgagaagaagctcaggggcaactgattagaggcgtactgggaggtaaaatttacaaaaattaagccagctagatatggcaacaagtacttagtgtttatagacaccttttcaggctgggtagaagcttttccaaccaggactgagacagccaatatgatgaccaagaagatactagaagaaatcttcctgaggtttgagatgcccagataagtcagggactggccaagatattggagattgattagaagttacaggtagagagagtgaatagaaccattaagagacccttatcaaattgacagcggagactggcgctaatgattagatagctctcctaccctttgtgctcttcagggatagaaacacccttagacagtatagactgaccccccctataagttactctatggaggccccctccactggtaaaaatagcctctgtacatagtgctgacatgctgctttcccagcctttgttctctaggctcaaggcgctcaagtgggtgagacatcgagggaagaagcagctccagaaggcctgctccagaagacctagaagccccacatctagggcttccacgcagaaaaccttgagacttggtggaaaggcccttatcttgtactcttgaccaccctaatttctacccttatgggatcccttttgattttgcttctgcttttaattataggtccatgtgtgttaaataggcaagttgcctttattagaacaagagttagtgcagtgcggcttttagttttgagacaacagtaccatgccctaaaggatcaagcgtgtcagggagaagatagtgtctagttataagattataactactaacaactagaattgaagaatgaaaaattataacgtaaaaacaaaattctaggccttta

SEQ ID NO: 21776 - DNA, 1175 bp, Mus musculus
aactatctgggacctccagtttcttgaaggttatgctcatcatctcttgtagcctcccttagccttgaagcaggctgattcagactttgctgccactgaatatgagatcacctggggtgtagccttctgaatttgatggctatattgttatgtcaactaccactgctcttctctgagactctgctacctgctgagagacccttgagacattccagagacacatcctatcctgcacatccacctacaggctggctccaggcaccaagaatggattggtgggggatgggcctcccccccttataagcacattctcttagtaaactggcaggcagagaaaaatttgtcttggcttcattcttttctcgccatctagtctctctttcagccccagcctgccttccagaaatacctggttcatgtaggccatgagcctgcttactactttaacagattggcacctgaattgggggcctggaaacagtgggaaaacactgagggaccgctgtcttgtgtggagcgccacgagaagagaataatcagaagattgtattgggcacagtttgcaacaggtatttatgccagcactgtttgtttttgtttttgttttgtttttgtttttttttattaggtatttacttcatttacattaccaatgctatcccaaaagtcccccacacgctccccacccactctcccacccacccactcccacttcttggccctggcgttaccctgtactgaggcatatgaagtttgcacgaacaaggggcctctctttccactgatggccgactaggccatcttctgatacatatgcagctagagacacaagttccagggggtactggttagttcatattgttgttccacctataggattgcagatccctttagctccttgggtactttctctagctcctccattgggggccctgtgatccatccaatagctgactgtgaacatccacttctgtgtttgctaggccccagcatagtctcacaagagacagcactatctgggtcctttcagcaaaatattgctagtgtatgcaatggtgtcagcctttggaagctgattatgggatggatccccggatatggcagtttctgccatatccatcctttcatctcagctccaaactttgtctctgtaactccttccatgggtgttttgt

SEQ ID NO: 21777 - DNA, 1107 bp, Mus musculus
ctgaattgaatacctaggacattcactcagacaactttaatcctgttgcttttaacctttgactttgtatcttaagcagataggttgccttcacacaggatcaccttcagcaagctcagttagtcaccttagcagttactcatcactatgaagaaatgcattgagtgcatattcatatgtcctttgtggctttggtctgaacaggaaaagggtgtgcttatgagggtcagtcgtcagagaggggcagctggtttccttgagttcctatttacctaagacagagacaagtgccaaaaggccatgtttgtccaagcaaaaccaacacactgcactagttctcttgagactggtaagaagaagcaatacatagacccagacctaagacagacacagctacctagccaccgtatttccaagaagtgatcaagaaaaataagtaaatcttgtgccctcccccatcttcaaaaaataaaaaaggggggaattgtgcccttctcccagtcttgaataggctaaacaaacttggacaggtttataacctggctagagtcagtgcctggccttgccacattggtatttactacagagccttgaggagctgaccacctgctgagcttgttttgcaacacaatccaactgaaacaaagcaacaaaactcagctaaaaaaaggataggtctttgggttttccttacgtaaaagcagagctgaaaactaaactttgagccttcatttttgtctcttccagctgtcctattgcattcccagtctccctttcaggtgtacccagttctctgtgactactggacagttacaggaatatatctaccttaagactcagctataccactcttgggctaatacccaaaagatgccacaccatgccacaggggcaagagttccactatgttcacagtggctttatttgtgatggccagaagctgcaaacaactcagatgtcccacaatgaaagaatggatcataaaatgtggttcatttacacaaaggaatactacttagctattaagaatgaggacactatgagttttgcaggcaaatggatggaactggaaaatatcatcccaagtgaggtaactcaaactcaaaa

SEQ ID NO: 21778 - DNA, 1128 bp, Mus musculus
gaagcattttaatagagaaacaggacactgattttgaggatcctgactccaaagctaatgtccttcttcagtctattatcctgatactcgcagcaattaagcttcataatgacatttttttttcatttatttcagttctatcaaggaaagaaaaatacaatttaattccagagacaggattgcagtcaacacaatataaggtatattcttggtttggaatgcaggattcaaattgttagaaaagtagtccgcagattgacctgaagtttaaggataaatgtgtgtttccagtccagtggggtaactgattgtctttcacactctttggatagctcatgacccaagcatttgtcaaatggtcacttctcatttgctttctttgacttaaaagacttaattcaaatatatcaagttcctgtatatttgagactgtatagaattataattattttattgctaatcaataattgtcatggttttagtgtaagttctctagtgaactcctgaattccagggggtattagtgtttggagtcacaaaattattctggtgctaccttacctgtgactgtaagctctcgacctgataattgtttgataatcataatcctgaggccagtgaatttagctcagtaaagaatctggttcaagtatttttcctttttagaaaactgattgtgtcagttgttttgttcgattttgttggtttggtttggtttggtttggtttggttttctgagactgggtttttctgtatagccctggctgttctggaactagctatgttgaccaggctggcctcaaacttacagagctcctcctgcctctgcctccctagtgctaggattaaaggcatgcactacaaccacctgtctctgtgtcaaattttttgatctaatatgttccagtaattttataaataactttagtactatgaacaatttatccattgtgataaatacacatgagatgcatatttttctttttggggaaaatcatgccttatcactagtaaaagtttaaaattgtgatatttaatactgggtgtgtaacaatggcagtttacaaaagaaaaaaaaaaaggttattataatagaaacaccatggagaaagagacaaacttaaacca

SEQ ID NO: 21779 - DNA, 1146 bp, Mus musculus
gccaagtacgaaggcaacgcctgagagcagaggtcgcccaagcaaagagagagactgacttctatcttcgaaacgtagaacagggacaacacttccttgcagctgatggggatgctactcggccaaatagctcctggacattcacccagcgtcccactgagcaggagtttagggcccggaaagctgcacggccaggagggcgggaaagagcacggctggctaatgtcgaggaccaggcccgatccaacagagggctccttgccaagatctttggagcccctctacctgcagagagcaaggaaaaaccgtagtcaataagggactcctggtgatggaagaaatacctaccagccctgcgccattctgatctgcttcctgaagagtgtgaccatctaggcagatgttttctctattccacacaccaagagtctggtaaaggccttttgttggtgtcttttacctactttgaacaaatcctgtaagtgccagcctgagaaccttactcgtcctatccagggtgaagaccactggaggtgcctgttgtgttttgtttgatttctgattgcctgcctctttctcagtggacagctaacagtttctgactgaaagagtggacttgccctccactagggtagtggtctgtggtgtttgttcactgtggtggaaggctgaattagcaggaattggattagaggtccaatttgaggcttatatttgaaaataaaaaataatttatttttatatgctttttagtttttcattaagtaagtttcaacttcttttgaagccatacatgccgctcagttactttagcacaggcatgattctcctccacccatgaatctcagttactctatcagatatgatcccaatgctcctgtgttagtcagggttctgtagagtcacagaacttatgggtagtctctgtatagtaatggaatttgttgatggtttaccgactgtagtcttaactcccaacagtggtcaggagcacctgtgaatggaagtgcaagggtctagcagttgctcagtcccacaagacaagcaggtgaaggagggtcttccttcttccaatgtcattatgtaggtctccttagaagatgtggcccaggttaaaggtgtgtgccgccattcctggatctggga

SEQ ID NO: 21780 - DNA, 1188 bp, Mus musculus
ccagtctcagcacctcctttattaaaagtgagtgaaaatgtcagtggtaacatagacaaactaccatcctgaggcagagctattgcccacttcaaggaaacttgtgattctcctttttgaacaaggaaaaccccggggtaaacacaaatgcatgagacacaaaacttaagaggcctttgacaagtaggacaggagtagtccatactattttccacaattgtagtggagcaaataaatgaaacatgtcacacacacacacaaaatcaagcaaaaatgttaactttttcattttaagtgtgctgtcatgctcggccagcaaatacctatggtgccattcagtttcctgatcctaagacaaaaaaaatgaatctgttatgaaaaacaagaagccatccagggatattttcatggaatatgtgagttatgaaaagtttgaatattatgaattatgacatgtataaaaatgtttcttgcaaatgctaaaagactcagcgtcttccttcgatagctcagttggtagagcggaggactgtagactactaatgtggtgatccttaggtcgctggttcgaatccggctcgaaggaatgatcttttgaaacggtctcactatggtgggaatattaggactttcagagaatgcagtgaaccaatgtcacttgaaatactcaattgtaggatttagggtaaaataaacaaagctcaggtgctgtacacactatttttccacagctcttggaagatggagaagaaaggaaggtgctgcattcttcaaattgccaaaagcaattactttccacgaaattcagactgggtctgaaaatatgcctgtatatataaagatcgtctcaaattaaaggcctaaggtcctttataggaataaacttgactctccaaatatgaacttgtaaagattgttaattagtattaaagttcttattgtatttggggtgggggtgggggggttcgagtcagggtttgcttgcctctgcctcgagtgctgggattaaaggcgtgcgccaccacgcccggctcttattggatttttatactatcttttggtggtataaatgtcgattaaaaggcacctccttcgagccggattcgaaccagcgacctaaggatatcaacacctatactacagtcctccgctctaccaactgagctatcgaagggagatatatagcct

SEQ ID NO: 21781 - DNA, 1114 bp, Mus musculus
gcacaaggtcccagcaccgttgtttccgtgctctccgcgtcctggtccatttgtacgcacccctgtgcgattcccagaactggcggtaccgtctttcatttatagagggcgcaagtaaccccgggactgttccgtgacaaccaagccacaatctcactttttgctatgtaaaacaagatggcctcaaagagggggcaattctcctgccttaggacttctttcttccccttccctgcagttctgggattataaaacaccaaccctaactcaggaaactctttcttaaatactccattttactttctccacttcagtttttatcatcttgttcggattttattagacataaaaaaaatcatatcaacaaacacactaacaccccctccaccccacccccacccccaccccactcccactcccacaatttctgtttgatgagctgaaaataacagcgagcattgaattacatccagttatcaaaagggagtaaggtagcagccacttaccatcagaaggggaattagctcaaatggtagagcgctcgcttagcatgcgagaggtagcgggatcgatgcccgcattctccagttttgcatttatgcctgtttcttttcccatcataccctgctagaacaagaacaaccaaatccgttacttctaacctctatagttaaatttcagaagttctctcagcaacccggaagggcctagttcctaccacacactgttctccaggaaatggcttggagctctggagttggtatttcctgttttcctatcaagttctcacagctttccctttgttaacgcgcaaacgcgttccctttgttgagacagggaagcgtatatagcggtgtttggatctaggtcgtttgctttttttgtttcagttcagttaccggcactggaatatcccggaatacagcccaagatatggaaagaaatgtaggaccagctcttgtgggttggaacttactgtgccttgcagaaacgcctagtccaggactatctaatatattttatatccgaggcccaaacgttatctttaaagaaaaaaattgaactattttctatctttctgaaaattatttgcttagagaaaagttctgacaca

SEQ ID NO: 21782 - DNA, 1224 bp, Mus musculus
tctcccctttcacagttctacaggatacagaaaaattctgagctctagaaaagtatccttaaacaacacctcaacagctcttcatattcaaaagagtgtgtatgaaaaatttaaactcattttatgaagatggccatcacttataaaagataataacaacatcgaggttctaagtagccaaggtcaattttgaacttctaatcttcctgcttgtatctcccagttgctggaattacagggtgttacttcccagttgaaatatcatacacaaacccacaagtatatgtgaatataaacatatatttatgtacatatatgtatatacacatattttcatgtatatgtatatattatataatttatatattatataattttaggatgcctttccctaaaaatgatatgagcgttatatttggtacattaaatatggcaaaacatggcaatgtatttttgagctagggatacagttaagttgatagattcctttcccaacatctaaagagcaggtgtgtcatcgtccggaatccttacatgggaggaggaggcaagataagtatgcatagcagttcccacatggtctagcggttaggattcctggttttcacccaggcggcccgggttcgactcccggtgtgggaaactcattgttttacgaatgatcctagtacttgataaaggacttcaaagtgttcttaaagctgtagagtttgagacactatgtcagctcctttcttaacggagcaaggaaaatacctaaataaatgagaaaggcaatatgtgtattatacacagtagtctaaggtgtaggaatttctttataagcacatgatgttttatcattaacaaagcatttttcacttatctagttccttgttgcaaattcttgctggatttagctttctggtttcacagtaggaaaaactgagtgggagatttgcttgatttggatcactaacagggagggaaattagagctcaatgtattctttccttatgatctcagacagggagaagaagacaacatgagtaatatgagtaaaaccattttggaggtggataaagaactttagcaacggaccacactctgttagggtgtcaatccttaggcattaaaccacgaagctgttcagagcatctaagatgctcaccacaaccttacgtaaacgtgaaaatacgtttggatttggagaatgaacacgatgattctccccaaagtgagagt

SEQ ID NO: 21783 - DNA, 1195 bp, Mus musculus
ctctaattccattggtagatcacgaattcaacaaatcattaaatcctaaaaccagaagggtaggtagtcaatgtgtgatatacgttaagatgtagaacactgaacacagattactgcacttgtagtcgtggccgagtggttaaggcgatggactagaaatccattggggtctccccgcgcaggttcgaatcctgccgactacgattgtgggtttttgtggtttccaagtgtacttcaaagtaaacaatttatctcggagattttataaatgacatcaatgacttctccatttctctaaattagatataaacttactggttggtattcatttaaaatagaaaataactgctataacataatgaagtttctgtttagtgtttcacaggtgttttttttagttttttttaatgaataaattgtaaagtaaattaacttaaagacagtaaaacttcagctctagttttgcacctttgaaatgaaataaaaagtatttcccaagtgtaaccctaagacctcagcataatactgtcacttcctctttctatatgaacacaaacctataggtgggccagtggcgcaatggataacgcgtctgactacggatcagaagattccaggttcgactcctggctggctcggtacttttttgtagaattctcaagtttctcctgtattgaatttctgtatattacttttatatttcactttattgttttaaaattttcaccttacacaaattaaatataggctagaatttaactttgccactcttctttcatacaaatcggttttatgaaagcacatcactctttacctacaatacatgactgtgactcacactctccttaaggtcttcccttaatatcaaacctcatctacagaaataaatactctactctcaagacctctgccatttcccacttccctcttttattgctactattgctattttatatataccagagatgcgctcagtatgttttatgttaaaaaaaaaaaaaaaagctctagcagaggatggtttcgatccatcgacctctgggttatgggcccagcacgcttccgctgcgccactctgctcctctagacaggctttcttaattaccttttggtatttctctgttccgtttttgtttttggttttttttgtttgtttgtttaattggttggttggttggttagttggttggttggt

SEQ ID NO: 21784 - DNA, 1149 bp, Mus musculus
ctttgatatattcaaatctggtttggattggctcatttcaccggctgagaaataacgtatcatgtgcagtctaggcacaagaagcgggaaaataaaaccaaaggcgggtagagaacatattttccagagtggtttgtggatatctagggtcatgagatttcaaattcaagatttctttgcctcaaattctttaagcgactcgatacaaggatggaaacataaatttaagaaagctcgggtgtgccagactaaaacatgagtgtagcagtctgtactagcaggagactgtgtgcaggagttaaccaatcgggtgtgcaggagttaaccaatcaccacttgaattcctcagccaatagtactactgcgcgggacacttgaaaagcagacacgcctatcaggatgcttctcggtgggaaggaggggtacgagcgcgggtacgtgtgttgcgcgtgtgcgaacgcaagcgtacttaaaggccaaagtgcgctacttaggtatctcacttttccctacggttacttgccatggctcgtactaagcagaccgctcgcaagtctaccggcggcaaggccccgcgcaagcagctggccaccaaggccgcccgcaagagcgccccggccaccggcggcgtgaagaagcctcaccgctaccgtcccggcactgtggcgctgcgcgagatccggcgctaccagaagtcgaccgagctgctgatccgcaagctgccgttccagcgcctggtgcgcgagatcgcgcaggacttcaagaccgacctgcgcttccagagctcggccgtcatggctctgcaggaggcctgtgaggcctacctcgtgggtctgtttgaggacaccaacctgtgcgccatccacgccaagcgtgtcaccatcatgcccaaggacatccagctggcccgtcgcatccgcggggagagggcttaagggtttctgttaatccacacaaccactttaaaggctcttcttagagccacccatcttccaaaaaaagaactgtagcgctttttccaacttgtgggtattaatcagtttcatttgtgaaagtgctaggtctcctttcatcacaccgatctattataagcaagcaatattttggtaagtgatatctttaccctttttcatggaaattgtactctta

SEQ ID NO: 21785 - DNA, 1186 bp, Mus musculus
tagacaatttcaaaacaggaaaccaactttacatgtagctagaatttatatatgaattttgtatctagggagagatttttattgatactactaacaaaataacttttaaaagaaaaatggctttgactttagtacagtatcaaaccaactttttcctaaaaactatttcgtctagttttcatagagtctattggctaaacttggccaatcagaagaaagaaacgagtcttcatttgaatagagccctgtaaagttcggtccgcttctccgtgatacttacgcaactaaccactgagcgaatatgcttcctttgattggacagttagtgcttgacgtttgcagactctctgacaaggacagccaccgctttatttaaagagcaggaaaggaacggaacagttcaatatctcttttcttggcctaccttcattctctgttcactatgcctgagcccgccaagtccgctcctgccccgaagaagggctccaagaaggccctgaccaaggcccagaagaaggacggcaagaagcgcaagcgcagccgcaaggagagctactcggtgtacgtgtacaaggtgctgaagcaagtgcaccccgacaccggcatctcctccaaagccatgggcatcatgaactcgttcgtgaacgacatcttcgagcgcatcgcgggcgaggcgtcccgcctggcgcattacaacaagcgctcgaccatcacgtcccgggagatccagacggccgtgcgcctgctgctgcccggggagctggccaagcacgccgtgtcggagggcaccaaggctgtcaccaagtacaccagctccaagtgagtgctcaagactcagctcttaacccaaaggctcttttcagagccactcaagacttcaaaattggagctttaatgctgacttagtgactaccgggaaaataactgacttcatctgcaggattgtgtacaaacacttatggtttagtaaatcaaaagatagacattgcccatcagttctgtctggtccacttaaatatgctttttcttagaagttctaagaaccctgtcatacctatctaggtccagtccttgagtttcaaaaggccaaatacccaaatgtttcagttttccagttcagggaagtaaatctgcatggtttgccactgtactggctagttttgtctcaacttgacacagctggagt

SEQ ID NO: 21786 - DNA, 1160 bp, Mus musculus
ttttggtccggatagtaaactgctcccttacatctccttaaatataaagtaaggaaaaagaaaaaactcagttcgggtaaccaagttcaacaagtaatccttggggccgctgtggtatcgccaaaatctacatagtatctcttattaaaatgttttgacgaaaatgtaacaattacggtacttaatggtaacaatgtggctgaggaagcaatagttaacaaagaggagtaagccaggtaataaaccagatttctattggtcacaaatttgaagttgagacctgttatccaattaccaagtacttccgcatacatcataggcatttgaagatttcaaccaatcaggagcatgttccttctataaaaggaacccagaacctaacctctgcatttcctatttctttgtagaaatggctcgtactaagcagaccgctcgcaagtccactggcggcaaggccccgcgcaagcagctggccaccaaggccgcccgcaagagcgccccggccaccggcggcgtgaagaaacctcaccgctaccgtcccggcaccgtggcgctgcgcgagatccggcgctaccagaagtcgaccgagctgctgatccgcaagctgccgttccagcgcctggtgcgcgagatcgcgcaggacttcaagaccgacctgcgcttccagagctcggccgtcatggctctgcaggaggcgagcgaggcctaccttgtgggtctgtttgaggacaccaacctgtgcgccatccacgccaagcgtgtcaccatcatgcccaaggacatccagctggcccgccgtatccgcggcgagcgggcttaataggcacgctttctacactggcacgtaaaccaaaacggctcttttaagagccacctccattatccaccaaagatgctgtagtacaagtttgtagagtgttccagggtttcctattatagcctttcttgacaatgatgagcaccacccgacgaagcagtctgagctgcctgtttttggaaacaaggctttcaggatatcatttcatcttgtatgctttcaactagagttggggtagccattttaagccagaaacaggtacgcacttcagtttgggattgtgttacaatccacacagtaaaagtccaacagagttaacgttttactttgtttcaccattcaa

SEQ ID NO: 21787 - DNA, 1117 bp, Mus musculus
ctcctgaaggacacaaactagtgactaagaactccaagagaaaagcggaaaactcatattcccctcgccacaggggctgtgccttccgcctagcaataggattcagccagtgagttagaggggcggatacagaatcaccttcccgcccgcgccttttcagtcctctaaaaggtccgcattcgccatatatataccagctgtagagggcgcttaaggaatttcaactcagtgctccatagccatgtctggtcgtggtaagggaggaaaaggcctgggcaaaggcggcgctaagcgccaccgtaaggttcttcgcgataacatccagggcatcaccaagcccgccatccgccgcctggcccggcgcggaggagtgaagcgcatctccggtctcatctacgaggaaacccgcggtgtgctgaaggtgttcctggagaacgtgatccgcgacgccgtcacctacacggagcacgccaagcgcaagaccgtcaccgccatggacgtggtctacgcgctcaagcgccagggccgcaccctctacggattcggcggttaagctcacctggagcttctttctcaaaggcccttttcagggccacccactttgtcataaaaagctgtttgcatttctcgacttgtaattgttctgtccctaaagttcaaaatggcggctgagacttttcaaaaggtaaatctaggcaatgaaagtgcttccccagtagtttgtagtaattataacacatcaaatccagacaaggtctactgctttctcccagtgcttaagctgagtcttattcccttgaaggtgctaaatacaaagggcaaaagatacttttgaagagatgatgaacaaaattcttaggcctaaagagctgttttaacctgtgtgctctttcccctgtatccttgattacaaccctaacgtttcacttctgggctaaagctcaaggctgccagctcttcctgacaacgttgctccagagggaaaactccattactagttaacagactggttcatattttttaagtggccttattacttagcaacttagacttgttaccctgctatgagccaggctttccacattgagaaggattcgactactaaatggcttgttga

SEQ ID NO: 21788 - DNA, 1216 bp, Mus musculus
ctacaataatcattcccccggtatgcactgctttcccatctagtgccaattcctacagcttggtgcagatagccctggaagcttgtgttgttgctttctcgaaaaactcaaatttccctatgtatttccgtgaaaacaagttatttcatagagtcctgaaatgataagaatgtgaggaaccatgtcctgaaacaaaagtttgctaatgaccgcgagagaagtagtatttttaaggaaaaccttaaagttgtcccaattttcgtcaagtttgaaagagagttggggcaatcagagaagtttcagggtgccgattttgaacataggtgcacaaattaaggcaagaatgtagcctacaggctctcggatcagtttcccccaagtccctaattatttcgtgcccatattttttatatttttatacttttttgaggggcaacaaacacagccacaaggcaaagctgaagatcctttctctggcaacgcggcgcacggcgcacggcgcagggaaccaatcaccacgcagcttctctctatataaacccagagcctgcagcactgggaacaaccttctctgactgtttgtgcttactttttgctttactagtaaagcttagaacatgtccgagaccgctcccgcggcgcctgctgcccctgcacctgtggagaagacacctgtgaagaagaaggcgaagaagaccggcgccgctgctgggaagcgcaaggcgtccggacccccggtgtccgagctcatcaccaaggctgtggccgcctccaaggagcgcagcggcgtgtccctggctgcgctcaagaaggcgctggcggccgcggggtacgatgtggagaagaacaacagccgcatcaagctcgggctgaagagcctggtgagcaagggtaccctggtgcagaccaagggcaccggcgcctccggctccttcaaactcaacaagaaggcggcttccggtgaggctaagcccaaggctaagaaggcaggcgcggccaaggccaagaagcctgcgggagcagccaagaagcctaagaaggcgactggtgctgccacacccaaaaagacggccaagaagactccgaagaaggcgaagaagcctgcggcggctgccggcgccaagaaagtttccaagagtcccaagaaggtgaaggctgctaagcccaagaaggcagcaaagagtccagccaaggccaaggctcccaaggctaaggc

SEQ ID NO: 21789 - DNA, 1101 bp, Mus musculus
cgatgcgctcgaagatgtcgttcacgaacgagttcatgatgcccatggccttggaggagatgccggtgtcggggtgcacttgcttcagcaccttgtacacgtacaccgagtagctctccttgcggctgcgcttgcgcttcttgccgtccttcttctgggccttggtcacggccttcttggagcccttcttcggggcaggagcggacttcgcaggctcgggcatggtagaaacaagcaacaaagagaaagataaaacaggaaatgagatgtgggagaagcttcgttcttgccattttatagaggttctatgcaaataagggactcaaaagtagtcaactctgatttgaaggccagttagtgacaccattacccaaattagattgtattgtacctctttccttattggctgcagaggaaagatagttttaaccaatcacacatcagcttttccacttccatgtacgagtataagtagcttctcgtctggccttttagtaccgcttcgttgtaattctttgcaattataatttcctaccttcttgcgtcaatgtctggacgtggcaaacagggtggcaaggctcgcgccaaggccaagacccgctcctcccgggccggcctgcagtttcccgtgggccgcgtgcaccggctgctccgcaaaggcaactactcggagcgcgtgggcgccggcgccccggtgtacctggcggccgtgctggagtacctgacggccgagatcctggagctggcgggcaacgcggcccgcgacaacaagaagacgcgcatcatcccgcgccacctgcagctggccatccgcaacgacgaggagctcaacaagctgctgggccgcgtgaccatcgcgcagggcggcgtcctgcccaacatccaggccgtgctgctgcccaagaagaccgagagccaccacaaggccaaggggaaataagatctttcttctaatctcgtaaaaaaaacaaaggctcttttcagagccattcacttaattcagtaaagtgctgaaatactataagccttaagtggatttaggactaaaatttccgatttgtattcaatggcataagaaaattcaacctgtcaattgtcccc

SEQ ID NO: 21790 - DNA, 1179 bp, Mus musculus
gcggatggccagctgcaggtggcgcgggatgatgcgcgtcttcttgttgtcgcgggccgcgttgcccgccagctccaggatctcggccgtcaggtactccagcacggccgccaggtacaccggggcgccggcgcccacgcgctccgagtagttgcctttgcggagcagccggtgcacgcggcccacgggaaactgcaggccggcccgggaggagcgggtcttggccttggcgcgagccttgccaccctgtttgccacgtccagacattgacgcaagaaggtaggaaattataattgcaaagaattacaacgaagcggtactaaaaggccagacgagaagctacttatactcgtacatggaagtggaaaagctgatgtgtgattggttaaaactatctttcctctgcagccaataaggaaagaggtacaatacaatctaatttgggtaatggtgtcactaactggccttcaaatcagagttgactacttttgagtcccttatttgcatagaacctctataaaatggcaagaacgaagcttctcccacatctcatttcctgttttatctttctctttgttgcttgtttctaccatgcccgagcctgcgaagtccgctcctgccccgaagaagggctccaagaaggccgtgaccaaggcccagaagaaggacggcaagaagcgcaagcgcagccgcaaggagagctactcggtgtacgtgtacaaggtgctgaagcaagtgcaccccgacaccggcatctcctccaaggccatgggcatcatgaactcgttcgtgaacgacatcttcgagcgcatcgcgggcgaggcgtcccgcctggcgcattacaacaagcgctcgaccatcacgtcccgggagatccagacggccgtgcgcctgctgctgcccggggagctggccaagcacgccgtgtcggagggcaccaaggctgtcactaagtacaccagctccaagtgagttcatttaactcacactcctaacccaaaggctcttttcagagccacccatactgtcactttaagtgctttgtaatgcttggcttttgtattataacgctgggaaatgacacaatattagctaagtgtatgttagtgtgaagaatatgtttgcctcagtgtaaccaacgcgctgccagatacactatcaatttgtaaactacacagt

SEQ ID NO: 21791 - DNA, 1464 bp, Mus musculus
tcaataaaaagtctcagaacaggaaatagtaagtgttcttaaaattgtacttaaaaccttggattcagtggtcctaaaccttcctgatgctgggaccctttactacagcacctcatgttgtggttaccctcacccataaagttatttcactgctgcttaactgtaattttgatactgttatgaattgtaatgtaaatatctgaaataatacggggggtgtcccgatttataggttcacgagactaataacattactttctatttggtctgataaaagacaaatttcttttttcacaatacataaattgtcactcttgagggcaatgtgttgaattttcaactgctggctctgctcttgtcttaggacccgccttgtctcctcagccttttcataggataaacgccagaagggcgggaattgaccatggttcacgcccccttcccttcaggttttcaaacaggtccgcattggtattataaaagccaggaaggccgcttgttacagtcactggctagtgagcttccttcctagtttgctaacatgtctggacgcgggaaaggcggcaagggtcttggtaagggtggtgctaagcgccaccgcaaagttctgcgcgacaacatccagggcatcaccaagcccgccatccgccgcctggcccggcgcggaggagtgaagcgcatctccggcctcatctacgaggagacccgtggtgtgctgaaggtgttcctggagaacgtgatccgcgacgccgtcacctacacggagcacgccaagcgcaagaccgtcaccgccatggacgttgtctacgcgctcaagcgccagggtcgcaccctctacggattcggcggctaaacgtactcatttatttttcttcacccaaaaaccaaaggcccttttcagggccactaccttctcacttaaaggagctgctcttaggtggttttctggaatggggtgggtgctgggactggctcgatacatagtatctgtttaggcaggtccacctgtctatcttcagtattgatagcctaaaagcaggcctgttgtctcattctttaatgctgacattctcaggagagggctgagggtcagtcaagatccttttttccaagtcccttaaggtatagatgctatcctgtctcaaaaccaaaccctctaatcaatccaggccttggaaacctaggaacactgaattatgttcaagttttctaacctggagctttctacaatttcttcccctccctcctttcattctttccatgtattctgtgtaatagccctggcctggaacttactctatacaccaggctcacagatatcttcctacctctgcctcccacgtactgggattaaaatcgtggtccaccacacccagctttctctaacttcctaatctgtaaaataagcaccagagattgacgtgtaaatcttctatctattcctcaaggaaaacttcatatggt

SEQ ID NO: 21792 - DNA, 1157 bp, Mus musculus
ctgtttattcttttcaaacaagacgtcttatctctgtgtctctctaacttttgacatctgtaagatttactcccaaccgtttactttcactctatgatttcctttctgtagactaaattgcactgccttggggactccgggaagcttggaggtcgactggatcttttctgatcttccttttcctttactgaaccgaaagatcaaagttttaaaatacagtttttccaggaacgtttcgatggtttcagaatatttggtattaaattgagcccaagctttaacttctggaatttcaaaatagagcaacttctgtttttaaaaatatatatacaatttaatctaaagcgtttagaaagaaaccaatttgattaaggagtgttaagaagcacagtcgcttgaacattattatacaagattactgcttgaccaatgggaccgtcctttgtaacctctaaccaatcaaacagaatgaaagtaagacttaatttgcataagactgcctacaaataaggaaaccgttcacagcagctcactttctttttcttcctaagaaagagatctgaagatgcctgagccagccaagtccgctcccgccccgaagaagggctccaagaaggctgtcaccaaggcccagaagaaggacggcaagaagcgcaagcgcagccgcaaggagagctactcggtgtacgtgtacaaggtgctgaagcaagtgcaccccgacaccggcatctcctccaaggccatgggcatcatgaactcgttcgtgaacgacatcttcgagcgcatcgcgggcgaggcgtcccgcctggcgcattacaacaagcgctcgaccatcacatcccgggagatccagacggccgtgcgcctgctgctgcccggggagctggccaagcacgcggtgtcggagggcaccaaggctgtcaccaagtacaccagctccaagtgagttcatttaactcacactcctaaaccaaaggctcttttcagagccacccaacagttcaaaattgagctatgcgcttgttcttagtacccgcagtaccacctttatatggttctttatttactgggacaaagttcctctagtctattcaggctcgtcaaatcaagtatttaagataaaactgccaaattggctacttctgcagtgaagagag

SEQ ID NO: 21793 - DNA, 1410 bp, Mus musculus
aggcaggactctcggaggagcctgtgttacttccttcacttaagtgcagatttgtaataaaaatcataatgccaaaggcaaggttttgggctacacaagaagctaaccacttggagaatcgtctttgatgggtcagaaaactgtacagtccaagatcagtttataatttacgaagaaaatagaaagttttgtttctctgagttgaaatttgctgaacaccgcaggaaatattgcaagtttttggcagaaggcttaatgctttgctcactttttgagatgtgcatgaagcccgagacttcggggaacattattttttaaaaatcgggcaattcgatgtagggaattttgacatttttggctttttttgaggtgtaacaaacacaactccgcatctgagaggacactccgcggctgccagcgaggcgggctggacagcgcaccaatcacggcgcagctccgccctatataaacgggcgggcgcagcgccgcggcccgagtcctggccagtccctctgcttccggctcgagttctctctcctcacacgcttcgccatgtccgagaccgcgcctgctgcgcccgccgcaccggcccccgccgagaagacacccgtcaagaagaaggcccgcaaggccgcaggtggcgcgaagcgcaaaacctccggacccccggtgtccgaactcatcaccaaggctgtggccgcctccaaggagcgcagcggcgtgtccctggctgcgctcaagaaggcgctggcggccgcggggtacgatgtggagaagaacaacagccgcatcaagctcggcctgaagagcctggtgagcaagggtaccctggtgcagaccaagggcaccggcgcctccggctccttcaaactcaacaagaaggcggcttccggtgaggctaagcccaaagcaaaaagggcaggcgcggccaaggcgaagaagcctgcgggcgcagccaagaagcccaagaaggctgcggggacagccaccgccaagaagagcaccaagaagactccaaagaaagcgaagaagccagctgcagctgcaggagccaaaaaagctaagagcccgaagaaggcaaaggcaactaaggctaagaaggcgcccaagagccctgccaaggcgaaaacggtaaagcctaaagcggccaaaccaaaaacctccaagcctaaggcagctaagccaaagaaaaccgcagccaagaaaaagtaaattttctttggccaactgcttagaagcccaacaacccaaaggctcttttcagagccacccacaactctcagtaaaagagctgttgcacattcacagggggtgtggttagggtgggaacaaaccttagtgggctgagcttagcagaggaggctggggatatgtgggtgtgcgcaatggtgttaactctagcttagctat

SEQ ID NO: 21794 - DNA, 1158 bp, Mus musculus
gtggcgcgggatgatgcgcgtcttcttgttgtcgcgggccgcgttgcccgccagctccaggatctcggccgtcaggtactccagcacggccgccaggtagaccggggcgccggcgcccacgcgctccgagtagttacccttgcggagcagccggtgcacgcggcccacggggaactgcaggccggcccgggaggagcgggtcttggccttggcgcgagccttgccgccctgcttaccacgtccagacatagtaatagtgctgtgtaagtaacagaacagtaaaaacaagttaccaagactgtacagacgcggcagcttttatagtaggttcctgggtagtaaacgctactacttgattggttacaagtgagctcattgatatagccaatagaaaatctgcttctggaaacttcatttgcataatcccacccatgaacccactactttttcttcttccaattagctgagactggttcgaaatccttcattagcataaacgccctataagtaggagaagtccgttcccagcccacactgaggttcctgtgtttggaaatccgaagatgcctgagcctgcgaagtccgctcccgccccgaagaagggctccaagaaggccgtgaccaaggcccagaagaaggacggcaagaagcgcaagcgcagccgcaaggagagctactcggtgtacgtgtacaaggtgctgaagcaagtgcaccccgacaccggcatctcctccaaggccatgggcatcatgaactcgttcgtgaacgacatcttcgagcgcatcgcgggcgaggcgtcccgcctggcgcattacaacaagcgctcgaccatcacgtcccgggagatccagacggccgtgcgcctgctgctgcccggggagctggccaagcacgcggtgtcggagggcaccaaggccgtcaccaagtacaccagctccaagtgatcctgccaagtaagcctccgtagcgaattccaaaggctcttttcagagccacccactttctcaaagagagagctgtggtagaacagtgcgttcagttttacccagaagcagatgacaggtgcttataaatcttaaaggcagtgggatacttttagcttaatttcagtcttggttacatttagctacaaccattttgttgggagaaaaaaaaaaa

SEQ ID NO: 21795 - DNA, 1192 bp, Mus musculus
aaaaaaaaacaaaacaaaaaacaaacaacaacaaaacccctaacagttgagagtcccagactgatttcctcctggcattgtatgtgatcttccccaggaaaatagcaccctatgcacttgacatccgtttggtttctctgacccttgttcacacacaaaatttctaggtcattaactatcagtggcatctaagcatcagggagatctttacagattcgcagaatatattcttctattgctttaaaagtaacatggaatgcatttagtgaagatttaggtgctataatttaaaatccagaaaacaaaaaagcttggattcatattttgtcccaggcagctgaaaataagcattaagaaaaaaaattacatgcacaaagctgtccaggtttgtcttttgtttcccagtatagtcaaggctacccttcagctcccagtcttcttgcccaaggctcctcagtcagtcatggagttacaagtcaccacattgcctcctctctctctctctctctctctctctctctctctctctctctctctctccttttctctttgaacaacagtcctagggactgagaataggccttccacacacacacacacatgtgctgtagctccatcctgcacattccacttcaattgctccatctaatgttttcccttcaagtcaaaaaaagaaaaaaaaaagtgaaaatttataaagatttgtgatttgtactttctaatattccacaaaaaaatagaggctcaaaataactaaaaacacaaacaatcacataggtatgaatacataaatcatgatttctaagcatgagcctagttacttaaaattattcttatgacgtgatataacatgacgcattttttttgctttacatgacatttattatatatacatcatatatatccatacatgacaaacacttaaaagcattcttttgctaggagcatcttaattttgcagcaagtattctcattttctacgtctgtgtgtctttcttatcacaaatttctacagtgaacatttttatagaatttaaaatggtgcttctcagttgttccttgagttctgaaactatggtggttaatctgctagtatcacccatttgcactgtcttgaggttacagcatccagcactgttgagtggtacaaacgatgtcaggtctgctcctcctgtagagagggagagagaga

SEQ ID NO: 21796 - DNA, 1450 bp, Mus musculus
attaggtctctgactcgagatagggaatatgaagtttgcagttagggtgctcaatttgagatgccttttcaatgtttatgtctacccaaacaaaactgccgggaatagattaaactttactgacatgggacagtcttggcatattttacctctgttttggacatctaacctgagtcctcacaaagaaaccatcaactaatttaatacaagacagaaataaaagcaaacgagaaatggggatgtctgctttgtggaatggccccaataagcctttctttcatgagaaagaatggggtcggggtggggaggagggaatgaagtttttctgcaggatttaaatgtggtctttaagagacaccgcatgcaaagaatagctggggcttgctagccaatgaaaacattcagattccaatgacgcatccttttttctccacccccttccaagacccggattcggaaaccccgcctaacgctctagttttcaaccaggtccgcagaaggcctatttaaagggacgattgctgtctccctgctgtcataaccatgtctggacgtggtaagggtggtaaaggccttgggaaaggcggcgctaagcgccaccgtaaggttctccgtgataacatccagggcattaccaagcccgccatccgccgcctggcccggcgcgggggagtgaagcgcatctccggcctcatctacgaggagacccgcggtgtgctgaaggtgttcctggagaacgtgatccgcgacgccgtcacctacacggagcacgccaagcgcaagaccgtcaccgccatggacgtggtctacgcgctcaagcgccagggccgcactctctacggattcggcggttaatcgactaacaaacgatttccactgtcaacaaaaggcccttttcagggccacccacaaattcctaggagttgttcacttaccgaagctttaatcgagcctgctaggtagtttaagtgttattctgtcctatacttatgtggtgggtagtaattatgccatgcagccgaatataccctgtaggtttaactgggtaatataacaagcccataattttgaactgtcagaagttaatactgaacgaactgttttagaattatttgaaggttttccactgatcgtgtcacttctcaatccacttttgataccggtcatttaagagcttattcccttctggagccatctagaagctcaggagagagcaggaaccattgtatctaagcaaggcaaaggctgattactacagaaactgaagacgcttagctgttattaattgtataccattaataaggcctaagtacacataatctatattagggaccacctaatggtatgtttatatacagtttagttgtgcagtggcttgataatttaaattcttgtgggtgtgccatgtttgccatctgccacaagagggcggcgttatttccaggaagtt

SEQ ID NO: 21797 - DNA, 1107 bp, Mus musculus
attaaccaatgggagaaacacaaacagaatacctccagttagtataaatgcttgctgttcagttgcagaatttactatatattcttttcctttctctgctttgcctttactgatacttaaacgcatacatgtctggacgcggaaagcagggtggcaaggcccgcgctaaggccaagacccgctcctcccgggccggcctgcagttccccgtaggccgcgtgcatcggctgctccgcaagggcaactactcggagcgcgtgggcgccggcgccccggtgtacctggcggccgtgctggagtacctgacggccgagatcctggagctggcgggcaacgcggcccgcgacaacaagaagacgcgcatcatcccgcgccacctgcagctggccatccgcaacgacgaggagctcaacaagctgctgggccgcgtgaccatcgcgcagggcggcgtcctgcccaacatccaggccgtgctgctgcccaagaagaccgagagccaccacaaggccaaggggaagtaatctggcgattgtctgtactgcccagttgaaagttaaccaaaacaaaggctcttttcagagccacccacatctttccataaaatgagctgccacctcgtgaaacgttcttccactacagtttttatactacatatgaaaaagttacgaagtagctttcaatcttagtaaattgattttaatactgttagtccctgcgataaatcttacgaccttccttagtttgagtcaaaagtgtgtaagagatgaaacctttagaacatactatataaatttttagtagaaatttggcacccaggtttgtcattcacgtcacgattgtctagagcataatggtagtaagggctaagggccattaaatcccacttccatagtttcggcagtattttaactaacatgatctgcctgtgtgtatcggtttgcaaatatttgattttagaattgataaactacatttatttaaactaggtcttgcaaagctcacaaaacctactttaaatttctatgttcacttgtttgattacctgaattgagttttcaaagcttgagacaatttgatgtatgtatgtaagtaaaattatgtaaaact

SEQ ID NO: 21798 - DNA, 1328 bp, Mus musculus
tccagacagggaatagccaagtgcatctatatgactaggcaaaggggcttgacctatgttgacaagtagaattttaataaattctacttataccgattctatttcaatttctattaaaaaaattctcttgtaatttatttttaaaagtatctttcacatttgaatttttaggttttaagaaacaataatcacatggtcttttggcacctgttgaattttttaaaaagatgttttaaacctaaatactttacaggggtatttgttttaatcctccaggtactggtccataaaaatgtaactccttgctaaaatccttatagaacaatataacatataataaaagcagtatactcaaatctggggaaacctgagagactccatgtctgcatgtgccctatacagtactccagagtcaccgccctgaaatgggctgagcaaaagaagcctttggtccccgcccacttgaagttctcaaccaggtccgataagagcctataataacacagcgaattcttagttcaccagcttcctactgaaagcttgtaagaatttaactatgtctggtcgcggcaagggaggaaaaggcctgggcaaaggtggcgctaagcgccatcgcaaagtgctgcgcgacaacatccagggcatcaccaagcccgccatccgccgcctggcccggcgcgggggagtgaagcgcatctccggcctcatctacgaggagacccgcggtgtgctgaaggtgttcctggagaacgtgatccgcgacgccgtcacctacacggagcacgccaagcgcaagaccgtcaccgccatggacgtggtctacgcgctcaagcgccagggccgcaccctctacggattcgggggttaagggactaaagcgattttcttaactgttacaaaaggtccttttcaggaccactcactgaattccttaaaaagctgtgcattttgctccctcacccttcccccacactggcagcggccctcactaatagcttcagctttaactcaggctgtggatagtcagcatagttgagattccccacccccacccctccaggctgaatttgtgcacaaagtacagcctcaccttgtacaaattgttaaaagtaggacacttcaaggctcttttctcaggattggttcaaggacggttaaacagtcttgaaaacctggaattttggggaaaggtgttagaacctctaggttcaacgactcattaccaccgcctgaaaataaccttgggtaggtgaacaaaggtaaccatccagatgagaatttactaaagaaacaggctcatcgggtcctggaggtaaaaacaattgagt

SEQ ID NO: 21799 - DNA, 1376 bp, Mus musculus
gtctgtgatgtcacttttcccgccgtccggctttcggggcggggctgatgggcgagatatgtgacatcactttcccgccggcgcgctttctggtcgtgactgaggggcggaatttgtgaagtcactttcccgccggcgggcttttgcgtctttcccggcatggctgagaggagggatcagtgatgtcgctttcccgccggcgcgctttcgggtcttggctgaggggcggggtttgtgatgtcattttcccgccggcgcgctttcggggcatggttgatgggagggatttgtgacgtcactttcccgcccgggcgctttcggttctttcccgccaggtcttattggcggggtttatgacgtcaccgtccggcgggcgggttttcgtttgtgtgattctgttgggggtgggagatcaaggccaagcagctatataaaggaccgactctcagctctgactccattttccattcttcctaagacatgtcgggtcgcggcaagggaggaaaaggcctgggcaaaggcggcgctaagcgccaccgtaaggttctccgcgataacatccagggcatcaccaagcccgccatccgccgcctggcccggcgcgggggagtgaagcgcatctccggcctcatctacgaggagacccgcggtgtgctgaaggtgttcctggagaacgtgatccgcgacgccgtcacctacacggagcacgccaagcgcaagaccgtcaccgccatggacgtggtctacgcgctcaagcgccagggccgcaccctctacggattcggcggctaagacttttttaatttgtattttctaaccaaaggcccttctcagggccgcccacattccctgaaaaagcgctgtaatactgaaccacctaacagcttgggcatctcagaatatagagaaattgagtaaataaaccttgagtgcctttggagaattgtaaggtcaagtttgcaccattttcttggaaaagaaatactgccttattaagtgtgcgcagctaaactctgttccttgaggaaagcctgagtgagggataggaaagcagttaagcatggttctcatctaaccacattaaaaacgtctgtaagtccgggcggggttcaagtaaagtccatgtaaggcagaactaaacattcctcataattctcaaccatttgccctgagatgtggcctttttgccaacaatgcaatggcaaaaattgttttttgttttgttttgtttctctttctcagaacaggcagagtcccagcggattcatgtcttaacatggtgattacacaactaagataaatggcattgtatttgagaactctaatgccgtgtaagtatagtagcttccatttcatgaccccctttacagcttcac

SEQ ID NO: 21800 - DNA, 1396 bp, Mus musculus
ccacctttcactagttgagctcctttttgataggcatctaccactttctgatgataaaacaggagagtacaaggagaatctgctgtggttgaaattccacctcaagcagccagccggagaagttttgaggccgcctcctctacctgcaaaaacacgaagctaggtcggtggaatcgcaaaggagttagtttctgaaatcttgcaggcagacaggcgcacgggaggcggggccttagggtccagggggcgggcgttagcattcaccaatcacagcacagcactgctctataaatactccgtgcaggggccttgtctttctacttcttttcttcgtcttgggtatagctgttgtttattcatcagcaaccatgtcggagacggcgccagtcgctcaggctgcttctactgccacggagaaacctgctgctgcaaagaagaccaagaagccggcaaaagctgccgctcctcggaagaagcccgcgggaccttcggtgtcggagctcatcgtgcaggcagtttcttcttccaaagagcgcagtggcgtgtccttggccgcgctcaagaagtcgctggctgcggcgggatacgatgtggagaagaacaacagccgcatcaaactggggctgaaaagcctggtgaataaaggcacactggtgcagaccaagggcaccggcgctgctggctcttttaagctgaacaagaaggctgagtccaaggccatcaccaccaaggtgtcagtgaaggcgaaagcatccggggctgctaagaaacctaagaagactgctggggctgcagctaagaagactgtcaagactccgaagaagcccaagaagcctgcagtttccaagaagacttccaagagccccaagaagccgaaggtggtgaaggccaagaaggtagccaaaagccctgccaaggcgaaggcagtgaagcctaaggcttccaaggcgaaagtgacaaagccaaagaccccagctaagcccaagaaggcagcgcccaagaaaaagtgaacagttggaggcttcttctataaataacccaacggctcttttcagagccaccaacataactcaaagagcctgacacttgtttcacactataacaactgcatttgggtacaagcctggtgggatttaggcattattaatttcccccagtaaactgacaatttgggtcagtctagtttctagttttatttccctgagattctgggaaaacagccttgttagccctgggaggcgctaccctctccaggtgtggtggataagctctctatggtatggtagtgcaatggcctgggtgcctcaaccagataaggtcctattttgccaatgaggatgagaactcaggtgcttgatcagtaagagtgggctgcagcaagggttcacatgcaata

SEQ ID NO: 21801 - DNA, 1211 bp, Mus musculus
ttttgcaaacagtgcctgagaaagttttttccctgtgttcaagaaaaattctttttaacagtgttacagatctattcagatgtttaaaataatgcttaaattcaaagagttttgcttctagtgaactggtaattactaaaaaaaattttgcctctaggtatggctaatgtaactttacattatgtaagaaaaatttttattgtttctgcttctatacaagaagccaagagttttaatctttcagtgtatattgtttcctaagtgaaaagtattttattaactaatgcttcttgaagtttaccttaaatccttgctctcacccaaaagattcagagacaatatccttttattacttagggttttagtttactacaaaagtttttacaaaaaataaagaaagcttttataattgttattaattggtaattaaaaattggttgtgcccaaaacaattctttggccagaaaaaacattattgtaaagtcatttttctcatcctcccagccgatcgttggcccacgtgggcccaactagcttctgtgggacaaagtcttaagacacagtttcccctgttccagcacagatgatctagttgcgtgctgtagatggtgttttaaaatgctgaacaatcaaaccttaatttgtatattaatagtcaatgccatatctctgagctcgcaattgcttaaattgttcatccctcagatactattaattctcaaatttacaattgcttatacatatttctagttaataaataaattatgcacatgtgactcttaataactttgcaagccttctagttacaaccgctccctaagaaaattgattgaaagtgcaattagtcactgcccctttacagccaagtatttaaaatatttggtcaactagttattaattcaaaagtttaggtattgtgaaattttaaaaatttaacttcttaaaagacaaaaaagagaaaaattgtatccccgtacatactatttagtgcattcccatgcacactatttaagtcttacctttattttcaaaatttaatattttaatgtcaaaaagtttaataaatgctttatagtatcttaaagagatctacttattggcttatagattgatcctaaaacagctaccttattagaaaagggaaaaacaggttttctccacaaaacgctgcagaagcatattagtaaattcgtgtcacgagctggtaggta

SEQ ID NO: 21802 - DNA, 1169 bp, Mus musculus
ctgcctcccctccccaaaagataccgagagccacaggtgtgggtcttaacaacatccacgggaagaatcgggtcaatgtccacccaagccaaggttaaaagcccactcatctacggatgaaaaaatcatttgatcacctcagttaagcgttgccttattttaattaatagggaggagagagattggagaccgtactgtcttcactgcctcccaccccaaaataaaaaagccatttggccttgtactacagagccggtcgaaccccttctccctgtttcccacctatcatccaaaaatgcggaggaatatcaacttagtgttattcttattatagtgtatttcacatttgttcagtcaaacttagccagagttccaacgccctacttaaaattcaactagaaagttacctaccaagtactaattagcattataaagtcagagcctacagctccaggcttttcagttagttgtttactaaaataagaaaggacagtcttagccagatacagtttaccataagaaaagttaaaaaatcccacgaaagcaagttttttctttagccctagattccaggcagaactattgagcatagacaatttttcccccctcaggccagctttttctttttttaagttttgttaataaaagggaggaaatgtagtctcccctcccccagcctgaaacctgcttgctcaggggtggagcttcctgctcattcgttctgccacgcccactgctggaacctgcggagccacacacgtgcacctttctactggaccagagattatttggcgggaatcgggtcccctcccccttccttcataactagtgtcgcaacaataaaatttgagccttgatcagaataaatgtcttggctacattcctttctctcgccacctagcccctcttctcttccaggtttccaaaatgcctttccaggctagaacccaggttgtggtctgctggctggacacaacatatactggctagttttgtgtcaacttgacacagctggacttatcacagagaaaggagcttcagttgaggaaatgcctccatgagatgcaactgtaaggcattttctcaattagtgatcaagggggaaaggcccctgtgggtgagaccatctctgggctagtagtcttggttctataagagagcaggatatg

SEQ ID NO: 21803 - DNA, 3208 bp, Mus musculus
gggcggagggagtggcgggagacccttgccacgccttaggactttccatattgataaataggggaaatgtgtgttctcaaacacccctaggaaaagaagtatcttactgaaagcctaatttcaaagctactcactatttataccgacttttatatgtcacacattactagcttttcggtttttctgtctccataactgtgaaaaccttcacgcttcttttcccgcctcccccttcagtttttgccacagatggtagcgtccggggcgcgcgcaggcgtagagcgctcggggcggtgccgcggaggggcgggtgacgcagcagccgtcgctgccattttaagttgtttgttcttgtttcttttcctcaaacgcgactcagccccggacccgggaggttccagcggcagccgctgcttctgaagccactccggtgcggggggtgggggaaccgaggctgtggccccgcggacgctcgacctcctcctccgttgcggctctctccccccatccgtcggggctctctcttggactatcttcctgaaccggactgttgggcgaagcaggcctcgggagccgacgctcgaaccgagacaactttgccgggctcactccgcggacaggccgtagcgcagggctcccctccttccctcttccctcccgcgcgctttcctcttcctcgccgtctcccccctccccctaccaaccccgcgccgcgtccttccctccgtcgccgcccggggcgccgagcccgactatggggcccaggtgggggctgagtggcggcagcagcgcgcgtggcccggccacagagcgcagcgcagcgggcatggaggggctccgtcggcccgtcgtgttctcttgacatggctcccgcccgcgccacgagcagcgcccccgccgccgccgccgcctcctcctccgcagccgccgctccgcccgcaggctgcggctagacggcccaccgacggtcggcctgcgagtcccgctctcctctccgcggggaccccgccctgccgcctagatcccggcctctctgtccccttgggaaaccacccagccgcccccactcgggaaacatgggctgttgaacgggaaaagcgaatctagaacccgggaacttcattccttgcttttttttggggtgggagggtgggcttccttttaagaagtaattattattaacacgattattctcttcttttcccctcctcccaactgatccttcctacttaactctcttcccgcctcctctacccgggcgggaattgtttccacattgaaatgagtgagaacccgagtgatccagtgtctcccgtggtgcgagtgagtcgctgccgctgaaggccaggggttgtgggtgggacctgggggtcgaaggcaggtgatccccgggcccggcctgggacgtgggagaacccgccaccttagcctcagccatgctcacacgaagataatcgaactccctaccatcccgaacttgaacggggtcaaatttatacggagggctccccggggaatgtagaacccaccgcagggctaagggtgcttggatcccgggcattaatcagggctaatcacagagccggaataactattaataccgtttaatagacccccctttccctctgccatcatggttctccttggcagcagcgttcgcagccgcctgagggtgaaaacgtgggtgatggggaagttggtaatgactccgctgttttttctcatgactcctttgggcaacagctgtccacccccggtatacactgtagttgattgcagggaaaccctgtacctctccccttctttctctgctgattttgcacttttctctttgctcaccaccaagtgtaatcaatagcaaagcactgacagttcatagcagtagtgaaatctgaaataactaagaattaatcaggtactacagccatggatctggctgggtaaaatccaactggggatttcagtttcattcacctaccctgttttggtggttttcagtttttgggttttttgttttggggggggtattttttttttccctgtatttgggaagcaacatcacaattttccctcccttttctcaatttcttaatcccttttctgaaaagggactatgcgaatgggtttcaaggattggaccggtgtcagctgtgttttactgcgcacctaaatcctgatgatcggtttttcattttcccctcaatggcttttattttggcagtttagccacatgtgttttccagaaagttagttccaagtttttttctcctctttctttccttccccttcaccttccccatctaacccccaaacattattgtccaaacatgactggacagcaacttttgtttcttgaccctgtggtatgacagtctgctaatattgttagaaggtgcagtttgggggttacagttgtgatttagctattcaatcatattagcaggaaaaaaaatgacttgtttctgttgtacttgagtcttaagaaaaagtgcccatagtttagtgacaatttccaaaggctttagtaccacctgtatttcaaaatgggggacccaaactcccggaagaaacaagctctgaacagactacgtgctcagcttagaaagaaaaaagaatctctagctgaccagtttgacttcaagatgtacattgcctttgtgttcaaggagaaggtaatttaaagttcttactgtgaattagtacaagtgggtttgtaagtgtgtattatttgatacttcagtgttttataaatattaggtttaagagtgtttggagtaagactactgctttttactgctggggttagtctgtgaatagagaccttagagaaaatggagggctcatcatattgactgaaataattctaagggcttagtagaatacacttttagttgacattggactgtataactgaaacttttatgtagaacaaaagggaactttagtaaagttacataggatgtctccatgtaggtgacatttcttaagatatagttaatgaaggaatacatttaaacttcagaagcagctaaaaactgaaatggtaaatttttgtttagaattgctatttttttaacgttaaaaatcaagaggatgttgggtgtgtgtttatgatctagttccatagttaaatattagatgaatttgagtgaaaggcaaacagaattcaatgaaagcagtattgttttgcaattcaagatggacattt

SEQ ID NO: 21804 - DNA, 2148 bp, Mus musculus
aagatgttattttcacattttctgttttttgtgtgtgtgcttgttttttaacatgatggcaaaattgttaagatggattagtgttgtgatgtaggttctcggaatacaagctctaagtgatgacactagatagatttttccataagatgcattctatagtgttatgctttgtagtatagagttagattggtcatgaacacttaaataacttggagacacaatttgttttttaccttttattaaacattggtaattgtagtcagataatatccagaaatattgactatcattgaacttgactccatttcaagaataaaattgttaatttgtttgaatatttgcatgttttaaactcgtgagatttttattgcctgtagaaccagttaaatcaagttatatcaacagtgtatcactgaattttttcttttagaagaaaaagtcagcactttttgaagtgtctgaggttataccagtcatgacaaataattacgaagaaaatattctgaaaggtgtgcgagattccagctattccttggaaagttcgctagagcttctacagaaggatgtggtgcagctccacgcccctcggtaccagtctatgagaagggtaagcctgggaggctgcactgaggaaatgagttggtgtgaattaaagtgtgcattttcctcctgaaaatcctgagttagctagccttatgcttcaaggctgcagatgtgtaatgtttttgtctcaagacaaagtaaaagacacggataaagcatgtagaagcacccatcactccctgttaggtacttagtattataaataaaacagtttgtaagtacctttaagtgcttttttaaaagattgatttctaataatagccttggtcacttgacttagatggaatgacaatgatgtatgtgattactatgattggtctctttttgaggggagaatatcatgccccattgtaataagaaaatctaaagaaaatatattactgctaaccttcaaaactgtattacattgaagttaatttggtgtatactccaaaattagttgaagcagtggaaacatggagctaactatactagtctggaagaagttcattggccttaaggaacagataatgttatgtgatgtttggaagataagtggagaaaagtagccagcaacacatgaaactatgctgtgtaataaacttggtttgtatacgtttggagacgttttagccagattacatttggttttgaaagatgaaaataaaggcatattcactaataacgttagctccctagctagagtttaggcacatactgaggaatgtttctgcgtgagaaatattggctaagtgactggactctacagtgtaaaagttagtactacggctggaattaggttgtgtgcagtctgttaccctgaaggtacgaagcgctaatgcacgactctagttgagccatgtttttgtaccttttgtactttgcttctttaacttttaaaagaaaagtctttgctctcgttttctaggatgtaatcggctgtactcaggagatggatttcattctttggcctcggaatgatattgagaaaatcgtttgtctcctgttttctaggtggaaggaatctgacgaaccttttaggcctgttcaggtttgttttaaataaagtagcgagcactttggtgacaatacctataataggacttaagttggagtctttgggaatacgcttctaatagttcataaatcttttctgtctttttaaatattatattagaaaaaaacattagaattctagaatctcttagtgtctctggttttaaatgaactttattaaaatcttttagactttttttctttgacaaagtctcatgttgtctagattgacctagaattgcctttgtacccctggtgaccttgaacctcctgatcctgctggctccatgcctggtttacttagctgaacatggaacccaggcctcctgtatcagaggcagtcactcagtcacagagccccaactctagtcctctttgctgacttgtagctatagttttctacagtgtatactcagattttagaattagaaaaacagtgatggctcaaccattaaaggctaggctcacaaccaataataataatatgtttgagcctattttaattaggta

SEQ ID NO: 21805 - DNA, 1816 bp, Mus musculus
acaggacagttctgttgacttcccaggtgtagtattttaatcttaaatatgcacaaatttatgcataaattatcagcatttatttcaaactactctttctcatatcctgcataggtaatgaactacatatctcttgccttattacagtcttatagccgtaagtcttaaattactgacagtttaaaactattaaaattattaaaaatgtgtttctctctagactccaaaaaacaaagccaccatcttcaagttatgcagcatctgcctctacctgccacaggaacagctcacccactgggcagttggcaccatagaggatcacctccgtccttacatgccagagtaaataagagcattgaccagcaaaatggagaagaccagagaatgcagcagctattttcttttcttgttttcttaccacttttctttcagagtttaaagaaaatggactcatgcacagaacactatgcattttgaaacttgttcatcctggatttattttaatcatttgtatcacagaactttaaaaaaaattagatgtcttctgcacggactgtgtgaaagaaggtgcattgcacattgctgcactgcatcggcatcttactaaaatgtgaaggaaggactattgtacactgaaatgcttactgtatctgaaagcacaggtgatgctcagtgttgtggtcttcatgtttgtgctggtgtttgcctctgacatctgtcatcagtattgagggtgagggtgaatgtagcaggtataagtgacacttaaaaccttaatagctttgctatgatcaccgttgttccagagcactgtcagattccttataatgaccaggtggttgttacaaaaagaaattacaaccacgggaaagaaatcttaatgaaaaaaagcatctcattgaggcatttctgcctcgtgtgcactgggccatgtttgttttcttggtactcattagtacacgtattttttcccagatctctttccccgagttgctgttatagagtactctgctgtgtgcagatgcatttatacacattaaagcagatctggagtctggtgtggccaacgcagctacaaaaccgagaaacattcatagctgcaaaaaccatcataagtagaggacttttggtttttgttttgttttttggtgttagaaattttaattacaaataaaaatccagtgaattttgcagaaatactggtttctacaccatcctaaagaagttgagtgtttgggatagaaaacgaaagtggggaatattacattgtaaaaataactgcagagtgaagagttctgaaagcagaacttgtttgtgcaatgaacataaggaaagactactgtatagcttttactttttttgtttttgttttttgtttttgtttttttcttttaaatgaagaaaagctttgcttaagggttgcatacttttattggagtaaatcggaatgattctactcttttggagtaaaactagtgcttactggtttccatttgtatttagcttctggttggaatttgaaaaaaaaaaaaaaagggaaagaaacctaaataaaataggtgaaagcttcccggctactcagatggatgtataaaaatagcagtgataaggtttttttttttttttttttttaatcccatgtctggtcacttaaggttgttttatcagaagaatttgatagaacattttgaaggtttgtgttgcagctatcattctgtcaaagtttggagtagaagtagatatacatttggagagatttgcccaagatcgtataaatagaggatttaagtcatcagtctggatccagaggccagtg

SEQ ID NO: 21806 - DNA, 1166 bp, Mus musculus
gctgggaattgaacatgggtcttctagagcagccagtcctcttagcttctgggacatctctccagtccactccttgtagttcttctgtcattttggagttgaataaagtatgctgataagctatagacatccagatacttcccttaggaagctaagcagattaaatgaaagctagaggtaagtgttcagtggtttcaaatatgaaataggaaactttttaaaaaggcatggaaatcccatttttatgtgaaaagaaacccatggataaatgaaggatgggtcaggtagagccccatgcagcccagccgtttgaatctggtaccaaaattatttgtaggttgctacacaggaaagctggtaggactgtcacaatctttcaacagttccttaccactaactatacttaaacctgttttctctcaaggtacatgtcacctgctaagataggagaagaaatagtgatcacagcacacattctgaagcaaggaaagacacttgcatttgcctcagtggatctgaccaacaagaccacaggaaaattaatagcacaaggcagacacacaaaacacctggggaactgagaacagcgggaagacccgaagaagcccaacaatgccaagtatggtttgtgaacaactttctgaaataaattatcaaaaccagaagtagctaaggaagtattttctttggaggggggaaaaaaaaccctaagaaaccaaaatgaaactaatatgaaagttagggagggggttgtttcttctgaaacagaagtctgactgttcaggaattatgtagaccaggctggcctggaactcagagagctgccttcctctgtctgtctctgagtgctggaactaaaggcatgcaccacaacacatgtataggtgggtgtatctttttcttttgaagcatcttgtttaggtgacgtgcctgatgattggatgaagtagttctcggctcagagttttgagttttggtttttgagcctggctttatagcaccaggatggccttgagctcagtcttctgccccagcctcctgagtgttgggattatagggaggaaccacctttgtgcctggctagtttgctttgggttgtataggtttggggttttgttttgttttgttttttgatttattcaaattccacaccatgcaccccagtc

SEQ ID NO: 21807 - DNA, 1136 bp, Mus musculus
acctgcgtctgccagtcgttctcccgcaggacgctggggaccatcgtggggtcgcatccccccaccaacgcaaagcccaggcactgaagccgccgcctcttcacccggtcctcctccgcctgtgctgcttcgggcgccgacgccgcccgccctgccggccctgcgggctccgccgcatcggaactgctgccagacgccatcgccgcagggtcccctcaaaacacccgctcttcacgctgcttcccgcgcgactgatcgcgaacgccggaacctgcgcaggcgcgcagcgtgcaagcgcgtccgcgtcaaccttccggcaagaagaccgccctctctggtccccgtccgcggccagcgaggcgcagatggggagggggagggggaggggaggggaaggaggggccgaggaggcctgaaggttgcgcgtgcgcgctggggcgctaaagagtgaaggtaacccgtgatcatctaggaccagggcgaccggggcgcgcgatcctttctcccgagcacgacgcgacagcggccgggcttgcagacttgaccttccacacccttgtcctctcacaaacgtctcttccagagttcattctcgcagagcccagactcttgctttgcgtccacgatgagcagcatgacccagaacctacgagaagtaatgaaggttatgttcaaagttcccggttttgatagagttttggaaaaggtatatttattgtaggcgaagtatctggtgaaggggacgaacctagtaaaacaccttagtggcctcgcaaacgcaggggaagtgcgtggcgtggattctcatcgaaacgtaaataagcatgtttggttttttgttttttgttttttttttaaccagcaaactgttggagtgtgtggagaaaaaatgtcagcgtaccatttaagggacgctggagcctgcagggctagtatataggaattgtttcttaagagtcaaggaggtttgaggtacggaagtgaatgcgagaaccacctgtacgtgtgttgtatttcttgcttttgagactaggtctttgtaactaggtctatgtaactatgtaacgtttgttggctgagaacccttgtagtccaggctggcctgggagtctacagagttaaccaggaccagtgcc

SEQ ID NO: 21808 - DNA, 1327 bp, Mus musculus
tttaaattgggggcagggagtaagtatataaacctttcataatattctttctcttgccaggttatcaaatgtggtggtttacctgacaacgtttttgatgcctgggaatttttaggcaaacctaaacattgccagtatacatgggatacgaaagcaaataacaacctcaggatccctgctgcttataagcatcgttttgatcgaatatttttcagagcagaagaggggcaccttattcctcaaagtttagaccttgttgggttggaaaaactggactgtggtagatttccgagtgatcactgggggctcttgtgcaccttgaatgtagtattgtgaaaagcttcccacttgcagctttacacgtttgttagcactagttctgaatttgtgtaggtctcaacctttcaggacatctgggtctaatacagaagaattaataaactggatgattactacagcaaaagcagctaacgttttactttgtatcttgtgtcctcagaattaagaactggtgtttgtaataaatcaaagcatgcttatgtcagaatgtgtgggctttggtttaaaggacataacctctccgcttgtgacaaagtcattgttgccatcaggatttcaagtaatgggcgtatctcagggctaactattgtttgaattaggcaccaatatattttaaatcattttattaagagaaaaagtaagccattgaactcttgagactgcattgtcttatattctgtaagttcagaaatgtaagtgaaaaagccgtgaccaaccgtagtaaagtagatgacagctgttgtatatcagacttaattttgtcagctgatagtatatagtgactgatgagtcagtcacagttccactgactcccagttactgttctgattagtggtagttatttgctgggaactgacaaagttcatcttggcaatgattaaacccagcttagcaacgtgagaattatttttttttttctaagaagaaaattcagaagaaaagtaactgagttttgttactggtaaaatggaaatacttcacagagtgaataaagaatacttttttttttgtaaatgttctgtaaagaaaaaatgtacagtaaataaagtgttttatttgtagactgactacgacttttttcttcatggtgggatttgttgctctactgccattgggaaagcagccctgcatgttacttttcagtgggaatcaccaaatgtgttttgttatattaaattcctgacattttggaggctggggcaggaggattgtcattaatgtaaggctagccaggactgacaaaataaggaaatttagaatgaagtga

SEQ ID NO: 21809 - DNA, 1197 bp, Mus musculus
tcaggacaaggtacagagtgaatgttcacataccctctggcacctcacaaagtatagtcattgtgtgggcggggggggggggtccccagtccttatgggaccgtgcaactttggttcagaacgcagggaaagggacgaggtaataggacagctaggttaggaggaggtgcgcatccctgcctaggcacctgtcagcgttgatgatcagctggctgcctgttccagggggttgtggcaaaggctttgggttcctaagacttctttataaaacgcacagacttcctgtgctctgtggaatgagggggtgtttctccttgtttctgggctgctgtttaaattactgggagcagaattgctttgggtttgttttgttttgtcttgctttctttggtttatcctggtttggtttggctttatgcgacagggtcttgctaagtagcctagctggctttcaaactcacaggtctcctctatcagcctccgaagtgctagggtcccaggcatgctctaccacagctgggtaaatggaagtctccaatgccctaaactttaaacttacggctcatgcttcattttgttcctcgtagaaaatcaacctaaactggaggcaaaaatcagcagagtcgggttggtaggatggaaaacatggctttgtttcttctccagagctgggtgttgagtccatggccttgtgcatactagcgtgtgttctgccactgagctatcgctagctcttttttctttaattttaatttttgagacagggtcttgataagtcacactggttggccttgagctccttattgtcctgcctcagcatcctccatagctgggtgacagaccaggccaatggacagcaggggctcccagctgcctcctactgccttaggtatgctgtttagggctctgtgccccatgtgtagagattcatgcttggcttaaaggactttgtgagcctggaagggaaaaaaaatgcttcacaaaatggtggaaatgcagctcaactccaggaaccattttgattacaagcagtacctcgctgccccctccttgaactcaggaggtgacttcgtggaggaaagaaaccaggtgcctccttgttcacctgaataagtctgacccaggctttctgtgccagggtgtggccactgctaaccctgcagaagagcaaatacattttaaccactgtgaaaaatt

SEQ ID NO: 21810 - DNA, 2775 bp, Mus musculus
agtctgctgcaggttgtgaaacattgtagtaatggcaaatcttcacaacagttcaatttgatcttggggaatagccaaaagttattttagatttttgttggtgagtagtgtagctggttatgctggctgatagcactttagacagcaggctgtgacatttatcttgttggttgtattttaacattaataatcccaaaatgataataatggtagcaatgtattgtggcctgatcatgtatcaggattctaggtggggcccttactggcaccgccttataatacgccaaggtcagtcaacacaagagaaaaataatcttttcagttggcaaagtggtaatttcttctcttccattttttatgtaattactaatttactaaatgtgcttttactttggctatattctatgtctcctttctatttcctggtcaaaccatgctcctccccaaaagttaaacttcctggctgcttgccatctccctggtctaaccatctcagaaccacgagttctgcatagacagccactgtctgtatccctgtgtcattgtaccttgatgccaaaggtcttagctgcgttttatgctttggtctaagctgtaagcggagacttggccgtgtcggactgctctgtcttctcggctgtccagtgaagcagagtcaatgtcctgctgaggctcaccaactgacatgggcacaatgacagtgccagtgctccttacacacgtctccagtcccaccagctcacgtgtccttccttcctgagtcctacctcaggtctcagggaaaggccactgagctaatagcctgtcttagttgtgagatgggaaagtgggggatgttaatacacaagtgaactgcagttaggaaggctaacttgtagagttaacagagttaactgtaaagtcctttccaatgaccttgatcactgctacccttggtcagtgttccagacaatgtctaatttcttgaaaatgcataaaattgtaagtaaaagccaagcatatcctttagagaatccttccataaacttaataactgctgtttctagtagctaaccctggtctgtcatggtctgtcagtgaggactgttggccaccagagggcaacttcactgtgagtctgccaagcacctcccaagcctttaccagattgctgtcaccagtttaggactgcccacgcttgggactcctgctcacgttgccccccagcgttgccccccagctgctcgtcgtgtgccagtctcacagacctgtgtgtatcttccgagcagtcggcatccttcctttgttaatagcctggcacagtcttaaaataccagtcctgggatgagcaaatgcttttgtgggttagtttggtttcctttgttttgacacagggtctcactctagctcaagttaacttggaactcttgagtcccaggctggcctcagatgcctacctcagattcccaagtgctgggattagaggcatgagtcaccacacctggctctttattagtatatattaaggtaaatttcttatatttattgaaatattaaatatatagaagaaacttttaggagtcccactgctgtgtttcttgcctacaaggatatttgcataattatgtaaaaatacaggtgcaaaaatgttcactacagcactatctgcaataataaaaaaatggaaatagcataaatataagagtgtaatttaattgaattatggactgtccaaaaaataaagtattgtgtaactattggaagtactcattgaaaggaaacaaaggtgcctaagagtgtagccatggtgtaggtgtctgtccagaccagcaggtctcaacctgtgggttgtgacctcttggggatcgaatgaccctttcatgggggttgcctaagaccatcagaaaatacagatgtttacattacaattcataatagtagcaaaattactgttatgaagtcgcaacaaccataattttatggttgagggggtcaccacaacatgaggaactgtattaaaggattgcagcattagggagattgaggaccactggtctagacttattaaaagacggaccaggcacccaggatgttacccatgaggttgctgccgagcctgacagcctgaattcagtctctgagacccacgaatggtgggaagagagagcaaaggctctcccctgctcctctgagcaccacgagtatactgtggctcatgaacatacttgtaacacaaataaacatgttttaaaaatcagcagtctggacattgtcattgcagtgatctgcaaatgccataaagggccaggggatactgggggttatgtgagaactgtctcagaagctgtggtgcagtgtgtacagccagaggcagcaggagtgagagcacgtcctcagcaccacatgcaaacacccttgagtcatggaccctgagagccaacgccataaaaacctcatgtcagcaaatattctatcagctacttaaagtatttttaaaaagtaaatatagttgtcccacaggccctgctaagccctctgtagagcaacagagggagggcatgggggggggggcatgggtctcacacttaaaaaatagtgaggttaagttcctgtttcctttcttttctaaactaagaaaggcttgtcagagctggtgtcaaagcgcaggccctgtactcacccttcccttagaccgcacggacaccagcgagctcccaaaccttgaacttgcctgtaaaacacgcacaccatggttggttcagcagttgaaccaataagtacaaggggctggggtgg

SEQ ID NO: 21811 - DNA, 1202 bp, Mus musculus
ctcattgttcactgtgctggaatatctccgtaactatctctgaccagcctgtttgttgtttacttttaagatttcattttaattacatctctcttacccttctactcattcccaaacttttaaatataaattaaggaaaggataatgtaggaatctcgtattttaaaatataaacaccattttctgaaatgtatgattacattcatcaacacgtaaagtgagaaatgcagtttgatcccgtctcacgcactaggtacgcgtgtcccacttcccagagcctgcagtgaagatgtcccacccatcccgggcagccacgccctccaactccaagaacccgcaagtcttctttgatgtggacgttggcggggagcgagttggacaaattgttttagaattgtttgcagatactgttcccaaaactgcagaaaattttcgtgcattgtgtacaggagaaaaaggaactgggtccgcgaccgggaagcctctccattttaaagaatgccctttccaccgaattattaagaaatttatgattcagggtggagacttctcaaatcagaatgggacaggtggcgaaagtatttatggtgaaaaatttgaagatgaaaattttcattataagcatgatcgggagggtttgctgagcatggcaaatgcaggccccaaatacgagtggttctcagctctttatcacaacagttccgactcctcatttggatgggaaacatgtggtatttggtcaagtcataaaacgactaggtgtggcaaggacgcttgaaaatgtagaagtgaatggtgaaaaacctgctaaactctgtgttattgcagactgtggagaattgaaagaaggggatgactggggaatattccccaaagatggcgatggtgacagtcatccagacttccccgaggatgcagatatagatttaaaagatgtagataaaattttattaatatctgaagacttaaaaaaacattggaaatactttttttcaagtctcagaactggaagatggctattaaaaaatatgcgaaggttttaaaggtatgtggatagttcaaaggctgttattgagaaagcagatagatccagactgcaacctatagccttaagtcgtgtgctgaatattggtgcttgtaagctgaagatgtcaaattggcaaggggtaattgacagttgcttagaggctcttgaaatggac

SEQ ID NO: 21812 - DNA, 1149 bp, Mus musculus
aatccccaaagtgacaactgatatgcttgtagagaaacttccagagatgggaatcaagctttcttctttgtaagcttgtcatgggcacatgcttcatcaacagaatgctgacacacaggatttagcctacaagagaggaaagattttattttgtttggtgacctgttgttcagagaatggtcatgttgtgtaactacatcctcagaactttaaaagcctcctggaatgaggaggagatgttcttaagatgcaagaaaaaagggggagggagggaaatttgccagaaacagaagttgctttgagactcccatgttcctacaactaacctcgcactagtgtcccataggtaactccaatgacctcatcagctcacagagattggcctgagtagaaattatttgtttgtcatcggtgccctgtctgagaagagaaaatgtagaaaaagggtgccatgcaagttaagtgtgtcttcctgttcctctgaacctcaaaatttgaattggaagcactgatatgtgaggttagaataaactgtgaaggaaaggtgaaaggctagaagaggagggattccaaatcaattttaaagttctagctcatctttgcaacacagacttttagcctgaaattcatccagaagtttttaggcatcatggccatttatctttgagttggcacatgttttctcctagtctcatttcaaatttgtcctcttggaaccatgttacttggttttagtttgatgctcaggagaatatctccagctgtatcccatcatggagagcatttgccttgcctaaggttggcaaatccactggaacttttggaaatttgtgacatttctcccatcagaaaaatatagatgccgaggaagattgcaatccaccgtgtcataactcagagtacaagaagtatgatcagaacaatgtgtgaaggtgtcctgccttttctgttctgattctggtggaggatgttcatttctgaagacactagaccaatcgctcacgtggtatcgataatatcatcagtggaaaggaactggccaagaaagtttgccctgaatgtctaggaagtacagggtctgttgcactgcacccatcaatttgaggcagagttggaacagataactggggtctctcagctgttgtcttt

SEQ ID NO: 21813 - DNA, 1271 bp, Mus musculus
atcattttttattaaaatgtggaatgtagatttaaactctgtgctggtgtgtatgtagactctgggactataaagtgactgagtatataggtagactctgaagaaaaggcaagcactcagctaaatggaagaagaaagaaattaatgaactagagataataaacaatacaaaaaaatcaaccatagcattagctccttgcaaagttagtaatattgcttccacaggaggcctacacgccgccgtctgtgccgctgccatgtctctagagatccctgagaagttccagcacattttgcgagtactcaacaccaacatcgatgggcggcggaaaatagccttcgccatcactgccattaagggcgtggggcggagatatgctcatgtggtgttgaggaaagcagacatcgacctcaccaagagggctggcgaactcacggaggatgaggtggagcgagtgatcaccatcatgcagaacccacgacagtacaagatcccagactggttcctgaacagacagaaggatgtgaaggatgggaagtacagccaggttctggccaacggtctagacaacaagctgcgtgaggacctggagcggctgaagaaaattcgagcccatagagggctgcgccacttttggggccttcgtgtccgcggtcagcacaccaagaccactggccgcaggggccgaactgtgggtgtatccaagaagaaatgagtctctgggcctttgctgttaataaatagtttatatacctatgaaaaaaatttagtaatattgataagacattagtcaaaaagaaacaagatgaagaagcaaattaataaaattagggatcaagccagtgtaatcagaatttactccagaacagaagaacattagaaaataattataaaaacacatactctgaaaacttgaatgacccagaagaaataaaggaatttctaaattcatatcatcaccaaaattaagctctgaaggtataaataatttatagatattacaagcaacaagattgaaaatgttattaaaagtgtcccctcaaagaaaagcccctgaccaaatggaattcaccgctgaattgcaaactttcaaggaagaccttataccaattcttcttaatttgttccactagataaaaagctatggaacatcacaaagctcattttatcaggtcaggattttcctagcatcaaaaccaggtagagaccctattacactcctccctttctcttgcctcttgcccccttactcccaattccctttccccct

SEQ ID NO: 21814 - DNA, 1213 bp, Mus musculus
tgagtgtcagaaagatactggtccacaccaatagccaacaaagatacccttatcagatgacacagaaatgtcccccagctgacaaagcaagagagtccttcccaccatcaacctaaggctcaagaatcttctcatttttttttaaaattaggtccatatttctacctacccattagtatttctttacccagatgttccatgcactatctcacctgagtttgaaagccagaccatctttgaattcttgactgtttagttgttggcagtacatttataggtgtcgaggctaagttttcccaacatctaagcctcaggtgtggtttgatagtctgtatgggtttcttatactttccccttcttttactcctgacacttggtttttgtttgtttgtttgtttgttagtttgtttttgagaggaggcttcttgtagcataggacgcccttgaattccctctgtagccaaagacgaccttgagcttcagatccttctgcctcttcttctggagtctttggattgcaggcacacttcacctgccactacttcacaatgcaggcctcattagctggtataggagctcctactttactgttatccttccacgtgcctgaccgaagcatgcctggattctagggttaaatatgatcatttgtcatctgtctaccttgagtgataatctaatttcatttcttgttactgtgataaaatatgatgataaagaacttaaacgagaaagggtttgttttggcttcgatttcaaagtacggtccatgatggcgggaagttggggcatcaggagcttggggcagtcagtctcattatgtctgtatttacaggagaacaatgcatgcctgtgctgcctcatttcctttctgcccttacagagtttgggagctcctacccagggaatggtctgtgcacagagggaaggtcttcccgtatctattagtgacaatcaagataatcccccatgagcaggcccagaggtccaccttccaaagcctccagattgtatcatgtttacaagctacatttaatttctatggacctgcctttcccccattcatcaagtttaggcaggatcaaagaacttgaagaatttctcagagagttaaggggaaagctaatgtgtgaggtcagtatagcctctggtcagcaaagggtactcaaatcctacttccccttgtgtgtgttgaatgtcaatttctttattg

SEQ ID NO: 21815 - DNA, 1234 bp, Mus musculus
ctgtcatgatgataaaacctacggatgcttccctgtgctttggctctggcctccatcaccactagtagggagcaaatgcaggattctgttagagttgagcacagaatctctggcctgaaatagaaacagtatggtgcatgaacagatgtatctgtggctctggctttctgagccccccatcctaagtcaccaaaattacttattccccaacaaatggaaagcaggctgcagtgtgaggaccacgtcacttagcccttcttttccatgttgtccatggatacaccttccattttcttttctttatcttgtacaagactcttcacactttattgttaatctttactacctcttctgtgtgtattatctcttttcctttctacttcgcttatattagttacactgggtgttgctatgtcaaaactcctgaccaaagtgacttggtttgaagtttgagaataacttccatcatgcagggaaaggttgcggggacatgggacatgaggtagtgggtcacatgggcacaggttgataaatattggggctcaactgcccctcttttcctcaggcagaatctgagcccatgggatgctgctgtgcgaattcagggtgagtcctccttgttctgataaaccttttacgaactgccgatatagacacacccagaagtgtgtttccatggtgaccttaaatcgaatcaagttgccagtgaagcttaatcttatcttaacacagttccacataacccaggctcagtaaattcctcatagagcctcttagttataagtggctagctcatcttgaatattcatactttacagtatctgagtttgagagactcaaacactgacttgacacatacaggccagattgctaacctgcaaatctaagacttgggatgcctcaaactctaaacaggttctgcatcagtctgaagccaagagtggaaaattccatgccatgaatctttgtttcaggcacgacattattaaatatgtcatataaaatggtctgtaggctacacgtgtaaaatgtctatgaaaaataaatggacttagtgtttgaatattggtcctctccccaaggtactatattattattacatgtatttagacattccaaaatcaggaagacttctggttcttgtcacttgggataaggaatgccaaattatgctatttacatgtctatgtaaacatgtatgtgtgcagtttgtatgtttataatctggtttcag

SEQ ID NO: 21816 - DNA, 1109 bp, Mus musculus
tacctgttatgtttggatagcctgcctagggcgaagccatagtctctacaaagggatatttcatttttataggcaaatagccttctactgaggagcacagtttgaaaggtattccccaaagagtttcaaagacaggagagccatgctctaaacagcctgaattcttataactgtcctttgaagatggacatttccctagaggtctcccccaggacttggaaaatggtggggttagaccagggacagtgaaagatttccttccctatctcatgctatgccaaacatctccttgtctccagttacagctgtgattcaggtatcttaagcatgatgctggatgtatccattcctttgttgggcctcttggatactgccatggtcccacttgcacctgaaattgtagggcattgagtcttcattgtcatgaatccagtttgtgatgtctggcaatgcatttattaaacacattctctctttctgtttgagagactcattagttttctaagcaaagaaggatgtttcatccatgccagggtctggggaaggaggagagtaatttgcgctgactgcatctttagaaagtagggaccaagatgaatagttggagacctaagacgaacagaatgttcataaaaggctttacacaaggtctctcatcttgatgctggccacccacatcctttaaaaagattgatttttacttttatgcctgtgtgtatgtgcctatggaggccagaggatgatgtcggtctcctagagtccacgttactggtggttgtgagctgcccagcctgggtgctgaatctctggaagagcagtaggtcctcttaaccactgagccatcactccatcgcagtcactcttccctttgcatgtggttagctgaaatgaggttgtggctttactgctaagaggtgtgtcctggggcttgggaagcactccgccagatgctttcgagtatggtaattaaaggggaagcagagggctgggaatttgggtcaccatcctggcaggcggtccatttctgtggggttatatgaagcatgttttctcaggtgatgcccaggaagcttcacagagacctttgcctcccatttcttacagtcgct

SEQ ID NO: 21817 - DNA, 1154 bp, Mus musculus
cccttttcatttgctttcttgtcttttaacctcgtttctttatcttcttttttattttctttctttttcttcgttttttttttttttctagtgttgttacccacgccattttacgtctccttcactgaagggctagagttttaacttttaattttttatatttaaatgtagacttttgacacttttaaaaaacaaaaaatgacaagagagatgaaaacgtttgattattttctcagtgtatttttgtaaaaaatatataaagggggtgttaatcggtgtaaatcgctgtttggatttcctgattttataatagggtggctggttaatatctcacacagtttgaaaaatcagcccctggtttctccatgtttacacttcaatctgcaggcttcttaaagtgacagtatcccttaacctgccaccggtttccacctttcaaccccctggtcttataaggggaggagagttcagcccagcaccataatgctttaaaaaaaaaaattttttttttttaacgaattgctgttctgtccagaggtttttaaaactggtgcattcacagcaaaaagggattctgtagctttaacttgtaaaccacatcttttttgcacttttttttataaagcaaaaacgtgccgtttaaaccactggatctatctaaatgccgatttgagttcgcgacacaatgtactgcgttttcattcttgtatttgactatttaatcctttctacttgtcgctaaatataattgtttcagtcctatggcatggtgatagcatatgtgttcaggtttatagctgttgtgtttaaagattgaaaaaagtggaaaacatctttgtacatttaagtctgtattataataagcaaaaagattgtgtgtatgtatgtttaatataacatgacaggcacgaggacgcctgccttttaagaggcagttccgttaagggtttttgttttaaaactcttttttttcctttctttttttatttctttttttttaaccatccatcctgtgcaatatgccgtgtagaatatttgtcttaaaattcaaggccacaaaaaaaagcaaaaaaaaaaaaacaaaaaaaaaaacaaaaaacaatatttgggggaagagaaaaagaaaaaaaatcatgccagctaatcctgtccgt

SEQ ID NO: 21818 - DNA, 1304 bp, Mus musculus
gaaagaaagaaacagaaaaaaaatgagttaaaaagaatagatggagagtagaaggagaaaggggaaaagaaaaggaagaaaaagtgcatagagctggcctggaacacgtcccgccgttggagaaggagcgcgggggcgttagtggacccgcgctcccatcccccactctcagggctggggactcgaaggaggcggagagtagacgggggcgacctttttttgttgttgttattgatgttggtggtggctaaaaaagctacttcgagtttcctccccaattttgcttgaagagactcccccccaccccacccttccaacgagcttccggacttggttgcacccccagcaagaaaagaagccaagcaaagcttctaaagaccgaaggaatctttccctcacccccaccccctcgccttggtgatttcttgtttgattttgcctcatggtcaagaaaggagggggaaaatccagcgtgccccatctcctacccaccccctctttgtattctctttgtatttttccccttcttaaaatttctttttctgcaatgaagacagaaagaaggctctggggtgatgcgtttggcatttgtgttgagcttaggggagcattggcatggagaaactccacgctggcgaagtcccgggctgggctttctcctcctccccccaccttttttccccttgtccttgcagctggagatgtgctgggagtagcaggccagcctcggaaatggacatggggacctcgtggaagccacagcaacctggttggggatgcagaaggacccggagcacagagggcgttggggttcccgggcctccgcctggggtctgtgcaaaaataaagaattaaaaaaaaaaaaaaaatcagagaggtgaggctacccagagccggcgggaggacaggagactgtgggatgtggtccaggggccgcggagtggtttgggggggaaaagagatttttttcttctcttaatgggaatcgtgatggtgttgagttatttcactggtggggttaatatagcatgttatcctgtctatcttttgaagatttctgtataagactgttgagcagtttttaaaatagtgtaggataatataaaaagcggatagatggcgctatgtttgattcctacaacgaaccgatcaccagctccttttcatttttaactctttaaaaggattcaaacgcaactcaaatctgtgctggacttttgaaaaaccacaattcaggaccaaattttttctccgtgtgtgtttattccttataggtgtaattgagaagacccgtttatttttac

SEQ ID NO: 21819 - DNA, 1099 bp, Mus musculus
tgtccctggaggctgaaagtgcattacaggaaaagagtgggtgtggcctgtgagtgacacacctctgtcattgtgctgctctaggggatggagcagaacttcacagtgatatatgatatctgatgcttcaaacactggatatgagggtttagtattgtgcacatcaccctggacatgtctggtctcatgtttgtggaaatgtgcctgaattgtagtattcctgcctttagtttgcttttgctgtttctttgttggcctagatttaatgaaagcacaaaatctgactggaagttattttctagtgtcagaattcatacatggtaatatctgaaatgcccatgttactgtggtctcataagcagtatttgttcccattctaaaagtttcactgggacccgtgtgatagctaatttcagtagtcagcttgacacacctgagaagatagaacctcagttgagggattgctaccatcaattggcccatggatatgtttgtggggtctttttcttatagcgaatttatgtaagaggactgagctcatgtgaatgatgtcaagcccattgttggtggtggcatcccctaggctctataggaaaactagtagaatctgagcctgggagcaagccaggatgcagcattcctcatgatttctccttcagttctggcttaaactcctgccctgactttggtaatgatggattatgacctgaaattggaagccaaagccaaaaccaaataaactctttcctctccaagctacttgggtcagtgttttatctgagcaacagaaagcaaactagaatggtatgttagctctgtgagtttagtaagttcaatgcactcaggtcagggaacacatttactgaacataggacatgtgcaaggtactgggagataaagtgatgaagcacaaatttagcctcctacagctgtgttcagaacatgagggtgtggctgctgtgggtgccatagtatcaggtgtacctatggcctgagcagccatgtgatcccaagaccagtgcagctagttaagctttactgcaggctatgttgttaaatggagaacaaaaataggttcttaagcaatttgtaaaatttg

SEQ ID NO: 21820 - DNA, 1193 bp, Mus musculus
ggggttggcggacttggatgaaaggtcatgctttagtgttatgtataattgtatctagactggattgaagggtgctgggcttggagtagaggttaattactgaggctagagggagtttccaggtacataactaaagcccctataaactagctttgggtgtccccaagtagttaaagatttggaatgacatactaggaaacaaaattatatagaggaaaggtattttcattttaattttgttctagagtgagctgctttgtttcttgatgaaacagaacaaggaagtagaaagcaagatttgaattattggagagcaacctcttagttgatgggagaatgatttcagaggtgatggaacactctgataagcttagccaagctagggtccaggaacatgacctatcttggtatgacagggaaaagagctgaagtggcggcagagatgggggtggggtgggtggtggttcgtgtaaaatataccctgagaaattgggatgacagtctaagactttgaaaatcaatgctccctagctctctcagtaagtgggagattcatggagaacctttctgacctcttaatactctctctctctctctctctctctctctctctctctctctctctctctctctctcgtgtgtgtgtgtgagagagagagagagagagcgacacacacatttgatttaataaaattaagttcaaaaatttcaggaaaactttgaacctgacctagtgtttgacttccacatctcagtttcactgttcctaggcagtggggaggggttaggatcaccgagtccaggagagggcagcagcgccgcatcagcctttgagtgttggccactctttctctgtgtacttggctattcaaaattaagcaagtgatttggtattttggtcgccattgccttaagtgatgaaaaaggggaggggtctctagagatatttaataatcttacaatttattaaactcttagtctccccggaatggcagggctagagaacacaaaggcagcaacatgccttgtgagaaagggttctgttgcaaacgtttaggcctaattttgttccaactttgcttgtaataagacattcagaaaaggctcaccagctaaatagcttataaaatacaaactgtgggaatagaggcctaattgggcttgttgaaagaatttttaacatataaacatta

SEQ ID NO: 21821 - DNA, 1234 bp, Mus musculus
gatggttttagctcccttgtcaaagatcaagtgaccataggtgtgtgggttcatttctgggtcttcaattctattccattggtctacttgtctgtcgctataccagtaccatgcagtttttatcacaattgctctgtagtacagcttttggtcaggcatggtaattctaccagaggttcttttatccctgagaagagtttttgctatcctaggttttttgttattccagatgaatctgccaattgccctttctaatttgttgaagaattgagttggaattttgatggggattgcattgaatctgttgattgcttttggcaagatagccacttttactatattgatcctgccaatccatgagcatgggagatctttccatcttctgagatcttctttaatttctttcttcagagacttgaagttcttatcatacagatatttcacttccttagttagagtcatgccatggtattttatattatttgtgactattgagaaaggtgttgtttccctaatttctttctcagcctgtttatcctttgtgtagagaaaggccattgacttgtttgagttaattttatatccagctacttcaccaaagctgtttatcaggtttaggtgttctctggtggaatttttaggttcacttatatatactaccatatcatctgcaaaaaatgatattttgacttcttcctttccaatttgtatccccttgaactccttttgttgctgaattgctctggctaggacttcaagtacaatgttgaaaaggtagggagaaagtgggcagccttgtctagttcctgattttagtgggattgcttccagcttctcaccatttactttgatgttgactactggtttgctgtagattgcttttatcatgtttaggtatgggccttgaattcctcatctttccaagacctttattatgaatgggtgttggattttgtcaaatgctttctgtggatctaacaagatgatcatgtggtttttctctttgagtttgtttatataatggatgacgttgatggatttccgtatattaaatcatccctgcatccctggaataaaacctacttggtcaggacggatgattgttttaatgtgttcttggattttgttagcgagaatttaattgagtatttttgcatcgatattcataagggaaattggtctgaagttctctatctttgttggatctttctctggtttaggtatcagagtaatt

SEQ ID NO: 21822 - DNA, 1096 bp, Mus musculus
tcagtgccatcttgtaacggcgaatgtgagggcggctccccacagtataggaagataggaaagatgaagttgcaagggcagtcagcaagttgtctgtgacttgtacaagtgtccagttgtctggagagtctagcatacttcagaagcatgaagtagatggtcttatgtgtgaaaactctgatcgctcagggagaaaaatgcaagtcagttcacttgctagagacagggaaactgctaaagtcaacactgggattgtttttctgccagcagtttgtcatgtgggttagtgtgggaagatgaagagctgcagggataggttggcagggcagagactggagcacacctgtaatctcagctgacgggaggctgtcacagggtgattacaatgagttcaaggcaacggggcttccagagtaagactccttttcagagagagagggggtgtgtctggggtctggggatgtaagtcagttagtggaatgctttcctagtatgcctgcctcccgccccaccacacacccatagcttatagacatatatgaaccatttccatactctgtgaaaatgagagacttagacatcagtgaggtttgctatgggagagtactttggaatatagtaagaaaatatatatatatatttttttcatgcctgttattgtctcttgttcttctactgtcctcattattcctttccctatttatcctctacattcatgtgtgtgtgtgtgagagagaccacataagtttcattagagtcttttacaggaagtgtgtgagggtaccttatcagtggctccaaccattgtaagcatgatcttccaagaataacagccatcattttcatcacagcagctgtgaacacttacaagcgacccttgagattgaagcgctaattgatattctctcgtagaaaggaggtagtggaggatcattccaactacagtccttgggtctctccttcccagtctgccgtatgtaattcttccctaattgcatgtggccctgaggtgttaactgtctagaagggggaggataactggaggtgaggactctgtgaggctatacagaagttgtcatgtctgctgcagtagttt

SEQ ID NO: 21823 - DNA, 1198 bp, Mus musculus
gaaataccatggccagtatttttcctattaaaataaaaatattaaacatcctacatataatttactttgtttgccaataaattttgcctgaattactataagatcttgcatgaaagttgttgagaaaaaaatggcttcttataaagagttatactttatattataaaaactactgagtattttctattcacgtttctataatctatgttctctgtattaaatattttgttgaaattttgaagtacttgggctggggagataactcactcacttgtgtggtgcacaggaccgagattcagctctgttatctacttaaaacaaagacatgagcaaaaccaaaatccaaacaaaacagaacaaagcacccagtgaagtgctgtgctttggtgaccctagctctggggaggcagacagacagattcctgggtctcttgccatgcttgcttggcaaggtctaggccagtgagaggctgtccacttgcctccacacacatgctcatacatttgcatgtgttactgtgcacacatgcatttgcatgtgttactgtgcacacatgcatttgcatgtgttactgtgcacacatgcatttgcatatatactcatacatgcacacacacacaaatattttgtagtaccttattgaactataactatatttagaagggtgtttaagactttgttgccgaggtataaagtgggatacacaatgatttgttgcctctttgaagtggctgagattacaaacttaggctatgcttggatttgaacttagggattctggagtgctaggttgacactcctcacagagctactttcgtgatttctctgttagtttctgtttcttctttatatacatgtttgtttttcaggcagcacagaaataattaatatatatatcaaatcaaatatatatatttgatttatttgtctagttggctgagaaatttccccatatttggcttcttaggaagtgcccaaactcattttggacagaatgctaagcagccctgatttgtcctatactgtgtcatctgtacaaaccaaggagtgtgggcctttcctgtgtcctttgtacttcaagcagtattctccttatgtttaaataatcttgaatgattgaggagaatgttggctttcttgaaggattagttggaaaatctggtttggtctccagaatttgaatgattgattagaatc

SEQ ID NO: 21824 - DNA, 1987 bp, Mus musculus
agccagaacccattctccgaatccactgtgagtgggtgagtttggactaagggaggtcaggagacgggaaatgcactgatagaatgccagggcgactcccttgttactcctcaggaatggtgtcccaaactggaggctttgtgtcagcaaggacccttccagttaacttccaagaatagcgttcccactggcaggtggcaagggccatcttgtcctggtgttgaatatggcatagtacctcaaatccattccttggatgctaagggctgcggaaatgagttagtcacgaaaactaacctccagctgagcagtttgaaacactacgtgcctggccttcccgggaggcacgtagtaggcactcaactcatacacgtttgatcgagttgaaaatatcccttgggaaaaccttttactgaaaccacaagaaccctggccagtttactctagatagatttccacaatatgcaaagtggtggtggtggggggagggtggagacagaagacaccggcactttaaactctgtgtgtgggtatgcgtggtgtatgtttgggaagaaaaaacaaaggtgcagactatcttcctctctcttcagcctccagccccggcctcctcccctcacacactctggacttggtaccgaataatcccgtgtggtcctagctgaagcactggggtggaggagggagggggagcttcgtgttaagtgcctactggaaatgcactgtggggttttttcctgtatgggaaaccgtttatgccaagctttcccccaatgccctatatttatctcatctggttagctgcctctgcttctggctttgtgtaattctctttgccagctgcatcgagctgggtttctgtccccaaagtctaatgactaaactcacctggctctaggttgttgtgtgtttggttgacttttcttgttgaaactattcgtattgtgatgccgtatttattgttttaagaaacgaaaaggaatactaataagtcttcaagcgttctctcaatgcataataagactttctccagttaaggggcttaactggcgtacacagtgtgagacatccatgctctattctgtttgcattttaggcattttctttgctcgtagtatctggcacacaaagtagatgagtactacagtatttttgttactttaagtcctgagatgcaggttccctggtaccattgagttgctgctactaaaagctcacatgcggaatggctgaaagttacacatgtgcgaatgaagacggcgtgagcctcagaactaaaactgtataaagggcaacacatgagctgtcaaacagtgttaggcgtgtgtttgtgtacatagccgttttatttaagtcgatacagtccgctcacattgccattatttaccaggtttgtacagagatagcaattcatttgtaaacactgccagaatattttctagctggtttgtaatttttttaagaccgtcgccttgggtttttgtgttttgtttctgttgttttcgcctgtgactctcgtttgcctttttttttttctgtcgtacatgtagctctgtctgtaaatagaatcgcagtatttaaagctttagctttcaggaaaaacgaagtaagaatccaagcgtgtgcatgacaggttgtgtgtgtgagaagggatctgaggaagatgccttgcggaggaggctgggtgacagttggcagggtgtgggaatgtctttcctacggggtgcaggcttttgtaaaaaaggaagtgtttctcccaacactgggagtaggcaaactactaatcagtttagctttgtgttgtatgctagtttgaaataaataaataaataaataaataatgtaatataatgtaaaaatagacaaacaaacaaacaaaagcttttatgatggattttgtaaatagatttgttacagggtgacctgttccagctgtgatcttaccacttcaaatggatgtaatttgaataaattttgtatggtaaag

SEQ ID NO: 21825 - DNA, 1184 bp, Mus musculus
agaaacgtgtatcgcagtgttgtcccttcctaccttcttcctccaagagtatcatgaagtaaacttcagaacaaagctgacattttgatgaattaattttttttttctaagcgcacagttgcaggctcccttgggaaagccctgcctggtcccaggctcccaaatcttcctgatgagtcagcaagtgagaagatgtgcaatcaggtgtctctcacctgtccttccctcccctccttcctctcctttccttgcggactggcttgctgtgcctaacggatgggctgttgactgggtccggccgcctggcccgttggaaacagcgccctcccttaacagcagttcaagccgtgccttctcttgcagaatgcatgtctttgtgagtctgctaccacggaatggaattctgccacaaatgcaagcttgaagtcatgcaaaggaatgacacggatttctccagctcttaggaatatttaaattactctcataattcagtgtaagctatgggccgctagtgtcccactaggaggcggcaagagcctccacagcctttttggatgaagaacttgtttgcaagtactcgttgcagatacagagactggtagagttctgctgctcgaagctgttgtggatttccctgtctccataccccacttccactgcccccatcctgcgtatttgtgagttttcccggttgattacttgtgacttaggagttccttgtgggttgttttagaagtttttatttttctagctgccattgaagcattcctgtggcgcccatcactatttcaattgaattgtttaccttaaagcgagttttgcaaattcttattcctttagcagagggagagcacctctactgataaaaagcatctaaccccgtgtgacctaaggtccaccaaccagcctctgcgagaagcatcctctgtcttgcctcctttcccaggaggggagcttggagcgagaacagctccggggcttgctgactcgagtggtccacagtgaggacctcgggccagatacagctgtcccgtggagcagcaggcatggatcccctccatccttgggcttcccgggcccctgcgaccggggaaagggctctaatgccacactcagggagaccacttctcaggatgcggtcaggtggagaggccctagggagaaagacatcccatggtgtgagt

SEQ ID NO: 21826 - DNA, 1172 bp, Mus musculus
agaaattagatgagctgatccaaagctgtaccctggacctcaaactgttaaccgaggattcagagaatcaaagatatcctttgtgctgctggtggtggttagagccttctgtactgtttgcagagctgacagactaacttgttcatgatgtagatagatattactctggcatggtacacactatcagtgtgtgtgtgtgtgtgtgtgtgtgtgtgtgtgtgtgtgtgtgtgtgtgtgtgtgtgagataaagtacttttagactatgtggtatcattatcagtgttgatagccaggtgagaacagtttttcaaagcatggtatgtatggttggaaaatctgaatacactcacatcataagaacacactattaaaagatgtcataaggtgtctggatcagtattgatgacagcatccagcaggtttgaccttggcttcccagagttttaatgtgggttagctgtcattgttggagttctcgacctttatcttctttctttcttcttttcttttcttttcttttcttttcttttcttttctttctttccttctttctttctttctttctttctttctttctttctttctttcttttgtagcatttggagtttgctgtgtctgggtggactgggactgcctgcaatcctgtcaatagggaaactgagtcctgagtgcacagccaatctggctacaaccgcagggccctatctcaagaaaagaaaaaaagaaaaaaaaaaaaacaaaggagaaatgatacttttcaaagtcaggtgtgttgttgcacatttgtgacagcaatatttgaaagataaagacagaattatcaggggttcaaagacagcctgggcactataaagtttaaagttcatctagggtgcatgagcacttgtcaagcaaagcgtaaaagtcaagagttcaggttgtgtgtgtctgcctagggagtttgaggccagagtagaaatcttgtttttaaagaaagaaaaagcaagatgtggaggtatgtgcctttaatgccagtatttgggatgcaggtagagttccagaccagcccttctacataatgagttccagactagctacaacttcatagtgagtatgtcctgtccaccttatctcaaaaaattaaaatgttaagagtaaaagagcctggtgtggtggtgcagagacagacaga

SEQ ID NO: 21827 - DNA, 1199 bp, Mus musculus
tactcagttctgtgatgctttctgtcgttccagtaacagcaagtcttcggaggaagttgagatgatctgaaatgcttttacactttcccttggctgtgtagctgtgtgggccctacatcccgatgtgattccttgcacggagccatgtagacaaagcctttcctgagcagtgggtgtttcgaatccttgtttctttgtgtggcattaccttcaacttatgaagcctttaggggcagcaggtggtttgtgggtgccatcatcttcttaatagataaggaagatgccaacacagacattcttggatctatctccccaagagttttctggggtgccatttgggggcactagggaggagccaggccatccactttcctttctgtgaccaacctccatagacagtccccaggtccggggcaaccaacccttcttgacattggtttgttgctgattttctcatggaatcaccaccgtgctggattttgtatgtgcgcacggtaaccatggtaaaccattcaatcaagatctgaaatcctcagctggggaccgttcctaataccatgtttaacatgattgattgtggtactttggatggcatgtgaattctggtagggctggccttcacacgtgatgtgacgtgtgtctgctgccacatgtcttccgaaaacccacggggctttgcctttatgtcgtatgaatttcctgtccatcctctgatatttattagcttcagaatggcggcggggtgctctctcagctcagtcccccactgtcccagacacttttaacagaccacatgtttacaacatgacatgctgttgttttaggtagatattaacattaacaaagtcattttggttgagacagtctcttcgtggttaggcctggctttaaacttatgttaatcctcctatccccactgtacctgggctaacgtgtgtgggccaccgtgcttgattaacatgtttatcataaagtaagcttgattcaggccctcagaatagcatttctgtgtagctacgtagttgacgcttgagactgatgaatgatgtgtttggttcttagctcattcctcctgaaaagaatagctaagtacccactgatccccagtgagccgtcaggcattggccgtcacctcttccgcaagccgggctggggtgtgttttgctggtgtgcccagaagacagtgcaggaagccagcc

SEQ ID NO: 21828 - DNA, 1173 bp, Mus musculus
tttgaaaagtagtttgttcctgtagtgttggtggattgttctcccgaacttaagtaacagctatgttcactcagcaaaggggaatgggaaactttggagcaaaagcctctagcgtccagtggaaaaacagtggtctgttccaatctgagtgtgtgcgggggggggggggggggggacggggacggggacggggacgacactaaaaccactttgtttcatagcctggtggggaagggactggggaatttcctgtctcttttcccctatcctggtttggtaacgactccagcagcaggggcttgctcaggaccagcctgagcattgtcgtgtgcacccacgctctgcttggctgtaagatttatttaatgacatgtgtgactctgagactattcatgatagtgaataccacagatttggctgggtaacgtgacagtttttatttgctttaagttaactttagcttctagtgtggtgtgtggcaaaagggcaccaaacttggatcccaggttcaagtttgatccttgacattagccttcgcctgagcaaacttgagagctctgttttcttgatccatgaaatgggaatcctaacacttgtgaactttctcttaggcggtggtgaggggctttgtcaaattcaaagcaatggcaggcaggcaggcagcgaggtatcacccctatgttcgtttttccgatttttggataatcaagttaacattcccccgccccgccccgttttgtatttctgcttcttgtttgtgatgggttctcatgttgcctgattacctcctaactcccctgtgcgtgggaggcaagccctgagctccgccttcctattgcctctaggttccaagcgcttagcttacaggatgctttctttaccttctctcccctttgtatttttacccagtattttttttctctatggaagtctaaatattgtaagttagggtatttctcttgcagcctttgtctctagtgagcaaacttcaactttccactccatataattcatcattctcttgacaaatatttttgtttgtttttgttttccttcacttggttaggtctgaaacggtctctctgtagcccctgctgctctgggactctgtgtagatactgtaactcgctctgtaggccaggctggctgctaaccagtgatcagtctgtttct

SEQ ID NO: 21829 - DNA, 1191 bp, Mus musculus
ctcacacttgaactatggaattaggttattttaaaagtaccctcaaagcaagtgctggaagacaccctagcaccactacaatatggcatggagaggtgggacagattggagtggcgcttgtgctagggacagaggtggaactggtaatgtgatggtggtgacaggcgagagaggactgaggtctgcatgctatcattgcccggtatggtcagagagatgttttgcaacagcctggacacagactccgcccccacccctctggaccttctgccaggctggggaatccccaacaatgatggaggccagggatgaagaaaggttcactttgtggattgaaggaccaccatgatcctcgatggcctcggaggccatgttgatatccgtggtccacgctgctgccccagaccgtgatgaagcctcccattcatgatgccttggtgatggcttcaggctttgccgcctcagggagccatgccaacgtgagtggcatgtgtgagcacctgagaccatgttgaggctcatggcatgggctaagggccatgctgatgtctaatggcctgtgttaacactgaagcccatgtggatggatgcccgagtgggtggggaggggtgctctgccgtcctcagtgctgtatgtagtacagaggtgtttgtggtctaccccacagctctcctcagctgatgccttctggcccaggtacagccagagaaagactcatcgtcccttgggggctagcattctgaccgtactccagtgaatatacaaaccacacaaattatacttttaggggaggcatgggaggtagacatgggaaggctgggaggtatgaactattggggcagtttcccaaataattgtcttagaaaagtaccctcgtcgggcatggtggggcacacctttaatcccagcacttgggaggtagaggcaggtggatttctgagttcgaggacagcctggtctacagcgtgagttccaggacagccagggctacacagagaaaccctgtctcaaaaaccaaaaaatacccataatggtctaagtttatgtgttgggctacattcatagctatgtggcttcagtttgggcctgatggatccccccttttcaccaagtagggtagccccttgagtcttcctctctctggtgttttctgctagctctcttggctgaacatcaggagagtgattttc

SEQ ID NO: 21830 - DNA, 1157 bp, Mus musculus
gtgtgcacgtgcgcgcatgagcactcagagagagagagagagagagagagagagaatttttttatagggcactaccttatcacattattgatgctggttggactcatttttaaaattaaattttgcatttcaaatgtgaatataaatactgaagaatttaaaagtagagaggagattgggcatcgagttgtgaatgttgtctctttaaaacacagtgatgaatccgaatgtcatttgggaaaactggcaggcaatccggttgcctttttacacgtagggcatgctggctactaaactgtgtaggagtttataatttgttaggtcattgtgacttggggtagttttcttcatcctatgcatgaagggttgacctctactaagggttatttagaaacatgatagcctctaagtagtgcctccgagtgtctctcccgttccgtgtcagaaaaacagttcaaaggtgcaaaaaagaggctagccgcaacatctagcgtgtgctgcacactcagtgctggggtgggtgctatgtgcatcacctgacatggattaattctgggagagcaactacagtagtctaacttttgtgtatgtattttatgtgcgtacatttatttgcttatctgtgtatgtgggtttgtatgtgtgggtcccggggattgaactcaggccattaggtttggcagcaagtgtctttacctgttgaaccctcttgccaaccctgtatttccttgatagagacacaggctgcgtgattcagctgaggttatagcaggggacaagttggcacttgtgccactgtttattgcctcctagtttctgcagactgaggaactgtgttcagctcatctgggtgttgctccctctcttcagtgaatgcttgaggatgttagatagtctagtgaccacggaacccctgcctaaaggccagccaggcagggaaatgggctcaattactaatcagaaaatcggaagtagtgcccctcagtttctccccacctgattgaaaactacagggcagagtcctccatccaatgccagccgcaggaggggctgtggcaggggaagaaccagtcttactagtagcagttgaaactggcttcatgtttggaaaacagaagtaatgggacttagaattttgaataactctatcattgggt

SEQ ID NO: 21831 - DNA, 1897 bp, Mus musculus
agtatgaaaaagatatttttaataggtgttgttactctaccaaagggggagatatatgaaagtcacctctttttattcttattaaatttaataattactttgcagattttattgagtgctgctacctgttctaatagttgttattctctgacactagaggcttttttgaagataaagtaatatcaatttatgccctggaatttaaaattatcaatccttaagttttctataaagtataccaaaaaacacacgaggcttattgtcttgtaattagtatgttacaaacttttagctagtagtttttacagaaagcacatagcagagatacaaggctaggctgagtgaaatggtcacacagcaatttgtaaggtggactaagtttatttagtgtagttggatagtctacctaagcaattggttttttttaaacttaaatatctgtttattgtgttatttgccattataactcaaaagtctttgctaatgtgtacccttttcaagacatccttttaattatgttggttttttttttttttctttttgtcttgcagttcctgcttctgtccgtttttcccatacagatgtcaaggtgcccgacttctctgactatcgtcgtgctgaagttcttgatagcacaaaatcttctaaagaaagcagtgaggctagaaaaggcttctcttacctggtaactgcaactactactgtgggtgttgcttatgcggccaaaaatgtggtctcccagtttgtttccagcatgagtgcttctgctgacgtactggccatgtcgaagatcgagatcaagttgtctgatatccctgaagggaagaacatggcttttaaatggagaggcaaacctctgtttgtgcgccatagaaccaagaaggagattgaccaggaagctgcagtcgaagtgtcccagttaagggacccacagcatgatttagatcgagtaaagaaacctgaatgggttattctgataggtgtctgtactcatcttggttgtgtacccattgcaaacgcaggagattttggtggctattattgcccctgccatgggtcacactatgacgcctctggcaggatcaggaagggccctgcacctctcaacctggaagtgcctgcctacgagttcaccagtgatgatgtagttgttgtgggttagacacgtggactcagggcctaggtttctgtcggtcttcaggtcccctcagaagagtggagagtaagccttgtgtacgtctaggttggttgatttaaaatatttaagaattgttaataatgtattggcaaacattaatgtgaagtaattgaattcactgttaaatattatcaagcattagcataataaaaccactgttgaacatcattagattcagtcatagacttgaaaggtgcaatgtctttgatagctaattctaataaaacattacagattgttgtattggtgttctcatctaaatttcttttcgtatcttgaacttgagaaaaggtggggacattatttttcatctcaaagtggatgggaaaatcattttgatatctaatatttttctgttttgatattaaacctttcacagttatggaagtatgtattattttgttgaaatattttcactttaaagactgaattttactctctagccaaactggcctcaaacttgtaatcttcctgtgcttgctgggtctcggatgagaggcatgtgccatcacatctagttcttaagtttgtctccaaatcagaactaacaagactgccttgaaaggctggaaaagacaaggaagaaaaacacaaattcaagatattattctactcaaagataaacattcccagtatttatttgcatgtttcactatacaacatttttatagagatgcgttcatgagtcgttcttgatga

SEQ ID NO: 21832 - DNA, 1362 bp, Mus musculus
gagacatttgagaagagatttgaagtcacagtttttagagctttgtcctaaactttaaaataaccatttcatacaagtggttctaagctccccaccctgtttctgtaaagaaaaatatacagtctacacataaaaatgttaatatttggataaatttgtgatccacaagtcctcgtatgaactctgaatttcatagtctgactttcatttctcccagtgctaaacactgaagcttgtggttctcactcagccttaagctgatggatcactgcagtggtgtggggagggttcacaaggacctgtatgtggaggccctgtcacacccacaaggcctggggaaggcttgtggtcttcaatgcagcctaaagatgaagccaggctcctcggcaaggcagcactccctccccctctgccacttcccacgcggtgaaatgtcttgctccatagctggaaagaggctgctctggcatgggctgtgttttgtaaagatttgaggtgccccaagtgaccaggcactgagctgtgactcagtggtgagtggcttgcgcagtagagtcaggtcattgtgacctgcaggcagctttcacctcactccatccttccgtcagcctctgttgcacttcactcttcagactgatctgtggataatgtaggctcctcttctagagttgacaaaactaattccagagcacagcatatgtaccctgtggattatttaaggtaaatgagtgtatgtttatttatcacagtgactggaagtagaaattgtaatcctttgttgcaaaataagtatgtaccgcattgtctcctccctgtgtgctgttattatatctgacataaacaaactaaattccaaagcagaagtacagaaccatttgttattttaaacacctaataaatacagtgcacaaagccagtagttgtccttctctgtaagacccctatctttatttcaccatttttattagctctgtaattgcttatattcctgattttaaaatccacaataaatagtggagttctctcttttatgttgtgtttgtgtcttcattgttaaacaccatgtatcaagtgtcttgttagtttcagtaggagtgtgccatggacactacttcattgcagacagtgctagggcaccaaataggcaggccaacagagagatgagttgcttctgagacgttaaggctgggaggcacctagagacccatgcttgcactcacaaccctggtttccctttaaggctgggaggcgcctagagacccttgcttgcactcacaaccctggtttcctggcgctgaacttcaccacaacccacttcttcctcccaggtcaacacagtttctgtcatccttcccctggggc

SEQ ID NO: 21833 - DNA, 1195 bp, Mus musculus
aacatagactttatgagtaaatagaaataaataattctaaaatgatagaatgtattcactcctaagatacactgcgaagaaaacagtgatttataaataaaaataaagggacagatgtagtgcttgtgtttttgataaatatttaccaatttcctttggcacagatgttgtgtgctctccattagctcagcgtttactctccctttgttgctttgccagacagtgagatgtgatgggaagagtgccgtcctgggcacgacgcaccatgtggttcagttgcaagttgagcattgatgggaaatggcacacctaattcacctacgaaatttgtagtctcagcttggttcttgagtgtgtgcctcgatttgtagcagagcttagaaagacgaaggctaactcgttttggaataagaaaggttttgtttctggttatgtcttaacattcatttaatcaggttaagtctcatgtcttcctgtatggatgctaaagcatttcttaacttttctaagttatttctaaaagatagctaatttttttttgtcaatttcttagacggctgagaagtcaggccagagtgaaagatcaaagaatgtgaggcagagacaaaacgatttcaaggtgagtgaagggtgagaatgctgacttctcagagcactctctctcctggcgttattgaagactttacagtcaagatactgtcttatcatttagaacaaactctaccaggttgatgaccataatgcagttttgcttttcattttctagaaaatgattcaagaagtaatgcactccctggtgaagctgatccggggagccctgcttccactcagcctccgagaaggggatgggaggcagtatggcggctgggaggtgcaggcagagctttcggggcagtggctcgcacacgttatccagaccataaggcaagtgtgggcacgtgggagccatgctcatggaaagggctcagtgggtttacatgcatttgtttgctgtagtggtttttaaaacagtcaacaccccagagtaagatatgctacttaacatgtcattgaggaatttatcttctgcctctctgtcctgaggctcctatttctcacttatctagccaagcagttcttcagcatgtctggtatatgtgctggatgagagtgtcatactgtctgtgcacccatctgctgcagagaccctgtactg

SEQ ID NO: 21834 - DNA, 1212 bp, Mus musculus
aacctcagcttgaatgccagcaagagcttgagcaaggtgcacaaactcccattttaacagccaagaaacagggaacaagtcctaccaaagtcaccagggtgagtggaaatcacaaatcctaacaaattttttgcaagttacattgaaactgtaacaaaatggtcccagcaagaccatggtatcagtcaaaaaggatggcatcagcacaggatttgctgatctgtaggtttcttctcaagttataagcagggtttttgttgttgttgttgtttgtttgtttgtttgttttaaggaactgaaagtataacaaagtaaaaacagaattctaggcctttaggcccaggcttgagaatgtggcctttgtaaaggtatgctaatcataaaacagatagcgacattcctccacccacccacttcctgggttcaaagagtgctcattcaaagaaagtcaccctgaccattaccagaacctgcaatgcaaatgtgctattgttaggggctcttagaagctgtcttgagagtttacaattaccaggtattccttgtgactcttgtaactttgcacttccttgtgactcttaactggtatctttggtatcttccaacagcgccctccccacttccttgagttgtggtttcttcctttaaatacccccttacccagctactcggggcaccacggtcctctacccctgcgtggtgtatgaccatgggcccgagagcgctcttgaataaaaatcctcttgcagtttgcaacaagaccgtttcttgtgggtgattttggggtgttgcctctcctgagtcagaacatgggggagtcctcacgttgtgggtctttcagaactagatttagatttattttgaatgtatttatctatagtaagctttcttgactataagtggtttattgaatatcctgccaccttacagaacccaaggcctctttaatttgtatggcagatacatggatggattgaaattgatggtctttttacataactggagttgtcttataaatattaaatttcagtctgcttcctttctgtttatcccactgtctgattgttctctgtgacacctcctcttttcccctactgcaagtgaggacctggcacatgtgcgtagaactccatccatgtctgtctaatgagctgggtctacacactgtctcacatagacatatgcagaggcatcttgctgcttgtctcctat

SEQ ID NO: 21835 - DNA, 1202 bp, Mus musculus
catgtgggtgttgggagtagaatttgggtcctctgaaagtcctcttaatcactaagccatctctccagcccctcaagctcctgttttgaaacatatctctcagttccaactctaaatcccatttagagcagttttccttggtcatttccttttgttctctaaggtgaacaagcagtgacttactaactgtgtgagcgtgtctagctaatcaagttcttgtgttagaaaatagagaagtgccttggccatgtcagttgtcatttctcttcataatgatcagctaaaaatatgagtgaaatgaaacctctccctggttcctgaggacagacagtgaagacccttgtggagctgggacgtgtgccatggtttgagggtgtggcatctcttccccatcttcggaagcatggatcctccgtatgatgtcctactctgatctaggagcactgcctttactgtcctcattgcagatgaggaaactagcccaacaaaggacttccctgaggatgcactgtgtgacactggcatttgccaggctagccttccccatcccttcctttttccaggaccatgttattctggctgcctaataatctgagctcctctaccctttaggcctttagagataccctctccctgtctccactccctctctcagttcttctgcctaggacctcacagcactatggagatgggtgctgccttcccacttcgctaaggactgtcctgtcttgctcagcctctgggcacctccttagtaggctgaaactacaaaccatattcagacctaacttgtcatgactacctgtggagctggagatcccagctggctatgtgttttctgccaacagtgcaggcaccgagcctggatggagcctctgaagaatgttctgagagtgggaagtgtcaagacccaacaatggctctttgtcctttctgtgtgtaattgacacattctctttctgagcagagctacttctgagctgcattaaaaagaaagcccagggccagtgagatggctcagtagataaaggtgattgccaccaagtccgacaacttctgacctccatatgtggccatggtgtgtgtatgtgtgcacacacacacataaataaataaataaaaaataaatgtaaaaaaaaaaaaaagaccagacaataaaaaaacaaaacaaaaaccaacagatatgcaggacatagactatg

SEQ ID NO: 21836 - DNA, 1194 bp, Mus musculus
tctacacagtgagtttcaggacagccagggctacacagagaatccctgtcttaaaaaaaaaaacaaaacaaaaaaaataaattaataaaaacaaacttcaacaatggtcttcagtgtgtattagagcaaatgcttaaaggtagctggaaagaacaccaaacataaagctgaaattcttgtagcatgtttaatttattatgagaagacgagctagcacattgtttctgtataagtaattgtagaggcttgttacagattccaccctatacagggtgtttcagatattcaggtgttttaatggaaatctctaaacaatgcccttggccttattttggctaaagtgaataggtagacctatgccaggttctgttaattgatgttcttgctgcttctaaagtatgggcttgctcttgggttgcaataacttaaacatctgtagtagttcttgaattgttatataaacaatattctaataacattatacattaaaacacagcaatagttctcagtttaaaaatcagcagctgtttttctacgttttttatttctgtctatattttcctatgtttgctgtgcgtgcatggtgtataagtgttcatgcatgtgggtgtgtgtgcacatggagagcaccagttgaggtaatgtgccttctttgattgctctccaccttatgtattgaggcaagttacttgaacccacaactcagtgatttgtcgtaactagtttgcttgccccgtggatcatttctctgcttcttggtggtaggattaagtgagctatcccacctatatgacatttatgtgggtgctgaggaactctattcctcatgcttttgtggtaagtactttatctccccagatcccacacttaattttatagggcaaagtttattgcacatatttagggtggatcttcctaccatagttgatctaatctagatattcacagatgtgcttagagatttgtttctgtgatgatttttagttgccaatcaagaataaatataaaagccccatttttttctgtcaacttgatacttagacacctcttgtttaatccataaccccctatctgttgtctctataggctcatggccatttcatagtgcaatagacatacattcagtccaacttcaaaagtccttatcgtctttaggaattctagcactgttcaaaagttggaagtctaaatctt

SEQ ID NO: 21837 - DNA, 1235 bp, Mus musculus
gctctcaaagctgttctccagctactctctgagccagcttcccgacaggaggccggagactagcctcagttttacaatttgcatttgaataaagtacctagacttccccgaaagaagttctgctttcctactttctcactgtctttcaagattttgtctttcaagcaggtaaatcaacattcccgaggcggaccagtggatgtgcatccccgcccccctagagcacacaggtggcagctgttacccccagtctcaggacatttccagcacgtggttttcagtctgagttaaaaatttaggtttacctagagggctagaagagtagatatttccatattaataaagattggtttttattttgatagacaggcttagccccttagctgacctctggcttttcacccttgctgttactgcaaggtgtccttagctcaataggctgtggaaaaaacagggatgaggaggaacgacttccagctcctattttagccacaaatcgtggtgttactaacgacataattcttgcttaggctttgctaattctgaggttgataattctcctttaggagctgtacagcactcagaactgtgcatactggtttgtgattgtacaaattcagtatgggcaccgcttggtgcagagatacttactgcaagggaaggtctggcttgaccatttctgagtttcctgtgagataaacccggtttgaaagaggttggtaccaaattttggttaaaaataaaaaatattctccggctctacctcgcctccccaaaaggtaccgagagccacatgtgtgggttttacccacgggaggaatcgggtccatgtccacccaagccaaggttaaaagcccactcatctacggatgagaaaatcatttgatcacctcagttaagcgttgccttatttaacttaattaataggggggagagagattggagacgtactattgaaagggcaagcccttcactgcctcccacccaaataaaagagccggtcgaacgccttctccctgtttcccacctatcttccaaaaatgcggaggaattcaacttagtgttattttcacatctttcagtcaaacttagccagagttccaacgccctacttaaaattcaactagaaagttacctaccaagtactaattagcattataaagtcagagtctgcagctccaggcctttcagttagttgtttactagaaaggacagtcttaagccagatacagttt

SEQ ID NO: 21838 - DNA, 1185 bp, Mus musculus
tcagtggcccagcatagccagctgtgagtgctgtgctcactcccctgccccatgtatgttttcgggtggccctgcccccattcctttcccccttgtgctgctggccatgaatctgttccaagctctggtgaggaaggaatgcgccctctcagggcttctcctgcccaatcagcccactggtagagccctgctctctgggaactcacctcctgcccatcacggaaggctgcaagcactgctggtgcagagccccaggcggcagtctccaagttccttatgccaagggcagagcagtcctcactggagattactggcacatggacttgactccaaggtacaccgtgccccttagaaaggcagcccacgggacaattgtcagcaattgttgcaagttctcttcatcacacaggaagaatgtcctggaagcagatgggaggccctctcagctgctttggtgacatagacactaggttcatggaaggtaaggagcatctgaaaatcttttgccaggctctgatggaagtgcccgaccaatatgaccaggtacagaagttagagagaaagcagagtaagtcggtaagaaagttagcacaagttgataaaaaaaaaaaaaaagtacagaggaggagacataaagaaaggaaggaaagtgctgctaagaagtgagctaataaaagaaaaagatttaacccatagagaatctaggcaagatcacgaaggtaaaaaagagcaaagcttcagcagatgcaggagagataatgacagtggcaaatagagagattaacagtgaagaaagaaggaaatagaggtgaaggggattagagagaggtctgagataggagagacaggcaaaaggaagggttgttatatagaaatagaaagcaagataggcagaaggataaagcacaagtgatgaggcgcatggacaagccgacaaagacagagacatgagtcagaatcagagatgtgcagtaagaaagaaagataaaccagggcagaggcaaactatgagggaggataggtgacaagatggagacatgataattggataacatccaaaatagacaagagaaaaacttgcataaaataatgaccacagttgtcagggaagctagcaagccttgagaatatagtaagatagtacctggcaacaaaagagagcctttggctaaagatcaatgagtt

SEQ ID NO: 21839 - DNA, 1172 bp, Mus musculus
ccccactctgttctcagctcttttgaggcatccagccacggctgggtgtctgagagcctgagaaccaggtggccctggcctccttgcaggacctgcttcagctgtcccacacctcagtctgtgctccccaacccctggagccatgtcccactgattccctacagcccaacacctgccaggaagcatgctcaaaactcttgtgttcttcctgaggggccaagccctgtggcagagcagacacaggaaccactaaccctacaactctgttctccagggaatcagactttgtacctcataaatttctcccaatgaaaccaggagatgttaggcattatgcctttggattagaaaaattgagcatgcatgtaagatcctattttattagtttcttttgagatggagtatcagtatgtatctttgtctagcttggacttgctacatagatcaggatggacactttctgcatgtgacctttactttctatgttgtttgtgtgtgccttgttcactgagtcagagtatcacagtgtaggtgagagtgaagattcggcccatacatcagcctgtgtcgtgtgatgtttattccaggctcaccatgatggatcctctgctggaagcaaatgctacttttgccttaaaccttttaaaaatattgggtgaagacagatccaaaaatgtatttttatcacccataagcatctcttcagcgctggtcatggtcttattgggggcaaaaggaaccactgcgatccagataactcaggtaaccaacactatatataatacagcagataaatgctgtggactgtcagttgagctggtgcaccacattccaaattgctcttacagatgatgtaggggtgtgactggagacatgatgggcaggatgtgataccctgctgggatgctagctctagcattctgatccactggtggtgacagtgtatgtaagggttaattgagggcagaaattcttaaggcatagcaccacagccccatgacctccattgtctgtggtctggccctaatggatctaaaccttcctacagatgaggtctcctcctaggatcttgaagtttattctcaaatggggtcattctaggctagaagaccaggaatagaacctttgaggatcttgttaagtacagtgctttatctgtagacattatgaac

SEQ ID NO: 21840 - DNA, 1197 bp, Mus musculus
gggcttgcttgcacatgctaaatccacccaaggtctcctagaatcatgttatattatagccacatgtatatgtgccatctttctcactcttctgggctaccctgtgactctagagcagtgtttctcaacctgtggaccgcaacccctctggggtcaaaacatcctttcacaggggtcatagatcagattatcctgcatattcaatttttacattacaattcataacagctacaaaattacagttatgaagtagcaatgaaaacaattttatggatgggggtcaccatgacaaagtgtcacagcatcaggaaggttgagaaccactgctctagatggaagactgaaagcatgccttatttacagctgaggaaagggcccagtgatgcacagtgacaccccttgacttccccgatgccctttgtcttatcagcctcacttcctagctaaaaatgaaaccttgggatgcagaaaggctggctgagcaggcaccgctcaattgtttgtctgtagctcatttcctaggagctcctctatagctcctgcatggaaagttcatgcaggaactccaaaaaaaaaaaaaaaaaaaaaaaaaaaaaaaaaaaaaaaaaaacacacaagaaagcattggtttgacattgtgtggtttataccaggaatcccacttctccaaggaggtttgcttaccctctgaaaagctgttgttcagatgtgtttgtgaagcagccatgtgaggcctacacttagtgtcctgacctcagctctatcttccatcttcccttttatttcttccagagtgctacaataaccaaggagagtaacagtacctgaaacttttggctgttataccaaatcagagaatctatctcctccaacatggcaggtaatgactagctatggggacgttagacatttagtcagaaattatattatttgctattaaaaattctaagcaacatagaagtacatataaacccatttggtttatgacatggatcgccgtgtgcaattaacgtttgtggtactttttatttactctgtccattttaacctccaacagagtgggccacatgcctttcctacctttgtccaaaaaccattcttgagacataaagttctcaaaaagaacagtgaagaaactagcttctgtttagaccaaggtttgattccatctttacctttcccctccttttgcaaacc

SEQ ID NO: 21841 - DNA, 1116 bp, Mus musculus
ccattgggatctccgtcatttctaagtccttagagagctaatacccagaaactatcaaatttgaaagtttatttcagtaaggtttatttaatccttccaaaggaggcataggaagactaaactgtaaggctgtcaaaagcgcttcaaaaatactggtcccgagcctcactctgggcctatgtcttcctcaaaattaccactagagggagaccggagacaggtcctaactccatcaggcttggcaatgcgcctctgtgtggagccattgcaacacaactccccacccccactaggggtttttctggttaattttttagagcaccaagaactgtcttttaaaattgttactgcttctattttgctctggtgttggctatgctgagaacattcagtggaccgtaacccagtgggtgttttcaggtagcggaaagaccgattttgcacctcagcttcagagcctaaataagaagcgcttcacattggtggcctgggaccctcgaggatatggatattccagacccccagatcgagattttccacgggatttttttgaaagggatgcaaaggatgctgttgacttgatgaaggtgagacccagagaagtgctggagtggggagagatgactgggcccatctttatttgttctaattcctggtgttctttctttttacaaaggcaataccaagtgagtctaatataaggaagagctaaaggaccaagtaaaaacagagcccagctatctaatgatgctactgccaagacaccaaggctctgcctttcccaccagtctcctggcataagtgcagttttagttttgttttgtgttactttggtttgagacagattttcattgtatagtcttaatgggccttgagatctcaacccttctgcttcaggctctgacatactaggattgcaggcctacaacaccacaccacacatagcaaaatacacagctttatacagatgaaaatggagtcctaaaccagaggttcaactccatggcttccacccaaaaaaagcaacaagaaatgctggtgaagagacaggaaagtgttctaaaaccaaaactgccatttggagaagatggaaagtaagcccttcggaccatcttc

SEQ ID NO: 21842 - DNA, 1100 bp, Mus musculus
gcttccaaccactcttccctgccagtctgacctatcatggctctcctttctcactagaagctttctgtgtctctactaaactacagatggcctaacagaagaggtttgcccccagtgggtccagcattttctctcctaggctgtgcctatactatgtctttgatggatatcttggccttcggagcctgaaatatttactccctggccccaaaggaaaagtttgcagagcccagcacgtgcaaagtctcttccaggtattctgctattctcattgtaaactacttggaggctagaatcttaagttctagaatcttagttctctgtgctcttcctgtttttaaagcaatctgaaactcttaagtaacagatgacttagaaagcaaccctaatctggcctccacttgtcctcaccaccctggcttagagtagcctgttcctcttttgccatccgtgagcccccgctgcctctggcacccagtgcccttgcttcttccaaatcctccacttctcttcctgggctcttgctctctgcctcaatgggtaaacactactcctgctccagaacactgcccccttcccctgcagttcctctttattacactgtgtcccactccataactttacaaaataggtgtctgtgttctctctacttcagtggcgttgtggtcgttctagtcttctgctgcatgggtctcaccatagcaagtatggtatcgtcaaagtgccgtacttttaactcatcgggagcactccctcactaccctctagacatttgagtcatgccttaagttgtaaggtctgtagaaacacctcctgtgtccacattggtcatctgtgtcacatcttccttgcccggccagtcactgatcttttaaagtatctgtttctaatgttggcttggttttgttttctgtcttccattatttctgtcctcctcctgcttgctttgggttctgattcgctttattccctccaatctcagagtagaaatcttagattattgctttgagatgtttagtcttttctaatatatcatttaatgctgtaaattttcctctagagctgctagagctaagcacctgtgcatataaagatctatt

SEQ ID NO: 21843 - DNA, 1142 bp, Mus musculus
cagggtctctcagtgaacccttagctcactgtctcagctagaacagctcggtaacagactccaaagaaccatctgtctctgcccactgggactgcagttagacgttcctgatttttacgtgggttctggggatctgaactcgaatctttatgtttacactctgtcctagttttattcctgttgctgggatagatgccctgacagaaacaactaaaggaagaaggggtttcttttagcacacactacgttacagtcgatggtcgtggtgaagccacggtggttagagctcaagactctgggaagcattacatagtgaggagacagaggaaggaggtacttactctggcttgctccaatcccctgccttcagttttacagcccaggccccacaggaaatggtgccagacatgtttaggctgcatagcctcaattcagtggcaccaatcaattccccccacctcaccccccacaggcacctgggactgtttcattcaattgctgtgtcaaataccatgctcaaaagcactttagaagaggaaaggctttattgtggcttccagtaacagtccatcactgggtgaaaaccagggcaggaactcaggcaggaacttgaagcagaagccatagagatgcagcatctactggctcactcacccctaaacccacactgagccagctttctttcatttcccagggccccttgcccagagagaacattgccctccacagtcagaagggcctctgtatctcttaaaaaccaaggcaatctcacagaggcacaccacagaccaacctgacagagataattacttgagactcttcaagtgattccaggttgtgtcaaatccacagctaatgctaactaggtcactgtcaatctcaacagttcttcaccaggcctcccttccacagtgtgtcgacttgacaagactaccacatacaacaagcactttatcctttgagcaatctccacatccctaagtcatcctaacagagccttccactgcctctggaccagctggctttccacgatggagacaaaattccgaatgtggcggactgaacagaggaaatactatttgggttcatggttttgggttatgtcctgttactttgggactgtggcaacagagcaagcacat

SEQ ID NO: 21844 - DNA, 1103 bp, Mus musculus
aggatgtgctcatgtgtttctttgcttgtttgtttgtgcagacgtgcatgggggtcagaggtcaacatcaggggtcttctttattcaattcctgacttagattttggaatagggtttatcggattctgccatgctggctagccagttcctgtctccatctccccagcactaggattatcagcatgaaccgctacacaccgcctttttaaatagttggatggtggggatttgaactcgggtcctcctactttcatggcaaacacttttaccaactgaaccaatgccccaaatcccctgcttacttcttaaatggtatccaggtttcatctgttctgttttgttttgtttacttggtttttcgagacagggtttcactgtgtagctctggctgtcctggaactcactttgtagaccaggctggccttgaactcagaaatccacctgcctctgcctcctgagtgctgggattaaaggcgtgctccacaacatgcggccaggtttcatctttctaagaaaacttttgttctgatgtcttgtgctcccactcttcccacatttggtatctattttaggagatgcccagggaacctggctggtcctgacatcttttgcttcaagtttagctactgctaacttgttatctatggttttctctagttccacttttatctccactactggcttatgtatgtttttggtgtttgcactgtggtttataatatatacgttgccacaatatgtctccaaacagtgcctccgagcacctggccccagatgtgaacctcctgcgttgtgcacttcctcctgctccagctgtccaactggagcctgagtggtatcttactcccacatctttcttttgtaaacaaagtcactattgctttaaacaactcatgaagagattcaaacgaactcatgcacatagtagccatttcagacctctgcttttctttgggtacgaatagtttcttccctgcttataaaacttactttggtatatccttaaagtggcaatgagttggtcagcttttgtttgactttatttatattttttaaattttacctcattgttcaaagatgttttcactggagatagaatttta

SEQ ID NO: 21845 - DNA, 2177 bp, Mus musculus
ctgtgtcatcctcctggctgtatgtattcctgcattcactggttcaccaagctagacttagaagaaatcctccctttgatctgttggtggtgacccatctcgaaggggtagtggtttgttcacattttcccaggaaatgtcacacaacagagagctttcggagaagtgaacacatagaagttcctagaggttgtatgtccagcaaagacaccacaccttgtactttttaccatatgccctgtgctaggtgtcaccttgtctgatgcccatagttaattattccttttatatttaaaccagtaaactttagtgcttccctaagcactgtaaactgctttaggaaattagtcaaatctgaggagagattaatggcagccacaatttacagccgttggtcagaaatacagggagtgaccaactggttgccactggcatctgcagtgtggggtagttgtgtgggacagagcccttaaactgtgtatgacaatatcaatactgctgctttcaggaagctagcatcgtatctggattgaactggtggacatccaggtggtgcccgctgtagaatgacttgctttggtgaggagaaatctcatgtttggggttatgaaagtattctgtattgaatgtggcaggaaaacccatttttccatagactaatataaagaagggtctcttacattcaaagatagcactaggagaggcgataagcttctgaagtgttttctactgaggagaagctggactttctaaagcaactgaaaataacattcaaaacttcttggcccacatttctgatgagatctggaaatgtttggatggagatcattcagggtggtatggctatagacattgtccatgtctggatccaaacatttcttcctcttattttgaggccttcctaattttaagctaatagatacaacatatccatgacttacagacgacgtgtttcagtgacctacaatgaaatgttcatgtcaggttatgctggtcacaaacattaaacagctaatggtaggggttgtttgtttgtttgtttgtttgttgtcttcctccaccacaaatgtgtttgctgtcacttgtgtgtgtggtcaccaaggaaaagggatctattttggcagattgggtgatagaaggtacagagtacacttaaaaaaaaatgaacctctatggccacagggagggtatctccaggattttggtaggggacaggaactattaagacaaagtgttagagagggatggaaaggagcccgtgagatatccacggccagagtccgtgactggtgtctcgaaggattgttgagacctgtgagcctttggaagtgaagataggcaggcacattcagcagctacataatacatagtcacaactctgaggcataaacattccctaaaggaaacaggatctagcaagctgtcattcaccttcacagcttctttccttcagttctctgactgaataaggtatgtggcacagtttgaatatggttcatttccaataatcatgtggggacttcattctctgacataatgatggtgaagtgtggtgacttttaaggatgatcagaggtcatggggcatcctgggaaaggattaatgcggtctctaaagagattagctcctttagatcgggtgattgtgagactgaacatgaccctttctctcccatcagtggcttctttttcctctctcacacacatatgttcctaacacatatgttgtggaatagccacgactctcaccagagcccagaagatgcaaatgttacaaacttagaggaagtgtggataaaatgagcctctatcctttataaagcaataagattcagaaattttattataacaacacaaaaacagaacagcacggtatagttttaatagtgagtggatagcaaaagaaaagagaatccacacgtagtgagcacctactatgtgctaggtttattaccatttagtctatagtggagagagacctcagttgtcattgatgaacctgggaaacttttattgtttcagctttgcatatctctatataaaacagtttatagtatccgtacagaggttcaaataacactaatgtatacaggaataaggaagtgatcatgcctggtatttgtgaacctgtactccctgccatactttaataccacttaatttttccaggaataatat

SEQ ID NO: 21846 - DNA, 2040 bp, Mus musculus
gtggacctggagccaggcacaatggactcagtcaggtctggaccatttgggcagatcttcaggccggacaacttcgtgttcggtgagtatgtggcatagctgaagacagaagagcacaaggtgttaattatcactagcacaaagggtggaggagtgtgatagacagggagcatacatagcagtggcgcctaagccttatcaggctttgaggcaattgcatcttagctttttcaaaggcaggtgtgctctgttaactcatttataattgtattgataaccaaatagtttattgctttattatttattggccatttgataataatttgaaatagccttatctgagaggtgattctttttttttttttttttaaagaaggaattttcccaatcatggctgacttaatcctcctttgctctttcaggccagagtggtgcaggaaataactgggcaaagggccactacacagagggggccgagctggtggactctgtcctggacgtggtgaggaaggagtcagaaagctgtgactgtcttcagggcttccagctgacccactcactggggggaggcactggctcaggcatggggaccctgctcatcagcaagatcagagaggagtacccagaccgcatcatgaacaccttcagcgtcatgccctcacccaaggtctctgacactgtggtggagccctataatgccaccctctcagtgcaccagctggtagagaacacagatgaaacctactgcatcgataatgaggctctgtatgacatctgtttccgcaccctgaagctgaccacacccacctatggcgatctcaaccacctggtgtcagccaccatgagtggagtgaccacctgcctgcgcttcccaggccagctgaacgcagacctgcgcaagctggccgtgaacatggtgccattcccacgcctgcacttcttcatgccaggctttgcacctctgaccagccggggcagccagcagtaccgagccctgacggtgcccgagctgacccagcagatgttcgactccaagaacatgatggctgcctgcgaccctcgccatggccgctacctgaccgtggccgccattttccgtggccgcatgtccatgaaggaggtggatgagcagatgctcaacgtgcagaacaagaacagcagctacttcgtggagtggatccccaacaacgtcaagacggccgtgtgtgacatccctcctcgtggcctcaagatgtcagccaccttcattggcaacagcactgccatccaggagctgttcaagcgcatctcggagcagttcactgctatgttccggcgcaaggctttcctgcactggtacacgggtgagggcatggacgagatggagttcaccgaggcggagagcaacatgaatgacctggtgtctgagtaccagcagtaccaggatgccacggctgatgagcagggcgagttcgaggaggaagagggcgaggatgaggcttgagttccccaggccaagcaggttagggaaagctgagatgaaaggagggggtgggggggcttaatctgtgaaaataccttggcagttgaaggaaggagaatggtcttaggtttgtgctgggtctctggtgctcttcactgttgcctgtcactttttttctctttttgtaataccgataacatcaatgtaacacttgagatctttctgaactcctgttgtaatggctaaaatcacataaacctttgtgtcctaacggtgtcctcttttctttctcttcctttctccctatcaagctctttgttatcaacttaaatccacctttctgaacacagaaaattttcttcctttagaaaagactgaaagctcaggtgtttgtttcttctttgggtatgctattaatataagttgaaccaaaaatggccttactcaatccaacaatgagaagaaacaatggattttaagatgtcctttggtacacgacttgtttattgagagtgtgtttttatgaagatgttgccagacctttatttccttaaaggtttatttgagcagttacttag

SEQ ID NO: 21847 - DNA, 1176 bp, Mus musculus
tctgacagagatttcacaagaagaacatgattcacaacaaactggtcagttggactgcatcaaaatcaaatgtttctgctcttaaaaatcagtaagaaagtgaaaagacaggccacagtctaaaagaaaaatatttatagagtagatgtcttatatagaatttacagtcaggatatataaataattcccaaaacataataataaaaaactaacattgaattttaaaatgggtgagtctagagaaatagctcagtgattaagaggactggttgatctttcaaaggacaggaattcaattcccagcaaccacatggtagcttataactgcctaacttcaattccaacaaccttttttgagttctattggcaccaggcatatacatggtatacaaacatacatgtaggcaaaacacatacacacataaaataaatggcttttatttaaaaataaacaaatgcaaaaataaacaaatccaaacatttaaacctgtaatcccagtattctggcagcaagaggatcatgaatttgaggctagcctgggctacatggaaattttcaagttagcacaggctatatagtgagatcccatctgaaaaaaaaaccaaaaatcttttttaaaaaaactcatgcctaaaccaggtatggtggcgcttgtgcctttaatcacaaaacagaaaaaggtgggtggatctctatgaacttccagggtaaccaaagctacatagttacctagtaggactttgtctcaaaaaaaaagggggggggggatgaaaaggaagagaaaaagaagaagtaaagagttgactaaatgtgttaccaaagaagatacatgatgacaagcctttgctcactccaaaacattgttatagcactctagatatttccaaggagttacatctcagtaaacccattagggtggcttcaatgagaatggccctcataggggcatatgtttgaatacttggtctccagttggtggaactgtttgggaaggattgggaggtatggccttgttgggtgtatgtttcactggaggtagactttgaggtttcttggtgtatgatcagcctttgcttgcaggccaagatttgagctctcagctctagccacctgctaaactctattccaccatcaatggatgataaccctctgaaactataatccccaaataaact

SEQ ID NO: 21848 - DNA, 1242 bp, Mus musculus
aacgttaaaaggtcttactctccacccatccctacacctgttttcataagttatgcacaaatgtcaacagctgagacggggtgggacaagttcttcattttgctctttattaagtcaaatattatggaaatatctacttattagcacccaagacaaataggggaaaggtttagatgtttttgtgtttttaagactataaccacctgcaactggaggacagggctgataacgggtttggccacaaaatggaaagcaagcaaaatcagacctcgtaaggggagtatcacacacagtcacgactacttcccagagccaaacgagaagtccctgaactagaagtgccattcaaagaatctcgtgaccatcacacacccagcccctgggtggcacatgggttgagggaggcccacacttcaactcctccctgttctgaatgacaccacctcactctaatgtattgtgtgtgttttagagaaacaatatggtgtgttgtgtctagtgaggaacgcctccctacctctgtcctttctgcaacccaaccatgcgtgcttttcctctaagagccgcgtgactgtacgtgttgaagggggcggtacctgttcacagcacaagtttatgttgagctctgaactgtcattcacagctgcgtgtctgcatggtgtcgcatctgttgtacctttggggaaaatttgtatgtaaatgtacagaaataaaaatgttgccccattaacagatttcctctggaatgtcttccctacctcacctgatggtatccacaaagggcatttcactaccactgaggacgagtaagaaaatcctccacgttgatcagacctccccacgtcactactttcaaggcttcttctgtgagcggccttcattcgccctgcagatggtggggcctctcactctgctttaagagtcctagtcttaaaaggtagtcagaggctgagatcggattaaacttaaatgcttatgtagtgtaattctcaaaaccatctgagaatcctgcacatttaagatgaatttttttccctcctttgtgttctgctaatccgtggcctgaggattcctagagaggacaaggaatgactatctacactgtgattctgggaggaaagactgataacacaaaactctcttctctaatgtagtattttttaacaagaaaataatatttctttaataaagcatttataccaaactcttctctccatagctgattttgtgtcacttactact

SEQ ID NO: 21849 - DNA, 1179 bp, Mus musculus
cctcggcgcccctcggagggcgcgcgggctccggcagcagcgcggagatccagccactgcctgcgctgcaccccagcggcggcccgcactcgagctgctgcgcggcgacagccgccccgagcctcctgttgctggactacgatggctccgtgctgcccttcctcgggggcctgggcggcggctaccagaagaccctggtggtgctcacctggatcccggcactgttcattggcttcagccagttctcggactccttccttctggaccagcccgatttctggtgccgcggggccggcaaaggcaccgagctggcgggtgccactgtcaccggccgatggggtgacatgggcaattggaccagcccctcggccacccccttctccactgcctcctgggggaccacgagcaaccgaagcaacagcagcgacacaccacccctcccatcccctccaggcaaggggaacaacgactcaaattgcgactgccacgcgtgggactacggcatccgcactggtctcatccaaaacgtggtcagcaaggtaagggccacgaccgccgcgtccccgcgttcttcttgtgaacctttttcttctgacctcggtcgcctctgctctgtgctccatctctcattctctgcagacttaggtccaaacctacccagttgaggaacccaaaatgttagcctgtgtacgcacaaccccgcattgactgggctcccggctgtccctcaaaggagatgctcttacttggatgtgaagccaaggcttttttgccgccctctgcggtgcccgtgacgctgcatccgcttcaaagagaccgacttagccttttctaatatccacacaaactcctgtcccagtgcacatatggaaagggctcccctcccccgaaaggttcaaatcctctcctctatctagctaaggtgtcagactcactgatggctcagcaggggccctggaagactcaatccctcttctagggcttctccttggagccaggacatagccatgttctttctgcaggctgcctgtccctgtgtctcccactaagaactaactatccaagagaaatagtgttctactctcagatattctttctagcagatgtcagcctccccacacgtgccttgaacagattaaagccaattgaatccaagttatagacaaagaagcagagccc

SEQ ID NO: 21850 - DNA, 1151 bp, Mus musculus
cacatggtttttggggagacattttagcagccagtatatctatttgtatgtttgtttctgttttactacactacaaatgattttgtgattagactacgtttcttctatcattttgtgcctaggttttggcaatacggaacacagcagtaggtaatcataaaatatgttgggggaaatcatggaagaagttaagagccttgattattgtgatgtcattgaaaacatggaggtcaaaagttcaccttaccacacatacaaaacccccaaaagaattaaaaacaatcaatttaaggagaaggaaggctctttctgttcccagcacatccatggcttatggtcccaaaaaaacacttgaagtgtgtagctgctccaaaacattggataagttggctgacgtgtttgctcctcatccatccactggtcctcacaggctgagggaatgcctgcctctcatcattttcctaaggaacagagtatgtatgccctgactggagatgaagtaaaaaaagatttgcatgcagctattcattaagattgattggaaagtcaggaccgatataacctaccctgctggttttatggatgtcatcagcattgacaagaccagagagaacttccgtctgatctatgacaccaagggccgctttgctgttcatcatattacacccaaggaggccaagtacaagttgtgcaaagtgagaaagatctttgtgggcacaaaaggaatctcaaactggtgacccatgatgctcgtactattcggtaccctgatcccctcatcaaggtgaacgacaccattcagattgatttggagacaggcaaagtaactgacttcatcaagttcgacacggggaacctgtgtatggtgactggaggtgctaaattgggaagaattggtgtaatcaccaacaaagagagacatcccagctctttttgtggttcatgtgaaagatgccaatggcaacagctttgccacttgtccttccaacatttttgttattggcaagggcaacaaaccatggatctcccttccctgaggaaaaggaatccgcctcaccattgttgaagagagaggcaagaggctagcggccaaacagagcagtgagtaaaatggtctctaggagacatgctggaaaagtgtttacacaagc

SEQ ID NO: 21851 - DNA, 1942 bp, Mus musculus
aatccaactaaggacctgttggctgacttgattgggtgccagcgacttcctgaagatcaacgtaaaaaagtacaccagctaaaggacttgttggaccagatcctaatgttggacccagctaagcgaattagcatcaaccaggccctgcagcatgcattcatccaggaaaaaatttaaatgagatgaagaaactccaagggtttgagtaattaaatacaaagactgaagaaatttcacagcagtttattattaatgtatataaacttataaatatttctgcagcaaatttgaggaagcatgatatatttgaattaacaccgagggtgatatttcttttagaaatgttagttaatctgttttgtgtcttatgtgaaatttcactgtagaaatgttttaattgccaagactgcacagaattacagtgctaatgtatatggttgcagttcacataaaagacaaaagcgtctgttatgagtggcagtgctgggtggttgatttgtttttagcagacttggcttcagtttgctcttcagatacaatggccagcataaatgctgtttatattcacgttttcctaggtgtgtgtgtgcaggccacagcagcatgcccttggtgtagtcagtgccgaagggagtctgttccttcttgagcctgcctgcagggatgtctcctcttttaaagcaggttgtgtacaacattcagtacactgaaggtaagctaaaccatcaacatcaccagtgttttagatgttattttattggaataactgaaaatgagggatagctttgtggcagaattccctgcatgtgtgataactgatcttgttttattttttcgcatcgcaactgtggcatagttacagtttctgttctgtcatcacatttaaaattggaagcatatgcgcttgatggatagagcgccttcagtgtactgtttcttatcaactttacttttttttaaatcaacttgctatagactttatacattttgttaaatacagttcttagtgacatagagactgcatagttttcatttactaattaaaatgttgaggcctacttctgaaagtcctcatatttaaaagatagacaacataatgagatttttaactatttgtatgtcattttgaaagtgtactgctttatggtaaaagtgtttttcatttgttcattgtttgcattatttgtgatcatgttgtctttcaatacaggcataaaccttccactcttgaacaaagcagctgctttttaaaagcggtaattgcttctttaccttttatttcttttgtaaatgaagcttttcttttaaaatgtgactttaaagtgttgtctattgcataaacagttgacactcacttactgtaatgagaagattgttctgcatgggaagtgggccgtgcagatctctgtatgttctcagtatgcatcactagataataaagtcttttgtgaacaaggcatttgtagccatttttaaaagattttgtcttcagtgctggtaagtcaggtaaactgtaaatagttaaagcagtctttgtttttctcctgaaaggattacctgctaaagatgtaactcagtatagccttatttctaaattgtttttaataattaaggtcttaattatttcatccagaaaaagttcttcaaattttgtcagctttcagtgtagtgaggttattcctcagtgtagtaggttatggggtctaactcaggatttaactaatgtttctgctattttctcacttttccttttgatggtgcggaaagagaaaaaggaaaacggggcacaggccattcgacgccttctccaaggggtctgatttgctgagacaccagcttcaccttcttaacaaggttatttctgacagcatgtgtagataaacatttagcagcaatttaaaacaaaatcatgtaaatcggcttggttttgcgacacaaagga

SEQ ID NO: 21852 - DNA, 1190 bp, Mus musculus
cctctgaacctacacccgtctcctcatggttagacttactaaaataaacacacggcagtttccagctacaggtagagtgaggccttttaaacaaggcatcacgggcgcagcgtccaccttaacgatatgggtagggattttcccaccatgcttactttactttggtgctaatatgctgcatattcaggtcttttatagttgttttcactcaaaatagtaactgctttcttctgatgattttcctggcttcattttgtagttatttaataagttgatttccactagaaacagttcatcttatgccttcaaagcttttgcttgctctttaaaaacacaaagttgcttgttacttgttctttgtgttttaggtgcagatcactggaagatgacggcagccagaagacatgagccaaggtttctgtcccataaaagatcttttcagttctcatttagtgtgtgtctgacttgtagtttcagcgttacagtttgggtttcattgctgtggtataagaacagtgctgttgtgcccatctgtaaagtgctccttgtatatcatagttcctgcagctacagccttcctcgaaagtaaaaagcaagtttagtcctaaaaagcccacatttcatagctgtcagaattaggtcctgaagatcactaagaaaaaaaaatagctgccaggttagtgtacatttgaaaataacctgcaagttgcatgtgctagccacacctgtaacctcagcacgcttggagtggaggcagaaggatgtggggttcaaggtctgcctggcctatcagagctctttttttttaatgctttggctttaagcaggtgcctaaatcataaaagtagcctaggtttaacaagctggtcaacgcctttaatagctgtgctttgttttagttcgttgtgaccaactttttagtgtcagagacataaaatagtaatggcaggtgttgtggaggtgagaaaggcggtactataccatcatcttcccgacctttaaggaaccggggagctgcactagagaaacgtccttctgtttgatgtggtaatgtcactgaggtagagtttgcagttgtgtaagacctctcttaggttgaggtcagttgtgaatgatcctattggacagacctgcgttcatgtttctgattagctgaaaagtcttcaggggaagctgacaggaagtttacg

SEQ ID NO: 21853 - DNA, 1099 bp, Mus musculus
ttttttttccccccgtaacaagattaaatttctcaggacacttttgggatacaaaatacatattttatggtatgtagcagagttagtgaaatgtaatgttctcattttggccccagatttgcatttcttctagtctactctggcatcatagggagaaatagactcggaaatgaaacaaaggaattacatgtgttaaaatttaaattatttaggaaatgagtgtgtattttttggataagattgtatagtgagatgtgacaatatctccttatggtagcatttgggccctataggtaatattttgtggctcttatacattcaacatgaatttattctacatgcaatgtcctaatataaatgttcactgcaaatcatttgtaatttttccatgtcagtgttgaatacagttgactaagatttgggattttttgttttttgtttgttttggggcttccttgccataccattgtagcatccttactttttcttcttctgtgtatagggtaagggactgttcttctgaagagccattccatttagtgatcaagatacggaagctgacctaagaaaatgttgtgtattctaattgttcttgataccatttgagttgtaacttacgttgtagcagcaaatgatcccaaactacttaataggaagcttaataaagtgtgcctcttgctaccataccgtctactggcattttctttatacctggtattatttctgagctcttgttttacaaatggcagatgtgctttgtaaagaactttgcttaaatgtaatttagggcttgtgcattaaagctaaattggaatctttacctaacagattctcagaagaagggcctccggaaatggctcagtcggtaaagtgcacccacatagaagctggacactggcttgtgtcctatagcctagcgctgctgggagggcagacacaggatactctggactcgctgccatatagaattagaccgtctcagaaatcaaagtggagtgacatggaaagacacaacatcagcctttggccttcacgtgcgtgcccacacataaaccatacatacacacaaagatcttaggagacttaaatgtgtactttg

SEQ ID NO: 21854 - DNA, 1118 bp, Mus musculus
acttgaaggagtattttatatctctgtttgacacgtcttaattcctaatctctggggccattatgtaaaatacgagttccttaactgtgagccctgtggtaactgatagttttacagcccagatggctatcaggtgactaatggtgggtagtatatacagtcaggatacattttatgggggctgatgggcacacgcaggcttctgtggggttgcatcatgctgtcactgtggtgtggagttagttctgctctcttgttcttttttaccactcccctatctacctcagaaagatcttcagattagcatgtcactaaggttctactcctacatgccttctgagtgtggtttggttaaatggatgaatacatatctgtcaattccttcctgagtagcttcagatttatagtggttatgcagaataaaacttaaaatgtcacagaatacatttcttttttgtttggttggttgtttttttgtttgtttggttggttttttttgaaactttgtttactctctgtgtagccctggctgtcttggaacttactctgtagatcaggctagcttcaaactcagatctgtctgcctgtgcctcacaagtgccgggattaaagatgtacgccatcaccacctgggctgcaattaaaaaattgttttaaattgtacgggtgcgtcacgtgtgcacttagttgcacgtgtcatgatgtacagaggtcagaagataacttggtggagtctgttctctcctttagggatagcattgatgtggatttcttcgcttccactttgacgttgattctagggttcaagcccaggtctgccaggcttatgtggcaagcacctttacctactggaccattttgctggtcccgaaaatgagaccttgttgagatagatgttctcatgttggtaggagggaatcagatgttaaccgttagagctcggtagctgtagggacacccagtaagtactccctcccctgttgtgagaaggcaggccccaggggggaaaggagcactgggtcagcgtggtggtcagcgtggtggtagggagcagctgttctaacatttttcagagtcacaatttcactaaaggggagggtgaagccttgggagctcgc

SEQ ID NO: 21855 - DNA, 1166 bp, Mus musculus
acattgtatttattgtaagctttggacactagctggacagattctccacctttctaacctgacaacactggcctggcttacatcctgtcatgtggcctgctacttgtcccttttagtcttctcctggcacttgcttcttccatatctggctggtgacctccctttgccacctggaagacccaccttaacactgtagcacagctattggctgttcagctctttatttgaccaatcagaaggtggtagagatacaaattactaagactagctacgcttcataagaagacaataccgaagactggtctgcactctactctcagctggtaaggaaatcagcacttgagtaacacaagggcacactttacacgcagtgcacaaagtcctgtgcctcaccatttttgttagtctcacagccagagacaacttctgcgtttctctagattcttcttgctggaggttttgtcaggcttatttcttggagtctgtaattgtgttgttttattgcagcagttctgagtagatatgatcctttaatctgaatgtaagagataggaggaggttcgttccctgtagtacgtgttggtgccctgaggagttacatagttcctaatggccttcccttgatccgtagcagagcgaacactggcttttctccctgcttcttttctgaaattggttgtgctcacattggtgtttagacagtctccttgtattttctgggctggtcttgaactactggacccagactctcttgcttacttaattgtgctagatcccccatgcctgctttttcttttgcccatcttttgcattattgtgcagtgttagaatctccaacattagcttccccctttgtttctgttttgcatactttgaagctgtcattaaatggatatgtatttttaacattcatatgtcatgactatgaatgactttttaaatcattgtagactctagtaacaccctttagagctacttgagtgtggtggtgcatgcccttaatcccagcactcgggaggcagaggcaggaaaaactcttgcgttcaaggccagcttgttccagaaagagttccaggacagtcaggactgtttacacagagaaaccctatctcgaaaaaccaaccagccgaccaactttgaagttgacttcattttgcagtagctgt

SEQ ID NO: 21856 - DNA, 1178 bp, Mus musculus
aacagaaccacacctagttccttctggatagtcactctctgacaaatgacaaatgtgtggcttctgaggtgtgacccagtcagcagtgacatgccactatctttacaacatttgtggaaaatacatagttttatgttgggttcagttcctttagaacacaaattacctactcttattaatggagtttccttgggtgggaagaagaaattcgtatgtaggggaagttacaccagcaacctcagacttaaccacaaaacagtctcgaatctggatttcagccaagtccatgcgaacctgaatcacatcatgactttttgttttgttttgttttaactggcccatggtgttactcttggcacccacccacttggtcatggtttgtccatggtctgtgaccactagaggatatgaggtagaccccctcagaactccatcctcagcttgtgtctctgaggattggggttccaagacatcatctccacccatcccctctggtgtctcacagcatgtcaactctttttccttttaggcgaatgaaatgctgttcagtgggcggaagttgacggcacaggaggcctgtggcaagggtctggtctcccaggtgttttggccaggaaccttcacacaggaagtcatggttcgaatcaaggagctggcttcatgtaacccagttgtacgttacagtatcttgtcttattttgttttcttttgtttctttaataatgaatgaaaagcttttcctccacagagattaagttagactggcagcgtgttccaatgtgttcccctagtcttccttgtcctgtgcacgggtgccaccaccagtgctaaccatttactggctgcaaagtcctttggtgcagtcacgtgcttaggtacccataggtggaggccagggttttcagtgactgggttccatgccatcccacagcagtagtggtgtgtcagggctggtccagtggtgggtgtgggtctgagtaacaaaccatctcaaacaaatagcttgggctgtttcaagtttgagtagcactgttaaatatcctgacagccctctgtatccaccacgcatccctccatggagatcagaatccacaagcactgaaatcccttacacaacatggcctgctgtagtctgcgtgtacctctgcatacacttgaggtcacctctgtaggtgact

SEQ ID NO: 21857 - DNA, 1292 bp, Mus musculus
gctctacctttcttactgtcccattcttacccagccaccgtgaagagcccagtgtctggaggaaagcaggtggtccagtgtctgtgagtcactccgtagctcgagtgttacttgctaagttatgaattagcattagtgggtttaaatagtttttctgaccctttttgaaaaataactacataagtactccttgtggctgggtgagaaatactactttgcatagttttgtttgtctatctgcagatatgattgctgtattacaccaaaagtattttttatgtttataaagtgtaatttttaggttcacttagaatatattttatttaatttaaaattctcttggcacactattaaatacgtaaactcctttcagaacagaaaagaactaccttatatttgacatttattatccagtctctgctcttatgtctgccatatattgcgcacggtttcgtgttcacgagtaccccatggtgtggggactaacttcagatgcctattatgactaaggcttctaggtttgcaatcatattgaatgtatgaagactgaaataaaataaaaaaccttatttttgtacagttttgaagtttatactcagaactgacgcctccccggccatgtggagcgctgtgcagtgtgtacatctgtctttaccttggatggattggtacagtatttttgcatctgtgggaccttctctttggttcagtagtttgaactatatatataaactgtacactctgtaaagtttttatagaataaatattcagctgtgaaaactggttaaataaaactaatatttcttaacacattgggagtgtttctctgcgtgtccttcccctgccaggtttcctgtggaggtgtcttctctgggttgttttttttttttttttttttttttgaggttcacagatccatagcccactgttcactactccttctcacactcacgtggatggctgctgcaacttctccaggaagcaaggcatgtttcaccaggaagcaaggcatgtttcaccaaattggcacctacaaaatactgatgctaggtctgtcacttcctctgctgaatcctgctctgtgggccccgggcacctttagtgacctctcttactgtgtctctcatagccagcttgccccagcctgtcactttcctgtcctaagatgggaatcacctgaagcttgtgagaaagcccctaatttgtgccataatatgtgggaagatatctcaaaagataatgacatcccagggggagtccagaaaggaagggagagccctggggaagttgga

SEQ ID NO: 21858 - DNA, 1131 bp, Mus musculus
aaggattctcagagcctttgtgtatcttaggctagcaaaattatgcctggcaaaccaggaagtctcatgtggctgagcatcgttgaggtgaagggtctttcaagacaacccctaggtgagataagttttcttaagtggaagtggacttgctgaaggtgccttcttgtgtaacaataaacttctaggaagctgtcagggttcagtccttcagagcctgatatctccactgcttgagaagcccaaattcatccttcagtgccttccatcaaccaatagtctgaagtaattcagagcactgacctgtgccatgtgctacctacttgttactgaagaaatggccagaagccaaatgagcctcattttcatctcacaatccgtgtcttgttttgctgcagccccgggttaagatttctcatttggacacaggcttctaattccaggtggcattttccttgtcaagctcttcatgagtcaattgtcatctgttgtaaaagctaccaagcatctagcttgtacctgatccagtcgctgtggggctggcaggacagagggaaggacatttaggatgatagttactcctagttcaatatgaattcaagttgacatgactatcatggctgaagtcttataggcaagactataagaagggtgggaacgggaggtaaaggaccttttccctgtggaggaaagccaccagggaacttcatcataggactgcttcctccaccctccagccacactctgggttcttagagtacaactttgggaaggcatgattctctgcaggattccagttccccagcccgagtttcttctgagccatctttctctaaaggtaaaggaaagtgtattatcaggacaacacactgctttattggcaacaactttttctgtgacaataatgaccctatttacaaaactgagcattttgtgtattgtctcatttttggacagggggactcatggggtgaattaacacaggaagacaacacaagggtatgaatcttgtgtgtttcattgagcagctccgaagcaatgtttaaccatgggctgcgtggttgatattctatatggctgagaaacgccccttccccttacactccccagatggagcttaagtgatgtatggat

SEQ ID NO: 21859 - DNA, 1099 bp, Mus musculus
gtcttgtcacactggcaggcattgtcagggttagatccaaggtcagggttttctttttcttgctgctgggtgcagtgataatctatgctgtatgaaccaaaacacatcagaaattggacaatgtctataccagattgtatttgagactgacaaggcaaaacaaaaccccttttgtcgctgacctcatatgtcaagactgggattagtcttccagatccagaacgtgttggttcgtgagtgtcatgacagtgtcgtgtccatgagaatggcttgggggagcagaagagagagggagctctcccttgacagatctgcccatgctggcaccccatccacctggcttcctaccctaccaggctctacctgggattttagacaaggtctcttcttagaattctttcctgtagccatcagaaaaggagtgagtaccaggccaagcactgggacagagtgtggcgccattgtgagctgtctgtgaagctagcagaagaggggtgcggaggttagtcagagtcaggctataaagaagaaagatttgtgtggacttagtctttcacaggtttcagtccctggttggctagcttccttgctttgggccacatctcactgtggaccacataggctggagaaaaactcttcaccttgtggcagccagaaagcaaagaaagaaggaaaaaggaagaggtcccaatatcccaatcatggccatactcccagtaacctaactttcttctagactccaccacctaaaggttccagaaccttctgactgcctcacgccgatgatcaaaccttcgttatgagggccttggagtactaagatgccaaccataacaaagtgtttgtctactgcccaaattccgctgcagaccacacccatcctttactctcaagccggagaagggacaggttagagtgagattagtaaactgtagccatgtgttccgaagactgatgtagcctggagtggccctgtgggtggcaccagcagtttaagatacactgaagtaaggaagggcattctgtgtctgcaccagccacatctgaaggaccatgaacaccaacctactggccaagtttggcttccctggtttccagg

SEQ ID NO: 21860 - DNA, 1173 bp, Mus musculus
taaccttgtggatttataactggtgtaggtcccatctgagcacagagtatttactatctgttaccttcctaacaaggacaaaaaaaaagaatatcttttttattctttaaaagaaccagttcttgggaggaagggagactgccgaattgtagtaaagctctttgttgtgagatctcagtgcacactgtctacctcaccattggtttctacagtgtatttgttatgacatagcatctacaggtgtgtagctcagaggtagaattccttcctagcatgtaggagttaagtccagtcgccattgcctcactgaaagaaaccacagggaaaatcatttgtcttgaatgagagtaattgggaagataggaaagtggatcgactgccccatagtcccttacacagaagttttgatgatactacttttattgtacccttatttttaattgacaaatatagattgtatgcttttagtgtggagtgcattgcattgatttctatatgttgtaagatgattttatcaatctagcttccatgactatcacttcacattcctgctgcatgtatatgagtgataagtacatttgaggtcttgtctcagtggatgtagatagaaagttaccactgaccacagtccctgtgttggtcagtagattccaatggtagcttcagaagcctggttctctgtcatagtctttattctcctctagtttacctttagccatcagcaaaagatgagagacgatcacctctatccaaccatttatttccaggatctgagaagagtatgggaatagtagataaatgagacttggtgtggcattccaaataggagattctgtatggcacatcacaataaattttgttctccagaattttttttaccaaatagaatctaagaatcattttgttagtatacagctcttttaggaagaatagccttacttgctataataactatcatttattgaattgccagatattattcctgttgtcactgactagggtgaatacaaacaacaaatgcctcttcaggctgcagaattagacattcagtatagaagtggtttacccagcagcaggtagaaaatgtagtgtaagattagagggtgcagggaacctctggtttatacagaagaagaaaaaaaaaggacaaacattacaattcagtacatgtga

SEQ ID NO: 21861 - DNA, 1650 bp, Mus musculus
tccttcttcctgatatgttagagacagtttccatctttttggaagaattttagtaagttcaagtatctcttgtatgtagtaactccttccaaacattgttcaatggaaaggagagttactatggttacaaagccccaaactgcaaacacagcacaatggccccttaatgtgaagataaaagcataggctccttagactaagataaatactgtttattctagtaaataagtgatttagcaggaaacagctgaagggttctaccctctccttttccttctatctgcttgagaataatgttaccctttacatctctgacattgctacataggtcagcctttctcaaaactggtccagagctgcatctggggaggacagttggacattcctagtacttgcttcttatgttcgaaagtagatgttagagaggatatagaaatggggaactgaacggaactgaaagaggcagtcagattctggaatatgacaacattatagaatgccacttccaattcagctctgagaggagcagtggtagcagctatgttgtatatctagggtatgacatgcacagggcttaaacaatgaagaacacactaatgtgtgagcctgcatgtcatggtagaggagatgcagcgaaggttgagagaatcacagtgacattttaatgagagaagttgaggttgcaataggaagttagcaataaaaagtacacatggaagtaatccttcatttgttcatattttttgtaatgcacttcagctttctaggcaccatgcgtagctcatccagtctgatactgtgactgctttctaagtcattgtttaataaattatgcacctacagatatatgcaactgccttcctttcatgttgcaaggtgattccatttcaatacttcatttattcttcttaataaaaacttatgaaataggttatctcacttcagcacagagactctggaaaggcctttctgctctctcaggattgcaccgccagtcagaggtagaactcagctggaagacaggtttcctcagtccagagcttcacctactatgttctgctgatgtctgtgcttgtcagtgcctctcgtttatgattcaaggtaagtttgacacagcagtcatgaacactgcagagggtcatttctgaattcttgtcttctgttgaagtcttgattctaaatcttctctactcttaataacaaagagttatttcttgtttttgtttatttttctacgaataagactttaaaatttttcttttaagatatgtgtacatatgtgcttaaaacagtcgtttcattttttgctatttaataatgtttgtattcattattacatgtgcaagacagtttatgagaatcctagagtaaaagaaacactgatgctgagtatggtgtgtgtgccagcaatcccagtacttaggaggaagaggcataggagttcaggtttgaggttagtctaggctacatagtgaggccctgtctcaagaagagaatgcagagagagaaatatcgatcataacagaaatgagtaaaggacaactgtgtcttactgagcactgactgagtaaaagtgtgagtgacagtaacctctgcaaccctttccgcggagtaattagcagcaagcctgctgaagctctggttcagaga

SEQ ID NO: 21862 - DNA, 1195 bp, Mus musculus
atgaaacacctgcctacagtcctcagctatgaggacagcaggatttctgaatccattcagccttaccaagattttgtgtggtatcacagtttcacttgccccataatttcccacctccaattaataatattaataataataataataatttagtgatctttattcaaaaatgtcttttatttggagtaaataccatcattttatgcacagtttctcaagtaatgtgagtatatgaggcgtggaagcttagttatgttcatgctttatattacgttctttattctgtctgtctggtcctttctatattgaagccagagtgagggagctgggtcccaaattggatcacaattgtagagttggtttggattcagcctctatctcttgctgtgccatggtgcacctcacttaacttctgaactccctgatttcttactgaagaatctggggttaacaagcgttataagcattaaatgaaagcatgtaataggtaaggcaatgactttgcaaggtagaaaatacctgttaccatgagcttatgattctatgagctgcagcagtgtcaaaaggtctgtcacagaaactcagagaaataggcagcatgggtagactatagcactcacagtaaggcttgtggtgcttaaggagcacgtggtctctggatatttcagtgagcaaagagaaaaggaattgtgcattgaaaccatagcccagacccacacaaccacctgtaattctactttcctctaatccctttccctttgcatagtgagaactttgcatgtttgtatattattcttttgacttcctcttcctccttctcttcctcctcctcctcttctttttttcccttgaaatgtatgcttaacatctagggctctttgaaaaaaaatcatttttgctttctaaaatttagatttaattggcttttgttgtccactttccttattaaaccgtatctgaattagtttcttgcatctcttctattctcatttgaactattcccctggcttctgcagtcgggatagaatttgtatttagggtcatttgggtttgtatcgggctgcgtaataaaaatgtcagaaataagtgaaggcctagtgtgaaaagaggtggcactgcctgttttgtgtggttgatggaaagctaagtgtccatcaacattgtggatctgtctctccatcacaagattaaggga

SEQ ID NO: 21863 - DNA, 1146 bp, Mus musculus
atcatctcttactacattttcacagagggtatacccaatcactgccattttcgcaggctcccacaggggtcttcactgggagaagttcttctccagggcgacagcctggctctctcgggacagaagggatttacttaaggatatatttgaatcataactgcaagggtcttgggaactgaggcatttctgaaggtctaaggccctccacatctggatattctatcccatttcttctgtttctcaaccagcctatattcagcttcccacttcatacacacacctcatggtgtttcctgtgtaatcctcttcattattacttgtggcttctgtagggagccactagctcaactggtgtaatttattaccaccatctttggggcaaagggctttgatcaggctgccttctggggctctacagtctgtggatggccatgatgaggccaggaatccagttctggagtagttggggccactcagcaaacagccctgctctcccatacaatctctaggagggctgataggactggactttcccaaccaacccataagtgctgcctcccttccctgtccaggctgctcatgtgccagctctgtgatgtctctccattgctcgctcctgtcttacactcatttacatggctgcaggttcagggtgagagtgtcctgagggctactgcatagtaggtgctgtgtttggaatgcttgtttgtttttccaaaatcatgctgaggtttaattaccactgtgatagtcccaagaggtgaaccttttgagatgagacgtgtgcatgtcacaggctgtgccctcgtggatggggttcttgcccttctggaggaggattcagagctccttgtcctgtgcttcccatccatcctgataggacacagtcttggtgctggtgtccttttgtccctccagccttgtgagctaagaggagctatacgaagataacaacacatgtccctcccagacatcggtctgctgcccctcatctcatacttgcagactgggagaaattactttgtatttttttttaattgtccaggctaagtaaggtactttgtaataagcagtaaaaataaactaagagagaagtagctcccttccatctcatctcagtgtttgtaatggtggtgggagccttac

SEQ ID NO: 21864 - DNA, 1146 bp, Mus musculus
gaaagggccttggtgtgccttgattttcctctatgaaaaggagcacagctctgagttggcagccaagggcagactctattcctgcctcctcctgtttcttaccggaaccccaagagctgtctttttctgagtaccagtggactgagcagggcgaagtcagaaatgagggcatgtcagatgctaggacacctatcctggtaaccatctgtcaatcttcctgtgggagaaggaaagcagaggcatccaagaagacaagtatgtggtggggaaaaggaaaacatcttcttgatggcacagatgctctgggtcagccctctcttcctagactgctcctcccttccctctgtcctcagcttagacacagaatcaagaaggaggaatgctcccatctcagattttagagttttgatgagaactctcatagaataagagaacagattttatgtccctaggccaagttgtagtcactctccttagattctctatggtaccgatggggctgtggagttggcctgtgaattccaggacacgtcttcatcttctggagaggatgttagtgtgaggcagaggtggatgatggggcttctgagggcaggctgtccaatgaatccttggagcctggccctataagagaagagaaagatctatctcctcagagaccatgagaccagccaaggtcactgtgctcgggacaagaggaaggaaaccctgggacatgaaggtttatgaacatcagtgtgcacactgaaaatgcggcacagaacctgggctgagcaaggcatcaagacactattctaagcctccctcccatgccaccttcctctcccttctgaatctgacggttctctcccaggcacttaccagtacatcgtactgagtctgtgcctctgttcccacagccaggaggaagccatcagtcactaggtctccagtgcttatatgggattctctcttgtaaataaggcttggggagagaagacagaggcattcaaagagcatgcatttatattaagtcacatagctgatgcatacattacacattctgtacattgcatctttgttagtctatgtatcacatatgtatttattttaatgaaacccaacaaaacaagggaggtaatatatgtacttgaattaatcaacaaa

SEQ ID NO: 21865 - DNA, 1195 bp, Mus musculus
ttgtcctgctggcgtggtaaagtttgggtgcattgaagaggcagaaaaacagtacacccctgttcaagcagtcctcccttgccttccgcagccctctcccgttctctccatcccagtttaaataagaatctgaccccacgattcctgcatctcatgtcctggagaatacttgtcaggaggaagaacgggaacacagccatgtgtgtttgtaactggcaagaggttgtggcgacttgaccctcccccatctcccgtccccccaccccaccccgccctgtccccgtttctaccacctcagcaaattgatgtgagcttttcccttacagttcgaatgttggcggcagcctgctctcttgcattcttcagggtcaggtactcacacagagagaatggtattcagctggcttttgtagttcaaggtcatctgaacagaataagttatacttagtatactgacttagcgacgaccccttgtgaaaggttcaacatcactatttcagatagggactgtgtagagaggtgggctatggggggggggtgatttctgaacggaatactgtgttggttcacactttagaacaaggtgataagagcagggactttagaatgtcacagcctcactctgtgaccttggtgacttaatctctctaaaacctctcttccataagtggggcatcctgtgtacctcaaagggtgatctcaagggttaaatgagatcatgtaggctaatcacttggctcaaatttaagccagggtttttagtacgcacgtgcacatttattcttaatcaacttcctgatccaaatctgtggatggtggtgcccacgtgcatatggcgagggcatggagggatctcactatttagcctggggtacacatggccacattcctagcatgtggcagcgcaaagcaggaggatcataggttgcaggccatcctaggttacaaagccagatttgcaggaagggggatcctggggtctggggctcagtaaagcacttgtctagctggcggaagagcctagtttcaaggttcaacattatcagtatctttggatgcttagaaaatggatgggaagccgggcagtggtggcgcacgcctttaatcccagcacttgggaggcagaggcaggaggatttctgagtttgaggccagcctggtctacagagtgagttccaggacagccagggataca

SEQ ID NO: 21866 - DNA, 1150 bp, Mus musculus
tattccgtagatgtgtgtatatatgcacgtaagtgcaggtgcctgagagagtgtcagatacccccgagctgaagctacagtagttgtcagccacccagcatggatgctggcaaccaaactcaagtcctatgcaagagcaaccagccctcttaactgagctagccctaacctcactgggtgtgcatgtttcttttgttttaaagagacagtaccctactttgtagcccggacatgctttaaaactaattcctgtccttttgcttcagccttccatgtgccaggatggaattgtaggctcagaaggaccatgttctaataatctcataggtacatttgaatactcaatacttcaatatattagctttcttctgtgcatttaggtttgctgtagcacatttctaacactgaggaaaagcataaacttttatgttcctttccaaacaagcccttggtgtttttcataagtgaaactgttcatttgaatatttaacaagagttaaagttgggtcttgcagtatccagggaaactctgactgcagattgccacactaaaggttgaaagtattatcttacatggtagtcactgttgacactgtccagcaaaggaaaatgcatttgaactacatataagaaataggaattagttgtctgcatgctagatgttcagaacagctggaaaagtaattaaaagcccagacttcccaagaagcaagtagcaggtttgagagctgactctttgaagtggggttaacacagggtacatgtgcagaaggggtgttgctgaggggttgcgatagtttgtctttgaaatccgttgcaactggcagaagtgacctctagcaggttgtgatggctactcttgtttttagatggatcttgtcatatccgctggtgggtggagcctcagggacaactgttagagtggagtggcagaactggaggtgcaggtagggaagtgtccaggcatggaatagaatagcctctgggtgccaggagaacagcccttgtgaatcataggcatcgagagcttgctcccgttggagctaatgggtagagaacaggaaagtgagtgcagttactattctgtccctgcagagctctgaatctgaagataccacagacattgctgggctgttagtggatcctcagt

SEQ ID NO: 21867 - DNA, 1238 bp, Mus musculus
cttcactgtctctgactggccaggtcctgtgtctgtgggtcacaggccacgtggatggaggttctatctagcctgtggatagcatagcatagcatagctcctttgtatgtgcatacaagcacttgctctcagttccaatacaaagaatagtagcacataggagttactttaagaatactaatgtatggaccaggcgtggtggcgcatgcctttaatcccagcactcaggcagaggcaggtggatttctgagttcgaggccagcctggtctacagagtgagttccaggacagccagggctacacagagaaaccctgtctcgaaaaacaaaacaagacaaaacaaagcaaacaaagaatactaacgtatgtagatggaataatgacttacatctctaatccagtatccaagaggttgagacaagaggatcatgggttcaaggacaacttggtcttcatcgcaagatcctttcatttaagaaaaaatgtatatatgtaaatggtgctttattctagttagtttatccaacttaaagacagatattgtgttttctgaagacacagcaaattcataagtgaccccagaaagtatgttaggcatgtcaggtctctcccacaccaagactgcagacggtgagatgatggttcagtgggtaaaggcacgtgccaccaagcctaatggcctgggttttatccctcaggacccacacagtgaaaggagaaaatcaactcatataagatgtcctctgacctccacacatgtgccccgggtacacttacagcacatgtgcacagaaaataaatgcaaaaacagttttaagtgggctactttattggaccgcaaggttgttgactttggagctaaaatgggtgttgggtaggtgttgctcagacactgtgactggcaggagaggcaagtatttggaacaagtcaaacagcccctccaggatagctacaggaagtccagctcttggctttgagtggtcagtgggagataaggtgtggactgttagagacttggcccctcctatcactggatggcaaactgtgaaaggaagataaagagagtgggggtgttttgaacaacaggagagtgcctttatcacacgcttggtttatgattatatttttggagaactctgcttgagatgcaggtctgcgttccacagacatgtgaaagcaattccatgtctttttgattgagagtgtgcaaatcacttcttacctatgtaaataggca

SEQ ID NO: 21868 - DNA, 1722 bp, Mus musculus
attgtgttacttgtcagtttgaggtccttcagtggcactaatgtgactgttcatggaatacagcaaaagcatgtgaaaattaaaaagtaaattatttcataccaaaaaaaaaaaaaccaaccctaccattttcttaaaatctggaatcccagcctagtggagtcgggaagatggctggattaaatacagagttcagttgcccgcatccatgtgtaagttgtacatcttacaaatgcttgtaactccatctcgaagagattccacaccctctcttgcctcccacacatggtgtacatgtattcatgcacacagaggcaccaataaaaaataattaattaaaggaatcccagtatagtagcctttggcccttaagtcttttttttttaaccccttttggtgctggtacttgaaccagtgcttcagcattctccatagctccctgccagctccttgtttctccgttctcttcctccctatctgaccagacctgaagaagctgccatctttcttttagacaaaggaaatttaagatattctgttgttattaatgaaaagcaaaagagccacttgaaaaatacatggggaaatgttttatacccggtcacttcaagatttaaaaaaaaatgagggtgttggggctggagagattgctcagaggttaagagcactgactgctcttccagaggccctgagttcaattcccagcaaccacattacaggtggctcacaaccatctgtaatggggatctgatgccctcttctggtgtgtctgaaataaataaataaatcttaaaaaaaaataattgagggtgttttcagtgcttcaagcatttggtaggtcctctactagtgtgcaagggtccttgtctatacacatagtgggatttttatgaggcctttccaaggtctctaagtatgcttggattgatgcaaatattcctgtctgtttggtcaccccatccttatacatctcttgtatgcctttctactccattgctcattgctggggttggggtcgttggttggtttcatgggtggtggttgttgctgctgctgcttttttcagtgctgtagtttgttgtgggtggctctgggctgcttgctttcctggaagaggctgtctggaatgagtaatgagtcacacacacaagtggattcctgtgaaccaatcgcctaatgaataaaggagccaatcactaggcgagtagacagggcttccaggttggagagaggagagcaagcagcacagagccattcacaacatttccccctttctgttctaataaaaaaacaaaacctttctcacagtatagagtacaacaagattagacctaacacccagtccatcatctatcctaaattaaaaggctggagagatggctcagcagttaagagcactgactgcacttccagaggtcctgagttcaattcccagcaactacatggtggctcacaaccatctgtaatgggatctgatgccttcttctggtggtctgaagacagcgacagtatactcatataaataaaaaaaataataaatctgaatgataagtcttttttttttttaaatcattctatacctgactcatgtcctggctttagactgtaagccatctgaaaaccatcctctcaaagtaaatagcctgggttggctatgaatctgcaacaccatcagagacccaagaatgactgatattaactgaaagtatataggaagcctaa

SEQ ID NO: 21869 - DNA, 1194 bp, Mus musculus
cacccacagcccctcagagccgctcaccatccctccccacgtgcccctggccaggtttgtgttcaaggtcctccccatgtgttgcctacaggtgcaggagcatgtttggtttctggcctctacctggagatgtgcctgtggaccattcacacagaatctgcatgtgggctcattttctgtgaaactctttgaggaccacatttggaagatggggggggggtgttcttgtgtatgttgcatgtttgtaaaaagctctttgcactggaaagataacccttacaacttggcttcctcaacctccctagtgctgcgagtctctggaatgcacgccctctctgtctgcactgcctgagtcactcacaccttcctgggggtgggggcagctgagtgtacgtgggcgtgatggtggaagtcaggagttctgaggcacgagagcccatctgccttccttgggagtgtgaaggctggtttggcctttataactccagattcaaaaactcctcattaggtttagtatccaggattcaagggtgggtctggccaagttccattagagcccttgagaagggcttgcctagtgtcacctcgtctgaacctctctcctgtctgcttgcttacacagacagccagtcagacacagacacgttgaccaccccaggtgaggtgctggatctcacagcacaggctaaagagcagccgccagcagagggagccagtgagatcagtccggcttcacaggaccttgctatcaaagaggccaaagcagcagcagctccctctgaggaggaggaagaaaaggagacagaggagaacccagagccagaggaagagtgtcgtgtggaagagagcactggggctgcagatgcccccgaggaagacacagccagcaaccagagcctggatcttgacttcgccaccaagctgatggacttcaagctggcagagagtgaggcaggctctgtggacagccaaggcccagcccagcaggagccaaagcatgcctgcgatacctgtggaaagaacttcaagttcctgggcaccctgagtcgccacaagaaggcacacagctgccaggagccgaaggaggaggaagcagcggcaccttcgctggagaatgagggcgttggcagagcggttgaggggccctcgccttcccctgagcctgaagagaaaccagccgaatccctagcaatc

SEQ ID NO: 21870 - DNA, 1244 bp, Mus musculus
taacattaccttttgtatttgtgtgtttgagcttgtttttgtgagtctgtgatagtactgtttttgttctgtgagctggaagcagaaaaccttccccttggatcctgtagccaataactggaagaaaatgatgtgaatttcatgtacatgacccgagggaagagggtgtgaggctaatttctaagctagacctgtattctctggttcacgtcggggaggagccgcggcctggcctctgtcattagtagatgtggttgacgcagggttcctgtgtggtgtgagccaaagccaggaaagagtctagcttcaacctcgcgagtgtttccaccctctccgtgttagaaatggctagtgttcccattcttaatttacagagaaaagtggcctccccagcaccctagcctacagaggacacggctggaggtcatatagccactttcccttcttcccattcggtatatgttattaatattattattattatttttatttttacttcttcagttcgctgggctctgcattcagcagaaacaaatgggcaatatttgtcctgggtgacctgtactgctccctggtccccccttattgtgtgcctgaagcttctggtggcacgccagtgatggctcttctactgtactcagacaaacctttcttccatgactgtagaatccagcaggggccaggagtggtcctccaagcgtggccaaggagtggctcagaggggagagcaaggatgcacaagtggtggggagcaggcatccgagacaccaggccatacctggggcacctcagagtcagtttgcaaggcaccccagtcttcctgctaagctgggtcagcgccttcccccagccgtgctactaccgtcatttgggaagcattgagatactactgccagtgatgaactgaagtgcatgcgcaaggtctagatgcgagagttgtcttcacctttctgcagtgtggggttgctgcttggagagaggagtgcttttaaatccctaactggcccaagcccctggtgcacagagacagggttcctttagttcctgggtgttctgtacaaacagtagacctcgctcatcagcaaaaagaaactcttcctactgtagctgagctcggttcagcaccctgtcctttagccgagacccgaggatgcctgagccacactgctactagagccctgtttgtcccttgccttcagggcctcaagatttccccaagagaggccctccactgcttcaccccc

SEQ ID NO: 21871 - DNA, 4183 bp, Mus musculus
cctcgtgttctcggcctcctgggaatgagtgcagagaggccacgccaccatagacgccaactgctgcttatgtgtggactgagcagtcggagtctgtggccatacgattgctgaaaatgcactgcattgcttttctaaagtaacaaatttggggttttttttttttttttttttttaaaaaaccattaaactgtgtgggtgtggatgtctgtgagcagttgtcttaccagaatcaatgttaaactacctgaaacacacctttagcatactcagcaaaacgctctcgccacttcccttatgctagtttcctgttttgaccccaagttcaattaatatttttttcccagtgtggttttaggtgaattgttttgagggaataatttgtttatttcttggaatcgatcaaatccaaactgagggcacaagccggccttctgcttgctgtctgtcccagcttgtatctaactgcacagcaggggtggctgctgtgagcatcagaggcatgctgggtagtttctgctgtctgctgtgtgcacccttcaggaacttaacaatggagtcaaggaattttggaatcactagcaacaaaatagtgaagcctgacaattctactgacactagtatataaatcttaattctatgcctgtttttgtttggtttttaacaaagaattgtctgtctgtgcagactggactgttgggttgtccattgtccacgtggcctgggagcctcggggtggcctggagcctctggggtggcctctttgctttgcttgtttgttgttggctttaaacagacatttgttcttagtagatagaattttaagaaaaaaattgtcacggtctataatccaagggatcacattttaggagcaggaatacattttaattaaccctgatctccagagatcttaattggaaagctttaaagcggctacaaggtttatcctttgaccccatctctggggagttttgaatgctgacctacttttttgcctttattaatatgaaaaattcccaaacttcaagcacttaagatttcaagaccaaaattaagttgggtttgataagttgacttgagtcatccctgcctgacctagcgacttcacttggcattgttgtcacacttacaagaagttacagtaatgttgaatgggacttgtaagaggcttccttccctctgtctttgaagccatattctgcctgcgtgtattataaggaagtggtaatttcagtagcttttctattcctgacctttttcattcttgttttcttgtggtccaatcccttccacacacagctaaaggaaagctacaaaataaaacacacacagaaacaaacttataagctgtttaacgtgtaagccaaagccaataatgattgaaggttttctgtgtcttctgtaattgttaatcactttgcaaaagggggtgaaatgtcaaattgcctgtatttgcatttctggactgtaaactttgtatgtaatataatgtgtgtggtttttaattgagctgtataatctgtttattttgaggcctacagaactgtatggtttttttacttaatgtaatataggggacccttctcattctcaaaaaaacattttccaaaacctctgaatatctaaatttggtaagctactgtaacatactacagtaaggtataagtaattaaaacctttaaatggcccatagtgtttaactaaaaacctgataaaacatggggaggtggagggactactacacttaaaagctgccacgtcgtcatccctgagtaactgccttatagtccagctctgtgtgtctgaggtccgaattagagccttgggagtgtaggatgtattacttcttagtgtagactgggaacagttgacaacttgagtcttcaggtgccaggcgtctactatagcatcagtaagtatttagcagaaactaactccataatgaatggaattcaattccacacatggtttgttcaagcacacttaataagtagtctacttttaaatgtctttttttaaaaatgtaaatacttggatgaagcttttctttgtttcaatatagtcatttacatcatgaacattgttttcagaatttatcttttgaacaagttggctttagaatctgtcaagtgaatgtaaggatcacgagtatcaaactctgtcactggacattgagaagagtggactaaagcgcggacccgctagctcaggttgtatggcttcatcatttggatcatgtgctgtgtgtagtaagggagctgtccgccaaagcttggcctgagaggtttggaaaggagaagtgagtgaggctcagtataaaaggctacgggggaagaatcaggtagaaatgagacgtagcagtgacgtcagaaagtggaacttggtaggcatcagcctggcatcatcattagagcagtgagcactagaacactgagagtggaggtggaggtgtggttacgcccttcctgcagtgtgcagaggccttcctgctcttgatagaaaggacggtgagcttgagggtgcatttgacccacgacttttgtttgtgtttatttggggtcttacaaccttgaattccttcagtatggtgtgaaatcattacagtttaactcagaacagtgtatatgccctcatcaagactgtgatagactagatccttgatttttctttgagctccaaaattgttagcttaaatgaagtagagttaaattaggtagagttgaggtactttacttccgtggtgttgggtagcatcggcagccatgtaacgagtccgtgaacttggcctgtgtttcctaagtaaatccttactcggttcagagaggagcagctggttctcatttcttgttagcggtgtgcttgtatgcttgtgatggatgatagatgcgaggtttcgcctctgcaaagtacttgctagggtgcacaggactcagcagttgcaggtagctgagcaatagttggttcagggcattaattgtattgatgtctgcttggttctgtccctttttcctttacacaaaactagactgattctctctgaagtgctgggagtctttctggattttagaattgggtgggaacacacacactgaggctggggaccctgcagtcagtcgccgttgtaagaaagtgggaagggaagctggtttgttaaacgtgagtcctgagctgtgttctgcggtgtcctcctatttatgactccttacaacagctccctggggcaggcgcgttgtcctctgtacatggaaaagagccactgaattgaagtgacttggagcctaactgttaaatgtggcttcagaagtggcttttaaacaaacaaacaaacaaacaaacaaaaaaccttagtgtgttttcctttcacgcatacatcatttcagaaattttacaaaaccaagcatttaggcagcttacaaatctttattttctagaatccagcagctataaagtagagatggtattggtattgaatatacagatgtgcttgtaccatgcacacattgaacacgcttaccacctagctcatgggcactgtgggaaatgcattgtgcatctctgtacttagctctgtgtgtgtgtgtgtgtgtatgtgtagaattacttgaataggagatttaatttttattcgttaaccacaacaccccattaaatcttcattaaataatatatgttatatgtctccctattaaaacagccatgttctttacaaacatgtggcagtgtgtggtggttcatgcctgtaatcccagccctgggaaggttgaggtagagggaacacggagacagatgcctggcaacatcataagttcccgtttcaaaaacagaaaccagtatgtttggattgtttgattggattttgtgtttaagctgaaatacccatattcatgttagagatggagtgtattatacaggcaggttggggttggttcaggtctggggttacaagacttctgatttagtttctattcagtttgggttttctttaggcacagtaagacatcacaaagaaactccagtgcatctggaaagcccagaggatagctctctggtgttgaaggcacaggtaattcgtgcctgtgttttcccctagatggacttctgtaggtggtcgtgacagtttgtcctcccattagcatatctccctctgccccattgtgagccctgagtcttgtgtacggtcttg

SEQ ID NO: 21872 - DNA, 1108 bp, Mus musculus
ctcctcagccagctgcactcaagagcacaggcacacactcgtacacacaggttacaactaagtaaacctttaaaataagacgtagaaggacacacacagttccgtttgatagagggacatcaaaatgacagaagcagatgcctattggagctggttgaaggaccagacgcctctaaagccctataaagatgcccatttaaagggtgtgcgggcatattcaggtgtccttggatgccagaagagacgtctgatcccctagaattggaatcacagacacttcacgtgtgagctgcccagagtgggtgttgggaaccgattcgggtcctctgtgagactggtgtacgcgcttaaccactaagctagctctctatccccaagttcagcatcatgcagtatattcgtccaccatttcatacatgttaaacataaattgatgtgctgtacatctctattaaaccaagtggcagtaggcagggctgcggcttgattgataatcatcaaattaagaacgtagaacgagccttgttgtggcaagaaacttctgctcaggagctggtccatctttttcctcacactgagatgtccttgctcttacagcttcttggtgtgactgtggaaaaatgtgtgtgtgtgtttttgtttttttgtggaattagctttgctcttgtctcctgtggctggccatagaaggacatgtgctgggaacttggcttgtaggagggagggagggagggagggagggagggagggagggagggagggagggagggagggacaagggactgacaggccagatgagatcaccagctgcccatgtgtcactggccatgtggacctgagggaaaattgctttgaaggacattttggggttaattctatgagattttggtaacacaccaaaatttgatcttgggaggcagagacaaagaactttgtgagtttgaggccagcctggtttaccgagccagggatacacagagaaaccttgtctcaaacaaacaaaatgttctataggttagaaaatagtatggcaaccattttaatttccctgacttggacgatcgccttctggttatattgttgtcttcattctcaggaaatatacact

SEQ ID NO: 21873 - DNA, 1161 bp, Mus musculus
ataggatccaggagtcaaagagtcagtgcactcaagttgttcaggagagagagagcctgctggtgaagatcaaagtcctggagcaagacaaggcgaggctgcagcggctggaggatgagctgaaccgtgccaaagcaacgctggaggcagaaagccgggtgaaacagcgtctggagtgtgagaagcagcagatccagaacgacctgaaccagtggaaaactcagtattcccgcaaggaggagaccattaggaagatagagtcggaaagagagaagagcgagcgagaaaagaacagtctcaggagtgagatcgagaggctccaggcggagatcaagaggatcgaagagagatgcaggaggaagctagaggattcttctagggagactcagtcccagctggaatccgaacgctgcaggcttcagaaggagatcgagaaactcaggcagcgcccctacgggtcccatcgggagacccagacggaatacgagtggaccgttgattcctccaagctggtatttgatgggctgaggaagaaggtgacggcaatgcagctctatgagtgccagctgatcgacaagacgacgctagacaagctgttgaaggggaagaagtcagtggaggaggtggcctcagagatccagcctttcctgcgcggcgcaggcgccatcgccggggcttccgcttctcccaaggaaaagtactctttggtggaggccaagagaaagaaattcatcaccccagaatccactgtcatgcttctggaggcccaggcagccaccggtggtatcatcgatccccatcggaatgagaagctcactgtggacaatgccgtagcccgggatctcatcgacttcgacgaccgccaacagatctacacagcggagaaagccatcactggtttcgatgacccgttttcgggcaagacggtctctgtttcagaagccatcaagaagaatttgatcgacagagaaaccggaatgcgcctgctggaagcccagcttgcttcagggggtgtagttgatccagtcaacagtgtcttcttgccaaaagatgtcgccttggcccgtgggctgattgatagagatttgtatcgctccttgaacgatccccgagatagtcagaagaacttcgtggatccaatcaccaagaagaaggtcagct

SEQ ID NO: 21874 - DNA, 1196 bp, Mus musculus
tccacaggaatagtggacgttggctgaattgcacttctcccacaggcttgtacagcctcaggacgtgtcttttattgtttttacacctgttttacagtgctgcgctaagctgctctgtggagcaggggaggaactctcatgaatctggcgattgtttgcctgcctcagttcttgccagtttagtgtgctcagagccccttccctaggtcctccagctagagtctgaagtatctgctggccgccattttcctctttgataatatttctcttggcctttgctgttttgtcttgtgggggtcagtggtaccgcttggccaatccattgtgaggtctacaaatggatggcctcgacagatgatttcctttggcaattctaggttctgctccagtcactgatttacgatcccgcatgacacgtctggggaagagagggccatttatgccattgcaagctcgagagtccgatgttgggactgtgcacgagtctttgttttatcagatgaccattggagttgttactatcacttttttttttaaccaggtgatgtgtagttgtagttgtctctggtttcttgtgcctatgaaatagcacaatgccctcaggactctgagcatcactgggcatgagtctattgctacctgggaaaaaattcttcttcttccactcttttccactcacctgaacatgcatctcttaagccctcttgggaaagtgtgggtttccaatagctccatgtgctgtgaatacttgttatctccagcccctgacgtttcccactggggtccatttgtatgctttgagcacaggagaagtaacacgtctcagaaaatgtcctcagtttatttagaacgtgtgatctcgtgctatagagttcagggaccttcagtcccaggttgagggtcgcatctcacagtgttgctggtacttcatctctggctgccatggactgaggatgctgaagctgaggggatcgacctcctgtgagcatcatggtttattagatgtttcggaagaagctgtggcctgggtctgaaaatgccaactcttcttatttttcaaaggagagagggtttgtgctttgtcattttgagcttaagttaaagttctggagcctgagcttggcttgtagatcctcagcttagaaagagccctgttcagagtgtgttaaatgacacccattcttaactttgtagag

SEQ ID NO: 21875 - DNA, 1992 bp, Mus musculus
acttcactgaacctagcactcactgatggcttgggctggctcgccagtaagctctgagatcctctggtctcaaccccagcaggactgagattctagatgggtactccagcacactttttgtacatggatgctggagaaccaaattcaagtcctcatacttactctgtgtgtggcactttacagactgaaccatctctctctctgtgtgtgtgtggcttaaagcactctctctttctcctttaaaggtacgaggttatcccacgttgctgcttttccgaggaggtgaaaaagtgggagaacacaacggaggtagagacctcgactccttacacagctttgttctgcgccaggcaaaggatgaactataggagaccccggggaagtcatccagcctgggcttaggcgtgacctcacacagacacacgtgttttcactgtggttagtcagaaagctgaatgtattgagcttgtgttgcttcctgtgtgctctctgagccaccacacactacggaccttaagtttctctaatcatggctcacagtccctgggcaaaccaaacgttttcagtggcgatccatcctgtaacccttctcttgacagaattaaattggctccctttgcaacttaaaatacagtcaaggaaagccaaattgctgaactctgctggctcccagggatgtaaggacatcatctcgcaggagcaatttgttgcattgcctgagttttgggaaggaggcctgcggcactgttgacttagtaaggtgtcggtccatagtgtacagatttcaaaacaaaagcccacagagccctggagatcccttcatagccactgctgggttcctgggtctcattacttctctagtggagagaggtaagccataacaaatggtacttctgatgtgtgccccaaatactcatgctgttcaaaggatcctcttgtctgcttcgcatagggtggagtgtggagatgtacgtcttctgcagaaagggagggtatgggatgcaccacaaggtgggtcctcacccgataggctttcccaggtccaaggaccagggagtctctgcagctcctctcgggccttcctagaaacagcttctgattctcttcctaagtagttcttttagcagctcgctttataatctccaccttaaaggaggctgaccatctctctaatgattgagcagtgggattcatctgacctccagaccaaagactgcagtcggcagggctgcccttgcctaggaagcccaaggttggatatcgcatggctacttccggttcccgccttccaggttattagacgccgctgctcgtaactctgtgaagatgcagcccacgtcatgcctctgtctgtcttgttctcagaaccactgtgtttgtgcccaggcccttcacctacctcccacgagcggggtgaaatcagcacctggcacaagacgtgtagcaaggagacttgaaaccagaccacgtctgcttccaaaacatcaggagcagaggcgccccgccagcctgttatgaacgtttattattaatcacgtgtgggtcacagctgtccttggaaaccagttctgttggcccagctcacagtggcttcagcttagcatcatggtcttatatgaaaagaaaactcaagtggtacaatttggtttatactttctaaataaactttttttttttaaagaaaaaaagtctggtctttgcttaaatgttacagcaaaatggatataaaatagacaataaattatagtttctatttacaaagaaggctgtaagtacagttacagattgtaaatgtattatttaatcagtttagtatgaaattggcttcccggtacatgattgtgaaaaggacatttaaaaaatattctaagattcagtctgagtcttactttctacaggaggaaatggtggttttggtttacacacagcatgctcaccttgacaaacccattcttacaggcagggcccttccctctctgggtttcggcttta

SEQ ID NO: 21876 - DNA, 1174 bp, Mus musculus
ggtcaaatctctggtagatcacataccaccttgtcatggttttcccgtatatgctttggaggggtgctggagggccttatgactgctagtgcctctgacgatctgttgcctgtgattggagcagtactcatggccactgtgtgggccctccctcatcagattagttggtgctaacttcatttatcacttgcagtgttaggtcgagaaaaagaggcatggtaaatgtgcagctctttccctttttgccagttttcttttagcatgagttggttctctgttacccttcaaagatgaccaatttggttttgagttattgttttgaatgcccatataaacaaacataggtggtggtgagccccttttctcagaaggacttgagatctctaagcaagggaacaaagctgtattcttgagtccagcatttggttctgtggtgtaaacccattgcctcttcctgttcctctccgccttggccttccccgcaggcaaccactttatcaagttcttcgctccgtggtgcggtcactgcaaagctctggctccaacctgggagcagctggctctgggccttgaacattctgaaaccgtcaagattggcaaggtaagtccaagcccgtgttaaactggaacagtctgccttgggccagattaattagcagagtagtccattattcattctgtgtgcaaagttgcaaacttgatttattaattccagttagtgtgccacttgacaattcatttcaccttcacagatggcagcctggttttggagtctgctggcttttccacaggatggagatacattatggccttggccaatttattctgaaggaatggccaattctgaattggcagccctggagctgtgcaaagatatggggtagagccttgtagaatgttcactgggtatctgtggagctcagccaatagctttcctgaagggtccttcctgggttctgcactcacacaggatcacagcagaccctttatggcgaaccctcttttccactgctagccacagttccttccaactgttcaaacagagaagccagaaggaatgtgtaacaacttctgtgtgcccgggctttctggaactgtctagagcagcccctgggcttctggctacttttaatcttattgactttgtgatgctcaccagtcgctcactctctat

SEQ ID NO: 21877 - DNA, 1181 bp, Mus musculus
aaacagagagtagggacctgcagtggatggagggatggagggacggagggaggagcatagacggactgcagcagcggcatgccctggtgactgggatccatcggtgactgggtgtccatctgccatggtggcctacctacagtaaaacagtgttttgtctgctgcaggcctaagagaaacctcaggcaggaggagctacaagggagaccaggagcctgaggccaggaaggagaagcctaggagaagcactggttttttacctcgatgtattttccttgagtaacttcaaaaatgtgtgaaagtttaggatcatgcacatgcgcctgagctgtctcctgcagcatggtttttgttacctcattggagttttgcttgagtggcagataggtgcctggctgcagcccctggttgctccattcccgtttgctcgctcgctacccagggcagcttttaaactttccaacttctgctctttctaatcccttgctcttctttcagcctgaagttttttaagcctggacaagaagcagtgaagtaccagggtcctagagactttgaaacactggaaaactggatgctgcagacactgaacgaggagccagccgtgagtgtcccctcctccctccctttactgcccagaggccagaagaggtgacatgctgaagtttcaattcttttgaagttgtaaatagaccttctccgcttgtgccctttctggttggccaaagagttcaaatttgcacacaggagctcaagaacatagcatagctgccccccacccccacccccccaagcaggttctcctgagcacaagagtaaacaggaatcattcttagaagaagtaaatgatggcatttctacgttggattcttctgttgggtatactcctgttgtcaggacaaccgcagactttcagactggctgtttggaacaggcactctatcatattggtcttgcaaagacctggtcttggttttcttggggaagaaccacatacaaattcttcctaatattctttagttccatatctatggccctcaggtttctcttcttgtttagtgtgtttttcactgtgtagcccaggctggccttgaacttaggatccctccgcccccgccccttgcctccccacggctgggattgcaggtatgtgccaccacgcttccatccctgctcctgtt

SEQ ID NO: 21878 - DNA, 1099 bp, Mus musculus
tcaagagttaaaaagttttgcgttaagacaaacatgactctaagtgtccagataaggcacctctctgcttagccttctaaaataagttggcatatccaacgagaaggtgcaggttaggaagcagtccctaactcttctggctttaacaggatctgacagtttcttatttagggagagtgagcttcatcgttgacatgaaaagttctgaggacacaaagccctaattagcttccgctctctgcaagagctgagtccttaacacaattctgggtgacatgtcttcgcctttcttgctattatcagtctccacccatgggtcatcacctcgcactcaacctgcaaagacaaagtcccaaatcatttaatgagacccttatctactgccagctttgaagccattatagaactcttcaccagtgaccagcgtcaaggaacgctttcattagaagagatgtgtccttctttgagatgtcaggtttggggtgcctggcctcagaagctggataatgcattgcttctttgctaggacaaggtaagggactcactggaatgattagagtgattatttgtagctctctgccacggataatcagccccaggtcagctgatgggaagaggtgacccaaacctgccttttcaggctgagtgttgttatcggttgacatcttcgccttcagcatctccctagacatgttcgagtttcaaacatcttttggccacatttaactttcttgggtttgtatttcttctatattttaatagtttgactccgaggaggtcatctgaggcttactatgatctatttttcttctgcaatttctcttttatcctacttgacatattttcttgctaagttcccttgtgcaagagctcttcgggtatggaaaacgtcttttcttttatcgtgtcaagtcatcccaaggagcagataaaagctgttcagtgaaacttgatatttattacaaacaaggaaagagatttgaaagtcataggaaatggctactccatgatgcagacattatagaagaggaagggcttgttaatgacagctgtgagcctgccgttccctccatcatcctcatcaacagcatcttcgcta

SEQ ID NO: 21879 - DNA, 1198 bp, Mus musculus
gacaccaacactcctcccctcgacactcgagtggggtgcaccatctagaccagcctccccgccagagtaggaaggaggagttttggggtggagacttcttctccactctgcaattcacagctgaccttttacatatatttgctgacatgtcagagaaatgattggaggccggttctttgttcttccccaagtcccgacgatagtagcgccaggagaatgattgaggctgtcttgggtgctccaggctcgcgctctgtataacctgaaacctcatggtccccgagaaagtgactgccgcaactgtgggagcagggcacccacccccgggcgaatctcctctcgcctctgctcctgcccaggtgtgattgctgacagagatgagcgagcaagatgggagccccaaatcctgtggcttcttttaaactcccctctaattagaaacagcaatgaagtcacctgaacgattttatctgtcatgggaaagcaaaccccaaccccaaacctcagctgcctatcccagaaccaccaacgccccaattctcgcttttaaaagtttttaatgaaaaagataaagagcctgaaagtcatgggggcttgggggaaggggggcaggaaccgtgaacgtgggttgttggtgggctttatacttaagtgttaatattccaacgtgaaagagcacgtgtgtgtttgtagtcccctcacccccaaccctctgcccatggaaggggactgaatttcggagacacaagtaaagcagaattgcgaatatcttcacctattgagcaacacttgatctggaatccacagctgaggccgccctgggggtggcaatcagatccgctaaagctggcagtgccttgaagatcgtgggcgggtgaggaggagggggcgggggccctgtcccaccgctagcgtccaggtgcgcccggactctccatcggccctttctccagatctggcccagccacccccccagcccctcccccacttctaacccaaaagttcggggggggggcgaggaaaccggtggaatgagcttgcagatgtccccactacacgagtgctcaaacacacgctcacacccgcgtgggactcagcaaccttcagcagccagtccctggcttcggttcactggccagggactgaccgggaaagcgggttagggctgttgggaaaagctggagctgatggtgagatt

SEQ ID NO: 21880 - DNA, 1161 bp, Mus musculus
aaaaagtcaaggacagaggaacccccctttctcctcagccctcttcctctttcctaccagtcaatagacaagactagagataaagaatgatgcagtatagggtgggagtggagagatgactcagcagttaagagcactgactgctcttctgaaagtcctgagttcaattcccagcaaccacatggtgggctcacaaccatctgtaatgggatccgatgccctcctccagtgtgtctgaagacatctatctgccatcccagagtagggatgctggagcaggagggttccatgagccattgaggctattagatagaccccatcattaaaataaaataactaactcttggttggggggtgtggggggtgtggcctgtagtgtgggtatgctggcatccaccttctcgcagcagcagagaatacccttgaggaaagtttggaaattcattcaccccctagttgcaaaactgagagatccaggcaggaagactcccagattccactccttcctacttgtgccaccctctgcagacgacacggtgcccagaacgccatcagatcttccacacagcccctgtggtaatacaagtggcagtgctcagagcccccggggttctccatctccttgccagagctgcaggagacagctgctcagctgggcaagctccctgtaaaggaaggcaagggccgcccatgccagcggcctgactgctgtgcatgggacacacttcaggctaataggacacttcctggggttctgccttcttcctttcttggacagttaggagcatcctggtttagagagaaaggaaatcctgtttcttaggtggggccttcccaaattgtaagtgaattagagaacaagccattaaaagaactctccagtcttcaaatcgatataaaatgtaatcatgtactcagctaattcccgtatttgtactttaaaatccagggagtgtatctgattttctactcccagacagcttttaatcccattagctaactcactcaccttttcaccttttaaaggcaaagctccccaatgccaacgctttatgtccatgttcaaacagtgttaattcttccttgaaagtcaccatctgcttgtctcctgaagactgcaaagtgtttgtgttggaaagatgctgcccaaaacatccccat

SEQ ID NO: 21881 - DNA, 1170 bp, Mus musculus
actaggaaagagcagcatgagtcagaatgaaatagcttaaggaatgagggataaaaagtgagatactactttaagatagagggctgggagtgtagcttagtggcaggacccttgcctggaagtcaagaccttaagacaaagatggggagcggaagagagagaaaaaagaggagacaggtggagagagggaggagaattgggagaagggggaggaaagagaggatgatggaaggaagaggcagaggggaaaggagggtgtagggcgggcggggaggaggcagggattgggaactagtaggtagaggaaaaagaaggaagaaaggaggagggataagatgtctgggacgaacccaaagaggtccaaggggccccaggctcaggttttcttcagaaagccagagagcacgcctgcccttcggaggtgactctcgtgcaagtgggggagctgaccttgtcccttctagcagcccttctcagaggaggccctctgggatcccaggttgctgacactggggagcttcgggtgtgaaggcgtccaccagctgccttgacatccatcccttgctgtgctctctgacttgttacctgccaccttgaggagaggctggggggaggggaggctgtttttgttttttttttttccctagcacttcctgttctgtcctgtgtcttttgtttgcctgtccaagaaggagctctagagatcatataactccacatggccgagtagcactcactgtatgatcatggagtgttgtgtggtgctttgctgtatttgtgggggtgaggctggaaatgaagccaggcaaggctctccaatctccctcagaagctccccaccccccacccatcccccaagttctcctgaagatttctgtctcaagacttgtgaaccattccccatctatggtagtgttggctgctctagttttcctacagcctgctgggagagctaagttgtcttttctcccttcagggcaggtctgattctaagaaaaaagatgaagttactttggcttctatacgtctccctccctgaaccgccatgtttgttcttaggagtctttgctcatttgcagatctgatcttcctctgcgggattgtttccctgacaccagtattttcatttgcttcttttccccctcttttgtgtgtgtgtgtgtgtgtgta

SEQ ID NO: 21882 - DNA, 1137 bp, Mus musculus
attttaggttgcaagggccaggaactcagctcaaagtagcttcaggagatcccagggcgtaactcatgaaggtgcatccctaggacctggcttggcctgcacatcaatttggcgcaagggtaaagtgaagtgttcagtatctttcttaccgagccctctctctaggaggaccagccctccatgtgtacccaagtctgaggggtggggtgcggggcctgggactttaatagctagaaccagacatgtccttgggcagcatgaatgggctggtctccccttctctgtctcattctgtcttagcttccctccggcagattttctccacactgggtcagacaggccagaaatagctcccacttgacttggtttggctttcctgggaggaagggaagagcgtttcctgatgtcccaggaacagatcaaggaggccttcgcatcggctcttctttgcccgtattcccatccggaatagaaccaggggctgaaagggctgacataactttcttgggtcattgtcccaccctgaaactaaaggcacagagccagccttggttcagaatggcactgtggcagggtgcaggacagacagaagcacacgcctgtgataggatgtctccttatcctcacttggtgttagagggaaaccacctatgtggctttaacgacctcagaaattagaacttggaaatttatttttgtgggaaaggtatgacctcttcaccacatcttttttcctcagaaaaatatttattttctatttttctaaagatttatttgtcttatatatgtgagtacactgtagctgtacagatggttgtgagccttcatgtggttgttgggatttgaatttaggacctctgctcactctggtcagccccgctcactccagtcaactccgctcgctcagtgcctgctcgctctggcccaaagatttatttattattatatataagtacactgtagctgtcttcagactaccagaagagggtgtcatatctccttatgggtggttgtgagctaccatgtggttgctaggattagaatcaggacatttggaagagcagtcggtgctcttacctgttgagccatcttaccatcccgaaaatatttatttttaatatatagtattttaattat

SEQ ID NO: 21883 - DNA, 2383 bp, Mus musculus
tctctgtgccagatactcatattagtataccctgttcaaaggagaatggtggataatactgtctgaggaaatcagaacttatttgagaaggaagctctcgttccacattcctagcaactatattctcaggcacacataggcgcacagagacagcttcctagtaactcacatcaatttcgtttaatacaaactgatcctgaagagctgaggaactatgtaagttcagtgtccaagcatttgactgacatttgtgcagagttaggttccatctccagcatcacgcacgggtcttgtgaacaccgacatcttcagtttacttgtgtctgcagttctgtggacagaacaaagccattcacaagtgaccgacagcacgtgccgtgagacgggaggtggctgcaggaagaggatgcctcagggatgccggacatttccgtgttctattccagagtgttctcttctcccagagaacactggaacgtcctcacagggatgaaggaattctttctttcccacaggaaaggtgctactgtgtgggtctggaacctgtgaatgaatcactcctggggtttcgtttctatgtgagagacggggacccggttctgttgtgtgcagctttagcggcatcaggacagcttccagcttgcaatgattgctgctgacaggaacacctggatctcaagagctttttatgacaggtggacatctgtgtcatttttccttgttccctcatccatccatccatccatccatccatccatccatccatccatccattcgtcagcctacattcaacaaacgcctcttgaatgtctatgattcccccagacacatgctgacagacacgagggaagcaagacagattctttctccactgttaaactctggggagtggtatcagcttttgaaaccctgctctagactcttacaaaatggctacacttagcacatactctgccctggctatatattatattgggccatagagatcagcaatgtatcaattaatagattaatccagagacaggaaggaggaaacgaaagctagagcctctttgtgactccaccaactccttcttgtctccttttattgaagagtccgcacacatactcacccctctggtgggccacatgaggacctgcatcttgcagatgatgtagcaagccttaggatggttcatgatcagtaggaagcaaattctaagacctcagggtgtctttctgagtctctcatttctttagggatgtggagagaagatgaagtatagccgtgtgtagtgtcgccagagaaggtggagtttaagaatggtctcagtgttattaatgagaaaaagttctgtcattcaggaaaaaaaagcaaaaaacgtgaggttgggactcagtaggtgagggtgcttgcagccaaacctgatgacctgcattcaattcctgggtcccacgggacagagggagagagtccactactgaaaggaacgctcaaacctcctcacacaggtccttgtgcctgggcactcccccgccccatatgcatacacacatacatgcttttgtgattttttttattagtgcttttacatttagaaatatttatttattctagcagggaaaaaaccccacatgctttaaatgatgtcactttccacaacttcattcttgtgctgtcattggactgaatgttatgcatctttaaagggaatcacttcgtgtaaaactctcttgtctcttctgctgaaaagtaaaatgggttgtgtcgggtaataaagggtcgaggggtaggaagcacttggtcaaggcgaagtctaaaaccggtctcttttttatttgttacttggatgagagcacctgaagactaatgttttacactggattgagatctcatggaaaatgaaacattctttttctggagaagtttacatgcccattgttggtcacctctttactgtaaatactattgaaaaaaggagcgtagcatttgcatagcagggattgtgcctgtatctactgtgtccattttgttttttcggatgttttctggttttgtttccttggaaataaattaatatattgttttccaccttcaggaatagtggatatttatttgatacctggttaatatgcactgggtcccccagcttttgaaaaggacaaaagaaacacatttatacatgtatagctgtcttaaaattatctctccactaaaaaacataattgacctttccatttgtggactaagggacactttgcactgcacttgggccatcttcaggtgaacacagagactggctgggcattgggtttgctttcatcattttagtttctagtcttggtaaaattccagtcagccacagacttcttgcagcagagctggccctagagcttgggcagg

SEQ ID NO: 21884 - DNA, 1149 bp, Mus musculus
agaaagttcctccatctttgctgtgtgaggccaaaactggtgccaggctgacatgtcttactgtgtggttagacagagcagcaaatggaatggcgagccttcctccagcagcagagccctgccctggtgagttacgttgattgtttaaagacggagcaggctgttgttgaagagtccagatagcgtcatttgaggggaagaaacaggccttaatgcattgtctcatgttttagaccaacctaagacaatcgaaaaggaatctggtgacacagttcaggaagaaacatcagaacctaactcggagaaatctgatgtaagtggtgacagcaagcagccaacaaaaggaaatagcccagtgacagccaagaagaggaaaatggcaaccatgtcggaaaagaagagaaagaagaaaatgtaactcacgtggcaaatcccagatttctcctccctatctgaatgtccttttgacggaattctccatgtccctgtgagaagaaaatatctccttccgtagaaaatgtgcagcttaagaaaaagaaccgctctttaggtggtgctttgttttgttaaatgataaacgttattttggcagatggcattttattatagattgtaatatatagtgattgtttactttagctgttcagagcaagtaaagatctgaaaattgtatttgaaataatacagagcttaattacatttatttggcggtgcttgggatgaagtccagacagagcctcgcatgtgagctttctctttgccccctgatcagtcccttggcctctggccctgctgcctccacacacctgttaggaagtctttaccagaagtggatgaaagggattttccagacaatctgcttctaagccgcgggtaacaagcaaatctaagggcaagaagacaacacttctcataatttgttgtctttcagagcatcagtagtctcagctcacttccttgttgctgtgttggctcagtgtcaccataaccatttgcttcagactggtgttggataaaggtgtgtcagtgtgtgatggtcttagaacaagcctagcacactgcgggtacttaatgaccatgacccgtgtcttagggtttttattcctgcacagatatcatgaccaagaagcaagttggggagtgtactgg

SEQ ID NO: 21885 - DNA, 1378 bp, Mus musculus
agaatttgaaaaacaaaacaaaacaaaaacaaacctgtctcaagaaaccttgtcattggctatggttatgctgttgatcaaagccttttacactggaaacgaagttttcatagatcaaggtcacagccgctaaactaggaggcgggagacctgccatgaatcagcactgtggcccctagggtgctggtctctcttgcccttccttcatccttcaagttattggcattggcttaggagtttcgtgtgccactgttaagacttggcatggtttttctatgcctcctggggggggggatgggggggaggggtgggggtgggggaggggtgctttgctttagcatttctcacacacagttgtgagccacctgcacactttgctccttaaaataaaaagccacctgttgtgtacttttcctgatgacttcccccccccctttaaacagtttgctgatggttgccaaagttggaattagtctgttgagttcacctcatccgtaacagctgtaaccccgagtgggctcgtgaagacttgaagctctccagacctccacattacaatgttgaagagataagtgcagcatatttacatagtgggacgttttttcaaagacccaccctgagcacactgaggcaaccatgtgctgttgctgtggtgaccattcattcagaggtggcaagcgtccgacttcagctcacgctgccttcaggcggcttcgttatgatgcctcgcctttctgtactcatagcgggggtaaaatgttgactgtcaacacgggggtgggggcagagctgtgcgtcctgcccagaagtgtgtgaaatctcttggagacattggtgatgtgggatcttttgcacaggtctgctatgaaattatgttacagtgacattatcagtgaaaataaagttttctattaagaacacttctctggtgtcgtctttgttagaggtgtgtgcgatgtagcttgagacatggtttgtagggcgcatggctctaatcccaggatcttagatgcagaagcaggagtcaggagttcagggttatattcatttttgtaagtttgaagctaacctgtgctatgtgaaactgtgtctcaaaaaaactaaaaccaaaacactcactcacacagaaccctttgagaatttctaacataggcctgtgtaataacaacagggacttggcgtcacatctgtgcttacgtgtcttaaaagcgggtttcatgtattcagatatagtttctctttgtgagcttgagctgcctgtctctgctcactacctctcaagtgctagggattataggtgtgcctcccatccagttcaccccttaatacagtgatgtttataccatagataggaactctcttgactttcatgtctttt

SEQ ID NO: 21886 - DNA, 1099 bp, Mus musculus
tacagttcctcatattgtggtggcctcaaccatgaaatcatctcattgctactctatcattgtaattttgataatttatgaatcataatacaaatgcctgtattttccaatggtcttaggccatccctgtgaaaagggctcagctcccaagggatcatgatccacagattgaaagccactgccctaaaatagtgccaccagacagaagacaggtgttcaaaatgcgagtgtgcgggaacttttgagacttaagcccaccagaggaatggaagagcaaccatggtaggcaagggaattaaagagctgatttagacgctacttagatgaaagatggctaattaaaccgtgagcttgagcactggggacgcgtctttgaaaaaaaccaccgagacttctctgagcttggttgaagatgcagtgtcgatgttgtcccccggcaagggaatgccattctgaagagatcaattgaattaaacacttataccaataaacaggaaaaacagcttgtcaggtgcagcgtctgacctttgatctccggcagcagcttttctaagtatcagctctgtcctggcaactctgctcactggctggcatgtagcatggtgcctcctggcttttgagcatctaaatgtaagcccagcagttcagcatggaggaccctatcctctcggagacctcccccactcccagctcctgcaccatcccctttctgtggctaggaaagaataaagacagtccttcccggggctcagggctcttggcaaattttctgtgcataaggttggagacaataagtgaccagagtgttttacagggaagtatgttttgagtttattttctggggtgacaggagccaaagctgcctcggacctctcttcaaactttgtttctgcctctctaactcacctggtccttacctttaccttaccgtgaacagtgatacaggattgccagcagagtcctgatgtaaggcaggtgaggctaaatcctgacaccggctgatgtcataaaggcacatattcatctggataattttgtctctactacagtgcataacattatatacagcattgatttgattttatttgataaaaacctt

SEQ ID NO: 21887 - DNA, 1167 bp, Mus musculus
ttccatgaaggaacagcctcttgagctgggtatggtggcacccatctgtgagtccagcatttgggtattgagacagcctagggtacacaggcacaagaccctgtctcaaccagaaaagaaaaatgtgtttgccaaatcataactcaggggctttgaacagagctgtctctgtttcaattggcatccttgctcatccattcctgtctacctcccttgttagtctagatttctggagttatgttccccacatccaaagccagtgtctacatacagctgccatgccctttctgaacaaaggctggagttgtccaattgcagttcttcttcgcatagaaatgcaattggaatatttacaaatcataatcaacagagccccaggggcaaaatagacattctatttgtcagctgttgctgctgagcctgctggtgaacaccattgcaagcagttgctgagcctgctggtgaacaccattgcaagcagttgctgagcctgctcgtgaacaccattgcaagccattgctgtcaagcttcatgagttaaatttaactgttagagaggagaaaagcatagcagtcatttggaacgatctcgtggggtgggactaagccataatgatgtgtctggctcaagcagcaatgctgtccctgctcagaactgtggtctctgtggagaacctagtacagagcctgagcaaggcaatggaccacctccttttcctcaaactgatggatcaccactgttaatctataccaggtgtgaaaaagggcatttcccaaaacatacacaaaacacaacttactctatttcccctccatttcagcaaatgtgttcttggttcatggcactggcacccagcgcatgggcaccaggtaggtgttcctcgagtgccaacggcggggcctgcccacccctgtcttcctttctgggcaagctcccattttaacttttccctgttaaaaattgtactgatgttttaaactcgtaactataccacccttctcactggtgtattttgaaaaccaccacagtccgatgtcctgtgccatgtctgtcattcctgttgaacagactcttcctgtctggtgaccacctatgcttcagtgcattttctaaacaatttctcaaactgatctgctcccgggtgctttcttaccaccatctctggtg

SEQ ID NO: 21888 - DNA, 1349 bp, Mus musculus
ctgccattaagacatccaaggttttatccaaagctgtttgctggtattagacagaaggcagtgtcgagcagcccttctggaaatgttgcatggccagtgctctagacgtgggtgggaaggtacagattcctaccgctaatctgagaagtgatgtggagggggggactgaggttacagttagagcttaaccagtttatttcacacatttgttacagaggcacaagatttacgtgatagaaatactttagaacatggaataaatgcaaaataaaacatgtttctgtgataccaggcacatgccatagcttaatgggcgatgctttcttcgtagacacacatggtgcatcctaatagatggttatttagattaagtaaaagtgataatatgtaaatttacttttcaagatagcagttatttattggagaatttaagtataaatcttacagtgttaacagttattttttatgaaatacttttaggttaaacctattggggaaaagttttagcgttgtagttaggaatctaagagctgtcttctcctttatggagaatgttatcagtccctcctttatatgaggacttatgttctgggcttctgttgtggagaaagtacttcacgaacagcaattcatcgacaagacctcaagagtactagggcttgagaaagtactggttgaaaatacctgcttggctgtgtaaaatgcctcttgccaggagtccatgtttgttctacccgaactttggactgttaactagagaagtgatagactgatgaaccttctagtgttgtctgctccatacgggaaatgagcttcaaggccaagctccttcctcatccttgttctttacagccctgtttaacctcagttgttacctcatccttcgctctggcagaggctggttgttaatcgtctactggcactgcccaaggtgagttcctgaagatgtagacagcgcagccccttgaatacactagcagggaagttacagaagccaaccttcggctatacattttctggggagatccccaatagcttgagagtggggtacagtcattctgtgttctttatgggggcatgactagaaggcacaaagcagtgacattgttcctagcattgatctttagcatttaatatttttttatactaactaaatattttaaaaccggtcaagatgacccaaggcatcttgataccgggaagatgtttacattagattttttttttcataatctaatgttttgagcttcaagctttcattgttgctaatgttttgtggtggatatctaagggttagatgccaataggaaaaactttaagcagcaggtgagctctctgttgtatcagta

SEQ ID NO: 21889 - DNA, 1208 bp, Mus musculus
gcatgttttaaaacttaagtaaaaacattttggatgccagtatgaggagactaaggcatagtcctttgtgtaagattggtttcctggcctcctttacccagccaagagagggaagagaaagtgttttctctgcagggtccctcatgtgctgtggatttatgtcttgtttcctgttgttttgttttaggacttttatagctgttataacagtcatacctgtattctcaggctctcggtgcaaggggtgtacttaactttaaagtttaaggatacaatatacatatactagagtcttgcctgcacccttccagaaataatgctatcatctctgaggattgtagattcttgaggacttcttggtagattgctgcagttccttcttggccaacccttcctaaagatgtatgtgtgtatgtgcacatgcgtgtgttcatgtgcgcatgcgtgtgtatgtgttttcaaattgcccatgtgatagcatggctcagatttaaatgccaaatgcattaaagatttgtataacagctgaggcattaagcacgtttgagctgaatggattctcacagtggaagtagatactggttagccgtcgacatcttgacccctttctttagattaggcttaaaaaccatttcaaagtggcattttgctaaaagtttaggataagtatgtactgacatctaaaacatgattcgaagtagtctgtgtttctcataatctgtgatactattctgagtccacagtgcaatctttttttaccatcagtttttctcagaaggtgtctgactgtgactggtagccagtataactgcagatctcagctggtaaactaagtgcttttatatttgaaattgacttcataaagccaataagcagtcctcagagcatggagatatgctcaggtgactgtagaatggcactgggttatagaatatagaattaaggaaccttgtattgtcttctgttaaagtgtcccagagtttgaaacttctaacaagttccattttatcctgtatcagtagaagctgcatctccatttgttagcacacacgctacctgttgaggacttcctagcattaagctccacgccagttctatgcataaccattcgccagatactgctactgtggtttacaggagcctttctgtcttgtgccgcgatgcatgatcatcttgctgcttgacaggtcctttgtgaggaattggaa

SEQ ID NO: 21890 - DNA, 2697 bp, Mus musculus
agcttctcaggagacatggttaactcaagtcctcgtgtgtgtcagctcagccagtggtaaaggcttacccaggattctttcttagtattcgaaacacagaattccatggctccttttctaagccttcaggagatttttttttttttttttttttttttggtgaaagaagggaaattaggtgtgttgtgaagaacaaggataattaagatctgaggatgctatagaaaacagtgcctccaggaccttccattcacagcgtggaaggctgggcgccctctttgagatgcctaggctggtactcaccacttagctcagtttgctgagttctgttctatagatctcctgtgtacaaagatggctgaaataggatttcctcagactctcccaggaactggacaagcagtttcaaagtctaaaaaggttggggtagtaccttactacttcctgagactcaccctttctccctccccggacctcatttttctttttccatctcatcctctgagttggacatttcaatgtcttaggtgttgctctgacaaggaccagactctaagccaatgagatagatctgagtccatgctccgtcacgtggttcactttgatctgagcatcatttaaccactctcagctttaggtctcactttgaattgattaatacctcctatgggtaaacagtatgtttgtgacagtaagtcagtagaattctaaagttatatttttccataaccattgggttttatgaaattcaccttcatccatttctttttttttctatatattttaagaaaaaagacttttatataattttactttcattacctcctctttgccccttaaaatctacagataacttttctaaggagactttgaggagttgatggtgatgggcgtgatgggtaaataggaatatattacaggttctgctcacctctggttaatgtagagagaatggatgtggccagcatttcctccactgccatttcctacttgctccttttggtttgactcagaacatcctttgactgggtcccatatgcaaagtactgccctcgtattagctcccgcccctcctagtcatctgtcactgtgacgtaaagaatatggaaacattactgaggaatttctgatgatggctttagattatagagaagtgtggtaacatagcttaagtatgactgggtagttactgaatctttttaaaatcagggggctgtattctcagtggttagacttgacagtcagccagtagtgtcctagttatccataatttctcatcctttgaaactgttcaggatataaaggacattattcagttttaaaatgtaatgtttcttgaatgtgcaatgccatttgtaacagagagaaattcaaagtgggggatgttagagaggctaatacacaaaacaagagcatatgaaaaccccctgtgtttgcaagcatagttcctccatcctgttaagaccataaccaccatggagagagaagtttgctcatgccttggttcagtgtgtgtgggctctacaaaacacaggtgctcatggcacgttctgtggggggatttgtcctcccttgaggatccctgttttctgtaggtgatcctgtatggtggcttagtttctgaatttgcctatcttagaatctagctggaatctgtttgggagaaattaatgtttcctatgtgaaatgttttcaggaagcaggtgctgcactgctacacctttctgagcaagctgagctgggatgcagtaccctttcttcatttagatccgctttcacattctttacctacatgtggggcacatgtattgaacacacataatggccttttgggttttgcaaactaatatatttagcagtttctctaacaatctcctttccaaagcagatgtcatacatcctaacttagatgtgtgcatttcttgacagaagctgacgtgctggtgtagagagactgttcagtgcccatgtttatgctgtggttatctcattgaaaaggatgcattcaaggcacagggctgggggtggggtaggcagagagtccatgtgatgctcctgctctcctttgcacgatgtcctgcacccacacctgctgtgtaggctccgtgacacggcctttccctttggggaatgcctagctccatactctgatgctgatcatctggactcaccccatgagcggagcacttccctcctagacgtgcactggggattcttttcaagacattcacttgttcagaggcttgagagcgccactgattgtaaaggttttggtttggtttggttgttgttgttgttttttttttttaagttttatatttttgagatagagtctcactctgtagcctagactagctttgaacttgtgatccttctgtctcagcttgtcaggtaccaggattgcagatgtgtaccactgtgcatggctcctcctttttaagtcaaaaggtttacatttcatctctgaaagtggttagaatagaatagttttaaagttttctttctagaaagaaaaatactcttgtttgcctaggtttttttcatagtgcttatgatagtagctgtgttttccttggggcactcttgctcttcccctgtacacacctttattcatgagctccacctgtttcatgaacaagtaggacgctcccctcagctcattgtcgccatatgatctggcagaatgctcacccgtgg

SEQ ID NO: 21891 - DNA, 1154 bp, Mus musculus
ccaaaatcccccctgaggaatcctcttcagacaaaacacaagcaaaacacagaagagccgccgttcagtgtcctcccgagcgcatcagagtctcataagaaacacaactgtgtccctgctaaacaggggaggcaatttaccaagcaaaatggagaaactccagggatgactgctgagtcctcagaatctggggacttggtctccccaaagaaaacctcctctcctcaccagcggtcagaactgcggagatggaggtcggagggttcagacccaaccaggctcagtggcctcgatgggcagcgggactccagctcctcctccagtaaagccaggactgacaatagtgaatgtagctctccttgctgtagcaccacgcccccctcctatacaagtaccgcgttcgatgtcttactgaaagcaatggagccagaactgagcaccttgtcacaaaagggctcatcttgtgcaattaagacagaaaaactgagaccaaataaaactgtaagatccccttctaaattaaagaacagctccctggatgccccaaatgctacgtccccagacctggttgtcgagtcgccctgtcctccgtgtacctcgtacccagtacatgtggcctccactcagaagagtgaacaagtggcagctcagtgtgtttctcacctgtacagctcacaggaccaccttgttcccaaacttagccaacagaatcagcagcttccggggcatctgggcttcacaggctcactgacaaacctgcacacccttgagagcactaaacttgagccgatctataatacagcagtgacatccactgtaggtctcacttctccctccactagaactcaggtcactcctccacaccagcaaatggattctgtgtcacctttgtcagtaagccctgccagttccacacagtcacccccagggccaatttacagctcagcccatgttgcttctgttgtcagtcaaagtgtagaacaaatgtgcagtctccttcttcgagatcagaagccaaaaaaacaaggcaaatatatctgtgagtactgcaatagagcatgtgcaaagcccagcgtgcttttaaagcatatccgctcccacactggagagcggccttacccctgtgtgacttgtgggttttcatttaagactaa

SEQ ID NO: 21892 - DNA, 1174 bp, Mus musculus
aaaggttgtggtccacccagtaagcatgccccccttgaaaactgactgtcttcaggtggccaatcccaatcctgaacttcctagtccacagagcccgagggaccttcatgttgcaagcatactgtcacattcagccagtgtgtcatccttagagatggatgagtcgtgccatcagaaaggggatgtgattcagtcagaagggaagccagattctcacagtggaacagcacatgcgcagctccagagacagcaggccacagaggacccccaggaacagcaggggaagctgctgctgagtccccggagcttaggaagtacagactctggctacttttcacggtccgagagtgctgatcaagccgtgagtcctccaactccgtttgccagaacttttcccaccatggacccagacccagctaagaacggtggagccccagggcctcgaatcagtgctccagcaccttctgctttggctaccggagagaagtcatcggtcgtcacaggccagatgcgcccacccttggccaccaaaactctggaggaaaggatttccaagctgatctcagacaatgaagccttggttgatgataagcaactggatagcgtgaagccccggagaacctcactttctagacggggaagcattgactcccccaaatcatacatattcaaagattccttccagtttgacctaaaaccgatgggacggagaacaagctccagctctgatataccaaagtccccgttcaccccaactgagaagtcaaagcaggtgttcctcctgtctgtcccttccctggactgcctgcctatcaccagaagtaactccatgccaaccacgggctattcagcaatccctgcaaatataattcctccccctccctctttgagaggaagccagtcatttgatgataaaattggcaccttgtatgatgatgtctttgtgtcaggacccaacccatccatgcccccaagtggccatcaccgtcccctggtcagacaggctgcagtggaagactccacagccagtgagagtcatgttccaggctctgggcagtctgtggatgagagctgtcaagggtgcccatcctccagtgaggctggaccagtacagagcaaagcagcgcagacccctcacctagagaagaagaagtcacatcaaggacgaggaacc

SEQ ID NO: 21893 - DNA, 1098 bp, Mus musculus
tcgccaggggttagacatgaagagaacaaggtcatccaagggcagaggccgcctctagtgtctggtctttcattggtgagcagctcagacactcaacagccgtcatttcccagcctcaagactgcaactagctttacatggtgttacctgctgagacagaaggcattgccgttggctcagaatgaccagaaaacttcagcctatacggggtggacagtaagctccagtaacccaaatccacttggtttgcctacaaaagttgctctttctcttcttaattctaaacagaagactggaaagtcactgtattgccaagcaataaccacccattcaaaatcagatttagtggtctattcaagcaagtggaaaaacaacttaagcaaggtacttgagatataatttatcttcaatggtgtttgtgcaaattagtttcaacaagtctcaacacctttaagtatcttaaagtattttaattgtgagtgacaggttgtactatgtgattattagatgggaggtgacactttccccagcagtcccactgggaagagtcacctacaattctggcagtgattctgtctaaatattttgcaagcaatgacttctgcggggcactgattgttagtttgttcgtgcttttcccttcagctgactctgctcagaggaggctagcactttgatttttctcgtcactgaggagttatcagttgagagaagatcatggctacagtctctcaaggctcatttgggaaagccagcatgtagatttccagaggtgattgtattctgctgtgtactgtacaaagaatcagtaatatttgtcatgtgcctcctgcagactggtctgttcttgacatacccattgtaatattctgagtgaccctctgagagccactggctaccatcagaaagatgcatgaaagagctcattccattagtagctgatttggtcaaagatttgtgggataatttaaggtcatgacattgtaatttgtggaattctctttagatttgttggctttataaactaggggaaatcatttaaatcaaataaataagggcattattttagactctgttcattcagaattattgattagc

SEQ ID NO: 21894 - DNA, 1176 bp, Mus musculus
atggatgaagactttatttccagggaatattatgttcactgaaaagaaacgatagacatctttcttggaaaaaaaataatgatgtggttgttcttgcctgcaatcccagtacttgggaagtggaagcagaattgtgaccacaatatcattctctgttagacaatgagttccaggacagcctcgattaaatgacacccttcctcccaaaaaagttttttgttgttattgataacaaaacttaggattcattgactcttgtagatcattattttgaaaaatgcataatatttgagttttttaaaaaacagcacatttaaaacaaagtatccagagccctaaggtcagcgatagagacatggaatacttgaaaacttacttagaacctctagacagccaactgccattgcccaagtggacatcttcgtttttgatgaatcccttttcaggtggaagagagtgtctagcaggtgcaaggcactggttcaattccaaatacctcaggaggtcattcgggctttgcacacacagtgcatcaacagatgtacaacaagctaaccaggcagatcttatatagggtacagatgaagcagatctgaggaccatgggtcaaagaagcaatgctgagctacctaacccatctggggttccgatccttgggcttcttgttggagatcttccactactccaggtttctctccttgaagaactaggaatgtccacccctcatccagcctgatggtctgtaaagtccatgctttgtatctgcatcagctggtacatcagggatgctggcaacacagttcaaacaagtcactcctccaggaatcctctgtttagaaccatgtgtatcgggtctaaaactttaaaactatacacacgcttaaacgaatgtatgcagatagatagatagatagatagatagatagatagatagatagatagatagatatctcctgttgtattccagtggtggactgtaggatttccatcaccttgaagctccaaatctatcctgcatcacctgacactcatcaaagaagccctcttccagctctgtgttgaagaagaatattggtatgtctccaatattcatgagcatctctagtcagcaatgaccgaggtggattttaataattaactcattagaccaatttatttctctaattgcttgtgaag

SEQ ID NO: 21895 - DNA, 1606 bp, Mus musculus
gacctgcactgcaccggacagtattcgctgagctgtcacaggaagacccgtattttacagatgtgttatgtgttagggatagaacccctagctctgtgcatggcaggcaagctctctaccgctcagccatacctccaacctcaattaaatcttgaaagtattcagaaaaccttgtgacaacaacaaaagggcaatctctaattatgcatctctggaggctaggggacagagagccaggtattcaccctgagaagaacgcaaggcccactctactcataggctattgtcctattgctggatgtgaactttcactctgactagcctgtgactctggctccattcactggtgatttcttttgcccaccaaaaccccggatcttgcaggacaggatgacactggggaactaagtacctgtcagacaatcctatttgtttcctttgggcaagggaggtgtcagaagtctgaagtatggctccagagccatccccagcacttgtattctgctagctcactccggtcagcgtccagcaggtgggttacgctctgcatttagctggggcttctagaacttctctgcagtgatgtggtttcctcagagtttatcagtctgagtgattgcattagtacaaagaagctagcagacccaactggccttttctcccctgcatcagggtccttatctgctggagcccttaagagggccactgaagcctctggctctcttccaggcgactgacgcattgcactactgagttccctgaagtctgctgcagccccttgtttacgccagcagagaacagagtgataagaacaacattcgagtggacacgcttgacgcttagtgcagcgttcaaaccttgcctggacctggaaattgtcagggccatagagtcccctgtcactgtgtgtctcctgtgccctgcccagctctctgctgtcccctgcagccaccacaagggctaggctgtccaatgagccccatagcttctaagaaatgcagtggcttatttgtagtactccgtgacatcccaggtgaagaagcaaaagcctatgatctgatctgatctcctttattctgccctgtccctggtttaggggagggagaaccttctagcaactacggctttgtttgctgcctggtgcttttatagtctgtcatttttttttcatttcctttttttaaaaaaaaaaaaaaaaaaacacaaaccaaaattgcattggtttggttgtcattgtctagtctatatttattgttttacaaacatgggtgtatatgtatgtatatgtataaaaaccaaacttatatatataaaaagtcaaggcatgtatactagatattttaaagttatttatcaaagggaaaagatgtgtgttataaagtaaaacagagtctatattttatatataatgtagatagtaaaaaaaatagcttataaattatagaaggttttactttttgttttctattattaaacaaagaaatttaaaagaaaaaaggacagtgactgcagctgtgcttggtgttctcaaggcaaatcactacggagctggaggtggcttgccctccctcgggatctgcagttccaggctcctgagtggatgatg

SEQ ID NO: 21896 - DNA, 1156 bp, Mus musculus
aacaccaagcacagctgcagtcactgtccttttttcttttaaatttctttgtttaataatagaaaacaaaaagtaaaaccttctataatttataagctattttttttactatctacattatatataaaatatagactctgttttactttataacacacatcttttccctttgataaataactttaaaatatctagtatacatgccttgactttttatatatataagtttggtttttatacatatacatacatatacacccatgtttgtaaaacaataaatatagactagacaatgacaaccaaaccaatgcaattttggtttgtgtttttttttttttttttttaaaaaaaggaaatgaaaaaaaaatgacagactataaaagcaccaggcagcaaacaaagccgtagttgctagaaggttctccctcccctaaaccagggacagggcagaataaaggagatcagatcagatcataggcttttgcttcttcacctgggatgtcacggagtactacaaataagccactgcatttcttagaagctatggggctcattggacagcctagcccttgtggtggctgcaggggacagcagagagctgggcagggcacaggagacacacagtgacaggggactctatggccctgacaatttccaggtccaggcaaggtttgaacgctgcactaagcgtcaagcgtgtccactcgaatgttgttcttatcactctgttctctgctggcgtaaacaaggggctgcagcagacttcagggaactcagtagtgcaatgcgtcagtcgcctggaagagagccagaggcttcagtggccctcttaagggctccagcagataaggaccctgatgcaggggagaaaaggccagttgggtctgctagcttctttgtactaatgcaatcactcagactgataaactctgaggaaaccacatcactgcagagaagttctagaagccccagctaaatgcagagcgtaacccacctgctggacgctgaccggagtgagctagcagaatacaagtgctggggatggctctggagccatacttcagacttctgacacctcccttgcccaaaggaaacaaataggattgtctgacaggtacttagttccccagtgtcatcctgtcctgcaagatccggg

SEQ ID NO: 21897 - DNA, 1197 bp, Mus musculus
catcctcacttgggttctaggagttacaaaggccggtgccgtcctgagacggggacagccaaactttcagaactggcaagaaaattcaggcattctgtatgcttaaggctgtcactaagggctacaactaggtgtgtgcatatatgtgggtatctgttgtgtttctttctgcagtttgcaacagtcacatttgtttggctagcttgtccaattggagaattgagagggctcctctagcgggtactccctcggtggccgcagcgccccctagcggcggctccctccagacagggccactgatctgctgttcttgttctctccaggaataggcaagaatgtcatctgtgaccgtaccgccacgccgctggacgccttccgcatgatgtcagcggcccactactacccgaagctcatgagcatcatgggcaacgtgctgcgcttcctcccagccttcgtacgcatgaagcagctgattgaggagggctacgtgggcgagctgctggtgtgcgaggtgcaggtgcacagcggtagtctgctgggcaagaaatacaactggagctgcgacgacctgatgggtggtggcggcctgcactccgtgggcacctacatcattgacctgctcaccttcctcacgggccagaaggctgtcaaggtccacgggctgctcaagacctttgtcaagcagacggaccacatcaagggcatccgtcagatcaccagtgatgacttctgcaccttccagatggtgctggagggtggagtgtgctgcaccgttaccctgaacttcaatgtgcctggagagttcaagcaggacgtgaccgtggtgggttccgctgggcggctcctggcggtgggcaccgacctctatggacagcgcaatagcgccccagagcaggagctgctgcttcaggacactacatccgtgagcaactccctgctgcctgagaaggcattcagcgacatcccctcgccctacctgcggggcaccatgaagatgatgcaggcagtgcgccaggccttccaggatcaagatgaccggcgcacgtgggacggccggcctcttaccatggctgccaccttcgacgactgcctgtacgctctttgcgtggtagacaccatcaagaggtccagccagactggagagtggcagaacatcgccatcatgaccgaggagccagagctgagccctgcctacct

SEQ ID NO: 21898 - DNA, 1108 bp, Mus musculus
ctcctcctgaccaccctatttgtgctgacagccccttatcctctggaagctcctgggcagctgtgccagcagactggcaaaactcccaaaaggccttcttccatcagatccatcagatagggtcccccttgtctgaggataaaagagaaaccctttctgcagctaactcctcaccctaacctacaccctgacccttgatcttgtccgcaggtaactccttaatagtctaaccctccaatgctcccagactctgggactgacaagatgcataggggcccccaatccaattagcagaggaaaagagccaggctatgagtgcttgcttacaggatgcagaggtacaaacaatgcaatacagcaggaaggaggagatgcccagctgcttagagcaagtgggaaagctctgcttaagaggtaactttttaactgggttctgaagcatgtataggagtttgcctattcaacattcagttgatttccatttagaaattgagctaaaacaaaggtacttacttgagatctcagaagccaccgactatggatggtttacaaaatattataagtctattgtgaagtgtggatttttggaattaggctcattagatgcctaaaagaacctaccattcaaaaaaaaaaaaaaacttaagctgtgagtctagagaaatggttcggtggttaagaaaaatgtactgttcttccagaggacccgagcttggttcctagcaccctcatcctgtggctcacaacagccttgtagctccagccccagggagcctggtgcctctggctcccatacacagagatacaaagattttgctctttgtctgagacagagtcttactatgtagctccggctggccttgaacttaaagagatccacctgcttctgcctcctgagtttgggggactaaaggcgtgcatcaccacacccagctctaatttgtaaaataagatctttttgttctggttttttttttaaaggttaagcagaaccagatcttgaaggaaaagaaatgaacaggactgaaagccagagtcctggctacagtagcacaaccatcctctccagaacatttagccagctccactcacagcagctcgccattta

SEQ ID NO: 21899 - DNA, 1141 bp, Mus musculus
acaagtctgcagagagagggtgaggaactgagtcgtcttttctgtggcctccaaagtgactgcctgggaatgcaggaggtgatggcgggggcagatttgagtgtgtgtgggtgtgggtgtggggagaagtagtgtgggcaagtgacgtcacgatttgacctttgaccttttcctgttcccccacactgtgtgtggctatctgagcttaattgggcagagctgtttgcttcttctctgaatgggtttcttgagttcagtcaggatgtcaggtgctgggatgggctcaactgacaggcactgtcgggacctgggatttgcaatggttatggcttaatgacaccccttctcgaatctctgacatccctgtcaaactgtcacagtattggtgagttagggcggggtttcctctttaaaataacactcgctgtggtccttggtgcctgcaaaacagtgacaaggtggcttttctattcactaggcgcttctgagcttctctgagcctggggttggctttccctttcaggaaaccaaaaccctcgaagggcaaagggtggcgtctggaattactatggtgattcagtgatagggacttctgagagaagcaactggggatgtgccctcaattctgtggggtcagaaacctgacctatacacatactcacacacacacacacacacacacacacacacacacctctacatgcatccactcattgccaagcttccagagttgttaaggagccacacgcttctgctagatgtgtgcaaggccaagagctgggagccatgagtgcacgtgtgtatggagcatactcagaggtctgagggtgtcagatgactaaattctgaacttgagtgagaaccacaaaataaggtggcagaaaatcttagctgcaagcattcatcgtgttgttgagggtcttcatttcaggacaagcagagctttttctgtcagtggcagctagaggtaaagccaaggtcctgggatctgaagagctgcctctgagtcacttgttgagctgccctgcccctttgcagcccacaaaaggaccaggcagtgtgctatccctccctggctgccagttatcccctccaaattctgagtggcatgtgggaggatgaagaacacttggtagaattg

SEQ ID NO: 21900 - DNA, 1198 bp, Mus musculus
catttgatgtagatactgccagacgagctggcactcgacacactcactgtgtttggtcagttttcttcagagctgctccctgcaaggccctggaccacagatacctagaggctgcttgcctagaggatgcccagagtacagtgtgactcacactgtttcatccagagcggctaacagctcaggacagtatcccttcccagtcagccttgggtcagacagaacctgccaaaagtcagagtcctcctgcagcagggcctctctccttagcgaatgccgcctggctgctggcctaggcccaatctattctctgtaccatgggaaaggtgaatgtgtatataaataacacctgcaaatggcatttcagtgggtcccaaggaagctgggcgaacactgatggatgctcaggaggttcttggcttcatgttgtcctgcctccgctatgcctcttacatcgttggcaattgagctctctcttggatgcaccaccctccaagaccaaggcctctgctgtgttcctgaaattcccctgccacttatctgactctggctctctgcactggctcaggatggttgtctagactgctcgctctctctctctcctccctttgaatggctggatctctctctctctctctctctctctctctctctctctctctctctctctcttctctctctcctctctctccactctcctctctttgaatggctaactctttctctccagatccagctcatgtgttattttgagggagtgacttttctggacctcttattctaccaaagttcctcttccagcgctctgggtctttctatgtctcttgcttcctttctgtccttggtgacattctcactgctgatgagtctcgtgcctgctcgttgtccctctgttggaaggtagcccttccagggctgagctttactctgtgtcttctttaccctcactagatcatgccagataccaagtcatctagcagtcggctgccaacagctgcaggatgaccagtgaaatgtggaagaccttttcattgtgtggacacatgatcttaggaatcacaggttagggacaagacacatccatccacccagcatttctgttccgggtatgataatctgcaccccattccaactttactgtgcattgatattacccggagagccctttaaaactcagattcctgggtggtatcggggatgc

SEQ ID NO: 21901 - DNA, 1233 bp, Mus musculus
ccacactgtgtcttgcttaaagcaagtttttataactgtctttgtaaaggcaggccttacaaatagtctggtaatgattgtagtgatttttaaatggtactttctgtgaaccagctataatatacattttttagatatgtagtttatataaaggctgagttaattttaaagcttaataactgttatatgatattctgaagacatgggttaaatttccatgcattagaaatgcaaggccacatgggttgtgtggcagggccccagagtcacccatgtgggtatcttagtttatatttttttgatggttacagtgaaggaaagaacactttttcatccagcatataatgtattttgttttagttgtcctctgctcatatttagattgaggttttaaaatactcattatataatttatgcttctatacttgcaatgcaaaggcaatgaagtccttagtgtacaataactagatacttaaggaaatatgttgtcttacagccaaatttgtatcctactgtggggcttcagacaccaggagaagtggttgatgccaactttgggcaacatccttttgtgtttgatatagaagactacatgcgagaatggagaaccaaaatacaggcccagatagaccgctttcctatcggggatcgagaaggagaatggcagaccatgatccaaaagtaagagcaaggaattttaaatgtacagattcaaacactgaacgtttataggcaaactattctttttgtcttcaaagatgtatctccagaagtctagtttaaatcctaatcatttgtgtgtactagtgattatattttaatctcaaaaggtaatccaccaattggagtaaaatagcattggtttaagcaccctcagaattgtgtctgtctgatttaactggatggaggtagtaaagagacacttgaccataaaagtagcgtaattcagtttttttacccttactaagatgactcagtgaagtctgtaggttatgcagtcaaacttctaaaaatgttgacaaaaaagagataagtttagagggtgacctagatcgtatgttattgtgggttctgtgatcatcgtcagcagtagttcaggtacatatggaggaaaaagaatggttgtttgatgcttcctctcaatgcagacaagtatgagggtacagccagagtgggcacacgggatggtccagcgctgaggagtgtgggttgctcgtctctgtaagagtgtta

SEQ ID NO: 21902 - DNA, 1151 bp, Mus musculus
gaaggtttaagtgaggtcttaattataataggtaagaatgtgtatagttgtgtgtataaaatggttacaaattacatgacttttacctctggatcaccttgagaagtttgtggtaactgaaagttatactttacattaaagcatgtgtgtgttattcaaataaaagcaaaactcctatgctatattagctaaagaactaatgcatggaaaaacataacctggcatgactgctgtttatgttcacattcctggtagaaattctttctcctcagtacttgtttttactgttctgggtggtgagtttattttccttaatgttgtagacagcatcctaatgctgaaatcactatataatttagttattgagaatgtagatggacacttggagcttttatctgtataatatctgtcgtgccgttctgagtcatcttacaacgttagtggtaagtgactgatgaagagccttgtttatcattgtaaatatactgaacctgtctctccaggttgggataaacattcatatggttaccatggggatgatggacattcattttgttcttctggaactggacaaccgtatggaccaacttttacaactggtgatgtcattggctgttgtgttaatcttatcaacaatacctgcttttacacgaagaatggacatagtttaggtactgagatgttgttttaaatacaaaatagccaaatattgtgattattttactaagcatgatggttttgtttattatgtgattctgtttaattattctatccatgtccatgttaaggaagtgataaaaacttgtattcagttaaggctaacttatgtacagaagtaatactagaagtgaccacccagtcctagtgatagaaatgccaagcttggcttggacaaaaacttcattagttattcagttctctagtacaatttaaaacattcagttctaagaatatcgggggagcagttaacggaagtgaactgtaaaagagcagagtggacatgcttacaccttaggcctgctaatggtgttgctgaaggatggtgtctgagacaagtttgtggcacaggaaagaattaagtaaataacagaaataaaaagacacgtgggctaaagtatggcaatgaaacaaagaatcatgttgtaggaata

SEQ ID NO: 21903 - DNA, 1099 bp, Mus musculus
cgtaaccaaggtgaagaaagttgggatttctgtgatcgttctccggagcagctctgtttagttggctttttggctgagccgtgtggatggaccacactttcaagactcctttcaggcgaacctgcagcatttgacaagaaataaatgtactctctacagctttaagcagtttgtaaggtggagagcgtgggaaggcatgtggaaaacaaggtagctttaagtctaaagaatccttggcatcagcccagagcccttctgtgcctgaccagcagccgttccccacgcagtcttgcctctgctgcagcagctgcagtgttaatgatgcaggactcgccacaccttaggggcctttgtctctgggttcccattgtcttagtaacattgttaatgtgccttgcaactgggagtctaggtacctaatgaaactttgtgactttagcacaagttctcttactgctgccacacctgcctttctggttttgagacaaggtcttgctttgtaggccaggttggctttgaactcactatccggcttcaacaccaccgtgcccagcctctacctttccgaatgctagccttccctctccctcttcttcctcttccttcccttcctgatgtgggagtctaacaccacactcctggcattatctacctagaaatcttgtaattcttggaatgaaaccctgcttcagtgtgtggtttggagtgaacttccttctggtgtccacctgctttgcctaagatgacacgcggcacttcgctcctatgggctatctagacagtgtgcacgcatttagaataagtacacttttccctgtgagcggctcaggttgtcacttgcccagtgagagagccccagtgcttggcagtgcccccctgtgcattgacttcttctgtggtagcagacacccccacagccgcctcagctctccatcggaaacagataggtcctggagcagctgcagttattttggagaagtgcgttctcttttcctctttaaattgctggcactcggatgagagtgagcatttgggaagcagtgacactgggggacccttcctggcttgccccacacaggcacaaatgcacaagctggtg

SEQ ID NO: 21904 - DNA, 1203 bp, Mus musculus
gctgggttgaggtagaggaagggagacggaagtttagctcagtgtttatgaatctggagctttgccaggactacctgagccggaaggcagtggctggctacttatctttccattctcttgttaattcattagtagatttgcgatgttaatatcactccatagcagatttgctgtgaggattaagagttaacaggttaaagtgctttgcaagggctcctggtaaccactcgaccgtcattatcatgagcatctctgattcatattttctaagagaattcctgcagagaggtccatgtgctttattgcacttgagcgcagagaatcagggacagaagtggattttaatctcccttaatttaaatcctcatttccgggcccaggcagccaatggatggacaagaagtgttctgccgagtttagaatccaggtctacaagccagaattctggaaaccgccatttttctcagtacctgctacttctcaaatactattacagttttctctaggaggggcgggtcacagttttgaagggtatttgctgaaaactcaagatagctttatattcagccagctttcttcttgtctaatcttacaagagtttgggcaacctagccccagttgacttgaggggcccagacactctgtgttcttcttagcaacatgagacatgttgggttgaacatgaaagggggaggggagagatgaaaggtttaacaatatgtgaccctcattcgccaagcctcaggagcagggcttcttggtgtgggaagctgaaccctgctattctgttttctcttggaaaaatatcacacggccaagcttcctatcatacagccaaactttctaggccatttggacctattaaccaaagggagtggagggtaaggccggtgtgtgcgccgtaaagctaaactcctgtgaactgctgtgtttctgctagactttgtacagtatcatctaagaggatctgttccttccatctcctcaatcttcctttgttcctcatcccccacccctctggttagtgctgctcagatcttcccactcatctcctaatggtgattaggacctaatttatgctggagtccttgtgagtctggtttctgcaaaggggactcacggcacatctggaaatggacacattagatgttctttcatgaaggcctgcagttcagtgaatgccgggaagctgagagacaggag

SEQ ID NO: 21905 - DNA, 1100 bp, Mus musculus
ccaaactgtacaaggagaagctcatgcatagaggtgaattcatacctctctggctgttagaataggcacttattgacatttagtggaggagaggctgggttactagacacttccaaacacaagatcaaccttatacaacactgttgttgatggtcccatagggaccactgcactaagactgctactgatgttcctattgggagcacggcactatctagcatggctgcattatacaactctccttcaagtctaagttctccttcatacttgtgtgtaatctgtctcttctacctagaacacttgcttgtccccttgcttgtcccagagtttcaagtgctctgggacacttgcaatctgctcagtgaggctctccatgactgcaaagtatatagttggccactccctttcatagcagccttcctatgtcgatgctgtcgggtttgtccatctccttccgtggaagccgaagctcggtgggggtaagaagcaagagtggcctctctcaagatccaacgtagagactggcatcctctccggattcatacacaaatgcagggtcatgcatgagttagcagttctggtgctagaatatgtgagaacctaaggactagggatggagacaaggaagaggccaaaagagacaggagcaagttggtatgatgtgttggccgaggcgagaaggcactgatagggtagcgggttccccgagactgactctcatgtaccaacggagctcagtcctacagagattttggtgggacactttgttccgtttcatgctgtgtgaagcttgtatcttgcttgtgaacctcaagatctccaagatggtggacatgggaatgagcctggcttccctatggtttagagtaacccatgcatgacaagttgcccattcattgagttattaggaaggttggagtttggaagggagggcccaattatagctgagtgtaaagtttggaaagaaatatccactcgccctggaccacctcttcttgttctggtgagagctgggcactgcttggctgggaacgtctctggtgtgtccatgttcaccgttcaggcatctagagttgctttcacgtctgtgatagagtatc

SEQ ID NO: 21906 - DNA, 1216 bp, Mus musculus
gaatcctccatttcaacaaggcataggtgaatttgctttgccccaggactgggcaagttgaaaatatttaagatttctccactcttgcttcctctgattgaagagtagccagggaaaccaggatacctatatccctttagaatttgtagaaccaaccttgttagagggagtcttatgaatttgtcacagttgacatctggcctgaagaggatggagcagttgcaacactcagggaaggagctatttaaaatgaatgtatctacttcgaggcatatcccgtgatggatttttagcatttaaaagacttgtgtaagtcttcatctttaagatctctgacctgtctccctcttgggggccaggaagacagtgtgtgaaggcaggaggcactgtttcaaacactggcaatagctatgcagtgtacaatcaagacaggtaagcatcctgttaaaatgtaggcccctgaggtttggtggtggccaggcccaaaattctgcttctatgaaggtgtcagagggtgttcatgagtctaaatgatctgcggcttccttcctccttagccgtggtgggggatgggcaaaggtagcagaagattcctcccccaggttggagagcaactgccagcattctgctcctttgggggcccccttcgaaggtgtttggaaagaatgaactagctctatgtttttaggagccagcccgtgggagcctggaaagagaagggattccggaaagaatgagatgaggcagatacagagacagataaagacaggctgaggcgggccgtctcgcctgcaatgtctgtctgtcacagcctatctcatccttccttctctgtttcaatttcttttttttttttccctctccatctcatctccctcattgcttttctgtctgtagtaagataacaggatgatttcgctaaagctcagaggcggttaagaaggggacatgcgtgccctagttccagtaccaaatgtggcagacgcttggggggggttgtctatgagcctcagtttccctttttgtctcatgatggaggttcattaggtggtacccagacccttcctaactctgctgtcctatgattagactgactcttcatgcaaatctgtttacctgtaacttggggcaaatcagctcaacttccaatggaaatgagttagctgtgatgcggatcagggttaccggagcgcataatttccatttccgccgggca

SEQ ID NO: 21907 - DNA, 2035 bp, Mus musculus
tacaaagattgtgtttctgagtcatcttcagctcttacaggatgctccagttgtttgaggaagaggatggaaattaatgtggctatttagcacttgcctttttcactaaggtgtgctttttccttaagtaatgggaaaattctgtgattgaatttttcttgctcctgcaggtttttgaggttgagataagtagctaagaagcaacattttttttttcttggtgtgtgtctgtgcccatgtccccagtcctattggactttttatatggaatctaattcctattccgttttacccaagttgctccctttctcattcttacactgcccaaagcagtaaagctctgtttgttctattttcagtcttgatgttggaggatgaaagagccaatgtgaatggaaagcatttaataagtagtcatggtctgggttcctatttaaattagtagcacatgcttttatctgccttgaagggttttggttatgttgcctggttgtggctggagctgtgacatcacacagcttggccctttacagatgctacatgattgattcctaatcagatgaggccctggcggacctggaacttgatctgaagatcaggttggcctgcctctgctcccccaagtgctgggattaaggtgcatgccacgactttaatgccagagacactgtggattccgttccttaatattgcaaggtttgtgaaaacagttaattgccgtgcagttacgattgcaggagtgttggtaagaaacagacagaccttcttatgagtgatcctcattattcctagttttgttgttgaacattaggttttgttcacttttcagctgtttacctgaagttttcttaaatttaagtagctttttttttttaaaaaaattattttttgtgattggggcttctgagtagccctgtctgtctgtcctagaactctgtagtctgggctggtcttaaatgaaagagattttcctttctgtgtctcctgagtgctgggattaattagtggctttcaataccaccgactgcttttgcttaccaattttttgtattgaaggctctgctgccacatctggctgaattacatacacttttctttgtgtgtgggtgtgtaagtggttgtctggtgcctgcagttgtgcaggtcggtcaaaggacagcttttgggaggagttggttctccttttgtgtgctttctcacctgggcactgaactcaggttgttaggcttgctggtatttagttgctttcacccaacttttacttagtaacagactatcaaccaacctacctttctttctttctttctttctttctttctttctttctttctttctttctttctttctttctttctttctttctttctttcgatgtacaatgttactctgtcctcttgagtgctgggaatgtaggtgtatgtatgccaaatactaagatgtttgcctctttttttttggatatattttatatcagaatggtagttttatttatttatgtatttatttattttagttttttcgaggcagggtttctctgtatagctctggctttcctggaactccctttgtagactaggctggcctcgaactcagaaatccgcctgcctctgtctcccgagtgctgggattaaaggcttgtgcgaccatgcccagctagttttattattttttttatgtatttcctacatgtcacacattttccctaaaagactgtacaacaaacacagtgagttgtcatcccaggaacaatttcttttttcttaacctgacaagttcacttgacatgcaaatgtgacacaagattaaaatgtggatcaggagcaacagttgccctcaaacagtagtattggtgctgagcagctttaaacgttttcttttcttttttagttgagaactggactgtgtttaacttcagctgtccttgaacttactatgtagactaagctggcttgaaacttgcatccatccacctgcctctggctggaagcaaagacagtgccaccacacctggtcccatttataagtttttgagata

SEQ ID NO: 21908 - DNA, 1190 bp, Mus musculus
agcttaaggcttcttctcttccagaggttctgagttcaattctcagcaaccaaatgatggctcacagtatctataatgtgacctaataccctcttctggtatgccagtgtacatccaggcagaaatctgtatacataataaatttaaaaagtcacaaatgggcagaggaagtaataatggctaaatcaaaagtgacaaccagccaagtagggaacacacctttaatcccagctcttgggaagaagaggaaggtggatctgagtctgaagccagcctggtctacaattgccttcaaggatatacagaggtacacagagatagatgccctgttttggaggagagtgaagagggatggagaggcgagcactggctgctcttctagaggactcacattcaatttccagcacccacatgacagttcacacctgtctgactccacttccagaggatccagcaccctcagacactaatgcgcatgaaataaaaattaaatttaagctctggcatgttgaacaaggtaggaggtgtcagaaaagttgccacagggataattggctaatggtggccaagtgcccatagcaacgtagctttttgatcctttgatgtcagttcctctatcattgtgaagcagaattcaccaagcactcaccaattaatagggaatgtgcgctgggtttagaccacagtgagacagggttcccaggctgccctttgggaatcaaatggaggccagaaccaaagtctattttgatgaagcaccatttggagggactggctgccttccttcccaaagattctcccagcatggaagggtggactgcccaccggccctccctctcccttgacccacttcccctcttccactgtacactcaataaatgaatgaattagttaatttaagaaaaaacagtggcagccaatcagaaaaaggacccccactgaaccccagaggtggagggccttaaggcaagtatagaaataacttatctgtagtaaatagacttagtgataatgagcatttttgtactttttctaaccatttactgcattttctaacaaatgctatcaatcttattgccacataaaagcttgcacacaacaggaaaaaggtgtacataaccccaaatgtatcctcctagtctggtttctggtgttgtgattaaaaaaaaaaaaaaaaaaaaaaccaacaa

SEQ ID NO: 21909 - DNA, 1134 bp, Mus musculus
aaatagtactcaagatttagccttgtgagattgaatttgtgatgtgagacagctttgggaattgctttcttttcagcaatctagaagttaggaccacttgacatcagacccacttggtcaggacggtttctcttagttacattgacttcttcaagtcctgatagaactatgggtccacgtccagtttttgtttggcaaggaggccttagggaccagtatacatagtttttcattgatatttctttcacatgacagtaaatgttcctccttatcttcctgtgtctctgccccttgaaggcctgagccttgctatgcagccttgctttgggtttgagaccctccagccctgtggtattgggttgaccataggacttcatacattccagaccaacctttaacccattcaacccattcagttctctagtctttgtaaatgttggagggcatggctactctgccccaactgtaagaatatagctttttaagcctcttaagccaactaggatgaagaactgtgtttctatattttattcccagttgggaaggccacaatagtgctctcccacattacagaaggatgtcacaatcttgaggggctccaaaggaaaggtcagttatcccactgagctttatctggaataacgatcactcctgcttaccaaataaaccatagctatacccaggatctgacctattcagtgggttttcctacagtcaagtgaccctagtttctggattcctgagcagagaccgtcttaatctctttgattctaggaagtgtttgaagcctaaaaggacagttccacatggtgggctgattaagcagggtttggggtaagtaagtccgtgcttggccataaagtattccttaaggtggtatatatgacatgtatttatttacctctcagtcatagacaacttccaacagagaacaaatacagatagccttctaacaccctttctcatgtgctcactctgaacagcagtgatagaaacagtgctggccacatctcccccaggggaaggactaattttacagggccccagaagggaacagcagtttcatggtcattgttgttagcccctgtgcagtacttggttgcacttcccttgcttgacccgtttctcctgctt

SEQ ID NO: 21910 - DNA, 1142 bp, Mus musculus
attgctgaaatgtatctgtattatgagatttaataaaagaaactctcagggtatagtttctttgaagttcattctctttgcactttaaaacgagtcagccgggcgtggtggggcatgcctttaatcccagcactcgggaggcagaggcaggtggatttctgagttcgaggccagcctggtctacaaagtgagttccaggacagccagggctacacagagaaaccctgtctcgaactccacaccccccccccccccaaaaaaaaagaagctgttcagagcacacacaccgctccttatttctttgtgtatcctgagctgtcactatgaagaaaaggccagccttgaacttgagatctgcctgctcctgccagatttaagacctttaaaaacatctttaaaaatgcaaaggagttaggaaagctactttgaaaagctagatgtagtggttattagcaaagtttttgatagccaacagagctagattatctgtgatttggacctccctggcttgtattttctcttaacagtacagcactcacattcacgataaaaaggatgaaaacggttcctatgtgtaagctgtttgctgggaatgcttcataactgtagatgccgatcataacatcatcttatgcactacatgtgtaaaactagggataaaaggccttggcaaggaggaccttaagcaagaagggtcactgagccagacacagcggctcatggtttctttaatcctggcactcacaggcagaagcagctggatctctgtgagtttgagtccagcatggtctgcagagtgagttccaggacaaccagggcttgtgcagagaaaccctgtcttgaaaaggtaggtagatggggctgcaggcatgactcagaggcttctctttgagaggactcagatgtggttctagtgtctgcatggcaatccacaaccctctataactccaattcgtagggatccaacaaatgttgtgcacacaaatacattcaggtcaaacacatttttttttttaaatgacataccagtcttccagaggacctaagtttggtttctagcacccacatagaacacatgcccaaatagataaaaacatacatcattaggaataaatcataaccaaaagattgatagaaatcca

SEQ ID NO: 21911 - DNA, 1199 bp, Mus musculus
aatgtcagctatccacagaactggtgtgaattggttgggaaaaggtctggaaaagctcacactctgagggtgagtgaccttgggttagtcatttagccaggaaaggaagcatgcaaaagcctaataaagactcacaggttttttatcatatggtagccttggtctttcaatgactaatgtctggtgtggaatgcctttttttgttttttgtttgtttgttttgttgagtctcccaagtgctggcattaattaaggggtgagccaccactgcccggtgtggaatgacttcttgaagattcattcattctttctctctctctctctctctctctctctctctctctctctctctctctgggggggaacaatctttaatgaccatgtcggtgattcattatggaggtggggtggcaccagggtgtggcagacatgccagagttgtccctgtcttctccagcagcctctagctcctgaggtaatctgtatttgccagactttctttatcatgaagatgggggtattaatgtctgctggttgagggttcaagatgacacagttgtagctgatcctcggctaattcctccaatctggccagatgtcgtagcctggcttgatggcaactcgctacccatgtcctgctttcgtgttcagttggagttgggtccatagtgtgggctcattgatggcgtctgggttggtggactcaatctctcagcatgatggcacctctgtgggactccaggagcgagtccttgaagatgctcttaagtattggtttgggttcatacttatgggttccatcagttttaattctgtcatgtgctatcaactttgacctcttgatcgtctctgaagttacctgagaaagtagcaagatacaactctcaggccagtcaaaaaaaaccctgtactaacacactaggtgttactactcactcaaggtcgtcatttgactaaggcatgtttaaaggtgatgtgtgatttgcaggaagaccataggagtttttgtttgaaatcacaaacattcagcaataaacctgtattttttcctgttgaacataacttttatcttgtatatataattagtaatacttttcttcctccaatttacccaagttgcctctcacataactaaaaggccattatcccagtcagaagcaaattcttaatacgtgactgtatctgtattttttagttgg

SEQ ID NO: 21912 - DNA, 1174 bp, Mus musculus
aacaggaaatagtggtccccccctttcccaaatcatgaaacatacttcacctgtgctctgactcatttctttctcttgtttatttgtatttgtgtagtccaggctggcctggaactcagagatccatcagcctcttccttctaagtgtccaactcagctgtctgctcataggtcagggttagtgtatttcataaattgtctcatgtctctttcttgctgtgtttgctgtactattctgatttcaatggctgtattaataacagttaaagatggagaaagttagtaatagatgtgagctataagagcagtctacttagaaggggttcttgataaaacaatgtatactgcagtatattgcgcagtggatggacaaatcttcatagctcctgttgggtagtatagtaaatggattcctggtgcagtagtgcacctttcagtctgggatagcacagctgcccgggaccaggatttcaaggttggtctgggtaactcaacgaaaaaaccctcaaaacaacaaaaaattaaacataattttagaagaatcaaagatagtgtggaattatataatgatttggtattttgcgctcacggattaaagacttggacacaaatggacatttttttttcttctgcacacacacacctccgtggacctcttgcctttggaattgtagattttaggtaatggatgtactttgtgaacaattagcatgttcaatatattactgggtataagaggctatattgtagacagtgtttcactgtacagaactggctgtcttgggacctattattagcctaggaccaagctagctttgaatttagaaatgaacctgcttatttatgcctcccaagtgctgggattaaaggtgtgagttaccacacccagttcatttagtgttttttaataatagcatgagaaatgtttaatgttaagtgtttaatgactctttcaaggattagtttcttaccaaatcctgagcaatattttttggccaagtgtcaggaaacatctgcattaatcccgtgactgaagccaacttcaaacaagcagcaagttaagaatccctagctcactttggctgatctttttatgagcaatgtctaaaccctaacaggtggcacaagggaatttaaggatagagaagcctagctgacttctacctatttctga

SEQ ID NO: 21913 - DNA, 1116 bp, Mus musculus
tcctcaccttaatgtgctttcaagttaaaatagcactctccttatactggcttgcagtagcaaagtgcagtagcatttgtgatctcctgttacatgcaagatatgccttccatgcatacctccataccatagaaactttgcttcctctttctcctttcctcccttctttctctgattgcagagagaaattagtaaaataattactaaaaaaagtggaagatagtgaaagttagtagtgggaatcctaatgtatgtactatttaagatgagttaaaattccattgaatacatacttttttcaatagaagttaataagtttgtatgaggcagaaacaaaagatactgttttactgtgtactggtgtacttgcatgcctgtgtcagtgtgtacattcatgtacatatgtacaccttccctaggcctacagttccttggggctagcctgggattctctggttgtaccattttatttcccttctgtcatctctgtggttgcaattgcttccagtatggacttgggaagactgggatattagctgctgtccctgggatttttgcagaacacgctcctggcatctacctaaaattgttgaaataagattcttacaatgttgcccctttatccagatcagattctgtgtaaggcttcagagtgtgtataggcagtatgcattagatttttttgtctcttttgccattgctgcacccatcagaggacacaaaccttatctgtctccattacatgtagaagctttcctctctgataagcggaggcatggagccttctatgtactctgaatgtacatacagcattttgggttttgtcttctcatatatacatgtcaagagtttgtgttcaaatttggaattttgctgtgcccattcctgcccctcctccccactttatttttgtggaatagaaactgtgtagcaagcactggctagttctgagactggctatttagatcaggctgtcatcacagagagccacctgtctctctctctatattattagcccacacatgaacagcttttcactgttacgagtatatgtatatttggtgacctttattttgtgggtgtttatatatagtggtacaatctgtatgatttaca

SEQ ID NO: 21914 - DNA, 1102 bp, Mus musculus
ctcagaccataggaaaaacattatatttatactatgattcataatagtagcaaaatttcagttgtgaagtagtgaaaatattgttatggttgggaggggtcaccacaatatgagaaactggctctattaaaggggcacagcattaggaaggttgggaaccactaatctaggaaatccttgatggggatattgggggtacatgaggaaatcagggtatttgctgcattccttcattggaggatttccttgagttttacgcagaaggaatgtattaccatttcatactctggcactggatcatataatacttgttaggaatgtgacatgcaacaccccatcaccccactctgtccaggatttttacatcatagataagggtgtccttaaatttatctgtttttaatcaagtgttagatatatccactgcacccagtaggaattttacagtgaaatatgggtctgaatatttgtgtgcctgattttcagtaattctccttccacaggatgacagcgatgggatcccgtggtcagaagagagagttgtacgaaaagtcctgtatttgtccctaaaggaattcaagaatgcacagaaaaggcagcatggggaaggccttgccgggagcctgaaggcggtaaatggtgagttgaaagtggaactggatggagtctttctgtgccttgttctgacctgggcacaagcaagcttactaagctaagagttttggctgtatgaatatatatttcagacatcctattgtatttatagatatatttttatgtttctttacaaaataatatttgggaaggtgtgtcagtctgttagaggttataaactcaatgtgacatctatttacttatttatcattcatgtatgtatgtatgtatgtatgtatgtatgtatgtatgtaatcaatctacccagtgagtgcataggaacctttaatgatcttgttggaatatggagacttgcaccctacatgaggaaatattctaaaaacctactgccctttgtgctatgtgctaccaacctgtgagcaccctgctggcttccttgttgaccagtagctacaaggcctgggtgcctaacagaatgctcagtctc

SEQ ID NO: 21915 - DNA, 1193 bp, Mus musculus
ataatatatcatctataacttcagagtggtttgtaaatacttgaggtgttgggggggaattctatacttggcttttataataagataatagagtggcctttaaaaaaacaattcagtttcttcttcctcatcagtaatttttttctctcttatttccaaagctttaagttaaatgcagagtaaacctccaacactatggttggatgttttcattttactcacattgagttatccattccttgctgttgtttatggtccgtttctccacagaaatattacagataagattctcaaatatttatctcctcctgggcgagttttgcttgaaattactcatggatacaaatggggtcatatttcgtggggggaatatttgaaaataaattagaagtggtatcatctagtagtggtaattagctttgttttatgcgattggcatgcagttagggtcctacctttataagcctctcctttgcattactactcctggaaggggtgaatgtcaagattggttttgatgaactacatatgttaaacccatcaggttctcctgcgctgcccaacagtatggtatattttggaagctctcaggatgaggaggatgtcgaagaggaagatgatgagacggaagatgtcaaagcaaccaccaacaatgcttcatcttcgtgccagtcaacccccaggaaaggaaaaacccataagcatgtacacaacgggcacggtaggttcaccgtggaggctgtgtgaggggcagtggaagccaggcttgggtgagagctgagaaaacatttgaagcgtttcagccagatttcttcagagtaattcaagttccagactcttaatgtacaaagaacttagtagttcagcccaaaagtattctagatgaaaatgaagatgttctatgtggaaatgattataaatgttgtaggaactacagatgacaaaagaggaaacttgaataatgacgattaagatcacttttgtgatcaggtttctctatgtggcccagtcagtcccaaaactcactctgtagaccagattggccttgaacaccaagatttccctgcctctgcctagtactaacttggtaaattttatatatatgtgtgtgtgtgtgtgtgtgtgtgtgtgtgtgtgtgtgtgtgtgtgtgtgtgtgtgtatcatacattatgtgtatgtatgtaattcagag

SEQ ID NO: 21916 - DNA, 1136 bp, Mus musculus
ggtcaggatggcctagaactgtctgcttagcccaaagtggtcttcactttcgggttagggttgtcttgcttcctgagtgttagttttaggcttgagccacgatgatccgttgcctacagtaggtagtttttgaatggattttaaaaaaccaagatataggaaatacatagttcctaggatatatttgaagtgttttcaatcgggttcatcatcacatttcatgtccttgtgcatcttggtgctggccatttatttccctggagaatggttgagttacatggtaacttacacagtattcacatcccaagttacatggtatggttcctctgttcaaggtagtgacttccttcttcccttctcttccttttctagttttcaatggctccagtaggtcagcacgggagaaagagcctgctcacaaacacagaagcaaagaggccactccggggaaggagaagcacagcgagcccagggcagacagccggagagaacaggcttcaggggctcagcccacggccgcctcggctgcggcttcctctgccaagggacttgctgccaaccaccaacctcccccttcgcatcggtctgctcaggacttacggaaacaggtaaccctcagtgagggcctttctagtgtcccacagaaggcccagtttattaatcaaggtgaattcaggctgaccgagctggaaaagtagagcatgattggacagagatcacatgaggtgtctctcttaccctgggaggatccagatctggcctccctttctttcctggatagcttgagcttacacagtattcacataccaagtgctgctccccctccaatcattgctcctcttctcttctgagagggcacctcccatccccttcctagctcatcaagtctgtgctggattaggcacatatttcccactgagggcatccaaggcagccaaggatactgagctgaatactacacagcttagttttgtgcatgagataaaatggatggagactaaagatagactagtttctagtgaagcaggcatataaaatattatttccttgtctttgtgtaaaattatacactaatgcacaacacaggtcatcctttcataattttatttttattttatgtgaatttgtgttttgcc

SEQ ID NO: 21917 - DNA, 1805 bp, Mus musculus
tgtttttgtttttgctgttttagtagcattattgggtttcatgttctgtgggtcggccaggctgttaacatggaacacacaaaggatagcaaacagctgcttttggaataagaaaaaaatatatttcaaaaacttattgcacacctttcttaaatgaacagcatcttgctgttgcaggttcctgggtaactgatgggtcaatagagagggtctttattctggaccctaagcttcctgaaagagccatctagagagatgttaggatgcagactcatcggggccgagcgctaggcaggactacacagtgggctgcacaatgctgtgtgtggtatgaaactcgtcattcagctagcacagattaattcttagtgggctttctgctgcttatcggatgtcctcatgtctcttctgagccagcaactgtagaagtcctttctcactggatttgcctgggtactaattctttctctttcccctgcttctgctgcctccataggtgtctaaggtaaatggagtcactcgaatgtcatctctgggtgcaggtacaaacagtgccaaaaagatccgagaagtcagaccttcaccatccaaaactgtgaagtacactgccacagtgaccaaggggactgtcacatacaccaaagccaagagagaactggtcaaggaaaccaaacccaaccaccacaaacccagttcagctgtcaaccacacaatctcagggaaaactgaaagtagcaatgcaaaaacccgcaaacaggtgctatcccttgggggggcgtccaagtccaccgggcctgctgccagtggcctcaaggccagcagcaggttgaacccaaagtcatgcactaaggaggtgggggggcggcagctgagggaggggctgcggaattccaaaaggagactggaagaggcacagcaagtggacaagccgcagtcaccccccaagaagatgaagggggtggcaggcaatgctgaagcccctggcaaaaaggcctcagcggcttcaggagaaaagtctctgctgaatggacacgtgaagaaggaagtgcccgagcgaagtttggaaaggaatcggccaaagcgggccgcggctggcaagaatatgctgggcaaacaagcacatggcaagacagagggcaccccctgtgaaaatcgttctacctcgcaacccgagtcctcgcacaagccgcatgacccacagggcaagccagagaaggggagcggcaagtctgggtgggcagcgatggacgagatccctgtcctcaggccctccgccaaggagttccacgacccgctcatctacatcgagtcagtacgtgctcaggtggagaagtacgggatgtgtcgcgtgattccccctccagactggcggccagagtgcaagctcaacgatgagatgcgctttgtcacgcagatccagcacatccataagctgggccggcgctggggccccaacgtgcagcggctagcctgcataaagaagcacctcagatctcagggcatcaccatggatgagctccccctcataggtgagttaattcggggattgccgggtgggttcagctgggccgtcatctctaactcgacaatagttgcacttctcaactcatttccctgctcttgtagaacctctctctctttcgtaataagtttggggcttgctcttggtgctagagcccctgagctgctgctgctgctgctgctgctgctgctgctgctgctgctgctgctgctgctgctgctgctgctgctgctgctgctgctgctgctgctgctgctgcatggctttttattgctctagagtt

SEQ ID NO: 21918 - DNA, 1465 bp, Mus musculus
tttttttcttggatgagacaaaaaagcctttctgagtgaaagctaggctatttggaagagacttggctttgatcacatgtgtctgacctttcacaatattgatgatgcagtaagctatgggggagccctggccatgctctgctgtagtcacctgtacccctctgtgtagtagtgccctggtctatgctgagcacagctttggtaccatttcagtggtcctctccttctgtgcatggctacctctttccttctgatcaattcctcagatactatttctggtcaccttcctaagatgatcataccttagtttgcttgtctcctggtacttagccacgactctaagcagtgctcaaaactgtttgtacatacaagctggctgctggctgctttagagcagcagttttgtagtaaggctttcaggactaatagggcataggaaaacaacttgtgatatccttgttaaccatttcaccccattgctgcccaggaggctgtgagctcgacctggcctgctttttccggctgattaatgagatgggcggcatgcagcaagtgactgacctcaaaaaatggaacaaactagcagacatgctgcgcattcccaaaactgcccaggaccggctggccaagctgcaggaggcctactgccagtacctgctttcctatgactccctgtcccccgaggagcaccgacggctggagaaggaggtgctgatggagaaggagatcctggaaaagcgcaaagggccattagaggggcacacggagagcgaccaccacaagttccactccctgccccgctttgagcccaagaatgggctcgtccacggtgtcacacctaggaatggattccgtagcaagctcaaggaggtgggccgggccccactgaagacgggccggcggcggctgttcgctcaggaaaaagaagtggtcaaagaggaggaagaagacaaaggtgtcctcaatgacttccacaagtgcatctataaggtgagtgggctgtgcggtagggtgtgccctgccctgctggagccggaggaagctgacttgttctgtgggatgagcgctaggacgctgtcttaggactgttctgagctgctgtgaccaaatatcacagaggagactttctgtgttgcttctagaggttgggctctttctcatttacagcattaggtgagtctttggcaacacagaactgtcatgaaatggcgtgctctccatgcctgttggtagttatttaaagccgatactatgatagtatattaaaccccaggaaatatttcttgttgtttttataaacctgatatgttaaataaagatttagttggaaaaagctgacatggttggcccaggtgcccacaacttgtctgtggcactgcgggtggctgcaggggcatgcccatcacccctgtctgttgcatctgtggtagtgtttacattagatccttcttgtacttagggagct

SEQ ID NO: 21919 - DNA, 1219 bp, Mus musculus
acaggggtgatgggcatgcccctgcagccacccgcagtgccacagacaagttgtgggcacctgggccaaccatgtcagctttttccaactaaatctttatttaacatatcaggtttataaaaacaacaagaaatatttcctggggtttaatatactatcatagtatcggctttaaataactaccaacaggcatggagagcacgccatttcatgacagttctgtgttgccaaagactcacctaatgctgtaaatgagaaagagcccaacctctagaagcaacacagaaagtctcctctgtgatatttggtcacagcagctcagaacagtcctaagacagcgtcctagcgctcatcccacagaacaagtcagcttcctccggctccagcagggcagggcacaccctaccgcacagcccactcaccttatagatgcacttgtggaagtcattgaggacacctttgtcttcttcctcctctttgaccacttctttttcctgagcgaacagccgccgccggcccgtcttcagtggggcccggcccacctccttgagcttgctacggaatccattcctaggtgtgacaccgtggacgagcccattcttgggctcaaagcggggcagggagtggaacttgtggtggtcgctctccgtgtgcccctctaatggccctttgcgcttttccaggatctccttctccatcagcacctccttctccagccgtcggtgctcctcgggggacagggagtcataggaaagcaggtactggcagtaggcctcctgcagcttggccagccggtcctgggcagttttgggaatgcgcagcatgtctgctagtttgttccattttttgaggtcagtcacttgctgcatgccgcccatctcattaatcagccggaaaaagcaggccaggtcgagctcacagcctcctgggcagcaatggggtgaaatggttaacaaggatatcacaagttgttttcctatgccctattagtcctgaaagccttactacaaaactgctgctctaaagcagccagcagccagcttgtatgtacaaacagttttgagcactgcttagagtcgtggctaagtaccaggagacaagcaaactaaggtatgatcatcttaggaaggtgaccagaaatagtatctgaggaattgatcagaaggaaagaggtagccatgcacagaaggagaggaccactgaaatggtaccaaagctg

SEQ ID NO: 21920 - DNA, 2111 bp, Mus musculus
cgaacccatggtcacttatatattttttgtaattactatattctagtttggagtacttgctgtaggatacaagctgtctttgcactagctctaaagaagaatttcttctggttttagagaactgattttgttttagcattaaactgttcaagtttttgtacgtagatatctagatactgcagtcaggtttggaagctgccgtacactcactgtctaaaacccttgaggggctgtattaatttgtatcgccccatggctgtgaaatgcctttttttttgtttgtttgtttttgttctgttttgtttggtaactgttgaggaataaaggctttttaacccatttttgaagatggtgaagtttggagaacaaattttaaaaccatcagtcagatgagatttttctagattggaaaagggatagaagatacacacacacacacacacacacacacacacagaaaaaagaaaacttgaaatggctttactttggctgtcttttcttctgtcatgtgcgaagggagtttgtaacttttggaaccggagagccctgtttctttggctgggcggttatggcagctgaaggcaaactgtgaggtttgagtgacgaggttctcataccagcacatcactatgcatccgttcgagggagagagagacaaagacaaagactgcctgccttggagggtcactgagggagacctgtgcctgatttcattaggaaatccattctgttatttttttttggtgctgttggctactttatcaaaaaaacaaaaaacaaaaaaacaaaaaacccttcaatagcatccttgaggaaaaggaacagcagttgactgtaagtgcttccctgtcatccatgtgcaatttcccgacattccacctccatctctgcttgtgtccctcacatcagcattaatctttgtttccctcacacttagagccactaagtctgcagttctttttgaatgtgaaacacatctgtgctcctcttgtctattttttctcttcatgttttaacaaaaaagaaaaaaagaaaaaaaatcccatcccttttgtacatactcctgtaaattgttttaaatacttgagccttttcttggagggggagggaaggggtgagaagatggagaaaagccttacgtttccgtttcttcatcggctgattggatgcttacagggttctcttgtgacatgtataagtgctgcttacatcactcaacagcaacagaacgtggtagtggagtagctgttgcccttctccggctgtgtgtacagtatgtgtggaataaaaaagggaaactgttttcacaagctgttgtttgtttcataattggatcagtccatagctacccacattgcactgagcttgccagtggtgactgccaggaacgcctaggatccactttggtggctgttgttgcagaagactaaactgctttggactatttaacgattgcctgacagtcgagtgtttccaatgtggtcgtccagtttctatggccttgctgtggactttcccctctttgtcggtaacctttcgcctatggcttacagttcgacatttaatttattagcgctgctctgcacccctcctgccgggaggctctgtgtggttattgccagttctttgtttacttttcaggtttgtactacaaggtttaataataaaaagttttttggacattttgtctgtcttgtgggaagggattgggctttctttggtcagtggggcaggggctacacatcctctcttaggccagggagcggagctacagaggcatgtccgtggcactgctcaccactctgggctgcaactaggctagctcatgccctggggaccttggggaagcaagtttctttcccaggttgtcacctgatgctaggtaaaattaagttcttcagatcccaatttgaccactattggttatgctaacagactctgcctcccagtatggtagggcacggtgcccacatagcctggcctaggtcctatttccttcaaggccctctccagcagacctccacacctgtgtttctttaggaactcttggtcaatcagctctaagcacctgtcaaggcaggggcctctatacgacccatatactcaccagc

SEQ ID NO: 21921 - DNA, 1099 bp, Mus musculus
agcccgagctgggaaccattccgggactggtaccctgcacacagccgcctcttcgatcaagctttcggggtgccccggttgcccgatgagtggtcgcagtggttcagcgccgctgggtggcccggatacgtgcgcccgctgcccgccgcgaccgccgagggccccgcggcggtgaccctggccgcaccagccttcagccgagcgctcaaccgacagctcagcagcggggtctcggagatccgacagacggctgatcgctggcgcgtgtccctggacgtcaaccacttcgctccggaggagctcacagtgaagaccaaggaaggcgtggtggagatcactggcaagcacgaagaaaggcaggacgaacatggctacatctctcggtgcttcacccggaaatacacgctccctccaggtgtggaccccaccctagtgtcctcttccctatcccctgagggcacacttaccgtggaggctccgttgcccaaagcagtcacgcagtcagcggagatcaccattccgatcactttcgaggcccgcgcccaaattgggggcccagaagctgggaagtccgaacagtctggagccaagtagaagccatcagcctgctgcctatctcccatagccattgctggccacccctctctgtcaatctgtgcgctcttttgatacatacatttacctgctgtttttctcaaataaaagttgcaagctactgctcaaaaaaaaaaaaaaaaaaaagaaaagaaaaaaaaaaaagaaaacgcctctatcagttgaccttcaggccatgtctgttgggggttttcttggttgctggaggatgggggatgagggggtacactgaggacagtgctgtccctgggcaggtgggcctgggctatgtaagacatgagcctggagcataccaataagaggttttcctctacagttcctgcctctatccctgcttgaatttctgccctgactcctttcaatgtaaagtataagctaaactatacatttgcttattacagccattgaactcaagctagcacactcaggaaggcaaacctgatggggctggttatgaaagatgatgcattaggaacactgtgtc

SEQ ID NO: 21922 - DNA, 1170 bp, Mus musculus
atgcacacgcacacacgcacgcacacacagtttgacagaaaatagttttcttcagtggatgtcttttcctaacattcgttgttaatctgtataaagtataaatattcaagcctgttccagagcacttgaaagcttagaactggatcacagtggcgtcgtatctagaaaactgactgtcggggcaccaaggctgaactcccaggtcccacaaatgtcctaaccagtggtggcttcttttgcagtcctgtccggtctgcagatcccgtgtggagcatgtccagcacgtctacctgcccacccacaccagtctcctcaatctgactgtcatctgatgcgtcctgcactcgatggacaagccatgtccccacaagctgcagtattgtaaactataagaataataactttgtgaagagctatttcactctcaacacccatctgccatgagacattttcagaaacaaggaggaaaagaaaacaagaatgtgaccacacctcttccgtgaggagaagcaacaggccccatggccaccaggaagaactctgggacacggacacattccttgaactttagggttggtttttttttttaatgatcaagtaaaggagtagatagaatcgtcttcgtcagtcaagtggcaacatggcccaaccgtgggcaccttttaggaaatgacgtcatatgtctccttcactttttccccgggcagcagattttgtaagtgttttaaggatttccttggttctttttgtatggtcatggagcgctgaatatttttaatagggattttttttcttaaagaaatagtcctcattataaaagtcatttctgtctttataactcattcaagaacaactggaaaagctggcagattgaaaaaaaaaaagcaatcctgtgacttcccaagggttgacagcaatgttgtcagattggaagcagtctggctgagagccaataggtaactcaccgtgggtgacttccttcctagagcccttccgtttcccctcattccacaccccatgcctttcactgataaaaatgctaccagtttggttaagagacatacatggtagagtcaagcactccctgggctttggagattggaaagcgagagtagcttccttgaaggaaaaagatgagagagagagagagagagagagagagagagagag

SEQ ID NO: 21923 - DNA, 1179 bp, Mus musculus
ctcagaaaacacacacacacacacacacacacacacacaaacacacactctgctctctggctaactccgaggagtgaactgactgcatccactaagctgacactaaaacaggtaaaaacacacatggctcagagcaataggaatatcataacttgtggttctatttcaggtataggaattatacaaatcattgattcttccgaagcatccgtcccatctcattctctggctcccttagcatgtgcaatactttgtgtgccaatagtgtgctatctagttaaagttcattcccttttggccttttccttgttcggtgggctgacctttcttcccctcgctggccagagaaaggctggaggagtgagccaggagaggcgagccccttccatttctccttaacaccgatggatgcagagtgctagggtaggcagcctatgggagcctgtgtgtgtctgtcaccaggacacagtgagagccagccaaggagacctgagggaagcactttgaaggtccgtcaccacactctgcaaaggcccctcgctctgtagtgaagctggaatggagccaggaggcggagtggctcctaggacgaactctggagcggaatggtcttcagtcaactcattttcagtctcttctgtgtccttgagactttgatccctgcctttgacacaagcaacttattgcatatgtgtgtgttctgagcatgcccaccagtggctttggagggcaacctggcaaccacagtcaccattcccttgggacagctttctcttcaaacaggaagaacacacagaggcaggagccacctcttatttgcagacattggtggggtcctccaggctcccggagcacctttggtcaactgtgtagggagcacggtaatagcagtgccctcatcggacaaggatcagccacgcgcctctgtacctgtcctctttgcaatatttaccaacagccgacttttccttcttctctttcctgctttccattttaaaacaaagtaacagcaggccttttttgtgtttacaacggaacacaatcaccaagaaattagtcagggcaaaaagaaaacatagtaatattactcataagaaatcagcaaacaagaacctctttctagggatttctaaatacacaacaacgtgactgttccttagactgtttaactttagaatt

SEQ ID NO: 21924 - DNA, 1198 bp, Mus musculus
gtgtgtgtgtgtgtgtgtgttgcctgcacttgtaaagtaatggggtctacttatattcaataagaaaattgctagtgtgctaactatatatctctctttataaaaataactaaagtagcctttgatctgcctgaacttggtcctctaggctcctattcagttttccatctttagttttttactttgagctgggaaagagcccctgccaaaagacagccaggttctctctgagcccagcccagccagccatctgtaaagaagaaagaagcttgtttgtcttaaaaggcagcccaagagaccgttacaatagcgattgtcagagcagaaacacttggcattggttgaaagtgtttgaaacaagatttgcctaaaaaagatcttcggtgcttgcttgcaacttctttatgttgtgtatctgtttgtatgtgcatgagtattcaatgtgcctgttggtgtgtgtgagagtgtgggcaagtgtggagcttcctgaagccagcctacagtctgagtcttcacctcccacattgtttgagactgggtctatcttgtttgctactgtgtataccaggctagccagccaacgggcttctgagaatcctccagcctctgcctcccatctcagtgtgggagtgcagggactgcagatgcacactaccatgggagtacaagcagatgtacatgactctgggctcgcagggactgcagttgctcactgctgcatctggctcatgtgtaaggtatgacttcagatcgccttacttctgctgacattgccttatccatccactgaactgtctcattagtctaagaatttcacattgatagagatgtgtgcattatctctagatcaaagaccttaaactcgagacccgagaacgtaaaaaagaatgggactgagaaccgtgactgtggttgcctctgcggctctgggccctgggcatctctcttctaagttatgctatgttttaactccatggcttttatgcattggctttaccttcaccatgcctggctggcacatttggtgactctcttcagtgaaggaagcgccgtcttctctactgttgaagcaagtggcaggagtcaaatgcacgtgagatggttgttagaatttagggccaaggagtgtagctggaggaacaggtcttcttgggcatctagccactgacaaaaggtaaaagaaaaaaagatcgcattc

SEQ ID NO: 21925 - DNA, 1113 bp, Mus musculus
tatggaaaaggtaagcaaagagatgttcttttcttctgacaaaatagagagtactgttacactgtttcctcattggtgtttttagatgttcctaactgccatgcatatcaaagttctagtcttgtatgtagctttctttagaacaggtagttcaactatattgtttgaaaatgtcaggacaagctacctagtcacccatgactgacacagcctgacttgctacttctgcttgtttcctttaggtccaccatacgagctttgatcaagaatttttctattgcttcttttttccctgctttcatcacactgctgttttttcagcataatcgaacagcctatgacattgtagcaggaaccattgtggtaaagagaaatggggtcagatgatgtccagaaccctgaatcccactctaaggaataacgacaagactaaattatgtatcaaggccatcattatctatgggttacattgatgatttaaaaattaaagcagtcattccggtgtgatcaggggtctgttctcaaagtgttgactgtacttgaatgtcaaggaacttcttcagaaggaaaaactattaaatttaagtgttaaaatatttataggacaacaaagcaaatttcataatcgatataagcaaatacatactttaacatttaagataaccaaaatttgctggaagcattttcagctttaaattctctaaatcaagttttactttaaagttttattttggcttatcctagagtgactgagaaatatccaattgtgttttataaacacctacagaactcccacagctcttcttatggaagctgctttttgtgagcattgagaaatcatcaactcaacaacccacttactccatggcaggtgttgggagaaaagggctagtgaggaaggcctgagagtcccctcaccccacacttgcagggtagtctagagcttgctgcagtagtggtgggatgtttcagcttcttactgcttatgtatttggaggcaagattttcatgatgatgaaaatgtactgagcatatcattgatatttttaaaaggtaagttagttgccttctgtagggactgggggtgggagtggggattggagtggggatttc

SEQ ID NO: 21926 - DNA, 1858 bp, Mus musculus
agattctatttatgtacagtaaattcctaaggcactgtgtattctatacaattccaaaactgtcaagacatcaaggtgttaagagtgtattttgtgaataacttgtactagcagcctgtgaaatattagcagttttcctattatgaattgttctctctaaagcaaggcagcatataatcttcggactttattctagtttaagctcattttggcctgttagagatgaaatttggaggggggtggggatgtgtcattgtactttgctctgttggtgaaacattggatttatgtctgtgtgcttttgttgtgtcagttagctagctgtaccaaaatgttagtttaaaactttacttcttactcattcttgtgtaggattttcctgagaaacactaaatcatattgcacaagagagcaatcttgacatttaaaactgtgaaatgcatttaatatctacagatactttaagaatctcctaagagctcattgttcatcaaccatggtttctcagaataattttatttaaattaaatacaacttcacaggaagtcttatttgtcaaaagcagtacatagagcatgtgcttgtggctctggcaagattttaaagctcttcaaacactacaaattgggaagcttggtgtggacaatcgccattgatgagagaattcaagttgaaatgtgcttcacccacacagctctggagtatttaattattgtttctactgcgagtattgaggtcttcactgaggatatttttatttatacggtaaataagtagttaaaatttgttatagtttaaataccagttaactcgacaagttctttagatctagctgtgaattcaagttgtgccatataggatgtaagataaaagtattgctttgcctccacaatagaacctcagttataaggagaaaagggaatctggcacatttttccatgccgaagctgtatcctgaaggggcaaaatgaagatctttaatgagcatgccctaagcctggagtcttgttgctgcattgccattcaggctaaacaactggcaagtgatagtctctcagtactcatcactagggatgttctacactctaggtaacagcatgacgacaaaccttactgagtattcgtgactataaacacatgccacttttgacagtgttcattgcttgactctgcctacaaagcatttacctaattgcccaagcctcaaaattgagtcttcaaagtatctttaaaagcattttaactttaaatgaaacaatcacacccgtttctggccaagggaagtagttctgaaggaagatggggcattaagctttctcatctctgaggacggttcctagatcaacagtattcctaaacaagtactggttcagctccttgccaccaccatccacataaccaaagaccaaagtccttactcgtgcctgggtgaagttcctcattttggctggtatgtgtagatttccttgtagttcactatagtagggcttaccctgaaaacagcactctatttttaatatttgtatgtcaccagtttgtattttgtgtctcaataaatacgtcaatgtcaacagtgttgtctgtgcctatttctacagctacagcagtgtattaaaccatgttctttaacagggctggagttcagtgataagaataccttgcctagcacatgtaaaaccctgcatatccaaatacctaagtaaaagttacctgcacatgagctcagcttcatgttaaaccagtccacagtggactgcctttcctcaagggcagttatctgactgtggtaatgttaactgtgtaaagccagaactcaggaggctgacataggaatattgctgcaaatttaatgccagcc

SEQ ID NO: 21927 - DNA, 2111 bp, Mus musculus
gagctttgggagggaagattttctgttggtcatgtattctgctgtgggatcactgaatggaaaggtatgccctcactttttagaagttatttattacaaacttttcttgctggtatataccacatgctgtcactgctggatgacaatttgcttatttggatactatgtattttccttttttgtgaattatttttaagtattttgttccttagttttgtttcatcattggtttgtaaggtttatcttctattcttgtgtttgtatttagccatgtgtactccaaaatttctcctgttttgtggcagccctggctagcctgaaatggtctgtagacctagactggccaggaactctttagtctctgcatcctgagtgttgggactagaggtgtgctccaccatgcctggccaaggtcttctacccacgtttaatatttccaggtcagagtgaatcctaaacaacattttgtgtcaccaatgggatattttctgcttaatttgtataggttcggttttccaatttggtagcagcactacgaatttcaacttcacaaacaataatccatcaggagtgttcacatttggtgcaagtcccagcacgcctgcagcctcagcccagccctcaggttcaggggtcttttcattcagccagtctccagcatcatttacagtggggtaagattatttcattgagaatttacattggtaaagaggtgtatctgtctgtttctaaaattaaatcaggatgcagtaatatagtttggataatagtgatacccagtatcagtttataacattgtaaatagggggattatgttataatctgaaacaaaagcagcaagttatagtaacattttcctcactgtcctctccactttgttgtaggtcattttaaatggtatgagtcctctgtcttgggcattgtgtcacattgtaatgtttttattttttcacaggtcaaatgggaaaaatatgttctcttcttccggaacttcagtttctggtcgcaagataaagactgctgttagacgcaagaaataaaagtcacaaaggtgttatacccaacagttttatcaacagctggtgccctgctttcagatactggattgtactacatgctgggcttatctgaagtcagatctgcctaaggacttctttaattttggaattgtcctcttttttttctttatggaagtcctgtccccataacccattctctttttgaaaataatagctagactggtgactgactgattcttcagcagaaacattttatgatccagcacattattcactgattggcatagtctggctgtacccaggaatagagcctgcacggtgaatggctttgtatagaacctgtctgcaccgctatgtgcattgataaagcgttaatggagcgtgttgaaattgtaattatatctggggaattctgtatagattagaatcctgtatagattagaggacgttgaaatgaatgatttctatgcggagtttgtggtggtgtatgtgtgaagtgagtaagtgggacgtattgtgcacagaaaaattctgatagagaaaacctgattaaagaacggtccatcctaaggacttgttagatctagttcattctccacttaataagtatatgctatttctatattttcattctatcaactgtcttgcctttttcattattttattatgagacttctgtaaatacaattttgtttctgtacctttttggcataacataaatctgtgaacttgaaattttaattttatgttagacatatttttgttgtttgtttagtcttgtctcagattttattatgtaaatcccattattcaaagttgcctaaatccatttggaaatctttaaaaaaaattggggattcttaaagttgaatttattggcttttctgatccagttttgtttggaccaaaaaccagtattgtacaaagtattaagcatatatttttatatttactgaaatggactgtggtgactttggataataaggaaaaagtttaatattaaagccatgtttattacagtataattaacatgttaaaccatgggataaatgccatcaataaaactttatgaagcaaatttgttaacagttt

SEQ ID NO: 21928 - DNA, 1178 bp, Mus musculus
atgagctgtaacttgcaggggttaaatttgtaacaaggataagcacattaatttgatatcattttgtgtgttgtctgtttttgaaggcttcgggacatcttcatctttaaatccagcaccctcagccttcaaatttggtattccatcgtcctcttctgggctttctcaaactttgacaagcactggaaattttaaatttggagatcagggaggattcaaattaggcacttcatctgactctgggtctacaaacaccatgaatacaaactttaaattttctaaaccaactggagactttaaatttggagtgttatctgattctaaacctgaagaagttaaaaacgacaacaagaatgataattttcagtttggatcttcttctggcttaaccaacccagcttcttcagctccgtttcagtttggggtatctactcttgggcaacaagaaaagaaagaggagctgcctaaatcttcacctgcaggctttagctttggtgcaggtgttaataacccccctaatgctgctattgacaccacagcgacctcagagaacaagagcggcttcaactttggaaccctagacacaaagagtgtctcagtgactcctttcacatacaagacaacagaagcaaagaaagaagacgcacctgctaccaagggtgggttcacatttggtaaagtgggctcctcttctttgccatcttcctcaatgtttgttttgggaaggacagaggagaaacagcaagaacctgttacttctacttctctggtgtttgggaagaaagccgacagtgaggagccaaagtgtcagccagtattttcctttgggaattcagagcaaaccaaagatgagagctccaagccgacattcagcttcagtgtggcaaaaccatctgggaaggagtctgagcagctagccaaggctacttttgcatttggaaatcaaaccaatacaacaactggtaaatagtaaaagactttttttctcaagttgtatttgataccttgacaaatgcaggaagtcaaggagttgctgcctgaaaataatggagagtatttgtttcaaagtttttaagagctcactcaggcttttctgttttaactgaaagaaattcccatgattctgatgaaatatctacagacccaattttgagaaatgcagctgtaacagaaagtac

SEQ ID NO: 21929 - DNA, 1199 bp, Mus musculus
ccaaggctagaattgtagatggactgtgtccacccagcgtttatctgagttctcagggatctgggatgtgctcctcttttgttttttgttttggtttttcgagacagggtttctctgtgtagccctggctatcctggaactcactctgcagaccaggctgacctcaaatttagaaatccgcctgcctctgcctccaaaatgctgggattaaatgctggtgtgagcccccacgccaggcttgaatgtgctcctcttgtttgttaatgcaagcacttgaacgaccaagccatctcggccacaagcaacacacacacaattgggaatagttcatacttaagaataagctcaccattgagaaaagttagagtgagatgtttatttgcaatgataaattaaatctgagaagtcctatttataacactgtaaggcttattttctggttcactctggttctcgctctctcttcgtgtgtgtgtgtgtgtgtgtgtgtgtgtgtgtgtagaaagggttaatgaaatttgaaaatgttcagttggtggtgtcattaagatggtaataaatttaaaacttgcctccatttcccaattcttttaggtttggtatctgcctcaagcagcagccctgcccctgtctctctgtcttctggaggctgtttaggattggacaagtttaaaaagcccgagggaagctgggactgtgaagtgtgcctagtgcaaaataaagcagactctgccaagtgcatagcttgtgaaagtgcaaagccaggcacaaagtctgagtttaaaggtgaggctatggtaaagaacccctttagttcctagctaaagtaaaatgtgtgtgggcgggcaggtttggtttttaaggtacccattctctggataattatataaaatgaaacccagtccttggttttttgtttttgtgggtttttttttttttttttaaatttgtgaatgatggtaaaaatcaaattaggcattcctcaggatgccatctatgtatctggataaggaacttctttgtgttactcagtttccaggtttaagtatgaacttgactcttacttgactgagaacttacactcttagggccttattgtaaaagccatctagcttctgagtgtggctgagcaaaagagagcacttagcaagcacggctgagtaagcttttatgctatccattttactatatgaatataa

SEQ ID NO: 21930 - DNA, 1112 bp, Mus musculus
agaggcgctgggaactgaacccaccactagtcatctgtctagtccttgtaaaaaaaaaaatcattttaattcttgattagaaaaatataaaaagtggtttgagaagatggagaaaaataaattttaaccatgttcaaaattcatcttacctaaagttgttcagttgtcttgaatattgtatagtttcatgttatgttggtataaatgttcttgtgtgtgaaaagccatggacatgagctatagaggcctggtttaacatgacatggctaaaatgtcagtttgtctgcaaaatactttagaattttatatatatttgcatattaatagatttaatgtctttggtttgtcagcttttttctgtttatttgcatctatctatttctcaaggaagtggtctctaggtcacattaactattttgaaaatgtttgttttgatttctgttttcttttaaggtggactctcagtatccccctgttcagagactaatgaccccaaagccagtttccatagcaacaaatagaactgtctattttaaaccatctctgaccccatctggtgacttaaggaagactaatcaaaggatagataaaaagaacagtgtgagtttgtttgtttattctgttttcttaagacagtgtcatgtatctggtctggaaatcagtagataacagggttaacctcacattcatgtcagttacattgcttctatctttcaagtgctgggttatataggtgcgcatcaagcaccacatctgtctgagaatatttatttttaatcagtctattttttcttctttaaccaatctttgaatattgcctggagtgaataaaaaaaaagcaaagtagaggacctggtgtcatctggcaactgtatggtgtatgatgcctgtaaactagtaaagagaattggtatcccttcaaaaatagcctttagcttgatcaaaccctaaattggtgtgtgtaaatttcatatattcattgtctagataagtttttacttatctgtgagttttatttgtgtgactgatttctaaaaggtttcagatgtcatctcctttgatgatatttaactgtattaactcaacttaaaaagacaaaacttacacatttt

SEQ ID NO: 21931 - DNA, 1403 bp, Mus musculus
ttgttacaaagtgacccagttgactgctttgacaggagcagatgagaagcatatcttatgttctgtaagaatgaggctctgaatccctctctatagaaaaggttacaggcactgttctttataaccaaagaacttccaggagactgaacgtctttgctgtccactcttgttttgtgtgagtatataatctcactccaatctggtgccatacttcccttggctaccaagccacgtgctgcccttggtccctgtcccctttcctaagcacactgagaaatcgcacagctgtaaccttcagtcttccacatagcctggtacctactgactcgatattgaccactgacatggttgagtggctgggactcctactccaccctagcagttctcacatcctgtccacctatccaagcaggtggagtgcacagggaagtgttactgcacacaacgcagcgatgtaccaagagttggggtacagccttgctggcggcttctttatcagtctatttcaggtcgctagattctcttgtggtgtgggtttgctgtttttgcctgactctggaaaaatgctgaagagaaggactaagctatcaagttcgtaggtttgcacgtcaccttgtctgagggggattaaacatcagactgctccattgtcattttttttcccccgttttggttttcaaagtatcctgcaaggagagacactgtaggatcgtggtgtggaaaattttacagatatattttatgtccttactctgtagatgcctgtacagtggacctctatgtacagctacacgtgtgttgtgaggaagtgagagagcatgtgtgcagtctgctgtacttttctggtttttaagttcttagcattggtgagggagatatgggagactctcttgacaagctgctgtttgtgtgtatagtgagctgaccggtagtattttactaccatctgtttaaaacaaaagctgtaatttatattccctatcaactttattgtatttaattggtacagatctgtgtgtgttttagaatacaaactgtctaattcagagtccaaagtgttgatcgtctgttctttgttgttgttgttgttgtttttttttttcgagacagggtttctctgtacagtcctggctatcctggaactcactttgtagaccaggttggcctcgaactcagaaatccacctgcctctgcctcccgagtactgggactaaaggtgtgcgccaccacacccagcttgatcatctgttcttaataatgctaccatggggtgggatcagaactcagtggctaaaatgacgacctgggtttgaatcacaggacccatatttcttaaaggaaaaggaaaaggaaaagaaagagagaaagcaagccagccagtctagtatagtggtacatgcaga

SEQ ID NO: 21932 - DNA, 1099 bp, Mus musculus
cccaggaagcaatggcagcagcatgccagtagaacacagtagcaaacccgagaagaagattgtaagttctgcaatgtttctatcatatcacctggtggtgggtctgaagccctttcccaatccgccatccaaatgctttcaaagaaattaagacaggtgctgagtcctgactttacaaatgaagtgttgctcttggtaatgccgtttttgcatgagtgcaaccttgaactgtgattttttccccctctctctctctaagtgtgctattttatttaactcctttccacatcatcttaagtttcgtagctagtggggggaagcacctttgatggctctggtcattataaagaaaagtgtaacagcaagatcagtttaaataataccaaaatctctctaatgtgtctacgcacattgcccagattctgaagttaatctacctagaggaattgcatttacttggcgtaagtaatcccgcacttagttgtgggtgtgtttgaaagctttcttgtgtggctgctaccaagatacctgtgtagtttgtagctgctctgcccagtcatccttcctcagctcgatccccccagcaccagcagcttctgtttacctacctgacaaaacattccaacctggttcttcttggcctggcttttagattggtgaatctgtgttactcagcacaagtaaggtagacctctgcctgcaaaaccttggtctccagcatggttccaaagctgcacgttctaagtgctgggaggggcggctcacacctgagatcacacgttcaaggccggcctggtctgtagagtgagcagtctccaaataaatgaataaagtgaaacaaaacctatgaaatgccagtttttcaaacaccatggttcctggttacttttcgttataagatacacctcaatttaaaaccaatttttttttctaaacctgtaggtgtggaagtctgggaagaatcatgtgatgtgatttcatggttttcactctcctgtgccttcctaggcttgagcagggggtggggggaaacccagcctgggcaagaggaagctgtttgatgtttgctgctgcctatgacccgctgtcttaagcagtg

SEQ ID NO: 21933 - DNA, 1164 bp, Mus musculus
gtgtaggtcagtgtaggtcacttgcctatcgtccgcatgcccagccaccatcttcaggactacagaggaagaaaagaagagatacctgcacgcttgtgtgcgcaaacacatgcataccattttgtcttcttgggtgtcttgttttgttttgaaatagggtcccattatctagccttggatagtctcaaactcacagagatcaccagactttaccacctaagtactgggactagaggtatgcaccactatgcctagctaattgaaaaaaaaaatttttttaaggcactctaccaattaactgatttatcaaggaagaccttataatacagcttaaacgtatatagaagtaactgataataaaaatatatataaccaacagttgcggaatataaatattggtacttaaatggaaatcattagctctaaaatgcctacttcactacatcccagtgagaattctagacagtacaagaaatgaaagaacaagaatattattaagaaacctaagagcactgcactaaatctttcccaggcctgctgcttggtgccggtctggggacagacagtgctatactagagcagaggaaatccagacaggtcgtttccatctgcctggggcctgtctctacaactctgccacactccctgagaatggagacagttttgaagatgctgaagctaggggtgggaacttagaacagaagatatgtctggaccagcaactccaatgctaactccacttcccacaggagtgtgggattatagtgtagcttcagaggtcgaataacgcagatgatcagtccagcggggaatgtttttcttggtgttctggactctgctccagaagacgactatgtctctgcattatatatgtcttcattaaagatttaaaaagaaagaaagaaagaaagaaacataagtgcaggagagatggctccgtagttaagagcactggctgctcttccagaggaactgggatcaattcccagcaaccacatggtggctcacaactgtctataactccagtttcaggggatctggcaccttctcagagatatacatgcaccagtgtgcataaaataaaaataaataaatcattaaaaaaaataacagtgtaaggggcttgtgagatggctcagcagaaaaaagcacaggctggctaac

SEQ ID NO: 21934 - DNA, 1185 bp, Mus musculus
ttggcctcaagccagtgcattcactgtgtgaccagatgaactttgaaatggaaaaaggaccctcctgcctcaacccctcacatactgggatttttagatgtgagccgccatgcccagctttttttaagttcaggggttttgtttttttttgtttttttttttctgttttgttgaaaatatctattctatttgaataatttataatacttttccagttggcagaatatgaagtgttcatcttagatttgtcacacagtttaacccagcttgcctttccttttctaccagagtttcacccagagtttgaagagacgaatatcactgatcaatatatgttactcctgcggcgtgacctatgagatagtatccaatatcccaaaggtaacacctgctgctgtttcagatgccactgtgcgagtgtaaggggagcggtagctctcaacgctttgagagcacgtggagacacttccggaaacaccattcacagaaaaacagtcgcctcctttctgtgccttaggcgaccgaggagattgaggaccgggaaaccctggccctcctggcagcgcggagtgagaacgagggcactttggatggggagacatacatcgagaagtacacgcggggcgtgctgcaggtggagaatatcctgagcctggagcggctccggcaggtgcgtagctgactgtctagccctgaggatgccattgccagctttccccagctatgggcagagatgaagcagacacctctcagagttgctcagagaaggagtgcgtgggtagccatttcctcagtgaaaggactctgacaagtatgtgtgtgtgtgtggtacatgtgggtgtttgtgtgttatgtgttgtatgtatataatctgtgttgtacatgtgtggtgtttgtgtatgtggtgtggtgtatgttgtacatgtgtactgaatgtacgtgtatgtttgtgtatgtgtatgtgctatgagtgtctgtgtgcatgtgtgtctgtgtgtgtggtacctatgtgtgttttgtgtgtgatgtatatatgttgtacatgtgtctgtttgtgtgtaatgtgatgtatgtgtatagtgtatgttgtacatgtgtgttgtttgtaatatgtggggtgtggtgtacatgtgtgttgagtttatgtgtatgttatgtgtattgtatgtgtgagagctttgaggt

SEQ ID NO: 21935 - DNA, 1123 bp, Mus musculus
cagttcccatgtgtcgcgttgatgagccaggaagagtttgttcagtgctggaatgttggacagcaagtctaacaatagacccgtgggcacagatgcggggcggcgaaggacagtgctccttatcttaaaaataatttgaacaccttctgtaactgctcagatgtggctaagatggactccgttggaccctagcattgctgaatggcttgtgtgtccggccagcagtgttttggtctggctggctctgggtgtttaattacatttgctgcctgaaccatgtttgcaggactgctgacccgtgtgcaaggcattcaggcgcaccgtgacgtgtttatgcaatatttaggcagctttcaaaatagggatctgacgccgctgccgatgctgccaagtgtgaactttaaattttaaacactgtgtgctccacatccccatgttggggacagaggagttgtatgcgtgtataactatctgcatgtgtatgcgtgagcccagactgcagcaggcctcagtatcatagcaccgaggactggttaaagtccgtggctgtgcctcaccccgagaatgtcctgtccagtaggtccacagtgggcagatgtgtctgtcgttggcagaagttggcagttgatgctgatccagttccgtctggagaccgcaccggggatgaaagagatctaggaggagtcaacattcaccggtgtatcaccaatggttgttcatctccaggcaggaggattaggaaggcttctcattttgcctttgaacttttctgttgtttccagtgacagggtgtggctgttatcatcaggagtggtattggagttattttaaggctatttcttgacattttgtgggcccatacaatgtttattgtcttctactgtctggtcttaaatgttttggagtaaaatcaaagactccatggtgcagtggattgtccctagtctttctatagaatagccatataggaaggcctggtttgaagctggagtgatggcctcctggttaagagaatttactgtcattgttaatgacactggtttggttctctgcaccacatgttcgctcacagccacctgagaccccagttccaggggatctagtacacactcttctgacctct

SEQ ID NO: 21936 - DNA, 1108 bp, Mus musculus
tcagtaaataggccaggctggccttaacctcagagatcatctgcctctgtctcccaagtgctaggattaaagatgtgtgtcactatgcccacttcctttgattgaaaattgtgacacattcattttctactctcctggaggctgaagggaccattactctaggtcagcctggacggtggtctgcagtcggattcccctgatgtctctgaagtttactgtatcgactagaagaatattgagttccttggattctctgggtcctctggccactccagagcacagatgactataggattttactggcttaaaacattggccaataggatgtggtagtggctgtggtcccagctactcaggaggccgagacaggaggattgctggagcctagaagttggaggccagcctaggttaaaaaacaaacaaaacaacaacaacaacaacaagacaattgaccacggagttgcctttatattatgatctatgttgaattttattttacagttctacatttccttatttattgtttgtgtgtttgtgtccatgcacatagaggacaatatgagggacccagttctcgctttctatttgagggactgaaccatggtcatcagccctggtagttcctctccacactgagccgtatccgcagcccagcactggattttctacacagcaagctgtctttctctgtgtaatttgacatactgagcaaatccgtcatttgcaaagttaccttgagcagaattttttaaaaaaatttaaattattgtaagctaccctggacaggttgagcctcccttgttgaaaatgcttgggactagtatttcagcccttgactttgtcaagctgcagagtatttatgcacacgtgacaaggcatcatgggaggaaggccctgctctaaacactaaatccatttgtttcatctgcactttatacacgtagcctgcaggtaacgatgcaatattttcagtgaacatgtgagctgcccatgacttgtctcatgtggaatttcctatgtgggacatagccactctcaagaagctttatgatttggaatctgtggggttttagattttcagattagagttactgaatctacatccgaa

SEQ ID NO: 21937 - DNA, 2232 bp, Mus musculus
taaatatgcttttatgtttttaggtatatgaaaattatcctgcttatgatttgactgagaggaaagatttcattaaaacaactgtaaaagaggtaaatatttctttcctatatgatcacttggcatagaaactaaaggtttatcaaatattacattttcttgagtattcatatctgtgaaaaatcacatttgacatctcagagttaatatggatgaggaaatacagttaagtttgaacatagagtaagataggttcatagtacacatggtagctttgtatctttgaggtactcactagcttcaaaccaaggcacaaggtctgtttcatattgatacttcctgatttctggttgactttaatatgttgcaaataagattttatgatatatgcatatttggtgttgtttgtggtaaagcagttttctttttcattgcagctaatttcttgagaagcggacagatggcttgttctcagatttgaagatctgattttataccagcaaagagaatgtattcttttttaaggctattgttggtagaacttgctgctgactcttttgcgtgttaacatatttgagcttgttttaaattgtattttcttgtagttttcagtttaaatcttgcatggcagtaatcgttccttgctttttatagttgtacattttgggtttctttattgtaaggtcacagattcctgaactattgtgaattttagtgaacttaatgttagcttgcttaagacattacttttaatcaaagcaaaaactattataaccagcatttatatgtgcaaagactattgcagtatttagtatacaaaatattttgaatacgccttctgtcagtgtgaaaacatagcggcagtctgttcatcatagggcacagctgttcagatgaccgagtcggaaccttttctgcatgtgtatatacgtcaagttgttggcatgacagaagtgacagatgttatttttgtatttttaaaaaccaatttgttgtatataatttttttatttcttttgtgcaaatcaattttttaaactcttgtgtctttaaacttgtaactaaatgtcagtgttcatccaggcagcagtgacagcgcagagttcagtggtgatggcactgaggactgtccagttctgctttgccctcaaagtgtcatcaatgtggttgtgttaactctaagtgtcatagaaattttataatgaggataaacacatcacagcttcaaaaactgggaaggcgtgagcacacatggatttatatataagtgaactgacagtagtaaactgttgaccatataaatatattagatacaggaaacctggttaccttcataattatgattaaaagcatcaagtgtaaccagagttggtgtggacaacataggtatctctgaaagtatttatcaaaaaccatacattaatattgaagtattacagaatcaaggctgtttgatttttaaagtgatgaaacatggactgccccttaaattttgactgtcctaaaaacctatttctgatttataatatgctgcctgataaagtgacactagatgtaccagctgagtgtttaatcttcccatcacagatcagatttgagcattaacaggtattttcacatacttgacttcaatatgcttaaagtgaggaacaagcaattaagtggggactaaaaatgttggcctttaagcaatttgtcataaatcttcacaataaagaataaatcaatgttttaagtgtcttgtatttaatctttgtctgcttaagtgttatttctctcctactctatcctatgacaataactgaccattttgacacagaactagttttgtatgctgaccacttactattaaggaaatagggtagcaaatgcttatgaccaagaagcttaaaggactggaaaggaggttgacacagtgatgctatgaccatttattacgggtatttgcaaaagtctacttattaagcagttttacataaccaattattcatgatatgtagttattaaatcaaagtatacttgtgctcattaacaaaagtctcagagattggagaacataactcaaagtaccatagttcctttagaacaaatatgaaactaagtatgtcactcagtgggagaaaattactcacttatacttgaaatagcacacaaagctcaagtgcctagaaactaactgacttagaagggccatttaacattgtgcacttaccgtttcacacatgctaaaca

SEQ ID NO: 21938 - DNA, 1208 bp, Mus musculus
atttatgtcgctggtggtgtgagcacttaacgtggtgggtccctgtcacggtgcagcgtaccggcgacgggaagcctcgcaagtaggtctcatttggaagccttcatctcgaacgacccctcggaaacaaacgtggtggctccgaatcaaccccgtccgcggggtgatcgccgcgtgaagtcgagtcgagaaagacttcggcggatccctcaacttcgtcacctccagacgctccccggctccgcggcccaggacggccggtcatttttctcccgggatcgggaggctggaagctcgcaggccccctagcgtccaaccgttcagcgcggaggccccggctcgcgcccgcccgccaccccgtgcacccacccagccacccgccggacgccgcgacccgggtcctcccgcggaccgcagaccccccgagaccccgcccgggcagcccgcgagagacgccgccgccccgcctcccgcccgccctcccgcgcgcgccaactcccagcgccgcgcgctgattggccggcgccttcccgctctgcttcccgaaccgccattttgaaaatcttgttgattctgaggagcggggagagagagagcgcgagagagagcgagcgcgcggcgcgaggacctcggccccgcgcgacttctacacagcggcggccttctcgtgcgcacccgcggtgaggacggcggcggggaggcgccggggcagcggggaggggacgcggccagaagcactgaggcccgccgcgggggaggggactcgcaaggctcggctcgcctgggccacactggccgggcccgagccggcccggggcggcgcaggccgggcgggagcgcgcgcgggcggctgagagggcggtgcggtttcccgcctcgggcatccccggggaggcgggccgagtgacagacccagggtaggcgacttggaggggagctgacgctgggcgctcggcacgctccatgcccgcgcgagcgagagaaccgaagcgtgcggcttcctccccgcccgcaggcccccagcatgtcggcggcggcggcccccgctgcggagggagaggacgcccccgtgccgccctcatccgagaaggaacccgagatgccgggtcccagggaagagagtgaggaggaggaggaggatgacgaagacgatgatgaagaggacgaggaggaagaaaaaggtgggtgggcagggatacgcatccctc

SEQ ID NO: 21939 - DNA, 1213 bp, Mus musculus
atgtctgtatcagggagccttgttcatatgattcttaatctcagtctcttttcacttatttttggttgattgggttacaggtctatttgtcttgtttatatttttaaatgaccagttcttagatttattgatcttgtattgttgtcttcatttctacttaaccaagtgaaatttctattttgcctcttgcaggtgtttccagcagattccagccaacgcttaggcatgatggtaggactgaatgggaccagggcagagcacttttagctcagaggcctgtgtgttttgcttcagggaatctcctcagcctgcttgagttttgatttttggtttttgttgttgttttgttttgttttgtcgttgctattttgtttgttttttaaatcaaattattgattaagaattcatccacacatacaaagtggcttgatcctgtttacctccattctctcccctcaattcctccccatcctccatcccccatccccacttttccttcccaacttcatgtgctcttaaattcactgagcttacttggtgctggctgtgtgggaatggggtcacctgaatcatggtagctcctctgtaactgttcgtgcttttctatgtccgccacagctccccagtgatgacgcttacgtattattttcaatgcttaaggccataagctaggcttactccccaactagctcttcacgtgtattaaccagtttatgctcgtctatgtctaccacatggctactattctctcctcagtttcattcctctgactttctcagagtccgggtcgcaaatcatcccgccccggactctttcccagagttcttttctctctctctccctctttcctgaactcccaccttcaactttcttcctttgctattggccattcagttcttcattgacatgtgatgctttgacacagtgcctaagagattatccctacaattctcagtaatcacacaccttagaacatgcccttttccagcagccaccaataggcagtagctcttcaaaactaaatgattaaggttttctggttttttttttttaaacaaatcagcagcttgagccattctacccaattccccttaaagttttcccctttacagagaggacaaacctccaacacaatctgaaccccactgtcacattcatagttattttcatcaatgcatctttaaggcgttttgtttgtttgtttttatttatg

SEQ ID NO: 21940 - DNA, 1275 bp, Mus musculus
ttcccatgagcatgcttctgtcttgctcctggcatccgggggcttttctggctccaacaactgttgaaatgcggcccaacctgtgtgtttctctctggctgctgcctccccatgtgatacccacagttccaattcattgttacaagctcatccatcctttccctggagagagaagtcctttcagttcattgttctgtgctcagcttgagctcccaatataaaagagacataagagaatctgtttcttcttcttcttcttcttcttcttcttcttcttcttcttcttcttcttcttctttttgttctcctcctcctcctgctcctcctgctcctccttcttcttcctcttcctcttcccctcctcctccttctcctcctcttccattcctcccttcttccttctccctcctttcttttctctctgtgtatatacatgcatgcattctgtgagtgtgtatgggcacatgtgtgtgtgtgtgtgtgtgtgtgtgtgtgtgtgtgtgatgctgggaactggaatcagaacttctttcatgctaggaatctaggcaagtgctctgccactgagttatagctccagttccaggctctcgctctctctctctctctctctctctctctctctctctctctctctctctctctctctctctctctgctaaaccatcagccaaagcaagatctaaaaacaatctagacttagcatgatcgctcatttcactaacagcatatggactctgttcttggaagaattcccctgggtcatttctttcctcgaggctccatgatttcagtccatggaagtctgggagagtctagatcagcactgtacacctttggctatcaaaggtcatttgcatatatttatggtcaagggtatcggcttctactcatggtctttagtgggaattttctaacattgattatttatggtcttgttactactataatctttattattataacaaagagtcactatgtagtgtaaggctatctccaaacttgtaatcctcctgcctcagcccctccagagctggcatcagaggaatccaccaatgtcaattatacttgcatcatttgaccatgtcagtccagtctgtacttggtcagcactacagaagacagagaaatccagagatggctaaaagggacaaagagggaaaacaggattcattgagtggctctcatttcttcttgaaaagggtatgtctcttatttacttttccagaaaagaaggtggatagaattaaaacatagaatttcagagcagggttc

SEQ ID NO: 21941 - DNA, 1237 bp, Mus musculus
tttcttttttattcttattcttattcttctttttccttttgttgttctgttacataccctggctatcttggaactcaatgtgtagaccaggctggcctcaaactcagagatccacttgactgtgttactgagtgctggggttaaaggggtgagcagcccgagagctcttcccttttcctggagatgaacaacaaactgcttggagctctactggtcttctctttagaaactctgaagtccaaaagtctctcttcattttaccccagtctctttaaagctctctgtcccccagggctagaggagatggctaattaactctggttcacactaatgctaatctctgttgaaaatagtttccagccatctactattccctccacacacacacacttttgtgtgtgtgtatatatatttattttacagtatgaataaagggagaattttccaaattttttctcaacaattccatcagtttatctctgtcgtcccattttgctagatgcagcaagagcaaataagggcacactttgatcatctgtgtagaaatcttatctggctatttttaacttaacatttcttaaaatacctccatttgggggtagcaagacagcacggaaatccgaggacctgaggttcatccccagaatccacatagaagagacccaacactatcttctgacttccacatgagctgtggcatgtgtaccctcaatacactccagacctgatccataacaatgacaaacactccatcctacaaaacactagaattcagttcagccaagttccatgtcactgcatatcaaggatactgtagctgggcttttctgctttggggttctctttcctatcttttatccacaggtttcaccctaccccccccccccccaatcaggagagaaagaaggatggggtgggggtagatacagagatccttggatctaatttcttgtttctttgctaatagctgatctttgctactttgtgagttctttttccaactctttattgccaggtttcacctcctatcactagataggagagaaagaaggatggaggagagagagagagagagagagagagagagagagagagagagagagagagagagagagagagagagagactgactctaatttcttatttctttaagtacaactactataaccagtccccctggatgaccaccaaccccacctagcatttatgtatcctctgaaaatttttcagaattcca

SEQ ID NO: 21942 - DNA, 1206 bp, Mus musculus
tgctagaaatactgaaagtgctttatcaaagaaaagcaaaaataccatagaagagtttgttgagcaagcataagcatcaacagtttgttcatattcacttgaatatttgagagagagacatagtattctaattttgaattgtgtataataagcaagtgaaattgaaggtcagactagaggaaacatttttattttactcattagaaagttggacccaagtgaattttttttttaagaaaaaagtagcactctgagctactctatcaaaaccctaatgttacaaagtcacttctgacctccagcaagtgttacatagttgccagttgtcttaatttctaaatgctgttagattggttttctggtctttatctaaccttgttttcactatagattttagtttccagtgtttaccctaatcaagctctatatagcagaccaggagcagttattactaaaaatcagtttgtgaatataatattcaggagttgaaggttagtattaatttgtgaacaacattatcttttatattaatatcaggcaagcatagagaagggtagaagagtttagcattatagatactgattataaatactgagtgtggtggctcatgcatctgccaataatctcagcactggaaatctggagcaagagggctgttgttgaattttgggcctgggctgggttgatgtctcacacacaaaccaaaaaatactaagaagaatctcttgttgggttggaagaggtgaaagtgattctgtgtagatttctgtcccccttgtttcaacataacttaaaaaaataccttgtaactttttaaaataacttttttaggttttatgtaagtgtttcacacacatgtatgtctgtgtggcacagaggtcaagagggcattcagtcccctgaaactggtgtaatgaatggttgtgagcctctttggatgctgagaattgaacctggtttctctgcaagaaagtagtagtgcctgtaactgccgagccatctctccatcctgggaattgtgttacaagctcttgtcttgaattattccattggcctgaagaaacagtgttaaagcaagcatgttacactcatcaagattgaaaaatcttgtattttaggactgagtatttctcagggccagaacacttgcttagcatgtatgaagttctgggttgccttttagcaccatttatataggcacactcc

SEQ ID NO: 21943 - DNA, 1164 bp, Mus musculus
ttgttgtgttggcatatttagtatgttgtatctgtgcccttactcttgttgacatttgagaggaaaaaataaccctttcaaaacagttatttttttgacaaaactctttgtggagtttttaccaaatagatcattttagtagtaaaacttcactatgtatccttcccaagacatgtgtcccctccctcagaaatatgacctaagatagtcaccaagtgtcttaaacagttttatatttgttactactaagaaggctattaatacattttaaagtactttaaaaaaaaaacttgaagccttttgttcttcttttctttctttacagatgtggtcaggtctttgaaggaatattattttcagtgattcggcagttcagcttaccttagcagactggctggagtgggtcggattctgtacttatagaaagtagacttgctctttgtcaggcttccagacaacctctcccttggctgtcaggggagggagcagctctcaacccagagaccttatcctgcttcccccacctgctgctgagccaggtccctgctgtacagagaaacggaccacaagtggccaggatgggcagctgctaaggagcagaagtgacccttgtcctccccggactgtgcagaaaagacagcagtaccagggcacagctcctagccagccctgctccctgggggcagtgtgaccatccttcacaggcgctcagagctagagtaagccaggccagccactttctgtcaggagtgctggcattgctgcccggcttgtgcccagccccaaagctgccctttcataagcccattgcctcagcctgccttggcctgctctgttgctagtggctgttttgctgtaaggattataatttttaagttgaatttgaccctaactggcttcaaataaggacaggtggctggtcaaacttgttcctttagattaaacaggtaatcagcaattgaggccttatttaaatcgaattaatacataggagtagcagagcccatgccataatagttttcttgacaaaggtggtaactagaccaattcaaactaaagaattaactctttgattctcagaattttaggaaacaagcaagactgaattagaacaaatgaaatttccctaactcatgcatttctgaattacagtctagtgtatcc

SEQ ID NO: 21944 - DNA, 1180 bp, Mus musculus
catggtctcttagacccacatagatctctggtaccgaccccctggcagcaacagggagctgttagtcaaagtagaggccagctcagctcaggtctgctgttagaatggctcaggtatgaggattcgatcaagaagcaagagttccagtgagagatcctgggcagaatcactctgagcatcactgaacatgtgggacctcaggtactcagagaccagccaagatgcccccacagaagcaactgagaaagcctagccagcagcccatctagagcagattccaagccctggtcctggggggatgtggcgcggtgtgactaaagggcacaatgtgaggctaatagaaagcaaacaggcctccgtgctggggagagcctaggctgcgcagtattttctcaggagctctgtgttggcgggagcgcgcagagcgggctgggctgtcaatcatggcccggttgtttgtctaacctcgccaagtgtgttttttctttattagcagaacacagatagggaagcagatctgtcctcagatgcaaggctgcaggaatttgtcctagcagcagaacggggaggaaggtggggagggacccatcctctccagcaagattgttcagagctcccagccatgctggactagggcggagtctaccctggacgcttgaagcctcccccgccccccgccccgcccccgccccctcccgtcccccggggcagcaattatgaccattttgcacgtgtagtgctgaggctagtgggggtctggcccacccagaaccacactgttggagagtcagggcctggagggtcttaaccaaatttcaccgcccccccccccatcctggtgcctctgaaatgatctgagcctgtgtagtctccttgcttactgtagcagcctcctgaagcaggcctgtgccttcagattctcccttctgcagttgatttgggggtcagcaagtatttttagggaaaggatcagatgatgcgcgttggatcttgcaggtcactttgttgtactttctgaattttgtgtgtgcgtgcacgcatgttttttcagtgttggagatggaagccattggtaggcaagcattctcccactgagtcacatgctgcttaatttctttagtagtgtgaaaatatctataggtactacagaagggggaatggctaagtgtcaataaaattt

SEQ ID NO: 21945 - DNA, 1176 bp, Mus musculus
atagagagctggcagctggacctcaggccaactcaaaagatgtgagaactgttgcattgtggtgcaagattttatcccatctgccttctggtgtgtgtccttattccacccaaggcctcattccctccctggagtgtgactgggtgtacagaggggcctgccagaccttctccactgttaagtttccagcccatatcattctgttagccgctggctgcctgggccagcgagtatacagccaagggctttgggctgcagttacagcaccttggactgcaaactgtgggctgtgggctctagtctgtggtccaagtgtcctggctgtgagccaagggccatggctgaatgcttgttgtttctctctgtccccagccagccccctgcctcccccagcacacaggaagccattcagggaatgctctccatggccaatctgcaggcctctgactcttgcctgcagaccacatggggcacggggcaggccaagggtggctcactggcagcccatggtgcccggaagattggtggtggcaacaaaggcacaggcaagcgcctgctgaagaggactgccaagaacagtgtggatctggaggactacgaggagcaggatcacctggatgcctgcttcaaggactcagactatggtgagtgtggctgcagggcagggctgctgcctgtagggggcagcactgactaggaacatgccaaagaggcccaggagctacagtcaggactgtaaaatccatcttgggctggggtgtggtggttcacactttcaattccagcactctggaggcacaggcaaggtgattctctattctgcgctctgggccagcctggtccacgtagtgagttccagggctatacagtgagaccttatcttaaacaaaacaaaatacaacagtatcctctggaagcctgtcattttgtggcctgggtaactaccaccatgctccatttgagaatatctttcttataaggaaactttgtccccatccacagtttgtccttccctagctttggccacttgtcacgtacttcaggtctccgtggatctattttggacacaccatctaaatggatcgtataatgtgactttttgagggcccgtgcatgctgtggcacatgacaggatttccttcctttctcaggcttagtaatattctttcctctgta

SEQ ID NO: 21946 - DNA, 1190 bp, Mus musculus
tcacctgagccttgtgggctctgcttctgttctagtgttcctagtacctatggcttctcccccacctgccacccccagaaacctggtgggctctgaccttgccccagagtcctccgcatccagtaggctctaccctcaactccagtaccctcaacacccagtaggctctacccgccacaccagcatcctcagtcagattactgtccacttcagcagccccagcaccaggtgggctctgtcccacatccccggtgtttcggctctgccagtgagttcttttggcagggggagaagatcttctatctcatccggccagcctcagccaacatctccctatatgagcgctggcggtcagcctccaaccacagcgagatgttcttcgccgaccaggtggacaggtgctataaatgcactgtcaagcagggccagaccctcttcatcccctcaggtgagtgtgctgcacaggtacagggcccattcttcacgctgcattcccctgacagggtgtcttgctgtccctagccaggcctgccctggtcagcaccaggttagctcagggctgtgtggccagccgactttggcatgggagacctggctcagtcagtagctctagaggaaaagggtggtcgttcagaagtcttcctaaggaacacttcaactggtgcaatgtaaagtcctgagcagctgaggccgccagcctctcccgggaagatgaaccgtagagctgagcagtccactctaaaagacttcttccttctaacgtaatttgaccacattttgagattgaagtgtgagccccactgtaccatccagtagctgatccacatgctggtttcctagtgattatgtatgtgctttaaaatcaggatccaaatgaggctgcagaacatgactgaactcagcctttgactggctctagggtctctccttcctttaaggcatctttatagttactctgggagggaggcactatggcttttctggagttcagccccacctccatccccctgggataacctagaaacaaatccctgcctctggggagaatgacagtcccagccctatctcttctgacctgtgtggacaggtctgagacttgggctccctctcctgatggcagtgctgccctggggtgtgggcatgtccccttggcacctaggcctcagtttctatctgtatggtactcgagt

SEQ ID NO: 21947 - DNA, 1210 bp, Mus musculus
gtgatggagcaaactattcatatcataagtcaggaagcaaaaggaaggccagggttctacaatcccctccagggacctcctagcatcctctgactagacaccacatactaaaggttctactcttccaaatagcagcacaggctaggaccaagcctttatattcataacaaacaagtggccttgaaatgcagggctcttggcttttaattttaatatttttctggaagtacttatgccaagatgtccatcattatctgaagctcaagttggctaagcatctgtgtatttatttgctgatgtggcctttctggctgaggtgagattcaccactttacaatgtcacagggtccagaaaagcagcacccatgaatccacagcaattataggtaggagagagaggctcagcccctatttgtcctgggggtgtggtacggccatgcacaaaggcagccgaggacaggtcagtgtccaccccaccatgtcctccagggaggccatagcgctttcccggcatgttcatgtcctgcttcctccccagggccggagaggagtgtggatgtgacagacgttaccaaacagaaagactgcaaaatgaagctgaaagaattcgtggactattactatagcacgaaccgcaagcgtgttctcaacgtgaccaacctcgagttctcagacaccaggtgacaggctactctgggttggttggcaggttcgactcaaagccaatgtcatcagcctggagtttgcaggatggtgttgggcctgatgtgagggctgcaagcgctgtctcaggtcctgctctgggttccggggctgtgagcctggtttggggttctaccctggtgtggggactgtgaagcgttgcttgaggttttgctctgggtggacgatgcaaagcctggcttgcagccctactctgcatggcctgctgctgtcctgtgagctgcccagcagtcaccatgcaggcctggttctcctttctcttaaagcacactgaacagctcagatcaaacaggagccaaaggaaaacacccactcgcagagaaagccactggggcagcatggacgagtcacttccagatgaatgtgctcctcgtgcatactaatgacatgctgggatggcacactgacatttacacacacctgtggcacacaaacacaaacacataacaaattgacacacactcataacacacagaccatgcgcaca

SEQ ID NO: 21948 - DNA, 1925 bp, Mus musculus
cagatccctctttgatatcagagatataaacaacacatttttttttttttttttagttttaaccagttgtagtcaaaatgctacaataaaacaaaaaagagaaagaaaatgaagagcatttgactcccgcacttaaaaatgaagtacacaaagtttaaactggttacgacaaaagcctagagttgtgtttcttgaactataaagaaaacaaattttggcagtgtttaagtatatatagcttaaaatataatttttagcatttggcaccatatgtatgccactatatttgattttgcattactgtttcacaatgaagctgtgttttgaggctttgatttatgattatgagagaagtaaggcacaaccacagtttctttcttacttaaatctcatcactgttgatgtggttcttttgtgttaaaaaaagtgcaactatcaaaactaaaaaaattatagattaaactgctgttgtgctgattttgaatacacagtacatcatacatcctttacaagcaagttcaatggagattacgttgaaatcatagaagatgcaaatgacctttcaaagtcaacacaatgtgttctgaaacctcgtgactaataccatgcatctgtgatcagtgagctacgtggttttgaatcggacgtagaccattagtgctactacttgagctaatcttctgcatggttcataatttttaaagtgtgtagttaatattatgcatgttattgtcctttcttccattcttaccagtatgtgcccatttgcaaaacaaaatgctaataatcagtaatagtcctataaaagatgttaactctgtttagtcattgactgatcttgctctaaccttaaaattttgtgattattgacctctgttgcatttattctaaaccccccaaaattatctagccgtttggaatatcaacattaccctggtgtactcactgctgtgtgcattattgttctttgttgctgttttatgccttcatattcatattagcaaaatatgaaattctgtaaagaaagaaaccccctatgatcttaaaaaacaaaacacccccttccccttctgtagcaggaaacaaattgcttgttcttgagaagtgtcccatcaggaacttagtagaagcaggtagacttcgatcattttgatgttttgttactgtttccaaacaatgtactttgaatcagaatcacttcttatgtttcatctacttccgatgctcttcatcacattagtgatcagaaatgaggtgtaactccccagcccctgcccgcaagagctaagtaggacctcactgtaagttgaagggagttccgccctaactcatggattgtgaagaatgaactgctgttgggtctgattgactgttgatggattgtggtgtggtttatccagaggctattgaatgcaacttacaatgcttaataaaaatctttattcttttagtataaagtatggtgtggcttttaaattcacttgtaaagtatgaattttacagaggtttaaatttaggtagctcatgaagagctccataagacaacattaagtttagaattaccaagccctgtcaaagtaattttagaggaaccttaatggttaatatgaaaattatgcagagcacagcttttgcgttcctctgaccaatcaggctgcgaagtacaaagtagctttataaaggcctaacggggaaatctttgtttttaaatgtagagttacaagtgtcgctgccctttggctggttctctgcagcctagttcaagcgtgcccagcaaagcggccaaggagctactggagcgcctgctccgagcagaggacgcgtgctttacgggcgggggcgattgtgcagcagatgcgcgcgcatctcggggcggagccgaaccatacccaaagccactggcttcttacgctgcagcgccaggg

SEQ ID NO: 21949 - DNA, 1134 bp, Mus musculus
ttgtttgttttttgttttgtcttttgtgcaggagtccaacctattccttctcagggagggaagctagaaatagctggcactgtggtcggccactgggctgggagcagacggggccgtgggggccgagggcccttccctctgcaggtggtgtctgtgggaggaccagcgcgagggtaagctctgggctgggctgctggactctgtgtaagtgcggaaggcagccttcgactgctcctcctgtgttacagaaaactctcttacatatcattagataattgtttgattcatcattatttaattattaaataattaaccatacattcattattcagttattgaactgttatctaaaaatgttccaagcattagttttgaagtcaaatgccttgggtatgaaccagaaaaatgattccttgcatttgatctgaccatacttaattcttaatgtctcacctagcataagatcgattcgagagtaatttaaacatcatctttgagagacttaagtctgtttgctcttgttttcctgtattgacccaggcgtccaaggggtgttatttccactccggtgattagaacgtttggaagaggtggaaggtactacggcagaggctacaaaagccagggagcaattcaggtaatgccctcacagtcctttcactcctgccatgtctcccctctaggagtgtccctgcctctgttctgactgtagagcagtgagtttatttggtacttgtcaggcttctgacttgatacttgaatcacttccctgtgctcaggaaccccatcaggtgacttcttgtttaggccaaatggtgtctaggctgctctctcttccaagatagccactctttaatggaaaatagattttattttattttatctaatctaatttaattaattaattaattaattagagtcaaggtctcactgtgtagccctggctgtcctggaacttgctaggtagaccaggctgatctcaaactcacagagatccacttacctctgccttctggttgcttttttattttaagtgtataaatatttgcctgcatgtgtgtctgggcaccatgtgcctcagagagcagaaggcgttggatttcctggttctagagtcatagaagctccatgcag

SEQ ID NO: 21950 - DNA, 1507 bp, Mus musculus
ggtttttattctaaagattttattcttgaaaagccattgaggtgacaagaaagaaaccatcgtagaattaaacctttgtcctagataatccacaaattaggcctttcacatatagatgatcaagagttgattgcactgtgtcaggtgtcttaccctgcccactgtctgaggtgacagttctggccaggcgggccccagtgctcactcagcatagaagaaagacacaagtttccgagtgccagcaaagcacagcttgaggacagggtttctctctgtgcattctttcacttctcctgaaacattttgacagttttaaagtttctttgaaacaacatataaagttacagatatatagtacaaatttatttcaaaatgagattatgccaactaatttcttaatacagttacttgaaaactgttccgttaccgcatggtcagtgttcagatctgaagagctaggccttactgaagagattgtggagctctgggcccagaaggagactgtatgtagctcatcaggtccctcgtcatgtctatccttaagcatcatattatcctcactgtaataattcacagatgtcaaactagttagtatgttcataaaacatgatttttaaatactctaagagcataaaatctggctttctttgagtaagaccggggctgggtgaagccaaggtgtgctcctcttgtgatgaggatcgagttctattaactttggggagttgtagcaggaaagtatgatactgtagtactcttactccatataaattactcttttccattaaaagattgacaacttagacccgagaggaattcagctgtcggctctcttcatgagtggagtagacatggcactgtttgctaatgacgcatgtggacagcccatcccctgggaacactgttgtccttggatgtatttcgatgggaagctcttccagtccaaacttcttaaagccagcagggagaagaccccactcatcgacctctgtgatggtcaggtatgtcggggacagggcagccatctctgactagtgtggaatggaatgcgtgagctaacctgctgtctaactcatggttaccattgctgtgatatagcaccatggccaaagcaacttggagagcaaagggtttgacttctgcttccatgtcgtcatttgtcattgacatcagagcaggaacctaggggcaggagctgatgtagaagccctggaggaattttggaattttcttttaaaaaccacagaaatattataagaagatgtttccgttttactcccaggtgtgggatgtggggctgcttcagactgtccacagcagttgactgtgatttgccccatgcttgttctagccaggacttggttttgtcacctgcagatagtttctgcaattgtgtgacctttggaattctggggacttttcagagagtgtatacatgctggggctctaagagattggtgggttgctgactggttgttggtcgaggtttgttaagtaggtgtgcaca

SEQ ID NO: 21951 - DNA, 1107 bp, Mus musculus
tacactctggagtgatacagctgttggctgcttgacacatctatcccagtggaagttgaatccttttagccacccacacccagctgttccagatgtgaagatgcccttattagtcattgagtatcctcttcatgggcacttcctatatcattcccatgttcagctgctgccacggattccttaattcaaatgagacagatttcaacctcacagagaaccacttgcctctctctgtctctgcctcctgaatgctgagaataaggcatgtggctcccaccagtctgggcaagcactgtccaacattctagcacgctgggtgttgatcaggggcacactgttcccctggcatcctctcatggaagcagtggttgaaagacaatacagaggcagcttcctggcttgcctgtcctggattattgagaagctgctgctgtttttccaagtactggccgactctctagtcatttcactccttctgttcctcacaggtatatggtgcagtggcctggagctcgcattctgcgaaggcaggagctggatgccttcctggctcaggcattgtcccccaaactctatgagccggaccagctgcaggaactcaaggtactgtctgatcagccttgtgtccttgtcctgggaagtcttgctttggatttggtgtaactttgctaaccctcaccagacagttgtttgggcaccaaactaatactactaatgtcctatgtgtcaaagccttcaaggcaaaggggatattcctgtccaggtctggctgtgccagcagggtttgtaagcaagtaaacaaatagccaattctatgtttatcagattttacctgtttatcagttgatgtttattcttgttttttacatcggaaaataaacttctcttttttattttaccaggggattcccgccctgggagggctcagtcttaggaatgttctaacatctagccaggattctttttcttatttcattgcattgttcctagctgcactttagttttctctaaagcatattctttgcccgtctggtgttgcacagtccctttttaaagaaccacttgaagagcggtgttagcatcatcccgacaccccttttcgtgagt

SEQ ID NO: 21952 - DNA, 2027 bp, Mus musculus
tccccacccagacatccctatgcctcctgtaaatgctgtttgcaagtcatgttactctggacttttttattctgcacagtttcccagtactagcactgacattgttctcccagatttcaaattaaccagcacaagaagtagttactcaggaccagcaccaccagcagtctgtatgtactgtgactcttttgagtagattcttacttcgtaagtccttgactttatgagtttctaaatgctaagagccacatacctgagaagagggaggactgggcagcactcatctgcctgtctttgctagtgtgtttgccagtgtcctacggactactgagcatcaactctctcgggtggtgcctgcctcagatataaagttttaagaagaagctgggcagtggtggagcacgcctttaatcctggcactccggaagcaaaggcaggcggatttctgagttcgaggccagcctggtctacagagtgagttccaggacagccaggtccacacagagaaaccctgtctcgaaaaaacaaaaaaaaaaacaaaaaaaaaaaaaaaagttttaagaagagctggtaccccttgaggattgtggagtgcttagagtgaggaggtagagtgtactgctcctcattgccctccgcctgctgatcggggggtggggggtggggggtgggacatccacgaggaggaaagagcagatttcatggtgtccagtttttctttctatcctggggtaaagttgttaacataattttccctggacggtctcaggcataacagtagcccctccctagtgcgcatacactcaggtcacagggctgggaaggtgctttttttgctgtatcttcctccccttgtaaaggtggtgtggcatgctgccactacccctgcaatggtgcttctatggcacaaagctgtagaggcagctactgtgggcccctgggaactcccatataaaacaacctctgcttattgctcttgggttagcaatagaggcccagattatctgtgatacaagcacatgactaatatctgggtttttattaacagctcaagtatgacacttgttttatggtcccaaattgcatttgagggtatgtttccggtaaagtaagtattataaattgagcctataatcccacaaatgcttgctgttctacaattggtttttactaaggtaaaacatggttttagagtatggtcagaaagctaatttctgctgctttgtagaaatgggctccttctagaagcagtagcttttctgttgtagaaaaggtgacattaatgttcattgaggtgacaggtcatgcatgacctcttgggcactcttacttgaacatgacttcctgaaatggtcctaccatgatcacactcttactccaggccagacagcaccaccctggcagcctggggccctgtcaccctcataggtctgtaatttaaaatgcttttagagaggtaggtatagatctgggaggagtagtgtttgaatatgatgaaaacacattgtatggaatgctggaaagaataaaatacaaggtaaaaatttatatgaaaaattaatttattataataagttattataagtatcataactataacataaatattataagctatgatataatatatagttttccctgcatggtgagagtactagatgctttttaggttaataattagtattttgttgcatagcaaggttttatcccttttttgtagcctttgaaaccaggccagggctgcacttgttcctgcaactgtatttttttcccatccttgcctgacatatgaggtacccactaggtatgaggagtgattggtcagcgattacacagctattgagtggtaatatactcaaaagttctccaagtattagagtgtttgaaaacagccacgcatctgagaacaaaacaaaataagtcccgcacaccagtgtctttggagcaagctttgtgtgttcatgacaactttgaactgcactcattaggactattgcaggtggacacccaatgtttagtgctatgat

SEQ ID NO: 21953 - DNA, 1104 bp, Mus musculus
ctcatctatgtggttttcttttgttcttggtttttggattaaaaataaagtaatgtaggattaattttgagtctctggacatacatttggaccacagatcccagtggactctcctaaacatctcactgtaggcaagttgttaagccattggaatagactagctatgtcattattggagatgatacagtatattgctgtgagtttcttgtaaattcaacatgaaaaatgtgcaatattattctgctttcttccatgcaaagggtgaaatcaaaattgctgtttctattgaagatgaagccaacaaagacctgcctccggccgccctgctctataggccagttcgtcagtatgtttacggagtcctgtttagtttggcagaaagcagaaagaaaactgagagacttgcttttagaaagaacagacttccaccagaatgtatgtactgtaacaatccattgtttgtttccctcggtacctcgtaatctcttgtgcattttctaaagccttagaagtatggtggctgagttgcctgagactctccttgtacaggaggtgggctgtcctctgggctgtaggcaaggatcgagccctcagaacaggagaagccatacttggtacagttttagtaatgatgtttatttggtaaaagaataaaatagcaggtttccaatgttaaacttgacgacattactctgaaaacatcttcaacagccgccactctctgttattagcctgtttaagtagccgagacgcacatgtctgcccatatgctcaggatccacagatctgtctctccaggagctcagaggtctggagagctagctcctctaaggttctaccgccatagtggattcacttcaggactgctatgcttttcctggctatggctacttcagttcatcaacatgggggaggggagggcactagagaggactgtttggaatactggtcaactttgaggtccaaagctttgtctctcatgaggcccatgtcatatttttgggaaagttgtgctttcttcttcatacttttatctgctaatttaagaattaaaaaatcaatatatgctaggaagtacagaagtgttatctaaaacagagtcta

SEQ ID NO: 21954 - DNA, 1215 bp, Mus musculus
ttctcacaatttgtggcttaaagtggtaatgcaagccctaatgccctactagttatatgaacattggcgagtgctcagggacattccaaagctgcatgagtgaagctagggtccttattatctcagctacctttctgctactgtggagagacaccatggctaagtgtcttttaagttccagaggatgagaccatgaccattgtggcagggagtaaggcagcaggcaggctgggcactgaagcaattgtacacatctgatccagaagtgggaggcagagtgctactatggaatggcattgacttgagaagcttgcttcaataacacaccttctccagtaaggccatacctaatccttccaccaactggggattaagtattcacatgtttgagcctggggatggggtgaggggagggggagggagaggggctatgattctcattcaaacaccacatttaagtaaatgaactatacactcttggtcagagggttaaaattgtcaaagctactcttgagatgactcagcaggcaaaggcacttgctgccactcctgacactggagtaagggaaagataacttatacatattgtcctctgacctccaaagacatgttgtgtcatgtgtacgtctggtgtgcacacagtgcacccacacaaaattaatgaataaagatgtaataataataaaaactttgttgctggtgagcgtaactttaatttttttcaaagccaacctttttttttttgtttgtttttttttttgttttttcgagacagggtttctctgtgtagccctggctgtcctggaactcactctgtagaccaggctggcctaaaactcagaaatccgcctgcctctgcctcccaagtactgggattaaaggcgtgcgccactacacacctggcttcaaagacaacttttaacgatggttcttaaatgcttaacctcccttctagccacctagactttctgttgtttcacatcttcaacagcatttgacagttttaatttccacccaccagaggtactggaaaagaaaggctattatgatacgggggaagtggacctgtttagaaatggtcttttggagcaaatcccatctgcattgtcaggaaatcagcagttcagttcataggtcagcagcggcagctcagtccactcacaaacatgccacagatatatcagcagtccatttcagtcgggtcaggatagcagc

SEQ ID NO: 21955 - DNA, 1211 bp, Mus musculus
ctgataggtaatgcagacttttatttaaaggaaaagtatagtgttgctttccaacacttttgaagagattgtgtcagctatagcaaaggcagctcctttgtcttgctctctctacttgtattctctttctttattttaccccattttcctttcttttaaaatttggttgcagggatcagtcagattagtttcctttcaagcagggtagcattggaattgtcgcaagtggagaatttaatttgtactctagatgggatggtaagttactgactgacgatttgaattcacttcatttctgagactccttttggagcagtgtgtcacatgattggtcctggcactttttgatcatttggatgattaatgctcatatcagtagctctttaaagatgtcaggtacatttgcctgttgaacctgctgctgcagttagagcctgcatctgatggcatctccttccttttctgtgtgtaggttgcacagagcattgaggatcatcatcaagaagtgattggcttctgcagagagaatggtttccatggcttggtggcatatgactccgattatgcactgtgcaacatcccctactacttcagtgcccatgccctgaaactgagccgcaacgggaagagtctcaccacaagccagtatctgatgcacgaggttgccaagcaactggacctgaacccaaatcgttttcctatttttgctgctctgttaggtaggtggagtggtacataagcatcctgacattatctatcttttgaaggttttccgcctggatgctttgctgttttatcagggggagaatgggctcttcacttgcactctcttggttttgttttctgctggcaatgcattgttcttctttctactttctagcatgtttatatgttgcttacatgttcttctatcaaggctggaaaacttactctgtgataggctcaaagttttagagaaagaacatttctgaattacaaatcacggtggctcacagccatccataacgccagttccaggggatctagtgccctggatgtatgggcgccagggacacgagtatgtggtacacatatatacctacacacatccaaaacacttattatgcacatacaataaaataaggctacaattagggaaaaaaaaaatgttgccaggcagtggtggtggacacctttaatcctagcacttggggaggcagaagcaggcagat

SEQ ID NO: 21956 - DNA, 1154 bp, Mus musculus
ctcgctgactgtcttagttgaggttactattgctgtggcaaaaacactgtcaccagaagcagcttcaggaggagagggtttatttgccttctacttccgcgtcacctttcatcacaggagaaagtcacactgggcaggagcctggagccaggagctgatgcagagggcatggagggcactgctttctggcttgcttggcaccttgacttgctcagcctgctttcttacagaacacagagccatcagcccaggcatggccccacccacagtggatcactaatgaagaaaatgttctacaggcttgcctccagccctccagcctcatcttagggaggcgctttctcaacggaggcgctttcttctctctaaggactttcacttgtgtcaagttgacataaaactatccaagaccctgacccccctaataatttttttttaaattacgtttagcttctaaaagtttattgatgagctgggctggctgccctccggcatcccttccagcagagggagtgtgtgtgcagaaaagaagtggcccctgaccctgcaagggtggctaagcaaatacaggtctaagtgaatgttgctgttcctaagagatagtgcctgaatttccaatctctcagcccacccggggctgtggatggtgtgttgccacaatgaagtctatggactcctccttctcttacttttgattccccaaagaagtgttagagagaaacacccacggggcaggagagggggaagtatagctagaattctgcatcacttgagagatggcaggtacctgagtactcttagggtgcacctgcggctagaaacagctacccgctgctctgaactaggttgaaggccagagaagcaggacactgatatgccagggaaaccaccggagcccagctcagatactaagtgtgtgttgccttgtgactcttcatctgggcttatcctgaagttcttaggcgtctaggccgatgtattcccacacagaggtgtgtgaggaggctcgtgtatgatcccttctgccaaatccatattatcccaggtgtgcttttggacaaggattgcttccggggaacatgtggataggaaagagtcatttctttatcctccctaacctgtgtgctcactgatgtggctgggcacagcctctg

SEQ ID NO: 21957 - DNA, 1185 bp, Mus musculus
ggtagggacataagattattattttctttctctttagctctcctcatccatattgacatttgaccctattcttgtttgttgtctcatagctgcaaaagggctgccacagctccaggcagcataaccacacttgaaagcaggaagcaaatgcatagttgggtagataggaacccaacagcctttaaagacccatttctccaagggctaatctgtattttaattcttgttttgtttcgtttgtttgtttgtttgttttaagacatagtctcactatgtagttctgagtgtcttggaactcactctgtagaccagggtggcctggaactcagagattcacctacctctgcctcccaagtgctgggattaaaggcatatgccacccagcttgtatttcagctcttaaaggaaaatgtttataggtatcttctttcatctttctggccgcaaggtgatctgtggcctccattgatgcaagggtgtctgggaaaggcttgatttgcataacgttttgatctgttacctgaggctgagtaccctggatgtccaggatggggtagcagacagtgaaataatttctttctctaggggagtgttggtgctttgtgcaaaggagccctcatctgcctgggtcagtcccacctgccagctagcctgtccattcttatccacagctggccacagtgggcatctgcaggccctgaggccgtttgctctctcctcccaagtgtcctgttccttgctctttacccaccatctggaccccatgacagtgtttttctcctcccagctgtccggttttcatttccctcaaacttttaattttcgaaaacccctagctactggcagagtggagttaggagctgggcgctcagccgtctctccatcaccgcatttgtaaacgttttatctgacccactttgggttcctctctgaatacttcggcaagcatctcctgacaggaatagggacaggtccccacagagcctctgcagggtcatgcccagggcccaggtgggtggatcctgctggatgtgtctggtgtgtggccttgtgattcccacaattgttctctctgggttccctgtttgcacctgggatctagtcagtgaagaaactggtgtggtgcttgcttgtcacatctattttaatatagaatggtggttctctgcctgttggtcatgaccc

SEQ ID NO: 21958 - DNA, 1219 bp, Mus musculus
atctcactgctaaccacatccaggatggcagtcccagagggaatggaccatctctggttgcagcctgtgttctgcagtgagcccccacacctcagacacgataaccatagcccaggcagacagcgcagctgctccatctcaaagatccgcatgctgctgtgtcctgaaaggtgacaaattagcagggcctgaggtcctaggttttctttcttgacgagagtgttccaagtgcctggtcagaccttggtccttggttcagagcctattatttggtcctttgagatctgcagcttgtgcttgggtcttttcctagaagttgtcagacccaaagaagcagtgttttgagaactactagtgctctaccaaactgcacggcacagtagagcccagctgtgtgctaggggactttttgtgggcccggagctgtgctcaaaactggcaggtaagagttgtgtggttctcggtgcagtttgtggatactacagaaggaagaaaggcctccgagggctctccttttccagatgctctgtcagtgcggagctgtggcatcagatcaggtgtgtgctttagtgagttgtaaaacaggactctgctcagtatttctctccctgtccccatggggcatctagtcttgagactccatctcccataatagctgcttggctgtctctccctgtggaaaggcatctttcatgatgtggaacaattactatccaatatggccctgtagtctctcaaacagctttctctttctctcccctggatcctggggtaccccagtctgctcagattcttggcagcacatggtcgtacactgggggcagaacaggccacacgtgtcccttgcatgtccatcctgggaatggctgcccgcatgcccacccaaccttctgcctttctttctctttgggccagaacgcagcttctcttacactgtatggggctttgtggacacttggagccccatcccctaacacacatgcaggcctcctctgccaactaatgtgctcgcgcactcccagaacaagagctttagctgtcagtgagcagggagtggctctcgactgatttctaatgctgtcttgttttctcctgttttcagctgtagagtagctgctgggaggaggcggccacccggccctgtcacacagcagcccctccccctcccctcctgtggcccatgcagaggaaggaagggcagcctaaagtccacttagaa

SEQ ID NO: 21959 - DNA, 1192 bp, Mus musculus
taagcaagctgtacagacatcacgtttgtgaagagctgagggcgtcaggagagccggcgaagtcggcatgcgagtggggaagagggttagccatagtattctttgcaaatgtgaaagtcagacattatatcttctcttgcttggtgtaactaatcactgttaatttcaggaaacagaagtcagtaaaactccttagtaaactccttgctaagtgaggttcagggtgtggtcaaattggtactagtggagggagggaaattgtcctccagcctaaaaagggacaaattataataatataaattgttaagaattgaagaattctgtttcctggaatgagcatttcttattcctagttgttgggactctttgccttctgttacagtgttgattcatacaaaatattgttacatttaagataacatcatctgtatggggtatttatttgcaatgatgtctaagtactgtattttttctgtgtgttaccttagtgtcagaatgttggtctttattttaaaagtcatatgcatgttctcctgccaaggcaccttacacagacccaaaacaaaacaatgagcagatgccttcagcttctgagaaaatgaggccaagtgaggagaaggcataggaaggtgagactagctgagacttctgtcatggctgatggcggaccgtctccacagccagcacacataggaaaactgggcctgggtgaagagtcgcattggtaggaccaataaagaataataaaacaattgaagcacatgcgtgccctctgtgattgcttcactcctgcaccaggtgaccgctctcagcgtgcacggtaagtctgggaccccaacagtcaaccctaacggtcactgaaggtgtgggccggaaacaacctgggatttatccttgggaggcaggattctcctccagggttgcccacattattcaacgtgaagactggcagcagggtggtcagaacccattgcagtttgtaggactcgtggcacaaataacttgtgtttcctgtgctggccaaatttcttgcttcagacctaggaatgaataactcttggggacaagggtgattcattgtcaatataaagctgtatttaactgtagaaataatgtacagagatacacggtgctttggaataactgcgagtgtgagaacttggggcattgtctaactccttagacagatgcc

SEQ ID NO: 21960 - DNA, 1193 bp, Mus musculus
tggctcattgcacattctctcttgattccttacctggtgtttgccaggttagaatttatttccattttccctttggtgatgtctagttttgtgtttgtctttctgcatttacattgtcagaggtgaccttcccccctccctgactctttcctgtttggttaaaattcagtcagatttcagcactcaggtcatttctttcttctgagagcagtaatgcaggaggcttttgtgtgtctagagagcaagactttgctgtgctggtccatccatcatcgcagcctgggtgggcaattcaagggcctctgatgtttgcttgtatttctctgactctacctgtggcttctgagagcctgactccttttcatgttggggttattacacgttagggtcgcttagctggcgtggcctgtctccatagctccacaggatcacatcagtgtacgatacactcttcactttgtgacctcctgccatggttcactcttgtgtcttcttcaccctgggaggatggctgggaggttgagctagagctacaaagggttaggaaggaggttggacaaggtgcctcttcctactgatgccgatctgccttgttctctctgagggtattagttgtcactgaggctaagctgtgctgatgtgaatgccttagccttggcagccttattctcaggtcctggggatatgtatttggctatgtcacagacatcagtggcttggcatctcttccctctggtaactagcaccgtagatgttttccttataggttgagtgtctttaaggaagttgggttcaggagacacatcttggatataccatagctcccacctgaacatcatcctcacagttgggacaggctgggtagagtgctgtttctggtacctggggccacatcctgatgggtgatgttcttttgtatttcctcccttgacagtgatctgagcttcctggtatctctcatgggctcttttctggaatatctcctcactaacttgtcaaaggacatggtccctgggacatctgattcagagagtgattctttctactctgagagtatcctgtaggatagcttatcttcactgaagggctttaaaggtaccctccaccccaattatggtttggatcttaactgacctccaaaggccatgttgaagtcttggtctccaggtgatggtgctgttgaagcctttaga

SEQ ID NO: 21961 - DNA, 1155 bp, Mus musculus
tgcatatctctgcatgcaatgcacgctcatgcacgcacacactcaccacaaacacacgactttggaactttgaacagttactgggtttgattatattaattaattaactaattaattaattttgttttttccaaacagagtttctctatgtaaaaaccctgactttcctgtaacttgctttgtagagcaggtgactcgaactcacaaagatctgcctgcctttgcctcctggctacaattaaaggtatataccaccacggcgagcccaatattaagaaattatttttttaagatttatttattttatgtatgtgagtacagtgtctatctcttcagacacaccagaagaaggcatcaggaaagagaggcccattggacttgcaaactttatatgccccagtacaggggaacgccagggccaaaaagtgggagtgggtgggtaggggagtggcggggagggtatgggggacttttgggatagcattggaaatgtaaatgaggaaaatacctaattaaaaaaaaaaaagaaggcatcagatcccattacacatggttgtgagcaaccatgtagttgctgggagttgaactcataacctctgaaagaatgcgtttaaccgctgaaccatctttccaacttcaggaattaattttttgatgtgatagacatgttttttgagaatggagaattggcaaggctctgtagcacatgcctttaatcctggtgctcaggatacacacatatgtttttattgaggatattgtgaaaggtattgtttcccaagcagttctcaatctatttttcatttatataaagaaaggctactgagttttctgtattctgttactttgctgaaagttttgttagctgtagaaatttcttcatagaatttttagtaatatataagatcatatcatctgcatataaatagactttgacttcttcctctcatctttcccttgatcttcagttctctcaatgctgtagctaagatttcaagtactttactgaataggtattgagagagcgcacatccttgtctcattttggattttagtggaaattctttgagttctctcccaattaagttgctgtgggttgctataacttgcttcttcttcttcttttttttttccttttttctttttccttttttg

SEQ ID NO: 21962 - DNA, 1173 bp, Mus musculus
tggcaatagaactacaggtttgtgcagcaagtacttttgcctgcagagccatcttattgattctccaagatacttttaaaatgatcctgatagttgagtggattggcagccagaatattggaactaagttgtttagttatatccctgtgtccatattctttgatgtaaaaattgagtgccttcagaacttggttttgctattggctggagacggccaaggcgtgtagaagagagaactttaaatatgggtttcacagatgagagaaaactagtatttgcctttctggtttatttagtgtgatttcctgttgcatccattttcctgattttctgagatgttctttctctctttctttctttcttggagtaatcttttttgtcttaccatgacacttgtccttcagaccctacagaagcagcctgtaccgttttacttggcagtccctaagctcaccaagcctgctttcactacttgtatgtctgagtactactgtgtctggtgcccactggaggccagaacagggtcttgggttcccctggaactggagttacagagtgttgtaaactatcatgtgggtgctagaaggaagaatggggtcctctggaagaacagccagtgttcttagtctagccactgagctacccctccaagccccaccttcggtacgaggggtggaatctagaggaacatttgtatagtaagtaaaacatttgtcagttgtcaagtaactataatatttgcttttcaggaaatcatttcaaaaaatttcccaatcagattctgaggagtgggaatctttgaaagacttgagaagtcagcttgaacatttaagatctgagcactcatttctaagtaaacttactggcttcaatataagaaactattccaagatggaagacattgtaaacactgaagagacagaaaaaggtacacatcattttttaacttcaatgtggtttttaaatttcattatgagtatattttggggtgaggtgcattcatactatgttgtggtggtcagagggcagctttcaggggtctcttctctctctgccttgttgaggcaaagtttctcttctagtttccgcattacatcctccaggctaggtgactgatcccttagctctcagtccttcaactccctgcaaatctttttttttttttttttttcc

SEQ ID NO: 21963 - DNA, 1098 bp, Mus musculus
aaagcacacctgtgagctggaaagttgtggtgcacagcacacctttgatcccaagactccagaagcagaagcaggctgggctctcaccaaaacaaataacaagcaaacacacaaaaacctaaaacacttgtaatcccaacattcaggagggtacaggccaccagatcagaaggtcagcgttatccccagctacccaaggagttcaaaaccaccctgaactctatgggactgcctcaaaaaggaaatgaaatcgcagaggaggaagcagagctaaaatgtcccgaagggactacaaaataaggaagaaaggcttggattgtgtgtggaaggaaaatgggtttctgtgcataacctggcagttttaccggcccttctccacccacatctgccccccacccccaccccccaaactgccctgtggttgctggaggctgttgtgcaggtacggttctccagtggatacaatgggctagaaaaaccctgtgatttatgcatgggagctgtttcttctcagcagctgccatagcccggtcattggtacattgttcttcctacaacggtctgtgctgttgcaccccgcctttgtatttgctggaacaatagtgtggttctcagtctttggagaacagcagaggcagcataggaagtccagtaaaagctctcctcttgcttcccagaaagtttagatctcatgttcttaacagagggtggggtagaaatcactggatcatcagggcactgtgagtgatagtgttccaagtgtgttctgaaggagcctctcctagggatctaatttaagtgcacacatcctgacccctgatgagtctgcgcttctgatggctcccaaagtcaggagcagtcacagcaggcgattagaagtggcaaaatgaatgtgtagacctaacagtctcttaccaacgtcttactcaccgaaccgaaggacccttggtaaatcaataaatgcagaaacctctttctgtctttgaaaggctgaatcctgacgtagcagctgatccaaaatgccatgcatctctcagtaatgtctaattctgtgctctggttgaaatggactattttaggtaaatgtcccacctgtct

SEQ ID NO: 21964 - DNA, 1161 bp, Mus musculus
ttacaatcatctctgccctgtgtggctgggtcctgcagtatttcctgccttagtctctattgctaggaaagactactaatgtcaaatcagtgaattccttatgaaccttccctgttggaaaatgttaggatgggcgtccactgccctgcttcattgatgaggtgcctcaggatcactggtaacttgcttatgttttggagataataaaggaagaacagatgacagggtagcagtccccccagctctgtctgaatggcctttgtgaaggctggacctccagtagatttctagtcatctatgtctcttttctagtcctgttgatcccacttccctacccctgaacattttacttttatattatagctacttgatacaaaaatcgtcctggatgtctgccatttttaaacaacttgctgtattttgtattatctgttaggtttaccttctatgatgggcctccctttgctactggactgcctcactatggacacatacttgctgggacaatcaaagatatcgttacgagatacgctcaccagagcgggtttcacgttgacagaagattcgggtgggactgtcacggcttacctgtggtacgtctgagtctccagtcctgtgatgttctcactgtctgtgaatatatcaggcgttccctttgaattcttttctgtattattatgtattgtgtggtctcgtgctagagttttctttgcatgtatttctgttagctgttttggtttctgttgcggcttacttgtattaggtgtggctgttagcataaccatcttgcttaatattttcaggagtacgaaatcgataagacactgggcatcaaaggcccggaggatgtggccaaaatggggattgcagagtacaacaagcagtgccgagcaatcgtgatgagatactccgctgagtggaaggtatgctgggtactttcagaagaacgaacagcagatctggctttgatgcgggactagatagaaatggctaagcacccttcatgctttttatgaaatattccccaaagtatggctgcctgtgtgagcttgtgtcacaagaggagcactacatcccagtgttgcttttggtgtctggttcttttttatttttctctctatcctcttgctacagtcatattctctttaaaagtctctgtac

SEQ ID NO: 21965 - DNA, 1099 bp, Mus musculus
gttttgctttgcagttaataagtatcctatgggaatactatttctgttatgccttctcttatgatactttcagacattaattttagcaactgttggtaaattcttcctagctatagttatttctctgatgttcgccaagtaatagttgcaaaagacttttatcaatataattaatatctctgggcatggtgggacacacccataatcttagtactgggaaaacagaaggtggattatcctaaatttgaggccagcttggtttatatttaacagctttcaaaccagaaatacactgtgaatcctaccccctcaatccataatgacttaagtaattacttatatttagaaataacaatatctacgtataagaaatgaatgttaagacaacttgttaaccttaggtgttgtttgaaacaatgtttcaaacattgttggaccattgattgattgtttggatttcccaaaatactcataggttgtgataacagcagtaaaaagtcaatatggtgttatctcctaatgctactctaccactcttgtttttaagtctactgttaccagactcggccgatggatcgactttgacaatgactacaaaacactatacccacagttcatggaatcagtctggtaggttaattttaaattgtaggaatgataaacattgtgtctcgggggtcagaggaggaggtgcctgcctgaagaagtttgttgacaagttcagtatttgcttttggagtaaatgtgatatatatcttctagctttttctaatgccatgaaaatgatttatgccccctccccccgccccatttgtttccccataaaaattacatttgggcaaatattctactcaaacccttacacattgggcaaatattctaccattgagccctgtgggagagcatttaatcccctcattaccgaagttgtgggtagtggcccataagcacactccaaacagtagtaatgcagggagattatgagttcaaggcctgcctgcctgggctacttactaagaaagactctgtctcaccaaacaaagttccctagggatattttaactccagcgaaggttttaacaaaagaaaaggcagaatt

SEQ ID NO: 21966 - DNA, 1144 bp, Mus musculus
cttcccaccacacgggcttttgttatccagataggcatgtatatcattacaaataaaatgtaacttaagggggggcttttggttttcatttttgttgttgttttagtgggtgggtttattcggttttgttttgggtttttgagaaatgtctcactatagtctttattcttgactgacctggaactcactaggtagacccttgaacttgggcccacctgcctctgcttcctgaatgatgggattaaagatgatcaccactccacccggctgtggttgagttttaaaatgttcgtgtgtggtatctaatggttgagatgactgggctagataatgtaactgcagttcagctgtaaggccgagattctatagatggtccttaagtcaccacagttcgaagtagaaggttacttagatgtatccaagacagtattgaaaatgtacttagaaatctatgtaagttcaagctctcctttatcctgagacacttttatcccccagcctgtgttcttgtctgtctcaggatgatcatcgtgtctgtatggacttcaacattattcagaaagactcagtccctgtttgtcctgtggatgcttcaggctgcttcacagaggaagtgacacattttgtggggcagtatgtgaaggtctgtgctttgtgtgtatggaagggtgtaatctgtcttatcacgcttagaattaccataggcatttaacattttaagcacttaaaacaaggaaagacagctattagccacactccgagggtctgacctgcttagacgggggagcgtgctgtggtttcatcagtaggggttgggagcagtacactgccgtctgtcctggcatggccttctgatgctcaggtgaactttcatgtttgagaacttcagtggctcatgcatcctgggcaggcttctcagcttctctcctcctagccgtgcctccagccccagaacagatgttttcaaaagacatcaattgtttgtgccttttacccattataaaatatcagctcttagccatgtatttatattgttagtaagtatgccaaggtgttttagtgactgactaatttattaacaggatgctgacaaaaatatcattaggatgttgaaggagcagggccggctgctggcggcgggcac

SEQ ID NO: 21967 - DNA, 1164 bp, Mus musculus
gcacacacaccaagctcatgtgcatacacagtcacaaaaataacatgaatataaaaggcctaacagatagacaccaaccacccctgccattgcgactttcaccagtacacatttgaccctcttccattagcacttgcgtgtctgcttgcagtccccatccgtctataagagcaactctatttactcacttacttggtatctcctttctgttttacaagtgatggccaaaaaatgagcaagcggaaaaagaactacccagatccagtttccatcatcgataagtatggtgcggacgccctcaggtacaaagcagccctgtgctcaggtgtatctcgtgtcatcatcctcagagtgccttgcaattatgctttaactgtcgggcctctgtatggggagttaggcttttgtagttggtgatttccaagtctagaagtcttttgaggactaaaaactgtcccggatgccatcagccatccatgacctcccgggcgtgtgcatactgtctctacctcagctcctttctaggtccctcgtcttgttggtattaggattctctctctcttctcttctcctctcccccaaccccaccagaagaaataaataaatgcatgaggttttagagaacttttagctacagcttgaagcgttcctactcctgaagtctatcctgtttaggttgcaaaggcctagagagcttgttcagaatctccatgtcataggtgaatcctacaccctgtcccatgctgtgtaccttcacacagctccctgtggcctgcaaacaagagagaggctggccctccactcattcgtctgtctatcaggactgggccattctccacagtgagggtgggcttccagagtgtggcagatctcctcatgagcccatgtgcacctgtggtgggggtgccagtgtttaagggctgtccctccgcagaggaaagcagagtttgacttggccttcttcatctttagtaaaaggaaaaagactcaggtgatctgacaagaacaggaatttttacctcctcaaattagtaatacttggtttgccatctgtgtaacttttctgtgtaaattttgtgcttctgccaggttatatctgatcaattcccctgtggtaagagcagaaaacctgcgcttcaaggaggaaggtgtgcgggatgtcct

SEQ ID NO: 21968 - DNA, 1686 bp, Mus musculus
tgtcctattctggtgccccagtatcctgtcccatgctatacaacaagccttctgtgagcctgtgacagtcacaggggaatttgcccgtagacaagatcgtggtgctgtccacatctaacttcctgcacctgcatcccgagattcaagtgcggtttttctgctttgcagatatgatctgtaggctttaaggtatttaacctctgtgcatattgacttacctgacacatttgatctaactggcacttgttctggggctcctggcttggtttgtttttggagagcaagatatccagagatattttgagtcctgtgaggtagctctactattacacctcatacatatgaagtcatttttctttgaaaagggacgtctaataactagcctatgcctgtctgtgtattgctattctcctctctaaagtgactggttttcatttctcagtctaagtgagatcgacggatgatgggtgcatctgagtgatactctctcctccattctgctgcaggccccttacacgccctttctgactgagctgatgtaccagaatctaaagctgctgattgatcctgcttctctccgggacaaggacacactcagcatccactacctcatgctgcctcgagttcggtaggaatcaaatagagacgagtcacccgggccacaggaaagggaagtccacatagggtcccaaggcccgcaggaagagatggggagagggctcatttcccttctccacctcctgagccctcctttcccctgggctgatgcagctactcctcaggctgcaggggcctgcagtagcaggggtatagcatcctccttaggaatggtagttgggtgagatgtgagtgcaacctttgagtaaccctgggagcaccgtgtgtgcccctgaaggtggcagtgggtgacatcttttctcagttatcgctggagacctagccagatccccctcttcacttaagagtaaccgtgtcaggttttcaaccttcaaaagtaatgatcttccctacccctgtgttcatcaatcagagaggagctgattgacaagaaaactgagaacgccgtgtctaggatgcagtctgtgatcgagcttggaagagtgatacgagaccgaaaaactattccaataaaggtgtgaaattgtcttcttatatcgaagtgacccagacctgtgtcttgggaaattttagcttagactttgcagcagtggtgtaattctttgtccttttctgtggtaaggtatgaatggcctggagctagcttagctaaatagtaaccagacagatgagcgttcaacattttgccgtttggggaaactgacccttagttcatttccactcccttccttctagtatcctctgaaggaaattgtggtcatccaccaagacccagaagctctagaggatatcaggtccttggagaagtatatcattgaggtaagtgaggctcagcccagtcagaattttctgtttcctagaaaattattctttggtaaattgctacatgcataaccatccatgaaattgttaaaaaaaaaaaaaaaaaaaaaagccaggcgtggtggcgcatgcctttaatcccagcacttgggaggcagaggcaggcagatttctgagttcaaggccagcctggtctacagagtgagttccaggacagccagggctatacagagaaaccctgtctcg

SEQ ID NO: 21969 - DNA, 1068 bp, Mus musculus
tgatgttgtgtttctgatcagagaggcattggtggaagcccagcagagagtaagaactccttccgtagtatccctggccagaagtcctgatcttgatgtcatgtaggctgatagagaactctgtcctagccattcccttctggggataactaaatagtgccaccctttccctgtcagtgtgacatcagagtcagctaaaataggtaatggtgacacctaacatatctgttccgggtaagtgattcaaagtgcaaaataagggttgtaaatataaaagtttgtgccttgcaaaggatgagggcagatggcttggtagttttactccttggcccactggggtttgccaaggcccctgtaagcgggaaagtggtatttggttgtgtgagggttggaaacccctttacggcacttaacttccagacttaacattttctctaaagttttacttcactaagtaagctcttatttccgtggccttccaggtggagtgttgctcctggagaatccgaaaggtgataatcagctgaacctggtgaaactgaagactgttgttaccagcgtatttggtgttaaaaatgcaaagctgtcagtcttccacggtgaaacaggtatgtggggagctagaggacatcttgtcatttgctcgaggtggcttcgaggtcttcatttggtgtccactgtttggcagagccgtggtcttttcctgactctgaggcaactggctctttagcagtgcctgcctgctgtgtctctcctgtgcccttctctgtggtatggctgaaacctgggacttacaggaagccctcatcctcccagtccctgttagccatgaggcagatcaggactcagccctccctgctgcgctgtgaggttatcggacagttcctgagccttactgagtccagacctgggatccgcttttaaagaattacaacctgggtctgggaggtggctcaggccgtaaagctcttatgtgatgaatagcgtttggattcccagcatccacctataaagctgcattagcggcacagcacatatgagatcccaggctctcccgtgaggcggtag

SEQ ID NO: 21970 - DNA, 2082 bp, Mus musculus
gtctgtgtctcaaaggttaccaaccagtccacacacttcgcagctccctgccctcagtcacctcactaacataagataatatgtaatcaaagccgtactgtaagcaacaaagacaaacctatcaggacgtgccaagagttgagagattccccactaaaagctaggacagaagtcaaagtggccttagaatgggcctcaagataggcagttaacatttttttatatgtttactcatatagaatattgactttttgaaatttttctctcttctagaaattacagaagatatcccaatgaagactttgaatatgaagactgtatatgtttctgtcttgccaacaactgcagatggctaacagctatcagtatgccttcagtcagtcttccttgaatctacccatctccttatacacacactcacacactcacactctctatgtctctctctctctctctctctctctgtctctctctcacacacacatacacacacacacatgggttcagtgaagttatctccttgggcacttgtcaaatatgctgcttttaaccggcgattctaatgggattgactgactggagacctcacatcatgttcacatttaaccttaaacacctatgcagtcatgttgggggagtgtcccaatgttacctcaacaccacgaagcttatttctatactggagttcttcagtatagaaagtggaagtggtttaaatggcatagtacatatacatatatatatggccttgtaaaacagatttgagaccttgtgaagaaatggatatgttatatatttctgctacctggattttcctgggtaatttgatggaatattttacgtttgattaaatcaaaacagtaaacactctcttagatactgtgttggaagtagttattctcccatagtttaatgaaacttgaaatctgtaatctttgaaagactaaatttaaccacgtctacatattaagacatcgaatgaacatcgaatattacctcttcccaaaattctgggtcctcaaagaagcagctgccaagacaaaatgagatggttgtacactttgttatggcagtagacataagtaatgggtgtcagcaggagcaggtgttacagactccacactcccacagtcggacagggagaaagggatctgggaaagcctggggtgcagaggagcgtggatcacagcagagacaaccattgctagaaaaggaaggaaggaaggaagcgggaacactgggcgtctagtgctcaaaggctccactgtacagagctgggtcttcatgccagctcgctcaggacttagggctcatttatagcatggacgtttttgtttaaccttattttaagggtgctctggtggagttcttataagtacatgcgttgcatgtctaagaagtatctgaagtctccgcccaggggtgtgttttggtattataatgagcctctggactaggacagcggagggatttagtttgcttcttggggtttccagccatcttctttggcagtaggtttctgatcgttttgtaacatttgtgggaggctttcttgccttcactctccactctgctttcctaactcacaactctgtaacagtcattgcaagcacaaagttatcaggcaaagattttatttttttattttattttattttttttagcatgtcagtttgaaggacagcctggtttagtgtccctgcctctcatagtcagtgtctaggaacagcttgaggtttatggccttggcacagatgcctcagtgtatgttacggtgcggtagctgaatgctagcagccaactcatcagattcttcaaaatggattctttggaaaagccatctgagtgatgcaggcccacagccatcaaaacaccacaaacccaccaattggacgagatgggaaacaacaacagctaaaataggggagaactgaaaaacggatgggtgggtgactgaagtggtagaaaagtggtggaaaagctcaattgtaaaagcaacaaagcaacgaaaacctaagcaatgtccagctcagaatcctcagcaccagccgagagactgggagaactggtgagtggagaaag

SEQ ID NO: 21971 - DNA, 3099 bp, Mus musculus
gggggtgataacgttttctccagttcaacaggagtgcttgacccaagtcagtcatatttataatatgcctgctctttgtttaaaattaaatttgggcacaggaagcacacagagacatttaggttgtttaaaaagtcagaatttctgagtaccatttcagtctggaggcttttagctgagtccaggtataaattagccataaacagtcaatgacccacagtagtctttagtaaactgttgagaaatctgggtaaaaggctgccttcaattctaagctttgtttttttgtggtttttgttattatttgtttctgttgtttactctttaatcgtaagtacttttaaaccacgacccaggtccttggttcacatggaataataaagatgtgtttttagatggcacattggtccatttgtacacacctgtcatcgggatcttagtacatggacttaaaaggcaacactacatcaatggtttgtatatgtggtgaattcctgcaagaacagtgcatttgtattagaaatgtaagttttaaggatggccttgttgccttctatcaagttctctgggactttgtaattttgattactactattgatacatggttatggtcagaaggcctcttctcccttcctccctcactccctctcctcctagctttccccacagagaatgttagaccagtatggcttcttgccttgatcctgttgtggcagtgtctgttcctgccccaggtgtgctattcacgcaggtttattccctccatggcctccgggctttgcatgtctatgatgtgtgtgtcgctgggaaggtcatgcttgccagttatgggtggatcgcagctcttcgccatcaagtgcattcaggattattcctgggaggttgcttaaagctgaaatagaactgaaatgcagttggtagactagccaaacatctgcttgctctcactttgttttggaagaaccatggtagcttgtcagctggtagaaagatggtttgtaaaaaccagtttctcacggaggttgaacctatctgtggctggacagtcttggatactgtcaagcaaacaccagaggcttggccaagtatagttacaattacctagttggggttcttcctgatgcaagaaatttttcactgttcgaggcacatggttattggctatccatttagttttcacagaggctgaccaccttacactgctgggtggtcacaactgctcaccatgtgaacatagtacctcagttctgtccttggctgcaatcgttgtgtgctcagtgttttctcataggcaccagggacaggcttctcaaggcagtatgatataccctagtctttggtgcctctagtatatgtgaccaggtgtcgtcctgcatgtaaatctccgagctgagtctgactcacagcccatgctgtcatctgtggcacaagtgggtgtgagtacgtcctgcatgcactaacggtgcagaacatggcatggtgactagaaagtaaaactccttttgaagtgtcccaaggactgggtcagttagaacctgtctgccactatctgatgacttacattgtggttttctacaagccacctcagttaactttggttccccgtggactcccaggctggaggaggaaagcgtgaggacggggatgattttgatcacgattccatttattgcctttacataaggttgagggaaggggaaggtttggtttgtttgtcttttaattgttttttttttcttttttttttttttaattcccccaccccaccctctttcttttggtggcttccaccacccttaatggtgacagactcctgggcctgccaccttggacttcccttaggctcacagttcagatctgcatgcattgcttgcattgttctggtatctgaatgttgattcctcatttaggagttcagcattaatttccaaaattttcatggggcttgtggcaacacgggccgtgaatctgtgtataaaatttactggccttcttcacttacctgctctagtatcgtatcgtgtgtgcgtgcgtgtgtgacgtcaggctgccacgtaaacttcagagaagaaccttaaagcagaccatccatttttgcatgctctcttctaagtagaatgttcaatgtaactaaaactaaaattgcatgtcaaagagacctaggttctttctttctttctttctctctttctttcagtttgcttttggtttcctgtatatttgcttactgtgctgttctagtggttgtagggtaaagacgaactggtgaagcagtcgtagcgccgaccgaaggtgattccagttgtatatgtcacgcagcattcgaagggactgtgcacgctctaaagatcacagttgcttctaagccagatttcatttctattcttgttttatgtgccaaaccccaaagtgcattgggcctgaatctctgaacactgtagacccattagaaggaagattgttctgaccgtcacaaattgtagtgcctgaaaacacttaacactgattgtctaagagatgaaagtcctccaaagatgacacaggaaaaatactacaagtaattgtggtggaaatgtctgtgttccttgggaatgctgcgctctctgtagtttccatcattggtgcagttcgaacgaatgagtagagttcagaggtcttcgtgttcacatttaaaactagataaatgacctcattttcttgagcttgaattcatttttaattttaattttattttatacaacgtgtagacggttccctgttctctgcatttagaagtatacacagtacaactgttaattctgtaagtaatttttataattatgatgtaactcttatccttccttaaaacattaaaataaaccctttatgtgcaacttgtggctgtgaactttgtgctgctgtgttgaatctgctgaaaggggtctggaagtcaggcagtgtttccaccacatggaaatgtcagggttgatagaaaaagaaggaaatgaaggtttgcttgagcggtgacagcagtgccatctgatctgggccggcattgctgtcatctcggatctaactgttgatgttttgatttgacattaataagaaatgttagttaac

SEQ ID NO: 21972 - DNA, 1200 bp, Mus musculus
ggcaggtggatttctgagttcgaggccagcctggtctacaaactgagctccaagacagccaggactacatagagaaaccctgtcttgagaaagaaagagagagagagagagagagagagagagagagagaggaaggaaggaaggaaggaaggaaggaaggaaggaaggaaggaaggaagaaagaaactgtcattatttaatctggtgactgagcagaagtaatggtcactgggggtttgctcagtgagaaaagctttctggaaccttctgtagttacctagtgtatgtgggactttggagtctatcctcagcactaaaaaaaaaaaaaaaaaaaaaaaaaaaagggcatgaccaatgtcagagacctgaaattccagtactaaagaggctgaggaaggaggattacaggttccagagcagcctggactatatagttgtcttggttagtcatcttgacacaagcaaggaggcaaggcccgcgccaaggccaagtcgcggtcttcccgggccgggctacagttcccggtggggcgtgtgcaccggctgctgcgcaagggcaactacgcggagcgtgtgggcgccggcgcgccggtatacatggcggcggtgctggagtacctaacggccgagatcctggagctggcgggcaacgcggcccgcgacaacaagaagactcgcatcatcccgcgccacctgcagctggccatccgcaacgacgaggagctcaacaagctgctgggcaaagtgacgatcgcgcagggcggcgtcctgcccaacatccaggccgtgctgctgcccaagaagacggagagccaccataaggcgaagggcaagtgaggccactgctcgcgtcggcccgcgtctctgtgatataacccccgcgagctcccaattgtcacgtccactcttgaccagcaagaacgacacgaccaccagtccttctaacagcagtttattcagcaaacttccgtcttcatctctctcgcttcaactttatctctctttctctcttccccaaaccccgggcctctcactcttatacattctcagtccctatccactcacagcaggccacgtcacctcaccaggcacacagcttcagccaatcagggcggcaggggcatgtctccaccaaatatggacttgtttaaaccaccagcatcatggtgcacctgtgcagctctcacgatggtcgtggct

SEQ ID NO: 21973 - DNA, 1196 bp, Mus musculus
acttccacgtggggccttaagagatcttaactctggaggtctgcttgctgtggccagactgtgtggtatctcctgaggaggagacccaaggagtcaccaacgcatttcagcctggacttggatgtgacttatctgttgcgggctccatccttctgaatgtaccaagctgctgacacggtgcactgccttcggatgccgctacccctggtccagggaaggcaggtggtgatgtgctatgcacatgcacattgggatgatgtctccctgcgttcacactacatttattttccatagaatgggtgctcatgtgtgtgtgtgtgtgtgtgtgtgttcgttgctgtgttgtacaggatgtatacgattgattttcccaggtggaacccattacaaagtgtcagtcttccacacatcattggtccaaacctgcccacactgctgtcccaggttcagcatgtgataaggtcatgtccccttcccagtgcccttgcactggtgttctaactcatagctgtgaaaagttactaaagtattctgtattctcaaaagcctcacccaagagcagcccaggtgtgtgggtcttacccttacattcctgcacccctcctccctcttgggtcccttgcgtaagcttaggtacacctaagagccaaattatgcgatcattgaggcatttctgaaagccacagaaaagccagccgggatctctcggaatgcaggcaccactaaaggaagaactcctaaggagaggcaaggtgctctccactgtgggcaatctttctaggggactgcagtctgtctgctgcatgtagagagtttccagcagtgacgttcacaagccagcccttcatctgtatggtcctgagttcaagtctatagagagaagcttgaggctgcttgtcccctttgctgtcaccctttgctggcaaggagctggagctgtcagcaaagcttctcaactccctcagttatggaccctgtccaggactattcagtgagaggattccgccaggctgggaggcgtgatgtagttatttgtgtgctctttagagagaaccattccaattcccatatgatggacactccagccactctcctccgcttggacctgcgttcatttgtccatcctgtaaagaaaatgcgtagaagacacctctgaacatcccctccccaaggattccgcccacagggcacacaga

SEQ ID NO: 21974 - DNA, 1126 bp, Mus musculus
agccagcctagcaaatgggtgttggggggaagagagtagagctgaccagggacctgagcagagtgagcatctgtcactcattcctgcctcggaaggagctttggacctattagtgtctgtcacttgggctgttctcctgtttcagttgagatttggaaaaagcacctggaagcgtacagtcagcgtgccctggagctggaagactcactggaggcgtcaacctctcagatgatgaacttgaatttataagaagagttcttgcctgtgtgtctgtgtattgggtaaggatgggagaggcaggaaaagacttccttctcagttctttactgacatgatgtatttatgtgactgtagagttggaaattcactgggcctcagggcaaaggaagcacctggttgtagcactgagtccatcagatgggcactcagatgcgcccgtgggcacctttccttaagagcctattgatcagcttcggttctttctctctgcactctggatctggaaaacgctggagaacgtggtcctgggtaccgtggctgcctaggacccactattacagtgctgctcaaccaagtttggggatggtgaaccaggagctgtgctccggggtgtgcagggcccttcctcgggggtggagtcctgccattgtgctgccaaggatttgctaagatgagcctcagaagaaaattagtttctaacatgactttttgacataaattaatgcttttagtttttattttccaaagaagcagtatatatcaaatttgtagatttcagtttggtgtctacaaatctttttaatgaacataggatgaatgtgtttctgtcctagaggacagagcttactaacatattttcctgcaagcaagagggcttatttgttttgaataaagagtgattatttaatttcatctcaggctattgtgatcttaggtgagtggtatcagtctcacaggttagcaatggagttccttactgacttggtcctcttttgcactgcggtggtgtgacgggcccagtcatcatacccagttccagacccagggactatggcatccctaatagacctttgcgtctcttttgcccgagtctgccccatgtcaggaatgcagctgcactcaacat

SEQ ID NO: 21975 - DNA, 1893 bp, Mus musculus
gaaggtagtaagatcacatccaaaatgccggttgcatctacccaggggtcctctccccctaccccggctctgtgggcaacctcccccagagccgccaccctacctcccaagtcctcctccggcacatcctgtgaaccaaagatggtcatcaacacggtcccccagctccactcagagaagacggtgtatctcaagtccagtgacaaccgcctgctcatgtctctcctcctcttcatctttgtcctcttcctctgcctcttttcctacaactgctacaagggctacctgcccggacagtgcttaaaattccgctcagccctgctgcttggaaagaaaacacccaagtcagacttctctgacctggagcagagtgtgaaggagacactggtcgagcctgggagcttctcccagcagaacggcgaccaccccaagccagccctggatacgggctatgaaacggagcaggacaccatcaccagcaaagtccccacggatcgtgaggactcgcaacggatcgatgaactctctgcccgggacaaaccgtttgatgtcaagtgtgaactgaagtttgcagattcggatgctgacggggactgaggccagcgtgtcccagcccatgcccctctgtcttcgtggagagtgttgtgttgagcccattcagtagccgagtcttgtcactctgtgccagcctcagtcctgtgtccctttttctcttgggttgagcctgtggctcatcccctttgtccttttgggaagcaagtatctattccagtctcaagtcctgcagttgctggagcgcttacgcacctgagccctttgtgtcctgggggagagatggccacctccgtgggctgcgaagagccaccccttcctcttccgattctcctagcagccactcagagataatttaattccagattggaaacgcccttttagtttatcagattggtaacttacatcctgctgcccagatggcacggacagttttctttcacttaattattattttttttttaaggattttcgctcctattgtgttgatgtcttaggtcattttctttttttctttctctttttttattaccagaggagatgttttaatattcatgagaagaggaacattttctagatttttttgttgttatatattgagatataaaatatggctatgttgcttaagattctcagggatagacttatttttgttaacttcattctttcctgctgttaggaacataggcctaaaattgtctcttgagtttgctcacccttttgttttggtagggtttttttgttgttgctgttattgtttctagtttttaatcttattcattttgaaggatttttctttctgaactttttaaatttttatattttcctgccatacatctacaaagtgggttttgagtgagggcaggtggcccagtggctttgggtggcgactgagctggtcccacgaggggaggagggtttatataccccatgaccctgcggcttcttggcgcctcctgcccatgaggatcacatcctgtctctccttgcttccatctctcatcactgcccttggacttccgccttgactgtccatgaaagacagaaatgggttgggtagttgggctcccaacctcggatggtgaccgcaacatcccgtgtgggcggccggccgctcctgcagcccgactctcctgccagtgtctttcaggatgtcaacgggtggtacgattctggcatttgtttctcgctcaccgtgtgtggaacactcattccatgtagagggtgacgaactctggattcccccccacccccaccccgtgccgtgtagacactcatcttctgcatgacatgatctaccattcggtgtaaacatttgtgtttataagatttactttgttt

SEQ ID NO: 21976 - DNA, 1189 bp, Mus musculus
cacactgggttgcacccaccctaattacttagcaaataagaaaatggcccacaggctgggcggtggtggcgcacgcttttaatcccagcacttgggagggagaggcaggaggccagcctggtctacagagtaagttccaggacaaccagggctacacagaaaccttgtctcagaaaagaaaaaagaaaaaaaaagaagaagaaaatgtcccacggacatgtccacaggctaatctgatataggcagttcctcagctgcagttgtctgccccgcaagtgtggcaaggtgacaatgaaaacccatcaggacactgtcatttaggtcttagcggtcgggccttgtggcctattctgagtcagtgagtccttccctccatgcagtgtttgactgtgctgtcttcccaggagctggtggagaagctagcagcccctcccagtgcctgagtcctccttacacttgccatccgtctctcatacacaggggaggaagtttgtctatgcaggctccaactctggagtggtccaagcgcccctggcattctgcgaaaagcacggtagctgtgaagactgtgtgttagcacgggacccctactgtgcctggagcccagccatcaaggcctgtgttaccctgcaccaggaagaggcctccagcaggtatgcctaaggatggggctgtgtgcctatgccccatgcacaagccatagagtaatgtgcgcctgctgtcttctaggggctggattcaggacatgagcggtgacacatcctcatgcctgggtgagtggatctcctttgcttcccacccctgggctggcaaagctcccggggcgtcagttccatggttttcctgtgcggtctgtcttcctttctcctctctgaacagaagtcaagtgtcacgcagcagacctgtgacctctccttgtggtgaacctgtgatctttctctgtccctttggttacagaaagagggctcaaaggcacacagggtgtatcggttcactggaaagcacaccctggcccacaccatgctcctctgttctgcttagctgggccccgtaaacaaaactggagcctgctaggaatgagagcgaaggagcccttgggtatgaccagatagccctagcctaaaaacaatactcaggaacagtgtgggacagtgtcatgcttcaagatgaaaatcctaccctagaaaga

SEQ ID NO: 21977 - DNA, 1207 bp, Mus musculus
gtcttgctgaagtcttacagatgagaacacagcctctgacaaactgtaaattctcacctcctcaccttaaatagtgagggtggttctgtgcatatggagcccccacagccacagcttcctgaagattgacccagtctcagacaccaagtattcaaagacacctcagcctctgtcctgtgtgcacgctgtccttcatgccctggttccctgacagtacagtgtatttatacaacattcactatgtgctatgtatcatagggaatctatgtgagcacactgttgctgtcttcagacacaccaggaaaggacatcagatcccattacagatggttgtgagccatcatgtggttgctgggaattgaactcagacctctggaagagcagtcagggctctcaaccgctgagccatctctccagcccagtatcataggtaatctagcgatggataaagcctgtgtgaaaatgtgtgtgtgtgttggtttgagtgagaacagcctccataggctcatatgtttgaagacttcgtctgtagttggtggaactatttgggaatgattgggtctctctctctctctctctctctctctctctctctctgcaacacaaatgtgtctctctctgcatgtggatctaaatgtaagctctcagctactcctctagtgccatgcctgcctgttgccctcttccccaccataatgtctcaaactctgacccatggaactgaaagccctgataactgggcatggtttcctttctaagttgccttcacagcaataggaaagtaactatgacaacaggcatgttctgcacaatgctaagggctcacacagctgcagagcctttgtttctttgagtttcagagttctgtacttcacttctgtttcattactctctctctctctctctctctctctctctctctctctctctcggggagatgtgagcaaatgtctgctcaccccaaagagaccatttgcaccaagtctagcttggtgtcttagttagggttttactgctgtgaacagacaccatgaccaaagcaactctctctctcttttttaaaaagatttatttatttattatatgtaagtacactgtagctgtcttcagatattccagaagagggtgtcagatctcattacggatggttgtgagccactgtatggtttctgggatttgaactcaggacctttggaagagcagtcaa

SEQ ID NO: 21978 - DNA, 1767 bp, Mus musculus
aatgattacacagtgtggtatcctgacagagcgggtgagccatctcaggtctgtccccttatgagccccgtttaccatcccagattcccccttgggacccccctcatctggatcattcccctccccccaggccctatctccaaacacctaggtactaagtgaacctaggtactaagtcttcaacacatgaattctgaggggacacattcatactggagccgatggcagcctggtgaccaagaccatctcaggatgagtttctgaatggaatcttcattcgccataaaaccagagatgtgaccttccccacaaggaagccttgctaagtgcgacattgagctgaggacacacaagctgagaattccccctctgtcctcctagccttggctaactactgaccatacaccgaatgtcacccattcacggcacttttgctgaggacctaaaagctacaaaggctgcatagccttccatctaggtctagggacatgtacagatgggagcatctcaccttcacctctgagacactgggacattcacagccagggatggtacaggagtccctgctggtggtgggctcaatgaacagagacgatggtgaaatgggtgcctctctttagaccagtggttctcaaccttcctaatgctgagatctttcaatacaggtccttgcgttgtggcgactcccaaccatgaagttattttgttgctacattgtcactgtaattttgctactatgatgaatcgtagtgtagatatctgatatgcaggatatcggatatgtaaatatctggtatgcaggatatgtgaaatgagggcacatcccacaggttgggaaccactgcctttgatagggaggcactatgcttagagcatggttaggaagtatttagaagctattggtgtgtcttggaattgtgttagtaggtcaaccgtcctgtggagggaaggaagggggtggaggaaatccctgtatgttgaattcattgagcagacctgcagaacacagccttggtgaggaagtcccatgggtcagaccacctgtagatttagtcaggagaggaagggccactgtatagttatggagacaggactgtctgctctgagcaagaagttctctgctgagctcctagcctaccttcccttgtccccagggctatagaaaggccacctcgaagaccagggagcatgtgtgagaagtctgtggaggcctctgccttcttcctggcctctctagcagtgcctctccttcccagggatttgggactgaccgttatctggctatgactgagcagagtggagggatgggctttgccccccttcagaaagccgaaaccggttcccatgtgcagagtcacatgtggccatcgaccagggctctcatctggtgaaaactgtgtcttactgtcaagattaattctctcccctgggccactgaggagggcagatggcaagaggatcctccctagaggatttagactatgaatgcccactaaatttgcaaggtcagaaactagccaaggtccttctcaggcatctatccttaacttggtctctccacaagctgcctctgatgctccgagccccttctgcctggcagctgggctccctgtgtgcttttacctatgacccttggtcagcagagtacaaggagcacctaagctgcctcgccacctcccactgactgcaaacaccacatacctcatgcggaaccgaatgtctctccagtaaacaccccagccagccattcataaaaacctgtctctg

SEQ ID NO: 21979 - DNA, 1157 bp, Mus musculus
tatttggggctggcttatacttttagaggttcagtctattatcaacatgtccggaagcatggcatcctgcaggcaggcaaggtgctggagagttttacatcttttgcactgggcagagcttgagcataggccctcaaaacccacctccacagtgacacacacttcctccaacaaggtcacacccactccaacaaggccacacccactcatggtgccacttctcatgagccaaggctattcacactaacacactgtcagagtttttggaaaactgtgtgaaggtacattttaaggtctttgtcccaccagaagtgtctcttacactgctagttgctaaagccagaaacccagtagatactgctagccctgccttccagggtaaccagccctcaatcaggtttgcattcccacatctcgaataagtcttgaatcttttcagttcccttggtttgtactggtgtcagcctccagatgggcagccctgccccgggatcacatgagtatgtgcattgtgtagaaccagtttctgttagctgctactccttgttcttaggctaaagagaactttgatcttggcctgcagccgttttttgacctgtgctgacttctttacttggttgaccgcttgctcttctcacccctcccatcatgcactctccgtggctgctttgtgcttccttctgtgtgtcctctgccccgaattcagtctctctattattcatttttcatgtatgtcaaaatatctgtattgtacagagataatgtaaataaggaaggagttgtttttgggctagtggcttcagaaggttcattccttggtggtttgagcccaccatgcatttcggcagaacaccttactggtaggaatgtaccgtggaggaagctgtttctcctcctggaggactgtgagctgagggaaggaagataggaaggggccagggaagatataaccccacactcagtgacccatttcctccagccaggccccccccccccccccgtctttgctactttctcataatgccatcacactaagactctatcgggggtgccttcattcccgtcagtaattcataaacaggcaggggtggtcacagccacccctagaggtgtccttcagtagttctgggcatatcttaatccagtcgagcctcttt

SEQ ID NO: 21980 - DNA, 1102 bp, Mus musculus
gggactatttcattcttctgagcctgagatctgggcatggcctctttgaatctgcacaggacagaggcacgtgctccatcttcattccctccatggcagaatgccacgtggatccccccatctcccccgtgcctgtgggctagaggttttagtcagctccacgagccctggcaggtggacagaggccagtcagggtaggtttagcatgctctgtcaggtttagcatgctctgaggactgcatggggtgtttctagaacaggtagggagggagacccaggcctgaggcttctttcccgaagactctaaggatatctgatctctgcggttcatctgggtgttccagaagtgggcaactccttatgctactaagctggtggagatggacaaagcctgagttaagatttagatgtatcttaggatagagtttgcagtaaacacatgtgcagcttaacagacacatcccaggttctaacgcctgtatggaggcggggtgaagtgtgttctcacgtggagctgagccggactctctttagacagcaaatgtggcctctgaggggcacaggaccaggcctgggacttgccctagttgcctgtgcagctccattttgcttctagaacaggctgctgttgacatcagcatcctggcctgggtggttggatgtgggggcctggtgggtcccataggattcagtccctctaatgctacccttcaggtcacatgtaaaacccttaggtcttttgggtttcctgccagaaggcagggtggctctgttgttcctttctgaaaaccctcagggcaggagggctctgcatacaggcttgccagcgtccctggatgctcaggccgataactttctgtttctctcagaccaccagtgctacaacggctctggcgccgattacagggggatggccagtaccaccaagtcaggccaccagtgtcagccttgggctctgcagcacccccacagccatcgcctatccagcacggaattccctgagctgggaggaggccatgcctactgccggaaccccgggggccaggtggaaggcccgtggtgctttacgcagaataaaaacgtacgcgtggaactgtgtgac

SEQ ID NO: 21981 - DNA, 1142 bp, Mus musculus
agttgctcgtggaggctggaggtcagcctcagctcctctgtggctttccattttgatttttgacaagcagtgtcctgtggatcctggaggtagccagcatggataggcgagccctagaggtgttctctcgccacttctctagagtatggataacagctgtgtgcattgtgtgtgggttctggggatagaaattaggtccttctgcttctctaggaggagctttaccagctgagcatctccccacttccacctccgagaactagtttacgctacagaatgtgtagaccgatcgttagtttctgaccttgtcatgggctagggcgacactagttaagagttgcctgacttacaacttgggccctggtgctgcccaccagcaggtgattcttgacaaggaacattgaggaaagtctctgcctggtagacagaactgtccccagaacaatggaatttcagttgggtggagtgaccatagcccccctgtctttctgctgtaacctcaggtgacatagaccacagtacttcgtctttgctggggcccaacccatgctgcaataggctattcatatctgtctgtctggccctctgaatgtgcgcctgtccctttaagaggtggtgggtgtcaactgtttgcaggtctgtcttccctccacattccttcttcttcatcttcagatcttcaggctctatgttgagtaacctaatatgtggaaagctaaatgaagcttgtaacagagcttcacatattgggacatagcctatcgaggcagagatacaatctctgagttctggatgttcaaaattcagatgtcagcaggagtggccccttctgaggcttagaggtacctctgtccgtcatctccctgaactttgggagtttcaggtggcctttggcatcccttggcacttcttgtcttagggtgacattgttcaggcttctgacacttttcctgtatttgtttgtccatattcacacctgctttgcaggaccctggccagtgcttttgagcccactctgcttgtcttaagttgaaaagatacccaatgaacccaagtcagagaagaccacacccaccgttacctggcttcagagctcagcgttaagatttggggaatggattcaggctatagttaagatgaag

SEQ ID NO: 21982 - DNA, 1124 bp, Mus musculus
gtgttgactgtccctcccaagtcagttgagagccgtgctttttccaggacactgctaattttacagaaccgacccacggcccatcgctagcctcctcttcatttctgattacccattagagacacgccactctgctttttcaagtctgaacataagcactgatggtgtgggctcctgggtgcagaggagagctgcgcctttactgggaccatcatctttgtgcgcatgcgcaagcgcacctgcacgtgcgggtaggattttggtttgttttcgggctgtggcgatgagggccaggacagtgtgtgtaggagatgggtagtggaggctttcccctggtgcagcagtagaggttagactgtgtgccttcctaaagaagccactgagttggtgcttaggcagtgtaagccgctccaagggtggccccgcatatttgctgatcaaggcattagcaaatgtctttgcggtggacccacggtatgccaggcgatcacttggttgattggttggtgggtcaagagcagcgaggcctccacttctgcttcgtccaacaaggagactgtacctgaagacctcagggctgtgtgcctgcagggccctccttgggcctcttgtattgtaagacagactccactggtttagagctcctcttcctcctgcctaccctctctcagtgatgtttttgcccagagacataaggcaggacacattcctgggccagactggaaaagcagtcatttcctggcagagagcgtggtcctgttataaagtggtctcctgtgaacagagcctgcgctgttgagttttattggggctgtgcttgtcttgagccccatgggagtccgtagctgcagcaaatggaacttttcagcggacctgcatgtgtgcagcagaccacaccttcctcggtctcccagcctgtggttaaatcacaaaggaatccgtgggagggacctacaccctttaaggtcttgcaggtttccccaatactcaagccacacttgggtttgggtactacatgggtcttactgagagtccttgtgactctcgggggcagcccttctacactagaaagcattttgtccctaccgtgctcctatatcttagtctttgagagcaaggcttct

SEQ ID NO: 21983 - DNA, 1217 bp, Mus musculus
tgccaatatgtatatgcaccacatgttcacctgatccccaaagagccagaggaaaacctcagatctgaatggtgttgagagggggtgaggggctgccatgtgagtgctgggaatcgaactctggtcctcgggaagacaagcaaatgctcttaacttccgagtccacttccagcccttcatgggttaatcttctgcagtatttctcagttcctcctctcctgtcacagaaggacagaagtttaagtaaggccagcctgggctttcacgggggacacaatgtgttggggaaggagatggaatgactccttcctcatttgactcccacaaatatttattagctgacagtaattgtgtatttatagggtacagtgtgtgctttcatttaggcatgcattagaggaagattctgccacctaattagcatataagtcaccaggatgatggtgtgtgtgtgtgtctgagtgtgtgtgttattttgaaatatacaacacttctttaactggtcaccacgcagcactgaaatgtattcctttgagactttggtaaacactttccccgtccttagcccttactctgacttgcacccagacaccctggtgtctgccttctgacccgttatttatacatgattatcaaaccgttgtcctggggcctcagtttctaaaggaaggtagtatcaaattgagcttcccatgattgtgagaaaatatcagtggccctggatttataaagcaagagggtggagccggggagacagctcaggggatgaagtacgagcgtgtaggactggaacgtggattcccagagaccaagtaaaatgctgggctggcctggtagcctgccagggattccagtgctcagaaggtggagaccggagaaatccctgaacaagctagttacatacctagctagactagcccttatgggtaagccctgggttcatctgagggactaacgggaggaagtaatgtcacctatcaggaggaagtgatgtcaccgagggcgcatcctagagggatatcgcatctcccggggcttcttgtccctttctgcttcaggaccactacaaggtgaagatttcttctatactgtgtgcgctgcctgtatcctgtctcagtgaatgttgtggagcaactggagaacgctggatgtcagcctccccttggacctccgcatgcatgcatgcttgtaggtgcacctgtacctgcatacatact

SEQ ID NO: 21984 - DNA, 1109 bp, Mus musculus
gtgggatggtctttgggggcactaaatgagttaataggaaactcttaggaccagtgctcggctaagagagcttgagagatgggcgtggtttagaataatttctcaaaggctgcctctgttctctgttccctgttcaaagtcattaaaagattatatttttcttgttacactttcaaagatcctccaaatctacaaagcaccccccccccattctgagacctcacccatgctagaatataactattgatctgtatataccccaagtcctagaggatattttcaacgatttttttttataccattgactactgaagatggcacaggatatgtctctaggtaccacaaggactgcatctatgaaagctaacttgtacattcaagttagtgtgtagtgtccccgtggtctggctgtctcccatcagaactcagattaatttttttcttgaaagatttactctgtctgtgtgtgtgttagtatgtatttgcaagtgccagcagaggacaggagatggcatagagttctagaattctctggagctggagttagaggcagtgatgagaaccaagatggatgctgggaaccaaactttggtcttctggaagagcagcaagagcgcttaagtgtggagccctctctccagccttcacagtgaaattaagcccattgtgaggtctgagaaggtggaaacttaatttgtggtgtttggagtctttggcaggtaattaaggctgactgaggctataagggtgggccctgatccagtatgtgtggggggtatctgtggtgcataaggaggagaaaggtctgagctgagatattctgtgatgtcctgtatcaactgcactctccactagctagaaggacctcactaaatgcagctgcttggtattttgaataaacccttttccttaatcattgaccagtccgtagcttcagctacagcaactgaaaacatattcaccttgacccaagacccaaactagggatctacttccagtctcctccccaagcctgtcacaggtacctctggactgatttttggttcttgctatgtctgacctcactttgtcctgggggtggggggtgtcgtggtgcttttcactgtgac

SEQ ID NO: 21985 - DNA, 1133 bp, Mus musculus
gtgtgaaatgtatgattcaacttttccactgtcgggctcctattttaataacggctttctgtgatttacatgccagagaacagcacttgaagggaaacaacccagtgttctttagtgtgttcagtcctaaaactgacaccgtaatcagttttagagcgttgtcactgccccttaaagaaaccttgtacccgttacagccatggctttctcagggttccggcagctgtgtgtgctttgggctctgtgagctcatttttttcccctgatatttcatataaatacaatcatttccatatgtggctttttgtggttgatttctttcatgcaatccagtgttctcaaggttcattcatgtcctgtgagtgttggaactctgttcctttcagaagtaaaacagttttttgtttgtttgtttgtttttagaatagttttaagttcatagaagtataaagtcagggctgagatggcttagccaggagcagggacccgagttcgattcccagaacctctgtaagaatgtgggtcacaggagtatggacttgtaatcccagggctggggaggtggagtctggtggtcctggaggtcactggccaacaagtgtagctaaattgtccagttctagccaatgaaagaacccataacaaaaaggggggaattgtacagttgacaaagaagttgttacacaaccatgaggaccagaatttgagtctccatcatatacataacagacaggcacaggggtgtggggctgtatagcccctgcactgggagggcagggaggcaggaggaacttcagaatttgctggctagctagccttgctagtcttgctgagtcagtgagttctccattcaatgagacacccccccgcccccaaatggtagagaccaatagtggaagagtctaatactgactactggtatgcatgtacatgtacacacacacacacacacacacacacacacacacacacacacacacaccacacacataggcaaactctgcctgagaattgacagctatggttaacacatagcctccatgtgggtactcatacatacgcatgcacacctaagccacgcgtgttcatgaatatgtccgtgcatacatgcacacagccccacaagtgtaggc

SEQ ID NO: 21986 - DNA, 1961 bp, Mus musculus
acttgatacaggtgagtggggatggccgagaggcatggcttctgcctgtggccacagagaaccggtgtgttaggcttgcaggttgcaaatccctcacagctacttcctcctgctgcatggtaggaaatcagcagcaggtagaaggctggctcccttcagagccggaacagtctgccgcacaagcatgtgacctcgtgttcctgtgctttgtctttctcagcatcagggttgtggtcactgtggagcagacggaggaagagctacagagggctgcatccaccatcagggaggcggcccaggctgtgctgttgtaggctcctgcccagtgcttcagccatgtcacctgcggacggaactactcagagacctccagctgcccagggtgtggctgtgcttgaatacacagccagagtggatggttgtatccagcaggagctgacttgtagaggatgacagatgacagcatatccctggtgtttctgcagtgccgtgtgctctgtcaggatgcttcactgtcatttgtattcgcttttgtttaaaactggagcttccattttccctctgtcgtctgtgggaatgattcaataagcacttctccgtatccatagaaaaggactttgcagctaagagggactctccatgtatccagttactgtgggagactgagagactgtgtcctcccctgtcctcaggcagagctcagtggtggctgctatgcagatactctgtgtgtgttataaacgtcatacaacatggtgatcctaggactctatgtgctccagttactgatactgtcctgtctaatctgagcttcactaacagatcttcataccgcttcctaagcaataatctgaatcaaacgttattttatttttgtgtaattgactttatattttttatatattctctagtcagttttgggaagagggttattattctgatccccaaatacaaatcatgcccttggtattttctaatatgtccaatgtcctttttcatggtggttttgtccaggagcatagacctgtgggctttttctaagctgagaaaaatgagacctttcctctttcactctataaattccagatgcctccgaaaaatagggatgctctaaacgtgatttccgagctctacactggctgccgttgtccttagcgagcgtgttgagtgatataaaggcttgtgacatgtgccacggatcgtgtgcatggaaggccttctcttgttgcacgggcagaggagtcaggtcatttaaatgtcattttctgatgtgcgttcatgtgaaccatgggtcggcatcttcttaagtgatctgtgacatttttaatgtttctatttcatacgtgccttgtgattgctgctgctgtgagggtacactcctgtcggggaaaagtctgttttggtttggtttttaatgaaataaacctccaagagcttacattcctgaaaaggagtctgtttggatagcagcttgctcagctcagcagtctcttgattttaaccttcattttcccctgtgtgtttttcttttgttttagaacataactaaatttcttagtcccttcttccagcccaaccaaagactatgtactatctcaaaattcgtaggttccttctgattgaacactgtctacttcggactataagaaggctggagtggggccagaagacttagctccatgggagagttcttgcctgccaaacacaggccctgggtttgatcctcagctggggaaggaagcttggctaagtggcagggcagttgcctctaatcgctgggaagaggcggcccagaggcagcacagcgccttaggtgctggccaccatctctgttggtgtactcccccagcttcccatgaaaccatcccatgtccttcaccatggagcccacacagaaccaacatgaagttcaagcctcaggatccctgtggcccctgggtcagacccagttaccatgtcgt

SEQ ID NO: 21987 - DNA, 1167 bp, Mus musculus
tctctgtggctaagtgagcatccacaccgtccccagtccccagtattggtgtgagactgagcaatagaaggcctttctgcaggcaggcagcagcctctctcagctaactcctctgttagagaacccacatcactgattaccacaaatctcttgtttcctgtctcaagaatactcctctaaagagtagtttgaactctgcccagtctcaaccttcaggacaaacaagcctttaactatagccattggacgcctgctctctgcatgctaaccaatccatcccgttacttcacctagccaccaccacaacctcacttctcaaaagttgtgtgtgtggtattcccagtcaggatgatcagtctgtgcgaagagggcaccccatctctgtatgccactcgggccgctaaccccagtaccctgtgccaccaccatcccagctgcagtaggacctgaaacaaactgaccaaatgggcaggaggaaggtggtatgcccacagtcccacgcaacagccccttccttggcccactcttgacccaaagtgaagctggccatgcttcctccacctgacatacacagggcgcctgagtaccaagtacaaaaacaaccctgttcctgcccatggctgacccaagtgaacttgggagtcagagtcggggtggggctgggaggaggtaggtttttcggttttctttttgttttttgttttgtttggggtttttgttttgttttgttttaaataaaactaatcggttcctgaagaaaatagaagtggagaaagtgaaagcactgcttgccgatggaaattgatactttaaaaagggtttggctagtagatcatagtaaatagttacattgtacctggccctctatcagccgtgtcaggcaagatgctgatgcagcgttactgatgaatctggtggcctttctttttctgggcgtggggagcacaggttactgcatccagtttgtgccggtagaaagccacttggactcacagtgagggaatggagccctgtttgttccctttgccacactaacaaaccacacatttagtacctaaaacaagtttatttactctcttagtgtgctggaggtcagaagtcagactggggcagacttccccctgggaagagtcactttgcatttccagccactggaagcccctgctc

SEQ ID NO: 21988 - DNA, 1167 bp, Mus musculus
tttccatggtaaagtgtctcaacctgttctcacctgtcactccgggtgcttctgtcacttctcaagatttctagtcacttggcttgcttgtagccatcttcaaccacatattttaattgtatcttctagtggctcaaggaagggttgtaattagaagcatcatccaagactggtctgttcccagctctgaggtttaactattaaatgccttttctaaaaagcccttctgagactggaatgggagtccggggatgtgccttgaagaggtagagctactatctcaaatcaaagttctggtatttgaggactccaaagtctgtgtgctttcagcagctgatctaagctatcaaagtgtctgagatggatagattgtcactgtatgtccttgccagagatacagaaatacttctaagcgtttgagggcctcttagcctggctctatccagccaggactgcagtgtttttaggagaatataagcatttgcattcaaccatccaggaaagtaagacgacgcttctggaattatctttcctacagcgtgtctccccactgataggacgttttgttcccttcgctgctgtagctgctgctaactgcattaacatcccactgatgagacaaaggtaagatgaaatatgtgcactgggcaagagaatagagtttagaaaggacgtgaattctgagctctgctttgaaatactctggaatggctgacccgttgggttttcacttactgaagtgggccgaagcagaggtgtgtctctagcctacaccctctgcaaagagagaattctgtatgatcgagaccagagagaaaaaccaagcgttccttgagttttccttggaattttcttacggtgatttcagtctcttagaacggataggaataaaaggagaaaaaaaagagtgcgcatttatggatggataacaaaccaaagcaataacaggaattgggctcccatcgttaggatccaaagctaatgaatatcccacagggctgtgttgcaatgacttcactgcttgagttcactcaaaaacagtatgtactgtatctatttctgatttagaaagttgttcaaatctgtacaggaacatagaaatcaacctcgcctttgagctggcatatccacccctcaaatctatcattattgaaaggtacatccgtg

SEQ ID NO: 21989 - DNA, 1919 bp, Mus musculus
aacactggttatcagtcattggaaaggttacctgtgcaaccaccagattccatttctacttctcttccccagaggtctcagcaatgaatcgggaagacacgaaaggtctaagactaaatatccaaattataaatactaaggaaactttgtttccagtttggcaatgatccagtctaaagtagaacctcaatttaaaagattgaggttcagagcatcaacactccatacacctccccaagtcagccatagactgttttttttttcagaagtgaaaccatagtccctatatgcctcttttttccccctctttttttttccatccttatagaattctccctgctttcaggaagatacaaagaaaccacatgaactagaccagcatctgtgaacattgtgctatgttccaccttgtttgaaaactgtgaaacagtgtggcatgccaacatctctatagtgatttttacacgtgatgtattcggtgtagctgaggtcactttggaagtctgtggctgttccatgtcctaggcaagccacttgttaaccctgagtgacaatctttataaatcattgttaattcagagatttgtacgtgagaaaacaacaacaaaattagagactatctagtttctgtaggttatttttcccaataatgtttccagatcgaatttcctcatagagaaaaaaaaaaaggtgtgccttgtgtctgtgcttctccgctctctgaaaggatggatggatctgaagttctcagccctcaccccacactgctggaatcttctgtagagctgcctgccaagccacctgaaacacagtggctccctgtgacactcaggcctcagatgagcctcgcttgccttcactgcttctgttttaaacagtagtaaaaaactggcgttcaaggcagagtccacaggtgcttaaaggacactttcagaagaagctgaaggccttgaggtctgcccacccagctgatctcggagtcctggccccagtccatgtgtagctctaagaacatgaagtagctggttgcaagatggaccaactcaccaagtgtcagcccaggtagtgagaaacttgcagtagacatggagctgggctcttttaaatttgttttgtgaagtttcagcctcttaatgcttttgtataggaatactcactgtgtggtttaatcatgatttattaaaaaaaaaaaaaaaagaacaaatgaacgaaaattggcaatctttgctgatcttctaaaaatactttttttttcctgaagaaaaaaaaagccacacgaagtgcaatagggttgtgcggcgactcattgatatttctctgatgtgagatagagctgtgtgtgtgtgactggctagcagctatcagtattagcgaggtgtcttgccgatatcagagtcagtgtgtcatttcagtttaactggatgaactgtcaaataaagaaatgcagaatgaaaacaaactgtctcttacttgtccgtgaagcgtgcggcttgggtgttgtaacctgctctgccttcatctgagtaccacaaataacccagttgtaacatctcctgttggtacctgtcccttagcaaatactatatctctgctttgggttgctgctcttctaccctcttgaactacacaagagccggacccctctctccacaaccaactcagagacgcccaaaggggacccgaacagtcctctgaagagtagggttttgtccagtatatgcatattagcggtaataatatcattgataacttagacacaggtgtaacagtgataactgacaataaggagacatgagctataacaatgctctgttatttaaaacacagggattgtttatttctggacttttccgtgtaatctttttttaatcatgtggataatgaggaaaaacaaatgtacaaagagcctgctgtacgct

SEQ ID NO: 21990 - DNA, 1409 bp, Mus musculus
gtgaagctgtttggacttcccaatgactcctgagagggccgacagcgagaggagagaggaggcaggaggccgggcggactatttgggctacctaatgactgtacctttcagggagaggaggcctgggcttcctaatgactcctgagaggacctgatgggagaggaggctgggtgcagaccttccttttgtatagttcaatgtagtcttttggacttgtaggcaccataaatgtttataaatgtcataaatgaccaaaaaaaaaaaaaaaaaccaaaccaaaaaaccaaaaccaaaacggcccaaaaatctttggtcaggctgagtgtaccttaaccctctctgtgatactggagaactgagctagctttactgtggtgagcaagtgccccacattagctccagccccagccccagccccacctcctgggttttgtgttggtgtatttgtgttagcagttcccatccctccccgctgctgacagctagctaatgaggattttgcaagtgcaggtcatggtctgttttgttttagggttctctagaggaacaaaactggtagactatctgcctaagaacagaactgatgtggaacatctgtttgtctgtgtatatatctgtgtctccgtatgggattttatcagagtggcttagaggctgtggtctggatagtcagtccagctgtctcctgatgggaaggccaaggatccagtagttgttcagttgttcagactggatgtctcagcagtgttactctggtgctggagtcccgagggatccctggagagctgctgatcgtggtctgtgttggaatcctgaagaagtaggttctgtggttagcagcagaggaggccccggcagcagggtagatgaaccaggcggtgagagtgagggcaagcaggggaaaagccatagcttgctttttccctgtccttttatataggctgccaccagcgtgtgtgtcccagatttagggtgggtcttcccacctcaaaggatcaaggaaaatctctcacaggtgtgccctgctggttgggtttcagtgtttccagatgccacagtcaaagttgacagccaagatagcccatcacttgagtagcatagcatgccctctcctgctgggagggccctgttttctggatttgaccatggcagagtttgttggacatctgcttaggcggtactggtttaaagggagggtagcagcatagggatgggatttttgaaaagcaattttgagaacagagcattcaataaaactggctttcattatgaggtgtctaaagttactatctttattccaggaagatactgcagttttaaattctgttttgatcttaaatttgagagcttatggtccagtctaacattcaaagcaagattcctgaactgcactgctggctgctgcggt

SEQ ID NO: 21991 - DNA, 1184 bp, Mus musculus
gttcttccgaaggtccagagttcaaatcccagcaaccacatggtggctcacagccatctgtaacaagatctgacgccctcttctggagggtctgaagacagctacagtgtacttacatataataaataaataaatctaaaaaaaaaaaaaagtacactgaggctctccacctccggcgccgtagccatcatgaatgaaccatccagaccaggaagttcatgaccaaccgactgcttcagaggaaacagatggtcattgatgtccttcatcctgggaaggcaacagtaccaaagaccgaaattcggtaaaagctggccaaaatgtacaaaaccacaccagatgtcatctttgtatttgaattcagaacccacttcggtggtggcaagaccactggctttggcatgatctatgatcctttagattatgcaaagaagaatgagcctaaatgcagactcgcaagacatggtctttatgagaagaaaaagacctcctgaaaacagcgaaaggaacgcaagcaagaacagaatgaagaaggtcaggggcacggcgaaggccaatgttggtgctggcaaaaagaaatgaaatacctagcagtgagtggagattggatacagccaaaggagtagatctgcggtgacttgatgttttgctgtgatgtgcagatttctgagaggacaaataaactaaaaagcttctacaaaaaaaaaaagtacactgagaaagccagggagagcaagcctcttccgtgctcagccttcagtccctgcctccaggttgcttccttgaatccctgtcatgaacttcctcagtgatgcactgttgcctgggtgttttaagatagaataaacccttccccccaccctccaggttggtttgggtcgtggtatttaccaaagcagcagaaagtaaactaggatacatatctcccagggactccatttccaaagaccagcacattgaaggttaaggattctgtgtatgggtttgagggaaatgcagactttccgtccccaagcacattgtgaactaaacataaagacagacatatcttactatgtgatttttggatcatctagatatttagatacgtctatatctagatatagagtaaatatatttactcactgaaaggctatgccagtctaggtcattgcctaagtcctggtctctctgtgcttatactt

SEQ ID NO: 21992 - DNA, 1344 bp, Mus musculus
gccccaacaaggagatgacatcacggtgctggatgtggagaagcagatcgaggccttccgcagccgcctggtccacatattgggagaacctttagtcccccagctccaagacaaagtgcatttgttgaagctgctgctcttctatgctgcggacttgaaccccgacacagagcctgcttcagagcactgaggcagccagacttctaagcactgcgcaccaagaatacctcctgactaccgccagctacttagaagccctgaagtatgaacagtagttaggaacatcataggaccaaacctatcttatttatcagtaggttgtaataactttgtaactcttcagtatatattttttttataatctttatcctagcctattcaaatttggcttaaatatacaaggtgtatatattttttattaaattatttatctatgcttttgaaacaggcagtgatatgcactatatgtccaacatttccatgcaagatgtgaaagaacccttctgcacaatccatcagtgttacactggtcaagatactgacggcccgctcggcccagctctgaaaaaaacattagtttttcctgaatagaccatgttctatactagactttttatattgcccataaatatgactctgtggccagtttattaagtctaacaaagcaggcaaagaaacaagagcctgtcaaacctgtggtgttaataagatagaataagatgtttacagtgcttgggctccactatggggcaggcagaatggacaagacagacctgggcttgagaaagtagtaaagatttttatttgtcaatacaagataacacaaataaattaatttttacaacaatcttagactccagggcttctctctgaggttagctcattatgtaaatagcctacttactatctaaagtgatcgagcaatcatatgttgagtgttcgagaccaacaggctgtgaacaatgaggagacacaaaagggcacttccttgcctcctttcctcggtaagatgtgttactgaacaaatgaggctaacttggtggaaaacggtctcaatgttatcagaatacagccaagttcatgtgaacctgaagactatataatccagccatacctatcgtcttctttaacaaaaccttaagctggtgtggctgtgcacaccttcaatcccagcattggacggcagaggcaggcacatcatctctgggcatctactgattgagttccaggatagccacagctacaaagtgagacactgtctcaaaacaaaacacacaactaaaaaagcctactatccaggaagtaggggtgactcccgctcagtggtagagcacttgcctagaa

SEQ ID NO: 21993 - DNA, 2160 bp, Mus musculus
gcagacaaatggagcctctttggaccacgacccctgcagaaatctgattctggtaaggtagcttcagaaagaccatcaaggcatcaggctactgtgtgggctggggctataatctgttgttttccttggcaggttttgctattcaggcttacaaaggtgccccaagaccctctcctatggaggtgatgcgtgcccaggccacacgagtaggtgaagatccagcaactttcaaaccaccaaagatggatgtcccaatggtagaaggaaagaagcaaccacttcgaacccataatctcaaaccccgtgacctgaatgtgctcacacccactggcttctagaatgctctgtccagggtctgcaacttccctgggctctgacttaggagtgatgtggctaactgaggcctgagtgagtgtgtagattgtccttgggtgagtgagaaaaaacactttgcattgctttcaggttggtggaaaatgtcagtggtgtagtgttgaggacctcactatttttttttttaaatcatttatcctagagaaggactctgatccttgctttcctaggtaaattatgctggagtgcttccagtactaaggcctcttgattctttccccttgaacactatgagcactgacaaatcatggtagaggtgcccaccaaccagtttgcacagtggaggccacctgacatgcattagcctggacttctctgagagctgggcacagcttgcaggaccctggctttctaagctgaaccacagattgttcttccacccaccctctctttttctttttctttcaagacagggattctacgtgtagccctggctgacctagaattagctctgaagaccaggctgaccttgaacttacagagatccacctccctgcctcccgagtgctggagctaatggggatcaccaccacagcccagctcaagttctttctcttggttagtccagcacaccactttgttctcttgggccgtatctgctgtgtcacaggacaaacactaggtcttatacagcccccttttttccccctgaattttaacatgacattaatttaacttctaattcagtatgatgctggtttcatactggcaaatggttccccactctaattccattactgaagattaagcccaggcagggacttgctcattctaggcaagtgctctaccactgagcgggagtcacccctacttcctggatagtaggcttttttagttgtgtgttttgttttgagacagtgtctcactttgtagctgtggctatcctggaactcaatcagtagatgcccagagatgatgtgcctgcctctgccgtccaatgctgggattgaaggtgtgcacagccacaccagcttaaggttttgttaaagaagacgataggtatggctggattatatagtcttcaggttcacatgaacttggctgtattctgataacattgagaccgttttccaccaagttagcctcatttgttcagtaacacatcttaccgaggaaaggaggcaaggaagtgcccttttgtgtctcctcattgttcacagcctgttggtctcgaacactcaacatatgattgctcgatcactttagatagtaagtaggctatttacataatgagctaacctcagagagaagccctggagtctaagattgttgtaaaaattaatttatttgtgttatcttgtattgacaaataaaaatctttactactttctcaagcccaggtctgtcttgtccattctgcctgccccatagtggagcccaagcactgtaaacatcttattctatcttattaacaccacaggtttgacaggctcttgtttctttgcctgctttgttagacttaataaactggccacagagtcatatttatgggcaatataaaaagtctagtatagaacatggtctattcaggaaaaactaatgtttttttcagagctgggccgagcgggccgtcagtatcttgaccagtgtaacactgatggattgtgcagaagggttctttcacatcttgcatggaaatgttggacatatagtgcatatcactgcctgtttcaaaagcatagataaataatttaataaaaaatatatacaccttgtatatttaagccaaatttgaataggctaggataaagattataaaaaaaatat

SEQ ID NO: 21994 - DNA, 2057 bp, Mus musculus
gtggaaaggttctgggtacagcacagcaagtcctcgctcctagtccttcattatcctccagcccctgctcgctctgtctgtggccttgtgttcctgcctttctagccccggggccattatttttaaagggagatgatttccatgtttttttttttcctaaatgccatccctggcagtgccaaacctgaaaaccttagcacagaatcttctcgacacctccccactgttactacagcctggccttgccagtctttactgaccacaaagtgcagttcactgaacagggtgaagggtggttttgcccaggtctggagacaacctgctgcttttgtactaactgtgccaacacccatgtttacacaagtctagagaaggaaggagccggagtcctggaacaagactggagctagggggttgggggggggggggtcagcctcagaatggcattttatttatttatttatgtatttatcaaaggaatgggccaaagttctaggttctgtttctaggtgctgtaatgaaaaccctaggagactgtcagaaaagctgaagcttagaactgtttggaattatgattgagattaggtaacctatagctgtcaatggagacacagaactgtagctttcccctcccctcccctcccctcccccaaactggccttgagaccataactggaagcaagtacctcaaggagacctagtactcatggtccaggacttaggataggactagacgagccatcagaatgactcttcctgtgcccacggcgggcacatcaccaagccttctgggaccatttatttgccagccaaaaacagactgaaattctgtattctctgaagtgaacattccacgactgtgaccgatgcaaagctggaccccatgttgaccctggtgcaggcaaaagagcctcggtctgccagggacactgaatgacaacagcactgttgtttgagacagtgtcactctgtagctcaggctggccttgaattgatggcacttgtccttcctcagcctcccgtgctgggattataggaagcactgtgccatcacgcctggcgcattcagtctgctgtttgagaatcactgtgctgtttgccaattgtccaacatacagcccaggaagtggaaagcgtcgttaacgtgagcacaatcatcagaaggggggcgggctgtgcccttggactccagcccatgagaacagaattactacaggacaaagcactctcattacaagggattgtcctgcttttgtactaaatatttaaagaatgactaggattttaaagtagttgaaattttgttggacattgtatgtctgttctgaggattccgcctctccccagtgctaaagcttaccttacaaccagacttattgagagaatttctttttcctaactgaaagacctttgtctaatgcgttttatcatgtacaattgtcatattgtccaaggggtgggggagtgttaagaataaacaatttcactgtgtctcctgaagtgactttacttgaggctagacctggtggtttatgatcccagctgctctggagaacgcacagtcaatcaggctggatcagtaggtaaagcctgatgaccagagtttgacccatataaacatgggtagagaggactgacccctcaaggcaggcttcccagtgctagaaaacaaacactctctgggcactctgcacctacactagtttaggaggaactatcaacacaagccggctgcaggacgatgacatccaccccctgccacagggccagacctcagactttgattcgggtcttggcagatactttactccacaacctcagaggccaaagtcctttctggcaatcaactttctcctgcccttatacctggaagatgatgctctccagcccatgagctagcagcacggggccaacaaggacaacttgtaaagtggagtgtcaccagctctctacggtgaaagtaacaataaatgccagaatggcattattcagggcatcgtcctcatcgtgaggacggctgatacttacagttcctcagacagtgagctccagtcact

SEQ ID NO: 21995 - DNA, 1164 bp, Mus musculus
cctcaggactggagttatagatggctatgaactgttttgggtcctctctaagagcagccgctgaaccagctttccagccctctaatggcttctgagatgagagagccggaccccagggatagattggaagtggcacactctatttaggcagcgctaggatttggatttgagcgtctgcctgtgtatccctccacatgtctgtccttcctttataggccatggcccgggatgagaagaattactaccaagacaccccaaaacagatccggaataagatcaatgtctataagcgcttttacccaacggagtggcaagccttcatcgattctctgcagagtaagaagatggaggtagactgagtggggcacacccccagacctaggtctgctggaacaacgaaaccaaagccaggctgtaaggcaaggggcgtggagcatcagtgatgctggctaagtcctgtggaatcgggtcttacgtgccccctcccccttccttctggagaaggaactcttcattttgttttgttgttttttgagaaagagcatctctctaatagccttagctgtcctagaactctctctgtagaccaggttggtcttgaactcacagagatccacctgcctctgcctctcaagtgctgggattaaaggcgtgcaccaccaccacctggagaaggaactctttcaaggccatggtttgtgttctgttgggagcttacagaaagccggggcctgctgtttcttttcagagggatgctctgtttcagcttgttctgtacatgataaaggaatattttacccatgtaacatgactaggtgggtttttgtttgtttgtttgtttgtgactgggcttctcagtgtagccctaggtgggattaaaggcacacttgtgtaatatttttgtgtttactgtgcccagctaagctctggagttgtcccaggaaaagctaatcttactagcgagcggagatggattatcagctcaacagcaagtactgcagtcctgggcttttgtaggcgctgccttgccttcttcctcgtcagtgctcctagtctcggtttcctccagacactctccgggaggcctgggctgacatagaagggtaaggagccaggtctctgctcactgtggattgctttttgttggccatggcttaaatcaaa

SEQ ID NO: 21996 - DNA, 3107 bp, Mus musculus
attctccttgaaggaaagccctgaaaagtttcagattgaagccaattttccaagacgggtacttccctgtgttccttcagaggaatggcccaaccccccaacactgcaggaggcgggactcagccacacagaagttctctttgtccaggacctgacagacgaatgacactttactgcctccttctcccaccccaatccctaaaagaaacggaaaaacaaaaacagagaacaagagataaattcatattattattataatacaatattttttttaaaaacactgctgcatcctatggaaggatcagaaaccatgctgcctgcaagagtcacaacctgcgtgcatccgtgtgcagaaggtcagcagtgagcattgcctgctcggcagacagcagactcgccttcccacagtgaagagacggcggccctcgtggggaaggagacattcccactgttcgcagtcattcttgcttttgtagaaagtacaaatgaaaccctccagcagcagctcctgaggacctgttcctcccacttgtggaggaagggaggagagcccggaacagactgcccacagtttatgaataactttgtttctgtttgctttgtaatgataatgaccaaaggaatgaggctgacttaggtgtatttttttcccttagatttgataagagccaatgccctgggctccgaggcgaggccggggccgcgtaataaaggtgccctgggctcatttgcgcatcctttgccactgttcctctccaggtggtcccagagtggtcatttggtttggtacagttctgccacttgtgtatcccatttggagcaatgagaggaagtctcggattgtgacccacaaaaggctgtgtgtgggtgtgtgctcacctttacacacaagtacagcttttccttggcatctgtaccaggtggtggtaaaggggtctgaaccaaaggctagcagctcctggttcccctctggctgtactgctgctcttcccagctcccctcactcaccaagcttggtgccttccagaggactagcggccccttcccgggcccaccgctccacctgtggatgcttggcctgcttcagtgcaagtgtgataacagtgtctaaggatagacccattgcagacatggaggtgcactgagaggcagaggcagcagatctctgaattccaggccagcctggtctacagagtgagaccctgtctcaagttttgagccaggaactttgaaagagaagttggcctcccagcccatgtgtgttggaaagcacattccgtggtaccagagacagtttgcagccttgctcttgccgtggtgaagcagcaggagccccccccccctcgaaatgtctcatctgtgactgaatgttgggtagtggatatgtggttgatccacgtgctcccacatgccagcgcgcactgataagtattccagtgtggactagctcggctggtacaggcttggcacactgcagctctctgaagttactgtagtcactaggagacagtgggcattccagtcgagagaaagcatagcttgtgttggtcacctccaagagccctctaaagccactgctctctaatagtcctgtgcttctgtcctctgctgctttccattgttagagggaacatggtgaggacggaaggctcgtgaagccattcagaaaacccatgactatccccgaggccctagcgcagggccctgaattctaccttgggaaatgttagcgctgctaggcctgctggcactacagtgaggttgagaggaccctcagatgaagtctgtcttgctgacagtgatgcagagggacttccccactcccagagcctccctcccagattgtagtccctgcctgtctgtctgcctggcacatgggcatgtggactgtgaacgtatcttgttcacagctgcttggagaaattctgatttctccctcttaatctctttctgtaatgtgtaccttttaattttatgccctttgccttttgataactgcaaaaggatactagatgccaggctaataaaaatagggtcccctgttgctacaactctgagggcagcctgttgatgtcctggaggcttgtgctgaaatacctacccagctctcctcatctgcccctcccttagttttgagagaggttctgatggcccaaagtggcctcaaactctccacacccaagactggccttgaactcccctcctgctcctggttcctgtagtgggcatgtgggtatgcaccactgcataggcttgccagtagctgtgaaacacttcagttttcttgctgtacctaggtctgctgtctgggtgccatttctctccctgggtgaactgtggacttcacattttgtccctgaggccagttcagtctgtgactcccaaagacctgtgagcttgaagacacctgtgaccatttgctattgcttaaattgcttccaaaatattctgccagttgttccaaagtcaagtcatggacaatggaaggatttatttccagttctgcccctcattcccctctgaagtggcctcagctgaatgaccatgggggtgaccaagcaaccatacctgagtaagttttacagcctcagtctggtcttttcttcctctgcagaatcgtctgtggcagataggttttgtggggggttttgtttttgttctgtttttctccttgcttgcttccactatgacagaagagaaggcaagattcctgtttcttttaaaacttaaaatagaaaaaaattaactagaatttccaactgatgagttattatgaaaattgctaatggtgccaaggccaaggaaagaatgtcgggaggtgactgagaaggagcagtagcccccagagcacataatcagaggggtcgcctggcgctgagcagggactgccaccttacagctggttggcttctctgtttgtctcggggagaacgcagcaacaaaacatgcatccacaagagatgcagtgcccctcctgtactgcacctgagtagttaataatttcctgaagaaatctagtgtactttaaattttttcataaaggtttacattgtattgtaggttaacattaaacgttttataacaaaaaaattataaaaccagctgtg

SEQ ID NO: 21997 - DNA, 2848 bp, Mus musculus
tggcctgagccggctcctgggtgtctctaggggcaggagtggagattttctccaagtcagataggtgggggaggggaggtcacgcaatggggtctgatgtgtgggtgttctcccaggccaaccggacctgtcccatttgccgggcggatgcctccgaggtgcccagggaggccgagtgaggctccacagccacccacgagatccctgcccaaagctccggaattgggtgggggggagcagggcgtggcccggggaggactgtgagggcggggccaggcctgtcagcgttcccacctgccactccagagctggtgccagggtcagtctggagaagcccctgcaataagcccctgcattgccaagctccaaagactccttccccagtctgcctgcctgcctgcctgcccgccacggagctgcctgagtttccccaactcagtctgcttcttatctgcccctgggtccttcttcctgctggctctgggaggcaggagtccattccccaagtgtggtggctggtgtgatttccccagaccccagacggacaaaggaatagccaccctgggtcaactggtctcctgtactgaaatgacgtgtccttccctgccctagtggggttgccaggtgtgtgggcagggagtagccagagaccatttcctgagttctcctgtttggttccagacagacataggcagtcagctctgcctccactgctgtgtggtgtgggtctgactccccaggacccttaccccaggcacagcgttccagcccacccccaggctggagagtatcccagccaggctccatgagcaaatgggccagggctccaagctggatacattgtgttctgcagtagcctcgagcgatctgggcatgttcttgtgttcctggtggctgcccctccaccagtgacagtgtcagacccatgctcgatcctccccctctgtctttttgcatgaatgtgaggaacagcagtttttgtttattcatttggcccaaaattgcgtgtagggggtgtggatatttaagaggtgtttagttttttattatcttgttttctctttggtttaataggagtgggggcatagggaccaaccgggaccaaatgcccagggggcagagtagggtccggttctgccacaccaggcctccacatgagtgtgtgcggctggaactttatctgggtggctggaagtcacagggcggagtttgggggggtctgtgctcagctgataactgccatgcactgtactgcacatgtccctagagcctaccgggaccgtctgcttttcagggcatctcctctccagccagggcctgtgtcccacctgcctgggtgagtctcctagcaatcctgtgaggacaggggtcagggaggacatgaacctccacctcagggggcccctcccggcctgattcctgccctccaaggtctggaggaggctgtgttccttaccctcctttcaggtcccactcctttcctttcctaccgccaactggggttgctgcgctgcctggagtgaacgaaccgcgtgtggggccggcacatcctagcaggcagccattggcgcctgctgcctcagggatgctccaaccaccctcgttctcaccgcagccctgcccccaccccagcctgccaggccccattggcctggtcccaccccacaagaacccaaagtcttactgtatataactccaggtgatgtttctatatttatagcagtgttgaaaatccacgtgttttacacagagaaccaccttctccaacccccatcccttcctcaccccaaaaaaggttttcaaacccttgtggttcctggggcagcagaattggctcatggactgtgtcggctgcagtgatgattccagcaagcagctactagggggaaatacaccttttttgtttgtttgtttttaatcatttaaaaaagatttatgaaacaattacttaggatgtttgtgatttgccgaccttgctgtagatgccatgttaccaatgatttcctgtggtgggggcttggcattgtttactctttatttaccaacttctggcctaggcatgacagtgggcaccttcccccagcactgctgggcccagcgcctgtgttctgtgttagaaaagttttatatatatatatctaactaaacacacacacacatatatatatatatataaacacatgtgatttgggggccctgttccttgcacatcttacagttacctcatttttcccatgtatgtatttgagaaaatgctaatatatagagacaaatggttcttaaagcttaaatgtgtggttttttccatcccattggactcacattggtttgtagcatttaacataactagtatgttgtattatatatgtgtatactgattgaaatttttaacagatttgtactttttttaaaatgaaagttgctagttctgcttgaccaagtagtgcaatcattattttttttaatattgttgctgatttcagagggatattcactaataaatgtatgatgtatacgagtgctgcccaagctgcctctggctgctctctgtgttctttccatgagaagtggggaatggggacgtggagactggtcatgctcagtggggtggcaagccatgaactgaccagaaacacctgccttgagtggaaatgggttgtgttggcaagttacaagattccatcgaacaaatgtgaggaggacacctggtcatccgaacttctaggttgttcttggcattttgaggtgatctcatgtagcccaggcctcagattcaaatctgtagttgaggatgaaccgtcttctgtctccaaagtgctggagttagaggcacgtcccctcacacagg

SEQ ID NO: 21998 - DNA, 1103 bp, Mus musculus
agcctcacggccagcttttcagcagctggcatagttcactcggggctctgccctgtcccaggctcttgtgccacagactcgggcttgccatggccacatctggcaagactagcaagtgcattctgggaggcgaactggggctccaccaggatgccagcaagcatttgtggagtggactgggatggaaaggggggtagggagggaaatctgtctgggcttcttctcctgtccacacagtgagtctgaaatgcctcgatcctcgcagggcttggccttgctcctgaccctcaggggagtccatgaggaagccacaacctgcaactcagtgcctcacctctcgaggtctccttacccactcagattcttaggagctcaggcctgtttactggggggagtggaagctggctctcccagccagccagccagccagccagccttctcctttgggtgagactctagggttgggcctggtttccagctgttccctctggactcttctctccccctagtggtcttgctgtggtgcccgagggcccaatgactggaacctcaatatctacttcaactgcactgacttgaacccaagccgtgagcgctgtggggtgcccttttcctgctgtgttagggacccagcggtgagtgggccctgggaggagggaggatctcttagcagtagggaggtgcatatcagtgtgctcccgtgtccgtgagagaacgaagaagtctggagtttcactgcagttgagcagacatggtaaacccaagcttccgtttgcttttctgtgaaggaggggcactagagttgaggacccgggtgagcccgctggtattcccttagcgtattgctaatagcctgtctcccctcaggaagatgtcctcaatacccagtgtggctatgacatccgactcaaactggtgagaagggtggggacagggttgagggtagcctggagtacagggggtgacatggggacctctcctaaggtcttgtggaaaggtctaagggcttcttcagggtggaactggccctgggtaggtttgaggtattgggttgctcattccacttctgtggagcgcctgctgtggttggcaccgctctagac

SEQ ID NO: 21999 - DNA, 1431 bp, Mus musculus
tgtcagggagggcactggagcaggggtgggctgatcaaggtggaagaggggcgggggatctgagctgaggtgggcaggccgagcttggtctcgtgtctcctcaggagctcgagcagcagggctccatctacaccaaaggctgtgtgggccagtttgagaagtggctacaagacaacctgatcgtggtggccggggtcttggtggggatcgccctcctccaggtacagccttggcttgcccaccctcctcctgcctgaagctctttcttcttcctcacctgctctctgtcttgcagatatttggcctctgcttggcccagaacctcgtgagtgacatcaaggcggtgaaggccaactggtgaggctgccaggggtgatggccatgtgcctggcccgtggggctctagtgggggcctcccaggacactctgcctcgctcacaatggcaaggcctgtgggacgtctgttacgacctgagccggaggttttgtgaccttggtgctcattacccactgaggaaaccattggggactagactggggctgtttgccacagagctctgtgtcgggggtgtgtacctgtgtgtgtgcatgcacactcgtaagtgcacctggagtctctaccctgctgctgtgaggtggtggcccttccagagctcgtggggggggggcagatggagggtagggcaggcacctgtgtcccctggtctactgtgggatgtatctgtgtgtggcttaggagcctgctgtctcagacctctccatactcaccatgactttgagcctgcctggagcttgtcttggcctcagtgtcacagcctctgaaatgggtccaagaattctctctctcgcttgcctctcaggatcacacttggcgatggctacaaacgactcaataaacaacactttgaaaaacagtggtggtttatgttcaccgtcttcgaaggttctgttggcagcgtggcctctacagagctctccagtgaggaggaccctggcctgaatccaaccaaggcctcttaggtctgggtagactatgcatttgagacagcctttcaaacaggtatattgccttaaaggtcacatctcctgttccccctgggcaatggctgtgtcatctacagtgggacacagaggcagctcccctggtctgttctatgtacctgaccgctagtatctgagagttgacctttccaacctctgtaggttactcctggcatacacctcaatgctgttatgtctcagcctcaagaaaggcataaaggagccgggcgttagtggcgctcgcctttaatcccagcactggggaggcagaggcagaggcagaggcaggcggatttctgagttcgaggccagcctggtctacaaagtgagttccaggacagccaggattacacagagaaaccctgtctcgaaaaaccaaaaaaaaaaaaa

SEQ ID NO: 22000 - DNA, 1166 bp, Mus musculus
tagaacctatgtcaaataggctgggtgtggtggtggctggagagttggagacaggtggatggataccttggggctaagcatccagcttagtcagtgaggtccatgagggaagctgttttaaaaaaaaggtgcttgtcaccaccaagaaagaggacctgaatttgatcctcagaaaccacatggtggaaagtgagaactgacccttgcaacttgtcctttggcttccacatgtaccccagtgacatgtgcatccttccccaaagaaagataaatgtgaaacaaaacaaaatacagcgacgcccaaggtagcaatggcttagtgtggtggtgtgtgtctttaatcccagaggaggagcactgtgaactgggcgccagcctggtcttcacagagcgagactctgttataaacaaacaaaaaccagaggcggctagagcttctgaggaagggcatccagggttgacctctggcttccatgtaaacatgcacaaaataagtaacaaagggaaacagacgttctcctgtgtagtcagatgtttcctgtgtctttccagtcttcccaaggtctgtttgttgaagaaacctctgaagaaggtctgaagagttctgaaggagacaactctgtgcccaccacgcaaaggtgaggctgtatgctgctgtgggtctcaggtctctttctacagtatgaggttaaggaagaggaacctcttgaaagattatataaatggaaaactggccagggaactcttctctcctttatgtgctgagattggaaatcatttttagctgtaagtttgcaaacgtgtatctcttagaagcctgggagaggttttcttacccactctagtcatcttagcataaatctcacagtttattacttgctgttccctaatccatctcagcttcctagactgcttctttatggctcgccctcttttctttcttttttgttttttctagttatatttcttttttcactcagattagcatacagaacaataagtttcacgtcatcttcatatatttgttccgttgcgctcattcacttgcctccctcatggctcactgtcctctcagtgtcccctctcctgaccagatatttccacttttgtttgttttctgagacagggtttctctgtgtagccctggctatcctggaactcactct

SEQ ID NO: 22001 - DNA, 1149 bp, Mus musculus
ttttgtttttgttactcaaatttggacacagtagttataatggctaggttggcttctaccttgtgatctttctgcctctgtttcctgatgtgctgggatccactgtaccttactaagagtattagtatttttttaaaaaaagatcttttaggtaaactgttactgaatacttgaggaaactacttgtgcaaattaatatgtaaggagccaagataaattgtttttaatgctattgaaatttcactagcattttctgtgtgtatatatgtacatttacatatgtccaacacttatatagaaatgtatatacatacatgtatatattcctttatagaaaaaagtaaaaattttaatgaataatagaaaagttctaaagtctagatttatttcccttaaatggctgtcatttgctcttatatgaccaaattgaataatctctagattagaaacttactttttgagtaaatattgaacttgcattttaggtaaaaggatgccacgaaggaagaaaaaaattaaagaggcctctgaaagccagaacttggagaagaaggatctggaaacaagcagttgtgtcagtataaagaagaagcgtagacttgaggacttactcatagtgatatccgatagcgatggagaggtcagtatttgacatggaattgtgagtctcaagctaggcctctttacgcatacacacaaggctttgttttgactgtaccttcctactagcttgctgaattcatttggatcttacttgattttcttttgatttctaaagggaattgtggattatttaaaagcgcgtgtggtcatattatttggctggggatgaatgataagtttttggttttgtaatatgttaacccaatgtgatttcagaactgttagagtaaaatcaaaagaaagtgtaatttgtgtttgaaaagtaagagaaaatgtgacagcttcctgggatggattccaggcttcctacatgcgagggactatgctgcctgcttggccaagaacataatgttactgtggaaaggcttcgaggagagagagtctagataaacctcccctttatttaccatttctctctctttcttttttacctgtgtgttagatcagatacagtacattatgaaccaactcagagtgtcttacatc

SEQ ID NO: 22002 - DNA, 1817 bp, Mus musculus
tgctgtggtgctatccctcccttgacctcctcaagaagattctgggggaactaaaaaggaatttagaactggtgcaggttctacagagagcaatagggtccccagaccctaacctgagaaattccttctgggtttgtgtcctgggatccactgcagtgggtttatacataactgtggatggagcaggtcttccaggaagtattcctaaagcttgtagagataaaacagcttccttgttagtgtcattgggtaccaagtagagatggggcagggcttaaactcttgttctttggtcactcaaccaagaaaaaaaatttcttctgtgagtcatgctgtaaccccagggctgaggttgatactgctatgacatccccacacagttggcccccagtgtccttaataacaatcttacccaggaaaggtctccctgctgccctaagcccaacccagttcatcccccagctaagggattgattcttgagatagtcactctggctactgagtgggggactgcgaagaggccagtgtgaaaactgtgtccatactgctgctggtctccagggcactcccttcagggtagatgtccaggatgttgtcttaagtgcaggatgtgtgagtgactgggtggtagtgctgaagacaggtgtcctttcccactccacttaaagagctgtcggagttttccttgaagtcctcctaggccgactggtccttgggagagccttttatttgactcataagtaacaaggcaaagagcgttatagcttagaaactcatgcagatgggccagaccaagcaccaccagccccaggtccttgtagcacactgctctgggcaccagcggcccctagctcctgacttaagctcttgactcctggcattggttctctgctttcagcttcccaactgtaggcctcctcagcagtcttcctagaagtctgtgccagaactggtgtcagaattagtaaagagcatgaagtagggaaccaaagggtaaggccctgaatgggctgactgaccattagcccttgtcttggaagacctctgtgtttaaatggattcaggagtccctaccagcttcatgtccagcactgcgagtatggaaaccctagaagtagctcgctgttgccctttggaagctcacacacttaaaaatcatgatttggagagtctcatggggcaagtgggagtgtccaggacacaagcaataacagcgtggagtagaaggctgagagaaatggctggtctctgtggctttgtttcatgtagcccaggctagtctcagatttgtcatctgggaggctagccttgagctgcttgctgaccctcccacctctgccttcctggttctgggatggtgggcacgtgcccccatgtcccacatcagctttcatccatgttattgtgggttgcttggtttgctttggtttttcaggatggggcctcattgtgtagctctgactgtcctggaactcactctgtaggccttgaactcagctccacctgcctccctcccaagtgctgccattaaaggcgtgtgccaccatgcctgaatgagaggttttttaatactatctagtagtcctttatttggatcagtcacaacctagctttgtactgttgaaatcgtattgtttccctttgaggttatcttgaataaagctgctgtaaaaactgtgtcatccgatgtgtgcgctcttccactcagagaaggggatggacaatggacacttcttaccttgttttttttttttttagccagtggttctggtgttgttcagttcgtaagggccccagttcctactaagtatttccag

SEQ ID NO: 22003 - DNA, 3094 bp, Mus musculus
aaactcagatgctaatattgggcagtttcatagaaagtcattgaagaactaggcacggtagtgtgtgtgtatgtatgtatatatataaaactgcaattcaacaacagaaataggattttgttttttatctttttgggggttggcgataggggtaggctgcctggcttcagaaaggggactttgaatgagaacagcaaggttttcaaggagtagtagtggacatcccaatatgtgggaggaggcagatgcaggaggatttttgtgaatgtgagaccagcttgttctacctacataatgagttccaggacagtgagatgtacatagtgagaccctgtcttgaaaaacaaaagcaaaacagaacaataagattttaggtagattctggtttgagatgtgttgtttgtttgtttttttaaatctccctctttttctttttttttccctaataaatggtattcttattttccttttaatttaaggttcctcagaagattttgagtaaatgggaagccagcgttggtcttgccgagcaatatgatgttcccaaaggctctaagaaccaaaagtgtgtcagtagctcagtcaagttggacagtgaggaagatatgccatttgaggactgtacaaacgatcctgattcagaacacctgttgcttaatggctgcttgaagtctctggcttttgattctgagcattctgcagatgaaaaggaaaagccctgtgccaagtctcgagttagaaaaagctctgataatataaaaaggactagtgtgaaaaaggatctggtgccatttgaatcacgtaaagaagaacggagggggaaaattccagacaaccttggcctagactttatctctgggggtgtatctgataaacaggcttctaatgaactttccaggatagcaaacagcctcacagggtctagcactgcaccaggaagtttcctcttttcttccagtgtacagaacactgctaagacagactttgagactccagattgcgattccttatcaggtttgtctgagagtgctttaatctctaaacattctggagagaaaaagaaactccaaccaggccaggtctgcagctcaaaagtacagctctgctacgttggagctggtgatgaggaaaagcgaagcaattctgtcagtgtgagtaccacttctgatgatggctgcagtgacctggatcctacagagcacaactcaggattccagaacagtgtccttggaattacagatgcttttgataaaacagagaatgctttatcggtgcacaaaaatgaaacacagtattctagatatcctgtcacaaacaggataaaagagaaacagaaatccctcattactaattcccatgcagaccatttaatgggttctaccaagacaatggagcctgaaactgctgagttgtctcaggtcaatctttctgatcttaaaattagtagtcctattcccaaaccccaaccagaatttaggaatgatggtctcactacaaaattcagcgcgccaccaggcattcgtaatgaaaatccactgacaaagggtgggcttgcaaatcaaactctattacctctgaaatgcagacagcccaagtttcgtagtataaaatgcaagcataaagaaagcccagctgttgcagaaacctcagctacaagtgaggacctcagtttgaaatgctgttcttctgataccaatggctctcctttggccaatatatccaaaagtgggaaaggagaggggctaaaactactgaacaatatgcatgagaaaaccagagattctagtgacatagaaacagcagtggtgaagcacgttctttcggaactgaaggagctctcgtacagatcattaagtgaagacgtaagtgattctggaacggcaaaggcatcaaagccattactgttttcttctgcttctagtcagaatcatataccaattgaaccagattacaagtttagcacattgctgatgatgctgaaggatatgcatgacagtaagacaaaggagcagcggttaatgactgctcaaaatctggcttcctacaggactccagatcgtggggactgttcttctggtagccctgtagggacatcaaaagttttggtgttaggaagctccacacccaattctgaaaagcctggagatagcactcaggactcagttcaccagagtcctggtgggggtgactctgccttgtctggagagttgtcttcttccctgtccagcttagcttctgacaaaagagagctccctgcttgtggtaaaattcgctctaactgtatcccaaggcgcaactgtggccgagcaaagccatcatccaagttgagagaaaccatttcagcccagatggtaaaaccttcagtaaacccaaaagccttaaagactgagcggaagagaaagttcagccgacttccagctgtgacacttgctgctaacagactgggaaacaaagaaagtggatcagtgaatggcccatccaggggtggggctgaagatcctggtaaagaagagcctctgcaacaaatggaccttttaagaaatgaagacacacatttttcagatgtacattttgatagcaaggctaaacaatcggaccctgataaaaatcttgaaaaagaaccttcttttgagaacagaaaaggcccagagttgggctctgaaatgaacactgagaatgatgaactccatggtgttaatcaggtggtgcctaaaaagcggtggcagcgattaaaccaaaggcgccctaagcccggaaagcgtgctaacagatttagggagaaagaaaactcggagggtgcttttggagtcttacttcctgctgacgctgtgcagaaggcccgggaagactacttagaacaaagagctcctcctacaagtaaacctgaggactcagcagcagatcccaatcatggcagccactctgaatcggttgcgcctcggctgaatgtttgtgagaagtccagtgttggcatgggtgatgtagaaaaggagacaggaattcccagtttgatgccacagaccaagctccctgagccaggtaaaaacttttatctggtaaaaagtgaagagaatttgttgatgttttttttttt

SEQ ID NO: 22004 - DNA, 1123 bp, Mus musculus
gattaattccgtcatttctatttggtgtagtatttatttaaacagtacatatagtaaaactagaacctacagggaggactggagccctgtgtaatgacgaagtggatattgatctctcacttgttttttcatttgtatccaagtgtatctatgtatattacatgaaaacagaattgagacaggctctcttgtaggaagggtgatttcaaattcctatgcagctgaggatgaccttgaactcctgatgcatcagcccagtcagtgtagtccttggtttttgtttatttggttcttgtgttttaaggcaaggtcttgttatccagtctccaacagtggtcttcctgcttcagcgtcctgagtctgtaaattgtactgatatgccaagataacctaggagttgttgctgtggcggtagctattaccaatttgggcacaaaaggtgttaaagaactggtttcaagtaccttagtaattcctgttgcttttcacttacagtgctttgaagccagtcgctcgggaaatggtattgttgaatcacgggctacatctcatttgaaagagttcagtggaggtgagtattgatgctaagaaaatgaaattaatttcatgtataaagttatgtaccagtacaattatactttgagattctgaacacaatatctaaaacccataggaatctatagctatttttaagtcttatgatgttattagttaaatagagtaaaattatatttttagtaaagaactatttgggccagttgtaaaatcagttcctctttaattttttttaagtattctgtcttcagattctaccattaatttcataccattgatcccattttgatttctttattagaaagtgtgcagtgtagtttgagagggaaatcccaaactgtctgactttttcttcacaatttgttttgagttttttttttatcatatctaaattatccttagtttctttaggtacatctgtgaccatcagccagctaccatatgcttgaataagagagcatattgatcctgttccatttattatagttttctctctttaagaaaaattatttccctctttcattctttttctgttcccatcttaatacttcttaaaatccccaacaac

SEQ ID NO: 22005 - DNA, 1102 bp, Mus musculus
actgaggactagcgcagagcttctctctctctctctctctctctctctctctctctctctctctctctctctctctggttttttcgagacagggtttctctgtgtatccctggttgtcctggaactcactctgtagaccaggctggcctcgaactcagaaatccccctgcctcagtgtcccaagtgctgggattaaaggcatgagccaccactgcctgactcccctcttactcttaatagtggttacatgtttaagagccatattttttattttatttgctgacaatttctccttgctggcaaatagacttgcataatgcaccttgttttcatatgtaatttttttacacttgctcttcccccatttccctgctttccgtaaatataggtcgtctgatgcgctgtgtccgctgtcctgtggcataccatgctaatgacttttgtcttgctgctggttcaaaaatccttgcatctaatagtatcatctgccctaatcacttcacccctaggcggggctgccgaaatcatgagcatgttaatgtcagctggtgttttgtgtgttcagaaggtaagttatgacttctgatttgagtggtttcaaagggattgtgcggtgtttatatctgatgtgtattgaagtgactatatgcacaccttagaggagctggttctccttctcccatgtgggtcctggatatcaagctcaggccatcagacttccctcatttctctgaccctcaaataaggtctctcattcaacctgttttggctagcctgctgcactattaaatcctgggttctgcttgtctcagctagccagtgctaggattacagggtaggcctttttcttgggtactagagatcctgactttaattatcaggcttatgtaggaagcccattacaacccactgaactacttctccagtttctcgtgtatccttggtgatttatttatttatttatttatttatttatttatttttagttttttaagacagggtttctctgtatatccctggctgtcctggaactcactttgtagaccaggctggcctcgaactcagaaatccgcctgcctctgcctcccaagtgctgggatta

SEQ ID NO: 22006 - DNA, 1685 bp, Mus musculus
gacagggtttctctgtatagccctggctgtcctggaactcactttgtagaccaggctagcctcgaactcagacacccacctgcctctgcctcccaagtgctgggattaaaggcgtgagccaccaccgcccggctgaaactattaattcttactgccagacattctgatgattgtctggggtagggagttagtataattatttaaacttgaatagataatttttaatgtgtccctgatctggaaactttttatctagaaaatggaataagcttttgcttctctggggccatggttcataaacttcaatatgcattaagagtacccaggtcagcttgtcacagcatattgttagacctgcatagtttagtattctcttgagtgtgtctgaaacatgaccttccaaatggaattggtgctgatatttactgctccatgggtgaacatttttttattttaaaatcaccctcttcatcttatgagggtgaatagtctaattttcgatatagcatacgtctcaggaaatctgatcagtagcttttcttgtgaattctaggatcgaatcattgatgctggtcctaaagggaactacgcacgcttcatgaatcactgctgccagcctaattgtgagacacagaagtggtcggtgaatggagatacccgtgttggtctttttgctttgagtgacattaaagcaggtaagagtcatttaaagattcttctgtgcctgagaccttgacttccaagttcttcatttaccatcaaaatatcttctgtcattcactcagaaagatctcctagttcccaaggatacataaacatgtaaagactttccaggtggtgttggtgtattggtgcacacctttaatcccagcactcaggaggaagaagcaggcagatctctgtgagttaaaggccagcctggtctgcagagtgagttccaggacagccagagctacacagagaagccctgtcttgaaaaagagagagaaagaaacggcatgtggtagttggacatgttttttttaattttgtgaacattggtgttttgcctgtgtatatgtctgtgttagggtgtcagatctcctggaattggaattacaggcagttgtgagctgccttgtggatgctgggatttaaaccccagtcctgtagaagcagaatcagtgctgttaacaacaccactgagcgatctctcaacccacagtttcagtttttgtttttctcattgtataaaccagactagctgtgaacccacctgcctctgctggaattaatgcatgagccactgtgcctggctttgaaggaacttcatataaataaaatcatatagttagttcttttgtaacaagtttcttttatttaacataatgactgtcaggataaaaattttctagtccttaaacttttttcttctgctctcctctgtataacagccctggctgtcttagactcactttgtagactaggctggccttaaactcacagagatctgctttcctcttcctccttcctgtgtgccaccatacctggtaatctttcttttattttaatttgagacagagtctcactatgtaaccatggctggactagaattcactatgtagaccaggctggccttgaattcatagcttctgctttctgagtgctgagattagcattaatattaagtaccccaaaattggcct

SEQ ID NO: 22007 - DNA, 1197 bp, Mus musculus
cactcctgtcatagtttttaaatgtacagaaagtacatgatttttcaaagagaattttgcaagggccatgattgcagactagatttggcagtttgttgttgtattgttgtttttaagatttttttttttttaatctatgcctatgtgtgtataagtgtgttaagtgtgcgtggttgccgatggagtgcagaaggggataccagagctagaactcctagttaaaggtatgtgatctgctagatattggtgctgggatctgaactcaggtcctcttaaagagcagcaaatactcttaaccacgttctctccagctctctattattctttgggtggttggtggtgttttgattaagacaagatctcgctgtgtagcactggctgggctgaaacttactatatagaccagctacctttgaactcacaggtctgcaatgcctggcttcctgtgctgggattcaagatgtggacacacaatgttttaaatttttaaataaaaaaataagagtgtcggtctgcatttttttttcctagttttggagaggctagggataaacccagggtttctcccatattaggcaagtcttctgtagtgatctttaaattttacttacttctgtgggtattgtgttgtattctttcagtcaatttatattatttctccatttataaagtggaatatttggcctcagacagttcctcagctggtttgaggcatacctgatctacacatgacactgtgaatgcatgaagccaccacaagttcagatcacctaatcagattatgtcataatgggcaggtgtcaccaatatgtattcttactctcttgatagtactactttgtagtaaaatgcctctttccttggatgcttccagataaggtacattcccaggcacacataactggcaggtgttctttaaatttacttgtgtgccctctgatagagggcagtggggtgtacccttgccacactgagcatgtggagatcagaggacatcagctggtgccttaccttgttctgagataggatttctttgttcacttttctgttgacactaagcttcctgcccaaggattcttagtctccactcctcagttttcatagtggatttttaggattcagacacagggccttgggcctaaacggcacctgctttaagaggcagctcttcagacatgttttgtttgttgtcttttt

SEQ ID NO: 22008 - DNA, 1055 bp, Mus musculus
atcacaggtgtgcaccagcatcctaccatcaagttgtgactttgtttttgttagtgagttagcgtattttgaatttaaatatttgaaaattgaaagaagtcatactttaatggcaagggttattttaaatattaagctgctgaaatttctgttaagttagctaactaataacagacttaaatttttgttctcttaaaaatacttttaaccggctatgatgttgtacacctttaatcccaacgtgctccagaggaagaagcaggaagatctctgagttcaaggtcagccttctatccagagtgagtttcaggatagccaggactatatagagagaccctttttcaaacaaaagcaaaaaagcaaataaaattattctattagtagctaatgtcacatataaataattaagaaatagtataaccatatatgttaatatttctgtggtctcttatgcaggcactgaacttaccttcaattacaacctagagtgtcttgggaatggaaaaaccgtctgtaaatgtggagcacccaactgcagtggcttcttgggtgtgaggccaaaggtaccacttttctaaacttttatattaggagcaatggtatgtcttccctgtacaatggtaggtacagtactagggatgacttcactgtaagaagctatttctttgcaataatgtaactggttatcagcagtgccactgacagtttaatgagtatgctcatgatctagttggtgttgctgcagtgtgtatgcagtttgactcaataggactcttaaagcatcctggaatgagggaggtcagactataaaataaaaaacctacaaagcaggttaattcctggtctcagctcacccattcataccttctggtaagctatttatatccccgaactgtgtgtgtgtgtcctttttttctttttcttttcttgaacatgtgcctgtcctcttttccttgtccctttacatgctggaattacaggtatgcattcccatacctgcctgagttttctttgttttgtttctttggttggttggtttggggcttttttgaaac

SEQ ID NO: 22009 - DNA, 2624 bp, Mus musculus
tgcatgcatgtatgtgcatgtgtgtgcccacaaagctcttctgtaaatggaagggtactacatcaaggccaaggtgagcttttggctggggcaactgctgcagtctctgtgttcttgtttgaagatttgtccttggaggagcatctggttagagggagatgttctctgagaatgtagtgtcccagaagtgaacaagggcgattggcaagcttacctttcttttctaccaataatcctctcacaagaacccccatcctcatttcctcaaacactcaggtgctttcagatttcagtctcgggcagtggacatagggaatttatggcaagctctgagcaagacataccaccttcaaggtgagtgtcagattccaaggaaattctttcctggtcttgtgccctcctacctgaggggaggagagaattcctacctgaaaagagagggccctctccacttccctgcaaatgactgctctctgtaatagagaccacatgcctggtaacttagctcagtggcaagccaaaacccttccccaagactggagagacgtgatgtttggagcaatgtccaatctaagcaatgactcctcataactgctgattatctgttactgctgcctgagctggggcccaagggctgggaatctgttggtgctaccttgccctaccatttccccagctcacaaactgccaacaggaagtgctgtttggctagttgtaccacactcacctgccctttgttctcagatcatgtgtttgtttacctgtcagctttgccaactcagcatctttagcaaacagacagcatcttttggcctttctgactcagttacagcttttacaccctcaacaggagtctgtatattccccagtttccttctccctaagttcctgttgaggttagcttccatctcttcttgaggaaagaacagtggttatattagcatttgcgctttatataaaaattgaaagtaggatctgcttttatttcccaaagcctgtctgtggaattgagacccttgaactcaggcagagggatgaggctggggcagggctgccccaagtttgggggcctaatccctgcacttccctgaaacctcagaatctcccctctgaatacacctgcctagttctctcccctttcatcctctcttcccacatcgtcagagtgaaaaaaagctctttgttttaaaggaagagaaaaagcgtcttattttctttttaaaaaattttaaaccatgaagaaaatatttttaaagaaattcacccaggacattaaagttcactatattacctatttatcatgtgtgagaatgtaagtatatacctgcagctagtagacgcctccctcctttctttcctccctccctcctttccttccctcatttcttaggctgtgtgaataggtttgcttggtgccagtcctgtgccctttgctctcctgtcatctgtagttgtgatcagaaagatacctgcactgcactgtcagagtctcctttcactatgttgtgtgttcgattaccgtagctgtttcatgaaataaactgtgaagtggggggtggggggtgcagactatgtaaaaattttaagtgaagaagtttggccttgacctagcttctctacaataggttgagtaggtaattggctttgaccattgtctagaagtgtctcacaggacaggagggagtgagttgggggcacaattggccacttgtcttttgttttgatacttccattcaccgacattcttttggagccttccttccagacctgctgggagaacgtcatctgcgccctgtacttggtctggaggggagggattgggggatgcaggggaagatcagtccttctgtcctttgttaccactgagagactcggtggaacctcattgacagcatcataaggatagtgttagaactgggcactggttactataccttagtaacacaagtattggggtggagaaccttgcagttccttctggactgcttttggatcctgtaataaccttttcttcaagggtgtgaattgccagcagagaaataggtggtaattttggctttggctaagtgcttaaattttggatgaccagagagtctgcacatgagacagctcccaggaagtagtttccagggacaagccaaaggcagaaatgttcacaggtcataactaatacttctctcgtttagttgtaggggagggaatataaggaaattgttgcaatttgcattcaagacttaatttttcttcctgctggagccaacccattttaatagatggtaagccatcatttaccaccaccacaccctcaaagtattgttaaatgtctgcttccctaaaattactgagtttgagattatttaagtcactatgtcaggcttttttttttcttttttctttttttttaccagtaatgcatctttggtacttattctctaccccacactacagtctgggcttgaagtacagtggtgagcctttgtggccctgcactgagttcacgaacgctggacactggtcgtgtcccagtgttgttctagaactgacgggaaggatgtctacgttgtccattcagggcactcaggagagcattcaatttgatatacacacacgccctccaagctgag

SEQ ID NO: 22010 - DNA, 1118 bp, Mus musculus
ctggagtgattcagtccagtccagaggaggaagagaccctgtgtccagatgatggcactgaatttcttatggctagtatcgccttgaccatagcttttatctgtctatcctgcccaggaaaggtcagaagagaactgtgggcgtggagtagccattaccttctgcttctctacctcctcccctctcatggcagcatctcaattgcttatgaagaataagggcaatgtttaagaattttggaagagctttgttagacaacaaacaacctcaaaagagatgtttcctgaccattataagcaaaatgcattaaactcttttgtggttcttcccctataacagccttcctgtgactttaagaacataagtctacgagaggccctaggagttgctcctgggagcttagtgcaccttggcagaagcagacagggagcagagcagaaactgaggtgttggcattgtttctaggttgggcagagcaggtggtctccaggttgtggtggtgccgccgtgtgtgtatgtaggagagtgtggaggctgggtgagtacagcatctaggagctcgtgggaaagcagctttctaggtctagcaaagaaaactgactagaaagctatattttttaaatggggaaaagggttcaacgaaggtccgtcactgtgttctctcgcccccaacccgttgccagctggaagtgaacctagtgaaaaagaggggagccctgtgctaggagtccccataaacatgtactgtaattctttgtatatagaaaaaaattactgtaaagtaaagtttaactttactcttatggcccttgccctgtgtttttattgtctctggggaaacatagcttaacaagacagggggctgactggtttaggataagggcaggagacagcctgggtcctccaagcactgggattcctcccaggtgcacgggttgtgcttaagtatccatcctttccctctctactgagcgtggttggtgttagtttcagtggcttcacagcaatcctctaccactcggtattttgaggaattattttagagaaatgaaaccagcactttgagttctatttttgaattaaagtttcactgtacagttcaggctaacttcaaacaa

SEQ ID NO: 22011 - DNA, 1198 bp, Mus musculus
ctgttagctacatttaggtgtgctccccaagtgtgaagacagtcacttctctttgcagatatcaaagcccaactctttgaaacatccagcaagacaggccaaagtgtgggtgagtgttgtcttgggtcctgtcagcaggaacaggcaggacagtagagcagaaaggttcagagggctgggccactgggatacccagggctgctggtctcaggccctcactgattctttgcttgccagatgaactcttccagaaagtggctgaggattacgtcagtgtggctgctttccaggtgatgacaggtgtgtacttcctcatggtccccagccttcttggtgacctacttgatgccccgacataatagtagtgctgagcagtcacctctcctctctttgacagaggacaaaggtgtggatttgagccagaaggcaaacccttacttctacagctgttgtcatcactgagtcaccactcatctggcccagtggaattagatgaattcccagaggggctggacctgactcttgtctgggctggaatggtcaagcgtctgagctattccaggtgcctctcacagcagaggtggcacctgcctgtgctggcccatggaacggaggaagtattgggctgactgtgggcatgaggaggagtaagggctgacttgaatcccaggcttctgtccagactatttaagtagcttctgaactgtaaataaaattgatgcatttccttgctgtgtgcactgggtgtcaaaacacctagttgttcctggggccacgtgggcctcacttatatgaagacttccatctggaaccaagtaacagtttcctaagactatcactgaaaccatggataaacaatgggctctttttcttatggcctttttattagtgcttacatgtctgagtgtagagcaaataccagggcttctaacatactaggcaagaactatatcactttttttcttttgtgggggtgaagataggttgaggctgggatggaaaagtacaaagttcaggagaagacgaaggaaagcacctcagctgtgcccagagacaaaaggcttgggtacatcaacctcaagacgagttggttaggccagctctacctgttgtgttatgtctgaacctgtgctcaggggtgtgactcagtcctaagcttcccagtgaaaccctataatgtacgcaacaagaggcaact

SEQ ID NO: 22012 - DNA, 1213 bp, Mus musculus
tatttagcgcctccaggtcatggctgcctgcaatctgtgatctgtgcccgggttcagaattagagtacactgaacctatccccgggcaaattccaactccctcctccacccgacatggattctgtggctctccaaagcgagcaaaatctcaagaattataccactagagagcgccagcagcaggtaagcaaaccatcctcaggatttctggccccgaaataccgctcaactcccgtgctgccgcctcttcctgtccaaccacctttggactgcaaaatagaaatctagagcccaatataaatcacaaactagacaatcttcttcgaggactttggaggcttggactgattctaatcctataaggattttgtgctataactgtggccacagttccgcagatagcccacatcggactctgtccagtctttcaaactccactattgaaggacagcctacggtgcgatctccagaagaagagaggaaggcgactcgctctacccaacgccacgtacctatagggattcgggtaccgttgccagaaggcggcgaacacttggtcccaggaacttcggagcacgctctggcccaggaaatacttcaccatcgtcccgacccggacgggctcagcacccgtgcagcatcagggtgaagagcccgggggtgggggggacgtggctaggcgcacgcccgccaggctcgcagctcaatctccgcaggaccgcgcccaggtccctaccgccgccatcaggggttataggactgcacgacgcttccggcgccggatgcataggatcggccacttccggcgcccgcgtcacgtgaccgggcgtcccgcctcttggcttccagtcccagaggtgctgtttggagttagctacgaggaccccagattcagtcggtaaccccggcgcagcggagcttcgggcgcagcggcggtcgcgcgggtgagcaccgcagggctctgcggcgcggtggagggcgctgtccgcgtccccgcgccgcggctctgcaaaggacggagcgccccgggccgaggcgccaggggcctgcgaggtgcgaggcccttggggttggggtctgaggcttgggctctgcctgggccgcgcggaccctgaagtgggtgaggcggcccagggagcatgagcgggcagcgcgtggacgttaaggtggttatgctgggcaaggaatacgtgggcaagacgagcctggtgga

SEQ ID NO: 22013 - DNA, 1184 bp, Mus musculus
gcaccgtaggctgtccttcaatagtggagtttgaaagactggacagagtccgatgtgggctatctgcggaactgtggccacagttatagcacaaaatccttataggattagaatcagtccaagcctccaaagtcctcgaagaagattgtctagtttgtgatttatattgggctctagatttctattttgcagtccaaaggtggttggacaggaagaggcggcagcacgggagttgagcggtatttcggggccagaaatcctgaggatggtttgcttacctgctgctggcgctctctagtggtataattcttgagattttgctcgctttggagagccacagaatccatgtcgggtggaggagggagttggaatttgcccggggataggttcagtgtactctaattctgaacccgggcacagatcacagattgcaggcagccatgacctggaggcgctaaataggaaccagtagacatgctgtcaagagcaggctcctgagaatcatctttaactcttgcagcaaacatgtcttaaccgaagacatagtgcaccgggaggtgacccccgaccagaagctactgtcccggagactcctgaccaagaccaacaggatgccacgttgggcagagcgactgtttcctgccaacgttgctcactccgtgtacatcctggaggactctattgtggacccccagaatcagaccatgaccaccttcacctggaacatcaaccatgcccggctgatggtgagacttcctttgctccctcaaaatagttgcccttcagatttcaggcaagagagttgtgggaacttctgtggccagaggcaggcctaaaataccaatgagctgcatctctagagttctgcccttagattggtctaccctttcgattggtcagattctctgggactgtcccttggctctcagatggtggggaaagacacccctgttctttttttctttttttttttccccgagacagggtttctctgtgaaactctggctctcctggaactcattttgtagaccaggctgtcctcgagcttagaaatctacctgcctctgcctcccaagtgctaggattaaaggcgtgcaccaccaaccactgcccggctgacaccccttttcaaagcttgttacaagtactgtgcgcagagcagtcagttggtgacatgcatgcat

SEQ ID NO: 22014 - DNA, 2805 bp, Mus musculus
ttttgcttcttgcccagctgagacagcgggcagggctggggtcagggtttagcatccccacagctggaggtttttgctccatcccaaggctagctctcaggagcaagcaagtctgtatttggggcccaggtgaggccctgtgtatgggatggctacttagggttccaggcagtggttttgttctgaggcctgcggcagcaaatgggatttgtggttctggacctcccagtagctttttacaaagacagacctcagccaaggctggaggaccgttcagtagggccaaggtgtgacagtttactaaaagtagcccgtctcagcctcatgcctgtcctaagggcttttttccacatctggtgattcccggtcccttctctgacctagagcagagagatggtggctgtcacattgccatttggggaagcatgactctcaggtcaagcaggactcaccccattctgcctggtatgcaatgttttgggaatagggtattgtacacaggatgtgacctcagcccagggcacaggcactggggacagaggggcaatgacagaaatcttgagattgaggtgatctggaaggagctgctgagccaggaatggaagacagctggatggcagtgctgctccctttgggcggcttgaggggacaaggctggggggccgagtggaaagcaggcaataccacagccagcttccggtctctggcaccctccccagtccagctctagggactcaccaagtctgcctccttcctcgccatcccctccccacagtcaatgcttggtctcttacctcacaagcaaaggctgccatccatgcagtgcggcgtcctcagttcgctttgttgctgcaggaaaggagtggtggaagcccatggagtgaacacggctgttttgttagtaccaccgtctttaccttctctcagcagagctgttcgctgagctgctaggagccatctgtccttgtcggaaactgttcatggtcatgtgtccagaggtagtcacagcagctgccagctgcagcttgctcccaggcttatgagcctgtcatggagcctcaggaaccccgtctttttgacacattgctctctaagcatgcattgcctatttgctgtgacaccatgtgggccgtgtccaagcagttacgttctgcgtgacagcaggcctgggacctgaagcatcaggcttctgccgtcgggaaggacctcagttcctattctaacttggccttcctgatgtccagagttattagctacattataatcaagatttacctttgtgtattagagcctccttagcagctgctgtagcattgggagataactcaataaaacacttgtctgacagtactggcggctgatggtctctggggctcactagtctagttggggacttccatgccaaaggaggcacatggcattcccaaagatcacacccaaagctgtcctctggtctccacacacatggcataaaacaaaacaaaacaaacccctgctttctccatatttggcctagtaaatcttgtggtgtaggaccaggcagggtctgcaatgaaccttagatgccagcacttagtgagtttgtttaaccttccaggtgggctctccatccctcatcacatagcctcactgtacttgtgaagaactgtttctaagttcaccccagagttgtctgtctgcacacaggaatgattccacaattagtttttttgtcatatgttcctaaaaatggccttcctaatcaacactgaagcacaaatgtgtacccctccttgtatcttctctgcagtgttggagatgcaaacctgccgactcacgtggcctcctttgtcccctccccacagagatgatggttgttaaagtgttccttaaattgtgtattttaaaactttgttttgctttaaaaagcttttaaatggtgtttggatgtattcctcagctcttcgagcagcatggccgtgtcctggacatgtaacccaagatgtcgctcaagatgtcttctgtgcacactggtgaccgctcttagcaccgtaccagactgtcagatggcctctggcggtgcttatacctggtgcagcctccaatgttcttgaattgtgttctcacacgtcatgagaagtttgggtctgcagcttgtatccagttccagttttgctagccagagctacgatgcattctgaagagaatttttctccccttcccacccccactccctcagcagctctgctgtgtgcttttctgcaccaggctggcagtctctgctcaccggtcacgtgcgtcctctgacgctttagttccaactcctgttactgatgttgtggaattgttattttcagcctcctggttataagctttgcagaggttccttcccacatgcttagcttcctgatttgctaatgacgtcatttgatgtgccatctgcatttaaatggcacttattaatcttttccaaagatgattttcctgaaggtttctaactttggcctttaaaaatttgcactttgttgaggtgggtcttatggagtgctgatgtcatcgcccctgctgtctccacccagttgtggccaagttttcctgactctgtcatcttccagcacccactcctgaccttgtccctttctcttctcatcagctgggatgcttctcctcccagctgcttccatgtggacctgtggctcaggagacccagaggacatgaggtgcggaaggtcttcccttcctgcctggaatatggtaggaccctgggggtacagaagcaagcgcctgtgacagggctggagagagcacatacctgttagatagggg

SEQ ID NO: 22015 - DNA, 1091 bp, Mus musculus
tccaaaacaagttctgtttctgggagactccacttcctgccttgcaggcgggctcagtagtagcgagccctacttatgattatggatggagcgtctattagagcctcccagtggccctctgaggggatggaaggctagcctcatgtgacagagaaggtagagttggcccctgggggaagggagcacaggtgaacaagtccaaggatgacttccagggacccctctccccaggtgctcccccactgggttgcagtcctcagttcttactactctagaaagttcctgaggtcctggttgctgcccggggagagcagggctcgttcaccttgctccatgcctgaacccagtaggcacttgaactgccaggggcaggctctgtctggcttcctggaaaacaggcctctgaccctgtgtttctctccccatagggatctaaagccagagaatatccttctggatgaccatggtgggtgagaaggcccaagtgggagatggggtgaggttggaagctaggcctatcagtgaacccacctgcttccatacccctacccaggccacattcggatctcggacctgggactggccgtgcatgtgcctgagggccagaccatcaaaggccgtgtgggcactgtgggctacatgggtaagtcctgttgacctagtacgccagtctcctcagcccccttgctgtcccaggcctggcctacttactcactgttgtactaggggagggagggtgctaacttcagagagtaggtgtaggtgtgtgtgtgtgtgtgtgtgtgtgtgtgtgtgtgtgtgtgtgatgttgggaaaccaagacttagccagatcccaccattgtgaaccctgctattcatttgccggatgcttattgaacacctaggactgggtgggcctgtgagggtgaagggaaacagaaacagagtacacatccatgccccatgcttggatagcatgccattcacaggggacacaggcagtggagacctagcttgtggacagtgtgacacagtacagtctaggctctccagagtccatcttgggctaggcattccacttcctgccttctttctcctactgtaaaacct

SEQ ID NO: 22016 - DNA, 1126 bp, Mus musculus
aactccagcactaggaatcccactcctgcccccaggaaaacaagcaatcagacacggagttccttggtgtgaccctcccctcagggccacaccagccaccattgatgagatgtggcttctcatactggctcagtccacagcaggccagtggcatacctgcctatccagaggatgtttgatcaaactctggtttttgtttctggggcccgagggctccctgctcctcacgacctgcccggtcctgactcctggtccctgtccagctccagaggtggtgaggaatgagcgctacacgttcagtcctgactggtgggcgctaggctgcctcctgtacgagatgatcgcaggtcagtcgcccttccagcagaggaagaagaagataaagcgcgaagaggtggagcggctggtcaaggaagtggccgaggagtacacagaccgcttttcctcacaggcgcgctcactctgttctcaggtacaagccagagtcttagctgggggcagctggggtacctcacccactcaggtaccctcaccaccactgcccttctatagcttcttagcaaggaccctgctgagcgcctggggtgtcgtggaggtggcgcccgtgaggtaaaggagcacccccttttcaagaaactgaatttcaagcggctgggagctggcatgctagagccaccttttaagcctgatgtaagtcctgccctcccttgctagtggccagccgagccagggggtggggcggggcagggctggggtgggtgactgggagcaagggccaagtcactttcagtgcagatgttggaaaaaccccatctaatggcttgggctgcccctcacccccagtttgtgtgtgtgtgtgtgtgtgtgtgtgtgtgtgtgtgtgtgtgtgtgtgtgtaggcttgtgaaaatggaatgcccaacatactgtgggttttagtgtaccaggttagaatgctgggcagacatggagatgctctgggagcattgcaagaactcatgtcctctctgtactgtgattggttagccttcgatggcaggcatcttttcccagggagtggcaatggtgacctagtggctcaggctcatgtcttcttagatagccacccagtgggcacagagcaaggt

SEQ ID NO: 22017 - DNA, 1594 bp, Mus musculus
gccgaggcccccaccggcggttggcggtagcagctactctcagtgacgtttacagttttgcacagtggtgttccccattttccacgcaagccgtggattgtggaacacagccggaactgtccccagtgtcctccgttcctcagccactggcctagctgagtttgacaaggcctgggccatcttgggacaaaggtgcgtcccttcagctctctgtggagctcggggctttatgtatttatgtatttgtatgaatgtatatagctactagagcgttcttaattccaccctggacctggacaccccagggcaattagccctggccaggaaagccaggagctggcaagaggagccagtgccaaactccaggcttctagggcccagtggagatgagcaagcagagagtgggccaggtcagacctctgcccacagcactgcactggccaccaccaacctccaagtgagacttgtgcctgcctgttgtggactgaggccaccaccttctggttgcctaatgctttccctctttctcagcatttgtcagggttggagctggggtctttgtatcctctaggactgggacatagtttaaccccagacttagctgagtgggacccatcaaaccactgcccgagatgggtcgctttctgccttccagctcccagagcacagtagtccttattctgggtcatatcctgaagacacctttttcagaaatgccccagtccaggccataggaggagttagaattagccctccaacattccagaatccctcataaaagtagacacatgcccagcaataatccacccttccctgtgtgtgcctggtgggggtgggggtgagtgtatatcattgtgtgaaaagagtagggtaaggctgtgcctaagcccccggaccctagccctggcctgtcccagactgtgatggctgtcctgatgctagttaggacagcatgggaccataaggccctggcttttccatatttaaagccaatgtaagctgccatgtgtctctatgtgaccaatgtgagctgccacgtgtctgtgcgaatacattctgagcacacggctggccagccaccactgcctgcctccttttatttctggtgtttcaatgattcttcctgatttcttggcccagctggaaagcattgaaggtggatctgtaatgggactgggggttgcccttcagaagcccaggagtccgcaggactttgcaggcaaccaaacctgtttttcattgctaggtgggacacagccttagatactggcttgggtgtatacatgactgctacagagacagatatatctcaacagtctttaagctctctgaggtcaaagaggccttgtaaactagggagtggcctggagaagcaggtgggagctgttgttagaaatacctgcccctagttagtgaacactgccctcctgtgtgtgtccattctgatctggcacacatgcataagttccaggactctattctcttaaacatgtgggtggggctgggtggtggtagcacacgcctttaatccgagcacttgggaggcagaggcaggcggatttctgaattcgaggccagcctggtctataaagtg

SEQ ID NO: 22018 - DNA, 1203 bp, Mus musculus
acaagcctccaggtagtatccccgggtgaatgatgggaattctggaattctgggatgggactggagggctaggggtgtcactagagtcggttggcacagctcttagaggttggggggcgggtggcaccactgatggatctacccagccttctctcttctctcaatatatcctagaaatcgacatcacctgctgggatgcagacccagttcctgaagaggaagagggcttcgagggtggtgattagtagcggcgactgccccctggctgccctcgccaaggctgcctacctgcagtggcctctggccagccggcttgcagtgccagcattagcagcagccccgcctggctcccactctggattccggcactggccggggacctgtctgcttccttacccacagggcctgacttttacagcttttctcttttttttaaaagttgatagacttgtacaattgactggttttcctcccgttggtagttgaaacaatgttgcagattccacccccttcctgcccagaccagattgtagcttagttctttctgctcagctgaccagggtggaggcctcaccttgtttgggacctggtgggggtcgggggttctggtgggaaaatgttccccccatcacttttcctagttttatgtttcttggaaaaaaaatcactttgtattctctatccagggcttcagatattttgcacgaaatttaaaacatggcaataaatggctcgtgggctctggctccctgggacccttccccttctctttaccctcgctgcttggtcagaaggaattatcagacccacctggggccccttggcttcccgccctctcctgccgggcaggtcccaggctggaggtcctaggcatgactcaagtcagggcttattgatgggacccagtggtttgggtggcccctccccaattctttcctctctgcttgggttctttttcacattaactttttttttttttctaagcacaaacttatgtaatgggtcgtgctcatgtctgttaataaagaaatccagatcccttcgggcctgctgctctgggcctccaggggttgatctggcgtgggcgccggccctcacgaccagcttcccaactcctgtcacctccgaggctacagggggcgcacaaaaacaggttaggaggagacggaacattaagcccttgagaaacaacctttggtttcc

SEQ ID NO: 22019 - DNA, 1141 bp, Mus musculus
tggggaaggcactagggagggagagtgaaaccagaggggacaggcagggcagaacaggacgaggagggggaaagctgtggttgtcggttggtcatgacaataaagctaggcatggcatcgttccgctgagccgggagtcctgggtcagatggcaatcagggaacggtgggggagaaatcgctgcctagtcagctcagcgtccggccctagccctggcagcccacaactcagtggagcgggtgtgcgatggagactccaaggcaacggttccttggttaccgttccctggcgaccatgattctcatccctcattggccagagccaggaatctacctggtgcgtgccttggtacccgctgcccctcccccttttgggagggagaagaatctggtgctcaatgctgggcatcccctggtaaccatggcaacccagcaattggcacagaaatcagcccaccagagctgcattctcctcgaacacaaaggaccctggggacatcctcagactcaatctctccctctctgagatggggatgaggttgctgtgaccactccccgactctgaccctaagatctggtcttctagccctgaggcagcctctgccctccctgaagcctcctaggactaccatatagactgaagccgaccagaaagctaaactaatgacttccttcctccctagccttttctgctctgtatttattcttggcaggcatactaacgcatccatttcatggaaggtaatgtagttattcttcccttgagccacccctcaacccatcctgatgcaggcaccacgctggacacacatgaagaagagactcttggtccctgagattcagaagggctcagaaccttgctcatctcccatttcccatctaagtcaggaggctggggtgtgcgagaagatgaaaaagcagagatggaggaaaggggggagcagggaggaggaagaaaagaagagggggaagagaacagacaagagacaggagggaagtggaaaaaataaaaaatggaggaggagggaagaaaagaaaaggagcaaaaaaggagaaggaggaggaggagaaggaggagaggaaggaacgagggagggctaaccccatgccccaggggttattgacccctgttaaggcgacca

SEQ ID NO: 22020 - DNA, 1213 bp, Mus musculus
caggacagggcagactctcctgacctcagcctgggcctgactttgccaggactcatggctggggtggcccttgtttctcttggtcaatgcctgcctctgtcctctcagtgcaagacccggatgaggaattcatgaagaagtcaaggtaaaagcttgggcgctaacccctctccctaacctcccacttcttcctttccagccaccagccctcggctgctcctggccatcccctgccagagctctcttctgtcccttcctcctttccttccctccatcctccctgcctcccttccatctctccttccttccacttcctcctcctcctcctctctctctttctctgcccctcagggaaaagtatgtcctggagctacagagcccacgctatacacgtctccgggactggcaccaccagcgctctgcccacgtgctcaacgtgcagtcatagcctggccttcccagcctgctgccctctgcttcctttctctgttactcactccagggcaccccacgggtgcctccagctcttgcctaccactttcatgtccctggcctgaacctcctaccggcccggtcctggcagccctcctggcacagggcctggcttcatctgacactgccttccttcttggccctgtggtactactgtctgccaggtctgcactgcctttgagcatggaaataaacattctcggccctgcttcctttgcctctgtctcccatcttttgggtctggttatgttttgggtttgggatgctaaatggtttagacatggtataggtcccgcagcttgtttctcagtgggagggagaagctaaccaagatggctctgccttacccatggttctcttggataagaggagacccaaagtctgccctaggagccggagcacactctgctactacactctacagcagcccagatagctgtaccctacttaggggaagcaccccttcctacccctaccccagagggacctggaatccatcccagcagctcccagtgcactcacgcatcacccatggggacagtacagctgaagttacggggtgggaccatgcccaaagcctcagccaggcagggccttgaatggcagatcttacagccaggtgcccaggacagaagccccagccccagcctcaactataccccaggaatcctggcctggtaagatttggggctgaagaagggtgggtagcctccatggtcat

SEQ ID NO: 22021 - DNA, 1190 bp, Mus musculus
agggcccgggagcagctctagttatcggtgatgttccctgtatatgtgtctgtcatttttaccttcctgccggactctgaaaatccctatccatgatatctacccacagcatctatgtttaaagccttcagttggtaatattgggtgcctcaggctcaaacccagacctctgcacagcctacaggccgtaggagccagctgtagcttggcttcctagcttcatctcagtcttacttcctaacctaccttcctggcttccaaggtccctccacaccacaccttcccaggcaaaaccaaaagcagaacaaagctctaggctccaactgtatttctgcatggggtgcttattcttcccagggtaataacactcacccgtcagtgcccgccaggagcactcagatggcccaggctggcttaaacatgccttggactttctgccctgtagcacttgacacggccgctcgaattaagctgtccatttagatgtctctcttccctggctgactgaagctgggaaacagaccatgtcttgtgcccagttgtcctcccaaagcttagtccactgtctcacagtcaatgagcaaaaggaactaagtctggaactcatgaactatgccttgctgatttactagccgcttgatcttgaaccagttttgtattcttaccaaagctgaagttccccatctgtgtgaactgtgttatggtacagcaagggcagtggtgagggctaaaggacgacttgctgcagggctaggtctgtgcatgtagctgctctcctctccaggtagtgttagtaataaggaggcgctctccacaccaggacttctcagaccttcctgaggagacacttccttatctagaacaaccagcaggcaggctgtgcatgccctgtgatgtctgcagacactgctccaggccacaccgctcactgctttcctgagtacgtagagttctggcacatggggaaggagactcggacccctacagccatcctgagcaaccttttcttgtaaattacaaacttcgatattaaggttcagagaaagtgattagtccaaggggctctaaagaattgagctcaggtgtgtagtcagtgttcagaagagacagaggtcacatggctgcccactggggaaaagagcattctctctaaggtgattcagaggtggaggcaagtcttctctccccag

SEQ ID NO: 22022 - DNA, 1217 bp, Mus musculus
tccctacaaatttcaggccggggggagtttgcattgtaaattccagtgaggcaaagcaacatagcaagaccctgtgtcaaatcaaataaaagtaaagagggatggggagaggatgggcaagagggagagttgtattactattgggtgaaacaggttcgaaccttgcctccgcttatatgttgcgcaggctgacaactattatcagtcatctcgctatttggctaaaccgaagaaaatccttccattttggagaccccagtcctcagcttgcagaaaccagccccaatcaggtactgccgcgcggaggcgtggtgtatctagggacttgtagtccatgcggcggaactcgcagtcccggcaggcactgcggtggcctccgctgggctacgtggctcggcagtctgcgcctgcgcaggcaggtggggcaagatggctgcggtgcgaggcgtgcgggttgtcggaagctcaccgggtctcttgctggggagagggatgcgggccttcctgctactgctgtggcttgcagcccgcggaagcgcgctgtatttccacatcggagaaacagaaaagaagtgcttcattgaggagattccggacgagaccatggtcatcggtgcgggggcgcagggaagcgtttgggacaagtcagtggtcctggggcggagggggatgcgacctgttccgggtagctagcctggccgcgaaccccgcacctcttcgagcttatttcatcttcctttttccgcctgtctccaggaaattaccggacgcagctgtatgacaaacagcgggaggagtaccagccagccacccctgggcttggcatgttcgtagaggtaaaagaccccgaggacaaggtaagctggcccttacccgctccggtacttctttgttagtttccttatctgttcgatcgagaattttagttggtgttgtgggaagataccggatcttctctaggaacttgggccgcggtttctggacaggttcagttcacaacttctcagtgacctctgagtgactcccccaattcggctgctttccctagcctgtgaaatggaagctcacttactctagcgataagtgtattaattgcagtcagtgatggataccaaaaagttgctaatgctaaagttgttgtttaggccttaatttcacaaaacagaacacctttcagttttgacaaataatgttttaaagacaaaaggcaaaatagt

SEQ ID NO: 22023 - DNA, 1633 bp, Mus musculus
tgaactaaccatgtccagcccaccagtttgcattctgaatgtatgacacatgtgatctttaaggagcagattgaaagacccgaacagaagtccacactaagtgctccaggacacctctgtcgcttgccaccacctttcctctcctctctaggtatcaggaagggttaagtgaggactgtatctgacaaatggacagacagacttaggagaaatgccttagtctgccagcagtcattcgactgctactgatgaagatagtccccacaggcatctggccacactttgggcagagtgggtggccctggggatctttgcaagctgggaacacagcggttccagcagtcttagactactaagccttgccgcttatttcccaacagtggcgagaagagcgcttcagacaaaccagcgaaagcaccaaccagcgagtgctatggtggtccatcctgcagactctcatcctcgtggccattggcgtctggcagatgcggcacctcaagagcttttttgaagccaagaagttggtgtagcagctgtcccaagcctcacaggcgatctttcttccaggctgtgggaagtaggaggaggactggttttcagccgcagatgttctggaggagagagggactgtaagcgtgtccccgttcctcaggctcaggtggaggacagcagcctggctggctaatgctgagccagtagtgggacaagccctcccacctccactcctggaccttttgcagtaatcactcaggggctggcgatgcccttggtgtctcagaatctcagtgttactgatcagggatatgaggttgctgtctggggtaggttttgggagggaagtgggtggggcagcaagctgattttccttctgtcttcctttgttaatgtgggattttgagcaggtcagggtgtatcagtgactccttgctattccagaaactttgcttttcttgcctttggcttagaaccagcctgcttatatagggtgtgtttgctgcgtgtcagtttaagggtgtggaggggttgcagtgcacaaaaggggcccagaggttgattttagtttgttacaattgtcctttctggggcttgaacaactggtatcaaaccaagcagagactttggtgctggttggaaacagagcctacagagtcttagttactgagtttattttcaatgaatgtgggtttgttacattggtttcccaataaaaaagaaaaaagaaaaaaaggaagaaaaactgttcgtggttactcttttttttttttaaagatttatttatttattatatataagtatactgtagctgtcctcaggcacaccagaaaagggcatcagatatcattacagatggttgtgagccaccatgcggctgctgggatttgaactcaggaccttcagaatagcagtcagtgctcctaactgctgagccatctctccagccctgtagttactcttggtgggtgtgatgatacttggacttaagagaatggaacaaggccagacgtgatggtgcacaactttaatagcagcactcaggaggcagaggcaggtagatctctgtgagttcaaggccagcctggtctatgtagtgaatccaggacagccaaggctattacacagagaagccatgtct

SEQ ID NO: 22024 - DNA, 1099 bp, Mus musculus
gatcctgagcaaacctattgaagtgcaggttggaggcaggagtgtggtttgctccgatgtggaacagcaggtggtaggtaccatgttcaggaaggcgccattttttggtggttaggcagtatatcatttggttttgtgtgaggtaggcgggacacttctgaagttaagtcacttacaaccttcatgttgccagaacatggagctgacctcaggaagctctttttagtgcttcctaccagaattgaaagctggcggaaacattgtacatctttcttgtctttgattaataagatttgagggacagagaaaaccagtgaccagttgccacggttacaaacctgccagttaaaagtctgctgcttttacttaatcactttaaggcgcaggaagctcgagattaaacaacgattttgttctaggacgtgtttgtgtttcttacattaacttgctacattgtggtattttcagattgtgattgaagaagaaaagaaattcttgaaattgctggagcttttaggccattatcaggagtcaggatctgtcattatatttgtggataagcaggaacacgcagatggtcttctgaaggacttgatgagagcatcgtacccttgcatgtctcttcacggaggtgacgattacttacctactagcatgtcattgccttgagcttgctcagaataataataatgctttgttgtctgtaatggaggtagaaggaatcaggtagtcagcccctggcccagcaacatccagttgtagctaatggaggctgctctcggtggcttctcacagctgccagtaggtcttgtctctcactgcaccagctaggctttttggccattgagctgtctgaattgacctgtcttcacatctagtactagggttacaggatcaaagaggcatgcctgactgttgacatgggcattagagacttgagtttgggtctttgttttatggagcaagaagtttccactgaagcatatccctgcttccttgctttctcatcatccaaagagaaactgtacctcttaagccgcagttactctgcatttctccccttcacctgtcattgtaacatcatgaattccttatcctg

SEQ ID NO: 22025 - DNA, 1127 bp, Mus musculus
agccctcaaaactcacataaatacaatgtacaaaaaaaatttgttttgttttccgagacagggtttctctgtgtagcccagcccttgctgtcctggaactcactctgtagaccaggctggcctcaaactcagaaatttgcctgcctctgcctcccaagtgctgggattaaaggcgtgcgccaccaccgcccagctcagttagtatttctttttttttaaatattattatttatatatttattataaattattatatgtaagtacactgtagccgtcctcagacaccacagaagagggtgtcagatcttgttacgggtggttgtaagccaccatgtggttgctgggatttgaactcaggacctctggaagagtagttgggtgctcttacccactgagccatctcgccagccctcggttagtatttctaatgcggtgtttactaatccttgatttgtttttctctcctgtcctagattgatgaacagattgaaagcatgtttaattcaaagaagagagtaaaggacatggctgcacccggcacatccagcgtgcccgcgcccactgcaggcaatgctgagaagctagaaatcgccaagagattggctctcagaatcaacgctcagaagaacctgggcatcgagtctcaggtattaagtaatttgttccgagccattgctgctgttgccgtgaagatccagaaatggaaagagtctttttcttttttaaaaagcagggtttctcacagcctaggctggccttgcattctctgggtagccacgggggactgtgaactgcttatcctcctgtctacttcctacacaccaagtttacaagtgtcctgtgtgaaagtgtgcttcagacactgctttcttttttgtttggttgttttttttgtttttgttttttggtttttttttttgagacagggtttctctgtgtagccctggctatcctggaactcactttgtagaccaggctggcctcaaactcagaaatctgtctctctctaactcccaagtgctgggattaaaggcgtgcgccaccacacccggccagacactatttcaatgtagatcctttccaggagttaaattgagcacaaaaaaaaagaatccaatacaggattc

SEQ ID NO: 22026 - DNA, 1731 bp, Mus musculus
tacactggctaacagtagcctatttatttacttacttatttttggttttccaagacagggcagttttacagattgttaaagggatcttaaacattgacttctttgtgtgtttttttctaaccttctgccttttattttccatcatagcaaaattcataccaaccaaccaacaaaggacgatacaaagtattataaacatcggagccactttgtacctttgctgtctgtgacgtttacagtgtattgtaaagtaaggcttttaaaattctgtcttgcttattttttaaatacaagaaaccagtgtttgttcaagaggtcgtctgtaagtactaccccatacccatccaaaaccatctacattagacctgttttcagaatgtgatgttcttcaatgtaaaccttagataccaacactttaaatatctggaagacattggaattttgtactgaatgctgtaataaagtctgtcaggcactaagggccactgacctgtcctttcagtggaattgtggtgtgctcatcacctaagaaaggtaaaaagctctggtcatagcctgctgagcttacacctcgcagactggagcatgtgagcaggaccctagagtgctgtgatggaagtttacaaaacaggctcagagtttttattttaattttatctgaaacgagtaatagtcaagccctggcttataaaattaaacataagtagtataatgggatttctgcatttcttttttatttcttcctacttttgagaaagtcactgtggggcatgggctggccttgaacttgtgatcctcctccagctgtctctccagtgcttggttttagcacacttggctctccacgtctttctactgtgctagtgttactatttaaggttttctctcgcccctggttttgcctaagtgctgacttctttattgactcctttagagaaagttattatgaccaatacatactccatgttaatcctgtccctcaagtgtttctttaggcattgatattatggtacattctctaccataatacttctaatctgactttccttcaggatgatggagttatgaattttcccctttattaaaacgaggcaaggtggtgcatgcctgtaatcatagcacctagtaggcaagggtagaaagatgatgaatttgaagccagtttggccttatataataaagcctcatgtggaaaaaccgtgcaggcaaggctgaggatatagttcagtggtaacgcacttgcttaagtgtgccccaggtctaatacgagaaaacaaagcatttttgttactactggttgttgggcaggcgaggtgacttggtggatgtgagtcttgctttcaaacctgatcactcagttcaatatcttggatccatatagcagaaagtgcaagttgttctatgattcgcattactgtgcgtgtgtgctctctcatgcacacacaggtgtaaataaatgtagtaaatcgaaataaagaaattacatcaaatactggtatttacatttcagaccacagcatttcttagtaaaatttggtgcacaaagaatcaaaaattcctctttagagcatttgaggtctaattctgaataattggattacctaaaaagacagaacagttttttagtctcgatttaaaccaggtgtggtggcacccacctgtaatccagcctttgggaggcagaggcaggatggtcccttagttcaagaccagcctgttgtcctctgcatc

SEQ ID NO: 22027 - DNA, 1133 bp, Mus musculus
ttttgaagacccaggttcaggtctcaacacccacatggcagcttacagttgtctgtaattccagtgaataagtctaaagaacaataaataataaataaaccagtgtaacatatttaaaagccatagtgacagccacctatcctacttgttaagtgtaaggttacttgtactagaaaagtaagaactacttgggaaatatttttagatcttcacatacccagttacttcacttcaagaaaagagcaattacagcaggaggaactagaacatcacactggaatccctgtcaccagcacttcttccggccttggtttatttattgcgtctcatcgcccaggtgtagcttgttaatttcagagtacacagcagccacaccggtgcagtggtgctcccggaaactccacaccggtgcggtggtgctcccggaaactccatactggtgcagtagtgctccctcaactccctggctccctggagattcagaagttacatcgtatcacgttttctgtttgtgtatctaagaagccctgagagcattttgtcctaaaatggaatattgcccagtatatctgttagtgtcaacactgactgatttttaaagttttaatgatgtacagagtttaatttgttttttaatgcaatatcaatatttcctcaggctctctataaattccttacagaataaagttgattcagtcggcattgtctcagattatctttccttgaatgctttgtcttttgtttttttctctaacctttttatttgtggacctctaaggggaatattagtgttggtatatctttctgcatttcttaacagtctcactgtgcagccccagctggccttgaacgtgctttgtagaccaggttggcactgaactcacagagatctacatgtttgtttctgtctcccaagtgcaggagagcatacatggcgtgcatttttttttttttttagcaaaaaattctcaccgggtgtggtggcacacacctttagtcccagcacttgggaggcagaggcagtcgaggccagcctggtctacagagtgagtttcaggacagccaggactgcacagagacacactgtctcgaaaaaccaaaaaaaaaaaagaaaaagaaaaggaaaaaaaaaa

SEQ ID NO: 22028 - DNA, 1121 bp, Mus musculus
atgctatcatacagataggtattcatacgcatttgtctctgtttttggtagaaaatgatgcaccccgttgccggcagtaatccagcgttctgtgggcctggcaagccttcctgcctcaatgaagatgccatgagagctgctgatcagttcgatctgtattcctcccagcaaaacaagtacagccacacagtcagccacaaaccaatggtttgtcagaggcaagacccattaaatgaaacacacttgcagcctaccagtggcagaaacatagagataaaagatgaactaaagaaaaagaaaaacctcaatcgatctggtaagcgaggccggccttcgggaactaccaagtcagcaggataccggaccagcacaggcagacccctgggaactaccaaagcagctggatttaaaacaagtccaggcagacctttgggtacaaccaaagctgcaggatacaaagtcagcccagggagacctccaggtagcattaaagctctgtcccgccttgcagatcttggctatggctgtggcactgctgcctttccttaccctatgatgcatagtagagtggtgcacgggcttcaggaaacgagtggtgaagtcaagccgcccagcgagtgagcgaggcaggagagcaggcgttaggagcaggttgttagttaccccaaagcgtcttgttttaatttgacatgctcttaccacgtggactccccagtgctgtttctgttggctctccctcaccctgcacttctttttctttctttttggcttagaagttgccacaattgagagatgcactttgggcaggagtagtacattgtgtctgtattgtacacagttcactcacaaccctcagcagctaagtcatttttgttttccctttgtgctgttctaagtggactcctcccatgctaagcagctgcccaagttaacttttatttgtgagtaatccattgtgaggcattgtaactgaaggggcagaacagcaactagtgagcagatcagagggatggctgtgtgagtttagaactctgaaataagacgcagctgtctggatgctttggaacttaaaacacagcttcttatttattgattcgcatgacattagttgatcattaata

SEQ ID NO: 22029 - DNA, 1470 bp, Mus musculus
gtgggttcagtaacctcagtggtagagcttcacacaaaccatagaagacagtgagcagtgctgggtgaccatttaaccactaaagtgcttcaaagagtttcttcttgcagaagcctagaatataaaaataatttacttaggacagtgtaacttctgacacaggcaaatgcttgcatcttcattgatgtgttcatctggtcacagtatctgtcacttagctgtttctgaagttgttcagcagctggctgttttaaaatccttgcacagctagttcctgaatacagttgaaatagtctagtgtggtatcatctcaccaccaaatgttaaggacttgggtgcatgttgtgtttcatggtgagtccacacggcatccttttgagtttgatttcattcctggctttgtaccttgtcatttcttcttgcccttcccacacgcatccccttccctccgcttgccgcacatgtactcagtggtgctgtgctgcgctgcgtcagcagacagagtgggctactgcataatgcgtttactgtataatgcgtcagaagatagagtgggctactgcataatgcgtttccgatacgtgttcatgagatgggacattggtgtaaggcgatatgtttataacagtgtttatcaggagctctatcccaggaaagggggatggatggatggctacagttgtgactggagcctgaattcactgttcctgtgagcagtcacctggaatattagacgtgtgcactggtgaacacctgatcctacttttctccttgtggacagtttactagtgtcagctggagaggcacggtgaggacgggagtgaagtcttcacatacaaatatttctacttctacatgatctaaagactgcattctgcatcttttgtaacatggtcttttgtcatgacagacactgaaatagcatgtgaaacagttgcctagatgccagtatattcagttggggaaaactgtcgtctcccctgccccacccccactgtataattgttccttaaaaggtaaattgctaattttatactgtgtgattctattcttcataaataggtttcactattctatattaaaactttgtcagaaaatgatgtgctattcaagtaagtttgttttacttttttcttaaaaggatattttaacatgccttatttattattgttatcaaaacaaataaggagtcaatacagatgaaaacgtcattttccacaggtatcaccttgcctaactaatctttagtatggggtgattttgatactatctttggagttttgcactggatatttaaaaatatatatattggcacaatatattgaaaaattaaatagtatttggtttaatttttagtatttgaaacattttttaattagtgtttaaatcagattaacaattctttgtatttttaattacttttttaaaaggaacatctgaaaaatggtatttagtcattccaaactggta

SEQ ID NO: 22030 - DNA, 1443 bp, Mus musculus
gaacttctgagagtagctttattttgttgaactttggtcttaagagaacagaaggtgactcttaagagtacattgaccagaaaagctccaaggagtcagaaattctagagttttagctttgaaaggctggaaggattcccgatcctttgatgtggtgggaggaaagaaaatcacactgacacacaagtgaaatccttccaagatatgcttgagatggtgtttattttagggtcgcttgtcattttgcatgccgtgcatcatacttcagacaagcctcagatgtgttttctttctgatttgaaacaattaatttctctttcaggtatagaagccaagaaaaatgtggtggtaacgcaggctgaccagatgggccctctccccagcactttgataaagactgtggattggttgctggtgttttccttgttctttttaattagtttcattatgtatgctaccatccgcactgagagtattcggtggctgattccaggacaagaacaggaacacgcagagtaaagacagaactgaactggaacaagaggggtctcagcccctcctttgtggacttagcattacagtcgctaaatgtgtggacttgcaacggaaatcagattcaagaatcatgttcttgttggactactgaaaagctgaaaagatttcatataaatgtgtttttcctatgacaactagcaggtacaaaaatgtccactagaattgactgttgttgctttttaatacttgaacataatgaatttcttttctagtgtcgtcaaacaggaaagtgttgtctcagaagaggagctaagatgggaagtatgggctaggacgggaagtgcaggtctactacaggaccaggtgaaaaataaagtcactgaaacaattcaaagtggtttcgcttgtttctgggaatggcagactttaggagaaactcctaattctaattaaaacatgttaattctgtgctagagcacagacattgcccagtcatatactagcacacagctagattgagatccaaaggaagttaagaaccctgtccttgcctggaggttgagtctggtctagtttaggacacagcaaagagatgacatgggccgctgagatggcttagcagataaaggtgcttgtcaccaagtgtgaagatctgagttcgatccctgtgttccacacggtgggaggagagaactggcaaattggtaatattaatgtgctaatttagaaaaactaacaggatagtgcatggtgacacgtccaaaatccccagcttctgggaggtggagatggatgttccaggccagcctctgcaactctacctggcttcatgaaactgtctcaggaaaggaatacaacaaagttacctagtaaaaaaaccaaaatgagggggctggagagatgattcagtggttaagagcactgactgctgagttcaagtcccagcaa

SEQ ID NO: 22031 - DNA, 1192 bp, Mus musculus
tctgtgtgtcaccggaccagccagagcatccacggtacctgcctgcactgtcccctcattcctcactcatttctggtagtcaccactcagacctttggccatttgaccagtgtctttcatagctaacttaaaacactgaacaccatagacacactactataaactgtgaacacagcttctcattccagcttaagagcctcagctccttacagggcagctaccaagctccagttagacattcttttttttttgggggggggcgagtgagggggtgggaggttggttggttttttgggttttcgagacagggtttctctgtgtagccctggctgtcctggaactcactttgtagaccaggctggcctcgaactcagaaatctacctgcctctgcctcccgagtgctgggattaaaggtgtgcatcaccactgcccagcccagttagacattctcatctagactctctctgaaaagactgagctaatgccgaaggccctgggggtggaagacagagctgcatgctccagattccatatatgaagctgcaactcacttctgcttctggactcctcaaacttctgatcacagacattaaaaccgtcaaggcacaaaaacttgtcctgtgccaacgcccgttttctagtttgttctccctgattcagcagctattgcctcccactacaaagggaagaatgacaatggatcgtaagcaaaaacattcaaaggcctggaatccaaaataagcacttaatgttcagaattaagagccaggcgtggtggcacacgcctttaatcccagctttcagaagaaagaggcaggtggctctctgagtttgaggccagcctggtctacatatcaagttctagtacagccagggctacacaaagaaatcttgtctcaaaaaaaaaaaaaagaaaagaaagaaagaaaaagaaaagttctgagttctctctctctctctctctctctctctctctctctctgtgtgtgtgtgtgtgtgtgtgtgtgtgtgtgtgtgtgtgtgtgcgtgtgtctttggctgggtagccgtggtaagttctcactagcccaggtttcaccctgcctcagcctcctcagtactagaatcatagataaacaccaccaaacccacggagttcggatattttccacacaggggtcgactatagaaaacactcccacctgtctatca

SEQ ID NO: 22032 - DNA, 1118 bp, Mus musculus
acggcgcaggatatgtattacaattccgaacaggagcacagtgaagaaatactaaacttaaagcaagatcaaaacccagcagggcaaactccagactccgcctctccatgtctgatgccaaagtgtttttaagatcttaaactcctctttgcggtgttggctttgttgactgcagcacacttctctctccacacagttagcagctatccttggcaggtgtcccaaggctctggcatcaccaacattttggcgtttccaaggcaacccaggcttcaccttcacagcttcacaatggcttctctaggcctccgtgaagggacacccctgccccaggcctggcctcagtgactttccttagccctggagattccacaatccctttcttgtgtccttgattctaaagccagaaccatgtggtcagagctgccgagttctgctgctgctggggctggaccatgctcctttgttcaagtatatttccaccagctttctgtttttttttttgatggtctccttcactatctaagcttggctgtcctagaactcactctgtagaccaggctggcctcgaactcagagatccgccatcctctgccatcagagtgctgagattaaaggtgtgtgccaccatgcccggccctaagcttttctttcattccttttcacaagttggcagcttagctggacggggtccttgctctgacgtcaccgctccctctattccacttagcatcaggcttgtctttaatctgtttacacttcctggtgcccctttctcctcaaagtggatattttgtatctccccttgctcagcttgctccttttcgttacagagttacaaaactgtcaatccataactcttcaatttagccctaggcagattttttggacaagggcagaaaccagcctcactcttcaccaaaatatcacaagaacagtctctaagctacatactaacattgttctcctctgaaacttctcgagccaggcccccacagttcttccatattcttactagatggcccgttaagcccctcttaaagcattcagctgcttctctcatcccgagcccccattctgccaacgagaagccctgcagtcaggccaatcacagaagt

SEQ ID NO: 22033 - DNA, 1174 bp, Mus musculus
ctattgccctagggcccccctcacccgcacccctgagcatcttgcttctgggtcctgtcactatgaagttcctctaaaggagaaccaccatctttctattccaggccagggtggcttgtgccctttcaccctaagcagcatctgcgggttccgagcgcccacctagctcgcttcccctcagcgccccatggcacgggagtcttctgtttgaagtagacccacactagccggcggctcccggtttctctcttccttctctcctctgtgccctgtgcactgcgagtgcccgccgcctcgcccttgcccacaccccgcccacgccctgccctctgcaccttgccggctctcctgttatttcccacctcatgcttctcttttcagctgaaccttattcacagtgaaatcagtaatttagccggctttgaggtggaggccataatcaatcctaccaatgctgacattgaccttaaagatgacctaggtaattggggatggggtttggcaccaccagctgtcagatgagaatttgtggaacccagaatttaggctctctgtctgcctagactcaggcgtggtcaaggcagacctccagtcctcggttgacatttgattgtagaccctgagcattgactcactctagaccactccaaatggagacggtcgcttacatctcatcaatgtgattgaccccttcccctgcattgcagacacgtcaccatctaaattctcttccataatgatcagactgactgctggtttcttggggggggggattttaaaatgtgtatgtgtggttttttttttttcttttccttttcctttatttctttttaagctgaaaaagtcaggtaacaacaaaacaacagtttctccattcaccctttggttagaacggcactccatgtgtatggagggaggcgagctaggtttcagagcacggagctggacatcattgatcatggaccagctcctgtccatcagccttccctaaccatgtggtgggacacagccttgccagagcacacaggcttgccgtatgcctctgggggcagggtcttaaacccagaccacggtatattctgcatgccttctgccctggactgcagccgctcttgtcctaactacgacggggctcccctccaggagcccactcccacccacacagacaggccac

SEQ ID NO: 22034 - DNA, 1149 bp, Mus musculus
tcctgcagcagccaacaggactcacagctgcactaaagttcccatgctgtggtataaaactgaaggttttaatcttcccacaagatgacaaagatgtaatcactttactcaaacattgaaaccactaaagatctttctccttcccagaaaatcagactattgggaattttcacaatttctggccgtctgatttgtgattcacgtccctttcctctgccatacactgtgtgtggttgaatgctctttggctaagaggtgaccgacaccaaccgacttctgttttggcccagaacctcgcggttcacttgtggattactagattggtcctttcgaaggctgtgcccatgtagcccgtgtgccctgtagtcaggggttttcttctcttgcccatggtctttttctacctcactactgacctttgccattggttcagcgtgccctagccaagttagctatccattcttctttacaaagactggcccagtcctctccccactagtcgctgtcacacactctgtagaccagaggattctcaatcttttcatacttgtgtatattctataagagcagcacagacttatagccaacccagtgccatgttctcaacattggtgtacaagcatgatggacaatccaatattagcctcatgcttacatggtggtgagagagactgacagccctccattggctgaactagtaccagtgctaagcagcaggcctcctgagatgctgtggtccttgcatctaagaatgctcgccactggtggccagaaggaatgacgggaaggccaggaaggactaagagttctccaagtagccgagctctgtctgcagctgcttcctgcctctgtccagcaaaggcagggcattccagtttccctagagcccactcccctggaccgaggtgtcgcaggccaccgagggtcggaggatgcctcctggctggtggaatcagctggagaatacatttcccagacgtgcccgtacagtgagaaagagtttgaagggttgaccctgcatgacttttcagcatctcatcctgtagacacttagatgagtgctcgcccatgttgcaccaccagaggctctcttttccacttcctcctctgcctccctccctccctccctcaccaacctcttgccttttc

SEQ ID NO: 22035 - DNA, 1126 bp, Mus musculus
gttccaggaatgggagtgtacatgaagcagacacgaagctcccactgggggccaggaccctggagctcagcctagggaaggaggtgcttctaaggagtgggctgctcatcaggtagtgtgggctgtgcagggagaaggatccagctggtcctggtgggcaccgatccaatccagggagccgggttgttcttagaccaactaacaggtgtaccaggggcttcgtcactgaaccaccaggcgactcctcgagccagttgtttgttttaaccacgggcaataaatatattttcagccaccccagtgatgcagctttgccaggacgccatggttttgtaaaagttgattcactcttattgagaataaaaatgatgcaaaggcttttaagacctggaaatgagaattgattaaaagaggggtggggactgtctcggttttttgagtcctctgtaatataatctcgaaggactgaatctggccctgccgatccgttggcttaaaggtgctctgcgttgggttagaagctgcatcatttttacctcctcactgtccgtgtccttttgcatcccgatgacaccgttttctcgctcactcatgcccgttgtcccctaccctcccttttgtgtcactgattgcactcaggctctcacgatgcaattcctgcggtgacgttccggaatctaaccattgctgtttacatcctgtagccgttacctgtattctgtgtgcatctgtctaaagcagcagttctagttgtcatcttaaggtctgggctctgaaagtttaactgcctctcagtgctgaaggcagatgccccgagtcttcatgcctttcacaggtcccctcaggttgcctcagtagccactgatgtgtgagaccctctgctgtttagggctagtctccatgctccctccccaaagaagtgagtagccagggtggtgagagctagtgctgatcagcccctagggaccccctcttgcccaccctgctcctagtcacttccaccctggcctctcctgattctgctcccttctgccccacctcccccaaagccagcctcagttagaactcacattcacctcactgcaaacatgaaagcaccgagctgtgtaggtggccgtatgccagc

SEQ ID NO: 22036 - DNA, 1181 bp, Mus musculus
agaagcaatgagcctcagatgacaattagatcaggcgagtaaaagttgcttttacacctatcacatatttactttatgatcacaactagcaaaattacagttatgaaatagcaacaaaataattttatggctggggaggtcacaacatgaggaactgttaaaaaaaaaaaaagtcttagcattaggaaggttgagagccactgtataaagtgatgtccaagaaaggcatttcttaatgaggaattgccacacccaacagtctgctggccttttagtgatggctaggagctgaggcataggtgaacttgcttggtgggtctacctccatcatttttgacactgaattccacagaatcttaaatgtgcacagattggctttgaccttctaggcttcttcaaaacagccctgcacatggccaatgcacaacacttttgcatctatatacaatgtaagatcctaaaaatcttacagtcatttgagttaagtgtgattgcttagatctttctccagagcttagatcagaaaagcctactgcctgtgtcaccacaccatgaaagaaaaggcatctttcttccaagacagtaggaagggatgcgaatacaggctgtaggcttcacttgaacacagttgtgatcagaaagcagttgctgcttgtgtgcagggcagtgggcactgaccagaagttctgctgctttgaaagggctcaagttctctgcagagaagaaggttggttctctgtgcagcacctgactggtctctcttcttcattcaggagtgttctagcctcaggtctgttttcccggaggtgaggtatctaagggaaggcaagcaggtttctctttgcctggtcacacagctggaggagccaggatttaaatgtggagctagcaagttcaaatactattgctcatgcattctatgatcactggtcgcttcctggccagagtcctactgctctgatggtagaggactgcaaagccttcccccgtaggggaagtgaggccacggtcttcactagtcactgctgaaagtcaccagcatcctcatagcttaaggcttagttaaaccgttgactgctgaattggtggggcattgggaactagaatgcctctttacagaaacaagttgtgacatctgaagtctgacacctgttctctaggccttgtacctctaactccct

SEQ ID NO: 22037 - DNA, 1158 bp, Mus musculus
aaaggacacaggttggattcccagcaccaataatcagctggctcatgagtgcctgtacctacagctccaggggatccgatgcccttcttctagcctctgtgggcacttaacacgcatggtgcacatgtaaacaagcaggcacacataaacagataaataaaaactaatttaaaagatatagatacaacaaagatgcttaggaagcaataacttttgatggtttgttttgaattaaatatggattatttaagtaagttcatataactttaataattcaactaaaactttagtgattcttgtaaatggctaaatgtagtttactattaaacttgtattagtcagggttctctagagtcacagaacttatggtagtctctatacagtaagagaatttgttatgatgacttacagtctatagtccaactccccaacaatggtcagctgtgaatggaagtccaaggatctagcagttgctcagtcccacaaggcaagcaggtaaaggaacaagagcaaatcttccttcttccaatgtccttatgtaggtctccagcagaaggtgtggcccagattaaagatgtgtgccaccacgcctggatctggaacttgttttgtcccaggctgaccttgaattcagagatctccttgccttagtctcctgggattcatagccactatgtcccaagatctccatgccaagatccagatcagaaacttgtatctcccagcctccagattaggatcacaggtgaaccctccaattctggattgtagttcatcccagatacagtcaagttgacaaccaggaatagtcactacatggcttaattctgtttagacttctatgatcttttaaaaacgtagtttgttttatatatatgagtgtgtggctcatgtgtgagtctgtgcacaagtgcacacctagtggtcctctggaactcaagtttggatgcttgggagtgtgggtgctaggaattgaacgtgggtcctcagtgagaacagcaagtgccgagccatctctgcagcctgacatctcatcatctttaacaaccaacacttaatagagagcctcagcaccctactacatgggaccaagcattctagtcccttgtcctcaggtactggggagcaagaaagcatagtgaaaatgccttcaagtga

SEQ ID NO: 22038 - DNA, 1163 bp, Mus musculus
cccagagcttctggaataggtaggtgtcagttaagagctaaacacagagagcctgaaggggtcaggtgccaccccagagcttccctggctctaggagcctccttcagcccacacaactagcaaggctccatgggtcttcgcgctctctcccaccacagcctcaagggaaggagaaagtcagaataacactacagagaatggtgcagcccagggttttcatggatccccaagctgccccatgcgtcagcactgcccagttgccctgaggtcagtgctcttaaccgctgagccatctctccagccaacagaattcatttaaaatttttttacgtgcactggtgttcagcctgcaggtatatctgattaagggtgtcagatcttggattacagacagttgtgagctgtcaggtgggtgctgggaattgaacctgcgttttctggaggagctgtcagtggtcttaaccactgagccatctctccatcccttgacttttgttctctagaaagtaaaacccagtacctgattgtctgggtttccatgtggacagacacgtggtgagggtggggcggtgattttcactcaggacaactgtcagggaccagtgctctccctagcaaaccaagatggatgggcgccgcactcaggagagtgccagatctttaacattgctgaagagctcttggttactgtgtcactttggccaggggccttagtctcttctaagatgggacccatactggggtttggtggggaagccacgctgtccctgaaagctataaagaaactgcttttttttttttttttttttttttggtggcggaaccaatgtgagtgctgaggccctggctgtctttaagggccaccgtggcaggggaacagcctttctgatgtagaaatgactgttgggtcatgcctttgaggaaacagttgagaggacacctcttgttctgcctctcccttggtgctggggcaattctgaatattggtatcttatcagacaagcgtgccacctatatccattctggcctctggcaagacgaaactcatgattttaaatctgcctgtgaactgatttgggaagccagcagctgggatggtttccaccagctgctcactaaagtcctgagccgaatccgacagcatcgtggccgctttgccagcg

SEQ ID NO: 22039 - DNA, 1193 bp, Mus musculus
ctttcccccataaaatgcccatcgttatggagtgggagtaagagttacaggcctaccttggcaaggccaggcaatgtattaactggaattccactcaacattaatttgaggctctagaagtattccttgtttgctagagtctgactctgtttgtaaaattaagttttatttgccagattcaacttttgtctccaaggcttactacctccatctgctaacctaggcctcgttctggaagcttctagcctttgtacagtctaatctaggccaagaacctacttatttttgaataagctcaccttctcttgttctttctaaactcttgctggctgattcaactctgctttttggttcagactcctgcttctgactggttcaatcccgcttctctcagtttctcactgaatgactctctgtggcctcaaactaacgctagcaatctgttctaatagtctggctccgtctcatcctctggcttgttctgtcttcgcctgtgtctagcttgccctctcttcaacctgtctctgtataactcttctggtaaaactatccctgaactccacaaactgaactgccatgaactcagctccactgcctgcctctcaactcacccactcaactgaactgactggaactcagagatctgcttgcctctgtctcctgggtgctggggttaaaggcgtgtctgggtctagttggatcacacagacctagaagatctttgtatgtgatctcttgccagagcagccgtattctaaattaaaattcttttccatctttaaaaaaattattttaaatatctgagaagcatttatcctcagaaaaaacatcagatgtttaatcctgtaagagggtggctctggtgtacgggtggaccatgctttgaggtcagatgtggctctctgggtttcatgatggtttcaccacgacctcagcagccatgtcaagtttaacatggaagaaacccaggctggaagaagttaagtggcttgccagggtccctggctaatgaatggcagagcctgaaccagagcccagctttctcaatgccccaacgtctaggatctacgatcttccctggcacacaggacttgttcccttccagggaaagtttccggagcctgtgcgctatgaaagaccagcaaaggggggttcttggaaaaatactgcctttaccttaggtgcctctgttt

SEQ ID NO: 22040 - DNA, 5023 bp, Mus musculus
ccttactcagatgggctctccgctgaaccccatttcttctgtttcatagtgcagaagtattctttcaactatatttttagtggacttgttttaattttagaggaatttccagtacagatgctgtgagctgacatggaaaacagatattattttttctacgtaattgtgaccaacacatttgtattttatgatgatattacatttgtttgtattcgtgttcattgtgattaactttcaaaagtattgtaaacgatgtagagtattttgcccctgttgaaatgtttagcattgatcttaaactggaacgtactttttcttattgtcccaacgttttttaatttgttaaattttttttacaaagtagttcatcacataatgaaattttatcctataagagaacatatattgtggaaagcagtagatgatatttctctgggaatttctttgccttaccacctttgaaaaagcatacattgtttgcaaaacctcaaagtagggcttgcttaaaggaaactgttgaatcttgtttgaaggacactgcagtcctaacgtgttcagtgaaagcaaggtggtagatttctggacgtcatacatttacatttaatataggtaatattcatcagtgtaatgtgacttcatgccatatatattttgtaaaacaattcctttttaaaaacttcaagtatttctcatttactcaaatttgttgtaagtcctacttaacagttagttactatgtgctctgtggccttgttcagcattgtttgctgctttgggccaacaattcaagaactctaattttcctgtgcattaatcttttcattttgcacttttatgggtgactgtcttagtgtagcctctggtaaaatactattaggtggcctggttttagagctcctcctcgctgccttggcactcctttgtgcaacacgaccacttagagatgacagctgtgagctgtgctgctttttctagcctttaatttccaatgtagtttataatgttgttcttctatagctccagctaaggtgcctgttagtcccctacaatgttatgagcattattgacattgaaaggttatgtatgtatgaatacctttgctccttaccagacttgtcatacaaggactcgtgcagtgtagccagtagaggctctttggttggcccaagaatgaggctgttggtgtaagtgaatcacaatagggattgggatagttcatgtcatatgtcatatagcaagacaatgtagagtgtaggcttgtctctctgcatcaacgctctgcctctttctttttatccttttagaacctacatggacgctaatctccacaacactgttggatgtgaacactcttaagacactcatctagttcactgtgccttgtccttaggactcttaaccactttctagggagcagttatggcctgagatggacagtcatggcctgagaatgaagacactactttgataaagaaaaaggcctcatttgcctatcagagtgagaaaggtttttttctggtgccttttgaaaatatacagagccacttggttcttctgctgaaaatgtaattttggtttgactttttagagtgcccttcctgcctttatgaggaaaacagctatttttttttttggggggggggattccttttgttttctgtgccattatttattgcctttcagagtgcaaccattgggtggctttgctccttcagagagggctccttgatagccttcagtagcttgagctgtagacataagtattccatagcaagagtgtgtcagctccatgagagagatgtctgctttatagccgaggcagaaaccgttcatgttcctttacttggcagccttcaggaacaggtttgtaagaacgtgtcttgagttgagtgagtgtatgtctgtgagctctgctgaagtctggacacaagggccttgcctgctccttttttcagcagtgggttacatgttgtctctccacagtcttcatgtcataggtctcggacttgcagagtcctatgtggcctgccatctgtacagtggcaggactgaagctctgagctgttctgaggttcatggagaaatcccaacctattctgtggtcagtaaatggagactgtgtagtctacctgctcctgtactgtccttactgtatgtaaggatatacagacgcctgtgggtaggcagtactcacagtgagatgaagacagcaagtgtgcactgaaccacagagggcagggagtagggcctctgaagaagccaccagaccagaccagtgccggtacagtctttgtcagagatggctctgatggggcccagactgaccctgaccatgctgagttgctgagggtagccttcagttctctaccctctgaagtgctaggatgacagacatccgccatcatacccagcttccgtggtgctaaggatcagcctcagtcttcaggcgtgctaggcatgtactttgccaagtatttagtatacaaaatacattagtatctgccagggaaaaaagatttgcaaataataaagattgccatcagtttgataaatgttgtaaatggaagaatcaaaatctcagcgatggattacagcaacaagatgctgcctaggaaaagcaggaccaagaggtacatttgactagtataccttcagcgtagcgtgatgacctcactgatgtcacccaactgaacttaagggctgtaagtaggcgtgctgtgggccttccagaactagagaaaattataggaggaagtcagttctaaagtatcaaaagctgggtaatggtggcacatgcctttgattctagcactcgggaagcaggggctagcctagtctacagagcaacttctacacagagaaactgtcttggaggaaaataaaaaaagaaaagtcaaagagcaaacaaatagaacagagtaggaatccgtgtccccttttttctatgtttcacggttgcaggtgtaagaaaagtagtcatagatgtggctgagtttctaagatgaaaccagtagtaagattgctaaatataacacttcaaccaagttaaacaccctttgggggtatgaatgaaagtaacactgcaatatgaaatgaaccgtgcaagtaacacttggggttacctcacagtctccctatgcctgagaggactgtgggaaacatttccatcccctgccagtatcgccattgggaggacagagtagatgaagaagtgaagtcttactggtccagggcacgcctgtcagcaatgccatttgtgcttctgccacagagagcaccgagaggcttggctcagtatcctcgaaccttctctggtcacttccctggcagcacttgggtccctgtcactcactggtctcttaaaagtcccgtctctttgcttcctaaagattctctaaaaaaattactattttttatttcttttttaaaagtctttgttattttgttttgggatacagtctctttgtacagtcctggctggcctggaaattactatgtaggccagcctcaaacttgaagtaattctcttgcctctgcctctggagttctgggattacaggcatgcactgcagagtacagtgagctctgatggcttttaaaattcagcccctttgagggtttggttttagatccattagctttgtctgaacccatctttgtccggccgagtaaatcctctgctatccggggtctcggtagaaatgtgttctcagtatacatacgactaaacattggttgtttataggtagcctcagatatttggtagagcatcttttttgaaagtaatctccagctaggtgggtatttccctcacagcagtaggattttccctttaggagataccagttcttcatctttcttgtgaaaataatgcctttatggggagtgaagattaaggagttgtttctacactaacagaattctatttgatggacaacttggacagttctgtggacttgggtgggttctagtgtgctaagaaggataacagtatttaatagtgtctgtcatcaggccttgctcatctccctgtctagggctgtaggtcagtgctcgagcacttagcaggcatcgagtctagtgttcagtgcccagcattgcacagaactcagaatatatctgtactgaaactgaagtgaccacctacaaccaggtggtatgccagaaccacagaaaggagattcacggtgatgtgtttaaagcattgggctggtgacggttgctgtgtagtaatgacctcttcctcagcaaagagagtcctggagcaggctgtcctcagaagagggaagggactggtgtgctccttgtgcagataacttagtgtataaatcggcatgagtagctatcctttaaggatttgtttgaagttactctttgtaaaaagttgagaattttgtgtgcagttgggcacatgcttgcccttcccccacccgccatagtcctgcctctcttgctgtgaactggtgtcagctacaacactccagctaggtctgagctcttttgagagaaggtctcgtagagcaccattctcagagagaagctaaagcatggggagccttaggacggtcaggcaatgcactctttaccacggctggctaaggctgcagcttgaccgtccttacctaaatcaggtaagaatgtgattacagagcgagtgcttgtgttccccggcctgccttctccgaggaagatgcttcatccgaggatgatgcagagcagacgatggctgcactgtaggtctgcctccttctgtgtatgggttctgctgctgcttacggcataggaaagtacactagcagcgtgcttcaattctgccatcttttgatacttataaaaatgtattaggttttactgtattgtgctctcaaagccataactcttaagaaatttggtttttttgcatattgtttgctaatactttgttttaataaacctcaaaatctgcttacagtgtctttgtttattttcttatactttgcctgcccccgtggttcacatagtggtggtctgaggaggcgagact

SEQ ID NO: 22041 - DNA, 1176 bp, Mus musculus
ggatagtttttcatgtaccatgtggttatgttgtgtgtgctttccattggcatctgataaggtgcagtcatcagaatgggattctcacccccctaggctgtgtgtgccctgagagactggggcttctgtccttcatgtcctcttcttactgcctggcttcagaggtggctgctgcatatgtaaccagaccttccctgtattggattaaataccgtaaatattcctgggtgccatctgacaaatgctttgggggcaacaactcctttcctttccatgcacgttttgctggtgctgagtagactgagcaggatacaacagaatgtagtgagtggcaggcctggattctgttctccatggtctcttcctctctgtgtgcgggttgaccatcattgggagaatatgagtctcacttctatctcatcttcaaaattagggactacaaactattgataagccacccccttctctccctccttgtccctccttctccctccttccctccctctacacatccactcaccactcacccacccatctacccattcatatctgtgtctatcagtctgactgtctgtctatgtatgtatgtatgtatgtatgtatgtatgtatccatgtatgtatgtatgtatccatccacttatctgtcatctatctatatacccatctatctctttgaatggggtctcaccatgtagcccaggctagactcaagagttctcccacctcagccttctgtgtagatattctataggtggtatcaccttacccaacttgggctatttttaaaagcactttcacgtctatagcaaaatcgagacgttagagagacttttatagatactagatacctatatgcttgcccaatacctccccagcaacaccctcccatcagagtgctgcatttattaagtgaaggtcacacactcagacctttcgtatcacccgaggcccatagtttacaatttcttagaagcatgttttgtgagtttgggtaaatgatgatgtgtgtatcttcacaatgccgtgcaagtagctttatctacctcatgattttctattttccgtgtgttcatcccactacacatctgacaaatactaatcttctcactgttccttagttttgactttcagaacattataggctagaatcacacagtgtgggcttcttagactg

SEQ ID NO: 22042 - DNA, 1645 bp, Mus musculus
tctatgaaacctacttggatcccatgcctggaatttggaagcatatgtacaaaaatcatttttacgttttatttttaataaatcattgtgtttgaccgtacatgtctaacattttttttttcctaggatccactccttaccgttttaaaggatatttttgttaggttttgatgtgtacttcgagacgcttaaaggaggtcttgtgggctctttttttttttttttccccttcctgtttgcccagttagtgatgttgaatttaccttttacagacaaaatctttctgaagtggtggatgtggctgtttagtcctgtgcatccatctctttgtaataagcgatttgcttatcatcttgacatggttggttctttctatgagaatttacttcaaaacatgtactgtgtagtttaaaaaaaatagtttgtgtttaaagcatgtgttctcattcatataaactgtttaaaacttttttaggtgacctagtttcttccttattggtttgtctgtaatgaatggttacaaataagggttctattttaccctaacactaaatgagttttttttaaatgtattttcagagcaggtttaaaaaaagcgtttcttccctaagtctgaactttgtcctcttttaagtccaacggatgtagcaccatctgctggtagagtggcagtatagctgcaagacggttggttaagaaaaacccaacttacttgttcaggacaatttcatcagatttagcagtttgccatcagaattctgcagacttgaaaggtccacatttacttgtagctgagacgggcttcccgggagtgtagttaacagcccgcatcagtcactttttctacgtgagatttgaacatgtaaactgctatgcatagcttgggcagtagccccaaactgctccggtagctactgaagcagctgtgtgtactggggttttaggtgcaagttgtaaaacaaaatatctgtattctgcttggttaacgtgtatttgtagcccttcatgcaatagaattcaagttgttgtttataaaaaaaaaacaaaaactgataatagaagaaaatgccttcctggatagaaacatagaatagcaacgtttatggatatcacaaataaagaattcaattcttacatgattgagtgagagtatgtataacctggtgggtgggctcagagtacctgctatcttactgggtttgacgagatggtaaaaatttgactcggattttggaagcctaaagcctaatggcatcaagcttttcagaaaagatttttctttttaccttttaaaatattttaatgttggaaccccacattttaagttgtcactgaataattcctaagatctgattcttgccaaaatattgtaagtactaaggttcttaaagaggtaagaggatttatgtttggctagtttggtaagtgtagtgagtgatagctgatgtttgggtcatgtatttaacactgtataggggtgtgtttgctgtggaagaaaaaaagttggatgaagttctttgctcacaattgcttgcttcccttaaattcctgcttgaaactacacttgaagatctaatgcaggctttggtggggggggggggtccctctaggatacaggaaaagacctaaaactcattacatgtta

SEQ ID NO: 22043 - DNA, 2361 bp, Mus musculus
aataaccaaatacagtggctgtgtctcaaggcacagtagcaatttaaagaaagctcagcagcccagccagcattatttagaaagcagttgatgcttgcaaaggtgacctgggtatagcttagattggctctccttaaattgttttcaaggtgacctgggtatagtttagaccggctctccttagattgtgcttcattgttcttttcaacagctgcagagtccagaagtcagatttcagcaacaactggaacaactcagtgccatgggattcttgaaccgtgaagcaaacctgcaagctctgatagccacagggggcgacatcaatgcagcaatcgaaaggttgctgggctcccagccgtcatagcagcatctctctatcctgagaaaatgtaatttatttttgataacggctcttaaatctttaaaataacatgctttatttcattgggattctgtgctgttataaaggaaaccaataggaagtatctggaggcagagtgcagtacgacgggcgggtttctgtgtctttttggaacagtgggaatcaatgtttcttctggttaaggctgctgcatgcatcaaacacttggcatttattgtaatttttaaaaaaatatcaccttttctaattgggtgaacaaatttttgtcctgcatctgtccaactaacttgctttttaaacataaccctatggtagtaatttatgtagaataaaggcattaaaaagcagatcatttgcgcgccccatgatttctggtacaatagtgcttgttgtgactttggcatgcactttgcaaatgatgctgtaagatttatactcctgacaattttgtttatttgtatacaatacaaattattgcacatttctaggccatctaagcaaaatttctgtaactaaaaaagtacaataaggattcctaattgtgtagaatcttacagcatctttgataaacatctcagcagaagtgccatttagtctgtgtggaaaataaagaaaaactaactctggttatctctttagggacatttaattgtacagacaacataatgtaacaatatctcagcattatataatggctgtaaattacctttccttgtgccgactggaggagcactgtatcatgctctgatgtgtttgctggggcgtcctgctccccgtaggtgtcgtctacgcagcattgagtttattgaaatgtcgctttcactggaagtgcggatgtttcggttctaattgccatataaaagtagagctgtctcttgggtttatcagctttctcattcataggcaatacctcgattttaaatgattagtgagccacttgtttctcaagtgtttggctagttctattaagaaatagttgaatgtcgtgctgttcggagcctcagaagggggtgggggaggggtgaaacagaatctattctggattgggccagcctgaactaggtaatactggcaattaagattctgtgaagattctatgcatatagtagtgtcatttgggtgaaaaagagccgttttaacaattttgagtacgtttggctattctatagcctctttcttccttccccaaagacgttctacttgcctaactctcaaactgttggggtgatacattcctttgggaccagttaaaatacagcgttagggtcggtgacatatgtgactggctctggttcagtattctcttatcttaggtcactgtagtctctcttgtatggttgcccaaaattataatgttaaataatctaaagtgagttcagacaagtaaaatcaagggaaatagaaggtgaattctataacttctgtaagttgcttgatattaaaaggttgagaggcaggttggccccagactgtatacttttctgacactttacctgggaagaaaacatgtacaaaggtcagggtggaggcatgactgaggaggtcggcacagcctgcatgtgtgtgctctctctgccttacgcctcagtctgtggttggaagactttgtactggtgaatggcaatatgcaggtggggcagtgtcaaaagcagtttgatttattaatctccaaataacaataaatctccagcttttacacttggttgtctcgcctcttttgtagaaaatgtctttgttttttctcagtatgtcttaatgtaaaacatatttgctttacctagattctgtgaaaacttagagatttcttttgtctgggagctggggagtggtggtgcactcctttaatcccagcactcaggaggcaggggcaagcagatctttgagttccaggatagagaaacaatagctcaaacaacaacaacaacaaatttttttgtgggctctggggcttgtttgtccagcacggtcttactctgtag

SEQ ID NO: 22044 - DNA, 1175 bp, Mus musculus
tgtcttaagatatttttaaactttagagtgtggaaaagctaacttgaaacttcaaaatataggaacatcacaaacacgggactcacagcaaattagaaagatgaatggagacgcttaagtgataaaggggcactagttcagaatccagaatgaaatgaagaattaaatagttggttaacattacactggcatttcccccccagtactgtgtcagaactcttctctctttattgaagtaagccaacttgctctttttgggcctctgaagtgtcactgtcagaattcttgtgccttggagccataaccaagtacagtaaaggttgatctgaaaatagagcttagtaactagtactggttagcaactttatttagctatgaacactaagtgtggagaaggggatgtaaagtcacaatatatactgtgtcttaaaacataaatgtgtgtcttaatctgtttgtttgtttgttttttttgttttgtttttaaataaatttttagctagtatgttcaacacccccggaatgcagagcctgctgcagcagataactgagaacccacagctcatgcagaacatgctgtccgccccatacatgaggagcatgctgcagtccctgagccagaaccccgaccttgctgcgcaggtgagcttgtggctgtgctgagagtgttctgaactaaacaggcctgtggtatcctctccgcacgttggcttgtgctctctcagaacactagagatgtggacactgcacctccagctttgggggcagttttagttcagatatacttgaaacaatctcatgtctgccatttgttgatgagatgtacttttaaaaacaaaaccaggcatttttagggaacctgctctgatcactgctgctccccagtgtggtgtttggtgctagctctcggggtggtggttgtggatggagatggagcagcagcacccttcctgtgcctgaacagctggagggagtacagtgagcacccacgtggtcactgctggaggaatgtagcttacagtgtgctctgggtgcttacagcactctgttaagtttaaaagcttctcttctttcattatgaaatggtttttattttcaaaatcctgcagccacactgctacaagggtatagcagatgtcgttgaggtagggtcggtccttggtgatgacttatgt

SEQ ID NO: 22045 - DNA, 1164 bp, Mus musculus
cctctcaggggctagccttggctccctcccctcctcttttctcctctcctttcctctcctcttttctcttctctccccccgccccctctcaaaccttgatccagtttcatgccttcaaaccggtaccatgaggaggaaaatgccaaattctgctgacatgatatgtagcctggttttcttggacatggctacagtgagcttcatgtgagggtctgtgatgtagttagccttctgtttttaaatacatttggattttgctatggtgacctttagatgtgtggggtcttccctcagggccccacattacaaagccctaatctgatttctttaacaatggcaattgcttctttgtaactgtgaacttcactattttctggccaaggctgaatctcaagatatcaattcactcaattctccaggacaaggcagagtgcagccagatcctttgccatgaaggaaaggcctgcagcctggtttcccttgtgtccgtgttctcctgaaacctcatgcgcaagtctcctcctgtgtacatttcttggagcattattgacctgagcaccaagatgcccattaatcagctcacgtcagctcaaagcctccagggcttctccagcccctggctgtgacctctgctgccttcctctggctgacaaggacactttcacctctgggagtttctgatgcttcccccttttatcattctttagcataaaatctagcatttctttttaacacatgtctcactggttcatacagagcctggtagcatgtagtataccattctctctctctctctctctctctctctctctagtaagtctcagtgggcttcaaggtctgtgtatgtgaagcccctggggtttgtgttattactgggaacgttacccctgcccccctgacttcctgtccttggtttccatagaatgaattcagacagtggtatagaagatgaaacatccttaagagatgactgtaaacagtggctaagggaccatttttgttgaactatatgtttgtggagatggtgttatttctaaagcctctaggatataagtctttgctggtggtgggtattctgttgttcatgttactggcagaatcacttgattaacttttttttaaattatttttatttatttagatatatgagggctctatctgcat

SEQ ID NO: 22046 - DNA, 1580 bp, Mus musculus
agaggcaggagatctcttgggcttgattaaggtcagcctggtctacattgtgagttctagaacagcaaggactatgtaagagaaatcctgcctcaaaaattgtgaggggaggtggggatggggggtgggcagtgtaggtttaagtccatttttggagatggcctgtttgtgatagcctatgaatatattttgtgtttagagatgaaatacaccaggaatcttaagtactttactaatttaaatatagcagaataggtttaaaactcttaattagcctttttggctctagaattggatgatacctcaccctttaaaatagaactagtgtttcccagaactgagcagatgagatcaggccaaggcaggcagcactgcgcagtcggagtcctgattaaaaaaaacagctgtttaaagttcagtgtgtctgcctggaacttagcacacgtgcctcccacaggcattagctgaatgcagaaggagttccttgaatagttcagtgctttcttttaaactggagatttctttcttagacactggaacttgcgagaaatccagcgatgatgcaggaaatgatgagaaaccaggaccgagccttgagcaacctagaaagtattcctgggggctataatgccttacggcgcatgtacaccgatatccaggagcctatgctgaatgctgctcaagaacaggtgagcactcgtgcccaggctcagtctgtgactaagggtactgctatgtgcagaatgtggctgtactgaaaaaaatcattctgtaattgattttttttctttttattacagtttggtggtaatccatttgcgtccttagtgagcagttcgtcctcagcagaagggactcagccttctcgaacagaaaatagggatccgctccccaacccgtgggctccgcagacttcccagagctcaccagcctccggtaccactggcagcaccactaacaccatgagcacctctggtggcactgccaccagtacccctgctggacagagcacctcgggcccaagcttggtgcctggcgcaggaggtatgtgtgcctcgcattgattacaagactggtgctgaaactatttatgtatctgtgtgcatccctttaatgaagactctttgttgcagacttttaggattgtttgaggggtaggattaatatttatttatttatttaactctgtgtgtgtgtgtgtgtgtgtgtgtgtgtgtgcgcgcgcgcgcgccatatgtgtacaggagccccctggaaatcagaaagaggtgtcagatgccttagaactgaagttgtacatgttatgagccatcactcgggtgataggggttgaaccaggttctctgtgagagcagtaagcgctctctctctctctctctctctctctctctctctctctctctcaactgctactgtctctacacccacaacatgccttgatctgtgtattcattgtgacatgatcaaatgtagttgccatgctatacagaacatctccagagctcattcctgggaaaatgtgaaaaggggaaataacatattttaagatgacaaaatggttgctattcaaagaacatata

SEQ ID NO: 22047 - DNA, 1149 bp, Mus musculus
tggtttcaaacagttcttgaaacagaataattagtgtctgctggtatcagggttatattaacaagagctctggtcttctgtggttgaggttaactctgaacaaacaatcagtagtgtgtgctgtaggctattagtagggtgtacatgcagatttctttgtccagtatgagagtacaagtatgtcttcttaatacacatataaaagtcccctatcttagcatcaggaagtctcttcaaatgtactgcaccgaatagcccattgagctactggctcattagcaccatgataaccttcatcagtgtcaccagctgatgaaggcttttgggtacacttcatacctaagccgtagcataggaattaaagctgaatagtataataaataatgaataacttataatgaataagtataactttataaatgaataataggaattgttttgtttttaatggtttttaaaatatagagttaatgacttcatattttagcactgacttctgattttcattttttgttttttcctcttctaaggcggacttggaggacttgcaggtcttagcagcttgggtttaaacaccaccaacttctctgaactccagagccaaatgcagcggcaacttttgtctaaccctgaaatgatggtccagatcatggaaaatccctttgtccagagcatgctctcaaatcctgacctgatgcggcaattgattatggccaatccacagatgcaacagttgatacagagaaatccagagattagtcatatgcttaataatccagatataatgagacaagtatgtagaaaagtagttctttttttacttaaactaaagggtgtttatgtgtgtgtgtgtgtgtgtgtgtatgtatgtaaatataaaatgttattgccagagattgccttgtgtattttttataaagttagagagaatcccaaccattatttagggaaactcagcaaaacaatattaattttgtttgtttgagctctgagttttctgctatgcatgaaaattctttacaaactctccttagagacaggctttttgtgccggtttctcctttggtggtggaggtggtgggggtcctggaatgcagggtggagaggtgatgtcagcaccttgctccttacacgtttcaaataaaacag

SEQ ID NO: 22048 - DNA, 1147 bp, Mus musculus
agtccaaggccggtggctacacagaaagattgatccgggggtcggggccaagaggatggggcaagacaagataaaggaaggcaggaagaattttaaatgattgagaagtgatgtggaggtgcattctacaggatttgaacatctgattgggaagggagaaatgaggtcttgagacccggttgcttgtaagagggagcgtgaacacttggaagaggaggatgcagctacttaccggttttcataggactggggttgaaggcagctaaataggtggccataagcagttgaagcagttctaaaacagctgaaagaactgcacctggacagtacactgggtgctggggaatagttcagtcgatagcttgagttctagccccagaataaatgtaaaagctcccagcgtggtatatcaagctctggtcccaaagattagcgggcagaaacaggtggatccctcggtcttgttagctaccctcccactctccacaaaaagatagcacctgacaaatgataaccacaccccctcccagcatgtgcatgaacaacacacacaaggatcggaaactcctcagcttagtagcgtattgctataagagaagggggcagactcagtctagaaatacatcatcattagagtcttgctaccccaaagttgaccacatgtgtgtcaccagcaagtttgtcagaaacgtgtggatctcgggcctaacacacacctgcccattagaatctgcaacctcaaagaaattccaagaggtgaccccatcagattttgggaagctcagctctagatgaggaaagtcaacagaggaggggagggtgggcagggaggaagagagggacacttgggtaaggcaccacagcaggggacttcagtctcgtcaaagctgggccagggagtgtgggtcagaaccacacaccgtggagggtgcgggaaaaccacgtgtgtgggttgtgactggctgccacgatcacaacaaccgtgttttcactgaggagggctttagagactcttactttcgggctcggggttgcctagagacagtcctagccctgctcacacactcagggcatgttgaagtaagtgggtggattgatagatcaagaacaaagtgtccccagagcaaggtcagctaatcgtttatca

SEQ ID NO: 22049 - DNA, 1816 bp, Mus musculus
ttatcattgaaattgtcttaatgttgattaagatgttttgaacaaaaattctaattcgtactttttttttcttttcttttatagtgtgaagcagtatgcagatgttgaaggattctaatgcaagatattttttcttttttatagtgtgaagcagtattctggaaagtttttctaagactagtgaagaactgaaggagtcctgcatctttttttttttatctgcttctgtttaaaaagccaacattcctctgcttcataggtgttctgcatttgaggtgtagtgaaatctttgctgttcaccagatgtaatgttttagttccttacaaacagggttggggggagggcatgcaaaaactaacattgaaattttgaaacagcagcagagtgagtgacttttattttttgttcattgttggtggttttaaaaaaaattccccccatgtaattattgtgaacaccttactttgtggtcactgtaacattggggggtgggacagggaggaaagtaatagtccacatgtccctggcatttgttcagagcagtgtgcagaatgtaatgctcttttgtaagaaacgttttatgatttttaaaataaatttagtgaatctatttttggtggtcttttttttttttaagacaatttcaaatggtggttgaattttccagcccacccctaaactaaacactaagtttgattttcagcagctcctctgttggatataagtgcacctcttggacatagacaaaatacattggcaaactcagtttgggtgacttcttaatggttggaaagacttggcttgataaatttccatcacatattcatgcttataataagcttgggattttgtttgtttttgcaaatgtttgccactacttttcaacagttttctgttagttgtggagaactgcggtggggagcaatactacaagagttacgcatcttaagtatatgccagaagcctgatgggcaatgagctttattaaccagagtaaacttggttatggaagtggctgatgctgaataaatcctggttatttttgttagataatttctcacctatagacttaaagctgtcaacctgctagtgtcttgttagttgaactttgtaaaaatatatatatatacttgtttttccattgtatgcacaatgaaagaaaaaagatgtaccatttctctgttgtgtgttgaattatgtaggaaatgtttgtgaacgattcgaaaaaaatggaaaaagttcctgtggatgttttgtgtagtaacttggcatctgtattgatagttcaaaatccacatctaaataaaacttccatgatgttagttatgacgtgtgcccaatttgaaaaggggttgattaatacatgtaaagtttgttgaagtgttcctcttgtaaggaaatacagtaatcttaaattatggggttttgtgtgtgtgtgtgtgaagtgttttttgttttttggttttttttttagcacttagagacagtctggttaaagtgcatagaaaattcaggtaattatttagacaacctgttagtgctaaatcattttgagtcattatacaagcctcaagtgtaatctattttctgcattgtagtgcggtgagcaattagctggttcacatattctcagaattacctaccttcagctccaataaggtggagtcatgaataagactggtataagaatgagcaggtttttgtcaacccatgctaagtattgcatcccaagggctttagagggaatggtggcgtacttagtttgtgaaagagcacataatctgctaaagactaggaatgccacggggttaaagg

SEQ ID NO: 22050 - DNA, 1196 bp, Mus musculus
tccgttgtaatgaaatgaagcaagttgctgaggacggaattactggtcccccacaccccttgcggggggggggggcgcaaggctctggtggtggaggtggttagggtgtgcttcattgagacaatctagtctaaaagaagtccattatgcctgtctctcctcaattatagtttttaaaaacagttcacttttaggaatattttagtttcctcgaatcagaccttgtttttatatactactgtagcactaggatgtcacttgtgtgtgctggaagcagaatcctttttttttttttttttttttggaagattttaagcaaaagagtgtttgctttctgataagccaatgtactagctagcttctttatttttcaacagattggtggatccatttaattcaagaaaatggagaccgaacagccagaagaaaccttccccaacaccgaaaccaatggtgaatttggtgagaagatactttaattataaccaattagtattttctgttctgttactttaattaccataaatgtttttgatatgttctgtttacctcttatatagtttcatttttttgtagtcttgagtttgtctgttggtttttatgaaaagaagtaaccttttcttgcacaggttaaaaagcagtacagtttttccaaccaacattttaatcctttgaaatacttattaaaataaggcctttgatattagggatattagggagacaaaggcagggacttaaaaagtggcttcaattaccctttcttgggggatgtttctaattgaaaatttaaactttaatttctaggtaaacgccctgcagaagatatggaagaggagcaagcctttaaaagatctagaaatactgatgagatggttgaattgcgcattttgcttcagagcaaggtataagctctttaaaatttggaggttggttagtagttaaatataaatggatgctttttcactttgaactctgctttggctctggaaacctttcagaattttataacacgttgaataaaaggtttttaaagggttcatttgttttgagacccctcacaggtgaggcgggccttgagctcttgatcctctgtctttgattactgggattccgagtgtgcgctatcacatttagttgtggttcttaatgataagcagatttcagaactgccggtagtgctgaaattttaatggtga

SEQ ID NO: 22051 - DNA, 1188 bp, Mus musculus
tctaaagaaaatggccaccctttccaggcttgttcttcaagatcatttgagaataatacttatctatctattggcatggacttacattctccaccctttatctatttgtctgttctaatggccagaaagccaaaggaagttactactgtgacagtcaaagcgtttattgtcactttaactggaaatctctcaagttctggtggcttttggggtgtaactgcaaaagtttctgatggtactgcatatctagatgtagattttatagacgaaatacttaccagtatgatagggtattcagtaccagaaatgaaacaattaagaaaggaccctcttaaatataaaacattcctagaagggttacagaaatgtcagcgagatctgatcgatttgtgttgcctgatgactatttcatacgatccttcttcatgtaaaggggtggtgctggaattgcaagatgttggtatggaacacgtggagaacctaaagaaacggttgaataaataatttgccagaatgctattggagcacactttaaaacaggcaaatatttggaatcaaatttgtgtattctcagttttggaattctgtaagaaaaagcttcagagcttaaagctggggcagctccgcggttgacagacacagtgtctgccaagtgtggtaactggagtttaaccatctggtctctcgaggcaaaaggcgagaccctgcttccagaatccgttggtagtcctctacacaggtggcagaggacacacacacacacacacgtactaaataaatgacatttaaaaataaagatatttaatcaaaatatgtgaaagaatgtttatattttggtgatactggcccagagtcttgtaatgctagcaagtttctaccatagttacatctctagatccttgggatgtttgtttgttttgtttatttttttgttttccctccctggaaactggatctcatacacaggctgtcctcaaactctcttgtatagctgagagtgacctcgagtttctggtctcttgccttcaccacccaagtgctagatttagggttgtacatttttacctgtgcgtgctaggcaaatgctctaccaactgagccatatccccagtccttgttgaagggtttagctgacccactctggctgagaaacttgttttccacttgtcattggataaacctaaaatt

SEQ ID NO: 22052 - DNA, 1242 bp, Mus musculus
tgctgcgagatatgtactggtccaatgcctgtatcaacctacttgggagaaccaatcacctccatcgtggatttaaggcctgcttcgtggaaaggaatgcatacctagtactgtggaactagcctgtagctagtgtagtcacaggcccttgagaacccactattgatgttatactaactagatgtgtagttaatgtgttctcattatttgtgtttattcccatagactagcatagctctcagccttgatcaaagaagcctcttactggccaaagtactgagaataagtgaccaccgtgtgctctgtgctcagcggacatctgcgtggctctctctgagacccagagagtattgcagaagagggctggaaaggctgtgggagccaaaggatatggaggagtgcagtgggctctgtcacctgggtgtgaacacagcagctgtggctgctacacaagactgggctgggggaggggaagagggacaggagggtgggtagggaagaggggattgcaggaagggggaggggatgagatgtggcagaaagcaaaggtgattaagcctacccccaaccccatctgatctcagaagctaagcagggtcgggcctggttagtacttgcatgggagaccgcctgggaataccaggtgctgtaggcaaaaaaaaaaaaaaaaaaaaaaaacaaaccaaaaacccaaaaaacaaaaaacaaagtgtcttaaaaattcacttatgggttagagagatgactcagtggctaagaatatttgctgctcttgtggaaaatctgagttcaattcccagcaccgacatgatggtctcacaaccgtctataacttcagttccagaggatcccatgacctcttctgacttccaatggcaccaggcacacccatgatacacacacacacacacacacacacacacacacacaggaacaaagcactcatacacatgaaaataaataaatctaaaaaagtattttcaaatccagtttaaaagcctgcacttccagaggctctttcagagaattctcctgtcccaattttttaaaagtaagaaaggaaagctgggcttggcggtacgtatccatgatgccagccctctgaaggtcttcccggcctacacagggaattctaagatggtgggtgttacatagacagatccgatctgtgtctgtgtgtgtgtgtgtgtgtgtgtgtgtgtgtgtgtgtgtgtgagagagagagagagagagagagagaga

SEQ ID NO: 22053 - DNA, 1184 bp, Mus musculus
tatgtcctgtaccaggtaggtgacagtggctgtcagagcactacgtcctgtctcaggtaggtgacagtggctgtcagagcactacgtcctgtaccaggtaggtgacagattattgtcagtgcactgtgtcctccccgttctgcctccttgtctcacagtttctttgcattgtgggcaccacctgctggccccaggcccctggcacatataatcacataactcttggctggttactgtcacaccacctctagttggatctgtgtgacaagttccacagactgaagcgatcgacctcaaaagggggaggcctcctggaaccagttgtgggacgcttcgccagagaaaaaatattgagccgtagttctcatggcaatctatctgttttgttttctcttattccttttcttatttacatgttcctggtagcctagcctaagatcttaagcgagaatgatgggtaagacatggggctactaacatgaccttatccccagggaaaccaatgctttactttctaaatcatttacaaaactatgatgataaaaactttcccaacaataaaatttcttatggctacatgtgtcatcggaggtggattttggtatatggtgtaaaaaaaaaaaaaaaaagccttaattaggaagaattaaaatagtttcaatttatattgaagattataaaaattcaggtactagatgttaaataatataaccacgggactggaaagttagttcagtggttaagagcactgactcttaaagatttattaacctgcacctggaaatatgccacaagccttggacgacagcccccactgaatacatccttttacaattgttatattttgatgatttataatgatgttgcctgttctgtttgcgattcactgaatacatagtttcagagttgtaatgcttggatgatttttgtgttttactgtgttaaatgatttttttggtatttgtgattgttcctttggatatagtttctaagagatgtaatgtttgcttttttaatgtataaaatcccctgcttgagagctgcagaatacactcagattcaaactgcctctgtgcttgtttctgtttgtcaccgccggatccttacccacctagcttcaaggaccctcattccaggggcccccatgcccgactggggtggtccgtggcaggttactgatagta

SEQ ID NO: 22054 - DNA, 1212 bp, Mus musculus
tccacctagctcctgccacaccagctcctgtgtgtggcgtgaacgcaggcaccactgtctccagaaagtcccatgtctcactctgaagtgggggtacccagtggaataaaacggcctacaactctttttgtgtctagaaaatgacacagaaatgaattacattttctgccatgctcactactcaggttgcttagagcagagcctgtatacttcttgtctttgattcccaacactcactttcctggtgtcatctgatagcaactgtttttggaatgctagttgctcccaacttctcataaaaacaaagcaaaatacgtccccctcccaacccctacagcccagctttacagggcctgggagcttgcatttatattgactaaatactttggggtaattttagattcatcactaagatttaaatcactttgtgtctttttcttgtttctcagctgtgaactcagtatctttaggtaaaaatggagttgtggagttgatgtttaaaatcattgggccattcagtaagaagaattcgggtctcatgaagtaagtaaatgttgtgatgcgagtggaagtttatccttaggcattctgagcttcactgccctgacatgtacctgagcaggtgaggtcagctatagctagagtctctagttcttaaatagtcatttcttttaataaagatgttcttaattcaaagcttaatgtttaagttagagcatttcaatttgttaagtacactgttttaagggcgatgactgaagctggtggccctgtgcgaggggctgggctgtgtccagcaccatcccctgaagcctttgttgagtgcccactctaatgctcgcccattgtgcttagctctcgatgaccattcgtcctcttcaccattatggactgtctgaaagttacacacgcctgttttgtcctcaccattatggactgtctgaaagttacacacgcctgttttgtccagatcatgctattcttttatcatttcctgtcttgggatgcgtatgggtgtctgagtatgtgtaccttacggttacattgtgtgtggttttcattaatttataagtcctgtagtttcagaaatgaaggacattgtgttaggggttagatttagtgtagtgctgtggagggctctttatttgtttgtttgaggctcacacagcaaggctcatcctgtgtcctactccgcgggtgccagtgtgtcat

SEQ ID NO: 22055 - DNA, 1138 bp, Mus musculus
ctttccaggcacaggccactgtccttggctttggagctgttgattaaagtctgttggcaagagaagagccaggtgatgtgagagggtcacataagacaggtgtgtacatattggcatgaaggatggagcacagggcccgatggctttgggcatggctggtaaagtgcattactcgattttgcaagtgtgaaatgaatgatgatggggtggggcaggaagaaaggttttcagttttgagaagagcagagccagaccaaaggcttggaggagaaaaccttgtggggtgagagaggactccgggtgggtgaacgtgtgtttgttgcttgtggttttctgaaatagaatggatttcttcatcagaaatgaacagtgttataaaggcagtgagcggctgtgacatggaagtggttaatatttatgttaaacagcggtctgtgtgagcaacattctctttgaggttggcacagaatccacactaatggagagtaatgttctttttagccttaccaatagttctcgggttgtgggactcctggctcagctggagaagatcaatacggattccacagagtcagatactgccagatatgttacatccaaaattcttcatttggctcaaagtcaaggtaaactccaatcccttccttgttttatggaatactttttcagttctttaaaagtagataactaagagtgtcctggtttttgatatgaagactgttccaagttttgatgtctggatagaagtaggagactgaatgcctttggaggagtttgattctcagtgcgcttgttagacttgatccctgttcaaataggtgcctgagagaaagcttatacaggaaacatgtattttggttctgcctcagtggccacagtcgatagccaggtggctccattgtttttggccctttaggaggaagcatgctgtggtggaagagtgtggagcagccaagtcagtcacctcattacagccaggaacaagacaacctgcacacatggctgacccctcagtttttcttcagaaaccccagcgtatttattactactgctgctcacaatctccatgctagtccgtgtgtctggagtgcttacaggtgcgggcagctggccgtgggccctgctcacctgctaggca

SEQ ID NO: 22056 - DNA, 1187 bp, Mus musculus
ataaattcctaactccctcgtatatactttctcacctctagatcacttgattattacaatgtaaatgtcttctgaatgtttgctgtattatttagggaaggatcactccattattctgtgcatgttcaaaatatttttctggatgtttttcattccttagccagatccatggctgtggagtctctgtttatcctatgctgactgtatttatgtctctttcatagtaaaggtctctcaagtcctgactgctggctttcaaatggtagatggagccattgtgttccctgcagggacttgtcaaatgctgacaccactggattcatctgggctgtttgtcatgagctggtttagtttcagagaggtggcatctctaacccaaggccctcctggatgggctgtgcaaactggatactgcacagctttagtgtaggcatcaaaaggtccctggagctttgcaaccgagtcctgctctcagaatctgccagctgccagccgccagccgttgagtagcagaagaaatctgggacttgagggaggacaaatctcaaatcctttatgacattttgctggactcttttgcatggggtactttgttatccttttgttatccaagccgcaccctgctgacaactccccctgcttgcttcgcctttcacagtcttctcagtggattgatcgggggcagaagggaactccacacaaccgggaagaagtcagatcgtatgcttcttaagcatggagtcctgctttagcctcgccctgcccttcatctctagagatgcttctgtgagttctcgaatgtgcagtggtgcaggtgtgtcctgcaagtgaccccatccttttggagtagccattgtccagctcctctatctgcccatcttttcaactgtactgtctacttcttcccattccctctgcccttgtgtcttttacagagattaacattttcactcctccacattgaatagataaatagataacctggctttatgatggtgtctaaatatactccatccccagtgttcttacttgtaacgctttgtaattgggggtactgtgattgggcacagcctcacctgtgcagagcccaccactcactgcacctcccgtcgtctttttactttttactttcagacaagggttgactgtgtaggacggactagcctcaaacttgtgattctcctgcc

SEQ ID NO: 22057 - DNA, 1137 bp, Mus musculus
ctacctgcagttcaaggtgagcttgctgcctgaggtcatggtggtgccacccatcctgcgggctgtgggactgctgctaaagatgatgataaggggataattgagatttggggtacacgggttaagaactttgtgtcacatgggcacagattgagatgttttcagcatttgcttaagagtctggggagctggagagatggctcagtggttaagatcattgactgcttttctggaggtcccgagttcaaatcccagcaaccacatggtggctcacaaccatctgtaatgagatcggatgcccttttctggtgtgtctgaagacagtgacagtgcactcataaagtatacatgtaaagtaaataaataaatccttaataaaaaaaaaagagtctgtatggatgggtagtcagaaggtttatattaaacatattgtgataaatcattccttctttttaggaaatgtctgacctcaataaatacagccctcctcctcagtctccagagctgtatgtggcagctagtaagcactttcagcaggcaaaaatgatccttgaaaatatccccaatccagaccgtgaggtaagtaagagtgggttcactgtacgtccttggggaaagcatacatcctgccactgggggtgtcagctataatgagtcaaccagacaggctgtcaaattgcaagaattccaggttaaccattttaagtctcttccctccaccatagggcttcactcttttgtccaggctggcctctcagctcctggtaatccccttgccctctgcctccctagtgttaggattaggtcataatctataatacccagtttccattatacattttaaatatgaaaaactatccagttactatagaacattttatacttgaccattttgaagtaaaaggctattgcattaaaagactgatcaacaagagcaaactttgaaagcaaacatggtttaagcatttgatggtttgattatgtgcattatccccagtgtaactgagatacatctactctgttagtgaggagttactcttgacatgtctaagtcactgagggaactcttgatgcaactctcagtgccatgtgatttagcattgtctgtcagaaccaagcagtgctgggctcagatgg

SEQ ID NO: 22058 - DNA, 2390 bp, Mus musculus
caccctgcagtgtaagacagagtagactgagggcagctgctggccacagcggctccctccttgtgctgccgcttgccagtttctgtccacagatattaagtagctcatcactcctgcacacacttgattccaccatcaatggcctagagctcttaccgtcagcataaacaccactagtcagttctatacaaaagctgttctgtgcaaaaactgcattaattaaaagacagccaccatatctggcttacttcaggattcggaaggctgaggcaggagattgctgcaagttctgagccagcctaaagcaacatagtgagtgccaagctaagatgagcaagaatgaaagcccctgtctcaaatatcagtgagagttgttactttaaaaaagactggtttaaataaccttcattattcttttgatgtacagaacactatgaagttactgacaatgcgagcacctatggtctgtgtttgtttgattgggcagagtttctagtaagtcactcatctcactaagaaaggcagtgcctgcactgcgctctggacaaaggctgcatgggcagaggtgtccaagaggaagggttggctgctggaggatactcaggtttcaagctggattcctacgaaggcaagagcaacacgagctgtttttcccaagtttatatactgtttgaaaaacacacaaggtgaatgttagttttgaaagatttgtagttcattgatggtaatgcatcgtaagtcttgattccgatcagcagcttctgattgcagactgactgcagtcacactgacgactcgttccagaaacgatctctctgaagagtggctgatctgactctgaagtgctggctaaataggaagcagcagcactagaggcacaggggctgaagatccctgcagtgaagtggatgccgggtggtccagctgtctgtgcctctttaaagcacacatttaaacccctatggcagacgtgggttgtttctcactgcagaactacccagttctaccccatgtttagatgagtactgtttaatgtcacaagccattttcctttacactttaacttgccagagcctcagatggactgttcttacaccttttctgctcctaggtcccaaactcaaggggactttgtatttctagtgcttgttttctaccttaatctggtttgggtttaaagtgtagatattgctgacaggctgtgctgatttcctttttaacaagtacaataggtaagggccacattctaccctttgggttctaagattccagggtaccaatagccatgcatgacagctgagccataccacctccgtactgaccaggaagtaaccaacatcctgtcttcgctagcatcttgatcaagtccagtcaggcatgcttcagtgtttctaggaaatggaaggtgccacagggttgggctggcatagctccgtgagaacttctacctagccagtatgtgtgagtccctgggtcgcatcctcagcaccaacgaacactgtcacattagagttaggccactgaaatcttagagtcatttttgctgtaagccaaatgaactagcaatagtcaggccaaaccacaaagccagattgaatttcagggtggctcactctgctaaaagcactgccccttcagagtacaaatgggaaaccccacgggcttagacagttgtcacagcacaccagtgacaagaccagcagaggaatgagcagcaaatcaaggatggggtctcttgctggtggccaagaacaaaacctacacctcagggcacttgggacttcagctggaacaaagggatgcaccactttccaacaagacctgaaactcagcggcctacaaactcctacctgataccagcagcagacactgcagtgtgatgtggttttccttcaactgcatgactaaagacccttagaaatctgtgtcacaacacagtcacaatcctcatgtactttagcgatcctcttacctcaaaatcaatttgtaatttgaccagaatcttaaatccttaataaatcttgtgttttgaaacttcaagttttagggttgtttggtgtttaagacacaatctcgtgtagccaaggtgggcctcaaacatagtacatagctgagggtaactgaagcctgaccctgcaagcctcagagcttgggagtagaggcttacacctgcagactctgggtaacgctggcactgcctgttcggaaggtggcgctctagttctccacagggcagctttttttttttttttttttgtcaagaaatttattaacctttacaaacactatttcactcaatcattcattaaaaaaatgtttacaattaagtctgtaatcaaaccatgtagcgttcaccaatgcattccagcccagttaccccatggagtaca

SEQ ID NO: 22059 - DNA, 1133 bp, Mus musculus
tgctagaaccagcttcatggccattgctttgctgggaattgaggaatgggataacaggcgtgacctacatcacagcatggcttgagtgtgtctatccctttctcaatctttgccaacccccgatctcaggcaggacaactgtgggtcacggtgtagtgggacctcatttccctcacctttggcatggcccattacatttttaccaaaaatgtgatgatcacatgcctcgtttgccaacccttcaacagttcctgagttctgagttccagtatctgaacttgggcaccaccaggcctgggttagcacatctcggtgagcttcatgatggtttgctgtagacctttcagttagaaacgcttgtgctaagcagccagcttgcttgctcagttcctgcccagctctcccttcctcgaggtcacagcagtgctgtctgagacattcggtgaggagagtggcgatggcttcccgcctggccagcgctctcaccagagtttcttagtttatagagacttgttagttttcttttgactagactcttgtgtaaaccctttcgtgtgagttgccatcttgttcgtttagaactttgaaacagtagttacagacatctgcagcccgggattcctctcagcaccgggcctgtggagcggaacatgccattctgacacttgccagtatgcatatgctttctggttcctaaacgaaattgctaaatatttttaaatatttttatcaccagttttttgagccatggttttgctgtatactacaggccagccttgaacgcacaatcctcctgcttcaaccttctgaggcatgtgctaccatgcctggatcccaagtttttccttaagtggtcttgattgacttgggttggacatcttaagtaacctgtgaattcttttgtggaaggctgagtctcatgcagctgagtttaatatttgtgctatttactaaaatacctaccaccaaaatataccaactcgtagttttatatgaatgttgatgagtctgtatcataaatagaattgttgatacatccttaatttgtgcaatattgtatgaagagattgagttgtcgattaaaaacatgcatctttatgatcctagtggttccttttcttgttggggaagag

SEQ ID NO: 22060 - DNA, 1358 bp, Mus musculus
tgcctgtggctgcattgaacagcctcggggctgtaccttaccagcactgaggaagcagtgtctaagcactgcccagtgcctctgatggctgtgcacttgtttatacctagcctaactgctcgactcaggacgagtgccctttgtggtgggacacgtgtctgtcagtaactgacaataagtattgtgtgactttgctcaaacaccattcttttcgtttatgttggattttgttttccctcctaggtagcctttccagtaaatatatgactcaggggagagcctcagtgaagaggacccagcaggaatcatgagggaaggaactgcagcactggaaatgccactcaggtgtccgtggccacttgggaaattaggttcatggcacaggacacagtgacacagatcaggcttcaacgtaacagttgaggggcatcgtaattttttaaattttaatgaaattgttaataaggaaaagaaaaattttaatatagtctaactataccaccaatctccagagatttgaagattttaatagaaagtcaacttaaaagaaaaatatgagggccagaattcaatgactacagcgtcatggattttagttctttcaaagcactctaaaaatagtgtgctgctcaccagaggagttagccctctttccctacacatcccctttttgatttccaagaggggattctctctgttgttcctggatcgtggtatggacgcacatcaaggacatgtggactatactgctgtacatagggtctacaagcattcttcatggctcattgtagaaatgatagcatggaatgcaagcacctgtcagtgtgggcctcggtggacgaccacagcaccactggcacatctttgagggcttccttctctaagtaattgacagaactgttgtgctcataaaaatgaagtcataaaaataagtagtccttttttgctggtttaaaaaagaaaaattaaaggagaaaaggacagaataaaagtgctttttactttttatgatacacagaaattagggtggagagcttttacaaacctctgaagatcaaagaggctgctgtctctgccaatcacaagtttgattggcaaccttctggtctgactggagccctctctaaactgttaatgaacttcacaagcctttctgaaatagtacagagtcagaactatgccggtttatttatcattttgaaataaaatcgaactttgaacgtgtaattttatccacattattttcttatgagtcattagaaaagtcaaccaaagcgctgacagtacacatctccttaatagggtgcccatgctgttcccctttgatagctgtgcaccgggtctggggtgtgcaagca

SEQ ID NO: 22061 - DNA, 1207 bp, Mus musculus
agattcctttatctatttagcatctaaagagcctcatagttcagattgcttttacctaataagcattaacttatggcctggccacagggtgctgcctgtaaggcttatggagactgagggagaggcatccccgactgggattcctattgggaaccccaacagcaagaaccgtttttagtggaacttactgcttataataagttagagctatgtgtgcattctgacatcagaaagaaatgcttgtattagcttatggctatactgtaggttttaaacactctgtccttttcaggatacattatctgaattttaaaaattatgacagttttctacacaaaatatgagcttgatcacataggagtacttagtatgctccacagctcatggcaggagtggctggaggccagagaaaagcttaggaaatggctgtgcagtccttgtctgagtgcctgctctcagtgtgtcctgcttctgggtgggcacgcctttgacttttgagtatgccttcagtagcagtgtttacttcttatagctttggagagatttcactcctgtgactcccacctgcttacttctctccagactgttctcttaggctttatggatcctcctgtagccgactgggcttcagagactctgacgtgaacattgatgttcagtttccagctgtcgtaagtacaaaatgatctgctggacttcacactcacgaagaattctctcattgtttagcattcagacattttatatttatgtgcttgtgtgagctcatatgcccttgccccctgcccccgtgtgtatgtgtgtgtgcacgggcgtgccagatgtgtttaggtgcccgtaaaggccagcgagggtatcagatctcctggagcttgtgagccacctatgtgggtgctgagatctgaactctgggagagcaagtgctcttgactttttagcccatctttacttaagctgtttttattgagttcatgggcacatgtgtacagtttcagtcacctggcagactgcctgatcataggctatccaagcagttggtgatctggctccttatcagaaacacacagctcttagtgtccttatctattccgtccctctgaaaacggacctgatagccaccttcttagcagagtggcagaggccctcagggaggtcagggcaaggcttctagattggagaatgctcagaatttaatggctggtcagca

SEQ ID NO: 22062 - DNA, 1155 bp, Mus musculus
tgcagctacgcctacagccagtacgccgaggcttgtgcgccggtgctagcgcagcgcggcggggctgatgctccggggcccgccggcgccttccccgcctcggccgcgtcctcgccgcgctggcgctgcccgagccactgcatctcggcgcttatccagctcaaccacacgcgccgcgggcccgcgctggaggactgcgactgcgcgcaggacgaacactgcaggtccaccaagcgcgccatcgagccctgtctgccgcgcaccagcagcgtgggcccgggcgcgggagcgggctcggtcatgggctgcactgaggcccggcggcgctgcgaccgggacagccgctgcaacctggcgctcagccgctacctggcctactgcggcaagcttttcaacgggctgcgctgcacagacgagtgccgcgcggtcatcgaggacatgctggccgtgcccaaggcggcgctgctcaacgactgcgtgtgcgatgggctggagcggcccatctgcgaatcggtcaaagagaacatggcccgcctgtgcttcggcccagatgcgagcaacggtccgggcagcagcggctcggacgggggcctggacgactactacgacgaagaatatgacgacgagcagcgcgctggggccgcgggcggcgagcaacccctggacgacgacgacggccttgcgcgcccgggcggcggcgctgctgcggcgggcggccgcggagacttgccccacggtcccgggcgcaggagcagcagcagcggcagtggaggccactgggcgaatcgaagcgcctggaccccgtttgcctgtttgctgctgctgttgctcctgctgctcgggtcacacttgtagctcctgcgcccctgctgcaggctgctccaggccggtatgcacgacccagctggttcccgagcagggcacctgtggctcggagaccggagatggtcgggaacactgacccacactcttcctgggtggacagggcccagctcgtaccgcagccaacatgttcggccctcttctgtgcggttttccaggctgcagagataaccggctgatctatactgccagctctaatctgcagaattcgggacaccctgcaaaagcaaaggaggcctagactcagagtgctgaacggtgggggtctttcaa

SEQ ID NO: 22063 - DNA, 1169 bp, Mus musculus
gtacatgtgagtgaatggcatatgtatgtgcatctagaggccatctgatctcttggagtggagttacagacagttgccagctgacttgagagtgcttggagctgaattcagtccccttggaagagcagcaggtgattttaacttctgagccatctctccagcccaggatatgcactctcactggacttgaagcctccagtagccaaaagatatatcaacagttatgaagcaaatctgtttggcatggtgtatatgcaaagcagatgatgatggtatgtgtgtgtgtgatgtgtatactgtgtgtaatgtgcacagtgtgtctatgtgtttatgctctgttgtggtttctgtgtatggcatgtgtagtgtatgattttatatatgtgttgtttgtgtagcatgtgtcaataagtggtgtgtgtgtgtgtgtgcatgaatgagattgatgtggttatgtgaactttgtgcatttagttatggaatatgtgacaacatatgctgggttcatgtgtgtatatgaaactgccatgtacctatgtggagcatcttgtttgtgtatgctggtacgtgtgatagatcggaagatcggatgtgcatactcgtaggcttgtgtgcctttggaggagccaggaggaagtccagaaatgatgctcgtctaaacctgctttggatggagggggcttctgaagtggctataaaagcccagcatctgtaaagttagaggacagccagggtgaggaccagattggttccaggctgtggagttgtagcctggtgatatcgggctataaatataaacatctgagagcaaagccccaggcaaactgggggttggagagccctgttccatcctgcctgtgagagcagtgactgcagcctccaaccgccaccccatgggaatcccggctgcttcgctggttaaaatgctttgtagctgctgatggcttaaagacttcaccatcttcccagctttgctttaaggtcagaaggattctaattaaagccaaagctgcaatctccgtgtcagcattgaaatgagcaccgaggccatccttttgggatcttcacagaggaaatccaagatgataatttctcacagaagtattgtctaataattgagccaaatagcagctctagagagcgactcagggtctgctcttttgaagtgc

SEQ ID NO: 22064 - DNA, 1203 bp, Mus musculus
ctctccacagcggtgatcttactccagcctggcgtgcacatggtactgtcaaaacaagtagactatgagaggggccttttaaggaccggagaactggcgatagaagaggggagggggacagtcaacttgcctcatcttcaggataggaaacatgttactgggtttaataaggagcatggctctgattagccacactgtctcagccaggctgcttgtggagctttctgtgaacgttgtaagtcactgctagtgggtctggcctcagatttagatagactggatgaagtctgactttaagtttaatggtttctgtgtattcgtgtgtcgcatacgcatgtgtacatgattttcggtgaacttactttaagccatttctagggctagggattgccaggctcagcgtttatatgggtgctgagattatgagctcaagttctcacatctgcgtagcaagcactttacccacaaagccatctcctcagctgctgggtcatatacatataacttcatgctcatgtgtgattttcccatatgcgtgtctgtgtaccttgtgcatgcctgctttctgtggaaccagaggggggtgttggatgcttttgaactgaatccacatgtgggtgggtactcagaaccaaacacaggccctctggaagaacagcagtactctaaccactgagccacctctccagcctcttcactttcttttcaacttttacttttgagacagagtctcacgtaacccagacttgccttgaactcttgatccttctgcctctgctgccaagtgctgggaatcacaggagtgagccaccacacccagctcaggtgcctgatttacgcttcaccgtgagtcagacatacctaggcagcttattaacctgaagattactggccctgggagctgagtcagaacctacggccctggaaacagtattcttaaaagtccctcctccagcctgatccagctgctgattgacttatctgcagcagctcgggtacctaaatctacccgtacaggtgtgttattcacacttaataaatagaaacacttgggctggggagatagctccctgaataaagtgcttgcagggcaggttttccaacccactcatgtaagtgaacacaggtatgatggcaggcacttgtgagcagcgctggggtgtggtgacaggcagagctctggaggtctctctagccaagcag

SEQ ID NO: 22065 - DNA, 1149 bp, Mus musculus
gaggaagtaggcatctgacctctgacccccacagagcacattccaggctggcgtttgctgtattagctgccagtcgtctgccttgtggaaaatacaaaagtcatatctatacagccgcatgtctttttttccgatcagaaattatacagcgacggttttggtttggaagctggcgtcaggtcactctgtgtgggtctcttgtgatcagatcagcccttggccctgatcacaccattcttgtgaaaagatctcagtgcccctgcttagctccttaagatagattcctagaagctgattccctgagccagaagttacactttaaaggctctggaaggaaaagagtttatgttgtttccacaagtgtctgccagtgtgttctcacgcccagggtgagagaggccacagggtcgtgtcctttgccagacactgttgtcttaaaaaccaaagcccagacccaaactgtcaccttgtctaacagtccacaggtcagtttgagcccacaggctttgagccctcattcccccagctccttctctgaggatgtgactacagagctccgcaggcagcagcttaatcttcctgctactccttttgaggagccgcgttcagcttccagcatcagacagctgtggttcggtgttccattttattttgagatttgggaccatctggaattctcggcttgggctcctttcagctcagatccaccgtctctaggcttttcctttttatctttatgctgctgtgatttgttgtcgttttgttggttttgtttttcgttgctgttgttttctcagacggggtctatctatgtagcctaggctgtcttagagctcactgtgtagtctaggctggcctccagtgtgtgttttaatctacgcttgctcagtacatcaatgtagacccccgtggcatttaggacagtgccctcaaggggtacttgggaagttctctgggctcttgtagcaaacagcattgccttcagattatcctagcttaccaagacataggtaacctgttaatgaggaggccatgccgcacacctccctcatcccgactcagactcacgtgcattctccattgcaccctgaagggaagtctttagggtcccagactgaaacatcaggaaatctattttcttggctttct

SEQ ID NO: 22066 - DNA, 1767 bp, Mus musculus
atcagccccgggacttcttccgtgcgcagaccctgaaagagagttcccttaccaacaccatgggtgggtacaaggagagcttcagcagcatcacgtgctttgggtgtcatgacgtctactcacaggccagtcttggcatggatatccatgcgtcagacctgagtctcctgacccggaggaaactgagtcgcctgcttgacccacccgaccccatggggaaggactggtgccttctggccatgaacttgggcctcccagacatggtggccaaacacaacgtcaacaacagggcttctagggatttcctccctagcccagtgcatgccttgctacaggaatggacctcctaccctgagagcacggtgggcatccttatatccaaacttcgggagctggggcgccgggatgctgcggactttttactgaaggcctcctctgtgttcaagatcaaccttgatggcaatggccaggaggcctatgcctcaagctgtaacagtggcacgtcctacaattccattagctcagtggtgtcccggtgagggcagccttggcttgggtagggtctttatggactgagatgcaagggcggaggggaggggagggggcagtgcacccttctcagggcagattcccacacattctttatgctcctgaagacaccctccaccccgtcctctgcttcccaatctccatctccctccctgtcacacatcccccagtcaagagcagaccgtatccttcactttggtcatttgggatgctagagcccttcctgtcagtgttttggactccatctcttgtcctctaataccttgcttattactgataattttattgagattccaaacttttcgatgaaaacaatttaactcctttattgattatccttatcaaaaaagaaaaaaaaaaaagaaaaagaaaggaagaaataaggaaagaaagaaagacacacatttatccataatgtgtatttcttatccttttctctgctgtaccagcccctcagcttatctcttttatatttgtaggagagactcccatgcttggaccccactgtatgatttataaacagacaatatgtgagtgccttttgcagaagagggtgtgttgaatcatctgagtcagaccggagctgccaccaaggaaacgctacctctctgtcccttgctgtgtgctgatcatcgccagaggtgcttcactctgacttgttggttttggatttttttctttctttctttctttttctagggagggggctctgtgtttcatttggcaaggaaagaggagaaaggagtcctccccagagtgttcatggccagtgttgctgtaagaagacaattttggttgcttttgtcaaaagatccgtgtgaacacgcacatgagacctacagacggtcacgctccctcactccctcccttctcaggtagaaggttgacatagtgtagggctacagagacctgtgttaagaattccgaagacccccccccccccatgtgtaacccatgccagtccgttattgttggtgcatagcaggttggttctacgctgagatcctggtttggtcacttcccatacttgaagtcagagagaaaggaaatagagggaacgagtttttcttgggggtgaccaagattgtgattgaattctaaatcagtgtgagggaaagtgttttaattcttctgtcctgagaagcatgtcatgttaccatatcatctgtacatatatatatgcactatgtatatacatatatattgatactggtattt

SEQ ID NO: 22067 - DNA, 1203 bp, Mus musculus
cattctgactttgaaaaggagcattcatttccttgtagaatgaatagcatttttccaatactgtttgaccttgcctctatgtggatggttgcctgctgagaagtcccagcacattttggaagtactcaacacctatcccgagcttatccctgtcccgcaggaaataaacacaggacatgccaggttcttccgtagttaactttacttctatatcatattgaggtagacaaagaaggctcagaaagtgtgtggcttaaatacttttggtgacgtgtctaaactaggactggtagcaacacccatgatcctcatgcaccctggggataggttaaagcccccaggggttgggcaaaagccccggagacggactggtgactttggcaggctgtgctctcgcagctgcgcacaaagaggtttagcaccatctagtggcggcacatagattgcagccctttacaaacaccaacatcaatgggctgcggaaaatagcctttgccatcactgccattaagggcgtggggcagagatatgctcatctggtgttgaggaaagcagacatcgacctcaccaagagggctggagaactcacggaggatgaggtggagcgagtgatcaccatcatgcagaacccacgacagtacagcattccagactggttcctgaacagacagaagtatgtgaaggatgggaagtgcagccaggttctggccaaaggtctagacaacaagctgcctgaggacctggagcggctgaagaaaattcgagcccatagaaggctgcaccacttttggggccttcgtgtccgcggccagcacaccaagaccactggccgcaggggccgtactatgggtatatccaagaagaaatgagtctctgggtctttgctgttaataaatagcttatatacctatgggggggggcttgaaatgggcttgatgattatgtgttccagagaggagggatttgattagagcccaccaagtattacttaagcctattctatcaggaggattatcttaaattttgaaagagacaaaaaaatggcctttagttccagcactggggaggcagaggcaggcagatttctgagtttgaggccagcctggtctacaaagtgagttccaggacacacaagaaacccccgtctccaaaaaccaaaaaccaaaaaccaaccaaacaaacaaacaaaaagaaaaccgaagc

SEQ ID NO: 22068 - DNA, 1148 bp, Mus musculus
aggaagagtgctggccactgagtttgtaattttcattctgattatagtcttgcagttcttatttaaatgaccatgttagattcacaggcctgtttatgtttcctttttacagtgctgccatctatgttgtatgattcattaattataatctaattacacaattgtttatctaggaaataataagccttcacctcttttcttcttctgataatttactatcagttccttgagtttttgttggtttggggactttctgtggagaaacagtgttagctttctcttcttcacctgaaaaggttgcctctcctcctttcttggagaatctgtgttttccagtccttgcagtcatcagtgtttggatttttaatccttcagtgactgatttggtatgggggttcttaaattattttcatatattattgtctctgtctcctaagttacttaatttgtcagcatttcagagcctacaatcatttgagagaactacagttgaggcggtacacagtcagaatgattgtttgctaatttggtgagagattgtggcattgtgacccttgactagggaaggcttatccactgagtgtggaagaattgctaagtgagtagggctggcctggatgagcaagagagcaagccaggaaacaatatttgctcatggtttttgcttttatgcttgaagttggatttctatcataagattcccaaataatggaaggaggttttggaatttttttttaattggatattttgtgtatttcacatacataaaatatttcaaatgttatatctgttcaccatttcccctctggaaccgccttttctcatactgccttctcctgcttctatgaggatactgcccctcccaccctcccactcccatttcaccgctctggcattccagtacactggggcatggagccttcacagaaccaacggcttctcctcctattgatgccagacaattccatcctctgctccacatagggctggagccatgagttccaatatctgtactctttgtttggtgatttagttcctaggagttctgaggtatctggttggttgatattgtttttcttcctatggggttgcaaaccccttcagctgtttcagtcctttctctaactcctccattggggtccatgtgc

SEQ ID NO: 22069 - DNA, 1221 bp, Mus musculus
gtcttttcaaaacattttaatcttcaaaagaataaaagaatccacactggagaaaaaagctacgaaggaattggattgtgagcaaattttttacaattttttacaatttacatttctgaatgtataagtgaacgtactgaagagaaagactatggatgttatcatagtcttaatcgtcatgaacatattttaggggccagaatccttctgactataaggaatgtggaaaaatctatgccaggcagttatctcctaatgcagcaaggaacacatactgcagagagagagagagacagagagagaccgtataaatatacacaatgtggtaaacctttgcgtatcacagttatctttgaatacataaaagagcacacaatatatctcagaattcataaaagaagacactgaagagagaaagtgtgtgtgattaatgtggtaaggcctttgcagttgacattgacattgatctcatcatgtataaattaacacagacttgtaagaaatctcataaaaataagaaatgtggtaagcttgtgtgtggaccagtcatttttttcttgagaaaaatccatgctgcaggttaaccctgtaaatggagccactgtggaaacattttgtacgtcacagtatctgtatgcgagagtaaaacctttaacatggactggatcgcttaaagtttgcatgtcacaataatcttttaggactttaaagaactcaaaaataaggcaatctatgactctgatggacatggttccatcttgtgccaacccagttacattaatttacacattattcatttttgagaaaacctttagcaaatgtcaactatctgctcaagcatggtgtctctattttgttcatacatggaaactcatagggacaaaagccctgtgagattcattgataacgtactggtttaaaattcacagttcactttaagtccgtaaaataactcattcaggtgtgaaacactgttggtgagtattagtgccttttctgttgttgtgataaaatgtctaaggtattgtagaatactgaagtcccaaaccagggtttccaccccagctttggccaatttttttccaggtaaaacacacacaacttttatatttgtaataaaccttaatcaatacccaatattggctaatatctatcctctatgctatcttgtctatttgccagccagtaattttgtcatattattttgctttatttcttctg

SEQ ID NO: 22070 - DNA, 1134 bp, Mus musculus
gaaaattaagctgttgtatagcagaaaatataggaagatgtaaaaccctgacctggtttcagggaataaacttttcttaattgcttggccatgtgtctaggcatgtaaatattttacagtgttttacatcatcttgatgtcagaaaattgaaaacacttatacaagagaaaaaccctatgtatgttgatgatctcattatagactgtagacaccacagttgtttttgatattaaggaaaaaactctgtttcatttcttcttcatcatggccttgaaagaagtaaattatttcccatgttcagacaagtgttttagtagagatcaccaattgtggtggtggtttttattttcaaacttttgggatagatattgacgtttgttctatgactttcgaatccatttacaggtgtttattaggggatccttgagttcattctgagacttaagttcacctttatttcaacttgttgaaaggtatttttctgctgcaatgaatttagtgtgatactcctcttctaagtggcccattctttaaatataaggatctgtgtgattacacatttccagtaaggttgctgctaaaagcatggtgagctctgttttgtgtttcattttattcacaaacttctttgagatatggttgttatccagcctggagatgtggttgatccagtgaatattaaatttaccagtagagggcgctccttgcagatatatcttatctactttcataggtaattcatctcagaggggtgagaaacaggccattggttttaactgtgtgtttgtgatgtttcctatatgcttggcctggggcatgtcattgttggagctgtggccttgtaggtatgtgctttaatacccttgtcctagctgcctgggagccagtattctgctggcagtcttcagatgaagatggaaaaccctcaggtccctctgcaccatgcttccctggacagagctatgctcctaccttgacgataattgactgaacctttgaaactgaaagccagccccaattagatctttgctgtataagagttgctttgttagtggtgtctgttcagtaaaaccgtaactaaggagtaaaatcctaactaacacattgtatgttcacatatcttacactgcatt

SEQ ID NO: 22071 - DNA, 1177 bp, Mus musculus
tgtaatcaatgtgataaagcgttttctgagaaatgtcatctccaaaaacatataaggatacatactggagagaaaccctacaaatgtaatcagtgtgataaagccttttctcaatacagtactcttcaaactcatagaagaacacatacctgagagaaacccttcaaatgtaatgaatgtgataaaggcttttcccaatactgtcatcttcaaattcatagaaaacacatacctaagagaaacccttcaaatttaatgaatgtgataaagccttttcccagcattataatctacaaattcataagagaagacatactacagagaaaccttacaagtgtattcagtgtgtgtaagtcaagtcttttcaaaacattttcatcttcaaaagaataaaagaatccacactggagaaaaaaagctacgaaggaattggattgtgagcaaagttttttacaatgccatcatttctgaatgtataagtgaacgtactgaagagaaagactatggatgtgatcatagtcttaatcgtcatgaacatattttaggggtcagaatccttctgagtataaggaatgtggaaaaatctatgccaggcagttatctcctaatgcagcaaggagcacatactccagagagagagacagacagagagatacagagagagactgtataaatatacacaatgtgctaaacctttgcctatcacagttatctttgaatacataaaagagcacacgatatatctcagaattcataaaagaagacactgaagagagaaactgtgtgtgaataatgtggtaaggcctttgcagttgacattgacattgatctcatcatgtataaattaacacagacttgtaagaaacctcataaaaataaggaatgtggtaaaagcttgtgtttaaaaccagtcgttttttttttttttcttgagaaaaatccatgctgcaggttaaccctgtaaatggagccactgtggaaacattttgtatgtcacagtatctgtatgcgagagtaaaacatttagcatgtactggatcactttaagtttgcatgtcacaataatctttcaggactttaaagaactcaaaaataaggtagtctatgactctgatggacatggttccatcttgtgccaacctagttacattaatttacacattattcattcttgaga

SEQ ID NO: 22072 - DNA, 1102 bp, Mus musculus
ttcttctttcgcttcatatggtctattaattttaccttggttattctgagcttttcaactaatatctacttatcaatgagtgcatatcatgaccaattgtttcttggtcatgatgtttgtgcaggaataggaaccctgactaagacagagcataaaccattggtgttctgttcaggaaatttttccctgtgcccatgtgtttgaggctcttcccccactttctcttctattagtttcagtgtatccggttttatttggcggtccttgatccatgtggacttgagctttgtacaaggagatcagaatggatcaacttgcttccactatggactggtgccatgagtggacattgggtgtaaattctgtaacctgtcccacaacacccagaggaagcaccactctcaagtgctctaacacttcctggatcataggattagaggtgaggagcacaaaacatgtgccccaatacctgcagtactgggaccataggtaaccaggcacccaggaactctgccaatattttcttatatccaaatggaactgctaaaccatatattcccttttggtaatatcttattaatgttatattgtgaactggtgtacctcaggttctggaagatcaatacagaactctattgtatgtatcactctcaaaagagtttaagtaaagggctggagagatcccatagcaggtaagagcactgactgctcttccaaagatcaattcccagcaaccacatagtggttcacaaccatctgtattgggatctgatgccctcttctgatgtgtctgaagaaagctgcagtaacatatacataaaatatataaataaaatctttttttttttaaataagaacttaaataaaagcacataagttcattctatgtttctggtttggttggttaattgtggcaggagaacagggtcttcctatgtatctttggctgtcctagaactcattgtatacatcacactgacatcctactcaatgccttctgcctatgtctcctgactgcattggtttggtttggtttggtttagtttggtgtggtttggtttggttttgtgagacaggatttttctgtgtagccctggctgtc

SEQ ID NO: 22073 - DNA, 1195 bp, Mus musculus
tcatgtatgtaatcaagttttttattacagtaagaggaacaggatttgcatgaagggcatggcttctgcattcacatcagaagagaagggagtttattgcgatccctactggggaaacagggtaggcaatcagctgctggagttgccattatgaacaagacctgatcatggcagggaggtgatttttaattttggatcatgtattaatcatgttctgtgatgaagacagcctatattgatgggtgtttgagttgtgaatgtcagttaagccactgagcattcaattcgaacgtagggtactgttctacagatacatgtgcaatcttcactgacatcattaagtcagctcaagaattgaatcccaggccatcgggtgtagttgtgtgtgtgtcaagttgtgtgtcaagttacaggtgtcagcaactaagagtccacatagaggcaagttcaagtagtgtttgattaatgctattcctgatgtgaggatatgggctgctagttttgaatgtcagtatggcttgtggttttttagtaatatttaagttggaaaaaatcaattattggttcccctttcaatgtaatttctatgaattaagcactgctctgatctcttactatttgcaattctgttgtatttcccaggtataagaatttcttttcatattttacaaggtcagtttaggacaaggtctcttgatgcccaggctggctcatgctatgtaattgataactgctttgaacatctggtcctgtccctaagaccacatgattcaaagacagtgctgcatgtcttctagcctaggctttgaaggggaaagttttcctggtttggcactacttgacattagcaatgagagtgaggttgataatcaccttgactggccatgactctggctgcagaaaaggcagtcatgaatctggataaggaactgaacttattgtcaactgtaattgacactacttcaagtaattcaaattactgtattaaaacaagttgacttagctaaaactggaacaggtggtcattgtgaaagtgttttttattatttgcaacatttaataagggagaactcttctttattctggatcttttgaattgacaaaaatgtcattaatctaggccacagttactggtggcatcgtacatttataaaggacattgaagatgctcgctccctctctttttctgcttgcc

SEQ ID NO: 22074 - DNA, 1250 bp, Mus musculus
ctgtttgattgtgttttcctgtatttctttaagggatttattgtttcctttttaagggcttttaccgtttacctgtgttttcctgaatttctttcagtgagttatttttatcctccttaaagaaatcgattatcttcatgagataggattttaggtcagcttcatgattttcaggtgtgttggtgtattcagggcttgtcgtggtgggagaactgggttctgatgaagctcacctacattggcttctcttccttatggtcttgcacttgcctctccccatctgtttaatccctggtgtctgtctgtagtctgctcttttgttcctgggtcacttcaggtctcctggtaggtctagttctagcaaaccttatgtgatgccttccaactggggggtgggtgttgggttcagaaggtcagagaagctcctgatctgttgccctggctgcagtagatctccagggaggacatcagacttttgggtcttcagaggagcagtcaagctgttgtcctatgggaagctgttctccagtggggcctgtggactgtggtttcattttccctgtgtgcatcagaactccagggaggctttcaatctgttgggtcagttgccctgtgtgctacagagcccccaggaggtcttcagactgtgatgttggttgcccagttgccctgtgtacagaggaacccctgggatgccttcaaattgtgttgtcttcaggggagtacacaagctggtgatcagttgctcaattgtgctgtgtgcagcagatctcctgggaggtctctggctgtggtgtcagaggcttaagtgaagcagatctcctgggatgcctcaggatatggtttcttcaggagagcagactagctagccaggcagaaatcaccaggcaaaaggtagatttttttttttcttaattaatctttgaattgtgtgttgagtgtttccctccctgggaagacatactaattctagaacaaatggattttcagcctttctggcacatttttctgacaggaggtatattgctttacagggccctgaaccagtctgttgtttcccagggcaatggccttgctttcctcttgattaaagtttctgtattcttaagttaaagggtagtagcacaacagagttttaatgttacccatttggctccgtgaatgaactgtgcgttgcagtaacagggaaaggatttgcatgaagcattgcttctgccctcagaacagaacaggaggagcaatgttctgtg

SEQ ID NO: 22075 - DNA, 1150 bp, Mus musculus
actgaaaccacaacagcctatgaggagttataaagccatagcccacctttctgatcacttcattttcagagggagctctagagaatggggcctctctatatggaagaaagatcagaaggaggtggaggggcagaaatataacaacttaggggtcagtttgagctatttttcctgtgagttttgagtttgttttttttctaagcaattacaatcacagttaattaacatcgttgaaactctaatttttcctggctgagattcctcacagcttttgatgaagacttgaatatatttgggcattttattcttggctttttctctacacacagcaggtaagtataagggcagtagaagactcagcagtagggatagccatgattattgggtctcagataacagttactagagatggtccacgtgcctctaccctggccctataactcacatctaaacactgagcttcaggttctctgcactaatttattcacttctttattaatttaaatttttgttctcattaatctttgtacatcttttcctttatttcaagaaaagactctgtgacctggtcaggtcactcaggaagcattttgcttggggtgacctgagttcagataccaacacccatgtttactatctgtaactccagatccagggggtctgacaccctcttctctggtgtgccactcgcacatacatggaaaacattttctctcacataaaatcatacacatgaacatagggacagagatgtcttcaaaggtgctaatatcttataatgcaaggtaagcaaatcaagcaagtttatgtgtataatagaaatcatacagtgttttttaatctggtattttgtatttttttaaaatttccatttcataaatgtagtacacacttaatatctaatcatcaatcataggaaaaagcgtggattctatgtgatcctaatagatatccttttttcttaccataataaatgagatgtttcagtaagtaaccctacttcttccaaattgaaaatatcagaatgcttaatctcttcagtttttcggattagtctccattcccaatccatcccactttatagtcaaagcagacaataggaatgaacaggaagagtgccggccactgagtttgtaagaggggtggtttc

SEQ ID NO: 22076 - DNA, 2082 bp, Mus musculus
aacaatctctggatggaaggggtctggctctgaggtgaggaagagttcagtaactttattcttcagttccatcttgtgccaacccagttacattaattcacacaacattaatcattcttgagaaaacctttagcaaatgtcaactatctgctcaagcatgatgatgtctctattttgttcatacatggaaactcatagggacaaaagccctgtgagattcattgataacgtactggtttaaaattcacagttcactttaagtccgtaaaataactcattcaggtgtgaaacactgttggtgagtattagtgccttttctgttgttgtgataaaatgtctaaggtattgtagaatactgaagtcccaaaccagggtttccaccccagctttggccaatttttttccaggtaaaacacacacaacttttatatttgtaataaaccttaatcaacacccaatattggctaatatctatcctctatgctatcttgtctatttgccagccagtaattttgtcatactattttgctttatttcttctgggttaggcttaactccattattttattgttgacctaacttaaggctgtcttttctctgtctactttcttgtctttgtggttctcctctgaccccaagtccagtatccctaatccctgtctatgtctcttctgcccagctactgtccagctattgattgttgtcatctttaataaccagtcagaagaaacttgagagcaaggtcacacaccttctcttagttctgtgtgcagatcttgtcttctatggagcaatcattttttcagtttcctgcttttaacattacaggtcatagcaagaaatgaaaccccaacatgaaggcaatttttagaagcatttaaatttcattagagttctaaagggatataggatcaccatgatattgtcagggcaacaagtgtcatttgtggcagctaaaggaggagctcagagctcacgtcctcaacctatagcctcaaagagagggttagagccaggtgaggtatcactcacctttaatcccagcacttgggaggcagaggcaggcaaatttcttagttcgaggccagcctggtctacagagtgaattccagcacagccagggctacacagagaaaccctgtctcaataaaaccgagagagacagagagagagagagagagagagagagagagagagagagagagagagagagagagagagagagagagagagagagagagagaaagaatatgaatgtgttcgaatgtgttaggactagacatgatttgaggaagtaaactctgaaattcaacctagtgacatattttctccagcaggcagacatttcctatatctccccaaatgacactactaactgagaagtattgatttctctgccatcaatcctctatgcttgctttttgttatataagccaacacatgatgaagaaaaactctggataagcgttatttgccacaaaccctgggttatagtagtcaatgtttatacaagaataacatcatgaataaaattttctttgctgaccaatttcgtttaattttatttatggggtttatctgcatctttgggtgagtatgtgcatgtctatgaagatttccatgatcattaagttgttgttatcttcttctagcagaagatacaccaagatgtccaaacctgactttgtccctgggaatgaaattttcttaattacttgaccatgtctctagccatctaaataattaaagtgttttatatcatcatgatgtcaggaaatagaaaaaaatcttatacaagagaaacaccctatccatgttgatgaccttgttatagcctgtaacatcacagatgttttccatatcagggacagcatcctgtttcttctcttcttcatcatagccttgaaggaagtaaattatttcccatggtccctcgagtgttgcagtagagatcaccaattgtgctggtggttttattttcaaacatttggaatagatattaaagttttttctatatctttcaaatccatttacaaacgtatattatgcgatccttgacttccttctgtgatttctgttcag

SEQ ID NO: 22077 - DNA, 1114 bp, Mus musculus
agggggaacgtctgggataatcattctggggaatgtgggtgacagctacttctatattgaaggtatggtagccttgccatgaccagtagcaaaatgctcacaagtaaataaaataatccacttgcagcttttggattcaaggcaggtattttgtctacttctcagagaagagaccatatcttattgacctcttgatctgtgggtgattggtgctcctcaaatgctattgcttcttaaagagtgcaacactcaggttggagaattagccccaggcagtgagttccctatttagctaatcaattcaaggtgggcagcccttcaaccatttacacacaaccaataaaaatgcaatcagcaagttttatttatgtatttgagtcttcatagtcacatatttgtaacaagggtgaaattggcagggaagaatttagaatggagatgggagaagtaagggggtaaattgatgaaggatatttgaatatggttcatagaaaacctgatgcagctaggggtttccagaaaccttgtttgggtgtggctctgaaagccaaagcctcaatagaagaaatgctaaagaaaggagtgttcctgcctattgtaaggcaaattgcttgggaggagtcttgtggtctttgcttggcgacttgaggcaaagtcagctgactggcactgaggagctccacaataaagttgaaaagttttggcccttggtaacccctgtcccgcccaaacccccatcaagatataacctgttccagcttgtcaagggtgtagtgagggaggtagacccctcttttacagcaattagacatttgagagctctcttggtgagcactctctttggactcttatctctatctctggtttttgaaaagcatcctggaagcagaggggtaagaagtagcagtacacagatgaaacaggatttgagaaaagagcaacagggaccacctttgtttcaatgagatcaagtgaaaggtagactagctaggtaaaagggtatagatgataggagatttctcagcatctagcagcttcttcctacattcaagcttgtaaatagatattttgcatacagttggggaaatgaagttagctcacaagggcagcatgt

SEQ ID NO: 22078 - DNA, 1161 bp, Mus musculus
cactagttctaccaagaataatatctaggtaatgattgtgttcctactgaatgagacattttttcccatgttttaagatgatcctactgagagagtaggcctgagtaatacttggtgtgctctaatacacttccctcctctatggagcacataatcatcaagccttttccactttaaaaactgtattttccattatacttacagcattcccaccatctctcttctgtctctgaattccttcatagacaatttattctttttcatgacggccatttctccttaaacaacagttactgtttgaatgtgacctatgtttgcctgcaggacttcccagctatgaagctaattgatggctgaactgactgtaggtgtgtaagagaatgtagacatgatgtaccctgttccttgattgaatgaatcaagtagacatgctctggaagactgcaagatcttcttcatatctaaaatttcccagtctaggaccctgtctgcacccattgtggaatgtcagagctcaataggcctggcctctctcagtcatttgatctcttcccatccagtggcagtgctgctactttcctgaggtccagcagggtgaccctagatagtgatggactctggaaagagctaacactcagtagctacagtaggaggtaccttgtgggttcattttaagattctcctctgaagcagccctacaagaaatactattgcgttggcaagcaaacactctctgaggattgaagcaagatatggtgtttaaatgggaatgtcacccattgcttctatgttgaatacttattttccagtacctggaattctttgggaggaatagttaaaaagtctgagataatcattctggggaattggggtgacacctacctctgtatcaaaggttggggaggtttgctatcaccaatagcaaaatgctcactaagtaaataaaataacccccttgcagcttttggattcaaggcaggtattttatctgtttcacagagaacacaccctatcttattgtcctcttgatctgtggatgatttgtgctccacaagtgttattgcttactaagcagtggaacactccagtaggagaattggcctcaggcaatgagttccttgtttggctaatcagtgcaacatgggcagtccttcaagcata

SEQ ID NO: 22079 - DNA, 1201 bp, Mus musculus
ttatgaactaaccagtacccctgagctcttgactctagctgcatatgtatcaaaagatggcctagtcggccatcactggaaagagaggcccattggacacgcagactttgtgtgccccggtacaggggaacgccagggccaaagggggggagtgggtgggtaggggagtgggggtgggtgggtaagggggacttttggtatagcattggaaatgtaaatgagctaaatacctaataaaaaatggaaaaaaaaaataagggaatctatgactctgattgacatggtccaaactttggccaacacagttatattaacttacacaacattattcattattattattatttttcaagacagggtttctctgtttagccctggatgtcctggaactcactttgtagaccaggctagccttgaactcagaaatctgcctgcctctgcctccctagtgctgggattaaaggtgtctgccaacaccagccggcaacattattcattctttttttttttcttgagtattttcttcatttacatttcaaatgctattccaaaagtataggggattttgggaacattattcatgcttgagaaaaattctagcaactgtcaactatctgctcaagtatgatgatgtctctgttttgttcctacctggaaactcatagggataaaagttttatgaggttcattgatgaggtaactggtttagaattcacagtttactttaagtccatgaaataactcattcaggtgtgaaacactgttggtgagtattagtgctttttctgttgttgtgataaaatgtctaatgtattatagaaaaatgcaatcccaaaccagggtttccaccccaactttggccatttcttttctaggtaaaacacacccaacttttctatttgtgataaaccttaatcagcaccaaacattggctgatatctatcctctatgctaccacgtctatttaccagccaggaattttgtcatataatttgccttatttcatctgggctatgcttaattccaagtagtcaccgcacatgaccattattttgttattgacctaacctaaggctgctttttctctgtctacttctcttctcttctcttctcttctcttctcttctcttctcttctcttctcttctcttctcttctcttctcttctcttctcttctcttctcttctcttctcttctcttc

SEQ ID NO: 22080 - DNA, 1203 bp, Mus musculus
cagaatgggccatctgcactgggcacccctatttcatcatgtggttagaagtccatgacagaggcatgcagacaactcacaacctgtgaccccctagtacccaccaatgaaatttttgataccctagattgtttccctggttctcgataaaaaaggtttcatgcctttgtctgaggtctctatttcaatgaatgattgacccctgtgtgatgattgtttctgcacagtaagccctctttgtttttgcatagtatctgagtctggggtcttccttcagtgattttcagacacatacattatgtagcagatgaatattacctacagttttcctgatggaagtgtgaaatcacagaatcaccgtatttttttaattttttaatttatttttggtttttcgagacagggtttctctgtgtagccctggctgtcctggaactcactctgtaaaccaggctggccttgaactcagaaatcctcctgcctctgcctcccgagtgctgggataaaggagtgcgccaccacacctggctcacatatcgtattttgtgtcctaaaatctctcttcaacttttaatgattctaaggagaatcattctgtgcatggatcataaaatgactaatggacttttgaagctctccatcttgattcaaggaggtttagcatgagaagaagggggggaggggcaggtagaaaagaagacgaaaaataagagaaagaacaagaaggagaccaagaagaagatgaaaagaagggagagcatgagaagaagaaatagaacagaaagaggaggtgcaaccgtatgaagagaaggtggaggagaagggaggaggaggagctggggtgggggaagaaatccttgcttagtgttggaagacagaaaggtaggctattgaaagatagggaaaagtgatactgaaaggcaaaacttgccattgtgataatgggtcagctcctgcacaggaaagctgggccaggaaacctaatgttgctgtgtgcccttcagcacagtctaaccctaaggaaggtgctagtgtcactcaagattccctggccaatgagaaacaccaggaagaccctccagtcagaagaggaggagggttcttccatatgctttgttccgttcacctccattgctgagcaggcttttgcagttggtgctatatgctttgacttctattgctgagtgccttaggcaagtggca

SEQ ID NO: 22081 - DNA, 1306 bp, Mus musculus
aagccttttctgagaaatgtagtctccaaagacatataaggatacatactggagagaaaccctacaaatgtaatcagtgtgataaagccttttctcaatacagtactcttcaaactcatagaagaacacatactggagagaaaccctacaaatgtaatcaatgcgataaagccttttctcaatacagtaatcttcaaactcatagaagaacacatactggagagaaaccctacaaatgtaatcagtgtgataaagccttttctatgaaatgtaatctccaaaaccatgtaaggatacatactggacaaaaacccttcaaatgtaatcaatgagataaagcctttttccaatactgtcatcctcaaattcatagaaaaacacatacctaagagaaacccttcaaatttaatgaatgtgataaagccttttcccagcattataatctacaaattcataagagaagacatactagagagaaaccttacaagtttattcagtgtgtgtaagtcttttcaaaatattttcatcttcaaaaaataaaagaatccacactggagaaaaaagctacgaaggaattggattgtgagcaaattttttacaatttacatttctgaatgtataagtgaacgtactgaagagaaagactatggatgtgatcatagtcttaatcgtcatgaacatattttaggggccagaatctttctgagtataaggaatgtggaaaaatctatgccaggcagttatctcctaatgcagcctggagcacatactgcagagacagagagagatagagagatacagagagagacagtataaatatacacaatgtggtaaacctttgcgtatcacagttatctttgaatacataaaagagcacaaatatatctcagaattcataaaagaagacactgaagagagaaactgtgtgaataatgtggtaaggcctttgcagttgacattgacattgatctcatcatgtataaattaacacagacttgtaagaaatctcataaaaataaaaataagaaatgtcgtaagcttgtgtgtggaccagtcattttttttttcttgagaaaaatccatgctgcaggttaaccctgtaaatggagccactgtggaaacattttgtatgtcacagtatctgtatgcgagagtaaaacctttagcatggactggatcccttaaagtttgcgtgtcacaataatcttttaggactttaaagaactcaaaaataaggcaatctatgactctgatggacatggttccatcttgtgccaacccagttacattaattcacacaacatta

SEQ ID NO: 22082 - DNA, 1146 bp, Mus musculus
ctgtagtggcatcccacactcttgaaagcattaccaacgctcctgtgacacatcagaactttttgttgactgaacgagtgacctttgcttcattccacctgctgtcccactgcatgagactgcacctactcatcactgcgctgacattctggcagaagagctggtacactgatgacagtagcctcgaggttaaaggtaagcagaaggtggggacagcagtatggtggtgaacagaaagcaagtgatctacttcctgagggacgtcggcccagaaagctgaacttgtgactttaagacaagctctataaatggcaaaaaaaaaaaaaaaggtctacactgacaacaggtatgcttttgccactgtacggggcaatatacaaagagggctgttgacatctgcagaaaaagacctaagatgctgtggctaaaaaaaatcagatggcagatctaaccgccaaacaaggagcaatgatcctggcagtcaaggagcctaaagattattataacatcagagagaccagctttagatacacccctgagcactatcaagttatagacagtatttgacttggcctgggggccaaaaaattcaaaggcatggttaggtcctttgactgctatgttacaggactctctgacttgacagaagaaagagtcaaaagctgcaaggactgtgctatgacgaggtaaaatttctaaaagaaaccttcccaaggtaatggacctgcctttgttgcccaggtaaatcagggactggccaagatattacagattggtttaaagttacattgtgcatgcaggccccaaaagctcaagacaggtaaaaaaaataaataaaaccattaagagacccttaccaaattgacagcggagactggcgctatgattagatagctctcctaccctttatgctcttcagggatagaaacacccctggacagtttagactgacccccctataaattactctacagggggcccccctccactggtaaaaatagcctttgtacatggtgctgacatgctgctttcccagcctttgttctctaggctcaaggtgctccagtgagtgagacagcgagtgaaaaagcagctccagaaggcctattcaagagaagaagacctgctacattagatgtctccacg

SEQ ID NO: 22083 - DNA, 1151 bp, Mus musculus
caagaaaagagcagttggaacagctcaagaaagaaaacagctagctcaccctcagcttaacggaacagaagcagcactggaagacgctggaacagacagtggaaatgttgaaggagaaggaagctgcagcatggaagaagcaacagggctaaagaacgaaaactgtatcctgtcggaacagctctgcaactgcaagattttgcagaaggagagactaaaagaccaaatctctgagctgctgagcagggagacctatcacctggaggagctgctgagcctgaactccggtcacctcaaggagctgctgagcccgaagaaccgtcaacttaaggagctgctgagcctgaagtctcttcatctcaaggagctcctaagtctgagagcctgccactcagagctgctagcccaagcactataagcacagtcttttataaaaacaaatgttgtggtattgaaagaagttttcattacaggatcccaccagactgggaacagcaggagcctcaagatttgtattgtctattttgtatgaagaccatcccagcaaccaagagatggatctccaggaacatggttcctgtccttgtccctgcctgagcactccagcctgcaagtctgtgctgggctagattcctactggagcgtggttcctacctgagaaggctgcctagccagaaatccttagaggttcacacaactgctgtctgtaggatgaaattgaatgcagtagctgtcactttgtcacaaccagactctcagccaatgcccaggatgaaggtacctgctgattcacagcagctgactgacacaaagtcattgtcttctgagatgcctatctcattcagtctttggtgcatttctgttcgggcctcattcctaatcttaagggcagcaagcaaggacagcacaaaagtgatgaatttctttatcttccttgtctgtacggaaaatctcagatttttttttgtgatcaaagatgtgtgtcataacacctggctttcttaggaaaaatgggagtgagcaggagaaacaagacttctttctatctggaacactttctgttcctttctatacatatagcatggattatgtcatatatggagatgttttattcttacactggctaatctggaattcactgtgtagcccag

SEQ ID NO: 22084 - DNA, 1155 bp, Mus musculus
acatattgattctagagcagctgctcccagtctagaatgagactgagaaaagctcctctggttgactctggtggccttgatcccactgttgctccttagggcaataacatgttgtcttcgtgactaacctagctaagcccttcaattagatgggtgtcccaccactcagtttttcagttacccatttgaatcatgttgtcatctttgcatcacagcaagaggaaaaggatttggatgtggactatggcttttaacttcacaccagaatgagagtagcctcttattgtacaattcacagggagaaatattgtaagcaatcagctgctagagtcacaattatgctaaagtaccgcattgtgacatgctgaaggattttgtaatttccctgcatgtattaattcatgccatgtgccaaccagctttgtatgcatacaatttgaggaggcgtgcttgatccagtgaatattgaatatacctgtaccaggtccaccctgcagatatgttttatcccctttcataggtaattcatctcagaggggtgagaaacaggccattggttttaactgtgtggatttgtgatgtttcctatatgcttggcccagggtgtgtcactgttggagctgtggccttgtaggtgtgtgctttaatacccttgtcctagctgcctgggagccagtatcctgctagcagtcttcagaagaagatggagaaccctcagctccccctgcaccatgcttgcctggacagagtatgctctacctggatgataattgactgaacctttgaaactgtaagccagccccaattagatctttgccgtataagagttgctttgttcgtggtttctgttcagtaaaaccccaactaaggagtaaaaccctaactaagacattgtatgtttacatatcttagaagtttacattgtatttaggggcaagattaaatagtaccttttttttttttttttttttttttggttttttggtttctctgtatagccctggctgtactggaactcactttgtagaccaggctggccttgaactcagaaatcctcctgcctctgcttcccaagtgctgggattaaaggcgtgggccactacccagctaaacagtaccttcttaatactgttctctctgcaggggattggccgt

SEQ ID NO: 22085 - DNA, 1179 bp, Mus musculus
tgccagagtccagcacggccttggtagggatagcgggacacggttcctgttcctaggacagggcaagacgtcatgggccacttggagtatcaagagatgctatgggtgtaaggcttctttgtattataatgtacatgttctcacatcctactccaaggagggtcctctctgttaatgactccaagataatcagtgacagaattaatctgggaagaaaagatgtggctaatgtgtcatcaaaatggtaaatcctaggaacttcaatacagaggtaaggctgtggagaagaactttaaaagcatgagtttgaaaatatataatttctgaactacataaaaatataaggatgcaatataaattctataaggggcttcacagatctaaaggaacagaggcagctatactatgaggcagcttatcagaaagattgaaagacaggcaaatgcaaatgcaggcagatccctgagtttaaagtcagcctgaaacagagagaatttaggtcctggtgtggtcagaatggaaatctcaggacaaggtctcacccagctaaatttatgctctgcagacagacctctgaattctgcaataaagaactaaatggatgtgtgaattaaaaccttggctttccggcttaactagccaaaagctgtaagccttactttttagatttttttttaattttttttttttttttccagcaagagctgagcagtctggacatctctggaaaacctaaaaagctcttgaattttttttttttttcagtgagaatttctgacattggttggtaaatccatggagagataacacagcttttacaaattttctagctcttttagaatttttttcaaaaaacaggtacctaaagaacatttcacatccagatgaaagaatatgcctgcttctcagcacctcacagaaaattctccaaaattaattggagacaaaattctcaacagaagaatctggaatgtctgagaaacacttaaagaaatgttgaaactccttactcatcaggaaaatgcaaatcaaaacaacgctgagattcctcctaaaaaatcaaagtggctaaggtcaaaaactcaagtaagagcacctgctcccaagggtgtggagaaagggacccctccactcctggtgggattataaaactttataaccactctgaaagtcaatcca

SEQ ID NO: 22086 - DNA, 1193 bp, Mus musculus
catttccatgatgactaaggatgttgactatttctttaggtgcttctcagccactgaatattcctcagttgagaattctttgtttaactctggatcctatttttaatagggttatttggttctctggcgtctaacttcttaagttatttatatatattgaatataagccctctagcagatgtagggttggtaaagatcttttcccaatctgttggttgccattttgtcctattggctctgtcctttgccttacagaagctttgcaattttctgaggttgcatttatcaattcttggtcttagagcataaaccatttgtgttctgttcaggaaattttcccctgtgcccatgtgtttgaggctcttcccccactttctcttctattagattcagtgtatctggttttatgtggcagtccctgatccaagtggacttgagctttgtacaaggagataagaatggatcaacttgcttccactctggactggtgccatgagtggacattgggtgtaaattccacagcctgtcccacaacacccagaggaagcaccactcccaagtgctctaacacttccaggatcataggattataggtgaggagcacaaaacatgtgccccaacacctgcagttactgggaccatcgttaaccagacacccaggaactcagccaatattttcttatgtccaagtggaactgctaaaccatatattcccttttggtaatatcttattaatgttatagtgtgaactggtgtacctcaggttctggaagatgaatacagaactgtattgtatgtatcactctcaaaagagtttaagtaaagggctggagagatggctcagcaggtaagagcattgactgctcttccaaagatcctgagttcaattcccagcaaccacatggtggttcacaaccatctgaaatgggatctgatgtccttttctgatgtttatgaagaaagctacagtgacatatacataaaataaataaataaataaataaaacctgtttttaaagtaagatgagagtggttagtggggtatggtaggagacccagagagccaagacagcctgtgagtgcttggttcaggccaatatggatagttttccccgcagctgcaaaacttcaggcccatggcatctgtaaatgttagcagaggtattccccatgccaagtgttctattcttgat

SEQ ID NO: 22087 - DNA, 1148 bp, Mus musculus
gatacacgccatttgccttcccctggcctcattttccacctcagcacaacattatctcaactgtactgccagtgctgagggggacttgatgaaatgagctttgctcttgggttttatatctgattttgttttccttggaaactatgtgctgtgtctgagcacgccattgtcagggcgtgctaacagatggcgccctcagttggagagccacactcttcaccagctcgccaggcccctcccttttggtgacttgggggaaggttcctaagccttgatttcctggggattaaaatgaatccataaatactttcttcacagaattgttaacaaggtaagatgaggaaccatgcaagactatgaagaacacgtgaacaacccacagttaagttcatccggttgtttctgggctgtctggccaggggtggaatctagggctttgcgcatgtcaggcacatgcttgaccactgatgtataacccagctgagcatgaccgttggttaatgtggtttttgttcatgggaaggctctttcttagctgatagagtatgctgtctcttcagctctgtttccctcccttccaccccaaactaaagcagaaagagggaaaacttagccactgggtatgtgttgtcttttgcttgggacagccctttttacttgtggttcatagaattcctggactttgggttcatggttggttggcatgtgttttaccccttggggtaggggtagagatgaggtggggatactccacatcaaggtttcttggccccccatgcttgacagtcccatgttgtgggtgttcggcatccatggctcctgtttatgagtatccctctctcctgttttaggactccaaatgtcctcagatattgccagatatttcctgaggggccgaatccctgtgaagaggctctgctctaaggcagcagtgggttcagaaaaggcagtttttaaaatctcatgatgaattgtttaacacttggtgacagcctaggaggtgatggctgacaacatttaggagccacccggagcccactctgccccaccagaagtgttagagaatacaactttggcagaggtgggttcctttgatagaagagaaggacagccctgcaagggaaggtggcagcaggctggtgctgaac

SEQ ID NO: 22088 - DNA, 1284 bp, Mus musculus
tgaagccttctgctgagtgtagtgggcagtatccccaccttccctttcttcccttcctgcagatggcccacacggatgctgtaatccatgagattattggttttcttgaccagaccttgtacagatcacaacatctttgtgttgaagcctcgagaaaactggccagagacctcctaaaggagctgcaagcccaggtctagcaggtagtacagaatgtgggcacctgcggtgaagctccctcagtggatgagatgctgtttctgaggcaagaacaagtgagagtggttgaacatattcgtgccttggcctgatggagtgatgtgtaccacctcccacgctgtactgcctggccccggcggtccatgagtattatgaagggaagggcccagactgcctgttaggttccagccattcataagagctagcactggctggtgtgctgactctctttatccttccctctctagtgaaggtgtgggggatgcccagtagcaggagacatgagccctgtagtggatgaggctgtaccgtacagatgagcacctgcctcaccggtgactgtcgctcagtgaggcctttgttcctcagtgcagaaatgctgcaaggcacccactatagtggaaggaatgagaggtggccagagaagggtcattccttcctcctcctctaaacccccaaaaggcaaaacacatctgcttccctatgtctagtaaacaggatttggaaactgagagtgagtccttgtcctcctgcacttgctgtgggtggggatgacgggcatggctgttgttttctagtgagaatatatacaagtgagcagtgtgtgggctgtgaccctcctgcacatctgctatgagaacccttgccccatgtgaaatcagcttcaattctcacagtaggacatttgatgactgcactcaggctgtctaggggggttgtggcataaagtcatgaaggcctgggttttctcttgcatctgcacatccaggctttgccgggcaaacactgactggcagtggattcgtcttttacccacctgctgatgggctcacagtggagtggagctggactttctactttttcattctgaataaaaagttgtacttaattttatattcagaccttcctactcctacctatggaagcttcaggtcacacaaaccttaggcctggcttggaaaagatcaattatgacttacctctggataaactgggatcctgtcaccaaacaagggagaatgtccagagggcagatagttgtgtgtacgtactcagagttgtttc

SEQ ID NO: 22089 - DNA, 1129 bp, Mus musculus
tgcctctcatagctcctggtgcactgtgcacttgggtggactgctgcccactaagagaagtaatatatgtgagaaagtaagaggaatgtcttcacatggggattgggtaacaggaaaactttcaagagtgagatgatcagaagactcccaccaaagagaagaagcccctcttctagcagaaggaaaatgaccaaaaaatgatacacccctcataagtataataatacatcatgcttccatgtccagctcagggtagtgagtgccattcctggatgcacatcaaaattgcgactggaagttagaaaggggggagatgtccacagtctgtcttcaatcatttgtcctgtgataacagtgcgaagccttaagtgagaagcaccagcctgtgggctgcaaacatgaagctcatggcagcagaaagaacaacagcaaatgatgttgtggctggaacagtgagcccaggggacaatcaaacaaatcaaccaaggaaacattctagggtggccgtgcagtgctaagcccctgagcatagaaatagaagccttcattcatggtgggatctggtgtgtgtgtgttaggtccaaaataggactccaatatgacagtgacaggtgatgacagtgtccaaaatgacagcctaggcttggctcaggctggattctgaccaggtaagcagaagaattgcttttagataaacaaaaaccttacttggcattcctcagaaatcctgtgaggcaaccccgtccaccctttacagtcaactaccttaggtacaggacatctagttcctgattcacccaaacattctgtaatggatcaaaacccctatgctaactcccaggctgttctggctcccatccctcctcctgttcatacctgtccccataaaactgtcgagggttttcccactgctctctgtgacctgccctccctgcgccttctcccccccccccccccgacagtttgattcgtcaaataaactgtgtttccacccatgtagtggtctagtttgagatgtctctgcaccttcatttacagtgtgatgtctaagtagtgccagctatgtgggcactggggaggagaggatccagagtggatttagaagaattggggctcacaagaccagtgc

SEQ ID NO: 22090 - DNA, 1204 bp, Mus musculus
tgaatgtagagatctccgtagttagtcctgtccagtgcctttcataacaaagccattggaagcactattagcttacaggaggctgaaaggtgaactctggatgtctttgagaatactgcaggggctgggtatgtctacctcccctctcttccaccacagggtctgcattgctgtggctatcctgtctgctaacagcttcagtttctaaagttaaggtttttttctaattgtgctctgagtctctacctggaacagatttggctaccagaaacatagacagatagtagttattttgctttaaagagcttgaaattactgatgtttaaaatgtgaaattagaaacatgttgaagagcccagcactttcagctctttccatccttcttgtttggctttaaaaactgctgctgttgcagaaagagagttgaccacacaagagctggagtgagctgagcccacaagtagaaaagcctccgctgagcttgtttcttgaggttttcctaagcatgttcttagggttttttttcccctatttgataaagtctattcattttagttttcttttctgcagatgaaagccaaaaaattgtaatatggtgcttatgttgtctgatgaacaaagaacctcggacttctgcagagtcaggacttaactcgtggatccgggtaagagagaaaatccctctgctggctctgctttgacttcaggtggtgatttaaagataccccactccccttctttccctttattggctcaattctgtctgtcatgttttaaggcagtggttctcaacttatgggttgtgaccccttgggggttgaacacaggagtcgtatatctgatatcatgaatattggatatttatattatgattcataacagtagcaagattattgttacaaagtagcgatgaaatcattaggcgtcggcataacttgaagaattgtattaaagggttgcagtgttaggatggttgagaacctctgggttaacaagtggccttttactgttaggttttccctgagtgttgaactgtttagatttcaggtttgcttggttcctgcagtactgctccttatgatgaacctcccagtgctgacaccactgcatgctgggtggtttcgaaaaatacttggtaatgattaaaagaatgtactgggttttctgccagctattgctggaagcactgtttcaccctctaagc

SEQ ID NO: 22091 - DNA, 2896 bp, Mus musculus
atgtaataggattatttgtaaaggtttctgtttaaaatattttaaatttgcatatcacaaccctgtggtaggatgaattgttactgttaacttttgaacacgctatgcgtggtaattgtttaacgagcagacatgaagaaaacaggttaatcccagtggcttctctaggggtagttgtatatggttcgcatgggtggatgtgtgtgtgcatgtgactttccaatgtactgtattgtggtttgttgttgttgttgctgttgttgttcatttttgtgttttttgttgctttgtatgatcttagctctggcctaggtgggctgggaaggtccaggtctttttctgtcgtgatgctggtggaaaggtgaccccaatcatctgtcctattctctgggactattcaagagaagccagatttgcttcatgcctgtgtgtggcagcttctgaggtcatgggtagccctccaagcacctctgcttgggtttcaaagagaagatgttctcacaaacattgtgctgcctattagggcctctatatagtcagcagtcagcactagtggtgaaagattggacaatgttgcctgatggtgagactcagccgggtcatgagattaccctctaggggtgtgtggttgttcctttctgatgatcacacatacacacagcctcccacccccatactccagatacaggcccaaaaaaacctatttcactgaaggtctatattcgagcctttacaaatgatagtccctcccttgctatgactgcctggttggagcaggctaggctaatcgtggttcagtcaactgtgtggggagagtttctaaggactcttttccacacggtcttttcctgtgtatactttcttctcttccccactgttagcatccatccagtgtgatgtctgtgaaagcaggaagatgccacctcgtaaaagcatatagggtaagctctttgaaccaggtgttgggctttagagtttgattgtgttctccttccccaaggtttgggtttctttgtctctggtcagcaactagtagatagggaaggaaatgcccttattccttgcaagtgaacattgaggacttgtctcagaggaaggaagcctagtgctcatggaagctgttgtgaggaatgtactctgtctgcatgcagcttccctgaatccctcctatccttcatggaaaaatttaaggagatgggtccctagtagtaccaataatctagtgccctcagatcctaaaatttatcccccaaattgtaaggtactaattggaagccacctgtgactaccgtgtgtgtgtgtgtctgtgtctgtctgtatatccgtgtgcgcgtgcgcgccagaagccctggccatccactgctactgtcttaatgcctgtcaagccactgtctgcctacccaacaccagctctgctcggatatcttgcaccctgagttgaggagggagatgtagagtgcggaagccaccttggctgtggttcttgattgtgtccctcatgcctgagccttgtgcatgtggcagaaggaagtttgtacagcctctcggcttctgtgcatcatcatgagtcccatcagccaaggcaggaaggacacagagctggcaggagactaaagtcagagagtgtgtgtctctgtctgtctctctcatagttttattttgtctgtattgtttgttcatttggatgttttaatttgtaaaagaaaagatctttgctgatatttataattttgtatcataagaatgtcctccagaatttgtcatgccagtttataacaagaagaaaaaattgcagggattttatttctattggaaacacttattgcagttatgttttacttttgaacagaagttttatttgtatagagtgcttactaatgttaaatagttcagagtatataacatttacattaaggactcatggtaggttttagtgtaaggagtttaaaggaaataaatattcaaactgggtctcgtctgccaatttgggtggaaatgagtttgtgtcacttcaattacaaagatgaaagtatgccatataatttatttatatgaaaatttatttttgtagtgtacatagtagtcatcaagtctttcgacagaagtatatttttaaagaatttatatgtgatgaaatccataatgtctggaactttgctgagacatgggtgtgaggacacgtttcgttataaatgacagcaagggagagaagagagtatgttttaacagtgttaggagagtacacgtgagcagtgatccatgtgattggaaagtatcggtgtgaacatggtgacctagtgcggttctcagatgaaaatgtacaaaactctctaaatattaatgttcaaacactgatagaaattctaacatgaataaagataatataacttgttggtttatgtgcttgtttctagaatgtttcttaaactacatatacacaagaagttccaggccgtctgttcgtttcttcttgctggccttacggaagctgttttatgtgtattttgtggacactggggaagtcacctaatgactcttctgagcgttcccttttcttacctttctatgtaggcacgcgggaagtgaatacagccaaattcagtgtaaacacaagtgacccctgcaaaggtcaatcagtggttggttaggagtgacagttactcttacagagagccactcagaactgttgcctcacgctccaggggatctgatgccctcttctggcctctactggcacctgcatacacgtgcacaccccacacacagacacacaaagagacactgacttaaagttgagaagttttttaaatacaatagcatcaccatagttgagaagtttttttaaatacaatagcatcaccatagctgatgacatagcactaactgacctggtaca

SEQ ID NO: 22092 - DNA, 1215 bp, Mus musculus
ctgtcctggaactcacagatctgcctgcctctgcttcctccgttttgcaattaaagtcatgaactgccgtgccctcctctccttttcttctttttgcttgttttctttaaaagatgtgtgtgtgtgtgtgtgtgtgtgtgtgtgtgtgtgtgtgtgatgtgcgtgtagaggccaaaagagacagttatctctagagttggagttgcaggcagttgtgtgccctccagagtggattctggggtctgaacttggatccactggaagaacagcagctctaagccatctgtcttgttcctgggctttcgttccttagtttaagtaaagtgtgtgtgttttattcttccctctgagcatcttttgattagcaccacagttcattcactagcagatcaggagtccttccttaagtgagagaaaactgcagacaagtcgcctaccctgcctcctgtcctcagcctaatccctctggaccaaagctctcaggccaggttttaatgtgttgcacatgtttctgtttctaggacttcaggatgcatttgacagtgactgggaaactgggaggatcatgccaaacaattataaaaatggatcagatgacggggtcctcgcttacaaactcctggtgcagactggcagccgagacaagcccatcgacattagtcaggtattcccgatgtttcaggacactgagcagttattacatctaggcagctgacccatggaatagggctggcagtgtataatcccaccttgtgtcccatgagaacctgaagtgataggagatggtaggaagaagcttgaactggctctgagctagccagaaaacttccctttccctgcctgtcaagcaagaggaggggacagacaggtgttgcctctaacacaatagcaatgggcaaaaatacagtatgttaacactgtgtgcttttcccagtggtgggaagcaccaacccatactgggctttcagagtttattgaacactgaaatatgtgttatatgaaaatacattagtatagtggtctcagttatattcagacatgggatggtgggtttattggagagcaatcatttgaacagaggttgggtaggtgggtggcttagaagatgagcaaagtcactagaggttgaggatggattagttatttaatgctttctggggtcagcttggcctcagcagtagatgttgagtgtaggtgtgggcagctacctgctct

SEQ ID NO: 22093 - DNA, 1216 bp, Mus musculus
gttttagatgggaaataaggggttttgtgttttctggttgggagactctgaataatgacttcagcctggttaagcagctacagtacggtttgaaccacataacaggcagccaaaagcctttctggtctgtcaacagcccagtttccaaagtgagtggggggttaggagtggctgtaatagtggtgatggtagagtcccgggggggggggggcgcttgcccaccccactggcaacctgtgagagggacctcgtaagaatgattgttaaagttagcagatcaaatacttggattggtcacatttaaaaagcagtttttaagcaggcaggtaatattgtaattcattctttcggtttttcactttggagctcagaagaacccatccctccccccaccagctaattttttttaaaggtatcaaatactatatcaggggattaagattgtctgttggttcccttaatttgcaaaccctgcttgccatcctcagccatggattcttttcctgacttaagtttgccagtggctttactgggaaagaacttttatattttctcctttcctttatactcaggccccagagttttgctttaataagcctgtgttgtgcaaatgcagccatgtgccctcctgcctgtctgagccacatttttcatggcctcacctctaatttctttcgcagaggtaagcctcctttacggtggacaaactttgaccccttggaattcctagaagagttaaagaaaataaactaccaagtggacagctgggaggaaatgctgaataaagccgaagttggccatgggtacatggaccggccttgcctcaacccagccgacccagattgccctgccacagcccctaacaaaaattcaaccaaagtgagtttcggggggggtgcttttctgttttcacttacagttctctctatgattttcatcctgaagatttcgtttggcagtgacttttgttcctttttaatttggtgtatggaactaaggttgttcacagagctgagttttgctgtaagatttagcataaccctcattagtcttgctattaatgttttctctgaaacaaacaagcccttaacgcactggatcttaacgaggcatgtgacctgcctactaattcccataattatgtgactgtcttttcattacagcctcttgatgtggcccttgttttgaatggtggatgtcaaggtttatccaggaa

SEQ ID NO: 22094 - DNA, 1137 bp, Mus musculus
ctagtctaaggaggaatgaagtatccacacattggtcttccttcttcttgattttcttgtgttttgcaaattgtatcttgggtaagtttctgggctgatatccacttatcagtgagtgcatatcaagtgacttattttgtgattgggttacctcactaaggatgatatccatttgccagatccatccatttgcccaagaatttcatgaattcattgtttttaatagctgagtagtactccattatgtaaatataccacattttctgtatccattcctctgttgagggacatctggattctttccagcttctggctattataaataatgcctcccttttattaagtaaacaccactacattatagtcactacatcatcaagagtgattccagggcagcgaatcatggatatccttctaagtacttggcttttactgtcttagataattagacagtgagtactaagtgatgcatcttacaattggtcatatagctgtgttattaatgcttttcttgtttgttttttctgaccattctgttacagaccaactcacggggtgacacagtgagaaccttgtgccttagttacctgactgtgcttcagaaagtagctaaccatgttgcactgctgcaggctgctagcacctccaaacatcaggtttgactttacatgtctttgtgatactatttatataaaacagatactatacagtattattgacacaaaaatcatagttctcatctaaaagagagtaagagatattttatcctggagccattttagtggccagagcctgggaacagagatttagattacaccaaatcactattttaacatggaagtggttttatgaagtttttagtttgctgaagaaagtcagaaatagaggagttttttaaaatatattggtgggtacatcagagagatgggtacaacaagatgggggaagcttttctgtatgtccaggatcctgtccgataacattcttagcttttggattgatagaaattttattccaaaggattattctgttagtcacaggacattagttctgacacagaggtgggcaaggaatggctgttagcgatgtggggttaaaactccacccaacataagataactaacttctgaacctgta

SEQ ID NO: 22095 - DNA, 1118 bp, Mus musculus
gtttctctgtgcagccctggctgtcctggaactcactctgtagaccaggctagccttgaactcagaaatctgcctgcctctgcctcccgagggctgggattaaaggtgtgtgtgtcaccaccgcccggcactatagctctttaatacagttcctcgtgttgtggtgacccccaaccataaaactattttcattgctactttataactgtaattttgctactgttatgagttataagtatctgttttccagtggtcttagttgacccctgtaaaagagtcatttgacaccccctaagggttgtcaacccacaagttgagaactgatgttttatagtttctattggcagattgcctccacttgatggtaatttggtaatttagggctcatggggtgtcttgccatctaattttgttttcatgtggtccataggtgtctacttgtattgtctagtcactatttgagttcacttgaagattctgagggaatgaacagcccctattcagactgcttagtgatcgttttggcattgctttacaagtgtcttacttaattcccataaatcatgtggagaactatgaaataaggtgctacaggactgagcagtggtggcgtgcgcctttaatcccagcacttggaaagcagaggcaggcagatttctgagttcgaggccagcctggtctgcagagtgagttctaggacagccagggctacacagagaaaccctgtctcaaaaaaaaaaaaaaaaaaaagtgctacaggcaccttaattgttaaattttatttatttacacattaggctttctattatagttaagactcgtttaaatttttcctatgatatatatatgtatatatgtatatatatatgtgtgtgtgtgtgtgtgtgtgtgtgtgtgtgtattggtaccagtattaatccaatacaggattatcaactggtttgtttactagagcgaaattagaagcttaaggaattattacagtgcttttaaaaataatcatttgagctttgtagctgcaggtgtcagcggttggaagtagtggaattttatgtagcaagtaggtgttttcctaactacatgatgtagaagtatcttgtgttttgtgctttgtgatt

SEQ ID NO: 22096 - DNA, 1148 bp, Mus musculus
attataagcctgcttcttagcaactatattttcagtgctttctgaactaaacctcagctatataccaagaaatatgatgctgtttcagaatggagcactgagccccatcccatctctggttctgttatctttttctacttgcttaactaaaaaggcactgctgggaactaactataactcaaggctgccttggatctgggcgatcctgggaggagaggcaggccagtagtcttgatgggaaaagagaactcaactttgaaagttacaaggttgcaggattcctggttacaattctgtccagggaaagagtctacagggctatgtgcctggcaaagagagaactgctaaaaggtttgtgatctaacaggtctgtggattttcctgtccactgatattttgtatcagtatatgcctgtggcaaatagtttgaatctcaggaccacttagtagcttcaccttagtcccttggctgatctcaggatgcctcatagtctgtctggagcagatgtcttcatcatcaagtcagcaactcctgctcctcccgtccttaactcctgactcagtgacagcagaaactgctggtctattcatttttctccccaaaggttcctctcaagaagccaatcaatccttggactttctctgcttaaggatcttttaatctgacccttgcttgttcaaagttctaccaccatcactgtccattgaagatcttccttttttaggcttcctagagaaacctattcttttgtttttgtttttctttttcttttaaattttttatctattctgtggtgatcccacacataaatacaatgtatttagatcacaacttccaccccaccccaactcttcctgtagcttcttctttgccattccaacagaaatctattatttctaaaatttgtccaaaaacatcacaagatagtcgctggtgttactgcttaaggtggggcttgataaagtagagaccatcaggcctgaggtctgcagcacttgcaagcagtgttgccccatttccaaaggctgacttaatttctctatgctaaaacatttgaagtcctcttttgtagttatgtggtttagataaggtctggcgaaccatatagattgaactctaaccctgtgtagctgaggatggcctcgaa

SEQ ID NO: 22097 - DNA, 1105 bp, Mus musculus
attcccagcagcctacacagcacctcccatactatgaaagctaccagacttcctttccagtttccgcggcagccgcagtcatgagcagcaaagtctcacgcgacaccctgtacaaggcggtgcgggaagtcctgcactggaaccagcgcaagcaccgcaagtttctggagacagtagagctgcagatcaacctgaagaactacgaccctcagaaggacaaacgtttctcgggcaccgtcaggcttaagtccacccctcaccccaagttctccgtgtgcattctgggggaccagcagcactgtgatgaagccaaggccgtggatatcccccacatggacatcgaggcgctcaagaagcttaacaagaacaagaagttggtcaagaagctggccaagaagtacgatgcctttttggcctccgaatctctgatcaagcagatccgggcccaggcttaaacaaggctggcaagttcccctccctgctgacacccaatgaaaacatggcggccaaagtggatgaggtgaaatcgacaatcaagttccagatgaagaaggtattgtgtctggccgtcgctgtcggccacgtgaagatgaccgatgatgagctggtccacaacattcatctggctgtcaatttcttggtgtccttgctcaagaaaaactggcaaaacgtctgggctttgtacattaagagcaccatgggcaagccccagcgtctgtattaggacgctccaataaacctcagtgctgccactcaaaaaaaaaaaaaaaaaaaaaaaaaaaccaaaccaaaacaaaacaaacaaaacaaaaaaaacaacctaccagaacggaggaagctttttagtcagtagtttgatctctccatgtcctgtgaccaatgtttgtggtgtcttcggcaataggctattatcatccagttctggtgggcaagcaagagcagtagtaatagtattgcgctacaggtccccagggcatcctgaccaacaactcaatgggggaaggtgtcgcatacctaccactgagatttgtatttggcaacccatgacttcttggagaagcattatcccccatataggataactccaattaaactcacatatata

SEQ ID NO: 22098 - DNA, 1193 bp, Mus musculus
ctgctattctgtagaaatttatgaagaatgttgttgcctcagatggggtgagagagaattgcactttttttttatatggaaatagatttgatgtaaagtttaaactattttgtaaatatggattgcagttacagggtagaagctacaagttgtgggaagctaggttttgcaagtttaatgcattcattggaagcagttctcacaggaagcactttgtgaataagacatttgtgtgaaaaaacagattggtacaaatagccaaagaaggttgaaatagattatttataagatcatttttaacagtgtatgttagtgtgtgtgacagtactgtaaacactgaagcagagcagtgtgagacatatgtataaaatacatatttttaaattgcagaatagcatggccaataagtccagagaaatgggaggccaactatttggaaagatgatataagttatggacttggaagaaaaaaggtatttgaggctcttggtaagatgggtactagtttttaaaattggtataaaatgagttttatcccatcttcctgggctttttaactcactgtaatgctgatgcttagaaagcgctcgtcacttggcttgttgactggagacttttgcacattgctcagctgctggacctgagtgattaatcttgcaaagtctatgtaacctggcaactggtgcatgtatgtgtacaccagtgagatctattatgggccctgtaatgagattggcacttgtgtttgtattaataaaagggacatctgcagggttgttttgtagtgaaatgttttaggtcttttgatagtaaacactaaattttaattgttctgcttgtttagcgttattagtggatggaagcctccatatttatattttcagtgcatattgccacctttctgcttcacttcagaataacatgccaagctattttgtgttcactaagtttagctgtcagttaaacacttgagtaaatattggctactcaaatatgcgggcttctgagatagttttagctgcaagtgtctttcttgtctggtggttcaaaaccattttctccaaatagatgaagttattgagcacgttgtgtactaaggcatgaatagaattctaggggccaagcagccacctcttttatggagtcaagaatctatcacttgagcttttgttaaaagttgaatgaaattatat

SEQ ID NO: 22099 - DNA, 1167 bp, Mus musculus
gtcgggtggcttctacctcttggcttgggccctgacaggtcacaggggcttccaagcgttctcctgaggctctttgagcacaatcaggtctgtcgacctttccagctttctgggtctggaattcctcaggcctttgttagcttgaatagctgtctgtgacaagtgagtatgtgttctagaaacatcagctgtttttcctcacatattttttttaaaagttcttacttgcattttggaaagcagttggtcagaaaccttaaaacctattttttttttttaagctgggcaattgtagcaggcagatctcttgtgagttcaagacctacctggtcttcaaagtgagttccagtatagttagagctacacagagaatccctgtctcaaacaaaacaaagcaaaacaaacaaacaaacaaacaaaacagataatacaaactatattttaagatttctctcccactgaagtgacctcttgagaatagccactgttcttgcatttcttcataaatctgagtgttccccatctcactgagtggaaatactacagatacatttaaaagatcgcctatactgtgtaagaaattacctcctgatgatccagtagaactcactgtggatagacacgtctgtcagattacggtactgcagttttacatccattgtttgaagactttattgtacactcatgtgcagatgaagttttaaaatgttactgacgagtcaccatttgatcagtcattgtcttgatattttattaaattgtatatttctaataatattttttaaagttgagagaactggttggatgtttattctcctgaaggtatttttaagataaagcttcaccatagcctgtaaacttggcacataagtagtttttgatactttttgttgcatttgaaaaatcttgtgtattgtaaaatggttttatacaaaatactaaatagtagaaattgtataatttacaatcgtataattaaaaatattaaacagtcttttggtttgttgtattcacttactgagcatgcctaatagatagcaatttaattatgaaatggatctaattcttagtttacagaaggcatcatgacaaagtactacagactgggtgggacaagtaaagaaaaatgtgttccttcttggtgccagaagcatgaggctctgacca

SEQ ID NO: 22100 - DNA, 5011 bp, Mus musculus
tgatccttatatctaggtttcttggctgtgcatggccctcctgtgacctccacttagcctccctggatagtggtttctgattttcagtgagctcctcctgaggtcctagattggatgctttgaggattctaaataagctgggttaaatgaactggaccaaagtgcctttccggaatttggggtagagataagccaaagagatttggaagttgaggtaggagtactgtggcctatattcatagtactttattatcacttctagcctacaaaagaaaggcgcacgactgtgcacggcattccaccacttctaggaaataaggagaatcagagatttccaggatatagcctgcatttaacctgctgaataatgttcagcttctgtttacagggtattaaaggaatgccctctatataccattaacattggtatataatctactccaggaaaaatatctcagctgagatgattgggtaattctaacatacttagttgaagtctcttctctttaaacaatagccccccctccccccaaaaaaagcacatcaaaacaaaaattacaatttctttcaatgtctgtctcccttcaggctcaccaggcctcctggttcttttgtgggaaagtccctctctgttccaggtccttgcactcacacatctcctgcgatggcaacattaatgtttaatcccccctcccacacacacacacagaggcttctaggatggagattctcgccaacctccctttgcactgagtggactcctgagttttgacattgtatcaagagagacttcaactttcagagactttcccagcaaaacctcttaaaagattggctacttgcgctgagaaaatgggtggattatgatagaggagatgggcggatttgctgttggaggagaaaaaccactgtgctcctcctatgagatggccttcttgtcttatgtcatttggatggaagccacatgcattcagaagtcctggggcttctgtgtcggagcacacagcttgtgtgggatggagtcgtttggttggtgctgtgtttctcattttcatttgtcaggctctgaaggaagttcgtgggtttctacacctctcactttctactaggaccataaatctattataacagctcataactgacataatgaattggcttttttccagcattcccatactaactctgaagcgctctctcagagcaagccttgaacactgtcacaccggtagagggcttgccggtgccttgtgtgggccattcaccccagttcacaactctttctgtagctctttactcctgtgtttctggaagcttgtaaagtttcttttgggccatcttttctttttccattatttcatcccatttcctgaaaaatctctcttgtcccaatgaccttctttatatttaagatgcatcactctgcttctgccacgataatgcctgtggctccgggaaacttgtacttacaggtgtgatgctcaaggcccttcattgctccaaactcatgccttgcgaccatctccgtggagtgcctgcctgtacttcctgggctttctctaagtccttgctgtggaattcatttccgtcttgcctgtcattgcatcatagctctctgggcctcagctcctggtttctgttccgttgcttccgggatttcatatttcatcggccattatctccaggaaccccaggatgttctccctctattcttcttaagctaacatcctgtggaatggcagatacatttccacttgactcgacccagagattgtctttgcactcaagactctctgctccagtgtgtaaaaactatgcacccagttcgggtcagtcttcgctttccaagtgagggtcgtctccggatcagaagtaatttcataggtgggtttgtcttttctcatttgtactttcttcttttcctttttctctgaaagttgctaatgagtttgaggtataacagcacattgtgggagaaagaaagagaggaagggtgagttaggttgattttgggtgagcccagaggggcccttggctgtccctgcccagatctctttacagacaggccaagtgctccaagaggatgggcctggctcgaaaccacccagtaattcctctttatctcttccttctctcctctttccccacagcctggctccgtggagggagcggaggagaaggagcgctttgcagcaaatgcccatgctggccttatggtacctgccttgctctgctgcccatgcctgcctgtctttgtttatttctattgctttttttttcccctcctttaaacaaaatttgaacttttctctgccctgcctttctctcctgtctgcctttttatggttgatgttgtattgtctcttctaaaggatgccattaaaaatcacacctagtgtgtgcttttagcatgccgatgttctccttgtgttgccctccttgtctttgaaattttcctaaggaatactttagagtcttcatggtaaatctctctctctctctttttttttttctcctcagtccagccatttcaaggactaagacagtcttacgttaaagtaaaaaaacggtgaccagcactccagggaagactaggaacagaaaacccaaaaaggatttagccaatcaatctgagaacaaagcagactctgcaatggccttagcttcttaccacataagaagttcattcaatgaagaaaatgtcactggcctctcatccactcactgactctggggtgtggttgaaccatttgagggcctgactctcccttttgttatctcaagttggacaaaagctgctgttgtgaacttagtctcaggtgtcaatatcctgtcctctgccaccagagagttgtctggtgagtgtggtacatgtgtgtgtgtccctgtgatggcaatcatgtttgctgctggcctccagaagagttgaggatctgatggagatatcttaggtatttattttttgttcaaccttgtgaccctgactcgcagtttataaagatgaaagagatgaacatcccaccagtggtaccctccatcttcaggtatgatttggtacaatcagcttcactttcctcttgttaatcctgttgtgatgttcactgtgtgaagtacccaagctgcttgtttttcaccaaagagtgctttattaacaacctgtgaacactgcatttaaacactgttgtatgttgttgtggttactgaaaacctgctaggaaatgttgagaatgttggaaccctttctcagttacctggttcctacaaatccttccttgtgtcattttaggatgaagatttcagagctgggatgttgttgggttgctcagccacgttataattgtgtttacttcattacatcaaaaccaaacatcaaccctagcattttcctttgggaaagcatcctaaataatggtggctttaacaacaaaattgtgagccttgctgtattggcgcacgccttgaatcccagcattgggaggcagaggcaggtggatctccaggtggagttccaggccagccaatgatacacaaggaaatcctgtctcaaaaataaaacaaagcaaaacaaaaaaaccaaacccaaaatcccaaaattgttaaccctttgtagagtctttctctgtaacgctgtggagttttttccttgtgatccacagtttgattttagtgacaatcacttgcttctggagttaggctgtttgtgtaagagatctcactgttgcctttggttagggaatatgactagaaactgtagtgtgccttttctcttcaccctgctggaagccagcagcacccgtgccatgaagcaattgcaaaaccagaatttatctgctgccacaaaaaaaaaaaaaaaaaaaaagacagagcccataattagaaaatactctatagttgtcttggttacttccacaattgaggctaatggttttttgactctcccagtttagaaactggagaaatgcaatattgaaagccattgacagccaatgccttcccaagacaggtgaatgtgtcaggtgagcaggcaatcccacttgaaaagctgccttccttgtagttgatattgacaggttaaagtctagttaatgtaaaaatattgaaagacaataggtcccccctttcagtgtttctatcctcaaactgcattggttggccttggattggaggcatgaggattcaatgtaaatccacacaaagagccccccttcctaggcagcacgtagctttcaaacaacgggaaaaaacagttaaggtaaagtttgttatctctggatatgaattggattggatctaggtaggagggcaaacgtttcatttaccaatcatgctcaatcaaactgcctaagtctaaaatagaaccttcctgggtggttcttccttccctgaacaagctaggccaggcaccaggagacagaaggagactccattccatctgaactaagctagatttgttcgcatggatcagaatgagttggtcagggcctgcccacactggctcgtggtctgcaagtttgggaggaaaccacctgggcttcagagatgaccacagtgctttttaaaaggcacttttttgtgtttgcagctccattcatctagaagtgctgccactgtggctcttccctgcatttaactcccttgctaaagttacttaggaaacgtgagttggtgaggacacattcatttctaggaaaagctacttgatgttgtctgggcaggactgcttagcaactgaccaccagtgacatcaggacccaggaagtctttgatcagactaatggaaagtccttcctgttgggaattagtggacaacctctccccaaactacaactacccagaaacttctgggatagaagaccctgtagctataaagcatgactcagtagatatgggatggaggggcccctttaacttaagaactttaaatgcctttgtaagtgcatcaaagcttcttccagcagaatgaaaattagaaaagtatatttataggtgcccttgacgcttttggggaacgcat

SEQ ID NO: 22101 - DNA, 1184 bp, Mus musculus
ctgctagtgacccatcttgccttcagacgcccgacaagggaaaaggggcacctagccttttaaaacctcttcagattgactcagagaacctctgtagagggaggcaataccctgagaaggctgtaactttttttttcttcctcctattcagaaatttctggaagatgtgcaaacagatttcattgatgtggtttgtttttctagctggccttggtcgaacaggcactctgataggctgctacctcatgaagcattacaggatgacagcagctgagagcattgcctggctcagaatctgtagacccggctcagtaattgggccccagcaacagtttctggtcatgtaagtgtacttgaagcttgtcttctgtaagaaccagtggctgtgggatgggggtggaggcgatgtccttacggaaagctgtatttttgatgttgtttaaacactgtaggaaacaatcaagcctctggctagaaggcgactatttccgtcaaaagttaagagggcaggagaatggccccctcagagaagccttctccaaacacctttcggatgctgatgacctgtccttaaatgggcttgagaatcaagacaatcaagagcctgagccggtaatggaaccacctcggtcacgctgttgtaattgctgtaaatgcttttgagatccttgtagggcatggcgaaactgtaggtaaagcttaaaataaagtggcttttaggggctgataccacacagtcatgtttacatatattcataaccttctctagaaatgtttgactgaaaagaaagttgtgtgcttatagaacattccgttgacttcctaaacacagatggcaattatcagtggggagtaagctcctaagacagagctgcttacactccaacctgagtgtgccatcttcatctcaactggattagtagttcaaatggagaactttcaaagaaccactgttgtagcaggcaacagtactatactaggttaagtagtaatgaatggatattcagactttaacaagttctaaaactaaaagcccattctattatgtatctttacccctttatagagggctttgtgactagtgtccctgaaagtcagctttgattgttttgaaatatggctggtagcttgatttttgaaaactgccgcttagcattcagaagaaagtgtgtgtgtgtgtgtgt

SEQ ID NO: 22102 - DNA, 1341 bp, Mus musculus
tggttttttgagacagggtttctctgtatagccctggctgtcctggaactcactttgtagaccaggctggcctcgaactcagaaatccacctgcctctgcctcccaagtgctgggattaaaggcgtgcgccaccaccgcccggcagttttggtatttctgcttgctttccaagctctttatttcccgtgctctctcataagcttggctgagttgggggtgagtcaggaaagaatctttaaacattaaagtgaaaatgcctgcctacatcaacttctttggaggtgcaggtaatttcttgcacaggggttatctcccaagtgaggattcatggaacctcttacagacagcagatgcctgctaccgattgccctaagcttgttttggtggaataagttgaaggaaatactacttggtttggtttgatttgatttggggactgtgctgggaataaaaaaccaaagtttttatgcatgtgagcacattctgttacactgagctacatccccagccctgatcatgttttaaatatctaggacaaaggggacctagaatatgtataactctagatacttctcctagcagttcacatggatgtgcacgcgcgcgcgcgcacacacacacacacacacatattctgctttttaaagggcaatattaagatttttttaaaaacctttgtaatgaaaaggtatgctgtgtgattgattgggtatgttagcccacactcatgatctcagcacaggcagagtcagtaagacaggggtagatactgagttccaggccagtctgggctatatatggtgaaattgtgtctcaaaaataacaaaaagaagtgtgcagccaaatatggtgattcacgaggaagcagaggcaggagggtctcggtgagttccaagacagccaagggctacatagagagacgctgtctcaaaaacagaacaattaaagacaaatgtgcattgggttaggttgtacagtagtaaacatctgcattttctcaccccagatctgtcttatttggaaaactattttcatattttacctctcaaaaatcttacttttgtcccagaaattctcatgaaatgtatcataaaatcaaaccactggtaatccttagtaactgtagtactactaggaccttatacttttatataaaacatattaaggcacaaaaatgtatttcaatgtacttttacacgagtatatacggacagtcacgtttttaaataaaaaaatgaatattttcagaatttaaaattaaaattttttgtttgggttattttgtttgttctgggttctttgggataagggagaagagtgtccatggagagggggctcag

SEQ ID NO: 22103 - DNA, 1099 bp, Mus musculus
ccccctccccccccctttattttggcagtgctagggatgacccagatcctcatgagtgaggtagcccctagcccaggagtaaatattttgaagcaagcaaattttttgaagtgagatttattagtacatgtgcttagaaaataaatgcaatttcccagctgatacatatgttagtcccagattccatctgtctggttagatgttttatttaattctacttgatgaagctgaatagaaggttaaatttaggatgctgtcccctcggaactctaacatattaaatagcactcttattcagacattgtcttgtcgtggttaattgccacgatgcagaattacggtggcattgtgtagggaacataagggactccaggtaattaattttccctctggactatttaggagttgaaatgcttccttgatccttatcagctgtaactctaaagactagtgtgacgtttgccctcagcggtctgtccttgttctcttccaggtaacaacatccactttgtgcaccgagacaggaataggttggatcacaaacccataaactctgttttacagcttgtgggggttcagcctgtgaacttcatgagcagacctacagtcatccacgtgtgactttacgtggcatcttccacttgtgaatgggcccttaaaacgtgaaccaaaatgccaggcaccatggcttcatagggctatgaaacacagaacttatgtgcctatagaactacatgctgagggacatcagttgtcagaaatggaacagacagtttaaattttataacttctataattttatacaaaatatataaaagtcaaacattataaaactatcattgttaatatcattttatgagtatccactcaataaaagatttttggcaactaaaatataagaagggggcgctagaaaaatcactcagtggttaagagcacttgcttctcttgcagaagacccaggacccaggtttggttcctaatacccacatggtagctttcaatcatctgtaactccagttccaatggatccaacaccttatagcctctggtacacatgcatacatataggcaaacactcatacacataaaacgacag

SEQ ID NO: 22104 - DNA, 1099 bp, Mus musculus
acagctttataatattgaaaacttagtgcttaattctgagtctggaatatttgttttatataaaggttgtataaaactttctttacctcttaaaaataaattttagctcagtgtgtgtgtatgtgggacttcagtgtgtaatgtgttgacaaatgttcgggactaaatactgattcagggtgacatggtacagcaagaaaaaggtggcaggtgctctggagccttcggatttcacctcagtgtcccatcagattaggtatgtgttagtgaatctagcttgggataattgttttctttttgtgtgtgtacatggtaaatgtgtggagttcagagaacaactcagttccacagtgttggtcctatcaggtcctagccatcaaaataaggttgtcaggctgggccacaggtgccttttactactgagctatcttgccagccccactagtttttaagtgacataattacgtatgtttatactataatgtgtttttgatatgatgtgtatactacaaaatgatctgatagggctaataagcttacctcaaatatttaattactttgttgaacttttctagctgtttttaaaatacacagtatattattgttggaaactgtcctgttatgtagaccaggctggccttaagcccatgatctcccttcctcagccttctaagggctaagataaacatgtaatgttatacccagtctcaagtctcatatctggcaaaacttgacagtccagaagaacatgagtaaatcgctcagcacaggagtctcaacttttctaattctgtgacctttcaatatagttcctcctgtgtgactcaaaccataaaattatttttgttactactttataactaatattgctacagttataaatcataatgtagatttttttttttttttttttggaaatagaggtttgtcaaaggagtcacagcgctgagaaccactgttctagaaacttgcaggttttacatattaggctgactggaagaaggttgaagtgctagtttcagtagtgcctgtccacattgccagtgaagaccacaatcctgctatgtagttctagaaagggccatacacaggtgggctg

SEQ ID NO: 22105 - DNA, 1141 bp, Mus musculus
ccagtgcgggtcttgttgggcgtttagcgcatcgggttgcctagaaggacagatgttccttaagaccggcaaactgatctcactgagtgaacagaaccttgtggactgttctcacgctcaaggcaatcagggctgtaacggaggcctgatggattttgctttccagtacattaaggaaaatggaggtctggactcggaggagtcttacccctatgaagcgaaggtaattggtttgttttatcctggctttgttttcagaaaaggaagcattaccagatgtggttttcagagttcatactttagtgggtaactcacagcattctagttcaagggatggtttctgagtattggcctcacacggcgtgagctgcaagtcactgttttgtttctagagctcatgttctaagaggtaaacagttgtgatcaagtctcccccttaactttcaaaggacggatcttgtaaatacagagccgagttcgctgtggctaatgacacagggttcgtggatatccctcagcaagagaaagccctcatgaaggctgtggcgactgtggggcctatttctgttgctatggacgcaagccatccgtctctccagttctatagttcaggtaatggtcagaattagcacctccctgactttggcgatttatgttgggggaggggtgcgtgcagatgcccttgggagtcctgaagcatcagaccccctggtgctggactgaggtagttgtatgccatctgtctaatatgggttctggaaccaaactcaggttccctgtaagagcagggaatgcacttaactgctgagaccgctctctccagcaccctctgcttttcagtgttttaatgcattgggggtggggggagatgattagaggacaacttgcaggagtcatttcttcccggtgtgtgtggcttccagaatcagaccctgagccttgttaacaagttcctttccctgttgagccatctcaccatctgaaatatttcttttactattgtgacttactctatagatagaacatagtttacataaatcttctccaacatatggatttttttccaagagattttttttttattgctataattagggccttaaagaacctgtggttcagctgtaaggctgaagggggaggg

SEQ ID NO: 22106 - DNA, 1099 bp, Mus musculus
acttgggaggcaggggcaggcagatttctgagtttgaggccagcctgagctatacagaaaagaaaccctgtctcaaaaaaagtaacatatgtgagtgctgagaattaaacctgagtcttccacaaatggtcttaaacacagccatctctccagcaccatctctgcctctggaattaaaagcctgtgccaacatctggctccccctgtctattaacaaaaaatgaaaactgccagttctgtgcttgctctagaatgaggaagagtggaggagagcgatatgggagaagaacatgagaatgatccagctacacaacggggaatacagcaacgggcagcacggcttttccatggagatgaacgccttcggtgacatggtgagtggggacatgatgcgaactcttgaactcttgagccctctcctccattttctttctacaaagttatctcaccttttctacttttttttttctcccttcccggaagaccaatgaggaattcaggcaggtggtgaatggctaccgccaccagaagcacaagaaggggaggctttttcaggaaccgctgatgcttaagatccccaagtctgtggactggagagaaaagggttgtgtgactcctgtgaagaaccaggtatgagggctgggagaagtcttgagtttgatccccagggtccacacttggaagagactcgaggtgggggaggggcgggagtgcagcatcactaaagataatgatttgattaccctcccccagcagccatcaactggtagtaactcctgagaggagccaggccccatgagactctgtcctctgtgctttagccttgaccacagtgttttgttttgtctgctcttttggatcctgaatgagacaggatctcacaatactagcccagcccagcccagcctggcctcaaacccaggatcctcttgccttaatctctctagtggattgcaggcatacattgccctacccagattcctgtcttactgtttttttgttttgttttgttttgtttttttcgagacagggtttctctgtatagccctggctgtcctggagctcactttgtagaccaggctagcctcgaactcagaaa

SEQ ID NO: 22107 - DNA, 1152 bp, Mus musculus
aactattccacaaaatagaaacagaaggaacactacccaactctttctaggaagccacagttacactgataccaaaaccacacaaagacccaacaaagaaagaaaacttcagaccagtttcctttatgaatattgatgcaaaaacactcaataaaacccctcgcttcctgacgcttcccccctctccccggccttctcccgcagccgccttctgcaggccggaatcgtactgtatgtccgctatccagaacctccactctttcgacctctttgcagatgcaagtaagggtgatgacccgtttcctgctggcactgaggattatatccatataagaactcaacagagaaacggcaggaagacccttaccactgtccaagggatcactgatgattacgataaaaagaaaccagtgaaggcgtttaagaagaaatttgcctgcaatggtactgtaattgagcatccagaatatggagaagtaattcagctacagggtgaccagcacaagaacatatgccagttcctgatagagattgggctggctaaggacgatcagctgaaggctcatgggttttaagtgcttgtggctctctgaagcgtaagcaagaatttccttgcactgagtagaatttcccttctgtcccttgtcacaagtttaaaaacctcgcagcttgtatgatgtaatcatttggggtccacttttaacttggactagtgtaactccttcatgcaataaactgaaaagagtcatgctgtgtagtcttgaagtccctcatttaaacaggttgagcagtaagccctggcagtgtccaccctggtacaaagcaataacaaggtttcagccaagccaagaaccccaagatcacaggaggctctgtctgaccaaaggttccttggggctccctggacagaggcccctgccctaggagagtgtcaccacttgaacagctcaattgactgacagaatgggtaacactgccccagctatgtcactagagggagtctctgaccctggtgtctgaccaggtagaattcagaaaggtctacctttccagagaagtcatgcacatttaattcaccaccagggtggtcttttgaagcacatctatcctagtgggggggtgggggtggggggctgggggggggttgcaaca

SEQ ID NO: 22108 - DNA, 1992 bp, Mus musculus
caaaaacataacaacagcaccagtggcagcctaagcacaccccctgaacggggcagtgatgaggacattgagccattactacaagacagcagcatctgggagctttcctttgaagagcctggaaatcagtgcactgagctataacccagtagtaatggagattctgcagacaccatctctgagagccatagaggaagctgcaccacgtggagacttcatggtgctggaggggcgatgctagcagcatcctttgggccacgtttaataagttattcttcccatacctctgcccttcactcttctgtctctctctgttcttttattcccattcttttttttttctttctttctttttttatatatatattctaggaaagattgaaaattcttcaagattatttagaatctagactttaaaactttaatagaaaaatcatgttggtggtaggaaaggtggtcggtctttcccttcagtaactagaataagagtgacagatatttttctgtcttttttggtagaagattgggacagtagtgttaactgcctcctttcattgtctttttgtgaatcattccctcttagtctataaatgttgatgagttgataagaatcacatggtatcagggatctactgaatttgtccagaggttagatgaaaaccagttttgctttccctttgttttctctacttcttaagcttctcaaaaatgaacattattaatattgatcagtgctcacatttatcagataaaggaaatctttcttagaaaatttaagttatgttgaacaagcagctcagattcttaaactttgtgtcctgattgaggttagccttggcaacatactaagagcctaagcatatctcaaggcaaaacaaccaaccatgaagctttctagtggcaacaaggaaatcagagaatacttcaggaaaagttttctgtttattattttgttttaaaattttaaatattcctaaaaggggagagagtaagatagcagtgtttatttttaagttcatactcacatgttactgtatgctcttccccgtgtctctttgtcctacttctgtttctgtaccatattcctgccttaactgttaatgtagaatgtgtttgtttttgactaatctgtatcttggtatgtttttccgaatcccataggaatgcgcacatcaaattcctttctaaaatatgagggttagtggagctcagtttcatgataagtgtcttgctaatttttgaggtgttttatggacaaagaaaactacagattttatattttgctgcatagtaaatggactattaatttgggtctatcttcaacaaagtactcctttgaaagttttataggtatgaaaacatgtagatatttgtaaggattttaattttttttgatggggtgctgtgtaaatcttgtatttataaataatgaaggtattgacagaaaatatatacaacttttataagggatcatatattgactgaatacatttaaaggaaaatatattttgaagcctgttctgccatgaacagatataacatatctttttactatgctgttggtttttaggttaagcttcctaatgcataataaattttcaatggatacttatatggcttaaaaacaatttctgtcattgctcttttgggttcttttggggggggtggctatccacacaactgagttagtaatctttcaactaattaaaaaatggttttaaaaaatgattttaagtttcttgaaaatcaccttttaaacataagtcatatttatagaaacttaaacaatgctgctatggatgtagaaatatctcttgttcctaatagctagatggtacaaaaaaacaaaacaaaaaccagaatctggaaaaattacttgctgctcttgatgaggaaagaattcaattcccagcatccagcattcacattggaaggatcacaactgctgcaactccagcttcaggaaatggataccatctggctgtgcttatt

SEQ ID NO: 22109 - DNA, 7593 bp, Mus musculus
tgccagggctggcctccggcaagaattcccggtgctgaaatgctctacctatgagaaaatacattgatatgtttatcaggaattcttgttaatatttgtaaatttgttggctaccatactaattttattttctaccacataagttttgcaaaatattaacacatcatacctttctagtgagagattttaaaaaacaaatcccatttgctagcctaaattgttctactcatgttactagtcttttgtctaggtgtattaatgtcatctgaaagtaattttacctcattccttctagttttatgtatgtattcactgctttttaaaactttattagctaataaattaaaacgattataggttgttgggtttcttttgtaaagacttgcagtttttcttcattagacctcaagctattttttcttttcttattctttcctttttatttaaaacttttatccttccttcattcttatgcaaaagatgcattttcctctttttttttttgctaacatgtatgcctttcagtattgtcaagttctagttaattttatatttgcctttaagtatatatacagatacctgcgtttattttcattaggatataatatttacatggttatcttttactttgattataaagctctcttggataattcaaatagtctttcagttggtagaagatgatatcattaatcatattctttctaaaacaatctttttataggtggtattttggcatgatttctgtatctggagtcttctcagtcactttctctgtaatttttgcctatgtagctgacttcactcaagagcatgaaagaagtactgcttatggctgggtaagatagtaagctttttgtttgttttgttttgaaacaaaaacttacataggccaagttgacctcaaacttagaatcttcctcttaagggctggtgttatgggtttttagtaatttacctgtcgtagaattttttgtttgaggcctgtctcaaattcaataaatatcgtgaacttcagctcctcctccctctactttcagagtgctaggattgccggccacgatgcccagcttgtagactttctaaaaactagagtgataattatcattttactaaaaactgactggaaattgaggtttaaaacaacatcagaaacagatttgagaagtgtgaggatctcagcagtgagtcccaggcgctcatctgaaacacagcattgtagtgaggaaaggctggtcattcagcagatagttgctgactatcgaaagttagaggagacttttttttgataattttacagtctcattctctcagttgatattagacaatctcattctctcaactataatgatattatagttacaaaagggaagaactattagaaaatgtaagcaggagcttatgtatgtatgtatgtatgtatgtatgtatgtatgtatgtatgtatgtatgtcagaagtgcagaagatcacattcaaggtgggctgtgttagccatcagagctgtgaaaatatgttttcttttctgaaaatagtgtagccaatttaagcttatccttgactaccttagaattaaatgagactcattttatttggctttgacaaatactgggggtgggggttaacccctaatctacaccatgaaaggcaccatgagaggaaggtggacattatggatttaggtaattttaaacaaaaacataaagtagcctacttgacagtatcatcaggtgctatgagatctttggcttcatgaaaacctaagcaatgttgttcccataacatttgaggatgctaccccatactcgcacaataatactcttaagagagtatagcactgctcccacaactacttgcatgtctttgcaatttgtggtgcatttatgtgcctgcctggatttttttcaaataaactgttaggatctctgtcatcatccgatacttgataaatactgagtttctggaattagtttcccaaacgaaagttctccacatctttattccccatcccaaactacagcctttaaacatttttagcacagaatacgtttatatgtgttatatttttgtattcacttgtggaataatagatgatataagaatgccattgatttatcaggaatcatggtcagatacagtgatttctgttgtttctttttaaataacactgttacttattctcttaaaattccatacatgtatttagtgtaccttatatccatcccataatccatgtcttacattttatttcctctttattattttcttttcttaactcactgggttcttatgtgacttattttattcaaacagactcttctagttttaataacctatcagtatgcttttgatactctaatgtgtatataatttagagaatgaattcacattatatttataaatggagaacatgggggtgcagtgtaataaggccatggcctctaaccagaaggcttcaaccttcccaaaaatcttttctattctcttttgtatgggttttggtatggggatgctaattaatgatcacacccaggatcctgagtatgctagtcagtctactacttagctatatatcctctcccctcccctcccctcccctcccctcccctcccctcccctcccctcccctcccctcccctcccctccttttccttctttcagttgcagctttttctcttaagaaaaccagcttatcccctacccctgcccccactgtggtaatgaaatagccataaagtcacaaatgggtgtgtgggaatgtatagtgtttttgaatgaaccaggtataggtgtttcttagaaatttgtagatttcatcatcagctcttcagtgattttgttttttgagatagtcttaactctctagccctagaactagccttgaactcagattataggaataaactactatcacatgctaggcaagtgctgtgttgtaggaattgttttcatactcttctttgcacatgtctgttttccaattaaacaaacaaaaacagtgaatgttctatgaggagagtttctacagtgttaatttatatcatattttgatcattgctccccagcatatcttcacttagttaacagtgtgtgaatacatttttaagcaaaattgcttttcttctttttaattcttaaaatttatatggaacatatttgttttgctgaaattaggagaggggactggagagatggcttagcagttaaaagcagttagttgttcttatagaggattcaggtttgatataaactgaagcgtaatttcagttcttcttctgacctctgtgggtaacgggcatgtacatggtgcttacatagacacttataaaataaatctttaaaataataataataagaagaaaacaaaaaaacgagagtatagctgcagctatgcagctgtgttacctgcagtgtgtgggactccggaaagagcatgctctctccactgatgtttttgtcaggatcctaaatgattgtacttttccccataggtctcagccacctttgcagctagtctggttagcagcccagccattgggacatacctctctgcaaactatggagacagtcttgttgtgctagtagccacactggtggctctcctagacatctgcttcattttgatagcagttccggaatctctatcggagaaaattagacctgcttcctggggagctcagatctcttggaaacaagcggacccttttgcggtaattgtcttcctggttgcaggcagcttgaatatcaacagtttatgaagactagagtgaatttatgtataatgaaaactgtggaagaggcagaaaggaaggtcagaatgtcaaggtcattctcagctgcatattgagtttgaggccagccttggctccatgagaccctgtgtcagaaaaagacagaaaaccttgtagttaaaattatttagaagaagttactttacaaatcagagaaaatcagtttttcttagagagttgtgtagaatttttttaatggtctgtttataggatgttcaggatctcttagagaagttacatgaaaatagtgagtcactatcaaaagagcactgacatgtgtttttgccctgtgtttattcccagtcattaaagaaagttggaaaagattctactgtcttactgatctgcatcacagtgtttctctcatatcttcctgaagctgggcaatattcaagcttttttctctatctcaggcaggtgagtagtaggtctctaaaagcctttcaacatgtagaatatccaagattggggtttgtctaagataaattgaggaaataattgtttctagagactttataagcagggactttgtatagtccagtgatttcagtgatggcctccctcataagtgactggaactacaggcgtgcatagcttcttgctgaggcaggggtgttctcagagcagtctacctatctttgccttccaaatgctgggattaaagtcatccaccatcaaatctagctccgagaccctattctaaaatagggtttagattgaaccaaattaagaaaatatacagagctgtcattatcttttcaccacaggtacacaattggtaccaaagtggttcatttggtacattttatgagcctgtatactttcatgcattagcactgttcaatctatagtttgtgataagttcactgttgcttttgcttccatgttttagtgagtaaagctgataataataggctgtctcctcttaagcactgaaattataggcatgaactaccccaccagttaagattttgtaatcgaatgtgatgagacagtaatggaaaagccagagttgtggctctagaatttgttgtccagttgtgattgggaggaagatacttagtgatgaagtaaagctgtataaggttatttttaatgtatgttcttatattttatagaattttagtagaagacaaagtaatattttttaaaagtattaattatttcatggttactgttctaattggaggtttagaagtcaattgccagtcagactcagctgcttacttagaagtgtatgggagatttttaaagcacaaccgtcttaggaccatccctcagagttggacgtaattggtcttcagtgtgttctggcgtcttattgtatctctccctttccttcccttctgttctttattctgttgcccacataaatttaaaacacacccagactcaagagccaccgacttgactggtagtccagttctgctttggcaacattaaaagttgaattgctttcttttatacttttttgtatgctttcattgtctccaaactgacatagactaattaagagaagaaatactaaaacatgagacataataacatttttttttaaaattcacaattcatgcctactaattacaactattttatgtcatatttaaatataaattatagggtttttttcagcttctgtctctgtcctaatttcagttgttgtgaactttcctcaattatttttcctaccatttcttactaattatatctctaacacctgtattacaaaagtatttttttgttgttgttgttttattttgcttttgtttttacaggttataggttttggatctgtgaaaattgtagcattcatagctatggtaggaattctgtccattgtggctcaggtgagtgtttctttatatgtgagttaaagtgacaaagatctgttgttttttttccccctcaatcctgatagcctcagatctctagtaagtcaagggtacaagtttctaagagttcctccaaactgttgcctcagctgtgatgtgtcttgctcgtgtagagaaccccagggaattcaggtagctggcagggacccagctccaaaaactgggtcattcacagactattcaggtccttgggattcagtagaccttcatacatacttacaaacttccagaacagctagtttaagggggtgctgaaatgattcagcaagacatgcttgtcaccaagcaatgacccgagttcagtctccagaatctacatggtagaaggagaaaattgtttcttgatgattgtcctctgatcttcatgtacttgctgggacatgtatacaaacatggaacaaataagtataaaaactattttaaaggaaaaataaccagatactgtaaaattaaccagaggaatgtgtttcagtgtttccttaatggcaaaaaattaggtagaaagaaaggttttacagatcctgctatctccaggactgaacagataagaatcaatacattacaacatatgcagtaaacactttccaacctattacagttgtcagtccagaaaggcaagggtatatgttgttgtctttcaggagcattcagtgcagcttttgtggattgcctagaggcttgttcccttgaaatggtatctaggccaagcttcatgttcttctgtgattaactctctgcagaggaaatgagcagtctgggaaactaacttgtcctaccaaatgaaagaatgacaaggctcttgggaatgcatgcgagcaaaggctgttccttgctgtttttgttttggctgtatcaacaaattcagattatgctaaacatccaagtttattgtgattttttttgttttttacattaaccttagctgtttgtccttgggtgtctttatctttattttcatactgtctctaccagttgtatttaacagaatatatatttattaaagctcatatcattggtaattttgtgaaattgttaactgctgaacaataagtgctgttgacattctccaaagaagactaagctgtagtcttcttggtcgtggtaactggagtgcagctgtgttaaccgtgggagaggtaccagcagagaaccagctagatggcttctctggaagatcgaaagctttaaaccctggccagcactggagctcccgaaactctgtttccacagagttatcactactgcctggccttagggatcatagactgtcagtgtcctcttaaaggtccagtgagtggactttactaaaagagcttatgctctgagtttgagtttgtgatcaaattcttgtgtgctcatgtggcgtctcagagttgtcttctttcctttgcagacagtcttccttagcaaattgatgagatcactagggaataagaacactgttctccttggtttgggttttcagatgctccagcttgcctggtatggttttggatctcaggcctggtaagcctctcctcattcacatattatcaaaacaaacaaaaagacccaattaacagatgtgatgagccttagaggatcaaaaaccatttaactatgtttaaagaggagttatttcattagtttggtgtattcaacattttacccctgggcaagagtggaactagatgatttaatatgacctgaagacttttactaagtctggagtcattgcttaattgaatgtgtgttgtcatctaccaaccctctaataaagttatcatgagctcatgagctctttctctcttctgtgtcctctccctctccccccgcccctctcttttggggtaaatgggtttgtgtttggtttttgaaacagtcgtgtattgtagctcaggctggtctcaaacctgtagcaattctgcctag

SEQ ID NO: 22110 - DNA, 1193 bp, Mus musculus
tttctcttgggctgtgctgtgtgatgtttatctccattccttattacagatccagacaggccagcccatccctgtacaaagagtgtttatttgcaataaacatactggagtctaggacagaaaagacctccttattctcagagttcaatttcagcaagcttaaacagcatatcacaatttactgagataatgtatgttacatctggtatcttaatggagtcacacgcatacacacaccaataaataaatgtaattttaaaactcagcaggaaagatggttgggtgggttaagggtccttgctcttcgtgcatagaaacattcacactctacaccacagcttacaatctagttctagggggatataatacccccttagtgtctgtctaggtatcagccatacattttgatgtatatataatcatgtaggcaaatactcatttcaccttaaaaataaatgtttttgttgtttaataaagaacattgtcacattctgagaggttcaaaaccttcttcatgtggataacaatagaaaattccatgaagtcagagaagaatatgatgttatccttttcctacaggatagcacactgtaaactttcacctgatgactgcaagatctttggctccatcctgatgagcagcaagtcgttgaaggttcttaatttggcatccaacaatttgaatcaaggaatatcctcactgtgcaaggctttgtgccacccacactgtactctggagtacttagtgtaagcagtcttgggaggcgtaccctggggagactatggaagtagtatgaaagttgcctttgtttactagaatgtgttgctgacacttctgagccaggctgagcttgtgggaggctgactagctagggaagggtgcagggtgggtgcctctggtggcatttttgggagagcagatctcttccctgagcggcactgttctagcacttattacagaagctctcagaggataagagtaattctcacacacctttattattcctggataggattcttatatatagttttggggtggatcagagtctgacagtaggtatcttcctattggcttggtctgagagtttgggtataccttatctacatgtaggagagctttgggtgctgtccctatttgactgatggccacaaacctctctattggggcctgtagggagctgtagctacaagac

SEQ ID NO: 22111 - DNA, 1152 bp, Mus musculus
tatggtaaagcctttgcatgtgataattctttacacatacacaagagaaatcacactggactgaacccttattaatgtaatcaatgcggtaatatgttggcaactcactgccatgtgcaagtacataatagaacacattcaagagagtaaccctatgagtgtaatcagtttattaatctgttgcttgtcacaatgatctgtatacataaaagaacatatactgtagagaaactgcatgaatgtaataaatgaggtaaagcctttcaggacacagtcatctctgaatacacaaaagaacatgtgcaggagagaaaccttaagaatgtaatcaatgtgatagggcctttgcatctaacactcatttctaaatacattaatgatcacatagtggagagaagccctatgattgtaatgaatgggtaaagcctctgcatgtcactgtacttgccaaatacttgaaagaacacacattttagagaaaccttatgagtgtagtgaatgtggaaaagcctttgcatattatagtcttcaaagacaatagaatacaaactggacagaaatcttgtgaatgtatgcatggtggaaaatcctttacatgccacagtagactctgaatatataaaaggacacatactagagcaaaaccttttgaatataatcaatgtggtaaagcctttgcctgtcctaatcatatttaaatgcatgaaagaattcatatagttataaactggttatttgaatatgcttggccctaagaagtggcactattaggacatgtgcattgtgggagtagatgttactgttttggagtaagtgaattactatggtggtgatctttggggtgccagccaggacaaacagccctacaactacttgactggaaagcagtcttttcttggctgccttctcatgaacatgcggaactctcagctccttctccagcattatgtctgcctgcatgctgccatgcttcctggtatgatggtgatggactaaacatttggaactgtaagccaggcccaattaaatatttgctatcataggagttgccttggtcacagtgtttcttagcaatggaaattctaaggcagaagttggtaccccagacttaaccattgctgtgacaggcctgatcatgtttttgtttggagc

SEQ ID NO: 22112 - DNA, 1110 bp, Mus musculus
gaactggaaggataggtgtgtgtcaggaatcccaacaggatagagaaagcttccactgaagcccttggaaggtttttgtttgggtgaacagggctggataccaaacacttccggttttccttaattctaacctggtaacatggagacgtttgtggtctggtatgggaagatgctcagtcatcccagaactcctcattccctcacaaagccctcatagagaggtttgtcacctcacccttccaggacactcaccatcgtccttagacactgaggtcatattctccaacaaagccaccactgctttgcagtcttctgggtgctgcgactctacccatacccgaagcttctcaggcaatgcattcaggaactgctcgagcaccagcaactctaggatctgcttctttgaacgtgtactgggctgcagccactggtgacacagcttacgaagctgggacacagacttctggggaccagctgactcttcatactggaaatgtcggaacttctgtcgcgaagcttcagtgtcagtcaaatgcttgcttggctgttgagctggcttgaggttacctgggttcaagtcttccccactttctggatagagggattgaatcagggcattccggggaccagccatatccttgttcaatgtaaggacctcaacaaccttaatcttcatcaggggactctcagcaggaaaggaattcatttcagggtccagagaatgcccagagcattctaaaagtcaaaatcagagcaaaagctaggcaatgtggcacattcctataatcactgttcttgggaaactggggccaagagggaatcactcttaaaagtctagccagatctacatattgaattataggccaattagagccacaaagacagactcatctaaaaaacatacataaaaccaggctgagtatgtagcacagtttgtagagaattacatagcatatccccagaaattcattaaaaccggtcactgtgctgcctgcttgtaaccccagcacatgggagacagaggcaagaggatcagagggtcaaggtcaagtctggctacatggtaaggaaggacaaggccagccttagatatgtgagatatagtttcac

SEQ ID NO: 22113 - DNA, 1158 bp, Mus musculus
atgagaaagctcctgcttttgctgcttcacagcttgtcactccctagactatatgacttttgagaagatgtaaccttatttcttaatactgtcactctggcacttataactgcaatatgtatatcttttggtttctttcagggtgggagcctacgttgggaaacagagagttaactccagactctcccatacctgtggtaaagccaattcatgacccaaacccaaaagatctctcgaggaatcgtacccagtctaccctctttgaaagtatctcaccagatgaggtccagggaaggcacaccatagaatcaaatccagtggggcttctacaggaaaaaggccaccctcagcagaagctctctgaaagctccaagtctcagaaccaaacttgtattgacaaaagccagtgctcactcaatgaagttcttcctagaaatcatgtaaaagttaagcagaagggcacgggaaaggggaaaggcaggacaaacaccatttccatgacaggaggtttacgcataagaaatcagcagaaggactccgtggagtggcgagacaggagtggcagcactcctgtgacacatggctcctctataaaaaaccaacaattgggttctgagcagggaaaaactcagaccagcagagatcccattacacttgctgtgcctgcagaattttaccaggaagccactggctctgaagagggtaggtttaggaacagtagcaatgccatggcagctgatgcacctccaaagattcaccagaaaggccctgaatggcataaagctgggaaaagtaacaattccatgttacaaggttcatctgcacaaaatcaccagatggggtctagggcaggaagagccagggacaacagcatcttaacacatgtaaaaattcaccagaaaggctataaagaaggcaaaatccaaggaaacaataattacttgaaacatgtaaaacctcaccagaagggttctaaagaggaaagactcagggaacttagcacttgtcaaaaacatgtcccctatgtaaaacaacacctaaagacctcaggaagaggaaaaggcaggaaaatcaatgcttccataaaatgtggtccctatataaaaacttactatagaggttctgatgtgggaaggctcaggagagccaacaattgta

SEQ ID NO: 22114 - DNA, 1113 bp, Mus musculus
tttccgtatattaaaccatccctgcatccctgggataaagcttacttggtcaggatggatgatcgttttgatgtgttcttggattcagttttcaaggattttattgagtatttttgcatcgatattcataagggaaattggtctgaagttctctttctttgttggatctttgtgtgatttaggtatcagagtaattgtggcttcaaagaatgaactgggtagagtaccttctgtttctattttgtggaatagtttgaggagagttggaattaggtcttctttgaaggtctgatagaactctgcactaaacccatctggtattgttttttttgctggtttttttttttttgttgttgttgttgttgttgttgtttggttgggacactgttaatgactgcttctacttctttaggggaaatggactgtttagatcattaatctgattctgacttaactttggtacctggtatctgtctaggaagttgtccatttcattgaggttttccatatttgttgagtatagccttttgtagtaggatctgatgaagtttttgatttcttcaagttctgtttttacgtctcctttttcatttctgattttgttatttaggactgcccttgtgccctctagtgagtctggctaagggtttatctatcttgttgattttctcaaagaaccaccttctggtggttgattctttgaatagttctttttgtttccacttggttgatttcagccctgagtttgattatttcctgcagtctactcctcttgggtgaatttgcttcctttcattctagagcttctaggtgtgctgtcaggctgctagtgtatgctctttgtagtttctttatggaggcactcagggctatgagttttcctctaatactgctttcattgtgtcccataagtttggctatgtttggcttcattttctttaaacactaaaaagcctttaatttctttctttatttcttccttgaccaaggtatcattgagtagagtgttgttcagtttccacgtgaatgtttgctttctattatttatgctattattgaagatcagccttagtccatggtgatctgataggatgcatgggataatttcagtat

SEQ ID NO: 22115 - DNA, 1327 bp, Mus musculus
tcaatgtggtaaagacttcacaactttgtaatctccattattctaaaagtacacatacaggagagaaaccttataaatgtaatcagtgttgtaaagcatttcaagtcacagtcatctgcaatgacataaaagatcacatacaagagagaaacctcatgaatgttgtcaatgcagcaaagcctttgcatgtcttaattcttcacatgtatacaaagtaaagcacactggggagaaccctcattattgtaatcactgtggtaaaaaccttggcaatttactgtcatctgcaactacttaaaagaacacattcaaaaaagtaaccctttccatttttccagagtactaatcccttgtgtgacacagtcatcaccccatacataaaagaacacatatggcagaaaacctgcatgaatataatgaataaggtaaaccctttccaggccacagtcatctccaaacatacaaaaaactgtgcaggagagaaaccttatgaatgtaattgatatgagaaaacctttgcatatcacagtcatctcaaattacattcatgagcacatagttgagagaagccctgtgattaaaatgaatgtgttaaagcctttgcatgtcattgtacactccaaacacttaaaggagcacacgttttagagagaacttataaatgcaatgaatgtggaaaagactatgcttatcactatagtttccaaagacataaaagaacacataatgtagagaaatattttgagtaggctctcccagcctgaagcaggctgatccagactttgaccttgctgccactgagaattagaccacctggggtggagccttactccctagatcactatattgttcagccactgccactgttctttttcaagaatttgcgacctgctgaaaggcccctgagatattacagagactacaccctgtcctgcaggtcatcacctgcagctggttccaggcaccaagaatggtttggtgggaatgggcctcatcccctttataagcatttgctattaaacatttgagctttgattaggaaccttgacttagctccattatttctcttgaccgtctagttctctctctttcagctccagtctgcctcccaggtgtactctgtttcttgtgagcctagggtcggctcccaacacttgtgaatgaagtcaagttggaaaaccctttacatgccacagtagtctctgaatacctaaaggaacacatacaagagagaaaccttatcaatataactaatgtggtaaagccttgcatgtcctaatcatatttaaatgtatgaaagtatttatagtagatgtaaactgtatta

SEQ ID NO: 22116 - DNA, 1205 bp, Mus musculus
acatacaccactgttgcacttaccacagttgcctggccgtcgcctttttttttctttgctattttctcttaattaccattatctgaccttcatgttctgttgtagtcatcagaaaaatattaatttgatataatgtagacatctttcctctttttattaatcattttatttgtttacaattcaaatgataacccctttccctcttccccctccacacaccacccattccatccccctctctgcctccacccactccagattcacactgctctagcatcgccctacactggggcatcaagcctccacaggaccaagggcctcccctcccactgatgccagatgaagccatcctttgctacatatagagctggagccatgcatctctccatgtatactctctgataggtggtttagtccctggatgctctttatggtccagtgggttgatattgttcttcctatggggttgcaatccccttcagttctgtcagtcctttcctcttctgatggggtctttcctgtctttagacagaaatgattctaggttaaaagttttgatatggatgggtggctcaatccctcaactggtgcccgtgcctgtctactggatgtggcctctatacgttctgtgtcccctctgttggatattttggctaatgtcattccccttgggtcctgggaacctctcaattccctggtttcttggactttctagagcctacccccagttccccatcctctagtgctacatatttatattttctgatcctctgtacttctctcttgtctcttcccatacctgatcctaccctccatttcattatgtccccttctacactcccttttaggtacccatgaagcaacttcattggaaactttgccccaaggaatggcttatagctttccattatgtaaaaaattttgttgctgcttcgatacaagaagtcaggacattgaatctttcagtgtctattgttcattatattgatattttatcagctgatccctctgaaggagttttactacaagccttggctctgatacaaggagctttaaaattttggagtggttgttgttcaaaggcagtatcttctggcctcctccaaggggctggcttcaagtctccagctctgccctctgcagcactctaggctcaggtggatccacttcactgatgctgctattcttggagatcataccatggt

SEQ ID NO: 22117 - DNA, 1177 bp, Mus musculus
gacagccagggctatacagataaaccctgcctcaaaaaagaaataaggaaagaaagaaaggaaggaaagaaagagagagtgaaagaaagactcaccaggatgttgaatgaatctaaatcttgtgataaaagatattatatggcattaagggaaaggtgatgttaaggcaagattccatccagctaaactcatggatgttcagttttaggaaggagaactgtatcacattaggagtgattattacctggttattcttttcatgtgggcataaggagatataaatatttttcaaattaacaagggatgaagtgtgattactgttctgagttttcaatttaacatctagatggaaattctttggtccaggcatggtggtacatgctgttaatcccaggagatgagagtcaaatagatatctggatcaagtcatcctggtgcagaattttaggtgaagaaaagcttagatccaggcatggttttccatgctttttatccaagcattcaataaacagggatacacagatctctgaattcaaggtaaatctactgagcaatttccaggacagccaagcttaggcagtgaagttgttgaaaatttgaaagctggtgatcatgtaatagaaaggccatggtccagccccagcaagtagctttgtctctgtggctctggctttacaggcaagcgtagaagggactacttagacaattgatgttggatagctgtagataaaaaattaggggtgatgaagaagaaaccagcatcactgaggtggaaccttctggtaagtgttttctggatggacaaagatgctgtgtaccttgtgatgcttctggacttggtcatgtgtgagaagtacccaggtggtgttagtttcgaaggcatgaaggtgtcatgtagagcagctaagacatggcacaatgaagagagtatttgagaggaaagcagtgcacccctgttccagcaggaaaacccagcatattgaaggtttaaatcccatgggatgagcagaaagaacagcaacagcagtagagtggaatcagccagaacctagggtgctatagagaaaagagctggagatgtgacccactttcttttgaggagtgcaaaagatcatgtgtagatcccagccagtggaacatgaagatgtaatattgtagttaccttggagaccccaag

SEQ ID NO: 22118 - DNA, 1193 bp, Mus musculus
gtctgtgctctctgagcccgagctgctctggttctgctgttctgaccctgcactggaggtcactgtggaagaggatgtggaggaggagcgagtcttttccttaaagtctgtgataatgacggtgacgttgcccacagttactgccaactgctgtgcggtgctcctgtccacattcttcagccggggccttgaggtgtggtttgtttccctggtctttgttgtagcattagcagactgtatgctgttagcttcactaggaggatctttcagaatatcagactttggttttgttttcttgttggtgtttttcttggtgacactggggctaatgtccttgtctttctccggcttttctttgtcaggcttttcgaccttctccttcttctccttcttagggggaggtggagtggcgtactgctgtgccacctgctgtgccaccaactgagaattgatgcgaggtttcctggtggaggtgcctttcagcacatcgcagatgctgcatttaaaggcttcggcgctgttcctaaaggtgcagacgctacaatcccaaaagccttcgtctgcggcaggtttcgcttgtctttttggcctggtcgggctcttcttgtcgcccatggtcatggacgggctggcccccggcgccccacagctgcgcgcgccgccgctcagaggagaagcgcggtccgcagcgtcgcggagcggcccccgccctcccgcgccgcacgcccgccctccgctgctgggctcgagctccagccgccgccgccgccgccgccgccgctggcgccgccagtctccggacgagactagtctcttttttttttttagacagcatttttctgtgtaacagagccctggctgtcctggaagctctgtagaccaggctagccttaaactcatagaaatctccctgcccctaccttatgagtgctgggattaaaggcatgtgcactactaccctgatatattttacatctttaagttacatattgggcatatggaggttatagaacaactctcttctgctaacttgtatgatctacagatcaaacttgggttattaggcttgccttttagctcctttatccactaaccatcttcccagaccactctatatttcataaaaacagtgataaaggcctaaaataaggtaattatgatggagaaaaaaccctaggggtcaagactctcag

SEQ ID NO: 22119 - DNA, 1300 bp, Mus musculus
tcttgacacttttatgtattccattgttttatatgattttcctaacaatcatttataattggatgtgctcctgaatctactttttatatatatataaaaaaaaatctgctgtgcacaattttccatgtacattacaactggttttgtttctgttttgttgaagagggttgggaggggggagggaacttttatttattgtgttcacagactccatcctgtcagcatatcctcttaaatttagttctttcttccagctatactctgtactatcagttttgatataactatatatataaatataaaattatatataaagggttatttgaaaccaatccatggcaacgctggtgcttgatacactgtgaagtgaatacaacattgaacagttgacacagatctgggacagtcccttctatgaaagtgctgaaatatcattaaaatcagtcttacatgaagtatgttccaacctgcgtgggaacttgactctctcatctgtctttagagtactggataatataaaaaatatattttttaaacaatgtgatctcaaatttaaagactgctccagatagcctgcatttgcaatgggctaattgacaaatgacaagtggttcagttggagggctttgaccattcggaagtaacaagactagctccagaatgccaagtattcgtgtaaattatggttacatgttaacattgctgtttttattaagcactcatgaaaatatggtgttctgtatctcgaattccggcctttttccagacctctgctcacgcctgaggtatatctagcagctgtcttagttctagggttgcggtagtgcatctttgaatccacaccacccagggaagcagtctacatcccctgtggtgttgcagtggtggattttgtgatcatggcctgttttactcctcctcccgtaccccgtcctccaaatcctcaccctaccaatgcagttgttagtctttcttcttaaaacctactatggctcattttattaaacaagggttgtcaacctcacatccagacctgacacggagatcttccagtctctggagtcagttcttagttccttgtgtgggaaaggatcgcaggggtgcatgggcgagttgcagggaaagctcacttcccaggagagtgaatgaatagtaggtgttctttgttgactgaactcttgaaagcttttcatttttaccattttaggggtaggagataatgaaagaccactgataatagtttatcatcccatcccaagtctcagtgactctgctttgctcttaggttcagggtatctct

SEQ ID NO: 22120 - DNA, 9516 bp, Mus musculus
tttgtttaataaaagaatttctatgtgtggaggcaacaagttaagaacatattaacttaacagcttgaattgagtagccaacaggaatggttccattcacatttacattaaaaccagtcatttgatgcgccggagtctctccacaaaggcagtgctatttgtcaatgggctcctgttctcgatgcatggacaatgctcccctctttttaaaacagtgcttgtgtctgggatgcaagctgtacttacctttttaaatacctttttaaagtatttattaatgaaccaaaggaaaccaggtgctttctgtaagcatcagaatatataatacatagtgatttgactatgaattttaaatccacattttaatattagtggggtattgcaaagacattccttctaaagttttaatattccttttattaagggtctcagggagggttaattagtcagccatatttattttccagaggtgtaaggaattgctaagttttttaattaacttttttaaaaaaaaattaaatgccaccaaattcatgtggattgcactgctctttgaaccaataagtgttggtatgcactttgttcagaaacactgtgtactttttcaaaacgagtttcatgtaaagtgattggaccccctagattagtggaaaaggctgatttaccagctcctcataggctactaattcattcatcgctggtgtcttgggttttcagttttgcctccatgataaattaaagaatgaggagaggtgaagggagggaaggaccacttcagaactagtgaacttgccttgaggtagaaactgcagtggtggagtctaagcagtcagatgttcctggccgccctgtctcggctgtcgtgggctgcgttgggatagagaggtgataggtgccacacaatgccatcctcaggcatgcattctggaaatggaattcctattagcttcctgcatttacagtttgccctgctatagtactccgtaggtaaaaacactagtgtagcttacaaagagacattaagaggaccagaaatacttggtattcagtggcacagaaagaaagcagattaaaacaaaaagcacagtgttaaggcttgcaagtttcccgtgcgtttagtacatgatctttcacactcgtgtgcacacacacagctgagctgacatgctctgcccgagtcatgcagttgggaagggggaaaagacatcttgacacccacgagaatattttaatcaaaacctttcagtttggatctggatacttcaaaacattggcagacgcttctgtgagtttagctccactaagatgtctcgcctgccttattaagaccattctcagtctacatttttaagctgccgtatcttaaattattgagaatttattaattgctgactatataataacctttgcttgtatgttacggaaaatggtttaagagccaacatttagagtgtgacaatggagctgaacagtttctaacgcgcaagcagttctgttcttgtgtatgacttgtaaccttaatttactgtgtaaagatggttacattatttccttagctttgtttgttggagacagatagcgaatgcttgttaagtatgtcaacataatctccccttgtgaacttttgttaatgtcttatacgagctctcttttccatttgcccagaaaggtggcttgtataacgctttggaagtttctgctccgtccgtcttagagctgacagtctgttaggtttgttttctcttcatgctaaagtgtcggtggttttgtgaactggtcagaaattcacaggtcttaaatgtttgggggaaatttatattggacactgctctttgtctagcaaataaaagatgttaatatattcctgttattggcatgtgcacgactgttattagaagccactttatcattttcctgctttaaatagaaatgtctatttatgaattctgcttgtagttttttcacaaataaaatagtaaaatttaaaaaaaaaaaaaagatggaaaatatatgtgtcttagagttactattgctgtgaagaaacaccatgacccaaagcaccttggagaagaaagggtttatttcattaaagttccttaaaagagttcaccatcaaaagcagtgagggcaggaactcaagtagggcaggaagctggaggcagcagctgatgcagaggttgtggaggagcctggctcactgcagcgatttctgtggctttttcagtctgctttcttatagaacccaggactgttgggagccgcgcccacattcgccgttacaagatggcgctgacagctgtgttctaagtggtaaacaaataatctgcgcatgtgccaagggtattttgtgactacttgtactctgccttccccgtgacgtcaactcggccgatgggctgcagccaatcagggagtgacacgtccgaggcgaaggataattctccttaagagggacagggtttcgttttctctctctcttgcttcttgcactcctgctcctaaagatgtaagcaataaagctttgccgcagaagattctggtctgttgcgtctttcctggccggtcgtgagaacgcgtctaataacaattggtgccgaattccgggacgagaaaaaactcgggactggcgcagggaagatccctcattccagaaccagaactgcgggtcgcggtgatagaggttcccgtaaagcagactgttaagaaggattcaactgtatgaattcagaacttttcagctggggaacgagagtaccagtgagtacagctttacgaggtaagtctggtcttgaactttctaaggaaattcaagacagtctatcagaagtaaagtggaatatgtttggccttgaattttttctggtgttaggagcccttttgttccttttcacatgttatcaagtgattaagatagggctgaaaattctagaggaaattcaggacaagctatcagaagtaaagtggggagagagagtaggaacaaagagaaaatatggtacacaaaataagtatacaggcctttccaagggtcttgaacccgaggaaaagttaaggttaggtaggaatacctggagagagattagaagaaaaagaggaaaaagggaaaagaagaaagatcaattagcggaggtctctaggaaaaggagcctgtgctcatcgctggatgggctcggggagccagctcttagtagctctgaagcaggtgaagaatcctcctctgaggaaacagactgggaggaagaagcagctcattatgagaaaaaagggtaccagccaggtaaagtgctagctaatcagttaaggaagccaaaagcggctggcgaaggccagtttgctgattggcctcagggcagtcggcttcaaggtccgccctatgcggagcccccgccctgcgtagtgcgtcagcaatgcgcagagaggcaatgcgcagagaggcagtgtgcagagaggcagtgcgcagactcattcattcccagagaggaacaaaggaaaatacaacaggcatttccggtctttgaaggagccgagggtgggcgtgtccacgctccggtagaatatttacaaattaaagaaattgccgagtcggttcgtaaatacggaaccaatgctaattttaccttggtgcagttagacaggctcgccggcatggcactaactcctgctgactggcaaacggttgtaaaagccgctctccctagtatgggcaaatatatggaatggagagcgctttggcacgaagctgcacaagcgcaggcccgagcaaacgcagctgctttgactccagagcagagagattggacttttgacttgttaacgggtcagggagcttattctgctgatcagacaaactaccattggggagcttatgcccagatttcttccacggctattagggcctggaaggcgctctctcgagcaggtgaaaccactgggcagttaacaaagataatccagggacctcaggaatccttctcagattttgtggccagaatgacagaggcagcagagcgtatttttggagagtcagagcaagctgcgcctctgatagaacagctaatctatgagcaagccacaaaggagtgccgagcggccatagccccaagaaagaacaaaggcttacaagactggctcagggtctgtcgagagcttgggggacctctcaccaatgcaggcttagcggccgccatcctccaatctcaaaaccgctccatgggcagaaataatcagaggacatgttttaattgcggaaagcctgggcattttaagaaagattgcagagctccagataaacagggagggactctcactctttgctctaagtgtggcaagggttatcatagagctgaccagtgtcgctctgtgagggatataaagggcagaattcttcccccacctgatagtcaatcaactgatgtgccaaaaaacgggtcatcgggccctcggtcccagggccctcaaagatatgggaaccggtttgtcaggacccaggaagcagtcagagaggcgacccaggaagacccacaagggtggacctgcgtgccgcctccgacttcctattaatgcctcaaatgagtattcagccggtgccggtggagcctataccatccttgcccccgggaaccatgggccttattctcggccggggttcactcaccttgcagggcttagtagtccaccctggagttatggattgtcaacattcccctgaaatacaggtcctgtgctcaagccctaagggcgttttttctattagtaaaggagataggatagctcagctgctgctcctccctgataataccagggagaaatttgcaggacctgagataaagaaaatgggctcctcaggaaatgattctgcctatttggttgtatctttaaatgatagacctaagctccgccttaagatcaacggaaaagagtttgaaggcatccttgataccggagcagataaaagtataatttctacacattggtggcccaaagcatggcccaccacagagtcatctcattcattacagggcctaggatatcaatcatgtcccactataagctccattgccttgacgtgggaatcctctgaagggcagcaagggaaattcataccttatgtgctcccactcccggttaacctctggggaagggatattatgcagcatttgggccttattttgtccaatgaaaacgccccatcgggagggtattcagctaaagcaaaaaatatcatggcaaagatgggttataaagaaggaaaagggttaggacatcaagaacagggaaggatagagcccatctcacctaatggaaaccaagacagacagggtctgggttttccttagcggccattggggcagcacgacccataccatggaaaacaggggacccagtgtgggttcctcaatggcacctatcctctgaaaaactagaagctgtgattcaactggtagaggaacaattaaaactaggccatattgagccatctacctcaccttggaatactccaatttttgtaattaagaaaaagtcaggaaagtggagactgctccatgacctcagagccattaatgagcaaatgaacttatttggcccagtacagaggggtctccctgtactttccgccttaccacgtggctggaatttaattattatagatattaaagattgtttcttttctatacctttgtgtccaagggataggcccagatttgcctttaccatcccctctattaatcacatggaacctgataagaggtatcaatggaaggtcttaccacagggaatgtccaatagtcctactatgtgtcaactttatgtacaagaagctcttttgccagtgagggaacaattcccctctttaattttgctcctttacatggatgacatcctcctgtgccataaagaccttaccatgctacaaaaagcatatccttttctacttaaaactttaagtcagtggggtttacagatagccacagaaaaggtccaaatttctgatacaggacaattcttgggctctgtggtgtccccagataagattgtgccccaaaaggtagagataagaagagatcacctccataccttaaatgattttcaaaagctgttgggagatattaattggctcagaccttttctaaagattccttccgctgagttaaggcctttgtttagtattttagaaggagatcctcatatctcctcccctaggactcttactctagctgctaaccaggccttacaaaaggtggaaaaagccttacagaatgcacaattacaacgtattgaggattcgcagcctttcagtttgtgtgtctttaagacagcacaattgccaaccgcagttttgtggcagaatgggccattgttgtggatccatccaaacgtatccccagctaaaataatagattggtatcctgatgcaattgcacagcttgcccttaaaggcctaaaagcagcaatcacccactttgggcaaagtccatatcttttaattgtaccttataccgctgcacaggttcaaaccttggcagccacatctaatgattgggcagttttagttacctccttttcaggaaaaatagataaccattatccaaaacatccaatcttacagtttgcccaaaatcaatctgttgtgtttccacaaataacagtaagaaacccacttaaaaatgggattgtggtatatactgatggatcaaaaactggcataggtgcctatgtggctaatggtaaagtggtatccaaacaatataatgaaaattcgcctcaagtggtagaatgtttagtggtcttagaagttttaaaaacctttttagaaccccttaatattgtgtcagattcctgttatgtggttaatgcagtaaatcttttagaagtggctggagtgattaagccttccagtagagttgccaatatttttcagcagatacaattagttttgttatctagaagatctcctgtttatattactcatgttagagcccattcaggcctacctggccccatggctctgggaaatgatttggcagataaggccactaaagtggtggctgctgccctatcatccccggtagaggctgcaagaaattttcataacaattttcatgtgacggctgaaacattacgcagtcgtttctccttgacaagaaaagaagcccgtgacattgttactcaatgtcaaagctgctgtgagttcttgccagttcctcatgtgggaattaacccacgtggcattcgacctctacaggtctggcaaatggatgttacacatgtttcttcctttggaaaacttcaatatctccatgtgtccattgacacatgttctggcatcatgtttgcttctccgttaaccggagaaaaagcctcacatgtgattcaacattgtcttgaggcatggagtgcttgggggaaacccagactccttaagactgataatggaccagcttatacgtctcaaaaattccagcagttctgccgtcagatggacgtgacccacctgactggacttccatacaaccctcaaggacagggtattgttgagcgtgcgcatcgcaccctcaaagcctatcttataaaacagaagaggggaattgaagagattttaccccgagcaccaagagtgtcggtgtctttggcactctttacactcaattttttaaatattgatgttcatggccatactgcggctgaacgtcattgtacagagccagataggcccaatgagatggttaaatggaaaaatgtccttgataataaatggtatggcccggatcctattttgataagatccaggggagcggtctgtgttttcccacagaatgaagacaacccattttggataccaaaaagactcacccgaaaaatccagactgaccaagggaatactaatgtccctcgtcttggtgatgtccagggcgtcaataataaagagagagcagcgttgggggataatgtcgatatttccactcccaatgacggtgatgtataatgctcaagtattctcctgcttttttacactaactaggaactgggtttagccttgattcagacagccttggctctgtctggacaggtccagacaactgacaccattaacactttgtcagcctcagtgactacagtcatagatgaacaggcctcagctaatgtcaagatacagagaggtctcatgctggttaatcaactcatagatcttgtccagatacaactagatgtattatgacaaataactcagcagggttgtgaacaaaagtttccgggattgtgtgttatttccattcagtatgttaaatttactagggcagctaaattgtcaaaaagtctttttcagtatatgttacagaattggatggctgaatttgaacagatccttcgggaattgagacttcaggtcaactccacgcgcttggacctgtccctgaccaaaggattacccaattggatctcctcagcattttccttctttaaaaaatgggtgggattaatattatttggagatacactttgctgtggattagtgttgcttctttgattggtctgtaagcttaaggcccaaactaggagagacaaggtggttattgcccaggcgcttgcaggactagaacatggagctccccctgatatatggttatctatgcttaggcaataggtcgctggccactcagctcttatatctcacgaggctagactcattgcacgggatagagtgagtgtgcttcagcagcccgagagagttgcaaggctaagcactgcaatggaaaggctctgcggcatatatgagcctattctagggagacatgtcatctttcatgaaggttcagtgtcctagttcccttcccccaggcaaaacgacacgggagcaggtcagggttgctctgggtaaaagcctgtgagcctaagagctaatactgtacatggctcctttacctacacactggggatttgacctctatctccactctcattaatatgggtggcctatttgctcttattaaaaggaaagggggagatgttgggagccgcgcccacattcgccgttacaagatggcgctgacagctgtgttctaagtggtaaacaaataatctgcgcatgtgccaagggtattttgtgactacttgtactctgccttccccgtgacgtcaactcggccgatgggctgcagccaatcagggagtgacacgtccgaggcgaaggataattctccttaagagggacagggtttcgttttctctctctcttgcttcttgcactcctgctcctaaagatgtaagcaataaagctttgccgcagaagattctggtctgttgcgtctttcctggccggtcgtgagaacgcgtctaataacacaggacctgatccttttatattaagattagatacaaatgttgagtcaaatattgatttttagtcaaataataacatcctcaaggcctttccatattggcatgtaaagccttcatagttttaaactatttcattgatgtagaattcatatatcatagaattcacctttaaaaaat

SEQ ID NO: 22121 - DNA, 1198 bp, Mus musculus
ccgagagtccccgtgctctgacttacttttacaagtataagattttaaatattctatacttgttcatccaggaaccactctcaaatgctgtgcaaaactcatttcataagttatttcctttaccggagtcccgatgtttgctctagttcattttctaatcattcctctcaaacgttctctgcaagtcaagcatgaatccggaattgccattgtgcagttattgcattgtttccaaaatgagagcacaagcatgcacctgggcctcagtttttaatcttttaagaattgtgacatcagggaacatctcgattcacagaactcactgtagtagatggagaaagaagaaagaaagtcgggtataaaagaattattatccacatcaggggcaactgaaaagcagtcacacacgaatgaaatctatacagacactgtccaggtctaaggttggaagacatgggaacaaacgatttttacacggagctgccacaggctcctgagatgtttctatcctggcctgttgcaggcagtctctgtcatggcatgctgaccccagcaggtcattttctggggagccgttccacccaactgtgcccccactcaagcccctgtgcccatagcatcctgtaggtgacctctctcctccgtgtctcagacatctcagctctctctgtctgagtcacgtcctcctctctgtccctccccagtgagaatgcatctctgctcaggcaggctctggctattttacacagactgtgagacgtcctgagccgagtagaggacagaggtccccacgagtcatcttcatcttctgagtcattgttcacactcacacggacacagcctgacaattcaccccatggctgagctcgggggacaccaacaacagagcaagcaggcttctgtgctgtcttttcacgtttttcagggggtcctgtggactggctcctgtttaaatgcccacagtaggccctttatgttcacaatgttttgtgaatttattttctgagtcagattcctcctctgaggtcggtttctcctcttgagtcaccacggccctgtcctgagccacttttctcaggcttttctgtggagaaataaacatgtttctcaaccctgagagaggtcctggcagcacatgggagtccccacagtcctgggcacctgtggcttttctgtcccctgcctgtgccttcctcag

SEQ ID NO: 22122 - DNA, 1133 bp, Mus musculus
tgtttggagctttccttctcgtattttctctagagtagaatttatgaatagatattgtttgattttggatttttattgaaatgtcttctttctgccatgtaagttgattgtgagtttttctgggcatagtagtgtatgtaggcacctatgttttttagaggttgcaggatatctgttcaggcccttctaactttgactgtctacgttgacaagtcagatgtaattctgatatatctgtctatgtatgttacttggtcttttacccatgctacttttaatattctttctttgatttttaggttttgtattttgataattatgtattaggatgggtttcttttctgtttcagtctaattggtattctagaggcttctcacacatttctaggaatctctttctttaggttgggtacttttcttctatgattattttgggaatatgttctggtccttggagcttggagtcttgtctcagttagggttcaattgctgtgatcagacaccatgaccaaggcaattcttagtttcagaggttcagttcagtattttcaaggcaggaacatgacagcatctaggcaggcatggtgcagaaggagctgagagatttacattttcctctgaaggctgctagcagaatactggcttctagacagtcagaataagggtcataaagcccacacccacagggacacacgtactccaactgggagacaccttctaatagtgccacacccttggcccagcctatacaaactatcacagagtcttaacattcttttatttctgttgctctttgatggcctttggtggaatcccagatttcctggatgttttatgctaggagttttttatatttaacatttttgactgatgtattaattacttgtattgtatatttatgcctgactgtctctcttccatctccattattctatacatgcttgttgcatctgttgatcttgttgtcttcccttagttttctgcctccagaatttcttcagtttgtgtcttctttattgcttctattttgacttccaggtcttgcccagttttatttgtttcctttacctgtttaattctattttcctgtatgtctttaagtaattatttgtttcttctttaaagacctttat

SEQ ID NO: 22123 - DNA, 1208 bp, Mus musculus
atatttcttactcaggattttctatgagatattgagtagggaaaagtttaaaaataattgcctgatttgtacatttttattctatttatatgtatttgttcacttttcccatttatatatgtattcaaaatacattccaattgcaaccccctcccctttccacattacacagtccctcatcttaactccttttcatctacccagggagagtggggaccacctgagtatcccccaaatatgacaagtcaggtctctgctactgaggtaagacaaggcagccaagttagactggagagactaacagtttggacagacagacaacaccttaagagacatccccccactctatttgttccaggacccatgtgaagactgaagcacatttactacatatatggtggggccttggcccaccctgtgtttgctcttttctggtgagtcactttctgagaatctcctagtgtacaggttagttgactcgctagatcttctaatagacttcctgttcttttgcaggccctcaatcctttcccccaactcttccaaacgactccctgagacctgtccaatgataggctgtgggtctctgcatctgtttcagtcaggggctggatggagactttcagaggacagttatgctaagctactgtctgcaagtataacaaaggatcttcactaatgtcaggattggtgcttgcccatgggatgggtttcaagttggtcagagtatcatttgtccattccctcagtctctgctccatctttgcacctgcatttcttgtagacaggaccaattttgggagcaaatgtatttcgttcatttactgtgcttaattctccactagaggtctttcctggtagcaagagggtccataactctctgccatgcatctcaactaagatcacccccatattatccttggtgacctctcattcctggtctctggcacaacctaaagattccccacccttccatacccctccccctcaagctgcagaattccattcatattcctgatcctctgaccaactcttgtctctcacaacacctgttcctggacactcgcctttccccttacttattcactctcccatccagttctctctttcttccatctgcctcctctgactgttttattccccttttgaatgagatttaacaatgctcattagggcttttcttcttgtttagcttctttggttctatg

SEQ ID NO: 22124 - DNA, 1196 bp, Mus musculus
gtggagccttcctgcctagatggctctgttgttaagccactgctgctgttctccttcaagaggttgctgcctgctgagaggcccctgagatattccagagactacaccctgtcctgcactatcctcacctgcagctgattccaggcaccaagaatggattggcaggaatgggtctcctcccctttagaagcacatttgctattaaacatttgagctttgatcaggaaccttgacttagctccattatttctcttgaccgtctagttctctttcagctccagtttgcctcccaggtgtactccttttcttgtgagctgcaggttggctcccaacatttgtgaatgttgtcaagttgaaatatcctttacatgccactgtagtctctgaatacataaaagaacacatactagagagaaaccttatcaatataaccaatgtggtaaagcctttgcatgtcctaatcatatttaaatgtatgaaagtatttatagtagatataaactatgttaatttgaatatgcttggccctaagcagtggcactattagtaggtgtgtcttgtaggaatagatgttacttttttgaaggaagtgaattactggggtggtggtgtttggagctttatccagtataaaacagccccacctattgtttgcctggaagatagtctcttcctgccagccttctcatgaagatggagaactctcagctccttctttagcatcatagctgcattcatgctgccatgcttcctgctataatggtaataaactaagtatttgaaactctaagccaggcccaattaaatatttacctttaaaacagttgccttggacacagtttgtcttctgagcaatggaaattctttctaagacagaagttagtacctctgtgtactggctagttttgtgtcaacttgacacagctggggttatcacagagaaaggagcttcagttgaggaaatgcctccatgagatcaaactgtaaggcattttctcaattagtgatcaagggggaaaggccccttgtgggtggaaccatctctgggctggtagtcttgggttctataagagagcaggctgagcaagccaggtgaggcaagccagtaaagaacatccctccatggcctctgcatcagctcctgctccctgacctgcttgagttccagtcctgacttcctttggtgatgaacagca

SEQ ID NO: 22125 - DNA, 1151 bp, Mus musculus
tttacatagaagcattcagaatgtcaacaaaacagctgcaatttttttattttgcaattacagagtggtattcacttaacagaacaacaattatcttcttataagctgcatcagaggcaactgaagatgaaaaaagaaaaacaaaaataaaaccaaaagaaaaaataacgctttttgccccatctactgcgaggatgaagaccattctcagcaatcagactgtggacattccagagaatgtcgaaatcactctgaaggggcgcacagtcattgtgaagggccccagggggactctgcggagggacttcaatcacatcaacgtggagctgagtcttcttgggaagaagaagaaaaggctccgggttgacaaatggtggggtaacagaaaggaactggccaccgtcaggaccatctgcagtcatgttcagaacatgatcaaaggtgtcacactgggcttccgatacaagatgcggtctgtgtacgctcacttccccatcaacgtcctcatccaggagaatggctctttggttgaaatccgaaatttcttgggtgaaaaatacatctgcagggttcggatgaggacaggtgtggcttgttctgtctctcaagcccagaaggatgagttaatccgtgaaggaaatgacattgaacttgtttcaaattcagctgccctgattcagcaagccacaacagttaaaaacaagtatatcaggaagtttttggatggcatctatgtgtctgagaagggaactgtgcagcaggctgacgagtgaggaggcctcagttcctggccccagaaacgagatcctgatcacaagaacaatttgggctcttttgggagaataaaagacttatatattgaaaaaaaaaaaaaaccaaaaaaaaccaaaaaaaaaagcaacctactgttcccatatataactaatttgtgctgtgctttaaattttcgtgccaatttacaaatcccagactatgccaggcaaggttagtggctattgaaaatatcaccaggacagggctatctaaagacacatttggtagtgtgttaactatacaaaaaaaaaaaaagacactgtacagtttaaaataaatcttacacagccttacatttcaattttttttctttaaaatgagtgagttgtgtacaggag

SEQ ID NO: 22126 - DNA, 1645 bp, Mus musculus
tcctcatgactgtgtcccagactaaaaattacttagaactccagttttatgggacagttacctggtacacacaaggcatagacaagactgtcagattcccctggccttaatttattaatggggccactagagggacatcaagtaagaattggattttagctgagaagcatggcagatcccaggagtcagccacaaagcccagaggcccctggtgataatgtgttggctttctttgggcaggttctgaagacagcccaccgaagcattcaagcaaccacgaaagccattcttccagaagaaggaaccggcattctaagtccaaagtcactaatggagttggaaagaaatgaaggaagctagttaatgtcagatgttccagagtgcctagacccgagaggaaaacagcatatttggaccttcctatgcagagatcataatgtacggaaagaaccgagggagcttaggggatcgtgacttgagagtgtaagtcttgtctcccatagacctggacacacactaggctgaccatggctcggggtcctttgccaactggaagagtctctaaacttcagcgtatggcctgcattctctggtagcaatacagtgtgctggaaggacaggatagctgtttattcccagctgccagcagtggctctctgctggtgtgtcttgtggatgttgtataaatgtcttcattcagatgttgacttaactaactggctaatgaactggtcgcttggttttatttttatgagtctgcctgtccatttgattgattgtttaagttcagagagtctgcttttacttcatgtttttgagttaaatagcttcaaagcttccagaatccactgctgaaattgggggagggttccttctagagaaacaaagggtggaaggagctttggtgtcccagctaagcatactcagtccccagccacatggcagatgaccccagccggagtgaagaggctggctgctggcactggagcctcggcttcagattagaactgttttgttcccttccagacactgtccagactgagtgcacaagaacgaccttgcgagcggatctgggacagtggggctccctgccagggtccttttccatgtgcttggtttttcctctgtgatgttttgcctactctgtctttctggctcatgtgaggtgctagtgggtattaattaactttcatctgtgccatgttctactaaaacattctccctgtctaccctggatccttgttttaaatatatcagttcacattaaacagctcatcaatgatctgtctttgttagaatgatgtttctttgtatcttattagtcttttaactacttggaggcaagttcatattttgcagttgaccttaggataatatgtatgtatgtgtgttctatatggtaaagaaagaaaaaagaaaaaatatattttaaaggggcttacacatatatgtcctatctgaaccttccagagtgatccacagggaatggaagtgtatgcaggggcattgtctgtcactatggtcttacttactaggttggattttctttctcagacaagtgggctgtaaaacaaacttgctacaaacaatcctgctgctcactcaccaaagcacgatgatttctgtttctttgcctccttaaagg

SEQ ID NO: 22127 - DNA, 1193 bp, Mus musculus
gaagagtgtaaaaaacccttcagcaatctttcagccctcagtagacacaaagtagttcacactggagagaaacgctacacctgtgagaaatgtggcaaagcctacagcaggagttatcacctcagtcgacacaagaaagctcatagtggacagaaatcctacaagtgcaaagaatgtggcaaaatgttttactattcttcagaccttaaaagacaccagagaattcattctgaggagaggccctatgaatgtgaagaatgtggcaaagcctttcctagtccttcagacgttactcagcatgcgagaacccataagagaatgaagcagtacacctgtgatgagtgtggagagtgctttactattcagacaacattttccaacctccgtaaaattcgtcttgagggaaaaccgtctgaatgtgagagatgtcgaaaggacttttaaaggttcttcataacttacaacacataaaagtcttcagacagcttgcctgcacgtggggaggacgtggcagatgctttatgtatcaatcagctcttgctcaaccacaaacaattcacacctgagagaacccctacacacgtgcagaaaaagaccagggcatatcaatccctcatgtctctataagcatcggggaatccattctgatgaaggagccttcagaaacaatcagcgtgacaagacctttacccgttcttcacacctcaagcatcccagagacttcatagctgcagagacactctccatgtacaaacgctgtgcctaagccttgaatgataattgaagtcttcatcaacgccaaagaaatgaccaaggtgagaacccctgcaggtgcagatgtccttgttagctgtagacatccacatcacgcagcccagcatttcctgagggactctcaactaggtatttgactcagtcagattagcctgtaggcatatttttctggagcattttcttgattgctaagtgatgtgcattagtctgttcaagggtagggagtgccattcaatggcaagtgtccttgggttatacagaaatctgggtgaaggagaatattcaagtatggagcaaacaggcatatttcctctatgactgtaggccatatctacttcccaactttcctagttaatgcgtttttcatcttgtggtgaccctcaaccataaagttattttcaatgctactgcaaaactgt

SEQ ID NO: 22128 - DNA, 1193 bp, Mus musculus; identical to SEQ ID NO: 22127

SEQ ID NO: 22129 - DNA, 1188 bp, Mus musculus
tggctggaagtgcttttctgctggttgctggggttgaaacatggcccacttgttgcctgtacactgattttgaactcagaaatctacatgcctctgttacctgatttttgggatttaaagcatatataccaccatgcctagacctaagcttttctctacttggaacttgctctgtaccagactggccttgaactcagagatctacttgcctctgtctcctaagaactatgtctcaagatctggttcaaaagtctgtcttccagcctcaagatctgtatcacaggggtgtcctctatctctggattgtagttcattccagattaaaagtccacatgaaaaaaaaaaacactggtcataataatgcctgacatgatataactatctcctgttctactgcaaaagcatacacaatatgttcagctgggtggaatcttgccctgaggtcaccactcccttagtttcatttaatattcttgccacaggatttagctccattccacttcctgatgtctctttaatacttgaaccatacattttgtatttttcctttctaagtttgcaatatttgatcaaaatgctcttcatgagaggacaaagtcactgctgggcttgcttgagactctgtttatccgtgcaaataatccaaatttcttcactttagccttaaacagactctctggacaagggaaaaaagcaggcatattcttcaccaaaatattacaagaacagtctttaggccacatactaaaattattttcctgtgaaacctcataaaccagatccccacagttcaaatatcctcagcaccatcgtcttccataatcctactaggatgacccattaaattccacttaaagcattccactggtttccaaagtccccaaatccacactgaaaaaaaaggtcaggcctttcacaccaatactcccctcctggtaccaacttcttaggttgggttttatcacctgaagaaataacatgactggcataaggttttactgctatgaacagacaccatgaccaaggcaagtcctataaaaacaacatttaattggggctggcttacaggttcagagattctgtccattatcatcaaggtcgagcatggcagtagccaggcaggcatggcacaggcaaagctgagagttctatgtcttcatccaaaggctgctagtggaagactgactt

SEQ ID NO: 22130 - DNA, 1106 bp, Mus musculus
ctgcagtatcagagaataccctgagaccagctattcatccatcttctgcttcctgactgtagaagaaacgtgaccagctgcttatgttcctgttgttttacctttctcaccatgtgctgtggttggaataagaattgccccaagggctcataggcttgaatgcttagtctgaaggtagtagcactgctggaaaaagattaaggagtgcggcgtcattagtgtaagtgtgtaactgggggtcatatttgaggtttcaaagtttcagacccagtatctccctcttttaaaaactttagtcaatacgtataattctcagctactcttcaagtaccatgtctatctgcattccaccatgctcccaagctagtttcccacaataataacttacaagcctctgaaactgtaaacacgctccaattaaatgctttttaaaatagggattgtcatggtttgatgtctcttcatagcaaccggacactgagtaagtctccatggtagacaatggaattgaactatgatccaaattaagcccttctacttgtgcttgtgtgcatatattattgccatgagaatacttactaaatcttcatgccaaatgcaagtttcaatgtgatgtttaatacgtatgaatcatgtgtgttttccctttccccattattgccctcccttttgctcccttctctgaaaagtgtttccactcttctttatttacatacctacacacatatctacattaacaaacacagatgtagagcaagcagtgtctaaaactagagaaatattagtgactgctggctgcctgccagtcacacgggtgcccctgcaacactggagcatttatctcttcaacctattggcccagaacatctgacagatttttctctgcagcagcaaatatgaaggagttatctcccttgacctggcagagtttggctgttgactttctatgttttctgcttctccacagcttgcaggtcagcatttgaggtaagggcagtttcctgtctagtggcagcttgtcacatttttaacaaacttcgtaaggaagttcttcaatgctcatcatcatctttgaaggacttgcagattctgccaagagctgggat

SEQ ID NO: 22131 - DNA, 1357 bp, Mus musculus
gaggtcaaataacttacattggtatagaattgattgatttattgatacaaatttaaggttctttacatttcaaaattctatattatgttttaaccatgttttaggtatcctacacaaacaattacagtctttaaaggctactatgtcaaactgttttggataattataataatacaagttggtagtcatttaatcaaagtcttgttagctacttctttagttatttatgaaaataagctttgtttgccctcctgtagctgttttcaaagttaaacagataaatggctagaaaaaacctacacactcagatctctttgacatataggtagtttttaaacacttcagagatctacaggctatggcatttaagatgctttaataataaacgtcttttcgtgacagcaagacacatcagcttctgacagcacccccaatctacttccaagaagatgatgggcaccaaagaacctcccactgtagtctacttcaaatatggcaaaggtagctactggttaaaaacctacctttgcctagactgcacaaagtatgtcatccaaagtgtggacaaataggacaccgggaagttgactgactaattttgcagggacaaagtatgactatccttctatatccctgcttaacaagaatcctgtcaggtattctagacttctaggctaaatatggatgcccaagtgttgcagaggaatgtgggtaactgtccaggcagctagtggtctctgttgtttctataattttggaagtttcttgctctgcatttcctgttttctcaggtaattttatccttgtcaggtctctgatgaggatgaagagagatcatgaaatttttcatctaaaatgtattgattttagagaaaaaaagacattcattagactaaaaaggaagtgatactgggatagaattttgtacagtgtataaaggttttctttgtattattcagacattgatttgtctaccaggagaatgtcgactgatgcctggactttggtgttgttatttttatggctcattccttgcatcagtgttttgtaaacatatacctctcttactttcggattgtctcaataaagaactgatggccaatagctgaggctggagaagaatgatgtcactttgggggcagagagaggctctgtgggaagaatcagttgccaggtttattctccaacatcacactgaggtggaaggaacaggtgccaggactgactgaatgaaaagtaacaggtcatgtagcagatatggactagaaaactcaggttaatttagacatgctagctgtgaggtagccagctaagccctaagataaaataaatattaatacgattctgtgtcattatt

SEQ ID NO: 22132 - DNA, 1191 bp, Mus musculus
tgaatctcatgtgacacatggactgtggtcttttatagtgttgtaattgttaaatcctttggggacctttcaagttgtagcctattttacttatgaggtgaaagttaggttggagaaagggaagggatgttacgacttaaagctttatgggtagagctagcatgttgactttgggaacatactgaatgccaagaagacccacacccatgttagcattcccagtatcctcacatagaaagaggtaattacctctaaagcttgtcctctgaccttcttgcatggacccccacacaaacataaatttctgtgcccagaaataatataaacctagatcacacttttgaaatgactttgtgttttacatggaaaagtgtaaactaatgatacaaactcagttgttagcagcatgagttctagaatcatttgaattgcaagcctcttgttggtttgttgaatttctcttgattaattaaattgatttcaggaggtctgttgattgcagttttaatcatctgtttgactgagatgctgcagtatcagataataccctgagaccaactatttatccatctcctgcttcctgactgtggaagaaacatgaccagctgcttatgttcctgatgttttaactttctcaccatgtgttgtggttggaataagaattgccccaagggctcatagaatagatttgaatgcttagtcatcaggtaataacactgctggaaaaggattaagaagtgtggcatcattggtgtaagagtgtcactgggggacatatatttgaggtttcaaaggttcagacccagtgtccccctcttttcctgactatgggtcagtatggataattctcagctacttctcaagctccatgtctacctacatgccaatgagctccctagcttgttcaccacaataataatggacaaacctcagaaactgtttacaagctccaattaagaaatataagagaaaacagtctcattcccaaaaggcagggtggatttttccatgtatgatgaaagtttgtaattgtttaaggggattttggtcaatagttgttaatggtgtttgagaggaaacaaagcaaaaatggcaagattcaagaatctcttctttttcctttctttgtctttctttcatccttctttcttttcttgcttgtcctaggggaaaagtagtggagaggggatg

SEQ ID NO: 22133 - DNA, 2184 bp, Mus musculus
tcttcggaaccatcaaagagttcatagtagagagagaccttgcaagtgttaagcatgtcaccaagccttttaaatatcgttcaaccctttcgaaacacaagaacactcatgcaagagagaaatcctaccagtgtgaagatgtggtatgatggtttgtatatgcttggctcagggagttgcagtattaggaggtgtggccttgttggagtaagtgtgtcaatgtgggtgtgggggtgggcgctaatacccttgtcctacaagccagtcttgtagcagccttcagatgaagatgtacaactcttagctcttcctgcaccatgtctgcctggatgctgccatgctcctgccttgatgataatagactaagtctttaatctgtaagcaagcctctattaagtgttgttcttacaagagttgctttggttatggtgtctgttcacagcaataaacccctaagacatatgggaagtgtgataaagcctagttaatcttgatagccttactcaacacaggatagttcataatggagtgaagtcctatgaatttttaaaatatttaatcttcttccactcttaaaacaaatctgtgctgcccagttttatgtcagcttgacaggcaaactagagctatctgaaaggacagaacttcaactgagtaaatgtttgcataagatccagctttaactgttttcttaattagtgattgatgggagggcccagcccattgtgagtgcggtcattcctgagctgggaggcctggattgtataagaaagcagattgagcagtccatagggagcaagcatccctccatgccctcctctatgtgagttctttttttttttttttttgaggcaggttttttctgtgtagccctggctgtcctggaactcactttgtagaccaggctggcctcaaactcagaaatccgcctgcctctgcctcccaagtgctgggattaaaagcgtgtgccaccacgcccggcccctatgtgagttcttgtcctggcttcctttaataatggactacaatgtgttggtgtaactcaaaccctttcctgcccaacttgcttcagtagtagtgtttcttagaagcaataggaaccccaattgactgactaaggcaacactcattctgactacaaactccatgagtgtgtggaatatggtgaaatgtttgctaacaattcagattttatccaattcaaaaggatctgcagtgaagactattaagtgaattattttggaatatcaacacaaacatcttacttctaatagcacaaatgctaagaaagtcaccagaagctgggtggtggtggtgcacacctttaatcccagcacttgggaggcagaggcaggtggatttctgagttcgaggccagcctggtctacaaagtgagttccaggacggccggggctatacagagaaaccctgtctcaaaaccctcctaccccccaaaaaaagtcaccagaggagtagagacttctctttgatgtaacctccccaccaatgtgttcaaccaatgtgcttgaatcttgcatggatggatgagtttcatccctctgtaactatatatatttcatgaaactgttgctctgttgtataacttggtcctttgggtgcctggaatctgatttgtgggctgtggtacagtttctgttgttttaaccagtggcggtgtcacccatactctttaaataacgcattccctgggtgtgtaagaagctccataaactcacattcctcaccaacttggactttatgaagatgatttacattggatctaatctaagctaactggccactagtgtttgtgtccccaggaaaagctaacagaaatcattgtcagttgtatttggcttcagaatgaagaatctcttcattttctttaaacctatagattgtttttcatatgactccaactgtcatgtcatagaacttggcagcatattgaaataataattgaaaagatgcatttgattagtatgtatatgatgtcaatcatgaaacattgtagatgcagttcttacataaataactattgatagggatcctaaaagtgatctcacagttgtgtttattcatttatgggaacacttatattagggccattaaaacctaaaagttatcagtcattaacttagaaatgatcaaatatctctaatgtgcccaaattttgtttttagt

SEQ ID NO: 22134 - DNA, 1184 bp, Mus musculus
ttgaactataggtacaataatttaacagaggctattttttttcatcaaagatttacaactagttatttatcagggccagaccattagacttaggaagagaaggatgacaggacccttcatgaatagaaccccatcaaactacacagcgagggtaatgtgatgaattaacatgacctgtgcacacatagggtcttgacagtttcaaggaaaagtttatagaaaacacaacatggtcattatgatttagatagcatgcagacttaccataatcactaagttcatggttatagcgtatgtcagaatttagctatgattttggagttatgattaagagactttagcaatgtgtctcttctatcctttttaagaatgtgcattccgttagttgttcttgttctacacagctttctaccatgaggtaaataacagcagcctctactggaaacagttcacctcttagctgttctccagtgcgtggtatctctccctggactgtcctgttgttttccgtctaaactgtcacagagttggggagacagtttaacccaggacagaggctgtgggagaaactgagtcagttacacttgagctggaggtgggtggggcatattctacctctggaactggggtttcagtgagctaaaacagcatatgacgatttataaaatcattctctgtattcagatggcattgtttctctgtaagactgaacccaggcatgtacctaagcatgacttgtttcagtgtcttcagatgtgggcaacagcctgagaaactcaatgtctattttccttttacacaggccccagtgttaaggatactatcctgattctatgagacacggatatattggctccgttatggatcagtgtctaagttttacatacaaagtatacctgtaaccttggaaagagacatttaaagagagaaacaatgaaaactagaccactgaggaactcagaaagttctagagaggaaagaagggtatcagggcttgttggagcagaaacaaagatcagcttcagccataagacagtggagtctcaaacatacacaaacttgcgtgcacacacacacacataaccctcaaaggaataaggttcgcaaaccttgtataaaggacccaacctcactttcatcttcaatctcccaaacaagcagggtagctagaggactctccccac

SEQ ID NO: 22135 - DNA, 1166 bp, Mus musculus
actctgcacaaattacttcataccggagagaaacctttcaaatgggaagaatgtggtgaggttttctatacctgctgaagacttactaaacatcaggaaattcacattggcgaaaaccctacaaaggtaaagaatgtgtcaaaactctttactgtacttcagactttaaataataccataaaaactcatactgaagagaaaccatactttaattagggcttcgttagatacaaggtacgtcctactgtagagaaactttacagatgtggagaatgtggacaaatattttaccgtacttcacaactttaacagccagcaaaagggctcattctcagaagaatcccttcaagtgtgaagtatgggacaaggtattatgtgctaccttgagctttctgtctaccagaacatgtatcctggagagaaactctgcaagtgtgaaaaatttggaaagttttttaactcattcctccctgattctgatcagacttggcaaagtttggggcgggcgttgtgtttttgttttaggataattgtgctcaggcctgttgattgtgggaggaaccaacccatctctgttgagcaaggatcctggattgtataaaaggagaaagggaactgagaagaagcgctcctctctcttcctctgccctctgactgtcgaggcaataggaacttctctttcagctcccgctgccctaaaatgtctcacgacgttcacagggtcgtgattcgaatgagaaatgttaaccctgtagtcttaagcatttgaacatttgtgccccgagttgttggctctatttggagagatttagaagtaggtcactagaggtgaactttgtgaataaagagctccctctacatccagttctctcactctgcttcctgagtaccattgaggatgtgaactctcagcttccggcttcggccaccatgcagcttattcccatgcccaccctctgtcgtgaacttcgatcccttctgtaccgcaaactgaagtaaagtcattcctccataaattgcctggtcatagtgtttaatcacaagagaaaagaaactagtaaaagcattgcccttgtaccaggaacagtactaaactgtttctactacattccgtgtgtaaggatagtttatcatagcaagagggaaagaaagtaaggctgcaagcc

SEQ ID NO: 22136 - DNA, 1163 bp, Mus musculus
ggcaaggatttccattgtccaacattactttctaaatacaggagaagtcactcaggaaaacaaaaaaacaaacctacaagtataaagtatgtatcctggccttctgtgctcaacaaaaacattagggatcatgaaagaatccattctgcagataaaccatacaactctaaagaatgtagcaaatacttcagaagttccatagcatatgctgagcacaggataattcctactgtacagaaatattacaattgtggagaatgtggcaaaaactattacttgtcttctggtcttaagcaacattcaggaattcatctgttagagaaaccacacaagtgtgaagaatgttccaaggtcttttgtacttactaagaactgtaaaacacctcagttcatacaagactgaaatgcctcatgtgaaaaatgttgcaaaccctttaatagactttcttgtatgtctcaacacaaggtactccaagctggagtgaaatagtacaaatgttaaaaatattcacagtacattaacacttcttcagacactaagttatcgaaagctttctgctgaatggaaactatgtaagattgagaaatgtggtaaataaagcctttggaatcattcacacaaccatgtcaaaaatacaaatgtcagactgtttattctctggatttgaggctgatctttccttgctgtcttttgtttcttctgtttgagaatcagaacacttctataccattgttgcaaaagtagtcacttgtttttatgttgtaatagatcacacataagagattgccttgagtctcacataacacatggactgtggtctcataatgttgtaattattaaatactatatggacctttcaagttgtaggctattttacttaggaggtgaaagtaaggttggggaaaagggaagaaatgttgtgattaaagctctgtggctaaggctagcatgagtttgggaacaaacttaaaagacaagacccatacccatgttagtattccaagtacccacaaaataggtaattacctctgcagatttttctctgacctccatgtgtgggctcccacatatacatacatacatacacccagacaaaataaacctaaattatgttttggaattatgcttgtgttttatgcagacaggggtcaagaattaatgc

SEQ ID NO: 22137 - DNA, 1162 bp, Mus musculus
taatcgcattaattcaagccttaaggctggcagaaggaagggctcttaatgtctataccgacagccggtacgcttttgccacggctcatgttcacggagcaatataccgacaccgtggactgctgacgtctgccggcaaagatatcaaaaataaagaagaaattctcagcttattagaagctgttcatttgccccgtagggtggcaattatccattgcccaggacaccagaagggaactgggcccgttgaaaagggaaatcaaatggcagaccaagaagctaaaaaagcagcccaagggccaatgactctggtggtgagaacccaacagcccgctgctgaggaaataaataaaagaaccctcacagaagaagaggggcgagattacttagctaacatacaccatctgactcatttaggaactaaaaaattactaaaattggttagtaagtccccctattacattcctggattaaaaggaattgtggaagagatagtaaaaaactgccgtgcttgtgcacttaccaacgctgggtctagcaggctccaggaaggaaaacgactgcgaggagacaggcctggagcctactgggaaactgacttcactgaggtgaaaccggctaggtatggaaataaatatctcctagtttttatagacaccttttcaggatgggtcgaagcgttccccaccaagaaagaaacggctaatgtagtggtcaagaagatacttgaagaaatccttccccgctttgggatacctaaggtaatggggtcagacaacggacctgccttcgtctcccaggtaagtcagggattggccagacaactggggacaaattggaaattacattgtgcatacagaccccagagttcaggacaggtagaaaggatgaacagaacgctaaaggagactctgactaaaatagccttagaatccggcagaagcgattggacagccgttctcccttatgccttgttcagggttcggaatacacctggaccccttggcctaactccatttgaattaatgtatggggcgcccccacccatttttatgaccgtaggggataagaatcgcccggatgtgtctttctctccttcttctagtcttttggctcgattaaaagctctcgaaatagtaagaaaagaggtctgggaacagct

SEQ ID NO: 22138 - DNA, 1291 bp, Mus musculus
ttaagatgttttcagatttccttactggtatcctatgggctcccatgtgtatttattgacctctccccctaattatccactctctcgccaggtgtcctcgttggagtgacatcgtctttaaaccccgcgtggcaatccctgacgcaccgccgtgatgcccagggaagacagggcgacctggaagtccaactacttcctcaagatcatccaacttttggatgattacccaaaatgcttcattgtgggagcagacaatgtgggctccaagcagatgcagcagatctgcatgtccctccgagggaaggccgtggtgctgatgggcaagaacaccatgatgcgcaaggccatcgggggccacctggagaacaacccagctctagagaaactgctgcctcacatccggaggaacatgggcttcgtgttcaccaaggaggacttcactgagattcgggatatactgttggccaataaggtgccagctgctgctcgggctggtgccatcgccccgtgtgaggtcactgtgccagctcagaacactggtctggggcccgagaagacctccttcttccaggctttgggcatcaccacgaaaatctccagaggcaccattgaaattctgagtgatgtgcagctgataaagactggagacaaggtgggagccagcgaggccacactgctgaacatgctgaacatctcccccttctccttcgggctgatcatccagcaggtgtttgacaacgacagcatttataacccggaagtgctcgacatcacagagcaggccctgcactctcgcttcctggagggtgtccgcaacgtggccagtgtgtgtctgcagatggggtacccgactgttgcctcggtgccacactccatcatcaatgggtacaagcgcgtcctggcattgtctgtggagactgagtacaccttcccacttgctgaaaaggtcaaggccttcctggctgatccatctgcatttgaggctgctgcccctgtggctgctgcctaccactgctgcccctgcggctgctgcagcccctgccaaagctgaagcaaaggaagagtcggaggaatcagatgaggatatgggatttggtctctttgactaatcccgccaaagcaaccaagtcagcctgcttaatttgagaaagatggaaataaaggcttacttctcttaaaaaaaaaaaaaaaaaagagtccacattccccatcagatcacttatatcctgctattctctctgttgcctcctgcccctcctgggccttggaaatggttccttttaactttcct

SEQ ID NO: 22139 - DNA, 1130 bp, Mus musculus
tgtatgaagaaagtatatacactcaacgttggggcttttcaaaaaaaattatgagatcatttgtttcataaacttagttttccacttaatcaaaatctaaatgttgatgctacaaatggaacatttcaataaaacagggaaggaatgctgtaaatgggtatttgaggtgtgtgtgtgtggggggggtggcgtagcaacagctttcttctcctccctcttgattaaaaaaaaaaaatccaatgtggtcaagtttactcactctcacggtttcctggactttagttatgtaatgttatagctgatagccttagattttttttttttttttttttttgtggatagcatgatgttggaatgaccaagtgtgacctttaccacaagtaagcttctatgggagaggatagtctatgacatgtctcctccccagctctggtagggaactttgttatctccaattctccatctcccagaggccctagtttgcctttcagctgacaaaacccaagtctgaccactgataaaccacagggctttcaaagctttgtttcttcaaatgtgtgtgttgcttcgaaggaaaaaatggaattaagaatctcaattctttgacaaatctttaaagttacttaatataaatgtgtactggtgtctatacgaagtaaataggctgcttacgttcatgctcagctaaaagatcagcaataagtacttatttctaaaataataccttactactcttcaaaaatatttagtcaattactatttgaaatactattttaaacatagatttccataatagagccagttctggaaatggctcagtcgtttctctggcatgactaagcagtcttgtgattgattacaagttggggcttatcccaaacaagagtctcctttttaaatgtgacagttttatctctgttaaggatgcttctgggtagaatcaaccagaacacttcagggttgggacacatataggaatctttctttcacatacagacaaatctcagggatttcattgggtgaagaaaattctaaccttccacgttgtgtgttcgtgtcctgacggagacagctgtagaggtgaaagaaaatttcctggccaaatcataagcatcatggacatagcagat

SEQ ID NO: 22140 - DNA, 1202 bp, Mus musculus
cttacctgtggccccacccagcacatcactacgtggaggggaaagaggcagctcccacctggcacccattgcacataggctccccaggaggacagatcatcatccacggctcacctgtgcctgggcacatcttggagagcttgtggacatactatctttcaatgaagtatattcaaaggatatttatattggtgatatttaaattaacacagacatgcaaagcattcttttgcatgtctttatttaattgtggttttattatcaaaattatatttctgataaaatattttaattttgaggtaatccttacaaaatgaaggttttcatgcaactagaaatatattttgaaatatatttgatatagtactctgccattttcatcatgttaactttcagtgtcaccatcttacagcttaggggcatttgcattcccctgacaaaggtatcatgtgtacagctcagtagtgtgccctgtccttctcatggactccattcatgtctgctcctcactaacagacttgggttttcccaatacctgactatacttttgtgattcagttcagcttaaagaacgccagttaggccgggcgtggtggcgcacgtctttaatcccagcacttgggaggcaggcagagataggcggatttctgagtttgaggccagcctggtctacagagtgagttcgaggacaaccagggctacacagagaaaccctgtctcgaaaaccaaaaacaaaaaaaaagaactccagttaagacttctaataccaaattctcttgcaagttatgaaaataaagtatataaaaggatcctgtgctattgtgtgcgtggttgctgagacaaaaactgggacaaagcaacttacagagggtattttagctcagttcaggtgtggggtccacagtgctgaggaaatcatagtggcagaaggaggaggtgactggttacatcccgtccagtcaggaaggaaaagaaaaggaaaagtgcctcgctggcttcctccttttcacacactccaatactttaatgcatggaacaggtctgcctatgtgtagtgtgggtgtccacttcagcctagtgtagaggacctctcgaagacatgcccaggggtttttttccagtgaggttgtagaccctgcaaacctaactgtaacatagccttcacaagcatgataaaccctccctgttgtgtatagtaacgg

SEQ ID NO: 22141 - DNA, 2233 bp, Mus musculus
cacctccaccgctgtctgccaagcgcagcccagcactggtcactctgcatgtttgtgtggtggccgcatccatcttacagaacagctccttgtgctcatctgtgaagccttactacatgtggatgtgcgtctgcctgcctagaagtcttcatctgtgcccagcagggcggcctaggagtgtcagggactggatgtgcggctgtgcagccgggtcagctaggtggccatttggggttctcatcgtgtctgtcacaggcagagacgccaagccctgctccgtgtcttctgacggagtgggcaggctgctgttttactgccctcatgtcttgtttgaaaatttgggactgtttttctatgtaaatattgaaaacttatgatttgtgcaataactcagatattttttatttaatttcatattttcacataagttatatttaagggaggagggaattttttttaaaacacgcttaaatcctttcccaatttgcattttctaagttgggttcctcgtgttggctggttatctgatagcatcctgacatgaacaccgtgaggagggaggggcctgtgggctttgtttttatgtcttttcttttggtcagatgcagtgaaggagccaagtcaacttgatagttctgtgaggccagtgtgtacctggcagcctggctgtcggccttgggcctttgtcctctctgaccacgagttctgacattttggtttgggtttttaaaaactagacaccaaatccagcatttaaagtgccagaagtaagaacctctaagaggagaagaggttgtcacgtcgtataaatcgtaaagaatcgtgactctgggcgtgcttcggtcattaagtgacgtggtctagagtcacgggcctggtgagtatcgttacagacaatggcacccagatttaggaatgtggagaaagggattttgttgattccattgaggaatctgcataggtatgcactcgttctgttaagagcaaatatctgaaaaggacctccgttgtccaggcacatgggggtattttaatgtatcacaggagagcacagccccagtgtgggcccaggagcggctggtgcctggcgtcagaagcatacaggtatactatgcaagtgtattctgccacaaccactgtctttgttactttttttgaacaagaatccatccattgcctgaccctgattctcaagcaccacggttgtcctggagtgcttgcagttgtaggccctctgacttctgcttctaaaacgggggtctggacctgctgcacaccacaggcaggttgcttcttgtccaccagtacagagtgtcaagccgagtgctgtgccacctgattgacatgcagcagtggaaattctgaatggatgtctgagtgacattggacacctcgccaaggacaagctctgtgtgtctgggtctgcctcctgctgccgtggtgaggctgttgactctgggaggcattccagagcagaggagcacatgggtctgcagctcatgaggattggagtcatccagaatatttaaaattatttaaattgtgaagcctgttgctaaagaatatttatgaacactggtccatagcctgtactaatttacacattagcaatattgactgtatctgcattaaggagccaccgtggggccgttcgagtgacccgcagatgtgcgttttaaagttctgtcatccacaggcacaggtatgtgtccgtctccgtcatggtgaaccagatgaattggcctggcgaccactgtggccatatgctacagtttacaaaatgataccatgtttaaattttctgtgcggacaacaatgtggacactaaaattaacatatttttatgtaaagtttttctattctttgatctttaataaactttagatgctagatacttttcctctgaagggtggggtagtttctgcattagctgcttgctggggttttatccaagcccaaggtcaaccctgtagccagggtggtgatgggtcattttgccacaacgtggggtagtgccactgtgagtatagcaggaggattgcacactgtattgtgctgtgttctgtacttaggtattccagtggctgtcacacgtaaagctcccaagtatgcggcactttcagcctgtaagtgacaggacatcggctgctaagtgacagcccagtcagtgtgtgtgtggtgggatatcgtgtcttatacgtgtcttgtgaatcaaacactatccatgccaaca

SEQ ID NO: 22142 - DNA, 1170 bp, Mus musculus
gaggtttcagagttttgatcaacagtctggaaagggaaatcagtgcctgaagtcaatgcaggtcctagcatcactttccagtagaagtgggaactgatgggatgaatgggcagctctgcgggtaaagggggtgagggtaacagttacagagccctaggtctgtgggcagcagagaagccacgtgctagcagctcacagttggtgaattacatgctgtggcaacacccagggagggccactggttcttcctgtgcgtgcgttctcacttgtgcgcgtcctccctctccccctctcccccctttttagtttatgtatatgagtgttttgcctgcttgtgtctgtgcaccagctgagatcctggtgctctggggaggttggaaaaatatgttgggtctcctggaattggagtacaaatggttaggagcctccatgtgggtgctaggagcagaacctgggtcctctgaactcctgaaccatgtctctagcaccagacctctttttctttggataaaggtgcgtcatgaagcctaatgtcacatttgggtgtttctctgcctgttgttgtgtggttcttgtgcctccgtcatgcttgctgcaggccaaggctctgtttctgctctgtttctgctctgtttccttgtgctgatgcagtgcagttgctggctgaggttgaaaacagcaccttccaacagtttacagcttgtgcttgtttcgagtggggatcccaagcctgaaggtctgcgatcttgggagtagagaaggagccagctttgcccaggtaggaactggaaggaataggaaccaggaacctaaggtcggggctgcactagccagcttggatttgcttggattacctgggacagcacttcggaagtgaaaaccattctcgcaggatgaccatctctttccttggtagctagatttggtatggagagagttggtttggcttaatagctgggatcctttattcttaagactagcccagagatccaagctccatgtccctgacttgggcattaaagacagaaactgatggaatatacaaaaaataggagaaaatctgtcgtattttcctctggtgttctgagatggtctcttgtggtccaggctggcaccaactccccattctcatgcctccacctcccaagtgctgggttatagacatggact

SEQ ID NO: 22143 - DNA, 1993 bp, Mus musculus
tttggctcgcgaaaagttctgccggagctccgccccctcagcgccacagcggagcaccagagcctcgcatcacccacaaagtcccgcctacacagcaaagaccccgcctcttcgctcgaaacagactctcgctccgccccgcctaacttgcaaccacgcccctccacagtctaacccggacagcgacagatcggacaacactccatgactctctgcgcacgcgctacgatcaggtcgtccatgcaggtgcctgagtctctgtgtaagacggggagattcacgctcagtggcgtttaaggttgatttgaggaaacacgttctctataggaataccacccttttttttgcgtgagttctcggcgggagcatgttgtgtctttcaggcatattttttgactgcctctgctaggacccagccgcggggtcctcgggatgcagccggaagtgcagcgtgcgtgcggtttggtgggtcgctgtgtgcgctccgcgtgtgcagccgcgtgggccatggggcggcgggcgcggggccggcggttccagcagccgccgcagcctgagggcgaggaagacgccagcgacggcggcagaaagcgaggccaggcggtaggcgcggggacgagaggggtgtctggtgggctcgcgcgtgcggagcttgctcgtgggccgggttcgcgggtgtcggtcggagcttgctcacctgtcgctttcctggcagggctgggaaggtggctatcccgagatcgtaaaggagaacaagctcttcgagcactactatcaggaactcaagatcgtgccagagggagaatgggaccaattcatggagtcactccgagaacctctcccagccacactgagaatcactgggtacaaaaggtacgtttgctgtgtcttttctgaggtgtggacttgggggctgtagtgcacaggaacgtcctcggtgggacattagaatatgaatagaaaacgcgacccgggaaagacttgggtcctatgggggaccatcagagcagcaggaatctttgcctctcttgcacgtcaaagtacgttgtccgcaagactcgtggcaattaaaaactgaagctgtgacaaaatgcagtattgcttttaccttatttgtaaggtgtgtccaacagaacagtgaactggagggagttagaaaattgatggtgttgctttcttagatgttaacagggcctaggtgttaaaaagtctgcacaccccggagcgcttatggaacgtcttctcagaactggttttacgtttaaaacacttggcaatcttaaagctattaaatcttaccaactcaccttcttagatgactgtgaaacttgcttttttttttttttccatagccatgccaaagagattctccattgcttgaagaacaagtactttaaggagttggaggacctggaagtagatggacagaaagttgaagttccacaaccactaagctggtgggtacagaatgcttcctcgtgctgggtgtttcttaggtccccaaccccctttaatgcacttctcagctctaaagtcactgtcggcttaaagagcttggttgtactttcctttttttttcttcttataaagatttacgtgtttattatatataagtacactgtattcagacacaccagaaggcattacaggactcattacagatggttgtgagccaccatgtggttgctgggaaggacctctgggagggagagagcagacagtactcttaactgctgagccgtgtacctagtccctggatgtatttttcaagcatctgtttgtctgttttccgagacaggatttctgggtgttctgaaacctgtagacaaggttagtctcaaactcagatccacctgcctctgctgggtggattaaatccatgtaccagcatcatctgccttattagatttatgtatgtatgtatacgagtgcagggaggctgtcttcaggcacatcagaagagggcactggatcccattaccatgtggttgct

SEQ ID NO: 22144 - DNA, 1109 bp, Mus musculus
tatcatgattgcctcagttcctgaggccctgggtgtgtgtgtgctcctcctaattacaccctggaacagttcccatagccgtcttttgttaagatgtctatcagttatgggcctgagcctaactctgtaggactcatgtgccttactcagagtggacacagggttaccaagagcaggcaggctctacaagcccctgggatgttctttgtgaagctattggagagtcagctctgaattgaacaatgcctgcagattccatttaaagagcaaatttcaaaggcaatgttttttaaaaagaatgtttatctttcaatgctttaaaaaaaataaaagtggttgacaggaacatagtagtcttaatttctttacagtggtgcgaagtgtgttgcttttgtgtgaaaatgaatttgttcccttcaacaggtccagaataaatctgcagaagccagagaacccagggtatccagccatgtggctgccacagagggaaatcccagtgaccagtctgagctggaaagtcagatgataactggagctggtgactcagaaacagctcacaacactgagaacacagagagcaatgagaagaaagatggcgtgtgtgggtgaggaagaaggtgccatctgagcagaactatctgtttgttgtcttcatagccctccttgttaagctaaatggggtcccagagccttagccatggtgactttcaggggaatgaggacacagcacaacttgtttgttatgttgtacaggttagaccgcactcacagatgcttccagctctacagaacagggttgagtgctgggcagggcaggatgagtgctgcaggtatagactgctcctgccacacttgctgaccaccttaccacctccctattctctcctcagccctcctccatcaaagaaaatgaagttgtttggatttaaagaagatccatttgtattcattcctgaagatgatcctttatttccacctattgagtaaggatcctgccatttgaatcccacttaagaaagttcattgtagcaaaacaaaagcattaccaatctcatacaattagtacttggtacttcgctctctttctcctgatcatgcgttagagctgg

SEQ ID NO: 22145 - DNA, 1287 bp, Mus musculus
gggacttcttttttggcaggaatccagacaccctccagtgccccatcgtgctgtgtgggtggcggggaaaggcctctattcgaacttttgtgcccaaaaatgagcggcttcattatctcaggatgatgggtctggaggtactgggagaaaagaagaaagagggagtcattcttaccaatgagaatgctgccagcccagagcagcctggagatgaggatgccaagcagacagcacaagacccctgcgtcccagactccgtccctggctgtgatgcagctgcagctgagccatcccggtgaaggagtcttcacacaatgaattggtaccatccgttgttggagatcaaacctagaatgtccttagccagggacctggaaatgagtggtggccacagtctgttaggagtcgcttttgcagagtggatacatgtttctgctgttaaaggctaacagcctttgcagaagttcagatcccttgttggccagtattgacctagtcttctaaaacgacagtaaaagtctacaagtctttgggaagcagctctatctatctatgctttaatactttctggactgcacaccagtgtgctgtgcagtcatgctgacactgaggtctcaggtgacttctgtgcctttgtgataaagggtgagataagccatctcagagggaaggctggtgaatcatgacagcagttttggggaccgtttgtgcttatcctggagttgttttaagtggggtggagattgcttgggtcatgaaataaagagctattatgatcatgtatcttggcatgagacttggatttgcttttagttggctaatgggagagaaaagccagccctctggtgtctcatacaggacttgaagctggactgtcagccgtgtttccctcgcccagattctcccggcagagtccttgcaggagctcttccttccctctgtctgtaatgcattttgtccgcacagttgagcatcagttacaccaatgctcttccggcctccctatatgtgctctgagctaaacaggctacctctgggaactcagctgtgccttgctcataaacgatcagtccagctggatttgatgactgtttatatgccctggggagggtcataggagcctcacctaaatgtccagctgtgccattcctcaagttgtatgtaactcttccttggggagggaccggaggatacaggccaaagaagaccagggtgggattccatctctgtggctatgggaaagctgtcatctgctggttaaagactttggcactgcctttgcagggt

SEQ ID NO: 22146 - DNA, 1097 bp, Mus musculus
ttttaaagcactccagacaaacaaaatatctgaactggtcattttgtgaatagcagcacttgtacctaactccttttactgtatcgtttcttcatctatgccagaaagtaggaaaagattatttcagcctatcttattgactgagttacagtccggggcatattatcttaaaactacattttgagagagttctaaatataaagggaggcttgaaatctgctactagttctggccagtcagatcttgtcagttatctgtttaccctgttccaatcatactgcttaagtttgcttaggggtaaatgccccaagaagattcctggagtcatggcctcatttagaaattcatagcttaatgctcatttatcacagtctccggggaatcaggatgagttacaagcagagccaggttagagtgagtgccgcacacagagaccaaaacctgaacgtgagagacaggaggacagcagtcacagcatccgactcagcactgctgcatctgtgttagacagctgtgctggcttcatgactcgttgcttccggtcgatatggccctgtgagaagggaagactttttcatttttgtaagcttgtttaagcctctatgtggtcacatacatgccatggcttaggtgtggaggctaaagaaacgtctggcttctccagcaccatgtctgcctgcgggctgccatactttccaacatgatgatttttgtttttaaaacagtgtccgattaaccacatgaagcctcaggacccaaacacaggtggacgtctgctagctcgcagaggcagaaagagaaagcccccagctgagccctcctactccactgacatcccaggaaggaaaagcccctccttgctctccactctgtcttaaacgcccttcaacccacaagccctcctctctccctcctggtttggttttgctttttaatgtttgctccgtgtcagctgattgttagctctgctcctgccctatcattgacttttttctagctcttgcgtacagaaggctcttgggttaaaggtgtgtgttagggaaaatcagtaccataacttgtttacagtacacaaagctcttggatagaagactgca

SEQ ID NO: 22147 - DNA, 1152 bp, Mus musculus
tgaggatgacgatgttgacaccaagaagcagaagactgaggaggatgcctagaccgcaaaaggaaaagtaaccttacgcaccgtgacctattcacactccacttcccgtctcagaaagtaaaagtggtcaccttcgagtagagaagcaggccccacctgcctacggccggcactgccacccacaggtggcatgagctctccaccaccccaccaaaactacaacatgaattggcaacatggcaggaaaaaagaaccagaacttcccagaccctgcttttttttttcttaaaaatatttcaaatggaaaatttgtttgtgttttttattgatattttatatttttgtacatattgttaggggtcagccacttttaatgatagcgggtgaccaaaccagccttcagagcattttttgacctacttcagactctacttgtggtgtaactatgttcattataattgcaaaggagaaaaagaaaataccttgttaaaaaaaaaaaacaaaaccaaaacaaaaccaatcttattccgagcattccagtaagtttttgtgtctgtacctagctatactataagtagttggtttgtatgagatggttaaaaaggccaaaaataaaaatattgttttcctttttttgtttatgaagttgctgtttattctattctattctattttattatattttatttggcctgtttgatgaaacaatgtccaacaataaaccggaattaaaaaaaataaaataaaataattaacgtgtgtgtgtgtgtgtgtgtgtgtgtgtgtgtgtttcactcacaactacagatagctcctgtgcaggtatgcatgtgcgacctgccaggagcgaaagcagtttagccaattacggctacagagacttacacacagaaggcagtgctatatgatgctccaagtgtagactctgctaaggtggagccatgtctgtattgattaaaatagaaccagcaggccgtgaaggaagaaggacattcatgcagattcatttgcactagaaactagtacaaggaccccctgataacacagaacatacaagatgagttgcctctatgacaaggcctcaacagtgatcagtgttatcaaggagtaatctcagtatatgggtatggtatacagggtgtagagtgggta

SEQ ID NO: 22148 - DNA, 1264 bp, Mus musculus
aggcttaccggaaggtcacgatcactgcagagagaagggctttagccagctctactgtaaagctcttgccttctttcagcagagaacggcatgatgcagatgacaggagcgcgcctcgtggtctgatgaggacagaggcaggcagctgcatttccccctataccacatgcatttcagttatgactgtatggtcacagacatatagattgtattattgtatcttggtcaaacaacaaaaacttgaacttagccctttttatttctttggctgcaaaagtgtcctttttagtggcttttaaaggttgagtggcattttttataatgatcttaaacatacaaaaacatggtttggtacctgagtcatttttagagtttatgctcaagtaaatggctaggcaaaagcaaattgtcttttaaaacaagaactaagcaagtctctcactgttgtagctggaaatggctccagaggtttaaccacagcatagtgcgcagctaccgtagtaccatagtaggacaaacttggtggaagtgtatgtgagtgtgtttcttcccatttgtaaatgtcctgaaccataaattactatcaggattaactgacagagcaagactcccatttggctgtgtagagatggccagtctgagggagcatcagagccctgtgggctgtgtgcatagggacagctctgtggggtgtgtgcatacagacagtgctatctatgatgtgtctcacattggatgatattccactttcggaatttttttatttgtatatagaaatgggtttaataactcactgtgattctgatttgtcttatattcatcatttcttaaaactcttgtatgtgtttttataataaaaaataaaagcaagccatacacactgttgtgattgttttatgtggtgcttgatgtcccatctgtagtgcggatgaagatgtgtcccagactgtggagtgtcaaatggttctgtgtagacttcgctattcagttataattgctgtctataaagtcacacctgacaatggttctggtgacttgcatctgtgtcttaagtagctttcacaaacatgagtgagtgggttgcccctttggaagttcttctttagtgcctccttctgcctatgctctgagctagtgctcaacgagcctgttaagagagagccatattctcaatgggtaagtctcttaagtcatcacccactggacctggcagtgatgggtctgtaatcacagagaaggggcacagacgtcagcatgagatcta

SEQ ID NO: 22149 - DNA, 1216 bp, Mus musculus
aaaagtatagttcagttacttaacaagtggtaatgtctctatagaaatgaattgaatcgtcttgtcataatgtatagcaaatggaaaattctgagcctgaagaaatttagaagcaagatgttttaacttcctgttctttgatggatggatccctttgataccacctgttccttctgtgttttctacctgtatacaaagtttaaaatctaacactgtgccaagccagacatggtagctcactcttacagtctcgggatttgggagattgaggcaggcgatcgagactacagaatgagacctgtctcaaacaaaagacaaattaaaaagggactaaagatggagggaaaacaggttgtgaaacattgaagatcagagccctgttggctgcctgtgccttgtaggcccctgtgaagtaaaatcactgcctcatcttagatcagttgcctcggtgagacagatgtaaaggcttttttcatccctctttcttacagattttccagaatctgagaagttgactctgttcattgccaacatgtggcgtgaagtatttctctcccagtcagccattagtgaagcgatgcagctggttgccaggcagcgtgccagaggagaagttctgaactgcttgagagctttcctgagctgggaaaaggtgcacttttgggttttggggggtttgtttctttgtttgtttcttttctgcagtacttgtaggatgagcataggtattgttatgcagcttagtatttattgtatttccttttgtcctagttcttcaacatttctaaaaaatgatatgtatttatttgcttgcttattatttattatgctgtgcctatacatgcatatgtgctcactgtacgtgtggacatcatagaacaaccattgggtctgttctgtcctcccacccatggttctggaaatcaaactgagttcatcagacttagtggcaagaacctttacctactgagccatctcaccagcttgttcttaggcactgtagagctatacttcacaacacgtgatttaaagtgtcatattatcttaagtttatgcattttatttattgagtactcatgacatcccaggaagtattgcagacctccaaaatgtatgatgttcatctgatacactaacttatgaccgatgaaatctgttggtctgtaatctacagagaaagggattgtaaattcattgatttttgcaaaaggtcctt

SEQ ID NO: 22150 - DNA, 1217 bp, Mus musculus
gagtgactgtcctagattgctgcctctcagcctaagagactgaagtgtctttgagagactatcttctgtgtgaatagcttgtcatattttcaatgatacaattctctttcagggaaagggaaataacacctaatttggacaatagaataaataaaaatggagatacaattagcctgagcttaacgtatgtacacaggtatttgcacacgtcaattcttagaacaatagagaatttatctgaatggtgaccatgtcctaataggcaagtaggtggatttacagacttgctgtggtatctatagtttgatctcaagaggttagtcatagggagttctctcacctctgctagcatgctaggcaagttgttatccgttattgtgacctaccttctggtgctatataagctttatttgtctgataaataccaatttaagattggctcttgtatcactaataattgttttatctttttcccaatctagcatttaggagaatacttacttcgctctattctctcagagctaaagattcagaagacgtctctggaccacagttacatccatgcactgtgcagagtgtatgtgggcatttgtcggcaacttggagacttggaaagagctcgcttgttctgttacagccttctgaaggaaggtgtgtgtgtgcccagggtgcagcactgctgtgtgagcacccactgctgcaggcccaccgtacacttgcttctctctcgttcagctggttgaatataaagtctcatgagtttgaagctagcatggtcttagagatcctgtcttacaaacaagttttgaactatcgtaaagattaagtaattctacatagccatactagttttcaacatactttacttagaattactgacatgggtgcatgtacttgggtttgtatagattgtttagacttaaattggcaccagcatttgtatagattgtttcctcttgcccactgtgtattttctctattcctgtgttgcacactgtggggatccttgtacaatggctgtccatattgctgtgcctttggctaaatggcagtgactgtgagatggacgttgtccctcactgatgaggaggaggtagaggagcagggctgtcaagtcatgagtattcataaacagggacagacaggaacgcggcacagtgctgcatcagggcatctgtatcagtcagccacactgctgctgcttactgatctgctca

SEQ ID NO: 22151 - DNA, 1247 bp, Mus musculus
gtaatattccactgcaggcacacgtggtgtgtgcctgtctgtgtttaggtgacacaattgtgttttcaagtatgtcattgctcatttgacttcatggatttgggtgagtgctgtacacataagttgagtgaaattacaaagattttgtgtttgtctgtttcttgtctttcctgattctaggtgaatgagaactttgccattgatttgatagcacaacagcctgtgaatgaggtggagcaccgcatcatagcctgcgatggaggcggtggtgccctgggccaccccaaggtgtacataaacttggtatgcagttaagcagcttactgtttctttgtgttcaccttccctcccagacatccgcactggctctctgggtgtcccagttaacagtcatagctcaaagttcagcctgcctggtgttttcatgggagtttctagttgacagtgtatttcaagttcaacctgattttcaatgtgctgtctaattgggattttaagctaaaaagtaagagatatttctttttgaattttttcaggacaaagaaacaaaaacggggacatgtggctactgcggcctgcagttcaagcagcaccatcactagtgtgggctgtgtcctggtcctctgactcctatggaacatctccacgctgggtgttctgtgtgaggccactgctctgtgaatggtgtcccttgttttgaataaaggatgctcccaccatggatagtgagttgtttcttcctttcataaagcaaacatgagcaggagccgcttcgctgctgaagtagcctcttctccagtgctggcgatgaagtgtgggcaccggcatcaccagcgaagggcccagcagctgccagtgagaaatcaacccactccaggtcccaacatctcatttaaaggaaaacaagccaaacgctgaaagggatacaacaaaggcttaacaatattaactgcgtctcagtacctaacagtgtgctctcgtcccagactgcaggctgatgtgggctcctccactcaaggaagcgggaaactcaaaggaggacatgccacaagactggatactcaggcacgagaaggggacaactaggctagttctgatttaaaacatgtaggatacagatgccctcttacgtctctgcaagtgagtggggatgagggtggggagaggagagatgtcagaaggcgtttgtatcccatttcccaggagagaaaacaggaaacagctaaagcgtagcaagtaaaagggaa

SEQ ID NO: 22152 - DNA, 1112 bp, Mus musculus
catttcacaatgtaagccctggggattgaactcagattgttaagcgtggccatctttacctactgagccatcctgttggctcagggccaggctattaagaattatctgactactgttggtctttgtcctgctgaccttcaggaactggtcctcctggtttccttttgctatccatcacttttttgtctgaggctttctaactgcccccaaataccactccagtgccctattgtctattgcttgtcttccttgatcctgcccctgtatctataggagactgcctgacaaacagtcttcataggaagggtgttgtagctctcagtgttcagcagtgaccagcttcatgtataaaagctggtttagaggtatttaccagggaccgtggagagagtaaagtgtatttatggatctgtggtagtttgaaaaggaatggcccccattgactcatgtgtatgaatgtgtgacccatagggagtggcactatgaggaagtgtggcctattggagtaggatgtcactgttaaggcaggctttgaggtctcttatatgcttaagttaggcctagtgtagcccgtggatcaagatgtagaactcttagctccttccccagcaccgtgtctgcctgcatgctgccatgcttcttgctatgacaataatgaactaaacctctgagactgtaagccagctcccatttaatgttttcctttataagagttgccatggttgtggtatatcttcacagcaataaaaccttaactaacatagtattcatgtgttcagtgtttgtgagaatgcatatccatggtgtgtattagtatgtgtacatgagtaactgtgtgttcagtgtgcccatgttatacatactgacttagatgtatactaatgtatacatgtttaactgtgcagtgtggtcattgtatgtgagtatgttcatatggcactgtatgtgttccatgtgtgtatgaattatgtatattggtgtgtgtgtgtgtgtgttcatgagtattgtatatatgtgtttgaatatttgtccatattgtatgtgttggtttctgtctataattgtgtagatgaacatctatgtgtatgtatatgtgttcaatatgaatgtgt

SEQ ID NO: 22153 - DNA, 1174 bp, Mus musculus
caccctgtgatttaaagttttaaattacatacattctttgctttgcatgtggactatagcctttgttttttgcttgcttgctttctttctttttctctttctcttcttcttttcctcttgcagtttcaatatctctttttcttgcttgtggcagaaagagtgtcaaaacccccaattcagccccagttcgctaagccctccacggtcaggccatactgggggtagtgctggcttcctgggacatccagatcaaccactctctctcaggtagatctgtctctgagacctagtctgtcccctgtcctgcctcctcttggtttttgttgaggactttctggagggtcaagttctcttcccagaaagaggatttgcaagagaaacttaggcctgattaaccactgacaagcaggtgctctcctctctacatggcattctagtgggacagagcgcagcatccttttcccttgcctcttccgtgcctgtgccgtggcaggaactcagtgttgcctaattctttcttacagggtcgtggacttcctgctcaaggccatcatgcgcaccatgtggtttgctggcggcttccaccgtgtagctgtgaaggggcggcaggccctgcctactgaggctgctatcctcaccttggctccacattcctcctactttgatgccatcccggtcaccatgaccatgtcctccattgtgatgaaggcagagagcagagacatcccaatctggggaagtgagtgagcacctgagagtgggtgagaccgtgggagtggatgaggctgcaggagtgggtgagacaccatctcactgacaggccctgactatgctggttttgtcactgtggttccctgtagcatgagctcctttatttatcagtactgacatgtcccccagtactgtcatgtgcagagatgcatctctgaagtcttgtcctgcaagcattcattttctgaatcttagcagttcagggtctcttgagcgtctgggcagctgctcctgagcaccagtgacccctacagatcaggaacagcggtgtcttgaggctgctggtcagatcacaaaacctgaatggcttgatgtagcacaaggcctttctgtcacatctaggaaccacaagcacagggtcaccgtgtgtgcaagggggaaaccctccagagtttccacaagg

SEQ ID NO: 22154 - DNA, 2521 bp, Mus musculus
tcccctgtggggaggacacccaccccagctccattgaagctgctttcccgaaggcttcagcaccataaccctggcaccctatacttgggccctggcttgaggaattgtcattcctgtaccagcattgggggtgacgacttttcctgaaatattcgcctttctagcagggatctctaaccagtgcctggtaatggggctctcttgggtcccaataatcagcttccttgtctttgcagatgacttctgcgggtttgcggaaatgtaccccgactacgcagaggactacttgtaccctgatcagacacatttcgacagctgtgcacagacacccccagcaccaactcccaatggcttctgcattgacttcagccctgagaactcagactttgggagaaagaattcttgtaagaaagcggactagaatggaagattccggagggatgaggcccctcccgcatcaccacctgcctccagtggcctggagcctgattgtgtgttgcgccttctacctttccctgtctctctatgtctgcaggcctgaggtccaagagacttgtgatgttatttgttttctgtaaagtctgtctcagggcccagctgggcatttgcagggaagctgtatgtgtgtcccatctgcccattgcaggcaggcaggcgggcgggcggctgctcggggcctccctgtggggcaggactccacaggctgagtgggcacaggtatggctgtgtgctcacctagaatacgctggtcttgagtttgtgtctgtctttcccctctttgtttgtgcggtgtgcacaatgcaggacctctgtgcgtgcgctgcacataccctccctggaacagtcagtcaccttgtcctaatttagtgcctctgccgtctctggctcacgtgacgggggcatcatcggattctaagtgtttctgtgtcggtgcaggaggtcgtgactcttttataaacctcacttaagtactttgaaaacattcaacctttttttaaaaaaaaaaaagaaaagaaaattggttttctacttcatttttcaccttaacgaaaggatatttatttccaggcttgcttttgatagactctgagacgtcctggtggccgcagcgtaaggggcctcactgccctgctcccattgaagtcatgggacatttagccacaaagaccggccccggggtccttttctgctttccttaagccttcttgaatctccatcttttttataaacattgccagtttggtatttcagtttcaatatgacaaagtctacttcatgtatctagtaaaagcattgaatgtgggttaaagagtcagccagagggaaagaactggaaagtgtccccttatctttgtgctgattttagccctctgagcagacatactgagaaggccaggaggtcctgcccaaagcccatcaccctctctttgcactggttgccatggtgacttagggaaagcagccaccatctgagcgtaggtggctttactctgtgggggtgacagctgaaggggacaggccacagagtttgctgtgcttggcccttcatgagatcaggaaggaacagggtccaggctgtcaccttcagcattacctggtttcctctttttttatgacaagacttatccgtaaagcacagtgactgtaggtttagtttgtttcctaagctttggaatcttgttttttactcctaagctagattttttttttttttctcatttggggcattgctataggaaatgaccaccaagccagtaaatgcaggaaagctgttttctgagtttctcagagggagtgtcagtatgtgctttccccaagagaggtcacataaacaaaacttgtcaacctcagtcacacagcgccacactgccgcgggatgggcagggagatggatttctgagctcttagctggttaggtatggatgaaatgtgaacacagcctttgtagctaacgggttggttttataactgtagagtacaaattttcagaagagaaaagccactaaaaggccaatgaaggagacagatgaactgagatgtcccgaggcttgggctctgccctgccatctgcaagtgatggattcctgaggaatggccactggtcatgttgaaggaatcctgagcagacctgggacggatgttcatcctcctgatgactctctctagtaacctcagtccgcgcatcagaactgtgaatgtacataccgggcaggggaaggggcagtgcccgccctgtctgcgggcgcctttggggtgcgggcttcaggttttcagtggaataaacatgacacgacgtaaagttttacaggctcgagtgtgttttgttaataaaagcttcacttagaaagtttgctgtcactcacgggacacgccatggtgccttgcatccggagggtcagctggttctgtagttttcctgtgtgatgcgtacgcaagtcgtaagcacatttgttagcagatccatcctttgaaacctgtgtaagaagaagtaaaacgacaggtaaatgatcacaccctccaa

SEQ ID NO: 22155 - DNA, 1132 bp, Mus musculus
ggatgttttcagaggagctgtgttctctcaaggacataaggacttgccttgctaacagtcatccatccctaccattgcaggctttaccctgtggataagagcagggtcaatgaatttggggagtcttatgaggagcagcccaagcggaagccccatccagactgagcatctcggcccaggctcccaggcggcactgtactgcacagcacagttgggccatgagtattcctgggggcttcgggaaaattcctagataccacatcttctgcgttgccaaatccctctgagcatttctcagtatccctgagcaccctctcttctcgtgtttcagaaggaaccatagcacttaaccatacaccccacatgaacttgggtcttggtgattgtgccagtgggcagtcacccaagggtagctctcagtgcatgagtgtcccatggcagccagtggacaccttagcacgcaagggtagggagcatggtggatttccacgtcagcttgtccaagtgctccttatgtggatttcacatacacaaaagtcgttctgtacggactctgggatcaaatggctctttttcccttttgtttaaaatttgattgtttaaagcctaatgtatgtatgtttctattttaaaataaatttctttggctgtaatatttttcttaacctctaataatataaaatatagaaaatattgcggatatcatacgttaaacctttctcaaggatcaatgcaaaagataggtttgtttctacattgaaagaagcaaatgggggctggagagatggctcagcggttaagagcactcagtgttctcccaaaggtcctgagttcaattccaacaaccacatggtggctcccaaccacgggcttctgtcatgagatccagcgccctcttctggtgtatctgaagacagctacagtgtgctcatacataaaataaatctttttttttttttttttttttttttctaaaaaacgaaaggagcagatgcccagtgtatttcccagctatggagccacaaatgtcctacaagctcatgttgtcatttaatggctggtcatagttgccagcattcaggctggtcatattttaggagaaatgctgtggagaggagtaggatgcaaagaa

SEQ ID NO: 22156 - DNA, 1095 bp, Mus musculus
aaaacgcgcctgttcaaatgctaggtcggtggatagaagcaatttcctcagaaagctgaaggcaccaaaggttatatttgttagcatttcagtgtttgccaaactcagctacagtagagatcacagattccctatttcccagagattcaaaattcagcagcccctctctaactatggctcagagtcgtgtcattacatatgccccaacaacaacccccacccctatcctacccccgcctcacacgtgcaagtactatcacagttgccaacctagcagagctgccatcctaaggtcgaggtcgccgctttggctgtgtgcacaggcaagcgccctcacccaatggccctggccttgctatgggtgcgtgagttgagatgatgctctggactctgaggtgaaggccactggaacagtgaaaaaagctaacgcagggcttttacctagtccccttcctttggtggtgggtgtttacggaacatatttgggatctgagtgtatggtcgcaccacaataaagccttaacctatatagtagaatttcagctgtaatcattaagaactgagattgccaccacccacctcactgtctgtgtcaaccacagcaggctggagcagtcagctcaggaacaggcaaaaccttaggtccctccgcctacctaaccttcaatacatcaaggataggcttctttgcttgcccaaacctcgccccagtctagaccacctggggattcccagctcagggcgaaaaggaagcccgagaagcattctgtagagggaaatcctgcatgagtgcgccccctttcgttactccaacacatccagcaaccactgaacttggccggggaacacacctggtcctcatgcaccagcattgtgaccatcaacggaaaagtactattgctgcgaccccgccccttccgctacaacgcttggtccgcctgaatcccgccccttcctccgttcccagcctcatctttttcgtcgtggactctcagtggcctgggtcctggctgttttctaagcacacccttgcatcttggttcccgcacgtgggaggcccatcccggccttgagcacaatgacccgcgctcctcg

SEQ ID NO: 22157 - DNA, 1124 bp, Mus musculus
actgcagcccctcagcatcctgtctcctcaggtagcagctctccttattctggacacaggctccttcctgcttagactggactttgcctgtccttgcagtttacatccagttttatgattgcctttccagacttgttggaacatgtctcttttctgctccaagaacccctttgaccttcagtttgtctgtaaaaacttaagcatgctctctgttagagttttccttggaattttattcctgtctcttcaggttcattctggctcaccaccaccaccaccccccccccaacattatacatcataggtatttggctacacgtttccttctggatactgccttagctacaccgagtgcttctgtacgtggccattttgatatcagtgattttttttgatttttgttttggagacatcgatatattccaaatgtgtgaaatattttgaattttccttggaaattgatcctcaattctgtgtagaagtctgcataataccagttattcaaaggtgctgcaaacttgtacctctgcacaggcagtttttctaaatgttcactgtatttctgaatcctgagatttttttttgtgtccactatgtcaaatatatacaggaaaagtccacgtcccttctggtcatgaaataagaagagggctactttggtttctcgctagtcggctgggcttatttcttcttactctggtggtatttacatgcaatgctgttaagtgtacgtactagttacagatttttattcattttatgtttatttgtttgagacaagattttagcgccaggcagtggtggcacacgcttttaatcccggcacttgggaggcagaggcaggcgaatttctgaattcaaggccagcctggtctacaaagtgagttccaggacagccagggctacacagagaaacctgtcttgaaaaaaagaaaaaaaaaagattttactaagcagtcctaactggccagtgacttgtttgtagatatgactgaccttgaactcgctgagagttgcttgcccatgcctcccaagtgctgagatttaagatatgagctaccacacccagctggagttttatctttctgattagagaatctttgattgccagggtattaattatg

SEQ ID NO: 22158 - DNA, 1131 bp, Mus musculus
tctggaccagacacccaggatgtactttgttaaggtggtcatttggactcctgtctatcacatttgctctcatggtctgggctctagggacctccttgaaataagcaatgctgggtgaccctgttgcagcctcttgttggtgattgggagtgttagcctgctaccctatacaggccaaaaatattatggcccccagttctctcaagatcagaaagaccccatggtgggggaggggttgataactagctcccaggacagtcttgagctctatatgggttcccttgacagtacattccaacctctctggtctccgctctgtgcgagaccctttggattctgggtcctcttcagagaagtaaagcctgactctaccaccagggcctggatgcttcagcatctgggttagccaggggcccttgtaggcctcgagggtcttcaaggctttccttgtcctagggtactcaatctggggcaatgggatagcgagaggactataggcccaccatgccccagggtcttttgtctggaacgtgggatgggaatgtgcggtagtggagtggagaagcgtggagtatcctcctgcatctctatctcctgcaggtttgctgtgggcaggttggaacccaggcaccaaggacagagccagcaggacccctgtccctggatccagccatgcttaatggtactcacatgtatcgtacaggcagatgtgaccggggcctatgatgccatcccccagggtaagctggtggaggttgttgccaatatgatcaggcactcggagagcacgtactgtatccgccagtatgcagtggtccggagagatagccaaggccaagtccacaagtcctttaggagacaggtaagaccatagtggactctcgtcgagactgtgagcatgttggtgacccgggcctgttcacgtcgtggatatctagtatctgtcagtgacactggtgtggctgtgataggtccacacttgtgtccatggtgccaatgatcatttgtctgacccagcctgcctccatctatgggaactcccaatggagagccgtccccttccaggagataacctgcaactattctcagtctctggggccacttcatgatttatgcatccagtgacctctt

SEQ ID NO: 22159 - DNA, 1207 bp, Mus musculus
cacaccatctccagtaggatctgtgtgacacgtttcacagactgaggcagttgacctcaaaaaaaggagaggcttcctagaaccggctgggttgtggaactcttcaccggagaaaaattattgagccgcagttctcatggcaatctatctgttttgttttctcttattccttttcttattctacatgttcctggtagcctaggccaagatcttgagcaagaataatgagtaagaaaccatcccttgagatgaggttactaacatgaccttatccccggggaaaccaacactttactttttaaatcatttacaaaactattatgatagataaaaacttccccaacaataaaatttcatatggctacacatgtgtcatcggaggtggattttggtatatggtaaagaaagccttaattagaattaaaatagtttaaatttatttatgcattgaagatttatcaaaaaatcaggcacttagatgttaaataataattgaccatatggggctggagagttagctcagcggttcagagcactgaccataatgatttattaaccttctcttggaactagccttggacaattgcccccactgaatacattcttttagaaatgttatatttggatgatttatattaataatgatgttacctgtactctttgtgattcactacatacatggtttcagagttgtaatgcttgggtgatttttgtgctttctgtgccaaatgatgtttgttggtatttgtgattgtttcactggatatagtttctaagagatgtaatgtttggtttttttaatgtataaaatctcctgcttgagaactgcaaaatacactcatattcaaactgcctctgtgtttgtttcttttttttttttaaagatttatttatttattatatgtaagtacactgtagctgtcttcagacactccagaagagggcgccagatctcgttacggatggttgtgagccaccatgtggttgctgggatttgaactccagaccttcggaagagcagtcaggtgctcttacccactgagccatctcaccagccccctctgtgtttgtttctgtttgtcaccaccgaatccttacccacctagcttcaaggaccttcattccaaggacccccatacccgactggggtggtccgtggcaatcttcatacattttaggaagtttctgctgcgctaggtttcgatat

SEQ ID NO: 22160 - DNA, 1198 bp, Mus musculus
gtgcctgtgggccctacagcctggatagtggcatgatgggagcaccccactgagacgtagggtcaagaatgtttgctggccagctacctttttctatgatatgatagctgtgacccctcagtaattcagctgggcctaccccactaggctgtgtatcccccattgtctctcggctacaattcccaaggcagtttcttctagcctgtccactggtctgtacaccaaagtattgtagcaggtctccatggcttgggtgggcctcaggtgcctgtgtgtgtctgtgctccagtcagttgatgcttagatggatggtctcagaagtggtcatgggggactctccagatggtgccacttggcttttgacgtcactgacatttcctggttacatttagtcttagcatccatccccctgccttagctctgtagtcagtggttctcctgagataacctaagtagaaaatgagcttagcaagtcagttgtaggtgctgagaatacatttagttactagtgtgcccttcttcttcttcttttttttgtttttgtttttgttttttcgagacagggtttctctgtgtagccctgtagtcctggaactcactttgtagatcaagctggcctcaaactcagaaatccgcctgcctctgcctcccaaatgccaccaccacccgtctgtgtgccctgctttttgacctgttagctgacagaggtaggaagctacacacgcgtatgtatgtgggtaacatgtacacacaccctgaaaagcccagagtttcccatcattcttcaggtgtgtcagggctcatctggccatccctttcctggaggggtagaaattggcctccactgtccacagtatagttgggtgtttgttaaatttgtatcttttactagaagacctgggatgctgttctagaatgttttacccatactctggagaaggaactgaacaatgaggattctgtgtttggttatagtgttctgggtggttagcataatatttatataggttaaaggttatgaaaggaaaagtattggcccaggattcccaagaccccttctcagcatgaaggagatttatctgccccacagggacaaatggtagggagtaagaaacaaaggtaggagataaaggatgatgggagaggagcaagggagaggggagggtagagggttatttgtccttgaggacaaaggact

SEQ ID NO: 22161 - DNA, 1149 bp, Mus musculus
catgggcccccacataccaagaactggaggtgagtatgccccatagccacagtgccaaggtagcagagtggagtggagaccctgatcctgccaactggttagcgctgtcttggaagcttttactcttggccttctgaggagagatctgacagggcatcactgccaaagaatgggagaatagccagaggtgggtcctggatatccaacaagccaccagcagtatggattggaggcatgctcctctacgggagtttcctctgttctaaggccaaccttagctgggacacctgaagcctcagacacaaggtcctaccggtcccatctgccccacctgtccttcttattccacctggtcttcctaggatgtctgtctacttgctctcccatctctatcccatctggctccatgagcacgggagccctgtgtgtggccattgtaactcctgtccctgcctatcctaccacaggccccaggtgttggtgatgctgaacctggactcggagcagtgtgtaaagcacccccgcctgctgtccttcacctctcagctgaaggctggcaagggcctgaccatcgtgggatctgtgctagagggcacctacttagacaagcatgtggaggcccagagggctgaagaggtaggcaggcaggtggagtgcagagtgagtgaggtccgggttgcaaccacctaagaagagctgagccacggcctgcatctcgaggcttaggggcacgatttttacacgtgccgttcctggtttctgtcagggtggctactgagtctgaaaggatcagaagtaagatttgaagagatgagatgtgtgatctcctgagacagaggggcagtgacaactgccatgggactggatccctgagggcccctgtgtctagccttggcactttgttcctggtgtctgttatagctccctgtgcaccccagcaccttctagtaggtagagattgttgggtcatgagtctgtgtgcgctgggctgtggtggcgcacacctttaatcccagtacttgggagacagagacaggcggatttctgagttggaggccagcctggtctatagagtgagttccaggacagccagggctacacagagaaaccctgtctcgaaaaaaaccaaaaccaaacaaacaaacatga

SEQ ID NO: 22162 - DNA, 1119 bp, Mus musculus
ttgtttttatctgtgatatttcttgggtacaaaaaaggccagcatctgctttaagcaatggtatgctcatgtcctttcctggtgtctcctctacactttagaggggatctctggagttaaggccaccctttggacagattcgaagggtgtgcatggactcttgtttgttatctgatgtcactggcagaacatggggaaaggtatttgtgttgaagtgagtgcctgctggggaccctctgactctggtttcaatctccattctgataagaaatgagaagagtatctgtggccgggcgtggtggtacatgcctttaatcccagcacttgggaggcagaggtaggtgaatttctgagttcgaggccagcctggtctacaaagtgagttccaggacagccagggctacacagagaaaccctgtctcaaaaatcaatcaatcaatcaatcaatcaatcaatcaatcaaacaaacaaacaaaaaccaaagagttcctgtggctatctcatgtatgtctgttagattaatttatattctgtagtgctggggtgggacccaggaccccatatgtgctagacaagtgctcactcagccactgagccacactcaaaccctggttggatgattttaatctctatttgcttttaggcagaaggttctaaagaatctgaatcaggaacatgtgttgagaaacagaagccaagtattcgcctctcctggtacccataggaaaggtttagcattggaattagtcatttttattgatcagcaaaagccagaaggagctgcccaagggtccacctgcccctcctgcctgatggagctctgccctttagtcggactatcagtagtaatattaaacgaagacagtttgggaaagccattcattttaagtgatcagagcttgtgtaagaagcttgttctgggcatttccttactatgtcagggttaatatcactttccctctactgcagcatttgcatgaaagggcttgagggtttgagtcaccctatccttccctaactaagggtcctgtcttcctcttctgtgaggtttccctgcccacagtggctttggcagatgtgccaacttcttatctggaccagattcctgcctggtcaggg

SEQ ID NO: 22163 - DNA, 2202 bp, Mus musculus
ggtatggccttaactatcaacccagacatggagttcctcgaggtcctgacggaagggctgaacagggtcctcctggtcaggggtggtggccgagaagtcatcaccatctactcctaacacctgcaacctggacacacctggatggggtcaggactgtgcaagctgcctgtggccaggctgggactcgccagcatgccactgtgatagccactgctctggcactcattgcctggcctaccaacatgttgcagtgattctggtcaccctgacacacacggcttcccacagacataacagctcctaggcttcctccaaacagaagatgctatatggcggggagtatctagagctgttctggtaggaacggctccttacattgttgtcggcaatggtaggtatacccaggagatctggggcagctcttcctattactggcagggcctcgcctcctgacactaggatcacctttctgcagatggctgtccagcattttgtggcagttatattttacttccaccagagaacagtacaaaggcgcctctgtacttttcatgaacctgacagataaaccagaactcgtgaacaagcacacagttccttgggtctagaatgtcactgagttgttccccattggcttctttgttcctttgagtatccttgctgtgctttctgtacagtaagcacactgaggactgtccaccctcacctcctcattctctcccccaccctcctcagacatggctcagggtaccactggaaagtgagatagtgtttacagggtaggagtgggtcaccattggaaccagtggtacctgacagctgtgttcccatctgagtcgatgccctaggagctcctgcagagagaacctttgttctgcagggctatctgcagctagcctgctttctcttctcatgggaactcagccactttatttcatacgcaccgagctgggaacttcaagcaggtgactacggagagccacagtgtaacaagcaaacggcaggaactctgagaattctgcacatagtccaccacagcaggcagcatccagagtgtgaaccatgatgtgtctcagcatacagctttgcacatgaaatgccgtcccatccctcaccctcctggagagaaaagccaggcccagcccaacaccctcagcctcagcagccacagccctgggtgtgtgtctttctggctgagtgtctcctgccatagatccttactcagccgggggccataggcgcctctgcacttttcaagaacctgacagatgatttgcactttacccttgggcattctgctctgtaggtcatggtttgttcacaggctgtaggcaacagcactgatccgttcctcacgttctgtatggcgtatttatttatttaaccctccccggggaagcttgatagaggtggcttctatgtggatggcccgtggtgccaggctctgggcatctccgacttcctccaagagaatcagccctgtccacattcacgacgttccagttagggtagaggccacgtttgcacctgcacaggttcttcaggctttgttaggcacccaggtaagctcgccagagtgactgctgcccagtgtgtgtccctgtcagcatagtgatttccacacctgcttttgcctcaattctgaacttggctcagactcctgagccctggatgtctagagcagagcaggtggctcgcctcgcctctcccagctgttaggaatgccctgggcagctggcctttgcaggttctgggtcgctgcttacaagagatgcctgtcaagagcgtccagcctcctttctgttgcaatctccatgttcctggtaactgtggccgttcagatcagtttcatgttttttcctttttatagacttttgtctttgtatgactttgttagtagcagagtaaagttctataaaatataaatgtttaaggaacttcgtgtgcctcatttccatagaattcagtggtggcagaagcagtacttacctattccttcccagagctgctcagaggcccacttcaagactgaccacccaagaggctagaccacccagggctctcagggtcaggggtgaccctcctgcattggagaagctctacaaaaatacaaggggaactctcgtgccaacttagatttgtcaactcagtactgccattgtagggaatcaactcagaattttctaaggatgggagccccag

SEQ ID NO: 22164 - DNA, 1105 bp, Mus musculus
tagtgtaggacaaggaccccaaatccctctggagttgtggtgagatgaaccccgtttcttgtgttgggggtgggacactttaacagcctcagatatctaggcaaacatgagagttcttgggttccgtaaggtgttgagtgtgctgtctcttagaggaaagctcagccgtcttgatctgttgatagctggccacagactcgtctgcttcttttccctcatgggcccttgtgaacttcccgcaacatttcttccagctcagttacaacaaccagtcccctcatctaaataagcacatgtatggccaatacatctcacccgctgtatcaggagaagttttaatactcgcctggtctcttcttggaccagagtaccacctctcagcagggacaatggtgagttcgtctcctttggcccaatagagtacttattagtggagttttgggcctctgatccctgctggaggctatggagttgtgaagtttctgattttagactagttgctagcagagaacacaagactctcaaatcaaatgaaggtcctcattgttcatggtacaacaaacccactgtggtggtttgaaataagaatcgtccccatcagaactatgaaagggttgtaaagattatgaagtgtggacttgttggaggaagtatgtcattgggggtgagttttgaggtttcagacgtccataccaccaggcctaggcacatgtgttctcgttctgtctgtctgtctctctttctctgtctttctttctctctctctctctcttcctatggatcaggatatagctctgagctactatttcagtacctgcctacatgggactaagcctctgaaaatataagcaagtctctccagttaagtggggtttttttgttttgttttgttttgttttttataagagtgccttggtcatggtgtctctacagcaatacaataattaagtgactaataagttgtctggatgataagaatatgaaaattcaaccaggccgtggtggcgcaagcctttaatcccagcacttgggaggcagaggcagtcggatttctgagtttgaagccagcggatttctgagttcgaggccagcctggtctacagag

SEQ ID NO: 22165 - DNA, 1282 bp, Mus musculus
tgtcctgcatagagctgagcctcttcctaattccacaaatgtatagatggtagctgtcatgtagccccactaaagcacaagtccattcagtaatggtcgtttcttttcaggcccccagcgtcaccatcgagggtttcctccaggccctatctctggcagtggacaaacagtttgaggagaaaaagaaactttcagcttatgtttgatcccagacatccatatctatggctttcaatggacaagtaggaggtgataccgtctacctcacagtgtgcatcagaaatgactctaagccatgtagatctgcaggccagacagatgggtgtacaatctttgtcaaaaggactatgtgttattttacagtgcatatctaaaggcaaaaaagactgcttgtctttttcactgtttttaaaagataattccagtctgtttgcatctatgtaaagccccatcctgactcaagcctgtcagacacaagatgttagaatttgtttaaaataaagggagatcaaaacagctgtcatagaacaagggggatgctaactaatgcagttacagcattgaaagatggattctttgctcaggctagaagggagcagttgctttctggcttgagtcggctttggttagcacaggatgctatgtgatgggtgagaaagacgtgttgctgtgatacggaaactgagaggggactgcaggtaagaagatgaagagttctttggtagtgcacaggagcagtgtgtgctttctatggtcacgtcaatcaggcaatgtgttttgtttctccagtcattttacttgtatttcaagtgaaaattcttgttacgaaatataaaataagtcaatatgtgttgcacctcacagaatatcatgttttatgtcatcttctgccaaacgtagtttggcactaatactttatacatgaatacacttttaaatggaatgctgcctttgtcacagaacgttttgtaatattaaacttgttttcagaattctcttatttttattctaacgtctgcttcaagtgctgtgagttttactaataatgactggcatactcacacagcattaagtctgctgtgctcccaggatctcatggtgcagttgcatcatggcaggaactcatccactctgccaatcaggtttgagggtggcacttctgagacactacaggccctggctcctgcctgactactaaactctacctcctgttccgagcagggcactgaaagcagaaccctgctctctgactccttggcccccgagggtacttgacttcact

SEQ ID NO: 22166 - DNA, 1238 bp, Mus musculus
aaatctaaagttaatatcataatagactaggacatcttttaattaaaacaggtatttcttgacctagaagaactcttgtaagcctccctctggagttgtgatgcttgggcagtaaaaaggtttactctggctcaggacttggagctgggaaatggggcctccattttgcactctatttcccttctgataaagtgagagtactcttagtgtttctgtttttcagaacatgttctatcataactgtctaccttctacacagtggtgagtgtgtgttctggtggtcattacttaggggctagtattagatgactgtcctctacactccctccaccctaggcagggataagtaggcttttaggaatctagtaatttgttcaacaaactaacctttactagatggctggctccatgctagcacctgaaagtcttcgaggtggcatgaaactattagtagtgcactgtggttggttggattttgccgttgaacatgcaaacttaatgtgtgcctgctattttatttctcttcatctcagctatgtttgaccgagaaaacaaggctggtgtgaacttcagtgaattcacgggtgtgtggaagtatatcacagactggcagaatgtcttccggacctacgacagggacaactctgggatgattgacaagaacgagctcaaacaagcactctcaggttttggtaattcacttgtcttgattgtatagcatatttcattttggaatataggagtccctcaagctttgttttgccatgttccatttattgatatttttaactcagtctatgtgaaatttctttttatgtcatacaggttcatattttgattctatttttgtcatgaagatgtatatgtgacatggagtctttcacacagtgtttcatccaaaatgagataagggctatgcaaatcatctactttttgtgaaatgagatggtgtcataagcaaaattgagaatgtggcttctggaacaacttaaagtagaaaaatgaaaacataattgtgtggggtagttggcagcatatatgtagtggtttgtcaaactacatgaacacagtgataaaataacagtaagacataattctataaataataaaatgatcagtccattcaaattttgcttcagtgggaaattagaaagtgtgtgtgcccattctcaaatggcatttagtatgtgtgtgtttggtgtgggcttaggcatgcaaagtgtgctgtgtttctcaca

SEQ ID NO: 22167 - DNA, 1673 bp, Mus musculus
aattacttaaaagaattaaagattttgtctcgtggtttcagaaagttaagtccattgctgtgagaactcattcaattgagcagaatgtcatgacagagacagctcttcacctggtagcaggaggctaaggcaggagaagcttgagttggtggccagcataagctgtagagagagatggggtgggaggaattaccataatttacatagccaacttgtgactcctttgtcttaaagttctcatgcctgtaaatgtacttgatggcctaattttacagaagcacagaagaaatggctgtttgtaaatattcatgccttgattcaccccgactcttttctccaaggttactttggagtacagacctgttatcgacaagaccttgaatgaggctgactgtgccaccgtacctcctgctatccgctcctactgatgaaacctgacagctacaggaccagcttatgtgattatatagcatagcttacctgcgtttcccctcatacttgtcttggtaaaattctgctctcatgaacaaggagtcacttcatagattgtgatcaacagcttggtagtacttgctgtaagggattgagttgcgccagactttgtctctttattcttgtgcagtgataaaactggcataattcttaagtgaagtacaaatgagcaatcttttatttccaaataaaaccatgtagtagtggattttagttctatctattggtctgaaacagcaaatataattttcttccgctgtctagctgcagcacaagtattgttttgttcattctctgtgtgaagtagggcaggtccttcataatttgaaggaaagtttggatatggtaagtatcgagccagtgccttgtttaggttcctggtgggtagaggtatatgcatatgtccatgtttatttgagggcgtatgtgctggctagctttgtcaacttgacaaaaatctagcatcacctaagaagagagtctcaatgaaggattgcttctgtttgcttggtccatgggcatgtctctgagggattggcttgattaatttaattgttaaggaagacagcccactgtgggcaccatcattctctggtcaaatcagtctggactgtataagagcaagctgagccttccccatgcatgcagttattcattgtctacttctcactgtgaatgtaactagtttcttcaagttcatgccctgacttccttgaaatgaaggactttaaccagcaattgtaagccaaataaaccctttctcaaagttgcttttggtcaaggtgttctatcacagcaaaagaaatgaaattcgcataggacatgcttatatggagactggagcttgacattagggttgtagggccagaaataaaagaggaaaggtgagaggaatctagccactgaaaatgacccacaagttttgtgtctgttatagaaagtagccacagaaaagttgctttttgcatgcagggaaaaaaaaagatcgtattttgtccatacagtgctcatcactactagaaaaggacgggctttggtatacacagcagcatggatgaatctcaatgctattgacaagggtaagaagtcaagaaggtacacactgattgcacttgaagtctagaaactgctaactgacatgtaataacagaagatcagtagctctatgcagatttggaaaa

SEQ ID NO: 22168 - DNA, 1167 bp, Mus musculus
taatccttactctggttttatgagctaagtacttgtaaatggtaatttctcaagatacccaggttctgtgacttgccatagtttctaatactcaacctatggttgccctcaggactaagatttgtgttagcaagaaagataaaatcagcagagaacaggcatgtagaagaatctagagggagccagatggagccaccaggggttacactgtggaatcccagggagcattgtttagtttaggggtataactagaaacacaacaaattcccaggaaagctcactggagactatcaagattttgatagagtgagatctattcatgtgacctttcacagcagttccattcccacaggaaggcaagtggtagaagtcactcatagtctgtaagcagtttaggtatggtgaatcactcttgctagttaccagcactgggaactcccagcatctagacacctattagggactagccttgtgtgaggatgcactatgaagtctgttaagtgagctttcccacatagccttattttacagaggatggggatagagagccttaatatggagaaagcaatctgtctaggtcataggtagtattttgtggagtggatctgagttgggtgtttgatttacagacattggaacctgtgtgtggttatttgtcagtagccatgcaggaagtgaacaaagtagtcagtttgtgttcagatcctatattctaccctgtgcatatctttctgtgtagagagatggcaaacttgaaaatacttacccagaaaacagttcagttatagaatggttaaggagcacttggcccgcttcctattccacatttagttttcagaactaccttgacagagctgatagcaggcactctgagcagaagccaggtaattccaccttcagataaagctcttgtccgtagctatttaccatgtctttctgctgtattaccagtcttttgagaagttatttttttctagtacatctaagaaacagttttttaagattgtgtttcctaattcattagaccattgaaggaagccacataggctctagttttctgttactccactggtttgcccatgtgatcttggacagaccacctcatggctttctctaagatttatcttttaaaatgacacattttccaggggaatcacatcactgttt

SEQ ID NO: 22169 - DNA, 1308 bp, Mus musculus
tattctcacagatccatgtacctcaatgtcatttacctgatttgtgtttacaaggcgttcctctaggaaagagggcaaggtaacaatcaataccttaagagataactttaggagcagcgccttggaggtcccgtggatctgtgtcttgcttcaacagtgtttgaacggaacagacccggggattcccactgtactcgcttccagccgcctttacaagtctctccagtcgcagcctccgggaccatctcctcgctgccttcggctcctaggaccagtctgcaccgtctcttcgcggttagctcctactccggatcagccatgacctctcagattcgtcagaattattccaccgaggtggaagctgccgtgaaccgcctggtcaacttgcacctgcgggcctcctacacctacctctctctgggcttcttttttgatcgggatgacgtggctctggagggcgtaggccacttcttccgcgaattggccgaggagaagcgcgagggcgcggagcgtctcctcgagtttcagaacgatcgcgggggccgtgcactcttccaggatgtgcagaagccatctcaagatgaatggggtaaaacccaggaggccatggaagctgccttggccatggagaagaacctgaatcaggccctcttggatctgcatgccctgggttctgcccgcgcggaccctcatctctgtgacttcctggaaagccactatctggataaggaggtgaaactcatcaagaagatgggcaaccatctgaccaacctccgcagggtggcagggccacaaccagcgcagactggcgcgccccagggatctctgggcgagtatctctttgagcgcctcactctcaagcacgactaggaggcctctgtgccttccaaggggctcccccctctgctctgcaccagcccgccctgggacctccacctgaatgaacctctcaagccactaggcagctttgtaaccgccctggagcctctgtcaagtcttggaccaagtaaaaataaagctttttgagacagcaaaaaaaacaaaaaaacaaaaaaaaaaaaaaaaaaaaaaaaagagataactttatttatttgtagctccattagagctatgctgtggaactaccaatctgtatagtctcatgatatttagaagttgcacattgaatagtgataagtatatatccaaaaccttttaataaacaaatagtccatggtaaagttggtaatactcatattcttgcagactcattgctaaatttattgagaggtcagtttatgagagtcaagattgttgttgtggaaaaac

SEQ ID NO: 22170 - DNA, 1195 bp, Mus musculus
aacagcagtaaagtggagtcaaccagagcttagagcaatacagaggtcagagctggagaagtgaccttatctctttggaggatagcagaagatcatgtgtggatccaagacattggaacaagaaactgtaacactgaggttaccttggagaccccaagatctttgagatgccagagctgtggggtacctgctcatgaaaaccagccaaagagaaagaattatgctgcagtgaacaaagcagaaaagagttggagatctgaagaatgctttaacatcagacatggagatgtagtttggagatttccaagctggcttttggttttgttttggtccagtatttcctcatgacacttaggaatggtgaaatatatcttgtgaagttggaagtatatgatctgtttttattttcttttttaggggattacagttacatgattggatgactctcagaagagactgtgacctttggacttttaacatatttgagactggtatagatgatggggacttttgaagtttgaccacatgtattttccattatgccatgtttaagaatggttcccatacattcctgtactccaacaagcttatggggccagtaagtggaatgtgggagtttgaatttgcttgtcacaaggagtggctctattaagaggtgtgaccttgttggaggaagtggatatctctgggggtggactttcaagctccaccaagtgcaaaacagaccctccaattccctccctggaagacagtttcttcctggctgcctttggatcaaaatgcagaacttacagctctttctccagcatcatgacttcttgcatgctgccatgcttcctgctatgatgaaaaatggactaaacctctgaaactgtaagccagccccaattaaaggtttgctttaatgagagttgccttggtcatgatgtctattcctagcaatggcaacactaagacagaaaccttgggagtgtatttaatatggtgaagcctttgcacaattctataggcttcatcatcatgaaagaatatgtactagagccagacagtggtggtgcatgcctttaatcccagcacttgggaggaagatgcaggtggacttctgagttctcggccagcctggtctactgagtgagttccaggacagcctgggctatatagagaaaccctgtctcaaacaaccaaaaacaaaaac

SEQ ID NO: 22171 - DNA, 1193 bp, Mus musculus
cttatgagtgtgatcaatgtggtaaagcctttgcatggcagtctagtctcaatatacataaaagaacacattctggagagaaaccttatgagtgtaatgaatgtggtaaagcctttacacatcatgctagtctccaaagtcataaaagaatacatactggagagaaaccgtatcagtgtgatcagtgtggtaaagcatttgcacatcaaacgagtctccaatgccataaaagaacacatactggagagaaaccttatgaatgcaattaatgtggtaaagcctttgcaagtcacactcatctccaagtacatgaaagaacacattttagaaaaaaaccttagaatgcaatcaatgttgtaaagactttggatgtaagaataatctccaaagacataaaggaacatatactggacagaaaccttatgaatgtaatcaaagtgataaagcctttgcaactcacagtcatctacaatgacataaaaacacagaggagagaaacctgggtattgtttactctgaagctccaccaagtgcaaaacagaccctcccattccctccctggaagacagtttcttcctgactgcctttggatcaaaatgcagaactctcagctccttctccagcatcatgtctgcctgcatgctgctgctgtgcttcctgctatgatgaaaatggactaaacctctgaaactgtaagccagccccaattaaaggtttgcttttatgagagtcgccttggtcatgatgtctattcctagcaatggaaacactaagacagaaaccttgggagtgtatttaatatggtgaagcctttgcacaattctataggcttcatcatcatgaaagaatatatactggagccagacagtggtggtgcatgcctttaatcccagcacttgggaggaagatgcaggcagacttctgagttctcggccagcctggtctacaaaatgatttccaggacagcctgggctatagagagaaaccctgtcttgaaaaaccaaaacaaaccaaaagagtatgtactggagagaaaccttttgaatgtacttactatggttaagcttcttcctacggttaagaaggaatgactttgacagaaatagttctcattctctgtctttagaacgtgagcatcacacaggagttcatgacaagctcattcttggaccctgtctacatgtgttaaatca

SEQ ID NO: 22172 - DNA, 1216 bp, Mus musculus
ctcagaatgaagaggaagtctttaagaagaccatcagagtcaactaatctgggctgtaggagaggctcagaactaagcccccatccaacgagcatacacaggatggactgaggcccccaccaaatatgtagtccatgtgctactcagtcttctctcccaacaactggattgggggatgtcccttaaggtgtcgcctgtctgtgcaaactgttcccctaacttggctgccttgtctgacctcagtaggaggggatgtgcctaaccctgcagaaacttttaaattttgccctactcaatatctcagggcataagcagaaaagaaagaattttgcccaaaatatctcacaaatgacctctaggtaaagttttcacagagtctattttccactgaaatagtgtgacctcagcttcctctggctgcatttactgtcaacactccagtcttccagatcctatgagagcaaccgttaagctccatgtacttttgccatcttttattctggtattttccatagcccttcaaaagggaacatagattctgtcgagctgcaaaatcatcttttgataccattgttgttgttgttgttctaccttattactctgttgctctgatcgaatcctctgatcaaaaccatctcaggtaataaatggtgtgttgtacatggttctgtccaatcacagaccatcatttggggagcttagaatagaacctgaagctacaaactgaaggcaaaaaacacggacaaacattgtctcatggctggctttcttgcttggtcactgtctcctgctcagctagctctcacatccagccaaggctcacttgcttaggaacattgccaccctcagtgcaagagccttcccacatcagccatcaacactatctctcatagatgtagaaaccagtcatctggtaaaggcacagcctcaattgaggctccttcagatgaccgtagctctgaagtgttgagaactgaagacaattatgatacagagataatattgaatgaggaagttgtacaaaccccaaaccaacaggctaaccatataaattactggagttcctaccaccgcatgaggaagttggagttgtggctgagccaggacaaaacagtaagtgaccctggctcagagcagggaaagatacactggactgggagttcagaggctgtgcttccctgcagtgagctgtctttaaccctgggttcccaaggca

SEQ ID NO: 22173 - DNA, 1185 bp, Mus musculus
aaacagaccctcctattccctctctggaagacagtttcttcctggctgcctttggatcaaaatgcagaactctcagctccttctccagcatcatgtctgcctgcatgctgctgtgcttcctctgaaactgtaagccagccccaattaaaggtttgcttttatgagagttgccatggtcatgatgtctattcctagcaatggaaacactaagacagaaaccttgggagtgtatttaatatagtgaaaccttttcacaattctgtaggcttcatcatcatgaaagaatatatactggagccagacagtggtggtgcatgcctttaatcccatcacttgggaggaagatgcaggcagacttctgagttctcggccagcctggtctacaaagtgatttccaggacagcctgggctatagagagaaaccctgtcttgaaaaaccaaaacaaacaaaagagtatgtcctggagagaaaccttttgaatgtacttcctatggttaggcttcttcctacggttaagaaggaatcactttgacagatacagttctcattctctgtctttagaacctgagcatcacccaggagttcatgacaagctccttcttggaccctgtctacatgtgttaaatcagaagttttgctctcagtatatgactcctagaaaaataattaaaggtggcccctgaactctatatttctgactctccagttactactaatctatctttcaagcagaggccccatatccttgagctctctgggagcagaggtgatcagaaaggtagtcaagggctctgaagcccctcaggcacacgcgaggtttcaggcaacaccagccccactctgaagcacacacacaaaatcctgttgaggattaatctaatgcctgctctctgacacagcgtttgcaacacagcaggtagaacttgccatatccacccaacaaaccccatacacatctaggaaacttctacagctcagaaactcctgttgtacctgaaattggatttcccagaatcatgccaggttcaatggtggcagtggaaaagtgaaaatattctgatcaagtattgctaaacaatgatccccatcactgcctttatacgactttcaaatacttcataacatatgtcacacaacagtgaatgtgtttgagcctatccctaacccctaaccctaaccactaa

SEQ ID NO: 22174 - DNA, 1192 bp, Mus musculus
tgcaagtatgtatcaacttgacaagggatggattgtgattgctactcttggttttcaatataagatctaaagtggaaagcataggtccaggcatggtggtacatgcccttgaaccctaggagatgagcatcaagcagatctctgagttcaagtccatcctgatacagaacaagtttcaggtgaagaaaagctaaggtctaggccggtggatacagagccttgcagatctctgagttcaaggtcagtatatagagcaagttccaggacagccaagctgaggcagtaaaggagttggagaacagaaaactggtgataatgtaatagaagaggccatgtcccaggcccagaaagcagcagagctcagcaactttgtccatgtggctctgactttagaggtaagaatagaagggactactgggaaaattgaagcttgttagctgtggatgagaaattagaagtgatgaagaagagaccagcatcattgaggtgaaattttctaggaagtgttttctgagaggacaaagaaactgtgttccagagatagccaggattgtaccttgtgttgcagctgaacttggtcacatgtaagaatcatccaggtggtactggttttgaaggcatgacggtgtcatgaggagcagctgaggcttggaccaatgaagggagcataagtgagactatcagtgaagcctagttgcaggagaagaacccaacatattgaagatgccagtccaatgggatgagcagaaagaacagcccagtagagtggagtcaaccagagcttagagtgatacagaggtcagagctagagaagtgaccttatctctttggaggactgcagaagatcatgtgtggatccaagacattggagcaagaagctgtaacactgaggttaccttccagaccccaagatctttgagatgtcagagctgtggggtacctgctcaggaaaaccagccaaagagaaagaattgtgctgcagttaacaaagcataaaaggagttggagatctaaagaatgctttaacatgacacatggagatgcagtttcaagatttccaagttgacttttggttttgttttcgtccagtaattcctcatgatgacattttggaatggtgaagtctatgttgtgaagttggaattatatgatctgcatttagatttttcttttttaggggattacagttaca

SEQ ID NO: 22175 - DNA, 1119 bp, Mus musculus
caaatctggctgataacaagggagcacatttcattctgaatgacaagactcgggtaggtgattctcattgtgtaatgaggaaaatcagtcccaagcaggctgacactgagccagctgttagccattgttaacaagtggaagctccagacagcaaacatgtgcctccttccctaagcccggccaggcctcaaggcaaagaccctgccttcattcccttctgtcagcttcagttgccttctctaccttcattattcatgaatcaaaattcaagttagatcttgtaaggttttcaatcttggtataaaaattaaacactcacaatgtttattataataaattaaattgctttaatttttaattcttaacatttcaaaaccttcattctaatcaaattgatagctcaagctattaaacataacagagacttgaaataagtgtgtgcctttctaaattgataagggtgagtaactgctttggctagtctacctgtgttcttgcagaagggcgtggtaccagaagatgctgttgaaaccttggctggaagcctggggacaagggaagcagatccagaacatgaaaaaactgtggaggataaagtcaaggtaatggcagctcaaatacttttacaaaatgacttattaatcatttacttcagccctccaatgaattagtgctttgtttttaaaaatatatctataaagcaccatcagctttctttctttaatactgcacataataagctaacccctaggaagttccaatattgatctaccatagtagagaggttacatgcctgtgtccaagttccatgaatcacattttcgtctacctgtatccatccttttctgagagattacaggaaatgtagaatgtacctaatacacctcccaacctgcccttaggccagcaagatgaaagctggcatctgagccagctaatgtttaacactgttaaacaatgttgaagtttaagctgtagagaaactcataccagtgaccatatgtttgtttgaagttaacaataggttaccttaaatttagtctctgagaaatacactgtagagaaggagacaacaaccctgagaatgatgccacttttatttaggagaaagctaaagaa

SEQ ID NO: 22176 - DNA, 1257 bp, Mus musculus
gggtggtggttgtggaggtggttttggtggccatgacaattttggtcgaggagggaacttcagtggtcgtggtggctttggtggcagccgtggtggtggtggatatggtggcagtggggatggctataatggatttggcaatgatggaagcaattttggaggtggtggaagctacaatgattttggcaattacaacaatcagtcttcaaattttggaccaaagaagggaggaaactttggaggcaggagctctgacacttatggtggtggaggccagtactttgctaaaccatggaaccaaggtggctatggaggttccagcagcagcagtagctatggcagtggcaggaggttctaattatgtacagccaggaaacaaagcttagcaggagaggagagccagagaagttacagggaagctacaggttacaagagatttgtgaactcagccaagcacagtggtggcagggtctagctgctacaaagaagacatgttttagacaatactcatgtgtgtgggcaaaaactccaggactgtatttgtgactaattgtataacaggttattttagtttctgttctgtggagggtgtaaagcgttccaacaaaaggttttactgtagacctttttcaaccatgctgttgattgctaaatgtaatagtctgatcatgacactgaataaatgtgtcttttaaaaaaaagttggtattttgctcgtgggaatgaatttgacttttgtgcaatgattttccagttactctggaaatgaaaatgagtattaaatttcactgggatgtggtaagcagtgccacttgggttctaagaggcataaagtgctgaaatcaagtggcaaaggctagcaaattcacttcaaactagaaaactggaattaaagactgacggagaaggaagtaagatggccattagggtgagaggctaaagaaggaaactctgtgtgtgtgtgtgtgtgtgtgtgtgtgtgtaccaagcacagcaaggtgtaaaaaaaggagagggaagctcatggatagctagaatcaattgcccaggaatctcatgcatttcctacctctaatgatgcatttgtttcagtttagtttctgagtttttagtatttagaattgataatagttatgttttattgccaatccctttgaaatactcttttaagatttagattttttaaattgtgtgtctgtctgtctgtctgtctctctctctctctctctctctctctctctgtgtgtgtgtgtgtgt

SEQ ID NO: 22177 - DNA, 1278 bp, Mus musculus
ttctcttttgtgaaaaaatagacagaacctcgcccccatattaaaacagagtcaggaccattccatgtattagttagggggtcctgccatttaaccatggcatatgagctggaagtgactggatgccaatgacgatccactgcagcctgacctttagcatcagtttgcaaaaaaattaaaacaaataagacagaggcaagatgtgcttttggtgaccttgaagattataagaccccctttttatttttaaagaagatattgttttaaagttcaccaataccttgtccttgagaattataaggaatcccagtaatatgggtaacgttaaattgttgacaaaacatctcaaatgcttgactgtaatagccagttccattatctgttttaatctgatttggaacatcaagcataaaaaatattgcaggagctcttcggacttgggcttgggttccggcgacatggctaaacgcaccaagaaggtcggcatcgtcggcaagtacgggacccgctatggtgcctccctccggaaaatggtgaagaaaattgaaatcagccagcacgccaagtacacttgctccttctgtggcaagaccaagatgaagagacgagccgtcggcatctggcactgtggttcctgcatgaaaacagtggccggcggggcctggacctacaacaccacctctgcagtcacagtgaagtctgccatcagaagactgaaggaactgaaagaccagtagaagccctgctgtctgagacttgcctagcctgcaataaacgggttatttacgtaaaaaaaaaaaaaaaaaaaaaaatattgcaggaaatgactaattgcagttgcaactagaaagcctggaaaggtgtcaataatcatatgtacatattttatttttctaaaatcagaaatatgagtgtccatttgcaataattgattaaatataagtcatcaagaattaacatcattatgtggaacatgtagaaattgaggacactgagaataagtttacaatttgacatgcacattctctaaaaataccaaattattatctcaagccattactatcttgatgatgtaaagagtgagattatatgtacaattattcctatgtaagacctatactctgtgtgggataaaaatatgctgtggtattgccttaagtggtctggtccaggcagtcattgataagctcttaaatgtctaaaggcagtcttttaaaggaacagtactttctcttgagttgtatatgcataaagaattgcaatttttgaaaattagca

SEQ ID NO: 22178 - DNA, 1222 bp, Mus musculus
gtctgcaccacagagcatatcaagacccaaagcttgtgcagctgtcaggaaacaaaatccgtacttggtcatctgtcctgccttcacccctaccgaatggggatcttcacttcgtaccgcaagaacaggttgacctatgtgttcggtccactattacctctcaaggggcggggctccgacttaggctcacttggtaaccttgacacccaattagcagggttctgccccaaatcggtccagccaatcgccgcaggagagccaagacgagacatgacgtcagataagattaactcgacgcgtcaccccgacgtcaacctctcctctgtcggacgtcccgtcctgagagcaaaactcctgcgactttgggccccgcccccttgaggtgaagagcagccaatgagggaggctctgtggggattcagaccaatgaacagagtccagggcggggtgcgggctcgagggtggggcggcccgcagctgtggaagcccgaggtctagctgcgcgcagtatatgacagtacgtcagcagcgggatggccgtagctgtggcggcggctgcaggagcccgagcagccgcggccgcagtggaggctggagcccgagcggcgtccgcggtggcaccccggggagtttaagatggcggcggggggggctgcgggactgcgggaggagcagcggtacgggctggcgtgcgggcggctggggcaggacaacatcaccgtgctgcatgtgaagctcaccgagacggcgatccgggcgctggagacttaccagagccacaaggtgagcggccggccgggcagcgctcggggaggcggcggccactgatctttctgccgggcgcctggcgccgcgccggtggggcgctggctcccgctgctgcctccgcacccgccgaagggaacgaggccagccgcgggcgccgacgccgcggtccggggcctctggatcgagggcgcgggcgggcggccccttgtggcggggtcggcctggccggggctgcgcggccgctgcgggactttccgacagccgcccgcggggtttctggcttgtttggtccggaggaggaaccgggtcctttgggagagaagtgtggcgatcgccttaccctcggagggggcgcacggagctaccagtaaagaagcgagggtcggaggccgcgagcggtcagagttttctgggaaacgcggagggatggctgagtcgctgagcgaggggcagc

SEQ ID NO: 22179 - DNA, 1149 bp, Mus musculus
tgttattgctgagcccataaatttggtcttttttttttttttttaaattctgagctgcacactgaatgtagggcctcacatatgctaggcacgcactctttctaccactgaactagagccccagccccttttggaaaaggaatcttgtgtattccaggctggcctacaaactactgtatctatgaggatagccttgagcttctgaccctcttgcttccacctaccaagtgctaggattgcaggccctgcagccctgccaactgtttgaagtagtgttgggtgtttaacacaaggcttcctatgttagttaggcagatgctatgccaccagtggagctgtattccagcagctcacctgcctcttctgctgtttgtccttttgtgacagaaccttactgagttactaggactggccttgaactccctatgttgttcaagcaggtcttaattgttactcttttccttcaaccttttataaaaaaaatgtttgccaaaatgatcaaaggtagccaggcagttgtggcacacacctttaatcccagcacttgggaggcagaggcagatggatctctgagtgcaaggccagcctggtttatagatcaagttccaggtcagctagggctacacagagaaaccctgactctcaaaacaaaacaaaaaagctcaaaaaacaaacttcaaaagtggttgactccaatattgtgctttcccaagtataacatgaaagttgagcatgcagccgggcgtggtggcacacgcctttaatcccagcactcgggaggcagaggcaggcagatttttgagtttgaggccagcctggtctacaaagtgagctccaggacagccagggctacacagagaaaccctgtctcgaaaaaccaaaaaaaaaaaaaaaaaaaaaaaaaaaaaaaagaaagttgagcatggttatgtctgggagcacagttgttcattttccatccctgaggatcaggcagccactgccttttttttttttttaaagatttatttatttatttattatatgtaagtacactgtagctgtcttcagacactccagaagagggcatcagatcttgttatggatggttgtgagccaccatgtggttgctgggatttgaactccggacctttggaagagcagtcgggt

SEQ ID NO: 22180 - DNA, 1148 bp, Mus musculus
atatttaagtactgtaagtaatgcaggacagaattaaaattatttttacctttcatcaaagaatcaccaatgaaaaattttctattctcttgtttgtatcactaattattgtccatgtgtagctaaatgccaaaagcacatctatttattttaagaaatgatcctattaaaaattcctactccatattgtaggcaacttcattagaatacttctgtatgtttctaaagaaactctaaagagtaaaaattgaaacaaaatgacctatttttttctagaaaaaaaagttacataaattgggttatagaagcttcaatgctcattatcttacagcacatagatttgtaatcatgtcttttccactggactttagggaaaagagtgcaaattcgtaaagctcctcaagccatctcggacacagtgcctgagaggaaaaggtcaacgcccatgaaccctgcaaatacaattcgaaagatgcatagtggcaacagtgtctctcagaggccatacagggacagggtcatccatttactggcactaaaagcctacaagaaacctgagctgcttgctcgactgcagaaagatggtgtcaatcaaaaagacaagaactccttgggagcaattctgcaacaggtgaggacaactcagagaatgtctgagtaccttctgatgaggttcagttgagcacttgttgatgggctgtggacataggttagctgatacagtacttccctggtgtgcttgaaaaccctgggtttgatccctagtacctcataaatagaacatgcctgcaatagcactcccgagatggagaaatgcgaatccccacaagttcaggattctccttagctacagagtaagttatagcctctgtgggctcctttcttaaaaacaacaaatcctctgcctgttcttgttaatattgtcactactttttagataggcaatcttcatgtagaaatataatttttgaatattattaaattaaaacatcttggttgttttgtttttaagatggggcttggtgatcctcttgccttagactcctgagtgctgatagtgttgctatgtgccactatgccatctaacagtttcattaaaaactggttgaaatgtgagcatttttctcatttggctaaaaccatttttc

SEQ ID NO: 22181 - DNA, 1151 bp, Mus musculus
ttataccaaccagtacagctattttctaaaactaagaagaacatttccaaaactcagaacttaacttacctcataagaaaaccgaaaggagactccatgttgagtctttgaataattctcatttaaccacaaaaatttttgtatgctaaaatatttctgttacttgtggttgggagttatctcatttttgtgcgtctttattctgttacctcattaaaaaccaactgcaaagtcctaaaaatctgttaaaaatagttttttcttaaaataccagtatcaaactgcaacacaattgttggcttcgttgtagttttccttaacaaagttattaaataaaataccaagtgtcagagtcttagaaagtgtgataagtatattacacaatggattaaaccagagtttcaaggttgccttagtctttacctttttttttccaaaaaaaaaaaaatgtatattgattttattcatttgataatgaactgtcttaaaattttttaaacattcatagtgtcccatgctagagcaacccgtggccctgaaccattgcctggcctctgtctgtaggctgctggcactgaagtgggtcgcacagtaagaaaaaaaagtagaagaaaaagaaaaattttaaacaaactgacaataacttatatacacttattcccaggaacctgagtcaccctcagggctccctctgatgtgcagtaagatagcatgtctgcagaggactgctccctgtggctggcaggggtcctcttgcagctgagaccagctgggtaacttaaatcagcgcagtgctactgtctccgtcacgcttagaaaacccaacctcgatactgtggaactcagcagaaatgagaatactactgaggacgctcagtttgcacactagtcacttttcccacttgcccactttcccagcaaggcatttgtggtaaagcaacttatataaaactggtatgattatataaagccatccggagaggcccaagttccaagatgttggcaccgtaaggatcaagtgtgcaccttagaatgcattctacagctccccccagctgcctgatgtcagttttaacccaaaataatcaagaaaatagatcttcaatggcaggaaaacaaaacaaaaaggaaagctgactgtgaactaatga

SEQ ID NO: 22182 - DNA, 1698 bp, Mus musculus
tcattagcgatgattttttttttttttagatatcggggatgcaaagtccatacagatgcaaagaattgcgtgtgtttaaaacaagacaaaacagtaatgtgcaaggtgaaaagcttttggataaacaaaagcctattttctgacctttcttaatgtaaactctttgccttaaatggtagaatatttagacatttgcacaaagtacaaaaaatcaaaacattgtttttggagggttgaaaaatagaaagtgaatgtgtatagttttctatacacatacatacatacatacatacatacatacatacatacatacatacatgcatacatacatacatacatacatacatacatacatacatacgggctgtctggctctagagtgttaaatctgccctaaaagttaaacccccattgcaatggctgccttaaggtgtttgctagttgtgtacatcatgtggttaaccagtagctacactgcttcccagtgataacagccccagcccgggaagcacactgtggcctaccagcatcagaacctgtgtgttctgcttgtctgtctgcagagctgctgtggatgtgagctgtgtgaaggttaaaaagctgctactctcagtaggccggacactcaggttaaagagctgacgagtgttgcagtagcttgttggtgtgtgtttgcttggtttttgtttgtttctgtcaaattgctacttctattgtggaagacaaaagcatttccatttcaacagtttgtcagctttattaatgttgggcaaaaaatgatatgttatgaaaatgaaacagatcttatagttttggggcaaaatgacaaaaataaatgtgtaggtaacctatttatatactgctataaagtattttttgaagaaagatatgcaaagaagctattacctacatcagatgtatatttaaattttttttcatcctggatcccaggaatataaaaagagtagatatatttaaccataacatactgtgactcatcaaatagcacaaactttcatttcatggagtttatctgttaacgttgatttaaactatcacttgtcttatcatgtgggaacataagttatgtggtcaaaatataaagattttgaactaaagttgattcaggttgtcttgtattgtctcaaagtgctgccagttgaaaagggaagcattatgtttacaaatctgttttgaaatgtttgccaaaattttggtagtatctttaataaagatgtttgtcttcagcatccaaaaataagtgaataattttgacgtgtatcactgtaaagtagaaaatgttagtactgaggccttgtggcagtatatgttgattaactttcttgtggagttttcctgaaatgtcaactggaaagactgggtaatggatccaaagcacagaggcagccaagcactgaagccaagattcctctgacgctacaactctggtatcactgcacacattccatctctgcatggccttctggagacttccatttcagttttgagatccctggtgctcttttaccttgatagtgctacagtcattattaagtagaagtttatctcaatcttttgagtttaaaaagaagaaaagaagcttagttatggctaaattggggcctcacattatcatcgtagatctcttgacataatgacttcaggagtacactctgaagtgttggcctttcactgaga

SEQ ID NO: 22183 - DNA, 1201 bp, Mus musculus
gattatccattcttcatgtgccaacatgtctctacctctaagcccaggttttccaaatccagttgctctaaatctccagtggatctgttgctggttttctgctactgttcgtcagctgaagtcattttgcagaagtccactttctaaagaattattgaatcaatggatatcgaaaatttgtttcctgagtcatgcatcggctcctctctccctcgtgcacgcacccttcccactcctgcattcactgcccttacttagccagtgttctcagcctcaacctcctacaacccgcagacgtccacactggtgtgaggatgctgtttgaaaaatcagatgaactttagcatagttggtcctcacggaggccacgttaacttaggcggcagagcagatggtgcatgcagctccctctgtaaaggtgattaattgtccagaaaatcccaagcagctgtgtgttgatccgagttagagggccagaaaaatcaaatgtgaaatacaaaattgcaaaattctccttccaagaatttttgtgaaagacgttgtttctgaaacattgtcctaaacagtttcttccatccaaactttgacattttgctttgatgtcttgctatgctgtttaattctcatggatctgtagatcacttctctggtctccagtgaggaggattcattactattaaagatgtatctatagataactaatgacttttgtccggttctgtgctgtgctctcaaggcaataagggacagtagtcttggtgcttttgggcagtcaacgcagggtaaaggcacttgcccctcagctttccgatctgagttcaatccctggggcccatgtagtgtatgtaaggtgagaaccaatacatgcatatgtacacacatataaataactgttattttttttaatttgttttgaaattatgtgtagttatgtgtttctgtgtgtggttatatgcatgttagtacagctctcttgtaagccagaggagtcaagacttcccagagctggaaatagaggcagttattagctgtcggacaagggtgctgggaactgaaactgggtcctctgtaggcactcttaacatggagcatttctctagcccgtggccaacatgtctctacctctaagcccaggttttccaaatccagttgctctaaatctccagtggatctgttgctggttttctgctactgttcgtca

SEQ ID NO: 22184 - DNA, 1107 bp, Mus musculus
tcattgctacttcatagcttaatttttctactgttatgactttcatatgcaaagtatttgatatatgactaccaatgggtagcaacccacaggttggtaaaacactgctcaagagtaactgactgctgcttcttcttcttcgggaaaacaccaaatggcggatgacgccggtgcagcgggagggcccggaggacccgggggcccaggattaggaggccgcggcggcttccgcacaggattcggcagcggtcttaggggccgtggtcgtggccgaggccatggccgtggtcgaggccgcggggctcgtggaggtaaagctgaagacaaggagtggatccccgtcaccaagctgggccgcctggttaaggacatgaagatcaagtccttggaggagatctacctgttctccctgcccattaaggagtctgagatcattgatttcttcctgggtgcgtccctaaaggatgaggttctgaaaatcatgccagtgcagaagcagactcgggctggccagcggaccaggttcaaggcttttgtcgctattggggactacaatggtcacgttggtcttggtgttaagtgctccaaggaggttgctactgccatccgaggggccatcatcttggcaagctttccatagtccctgtgcggagaggctactgggggaacaagattggcaagccccacactgttccatgcaaggtgacaggccgctgtggctctgtgctggtgcgtctcatccctgcccccagaggcactggcattgtctctgctcctgtgcccaagaagctcctgatgatggccggtatagatgactgctacacttcagccagaggctgcactgccaccctgggcaactttgctaaggccacctttgatgccatctccaagacttacagctacctgacccccgacctctggaaagagactgtcttcaccaagtctccttatcaggaattcacggatcatcttgtgaaaacccacaccagagtctctgttcagaggacccaggctccagctgtggctaccacataagggtttttatatgagaaaaataaaagaattaagtctgctgaaaaaaaaaaaaaagagtaactgactgcatac

SEQ ID NO: 22185 - DNA, 1115 bp, Mus musculus
catttccaatgctataccaaaagtcccccatagccacccacccccactcccctacccacccactccccttttttggccctggcgttcccctgtactggggcatataaagtttgcgtgtccaatgggcctctctttccagtgatggccgcctaggccatcttttgatacatatgcagctagagacaagagctctggggtactggttacagcaagtgttcttaactgttgggccatctctccagccccaaaatgcataatgttttgttacgaaaatttcctttccagatgaacattcagaacacttcttaaataaaaatgtaaatgaagtatgagcacatccatattataaacacagtgtaagttctaacaacaaaatatgaattctcttattaaaataactatggttagggctgggaagatagctcagtagttaagagatgttctgctcttccagaggccttggttcaattgccagcatccctagagttctgacactctgttctggcctgtgcaggtacttgcatatatacatatgaaaagtaaaaattaaaaaatactggatagtgttggggtttggcgactgtatgtgcgatggatcagggaaatgcttgctggcaggagtctgatatggtctcctgagaggctctgccagagcctgacaaatacagaggtggatgctcccagccgaccattggactgagcgcaaggtcctcgatggaggagttaaagaagggactgaaggagctgaggggggttgcagccccagtcgggggagcaacagtgtcaaagggccagaccccacccccatcccagctcccggggactggatcaccaaccaaagagtacacatggagggatccatggctccagcagcataagtggcagaggatgactttgttggacatcagtggacgaagtggcccttgggcctgagggggttcaatgccaaactgtagggaactgccaaaacaggaaggcaggaactagtgggtgggtgggtaggagatatttgaaatgtaagtaaatatccaataaaggggaaaacaacaacaaaatactggatagtcatattgtacatcaagattcattttattttctatgccatatagaaaata

SEQ ID NO: 22186 - DNA, 1149 bp, Mus musculus
atactttttaatccctgtacgttaagaaagaaatacacagaaagaatataatttcttaatagttttcaacataatgcccagaacagtagctgatagctcaggattcatcaaacaaacacagtgcagccagcaagacggagcagtaaagtgcatgtcaccaagcacatggaggaaggaaagaacgacctcccagagttgtcctctgacctcagccctgatactatggctcatgtgtgcatatagatgagcatacatatagctaaccactagggttcataatatattgctgtagttgtgaacaaaccacagggagcttagagagcgagtgactgggtgtggaggagcagaaaatgtaaatgttgcttttgtttcctcagaggcaagatgtaaatgtagtttttatttgctagatgttgtctcaaaggcttattgctgaatatgcttaccctttctacctctttctgaattctggccggctggatcaactcagttgttctagatcaagttcctctccgagctggctgattcaatctggcttctctcagattctcactgaattgttcttgcttggcctcaagctaactctagaattctagaattctgttctaatcttatggctccttctcattccctggctcattctgtcttcaccagcaacctgtctgtataaaactgtcctggtaaaactgttctcgttctctctctctctctctctctctctctctctctctctctctctctctctctctctctctctgtgtgtgtgtgtgtgtgtgtgtgtgtgtgtgtgtgtgtgtgtgtgtttctcttttaagtcacctccctttcctgtggtatttttgtgaaagttgggtatatcctatctcctctcactgattctgtcaaatctttcatcactttgtctacctctgaattaaacattactttcaaacatgattgctttcttctagaaactaaccttacctacattattaggaattaaaggtgtgtaataagggcatgtctatatttcagccagaggtattaaaggtgtacattaagaacatagctgtattccacctggatcacatcaacctaggttttgtttatgaatactcactcaaggagccaaattgctgtatcaattttcctctgcaagaggtgtcacca

SEQ ID NO: 22187 - DNA, 1099 bp, Mus musculus
gcagtcagttgtctggtgtaatcagttgcagtcctgtgtcatcgggcagaatcttgacattgctgtacactatcttactagtttgctagtagaacgcttcttgcagtgcttgacgacagacaaacagacaaacagaaaacaactgagtgatcgggtggcattagcagaactaagacaagcctcctgacaaaacctgaaacctagagcccagatcttatgccatggcttcgaacaggcactgctgttgggatagctctgcagaaaccagcgtgtcgggtcagggttctgggtgacaaaggtataaacaatgtccttgattttgtgtacaactgatccttagagcagtcaagttattggcagttttactaatacacagtgcttccattgctgactttagctgagtggttcattacagtaaaagtgaacggttgcatcacggtagcttctccaacgtctgtatgatttcacacaggtgttggtgaggaatgcagagactcatggtgataaaagaattttggaactgaatcggaagctgtcagcccagtgatcgtggattgtgagacttaagtaaggaaccgatgaaaatacttacagatgaggcaatgaatcaagagttctcaccagaacagcgtattttaaagttatagttgtatcagctaggtgtggtggtgcaccagtttagccctggcacttgggaggcagaggtgggtggatctctgtgagttccaggccatcatgatccgcatggggttccaggccagccatctggacacaatgaaatcccatcttgaaaagaataaaaaataaaaacaaagaaatttaaagctacagttttgatcatttgatccattgcttcccctccttttaaatttttttctttatagacaccaaagttcttaagttaggggtgtaactttctagtaagcccttaatctgcttttaacctgaaacctcttacttggcccataaggaaagtcaataccctgattcttatttaacagttacttacaaactgtttgtttctctgtttccaagacagtttctttgtgtagccctggctgctctggatttccctctatagaccaggctggccttgaat

SEQ ID NO: 22188 - DNA, 1099 bp, Mus musculus
cttgtgttgaatggaaagaaccactcctcaaagttgtcctcccatgtggctctcgtctttctccctggggggctgttggccaccagcctgagaagataaaggcagccgagtgtcttagtcatggtttatattcctccaaatgtttgtaggtttaccatctggcccaaatcacacactagggcatctggctgcagccttcagctgtggtacaaagtccaattcctgatttctgtgttcttctgtctccaggctccagccctcttgctagggcattctgacatctctcccgattccatatcccaggactaggatgtttccagagcacatgtaacattctctgctccctgcctactgcttttttacctcattccttcaatgtatggtcatgctagctcctgcctctccctgatggaggtaacagccgtcatatcagtatcagagcctgggtgatcacactgtatcttcccagctccttgactgccttggacatggacctggccctgcccaaaatctctgtagcctgagtctgactcctcctaggtcattctccagatctttgttccaatagacagctctgcttgaagctctagtacctggtagctgggtcaccttgggcaagccactaaagttaagcccaactttcctcatcataaaggtagggaaaacactcctcatgtcacagggagcaatcctcaggatgacttgtatgaagcagtttacacagagccagggagctggaaatggcccagtttccaggtattattactgcctctgatggtggacaacttaccttgactgaagtgctggctagttttatgtcaacttggcacaagctagagtcatcaaagaggagggagcctcagttgagaaaatgcctctataagatctggctatagtgcattttcttaatgattgatggaggaggtcccagcccattgtgagtggtgccatccctgggctggaggttctggcttctacaagaaagcaggctgaacaagccatgaggaatatattagtcagggttctctagagccacagaacttatcagtagtctctacatagtaaaggaatttgttgatgatttacagtctgcaatcca

SEQ ID NO: 22189 - DNA, 1190 bp, Mus musculus
cttagtggaaggagagaactgagtatacaaagttatccactgatacctacttttgtacagtggaatgcacacatacacactattttgcacatacaataatggtaattaaaatttttagaaatacaaataagtctgtatttggtttgtcaaaataacaattctgtcctttttactataagtgtatatatatatatatatatatatatatattactgctaaataatattcacagaagcctgggattttctcatgattttaatataaatagtgcctgaataaaagacctgatagcttcagatcaaattttctattgttataagctatggttaaaagttagaaaccttggatttattaaacatttttttatatgaaggttgactgaacactaaatgcccacaaatccaaaagttattggccatcatgatttcacaattggagtctttcatagctgtcctcataaatgggtctcagaacaggtgaaattacctctacaatatttacagaatgtatatatgaacaaataagtcccatatttggatttgcataccattcctagagtgtcattttctatttataggtaacttgaaacttaaaaaaaaaatctggaacctgaaacacttaagagtcctagtcatttcagatgacagatttccagcattgtggtgtatgtaatgagagacatagggtagatggagaaagaggtaatttgttagtatttttccattgctaacgtaccctatatttttagtcattgaactctcaaaatggttgtaaaagtaagcattaataatagaaaaattttgtatttttaatgtttcaataatattttcccatcttgatgctaggtcttcaaacatgaactatcttacttactgactggaattcttggtgcagcagtagattactggatcttccttggtattcagatgggtagaaatgtgatccgacatatgtctgatgacttaggaagttatatttccctttcctgtgatggtaagtgtatctttgttatggttacatttttaatcactcattctgaaaattaatttcaagtacctttaagtggtctattcttcagtctatactcatatgaagttttctttgaaataatacgcagaagcaatatgaaaaggaatgggaaattctataatgctcccatacagagtactttaaaaaacttatgatgttta

SEQ ID NO: 22190 - DNA, 1101 bp, Mus musculus
ttttaaaactgcagtgggtaagaggttgctttttacctttgctaagtcatttaaccttggaatctttgaaaggattgcattaggtaatacctaagaatcctttgaagtctaaactttttctgattctacaatgagagtgagacctacagtttgattccaagaataatcaaacctgttctctctatggacaaagagacattcactggctcagtatatgtcttttcatgtcacagtagaagatataaaagacccctttaatatctccttctgggagagttgcctttccctaagaaaaccctaggaatagcaacatgcaaacagtcattctcttacccttgtagttgttataggagcaagggtagaaacaggggtgggcagcaagcaaaattaagaagtgaggtttctctgtgtggatcacaccttaaagtattactagttatttatgcttgtcttcccttttatctaaaaaccacatttgtttcatatttagtcttgaagggttttttttttttgtaggagggtttttaaacaatttaaaattagaaccacatacaagggttaagaatacaattattactctgtattattaattagaaagtatttggtatgcctaaatcgatataaggattcagtacgcctaagtgcatatgtctttttcctggcattattgaaatcagacaaggtaaggatgatgaatgacctgtattttgcccacagaagagccagtttttcttctgcaaggctacaaatagcaggcaaggacagtactgtcacacggagagtaactctgaactctattactttctctgcgagtaaaaaagcaattcctcaggactaggtcttatgaaaacaaacaaaaaagtgcccttacatggctgaagttgttcacttgtcgtgtatcagtgtgagtagtcttatgctaagactgtaatcatgggttttgcaaactcgatacagcacttgtatgagctgaagctttctaagtacttttagtcttttggtacataacaaaagtaagagttttggtaacaaaagtaagagttttggtaacaaaagtaagagtttgggtaacaaaagtaagagttcctactgtgtccttct

SEQ ID NO: 22191 - DNA, 2649 bp, Mus musculus
gtaccacattttctgtatctattcctctgttgagggacatctgggttctttccagcttctggctatgttctgtgaacatagtggaacttgtgtccttattacaagttggagcatcttctgtacatatgcccaagagtggtattgctggaacttcctgtagtactacgttcaattttctgaggaaccaccagattgatttccagagtggttgtaccagctttcaatcctaccattattggaggagttttcctccttctccccatcctcgacagcatctgctgtcacctgaatttttaatcttagccattctaacttttgtgagttggaatcttagggttgttttgatttacatttccctgatgactaaggatgttgaacatttcgttaggtgcttctcagccactaggtattcctcagtgaagaattcattgtttagctttatacctcatttttttaaaataagcttatttgtttttctggagtccaacttcatgagatatatatatatatatatgtatgtatgtatgtatgtattggatattagtcccccatcagatttaggattggtaaagatcttttcccaatctattgattgcccttttatcttattgacagtgatctttgcaattttatgaggtcccgtttgttaattattgatctttcagcacacgacatttgtgttctgctcagaaattttttcccctgtgcccatatctttgaggctcttactcactttttcctctataagtttcagtgtctctggttttatgtgaagttctttgatcctcttagaattgagctttgtaaaaggagttaagaatgaatcaattcacattcttctacatgctaaccaccagttgagcaaacacaatttgttgaaaatgcagtctttttccactggatgattttagctcctttgtcaaagatcaactgaccataggtgtgtaggttcattcttgggtcttcatgtctattacattgatctacatgtctgtggctgtaccagaaccttgcagattttattcacaattgctctgtagtacagtttaaggtcaggcatggtgattccaccagaggttcttttattgttgagagtaatttttgctatcctatgttttttgttgttccagatgaatttgcaagttgccctttctaactctgtgaagaatagagttggaattttgatggggattgcatttaatctgtagattgctttcaccatgatagccatttttactatattaatcctgccaatccatgagcatgggagatctttccatcttctgagattttcttcgatttctttcttcagagacttgaagtttttatcatacagatctttcacttccttagagtcacaccaagatattttatattatttgtgactgctgtgaagggtgttgtttccctaatttctttcttagattgtttatcctttgtgtagagaaaggccactgatttatttgtgttaattttatatctagctatttcagtgaagttgtttattaggttttagagttctctggtgggatttttggggtcacttatatatactatcatatcatcagcaaatagtgataagttgacttcttcctttccaatttgtattcctttgatcttcttttgttgtcgaattgctctggctaggacttcaagtagtatgtggaataagtagggagagagtggacagccttatctactccctgattttaattagattccttcaagtttctcttcttttagtttgatgttggctactggtttgctgtatattgcttttattatgtttaggtaggggtcttgaattcctgatctttccaagacttttatcatgaatgggtgttggattttgtcaaatgctttctcagcatctaatgagatgatcatgtggtttttgtctttgaacttgtttatatagtgaattatgttgatggatttccgtatattaaaccatccttacatctctgggatgaagcccactacatcatgatgaatgatcgttttaatgtgttcttggattcgggtttgcgaggattttattgaatatttttgcattgatattcataagggaaattggtctgaagttctcttccttttttggatctttgtgtggtttagataccacagtaattgtggcttcatagaatgagttgggtagagtaaatttgcttccctttgttctagagcttttagttgtgctgtcaagctgctagtgtatgctctctccagtttatttttggaggcactcagagctatgagttttcctctcaggattgctttcattgtgtcccataagttttggtatgttgtgacttcattttcattaaactctaaagtatttaaattctttctttctttctctcttttctttgttttctttctttccttccttcctttcttccttctttccttccttcaccaagttattattgagtagagtgttgttcagcttccacgtgcgtgtgagctttctattatttatattgttattgaagatcagcttcctgttattttgttgttacatttggcattctgttcttgtgactatcttgttttaggtttgttgaaggatttctttgttggtctatctagtgtgtcatttccctccttgtgttggagttttccctttattatcctttgaagggctgg

SEQ ID NO: 22192 - DNA, 1108 bp, Mus musculus
cttattcttaggagataatgtgtaaactgtttagggataaagtcatgatacatgaaagctattttaaatgcttctttaaaaagagagaaaaatacaaaaataaaaagaagcctaactgtatttggaacagcacttggaaggctgagaccacagtcttgagactttaagggcagcctaaactacatttggaaaccttgttcaaaaaatataagtcagtggttggtggttctgagctttgtctctgaactgagtgttcggagctgttgttaggcttttccaaccttgactttatgaacttccattattgttactgtccctttgagtggtgttcctctttgagagaaaggagatctgaggttcttgtttgatattttatgcatgaggtttgtaaggaaggagataactgtcaatattctcatgacctctctgacagtccatgtgctgtagtgtgcaagtattttcaaagagggtactgtgtttgtggagaccactgcagagatgaacacagcaagccactgaaacaggaagaagtgactgctactgatctgagtgcaaaaccatcccatgctacttcctcaagtctctcttctggtgttggatcacttgctgaaatgaatccaggcgaagttgagtcatgaaactcaaactttccagttgtaggagtagctgtagaggattgggtgaatgccattgagtttgtaccagggcagccctactgtggctgtagtaagtattgtgaggaccctctaaactgcaatcaaagggctaaatgacaggccacagtgaactcagagtcatcttttctgtttccagtatttgagattaacctagtgtcaacacgttagattgggttaactaagatttaaagatgaagtaaaagaaattttttgaactacaataaaatgaattcctatttaagaacttcacataaaaccagagacactgaaacttatagaggagaaagtggggaaaagccttgaagatatgggcacaggggaaaaattcctgaacagaacagcaatggcatgtgctgtaagatcgagaattgacaaatgggacctaatgaaactccaaagtttctgcaaggcaaaagacaccgtcaataaga

SEQ ID NO: 22193 - DNA, 1147 bp, Mus musculus
aaatataagcagactcaaattctgttcctctattcacccaagtaagtatgcaaaaggtatgccaatattgctatcttctttccaccactggtgggagataaagaagtaatactttcattttctcagtgatttttttactcactaacacattaaaataagaaaggagctaacccaggcagcaacctttaatgtgccattcacacatttgcagcatatttgttatttgttccttggggctcatctttgcagtgagacataataaattaacacatcagtaaatcaaggacaatagagtttatatgtaagagctggaataataaatcagctggtagttgtaaacctcagacctcctgacaccaaccagaacagaacactggtgggtctacaaggctgcttgtaatcataacttgtagaagactgcgtaccttgcctccacgctgctgaaatgcttacaatatatgggtgtaggggcttggaaagaaaacagtatttataaggagtccagaatttcctgaacgtttgcacgatgttccttagtgaaagaactgcataccagtgagtaggctagaaaaagaattagctgaattttatttaaatactgttctttatttcaatgaaatattgttaagtaaaatgaaataataaatttgtaacaattatgttttagaaaatagagcaaacaaatagagtctaaacaaagttttaatatcttgaataataaaacttttaaacttgaaaataattatgaactttgaccaaaaaaatacacagcagatatatacccaaattccctttgacacttagttttgagaactcagggaaataataagagaatattagaaggaacccttgaaagtttgaagaatttctctctccaacataacagagccaaacttctctgttactgggtccatcctacaatcatcaattaagtgtgtgtgtgtgtgtgtgtgtgtgtgtgtgtgtgtgtgtgtgtagccttcttctaattcagacaatattgtagatattgtgcatttcataacatgaaacataaaacacctatagtatagagctttaattttagaagaacaattataaatatgtaaatgttgttgatcagtgtgttcaaaattgagtaagggttaaaaaaaaagctttagaaatg

SEQ ID NO: 22194 - DNA, 1176 bp, Mus musculus
gcaagtttctcaaaggtatcaggtcaacagcttccttcccgttgatagagatgaaagttgttcttgtatttaactggtaacaaaaacaaaagaagaaagaaaagaaaagaaaagaaaagaaaagaaaagaaaagaaaagaaaagaaaagaaaagaaaagatcaatttttgtctcactgtttcagtgtttaaataataattcccatatttgcataataagactctcttcagagagcttggagagctagctccctgttcactctctccagctgattgtgctggcgccatgcttcctcttcaggagggggaaagactattggaagatggctaacactctcaagtacacaagtgtaatagcatgaagtatttattttaaggcttggtatgttgtttaaattattaagtagtgcatttcttatggtcttttgggtagacacagtcagtaaacacttcagatgtaatgtgtaaatccttgctagtgcatgtctacacggtggactgctattgaagaaggctattcttccaactattgaacactgttgacagatatggattatgcaatggcttgttgggaggtggattagcggtgctgcttaattggtttgcttccaatgtggcttcgtatcaagaagccctgactagtggagatgagaaagatttcaaaatctgtctgcttatacctaccagcaacctaggcttgtgagcagaacgaatgatcccaagaaactacttgatcaagtttgtttttgttgtcctggattcaagatgtgcattcttccttgatctaagactgttaatgtatgaggctatagaaagagtccccagattttcactgtaactttccatttgcacacactgtagagcttcagactgttcactgatagtgcatctttagtggggatgtgttcaacaacacagtttactgcttctgtccattggttaggtacaaatatctgcctctgactctttcagctgcttgttgggtcttctggagtgcggtcatgctaggtctctttttgtgagcactccacagcctcagtatagtgtcaggccttgggacctccccttcagctggaccccactttgggcctgtcactggaccttcttttcctcaggctcctttccatttccatccctgtaatttattcagacaggaacaattatgggtcagagttgt

SEQ ID NO: 22195 - DNA, 2417 bp, Mus musculus
tctgcgcggtcctaccgcccgctgcagcgcggtcgccgctgcccagcctcaattgtgcccatttttaatcccctttaaacccagcaagcttttattctaaacctcaaacttgattttaaccaggttttttcctcaggtcatctaatgagcctctgtcttttacacaaagccacacactcgagtcctaaaaatgccaactttaaattcagaacatgatggactatgtagtttggggagtacaagttctttctccctataacgacttattttcacttcaacccccccccccaaaaaaaaaaaaactgtacatgaagtaccgaatccgaatcctcatttgtgcccagttgaactccagtctttatgtctctgatttcaggagggaatgtcgaaaggaaaatataaacagatcttttagatgtaggtataagtctccatgttcagtgaattttccagttacttataagaactgaccttactattaaaatatataacacgatgtgtgcgccaatgcagggtgatggtggtggctgttgatccttacaacctgtactttcacctttcttgtagcgtgccctgtcagatgcaggacttttttactatcatcaagaaaataaaactacataacctctttcttccaaaagtccaagtagggttaatgtgcttcagttttcatctgcagtaggaaaagagaggcgtagtgtgaatgggttgctcttttgaggccaaaatgtttactgttctcttcctgtgatagggcgctgccctgtaattccaacagtaaggccaacgcggaagataaaataagttgacattttactggcttttgaattaaagcattagacattaattacttgaaatttttaattagtgaaggttatatccagtgcatggtgagattgtgatttaatacatccatcctttttaaaatgaatgcaataagtaatttgtctaccttgtttgagaccttgagacagtataagcaaaatgagtctgagttgctaatgacagggaagaaaacctgagctcagccacctcatgaggaatactctcatcccatgaactgattttagcaaggtttaaactggtaacatgtcatgctctttgcacatgcatacattcagtaattctgtaaggacagtaaagtcctcagtgccatggctgggcatctcctgacattacttaggcagaagtaccttaggaaaaaccaaaatggggctttctccagcttttgggcagtttaaatatgttactccaacagtgtcaagcacattgaactgtcatagtggccctttacatttctgcttttagaaggattggtgaactctgtgaaaataatatctttccagttactgggcttgaaacactggtgtgcattgattatattttaccaaatgttataaattgtctggtgttttcagtatgtgaaaatgttcacaagaaagtgagtttgcaacatgtagaggttggaaaaacctatgcagggctaaatttgctagacttctgcagctaaattaaagcagagttaaagtgctcagcttatgaaccaaacaaaagtatcctgctcctgccctccgggttcctctctgcaactcttaaaccttattcagagaaagtctctgtttccttgggatgagtactttactgtcactggattgtaaccttgtcttctgtctagcagagagctatttacaaagttacattttgtaaatgtctgttactacttttgaatctgtgctatagcaacccagagggagccaggcgcagcaccccagatcaccagctgatgagtgacaaatgattctttacaatgtaggatttcttgacctgttgattgggttgctgttggtatatgtgtaaggatgttattcacctcagctttcttgggataacaacaagcacttggcagtaccctgcctacagggaggccagggttaatatttctcatctggccttctccctatttttattctaggcacacagtggtagaaaggtaaggtgtgagcttttttaaaaataaatcttatacttagttcttaaagtaaatagatggaaagagacataaattggaaattcaaaatagtctgattcaagctttggagctttttcgggtacctaacacacagtccttggaagtcatcatggatgtttgctagaccatctacgtgtaataattgttcttttctcacaattctgccttgtgcttcctgaaatgcatttttgtttgtttatatgtcaaaaataataaagtgtggacctcctataatcttgtttaccattttaaaataaaattttccaacaaagcaactgtgtcttctgtcttcctcctcagttcgtttttcaccaactgcacagaggctgttaagactgaaagctagccgggtgactgggccagggccaccagtattataagacataat

SEQ ID NO: 22196 - DNA, 1168 bp, Mus musculus
tttgatttgtatcattctgaaaggatttcatttatatctgtgttgcttcttagtagctgggaggttgggtggtactttcttagccatcctgagctaggggccttgcagtcaggcctagttcttcttctctagctaaaatagccagggatgcagactatggatggacacacggagccggtgaaggtagatgacttcaccctagatctcctagcagtgtgatctgtgagtaagacccagcaagcaggagaagatgcttcgggagcgagtgactgcaggaaagaaccacagtgcgttgggtgcgcgctgcggctcggcgatgttcacaagcccccctggatgcacattgcctcttttctctctttctttttatcagcggttcagcgaggaagaatgcctccaacccagcccaatccaggccagtatgcactcacaaacggggatcctctcaatggccactgctacctgtctggctacatttctctgctgctgcgcgcagagccctaccccacgtcgcgttatggcagccagtgcatgcagcccaacaacatcatgggcatcgagaacatctgcgagctggcagcccgcctcctcttcagcgccgtcgagtgggcccgcaacatcccgttcttcccggatctgcagatcacggaccaggtgtctctgctgcgcctcacctggagcgagctgttcgtgctcaacgcggcccagtgctccatgcccctgcacgtggcgccgctgctggccgcagccggcctgcacgcctcgcccatgtccgcggaccgcgtcgtggccttcatggaccacatccgcatctttcaggaacaggtggagaagctcaaggcgctgcacgtcgactctgccgagtacagctgcctcaaagccatcgtgctattcacgtcaggtgaggatgcggtcgcgaggagggcagactgtgcggggagctggtgggcatggcgaggcgagtccctggcatcctgcagctcccgcaccgccgctgtcgctgtgaggccgggcgctcaagccaccttgggcctgcccagggtctgcagcccgggtatgtggttgtcgccgaccgcgccgctgccatcttgggagcgtagtggtgcttggagcggaggaagctcagtgaggccagcggcctggcctgatggatggcctggacccagcg

SEQ ID NO: 22197 - DNA, 1344 bp, Mus musculus
gctgacattctggcagaagaaatgatctgaaggatcagatcagccttggcctgaggacagtagcctcgaggttaaaggtaagcagaaggcggggacagcagtatggtggtgaacagaaagcaagtgatctaggccagcagccttcctgagggacgtcggcccagaaagctgaacttgtgactttaagacaagctctatgaatggcaaagaaaagtctacactgacaacaggtatgcttttgccactgtacggggcaatatacaaagagggctgttgacatctgcagaaaaagacctaagatgctgtggctaaaaaaaatcaggtggcagatctaaccgccaatcaggtggcccaaggagcaatgatcctggcagtcaaggagcctaaagattattatgacatcagagagaccagctttagatacaccgctgagcactatcaagctatggacagtatttgacttggcctgggggccaagaaattcaaaggtgtggttaggtcctttgactactatgttacaggactctctgacttggcagaagaaatagtcaaaagctgcaaggactgtgctatgacgaggtagaatttctaaaagaaaccttcccaaggtaattggatccaataaaggacctgtctttgttgcccaggtaaatcagggactggccaagatattagagatcggttagaagttacattgtacacgcaggccccaaagctcaggacaggtagagagaacgaatagaaccattaagagacccttaccaaattgacagcggagactggcgctaatgattggatagctctcctaccctttgtgctctttagggatagaaacacccctggacagtttagactgacccctctccactggtaaaaatagcctctgtacatagtgctgacatgctgctttcccagcctttgttctctaggctcaaggtgctccagtgagtgagacagcgagcaaaaagcagctccagaaggcctactcaagagaagaagacctgctacattagacatctccatgcaaaaaaccttgagactctggtggaaaggcccttatcttgtactcttaaccaccctactttctacctttatgggaccccttttgattttggttctgcttttaattataggtccatgtgtgttaaataggcaagtcacccttattagaacaaaaattagtgcagtgcggcctttagttttgagacaacagtaccatgccataaaggatcaagtatgtcaggaaaaagatagtatctagttctaagattagaactactaacaagaagaaggggggaatgaaagagtagtaaactcagtgctccaaggtatgctaatcataaa

SEQ ID NO: 22198 - DNA, 1219 bp, Mus musculus
atggagtcctgtggtatccatgagaccactttcaactccatcatgaagtgtgatgtggatatctgcaaagacctgtatgccaatacagtgctgtctggtggtaccaccatgtacccaggcattgctgacaggatgcagaaggagatcacagccctagcacctagcacgatgaagattaagatcattgctccccctgagcgcaagtactcagtctggatcggtggctccattctggcctcactgtccaccttccagcagatgtggatcagcaagcaggagtatgatgagtcgggcccctccatcgtccaccgcaaatgcttctagatggactgagcaggtgccaggcatctgctgcatgagctgatattgaagtatcaatttgccctggcaaatgtacacacctcatgctagcctcatgaaactggaataagcctttgaaaagaaatttgtccttgaagcttgtatctgatatcagcactggatcgtagaacttgttgctgatttttgaccttgtattcaagttaactgctcccttggtatatgtttaataccctgtgcatatcttgatttagtccttagttcatgtggctcggtcacttgggggctggggagagcacgctgcagatgagaaagccccagcctggtggatctctgtgagcaccactgagtgatctgtgcagggtattaaccaacagcagacttccaggatttcctgaggctggcaagggttcctgaaccagttaccactccttcttgccagtctaacagggtgggaaagtccgagccttaggacccagtttcagttctggtttcttccctcctgaccaccatcggttgttagttgccttgagttgggaacatttgcatcgacacctgtaaatgtattcattctttaatttatgtaaggttttttgtactcaattctttaagaaatgacaaattttggttttctactgttcaatgagaacattaggccccagcaacacgtcattgtgtaaagaaataaaagtgctgcagtaactgaaaaaaaaaaaaaaaaaagaaaaaagaaaaggagatctcgcaggtgtcagatattacccagacagagcttgaagaatctcaggaagagtgcctgtcagagaggactttctcagaaaggggccctctcaaccctaaattagaaagatatagagacactgatgatgaggtaactttagacaaggaagatcattcagaa

SEQ ID NO: 22199 - DNA, 1212 bp, Mus musculus
atacagaaactgccccacctggggatccatcccataaacaatcaccaaatccagacactattgcagatgccagcaagaacttgctgacaagagcccgatatagctgtctcctgagaggctctgccagtgcctgaccaatacagaagtggatgctctcacagtcatccattagacaaagcacagggtcctcaatgaaggagctagagaaagtacccatgtagctgaaggggtttgcagccctacaggaggaacaacaatatgaactaagcagtaaccccagagcttcctggaactaaaccactaatcaaagaaaacacagtgagagactcgtggctctagctgcatatgtagcagaggatggcctagtcggtcatcaatgggagaagaggcccttggtcctgtgaaggttctatgccccagtataggggaatgccagggccaggatgcggaagtgggtggattggggagcagggggaagggggagagaataggggattttcggaggggaaatgaggaaaggggataacatttgaaatgcaaataaagaaaatatctaatttttaaaaaagagaagggtagatgtggtggagcttgtgtgcgtgcatgggggaatgttagcggcacttccctcattttgaattagttgtgactgacaaggcaaacttcactggcatgtaagtctaaatatacggtaatatacacaaatatcaaaattttcaaaatgctacagatttttatcactataaattgtaaaaaaaaatctctaaataagattatttaaataattggacatggccaatattagttactatttatgttttctaaaactagaaagatttagtaattttatacatgatattacatatcatcattcaagatgatctattgtctatggaagaatatgcatcaccgagtgactatgactgccttttcttctttacttgctatgttttaagtgatcttaactgtctcactgtgttgctgtgtgttgtgtgggctgtctctgtgtgtcgcttgtgaagtgtctgacctctttagggttgatggcagtgggagtggagaagcggacacggatttcttccttccacctgtcctcccgcatggtaagcagcggtcctgtgatcacttactactgtctttacatcagcttctcattctagagacaacaatgctgatcacttcctgtcatctcctgtaactagatgatccgtt

SEQ ID NO: 22200 - DNA, 2288 bp, Mus musculus
tattttgattaacagagaaaatgacatctgtggcatttctgggtgtatctttgtactttcttccttccatgttcgtgttttatagagatttttttcagagtctgaaccatacatgatagcatattttacaaagtctgaaaataacttcacttatttaatgttcacactgaatttgcatactctacttctcatccagttttcatgtctctggtttatgtggacaccagggattttaagcaatgaggatatttatagaaatgaaatagagtcattgaccacacaacaaataattgctctggtgttcggattacgccctctgtggtcactagcgtgtgccatgttgtctgttattttcttaaaacagaagcatattagttcatgttcctcgccacacagaaaccacaggcctgtgtccaggtctctggattgcttgtggtttcactgtgacttgggagtcagattaagaccatattttttgttccctaggaagtcacacttgaagaatttcaatccagtttgcatgactaagacttcctaaaacctggctctagtctcacagcctgcagtctctttgatcatcctaattatacttaggcacaaatacctgaaattataaaatattttatctattcatttctctatttgtcaacagacacaattatacactcccacacacatgcacatgtgtgtgcatgcacacacacacacacacacacacacacacacacactttttgttattgcatatcagcatctcagattcactttatttctttcattctattttacatttttttcatgaaaaaacagttgaggctacaactgagacatatagaaagcacttgaaagcaaaaggtatttacaaaagtcagatcataattgtgtttacttatttagctttgcctatttgtggcttgtatttacccacttaatatattacttaattaatataactgtatttaaggagacttaaatataacattgaaaacacatgtatcagagaagcacaacacccagcagctatcaagttgtttcaatgttttctactaattacaaactacaattttctaaaatactaataaaatgtgacaggatttgatacttcatatgagtgatttctctattatttatgtacgtatgaaatctagtcaaataaaaaaggagataatgaattcagaaatctttcagtaagtgctatcaatgaaaaacagttttagtatgaagtgattttaatacatgtaaatttgttttaaggtataaaccttatttgctttatttgctttttaaattatttggcagaattgtcaatactgctggtgttctttaaaaaaaaaaaacctgaaaaaaatcttgaaatttcagactaacagagtgtgttttccctctcactttccagggtgagcgtggacagtgacgtcctaaaatcaggctatactagccgagacttgattattttggaaaatgatgaccctggaggcatttttgaattttcttatgattctagaggaccctatgttataaaagtaggtccaaaatttcactctggattcataacttcagaaaaatgttgtagaagaatttgaactcttgtgggctttgtttttaaaggaaggagatgccgtggagctccggattactcggtccagggggtcgcttgttaaacagttcctccgctttcacgtggaacccagagagagcaatgaattctatggaaacatgggggtgctagaattcaccccaggagaacgggaagtagtgatcaccctcctcaccagactggatggcacaccagaggtaccttgttccacgtccttgtgaaaggttgacagtatcaggatattgagaatagaaatattttgaacattgataaaaagacataagaaagatttaggtactcctgtttagaaaaatttaaaacgaagcttgaaaagcagaatacaattcattcaaattatgagtgtatttctgtcctaaagcaagaacttgaaaaccctgagcagcttggcttttgtggtcagggcttctgtggtcagggcttctgccccagcccagctttctccacttacgatacatttcattctgcatgctctatactcactgaactcttaaagctctgctgcgaaattatttttcagaaagaaactaatttgctttataatagaagaatcacatgtacttccaatatatttatactgcaattcatatgcaactttcaaattaattttatttttttattcttgctaatttaaatgaatattcaatcaccaatgaaaaggccttgaattttta

SEQ ID NO: 22201 - DNA, 1137 bp, Mus musculus
atcttaagaccccccaaatagtgtcattgggttggaaacttcccatttgatcacacggacactgtaattcgtcaagatctattccttaaaaaaaggaatcctttatgactagctctgcaacctcacctccacttcttcatttttaaaaatacttgtgtctgatatttgaaggcacttttgtagttctttgatgaagtgttacacagaaaagtatattcagcaaatccctctttatatactcaacatacttattgctgttataaatagtaacttatgccttaattaacacctaacgccttacaaagttacttaacgtaagttcatgtacacttcacaatcaaagtttgtgtcagattttattgaataggctatcatttcacaggctatatacatttgtctgtcttcacttttgagcataaatgaatgaaggaaaaacaaatttgtacaacctgcctctgaagtcttgcagaagaaaatgattcattaagcaaaaatgagtaagcaagacttttacactagcagtagacgggttgctttattcggcactctgttgacctctgcttttccaaaaagaacctgtccaatttagattatcctcctaatgtgcatcatccaatggagaaacatatgccaaggtgtgtggcgtggtcaaaagggcttaatagtggcattttctacatctaatgtgggacaagcaatttggctaattagtatgtattctaaaaatacacttttagggagtggggtctgatttgcgtgggttttgtgaaataaagtgcagaccgtaaaatatgtcacattacctcattttttagactctatttcctaaatcaatgtttcagctttttaaacattttgtataacaaattccaatcctgatacaaggaattattaatatctatttgttatatttgggattttatatgctttcagaagaaaaagcattacaaaaagactgacatggaagtcagtcattttaaggcccctacatcagagcagttttagaaatttttccttatttagtaataggtacattttgataaattgatccttgagtaaatcttattaaaaataattttttcacataccatgtgcattttgaaatcagagtgatctttaattatgttcagtgttaac

SEQ ID NO: 22202 - DNA, 2734 bp, Mus musculus
aacttggtatctgtaaacgacagagatgttcttttttgtattgtcttcaatggtgccttctcatcacctgactgactgaggaatccatcccttctcttaggagaatgactacattaactcctacttcgacaacggcgatgattttggtgtagacagcgacgacaacatggatgaagccacctactagctgtggaatcctcaaatgtttgggggattcagcttcgagcgtttggacccactttattttggataaggattaagtccgtattttctgttgttcagtgttctgtatccaactcttgagaacgactttgtgtttacagcccatgaccttactcccttacctctgccacacctgtgactatgcaatgcggttgtgggttctctggcttttgtttgatctggatttgaatgtttctagagagttttcgtggcactcttgtgtgttcacagtttaaaaagctcactctggctcacctgctgaccttcggtagcaagggttactcgtcatagtggatttctcttaatactgcacgtggggcactttaaaagcaaactggacgatgatttctcttccctggaacattgttttatcacgctgtgacctcataaactgacctcagaaacgtccctgagttcctaacagtagagttatgctgataggaaacaggttctcggcaagcaccagtgacctgggtgagacccacttcagtttccacctcagccacaacaaagactttcacgtgggtggaaggttctcaacgcttggccttggggataactccaagccttacagtgtacagtgtgtaaactaatgattccattgtagtaagtctgacactttcaacttgttgggctgggacttgtgggaggggaagctgagacacactgctcaattctggacttaaactggaaacaagtcctggttgtgtaaacctcatgataaaatggtgtgtgagtggatatggtgaagggcactcccctcctttgtgtttcacaagactcataaactgcaagtcaattatataatcactgtaaaatctcaggtcattttggaattatgagcgattcttcttgttttaacttacagggtgactctcccctgcagttttctattttgcaggagaaaatatccagatcccttcacctctgaggactttaaaacatgccaaagattttcaagggaattcatagtatgcatttcgaaactaacgtattaacaggatctgcctacgggaggaaaatcggtttttcccagtgggagacttgttactcagtatcctctgaccggaaactggaggcctgcttcttctctcaggatcgagataaccttaatattaagcttaagtttgggtgccttagtttctccacttgtaaatggtttcctatcaaaatttataggaaaatttatagtgtttagacactaaccagaattgaccaaatatgctttcttttacgctacagaaacaaccatgtcgtaaattgtttgctctgtacgtagtactgtggacgtgagatagctgtgaggaaccgtttcctgttgagttataattcgatttccagtcttgtacctgtgttagaaacggtagtttctttgtatgatccgagagattccaaaagtcttttctcaggtgaaggatcactttcaatggcagtgcttctttaaatacttcctgatgggttcgagagcccatcttgacagtatactgctgaacgcttacatccagttcccaggagctgataaagatgctgtgagattcctagtggaaaccaagtctttaaagctgcagtgtgttagggaacttattaagttttagtaataatggcaaatgctgttatttgggaataaaaagtacttcattctcttatgtttgataccggggccaaacaagattccattcgtagacactctttggttgtttccttccagtattacaaagccacagataacttttccagttgggagccgcactggcagtgagttctttcccagcatccactgtcttcaagggtgtgcgccttccacccagagggaagcgctttcccacaggattgactcggaaacccttggcatctctcctaaggatgcgcatcttcatttgaaagatcagcttacaactctaaacgtactaattttgaggagagatgagattttccaggctgcttgactaccataaatcttgtttactttagctctgagtctatgaaattaccttgtagagagataaataagagtactagttagagaagagtacttactgggactggtgataaaatatctttaacaatctcgtaacaaaactagttgcccacatgctgatttttctgtatttgtttacacatacaaaatttaaaaaaataaaattttggccttaataccaagatgatttgcagtgaacatttatttggtacgaaaaaaaagttaattctgattttttttttcctgctaaaataactattcattgatcggtggttgtggaataacccccagcccacccccgttataacaaaagaaacctcttaccttaatgtggcagggagtatgtgctcacagttttcttgaacagttactggaagatgccaaagtgtcagaggattgctgtccctctttccatccacaccttcaagtgacaagtgtcagaggaattgtaagtacaataatgtcaactataatgtcaacccgctttaaaatggaaaagagaagtttcccctgaagacctttctcacttatggt

SEQ ID NO: 22203 - DNA, 1169 bp, Mus musculus
tgctcactcaagttagcaaaatattccaaaacaaaagcaattatggatggctaatatagttctaccaaatagtggcctgcctattattcattgtcttaagactttcaaaactatgcttctaaaaatacttaatttcttaactttttaagagaaggacaatcagtttgtgtaaattaatcctcttatatagaaattaaaattatccaactctcatatgttacatttgattatataaattcaatttcatataaatattttcactgagacaatatccccaaatacagaaaaattagtaaaattctaaaattgacttgctacattcaaagaacttcagtgattcatggtgaaactgctaaagaatagcagacgacgggattactattcattttaagtgcagatacaaagtaattaacaagctgttaactatcaatcctcctttaagttgtatttttttcagttttggaaataatcattaaaatttaaaaataaaagataaggagctcttggtgactatgaaatatataatatataattatcccaatgaatttaccaaacttgtcctaataggataacttcccagggatggggctttaagtaacagtaacaagatcataacaaaatatccttcatatcaaatatagactatactcatgaataatacataaataatcaaggtagattccttttaagtctttggggttactattgtgcatgattgttctggaagctaagcaagtgctattctgtggtgttcagcagcatgccacagcaacacgatcatcacagctaggtttgctgtttacatcgtcttgtggaggaattgggatggttccatgccccttgtctgggtatccagggatgtatagcatatgttatattcaactgttgaataaagtcttaacaagtataaccacttagggcaagaacattcacaatcttactaagcagccactcacctgttgtctggacgtaagcccaacaaactcactgcttcacagattaaaattcagtgacatcagacctcagttcatcattggaacctgagaaagaggggcagataatttttgtgactcctccaagacaagcattctagcagtagctgtcttctcctttaaaataacttgtaattactattttgctatacttatagatcctgagcattgacatcc

SEQ ID NO: 22204 - DNA, 1196 bp, Mus musculus
tgctcgcccgttgccccccatcgtgcactagcggtctcaaaagattcaaagtccaagatggcaaccctcaaggaccagctgattgtgaatcttcttaaggaagaacagactcccccagaacaagattacagttgttgagggttggtactatttgcatggcttgtgccatcagtatcttaaagaaggacttggcagatgagcttgcccttgttgtcttcatggaaaacaaactcaagggcgagatgatggatctccagcatggcagccttttccttaaaacaccaaaaattgtctccagcaaagactattgtgtaactgcgaactccaagctggtcatcatcaccacgggggcccgtcagcaagagggagagagccgactcaacctggtccagcgaaacatgaacatcttcaagttcatccttcccaacattgtcaagtacagtccacactgcaagctgctgattgtctcaaatccagtgggtatcttgacctacgtggcttggaaaatcagtggctttcccaaaagccgagttattggaagtggttgcagtctggattcagctcggttccgttacctgatgggagaaaggctgggggttcacgcgctgagctgtcacggctgggtcctgggagaacatggcgactccagtgtgcctgtgtggagtggtgtgaatgttgccggcgtctccctgaagtctctgaccccagaactggtcactgacacagacaaggaacagtggaaggaggttcacaagcaggtggtggacagtgcctccgaggtgatcaagctgaaaggttacacatcctgggccattggcctctctgtggcagacttggccgagagcatcatgaagaaccttaggcgggtgcatcccatttccaccatgattaagggtctctatggaatcaatgatgatgtcttcctcagtgtcccatgtatcctgggacaaaatggaatctcggatgttgtgaaggtgactctgactcccgaggaagagacccgcctgaagaagagtgcagacaccctctggggaatccagaaggagctgcagttctagtcttcccaatgtcctcgcacttcaatgtccaggctgcagcagggattctagggagaccacacccttctcttctgagctgtggttagtacagtggtgttgaggtggtgtggggaaacatctcactccccacagctctgc

SEQ ID NO: 22205 - DNA, 1196 bp, Mus musculus
cctggattgtttggggatgtctctggtaccccgctggccaacagttcattgtaatgccacctactcccagtactggaagactcctttagtgataagatggccaattggcactcgtttgttgcaggaatactaacaaaagaaccggcacgttccagcgcttgtgcggcaactctgctctggcggcctggctggccatgcactggtggggaatggcagacctgtttttctctcatgcagactctgactcagaactccaaaatctctccacctagctcgctaggctcccactggcgggtcgttaacgcgtcagcccatgcttcagtacttccacagcctctgtggtgcacctcaggcaacccagactttgacgctggaccttttctctttacccagtcaagttgccgcgagaagaaaaacaccacccaaacttagttcagaaacaacgataactcaatatctgggcgcaacaactagaatcctaatcttgtaagctatattaaatctaatttctccggtgatataagctgggagacactggtagctccatcttgtcctcacaatatccctgtccaaaaggtgtgtctgtctgtctgtctgtctctctctctctctccctctcctcccctccaccccccaagtccttcctactctccaagtgattggctccttttcattaggggattggttcacaagaagtcacctgaggacttgactcactccttgtttggagagcggaattagtatcaaaatacaaacagcaaattctagctgtctctctctacattcccatcctcaaccctgtctccttgccccttcctccctgatgctgccatttgcattctgccccaccctcagtctacccataaaatctgtttcttcctcctagggagatgcatatgccctctcttgtcccatatatgtgtgatatgattgatatagatttttatcttagatattgatttaatggctaataaccacatataagtgaatgcataccatatttacatttctgggtctgggctgccttaactcaggatgatttctttttctacttccaccaatttgtctgtaaatttgatgatgtcaatattttttgtattttactttatttttattgttttagcagctgagtaatactccattcttctttaggggacatctcggttgtttccaatttctgtctgttattagcagaa

SEQ ID NO: 22206 - DNA, 1235 bp, Mus musculus
gcatgatttaagtgaagtgaatgcacacccacccacagagagagtgtgtgtgtgtgtatgtgtgtctttagttttgaagcaaatgtaaaatgatatggttcctcgaggctttatcaaaaaacctggtattgagtctctgtagtctttgtcataattggcaaaacctctttatgtataaaagttgagaagaataatattgatttatatgtaagggtttcatggaagagaagttttaaaaatcatctttcttaaaataacatggaaatgatgcttttgacaaacctctgaatcatttgaattgaaattaacatcaaataaatttgataatttgcttaagcttgacagcagagcatcatgccaagttcaacagtgccacagtttactcatagctacttacatatgattgagtaggtgttattaaaaaataggaaaaagactgactagtaggttcaggtaagatttacatagcagtagtagggattttaggagtggagcatagaagcacaacaaagtcctgcgctgcaagatgcaagcgtcagtatggtttcttaagttctttctgtgctttgaagaggttgccagctttccatattcagacgacgggaagatttagtctttgctatagagattattgagcagggtgtacatatgtctcatggtttagcacttgcctagaaagcttaaggccctaggctggggacctaacaccatttattcattatttgatggattaaataaaataaatttttaaaaaatgtagctttagcatagagcatgctccttttgaaaaaatgtaacaaaaatgtttaactagtttgaaaagatccatcttttcctctgctctgcgattgactatttagtgtcattggtggaggcagacaagtgagtgctgagtgtccaggctctggattatgctagggttaaaactcaagtctcctcgaatctaactgcataacttccaggtttttgcctaacttctggcacaggtctctttagccatggtctgttttgtacgtgactaatgctaaaacacagctggtttttccagtgcttaacatgacattctatcaaagtttctttttttctttttttttttttaaagtttatttacttagaagcattcagaatgtcaacaaaacagccgcaactttttttttttttttttttttttgcaattacagagtggtattcagttaacagaacaactactatcttcgtataagcagcatcagaga

SEQ ID NO: 22207 - DNA, 1167 bp, Mus musculus
gacttgatcctaactaaaggagtaaatatgtgttatgtggagttcaggtaacatgttgccttttgttttattttcaaggtgggcatgttgaaactttgatcagtttggaatattcagttggaattgtctttgtttagccctcatatgaatgatggatagttctaaatagttttcatataacaccagcaggtataagcaatttttaaatttataatttagtggttacaaaagacttccgtgatattataatatgtattttattataagtgaaagtaatgaatataaatgcttaataagtatgcctgataagagtagcagcctaaaatctctttaaaaccactccttttcaagctgctgttgtcctgaacctattggtttctcaaattttgttgttactcccattgaatttgagtcttattcataagaaatacattatgtaattacaatttaatttttacatacttttccttaatttaaaaatatagactcattagattttctctttgtgttctgtttccattaagattttcattagttttcacttcccaaggacatctgacagacactggatagaatcaaagcaaatactgggtgttcttttggcatttgcctgatgtaaagatggctgtgcatagctcccacaagttatttgtggtttttcctgaacttttccttttgcagcaaagttctattttcattaactacacactattttaaagtagaagatggaggtgaaaggtcagtttgtgtcacctttggattttttttcttcgttaaagcaatggcagttttgatcgtaacagagaactacctggagtttggccttgaaacaggtaaaacttttatacaactttaaaaatcagttttagttatatattttttattttagtatttaagttttgtcagataaatatttaaatgttgagttggcttatgttctaattaacctttactaatcttcaatgagatctttattgttactgttttattagattttattaaccttgttcccaaaatgttgcacccttagttttttcttaaggtttaattaatttctgtaatgctaaggaattaatttcaaattttctgcactcatgaaatgtacaagtaccaaagggatgttttagagactgttcttgcaaataactgatttttattgcatcatag

SEQ ID NO: 22208 - DNA, 1143 bp, Mus musculus
tgaatatcctaggtaatcattcctggggaatttatccagaagccgcctttcccttgccagtggataataatctccccgccaactcggcttaccctgaactaccatcacctgatgggaagatgaaggtaactgttacacaaatcacagtggccctgagcagcttaaaaaacatcttcacgcctctcctttttcgaggacttctgtcatttttgacatggtggattgcagcttgcctcttttctacaagcctttttgggcttttctatcatcagtatttgacagtggcatgaatttcagtcaaaaacggatatccaagtcacactttaaattcaaatatctgtgcccttgaaggattgacaaaagaagaatgcaaatagaacggagaaaaaaattattggagtgttttgttttgaatgcttcctctgtactctcagggtgaattaatgttgtaatatttaaaactcatgagataggttgttacactgttacacactgtggcattggaattgtaactcattgagagaactaatgtgagagggctctctgcaggggtaatccttctgattatcttggtttacagttgcaaacctccaacagtctgttagacttcttctaggactccagttactgactgcttttcatggtgttgtggtactgttactactcatagttgctgcctacagaacaatcttcaaactgagccatgctcgagggaagggaaaggaacgaaaattacttctgttggtaatgtattagtcttaaaaaaaaatccaacagaaaggaagagaaagctactgtatattacagtaagaaaagctgcatagtcattttaaattgaatggagatataaattacctattgtctacaagtactgttacttgagagtagcaggaatattcttttaaagtgaatgccacccagcttgaaagttctttttaaatgattggccatatgaacatcagcggtctcactgttagttttgggccttgctgtattttattttttctttgattttaaatagttatgtttaatctaaaaatatttatcaatactgatcaaatttgagaattactttgcaatcctgctgactacgtgtatgtattgtgtatatattatatattaaatatataatatattgaggtt

SEQ ID NO: 22209 - DNA, 1105 bp, Mus musculus
tgaggcttctgctgatgaccatctgcagtattacttaccattatctgtcttctatggtcataaggtatatgtacatgatcaattctgttaaatcaaatcttccatttatagttcttgatgcacactacttagttatttcttcaagtttctggttggactatataaagctattaatgatggttaaatactgtagcagtagtagatgttgggccaatctaactttatactttcccctaagtctaacgaataaaagtttaaaaaggaacacttaagttctttttttttttttttttttttaatttcctgcagtgtctagcattgtcacatttcagtattatgcagtttacaaagtactttaagggatatttaggtatttctgctgtcctttatttttttatgtaggcttacttgtgcatttttggcctgcaaagtagatgaattcaatgtgtctagtccccagtttgttggaaatcttcgagagagtcctcttggacaggagagggcactggaacagattttggaatatgaactactacttatacaacaacttaattttcaccttattgtccacaatccatacagaccatttgaaggcttcctcatcgatataaaggtaaacctgctgataggaaattagctagtagagctaattctttgttattgtttgctaaaacgaattgaaaacttcataatcagtaatagactaactcgtacaacacaggtgcaacctgagagtctagggtaatagttttcaaacctcagtgtgcattagagtacacctggagagtttgtttcttaagattattggataagagttccctggtttctggtttagtaactttctataatagattatgagattatagtaatgtcattaaagaattattgtaactcttgtaaccgatatatatggtcatagatctaggcctagtgacttatagaacctcaaaaaagtcttaatattaaactaaaatataaattgatcttattttaaatgttttatgtactcagttcacaaataaaagcaccaaaattataagtacatagatgagacctgtattttcagagcctcaggaagtttaggtgggaggaccactttgaatct

SEQ ID NO: 22210 - DNA, 1200 bp, Mus musculus
tgacagttttccataattcctgaacatagtctaaaagtatttctgtagatatttgtgaaggctaattggttcaacattcgtttacatttactccccccacccccatggtatacattaaaaaaaactttgctttgacagtgatttggtacaatttctaatgtggccttccagtctttacctgagcgtctgtatcatacatatcttgtctttgccttgaatcccatagaatctcgaagagtttccctttctaagttagaaaagtactaaattgagaataatgttaagcattattgtgctaaagcgtatgattctgtttttttcttataagcatatattgctaatcatggttgtattccaaaaagtttgaaagtcatatcagtgaaaacactcagaatttggtgacaataacttagctatgtacataccaaacaatctagcattgaaagattcagttttggaatagaggaaaggaattataaaaatcattctttattaagtacctcctagttactgtagtttttaatggtggctagccaataaactcagaaatggtaacatctataaactttctttctagactcggtaccccatgttggagaatccggagattctgaggaaaacagctgatgattttcttagtagaattgcattgacagatgcttatcttttatacacaccttcacagattgccctgaccgccattttatcaagtgcctctagagctggaattactatggaaaggtattaatttgtttttacttcttagtagagttttacttcttagtagagtctgagcttttaagtaagcttcattagacaatatttctgtatatataatgccttatatctggtaagtttgtgattgaagaaagaaatcgcctttaaagaaagcatttaatcgagtattgttgagctaagagaatacatttctgactaaagtagaagtgtgacaggtagttttggaagacagttatagctaccagtgtatgatagatttacaaggcagtgttaatgcagcaaatctgatttattttatcatatgttgtaaagcatgtgtaacactttcagtaaggatttgtagaagtatgctttagggtatatccatatgaaaattatagttgagccataaataataatagcgagtacataaacacacatagatagacattacaatgagtacttaatgtgagttaattcact

SEQ ID NO: 22211 - DNA, 1149 bp, Mus musculus
actaaaaatactcagtttatgtcttgagtagaatctcagtcctttgatatagtttttatcaaaagtaataaatcctataattgaaattttaagctctttatttgcttagtgatttttttcctcactatttctcctgtgtctagcacgtactgaaaaagcttctggcgataacagaactgcttcaacaaaaacaaaaccagtatacaaaaaccaatgacatcaggtagcagcctgtgttctgcgtggattcagtatgcccaccgtggtaattcacaccatcatgtctcctttgctcttgccaaaaagaaaaaaatagagaaagaaaaaaaatagcacactttcccacattccagtgatgtgtgagctatgcaagcaaaaacccaagattctgctgaagagcaactgccagcacctttgtaagctatctgtgcagaatattgcgcactttttccacatggaatctctaccaaactctgagccttggtgtacccttaacaacaacaaaaatgctatgactgactgtgtcttgaactttgaaaatatattttcagtatatccaattgccaaagttttgctgtctcttggaaaaggaactatgaaatcaactgacaaggaaacgcattctatagacaacagaatttaactggatcgcagacagttattactgtaatttcttctttatgaacatgaccatttgactgttcactgactttctttgtatttacagtttccagagtttgacattataataggaacaatcttgctgtatactttttaaaaatactgtgctattctttctggaactgttgaaagacaatatataaaatcgatgaatctattgctcatcagctttattttttaaacataccacttattttgttggaattgtcaaagactgtatttagatctcatgcttttgttaaaatgtttacaacagtaaatagtttaaattcaataaatattattggtcattgtaccaattattgcatgttacccatttgaccattttatagattgctgatgtcttttatgtttaaacgaagtgctagaatacttttgtcacttctaagatggtttttgttatctttgattatgcagataacctaatcagccacttaacaacttacacatcttttaatttgtacttgt

SEQ ID NO: 22212 - DNA, 1227 bp, Mus musculus
atgattaggaagaggagggagtgggccaactacatgtcttctaactgcttttgagacctacttcataagagaaaatgcatgccttgtgctataaactacttagaagtccagggttgaggcaatcttaggctcaaagagggaacttacaattgttatttaacacggtgccaatctgccttctaaatattaatgtttatatccacagacaagtgctactcttagtcttaatcagagaaacctttctttctttctttctttctttctttctttctttctttctttctttctttctttctttctttctttctttctttctttcttccttccttccttccttcctttctctctctttctttctttctttcttcctttctttctttctttctttctttctttctttctttctttctttctgtcccccccctctctcttttaaggcgcatggaggaacttcacagtcaagaaatggagaaacgtaaagaaatgcagttgaggcaagaggaggatgttcgccatcgtgagatggaagaacaaatgagacaccaatgagaagaaagttgcagcaggatgggctacatggatccaagagaaagagacatgagaacgggtggtgaggaacaatgaacatgggagatccctatggttcaggaggccagaaatttccaccactaggtagtggtggtggcataggttatgaagctaatcctggagtaccagagaaacttttccttacgatgaaaagcaacaggtacagagaggtattgctactcaagaaaatgaaactcaaatacttagccttcagtaagattcctattgcccacatttaaggctcagaaaatcatatggaataggggttaagaacaatggaaaaacatgagcaaagagctgtggaatactatgctatgctctgggcataataaaatacagacaatgcagtctggatcttagaaaaagcaaccagtacatgattggcaacagtcatgaggatgggctcacatggccttccaattcctctctgaatttatgagttattggtcagttctgtaggatgacagacgttgtcttccattgtgtatccattcataaaccaactacacctcaataaatagtaacaagcctataaacatacaaagcaccctggttaaacacaatgggtatcagaacaatggataaatgaaggaaaggaactctgagagagattgtacgtgagagagggataacagagtg

SEQ ID NO: 22213 - DNA, 2084 bp, Mus musculus
gagctgggcggcgtcggagattgaaggtcattggaaacaaaagaagagggcctgtggctggttattagcgctttaaaccagcaagccacgtttgaagcggcgatcctcggttaggcccggtttagcccccagtgtaagtaaacggagtacttagtggtgactgccccggaattgttaggtgaagcctggtaaagggaagagagaggatgtggaataggaaaaagagaaaattgtactgtgattgatactgaaaattcgaataacaacggacgagaatgatgtgtttgtttctaaaagttactacttcggagagtaatttttttttcaaatattaaaaccaaaaagacccttacacttaatagggcctaccaactggtattcagaaaacctgcgtgttaaattaaaatgaaaatgttctgtcgaatgcagctgattataaaatacgtggttgctcccgacccttttattagagcaagttcagatgctttgaacgaatgttttttgccgtgttctctctttctcaacagaatttgccattttcagtggaaaacaagtggcggttgctggctatgatgaccgtgtactttggatctgggtttgccgcacctttctttatagtaagacaccagctacttaaaaaataaggatatttaattcatccctttaacaggtaattagtaagcttctaattttcctaaaacagtaatttctgttctataccctatacactcttccacaacatgcaagtagatagttgtctccagattccttaaggttaagtgtaaatgtcatattggtagaggcaatttggaaaacctattaaaaaaataaagtattgatcagtaaaggtcagtattttacaagtactccttgaccccaataatctgaatatatattatgcaacacacctctaagataagtagtattaaaaccccattgaagacacagagataattgattgagtttcaatagctagtagcactagtgtagggttcctacagaggataatcttgttctatgaatcacacttcataaatcagtgttgtgtcttctacagaaataattgaatcttcagcgacaaaagtgcactaaggatagccaacctttgacattaccaaatggtattgacatctacaaagttgatgggaaagaaaccctgaaatgttccagtgttcttttcatttctaccactcctagttatctattttatggtattaaagttggtatatcagttggtctgctgaggttgaaaaacttaataagtttctccatagacatgttgcatagtggtagcctagatcccttcatatacatatgtgtttatttagcataattcatgaaaattttggtacatgtgatgaagcaaatcagtatgaataaaatgatactgtaaacgctttctgatgtatcatcaaattgatagatgatatgaaattgctgtaacttgtaaagtcgggcttctaatgccattttgtttttattttgcagaatgaagaaagtttaagagatgatctgaaaattggattaaactcttgaactcttatactagaaaaaattgtaaataaactaatgacataaagattcaatgcctcgtctctgcaataaggaatgtgatagttattacttttgtttgatgagaactatatatgagagttggggtgacgggtcagtgcatgacatgctttcaggacctgcttataaggcctgctttgatatccttgagtaccctgatcaagagctggcaagcaaaatagcctgcttttgatcccaacacccaagaggcataaaatctctggtcaagctggtttgctaagctaactaggattaacactgaactctgggttcaacaaaagactttgctttagaaggcagtagaggaagatacctgaggtaacgttggatttctatttgcaagctcacacatgtcccaaatgagaatgcatatgcataaaacacagttgcatatgatttagactttattataatcttaaattactgggtgtcattaacttgttttttaaattgggaacatgtagtaacaatttgaatatacatactcatcctaacttaaatttaaaagtagc

SEQ ID NO: 22214 - DNA, 1062 bp, Mus musculus
gaaagaggaactgcttttctatgtttgtgagagtaaggaaagatatatgtttaagatgtctatatagttaagtctcactttagatgtctttcctgcattatattcacttgctctagctctacagacagtaattttttcttctttatgaactatactctattctttatgaactatattatgtttaccataacacaggagaatgccagggccaagaagtgggagtgggtgggtaggggagtggaggggaaggtatgggggacttttgggatagcagtggaaatgtaaatgaggaaaatacctaattaaaattaaaaataataaaaataaaataattaaataaaaaaatatataaaatatatgattattgagaaaaaggataatattctcactctatgcattataggaatatatttaagtacactaagtattcaggttaagcttacacaacttgttcatgtttcttgtaaaatgaaggccaggaactaagcaacttctaatttcagcgctgagaaggaagaggcaggttgagtagtgtaggacagaggtcatggaagttgaaatagtgagactttgaccctaaaaaaaggaaacaaaaaatcaaatgcaaatatggatggtctatattgttgttaagactcttcactgagtttcaatattcacttggctctatttttaatgtgaccctaatatcacacatgtaatcaagctcttatagattaacaccagatggctgtcatgggcctaatgatatttataatagcatcaaatatgaacaccttgatttactgtaacactgattcttcaatttcaattcaaacaatatacctgtcactacatagtttcactatctgaattttaggtttgagtcatttactaattttttactgttttttttttttgttcataaaatggaaatcatgaaagaactaaatttatattgctaataaaacaatcagatggatagatgcaaataaagcattcgtaatatgtggcatgtggtgaattctcaccaataattaaaagttatttaaaaacactgcccagatggttcaatgataccaa

SEQ ID NO: 22215 - DNA, 1198 bp, Mus musculus
tgagaaatgcattagtttggcaagtgttttttttttttttttttaactctcccataacaatgctgttttgtacatttccccctagaataatcaaatgaagctaatataatataatagtataaaacagtttagttttacaggcaaagagttggtctccaaattcagataaggtgtcctgtaatgaccagaccacattttacaggaaaatatactggtgcgtcctgtttaaatatgcgctaatgcagtgatagtgatggtcgggtttgtccaacagagacttctggtgcgtcagtgagcagagaggatttaaccgcaaggataccagtgaagcttcttacgcactaaagcacttcagaatgaaatggttactgcactgcaagacggacttcctcttactgttcctcttttctcaaacagatctgtatcaagacgactgattacatactcactcataagcaggaagagcactgcttaatctccggttacatgatggcacgcttacgttggaagcaatctgtaaatggggttaggctactctgcagtccttaaggtttctgctttgtgtttgacaaagtggtttatttttagaatgaaaaataatcctttaagtctcttcctggtctgagctcacagtgactgctcagatttcgctcatagtggagattacgaggtcagctgtagtaaaatgggctcctgacatgtgagcaagaaaatccagaacagtcaagtggaaatattggattgtagaatatttttttaaacgaaagggaccaatcccttttgtaattgatcatcagttttgtagtttgtgtatgtctgccagtcaaaattatgagataatcttttccaaaacaagatgttctagttttaataacaatattttcttgtgtatatatgctacatttatttatttatttatttatttatttatttatttatttatttatttatctctgtagcttaactcatatgttataaacaccaaattcttggaatgttttatggcagctcactatttacatgctttaatatttattttccaaattcttgtttaacattgatgctactattacctccatgaattagcacagtacagatgacacaacaagacaaaacagcagtaacaaaaacaccaaaatgggttcataatagtcttttaattagatagagatattatcataaatgaacccacatcact

SEQ ID NO: 22216 - DNA, 1171 bp, Mus musculus
tttgctgaaagtggaaacaaagtccaacatattttcagacgccacacttgccattgtgaaaggagagactgttccacttgatgtcttgcagatcaagggtgaaaaagaacaacctgtgtatgcaatgactggcctccggtgggggatccttcagagatgctggcgtcaaagttagcaagtactggtatcttggtccactaaaaaccaaagcagcccactttttcagcactcttcaggaatggcctcagactcatcaagcctccatctcttacacgggacctagagagagacctcccattgagcctgaagagactcctcccaggccgtctctgtataggagaatattacgcaggcttgcctcattctgggcacagccacaggatgcctcctcccgagaggtaagccctgaggtctggaaagatgtacaactgtccaccattgaactgtccatcacaacccgaaacacccagcttgacctgatgagcaaagaggattttatgaacatttgcattgaacctgacactgtcagcaaaggagatttcataatcataggaagtaagaaggtgagagaccctggcctgcgtgcagctggcaccgagtgcctccaagccagccactgtactctggttcttcctgagggaactgagggctccttcagcattgacagcgaggagtacgaagccatgccggtggaggtcaaactactgcccagaaagctgcggttcttctgtgatccgaggaagagagagcaaatgctgccgagcacatcccagtgagcgacagcatggcgggcactcccaggctgcactgcaagccaccagtgggaccacacggggatgtgtgtgcttctgtccccagagggtcacaggatcccaagggaattttcatggcaagtacccccagccctcctgtttgcttcctagagcacataccatgtcatgcacttgtttgtggtcagtaccctgttaacccctgctttccttatgttgaggtagttgatccctcttacacagtggttgtctcaggctgggtctagaacgttcttgtactccctgagttgggaagggctggagttttgtgattgtcccacagtggagagtggaatctgtagaccaagttcctgtttcggttctctgaccgtcctggggcaccccggggaggcagctgctgt

SEQ ID NO: 22217 - DNA, 1055 bp, Mus musculus
atataggtacttccttctaagtgtttattacggagaatggaaatgtgtttagctatccataagtggtatttgcccatcccaagcaagtgtgaaaatgtagaatagtgtggccattgcttactgttagatggagtgtatgtgctgacgttttcacttcacccttcaccccttgcatttgaatagtggttgctgaagatgacatgggaatcattatctagataatttaaggctcaaagttaaaactgctctcagaaagaaggcatttaaggctcatccattcccttcatttacaactaacagaaaaggcaaataaaacctgaacagaaaccagctttgaaatgacacaatgaaagcaagcattgaagcatcgtgcggtgtcccataagtatggtcagactttatgttttatacatcaggtcaaaatatatattcagcaaagaagagtagaggaagagcagactggagttggtcctatgttgactgtttcccatgaatgctactttagcttagagggaatgactgtgctcacaagcatacatagtgtcttagacatggtcctgggtctcagcagtaaatgtaattcatcctaatgtgtactagagcacagaaaatcactgtgttgacttactagggctttttttctttttcattacaatgcacataatacttccctgtatttatattataacatgtatagtgtaaaatgtgaatggctttttttgtgaatgaaaatctaaaatctttgtaactttttatatctgcttttgtttcaccaaagaaacctaaaaattcttcttttactacattgtgacttgtctgtttatttccacctttaggccctaatacccaccaaatattttatgttctggtttcatctcagggaacaagctccttgcctggatgaattaattttatggttagtagggaggaacaacaatgtgaaccaaccattacacccagagctcccagggactaaaccaccaaccaaagagtacacatggagggactcaaggcttcagccgcatatgcagcagagaatggtcctataggacatt

SEQ ID NO: 22218 - DNA, 1135 bp, Mus musculus
attcagcgacaccttccaactatccggtgcctaggaaacgggagatgggcaatgcctaaaataacctgcatgaaccgtaagtggtcctttagaaagaacggacagcgttgctttaacagatactagacacctacattttaccgctgtggtatccgtagtttagggtatggagcaagtaatactgttgtgttttcttctttctttgttttcttccatgtagcatctgcataccaaaggacttattctaagaaatacttaaaaaattcctcatccgcaaaggacaattctataaatacatcaaaacatgagcatcgctggagccggaggcggcaggaaaccaggcgctgatccttaaaatggcgaacatgtgcttcactcatcatttcagccaaagtcctgcctttccgtgcctttcctatcacctcaagaagaattagaagttggtttggattatgggactgccgtctggtcatttggggtggctgtactcttaaaatattttcaatgaaacatggaattttgaaaaagcgaataaaatgaaagaaaatgaacgaagaagataaccattttcagcctatctaatttctttagttctctcaatgcctccagtgcagactgtttcctgtacaccagcctactgtactattttaaaaaaacgcaatttcagcaccgatggccatgtaaataagatgatttaatgttgattttaatcctgtatataaaataaaacatcacactcagttcaggcatatttaatgatgattatgcagctttcaaggtctttaatcgttggtttggctgctttgctatagcttgcttaggctggaaatggttttgtctaccctttgactgtcagcaagtttgaggacggcttttctggacagccagcaaacagcatcttgcaggtctctgcacgtgtgtcagccgcgggagccacactgatgcctggctgattcctggctgatgaaactctcgctcggagctccagggtgtaactccgctttgtcatgttcccttttcttcacttacacgaagcgcctgaatggaggacttttctatgacctggaacatttttttaggggtcaaattgctaactattaactcaaccaggtttcatttacaatggctttcttaa

SEQ ID NO: 22219 - DNA, 1170 bp, Mus musculus
attatggtatatagttttattatatggtaataatagttttctcaaaataaatatgtgactgtttgctctaccgcataagcagctgcctcctcactgtaagaagtatcacgtcttccctcagcatttatcaaatctgggagagaatgaggtgtcgacctaagcccttttcctcctcctcttgcaggcgatgtgttccacatcactgctcccagtaagttcaccttcgaggaggccgaagcagagtgtacaagcagggatgcgaggctggcgactgttggagaacttcaggcagcttggagaaatggctttgaccaatgcgattacggctggctgtcggatgccagcgtgcggcaccctgtgactgtggccagggcccagtgtggaggaggtctacttggggtgagaaccctgtatcgttttgagaaccagacatgcttccctctccctgatagcagatttgatgcctactgctttaaacgtaagtgtttgatatctcttttaaaaatacagattaaaaagctgcagcaaatatatacccactgaggttccagtggatgtcgggatggattctgtattctgtactaagtgcatggaggacctacagtgcagtgacacaaacagacttaataccaccattatggttaacacagtagggagtttggcaagtgggattttttttgggaggtggggagataacaacgtcagagtggggtcttaactgcaccccagaattccaaaaatcacagaacacaccctgaattgaaatttcttattaattgaagcctttcaatgcaatttcactcttaatataacaatgttaagacaacagcagctgagttaaacctttgaatcctgttttattttttgatatgattcttattataaaaaggagacaatttaagcttaagtcattgcaggtgagtatttgtgctgaaattaataatgattgtgttcaattcctacctaaaaatgcatcatactatcaaataatacgattcacatatctcattttgtttcaagtaatagaataggcgccttttggcgattaatcttgctttgaattaattaaagtacaatacagcctccttgcatgaattggctatgctcagttagatttgccttgtaaaattaattttaggtagcattcattacatatatatatatgtatat

SEQ ID NO: 22220 - DNA, 1209 bp, Mus musculus
acttaaagaaatcttgtctaagatcacgtgaattgacttcttggagcttcctccatctcttgtctctaggacttcctaaagattcccttccccaaaccttggcagctgcttatttccattcaatctcctggccctcttggttactctcctgtctctccccacatctgtccctattcccctccccctttcctctcctctgcacttccctccttctgccttttctgtctattttgttcccctttctaagtgtgattcagtagcctcgcttgggccttcattcttgcttaatttctttggatctttggggtgtaccctgagtattctgtgcttaatggcttcagtgagtacgtaccatgcatgtccttttaagtcttttttacgtgactgaagatgatattttctagttccatccatttgcatgcaaaattcatggtatccttgattttatagctgaatagtattccatggtgtaaatgaaccacatattctgtatcgattcttcagttgagggacatctggactgtgtccattttctggttattacgaataaagctgctatgagcatagtggagcccgtgtacttgtgttatggtgaggcatcttttgggtgtatgcccaagaatggtatagctgggtcttcaggtagaactatttccaatttcctgagaaactgccagattgatttccagaattgttacacagttgcattcccccccagcagtggaggagtgttcccctctttctacgtccttgccagcatgtgctgtcacttaactttttcatgttagtcattctgattggtgtaaggaggaatctcagggctaatttgcatttccctaatgactaaggatattgaacatttctttaagtgtttctctgccatttgggatttctctgctgagcattctctgtttggctctgtaccccattttttaattgggttatttggtttttggagtccaagcacatacacactaggagcatcatacatactgaacagttagctccaaatatgttcctatatatttacacccaaatgtatattgccaaatatacaaacatacatacatgtaaaaaaaaacaattaataaagaggggctatgaatttgaatgaatgcaaagtggcatagatggcagggtttagatggaagaaagggaaagggaaaattgtagttataatctcaaaaatgttttaaaaacaaatgttat

SEQ ID NO: 22221 - DNA, 1112 bp, Mus musculus
atctgaaaatcagagcgaaaccttactttattatatagcagaatatctaggatatattttttccacaatttaagagcttttaatattcttcccaaatcatattctctctctctctctctctctctctctctctctctcacacacacacacacacacacacacacacacaaacacacacacacatacacacaaacacacacacacacacaaacacaccacagttttatttaaatattaaattagaattacatattaacaaaggttttgctccttatccttaaagacttataaatgaaatttttttttctctcaggttttctgagaaaaatgtggcagagactaaggatagagacatatcatattattactctggcaactaagatgggatatcaaatatggaaatatgtaaattccataaacgtatcaaaaatgtagtttaaagtctggtgtccaagaaaagtcagagattgataggaacaaagtgcctgcatgttagacatgcatggaaggtgtcacacatttactggaattccgtggtgacttcagtacctactcctctgacaccattcattctataggcatgtatgagatgtgatagcaggaagggctggctctacctccaaactatgtggaaattgatgtgaatcatcaggtgtcctttgtagtcctaccttcataactcagacatttatacaacagagtttctgagaatccccacggaaataatttatttgactgagtttccagatgttcttaagcaccatcaaacaattcacctccattatgcgctctccaagattgacaagtgcagggatgctaacagcccatgcagcagtacttctccatagaacgggtctggatacagactaaaattctttaatagtcagtgattttataataatacaaggagatttcgaacacaattataatgttaggcactaaagtacgttctcagaaaaccctctagtgtgcctgtgggatcgccttatggtcctctcacaatcctgtttagaaagttgtttgcttcccacattgatggcccttgctgtgagtaacgaggtcatgttctgagtgataggacacatgtgaaaacgttcagcaccacctcactt

SEQ ID NO: 22222 - DNA, 1212 bp, Mus musculus
aactttttttttctagaaatgtttttctatattttcttactggtaaatgagcttgtcagcaagaatgaatcgaggatttcctggtccacctttctctatttccagggaaaatccgtgttctgacaaaacacctgaggagcatgggctttatgatggaagcaccgatgaagaaagtggagcccctgtgcaggctgcaggtgagaggctggacctactctgggttcatgtgtcacatgggcttatcactgtcataagaaaccaaattgaaaacacgtatgaaaaaaattttccatgaaattgataaaaaattttgccctaaagaatttttaccctaaaacttttaaaatattacattaatattaaaatttatagtagactgtagcagttagtaataacaaggcacacaagcaaatacacacacacacacacacacacacacacacacacacacacacacacgcaagttaactagatggaccttgactgttaaatgagaatgcatgaataagaaggcagatgcatcttatgttaaatatcaccagctcagaatcagaacttcaactcagtgagctcatggagctggggctatagctgaagcagggggaggctgaacctgttcttacgctttagagaagagcttgctatggagtgaaagggcgcagagagaaaagatgtctagttgcactgttttcaagcagtttttatcttactggctttttgctagtgcgttacggtttcagatcttgtgtttttattggttttatttgagtttgtgtgtgtctttgtgtgcctgtgtattttctttgttttcatgtggttgttgttgttttactttctttgttttcctttgcttgcttgtttcggaagtggggatgaaagctacatttgaatgcatagagtgaaagggatgagatagaggaagggaacccctgattagaatatattgtattaaaaattatattcaaaaaacaaataactttgaaaaagggataaaaccccgaagggaaaagcatcttggtttataatttgttagacacctgcaggcctgtgaaccatgtcctagcaggtatttaaccctatgagttattttctagggttatgtagaggcagtataagtgcatagtaatatatgggagcagtagaagtaggcaagccctgaactcctataacactgagaaagttttgcctaaaccccatataaaaccagtttta

SEQ ID NO: 22223 - DNA, 1409 bp, Mus musculus
ctgggccattgacagggcaggatatgtcttgcttccaggtagtcttgcaagatagtcaaaaggacacatgtcaaattggtcttaatagttttaaaaagttaaaattccaatatggtgtcctattgataccttttctacttaggctggaaactaccatatatgtttcaattcaaggtgtttcctgctggggttagtaagaatataaatttataataaatttgttcatcttcttaataaaattagtcttgtaccatagggtgacacagagttccataaattaactcttccaagtttacaaagacaaacaaatccttgcctccatttgtgaaaattatttaacacttgtaaataatatttttttcaggaaacatttacacaattggtatggcatgtgaccattgaaaatagatgagttgtttctctgtattcataatgtacatgaaagatgaaattaatgtctatgaagtataatgtgctaattcttgttattgacataatcccaggattctagaaaaaaaaatgaagagtgatgattcattgagggtagaacttctcagagatcatgagttaaactgatcttgacagtgtttttttttttttaaaaaaaaaacaaaaaacaattctatgttagggattgtatgtcccttagtttgtgaggtatggtgtggccataaaggtcaacggatgttatattctggaaagtcatgtattttacctacctcaaaattgaagttgagattgtcccctcctgcctcacaaatccttcaggaagataataaagtctcccttggtttatgagtgagcaaagttgactaaggaatacactagtagattctcctgagacttttgtaaacattgtagaggcaactggccagtcaaggctgtgttttcagaaacttgtaaaatctcgtattctatctgctaaaagcagccccagctgttaaaacaggcacccatcccaaaagtgcacagtttacatttcctggacatacagaaaatatttctacttatcaagaacttaagctccacaaaagcctttgagaagctactctgtcattactatctgaaaacatgaatggaaaattcttagggctgctcttctcttcctttgttaccttctagtaataataaatgttctcaaacggtgctagcaatcgcccttgttacagggggtcctgactaacttctgagaaataacttcatatcatttccactttgccctgaactaattcctaaataatctgacaggccatttcagtaccttttgtagaaagaattcctgtttaaaagaggtagtcgtcctagtctctggttagttcatacatctgctgtgtaataaaaaatgaactgtcagaagccgtctagttttgatatatcacattgaaagagagcagtacatggagcttaga

SEQ ID NO: 22224 - DNA, 1223 bp, Mus musculus
atgatggtgtctctcttacccttagctacacctcgggtctggggtcagtttgcatcgtctttattaggctgggccctaccttgttcacttgtgttccaacagcgacctatccagttatctgggaagggttttgttttgttacagagagcatccccacacctgctggagtgggtggttttattttatggccactattcttgaaataataatactgctttatttatttatttatttatttattattattattattattattattattattattattgcttttgttttctccttattctcagatccgctgatcttagaaactgcagcatgaagaatgccaagagctgtacatggaaatgggactgcaatatctcacatcaccaagatttgatacagatttctttcctcagaaagaagacatctgcagaagcctgtttggaatagaacatgtgtggaagaaacatgtcacagattccgatcactataaataacaagaatgaacctagtttggtgatgatgtcatttctgacgtcatcagggcgtgcacaggtcgtttttgcctaggcacagttctcctgctgtggagattgatggggaagtgtatttgtgtgctcgctttagtgaacgatgaatgaaaattaaaatgtagaacttgcctgtttctgaaaattaatgtaataaatatgacacatcttaaattattctcccacagtcaaattcaggagcaatggattatttctctatcactcaccaaaaaaaaaaaaaagtgtgtgtgtgtgtgtgtgtgtgtgtgtgtgtgtgtgtgcgcgtgtctgtggtgtgtatgttaacacacacataaaaaattagatgcagaataaagaatagctgatcattttaatataataatttgttttacaagctaagtatggaatggtaactacaggttttttaaatagctatagaaaacatttaagcattgcaaatgccttttttttttttataaaaataacacaatcattttccttcttcctgggagacccacgactgctctgttgaattactgcaggcctctcttcatagccctacaatgttctgtgtaatatgagaataacaaactgtctcataacgttgctgtgagaactatatgaaatcattaacacacaattattgaaaagtgtatacaaatactaattaaatactcacctgctgcataattgactactgttactttgtcccatatgttt

SEQ ID NO: 22225 - DNA, 1245 bp, Mus musculus
tgtgatgtctgcctgcctctcagatagtgcagagtagttccatcatcaaacgtgtctcccaggcaaaggcatcctcacaggtctaccctgccaagtcagctgcgtcccaagccagagctcagctcccactggcctttacctcctgctccctaacctttctgttagttggcagcagggctctgtcttctcctctattgtaaagaatcctaactgaggaagaaggacattgcggtgatcactagttgctaattcatgttacagttttgcttgcatcaggtgttttcgtgttactgtttttgtccccctgtcctcatcttgtccagtcagtataacagctgcagatggagtcccagagcttccgagtgtggcagtttggcacacgtgcttcttcctggtgacacggagcccctgtggcttagcattgcgcttgcatgtctagtagctccagtgtctgtttaattggattcttttgcctaaatttaggattttatttttactggtgctaagtaaaaattttgcctgttatgacttgtttttgttaatccttgatctgctcagttgacaaacccttgttgttataatataaggatttgataagaccgtttgtggcagtgggggctcaacaggtcacgtcagatctccttttgaagaatgctctctgagcaggctgtcttacaggagtgagtttactccttggccaagcagtttagaatgctttcagaagtgggtaatcctgagtattgggtctgcaaatcaccaaagctgtgaaatgtatagagaatggagtctgttgcaggtatgcaaagcagtggattgagggtgcagtgttgatgagaagaatttactatatggaaggaagttatcaaggttagttaggaaaaacagtgtgtgttagtaaattcaggagaacacacatggcttacaaataccacatagccaaacaaaggggggcaactgtagggtatttccattcttgtgaccacaaaagtgagtgagccagaacatactgggaattaaacaaagtagggttaagttttcattaaaggctgtgctatgcattcaccattcctggttgccctggcaacggggctccttcgaatgctaatgacattataatgagaaaaaagcccacatatgcaaatgcagtaaatagtaattagaggcagagccatacgtggaatggcgagccccaccttgtgaaggtctgggaggagttggtgaggggtttgtattggagacaaagag

SEQ ID NO: 22226 - DNA, 1193 bp, Mus musculus
actgtgcctaaaagatccattaaacaaaagagcctctagcatgtaagccccttgcccaaggacaaatattccctaagatgctggaggctattgttcatataagataacaagcacaggtttccacttcccaaaacaagtttggttgatacaactgcattggatgtatttgatcccatatacacatgcaggaaatacatcaggatgtatgcttgtcccaagtaggacaaaggtgggaaacatagccttatatgtatgctttataagcacctggacaacttaacttagttcatggccattttctggaagcacctggaatggacctgaccagagtccatcatcctggccagtatttaaattaaagcttgcctttccgcgctacccgggaacgggtccatacatcgttgttcttgattcccatcgtaacttaaagggaaacttacacaatgtccggagcccttgacgtcctgcagatgaaggaggaggatgtcctcaaattccttgctgcgggaacccacttaggtggcacggaccttgactttcagatggagcagtacatctacaaaaggaaaggtgacggtatctacatcataaacctgaagaggacctgggagaagctgttgctcgcagctcgagctattgttgccatcgagaatcctgctgacgtcagcgtcatctcctccaggaacactggccagtaccaacattataaaggaagtgactttgattgcgagttgagactgttgattcatcagagtctggcaggaggaataattggtgttaaaggtgctaaaatcaaagaacttcgagaaaacactcagacaacaatcaagcttttccaggagtgctgccctcactctactgacagagttgttcttattggaggaaaacctgatagggttgtagaatgcattaagatcatccttcaccttatatctgagtctcctatcaaaggacgtgcacaaccgtatgatcccaacttttatgatgagacctatgattatggtggttttacaatgatgtttgatgaccgctgaggatgacctgtgggattccccatgaggggaagaggtggttttgacagaatgcctcctggtcagggtgggcgtcctatgcctccttctagaagagattatgatgatatgagcccttgtcgaggacctccaccacctcctcctggtcgaggtggccggggt

SEQ ID NO: 22227 - DNA, 1196 bp, Mus musculus
ccactcactgggctgtatatagcaaaagctaggcctcacactcttcactgtaagccacccttgaactaaagttgtccagattgtttcaactgtcctcaaaactttcatctggcttggaaggagagtctgaggactgcataattatctaggtcctgggaaagaatcaggctttgtagaggaaataatttcaaattttaaactaagtaaagccatataagctggcttgttacagttccttattttcctgaagttaaaggtgtgtgcttaattgctcatagagcctagcatccatcccttgcctctgtgtcaggagaaccctgctgacgtccctgctaacactggactctctgtccctgtagtactcccccagcatgaccatgagcgtgtgatccgttgccgcgtctctcatgaaaaccatcgtgagtcagcccatcacagaactactacagaagaaaactactcgtcgtgtacagttagacaaaggaatctcagacaaccagaccaccttttagttcctgctctctcccctattttgagaagaaagcgggtccaaatgtgattcaagcaactgtacggagcggcacattagcattgcccccaactgaactgcgatgattatctgtgtgtatgtgtgggaagagaatgcatcgtatatgcagatctgtatgcacatatacgcatacgtgcattgacccacaggacattgtaagatagtatcacatgacatcttaagtagaagtaagtaggacttttatgccatcctttttttcacgtttacactttaattattaaaggttgctcctgcccttccccaactattttgtgctgtgtacatcactgctttatataagttattttttaaggtgaactcagatgttatggttttgtaaatgtctgcaatcatggataggaataaaattgcttatttgagagctttcattcactgtgtctgaagcaagttgcccgtgagccccaggttgtaccaagtagagacagtgacttcatcctcatgtccaaccaggcacccagttaccttctgtgcaaagtagtgtggtgctttgtatataaggaaacccctcaacagtagctcagccagggcttcatacagtacacttctgcaataactgctttaaattgagttctttcttgatttgtgtgtcttagatgatgcagaactcattagctaactcaaatga

SEQ ID NO: 22228 - DNA, 1198 bp, Mus musculus
ttgtcaaagagttcatctataatcatgccttcagctctattgtgtacctggaattgaactgatcagactgattgttcccttgaaactttgtcccaaattgttctgggttttaaatatgctggcaaagaccattctagcattagactccctaaagtctgatccagattgacaaagtcgatctgcactgggttttcagtcttatctctttgcagggtttagtgctctgtctgacacctgcacaccggaccccctcagagacagggaaatgtgctctgtatatttgcctcatgagctgttcttcatcctaatttgtttgtgacttccttgtatggaacctgtgtgttattaagccacatgataggaggaggcagggaagaataggatgaaagcatcttcctaggcctctttaactgactgtggcatagtccttgacattaaagttggcaatgtctatagtctgaattcctaacatcgcacattgctgttattctgttctcacagggaaataaatgcccgacttgatgcagtatctgatgttctccactcagaatccagtgtgtttgagcagatagaaaaccttcttcgtaagttaccggatgtcgagagaggactatgtagcatttatcacaagaaggtaagtggtgaaaatcaagcctcctgagactcagtgtcccttagataacaactggaggtcctgatggaaaaccacgtgcatctcactagagcttataagtagcacaagaaaacaactgtagctgcagacattttaattgtacaatttaagttgtttgtattccagtatttatagtcacaaaaagttttctcacttcttgagactacagcaacacagaagtacttctattaaaatgcaagatgctgtgttatgtcatccaagttcagaccattgtcaaaatgagaaacttactttgatctgcaactttgaaaaagagaagccttaattttttaattttttaaaataatctttgccctaaacaaagggaaaatccttttccatcctttaccctaagatggtgtccatccttgatgctaacatgtgtttcttggatacagcagcaggataaatcctgtgtttgaatcctttctgttagtttatttattttttgttgccagaattgagaccatccatgttgagagttatcagtgagcagtgttggcgcctgttgctgagttgtgtgtg

SEQ ID NO: 22229 - DNA, 1122 bp, Mus musculus
gccatttacgggaccccatgtccattgttctttggcatctgcaatgaaatggttccggcaccttctttccttggtttcgggtgtataatattgaacgaccaatggagcactaatgtggatcatcttgggataatatctgttgtggttagttttagttgccaacctgacataattaatctgggaaaaggtgatctcagtgaaggagtctatgtatgtagggtagtatcttggagagtgggaggacccagccactgtgggtgagccattccctaggtttgggtctgaatgttaaaggattggagaaagagagctgggcagaagtatattctctatcagtgcttgactacagatgtgaccagctgcttcaagttcctgccacctgatttccctacactgctggactgtcacctggaattgtgtgcctaataagttttccccctgcattgctttgccagggtattttatcacagcgacagtgcagaaagctcagacatcattatcatttctcatccttttgacagtgctgcttcctgttgtttgtcaggcttacccaacctttcactgactgagctaatcggatgattctcatggctcccctactgctttattttaatttcttagaaggccttttaactccttcaattaaaaaaaaaaaaaccctccaaattacgtgaattgttttatttttaaatccttgaagtcattctttggtcattggcattttaatctgtatacagaagttaaaaatggaactattgctacttagtattaacagatttgtgctaagcaacaccacacacccctttactgtctccctgcccacataggcatctgtaattagtcctaacatgttttctcaatgcgactcctcactagtctcagtataacacttcaaattactgctacctgcttcttggtgctgaagattccaggtgcggctcttcttgttcacttactttaccagaaataaccatctttgtaggtatttcttaaggtctgtttatagttatttccatttctttcataatctataccctactccctacccaaatgcatcccagcttggttttcaagacagggtttctctgtatagccctggctatcctagaactaagtttgtag

SEQ ID NO: 22230 - DNA, 1102 bp, Mus musculus
tttcaaaggacttgagttcaaatcccaacatccacatcaggtggctcacaaccacctccaacttcagctcctccggcctccacaaatatcagtactcacaaaaacatataacatataggcatcatttttaaaaatataagcaaatctttttttcaaaatattttatacgtagtaagactgaacagctgtaaacacgcatttaatgcctagtacaaacttaactaaaacaagtaccttccagtctctgcctttcagcacaggttgaggagagtgataccttgtgttttgttttaaaggaagccatgaatcaaccaggccacctcagactctttgtgacaaggatcatgcaggaatttgaaagtgacacgtttttcccagaaattgatttggggaaatataaacttctcccagagtaagtatacaattattaattagtgagaagcactttaaggactaactacagaaagaaggggaagcaagtaagaacaaagcacaatgacatatggatgaaaatttacaaggctcagcagaagccataactgacatacaataaattagtaataaaaagaggaaagagaattataaagaagagtaacttttcagatttgatttgacatagcaatgtgttatgtagaaagatactttttaaataatatttttatttatttgaaattttcatacaatgtatttggatcatattcatcctctcctccaccttcttccagatcatgttctctctctaagaacaaaaacataaaaaccatggagtccagtttgtactggctgaactcccaaacatggggccagcttggaggatggctggtagacacagttagttttgaagaaaacaagcttctcctcacagcactgtccgctggctaagggtgggctttgtccccactcctgtgcagctcttgtgctgtcacagtcactgagctctctgtgcatctgtgtcctatctgcaaaactctgcttcctggaagccacccaccacctctggctctacagtctttttctcccttttctgtgtagatcattgaaccttgaggaaaggagcatgtgtgctacagacatcacattagggctgagaattccaaagtct

SEQ ID NO: 22231 - DNA, 1161 bp, Mus musculus
ctcacattgtgtgaatatagatctcagctctcccttctcatttcttcatttttgtccctattctcaataagaacagacttctgtgtgatcagcttcatttaaatacctctctaatgcttaccagcttttttaaaaattggatattttatttatttacatttcaaatgttatgacctttcccagtttctctgcaaattccctatctcgtccccgccccctccttaccctgcttctgggagggtgctccccacccacccacccactcctgcctcactgccctagcattcctctacactgggcatcaagccatcacaggaccattgatgccagataaggccccttcgactccttgagtcattcccctaactcctccattggggaccctgtgctcagtctgatgtttgtctgcaagcatctgcatctgtcatggtcaggatctggcagagcctctcaggagacagctgtatcaggctcttatcagcaagtacttcttggtatcaccaatagtgtctaggtttggtgtctgcatgtgggatggatctccaagtggggcagtctctggatggcctcccttcagtctctgttccactctctgtccctgtatttcctttagacgagaacaattttgggttaaattttggagatgggtgggtggccccatcccccaactggaaggccatgcctaacctctggctatggtctccacaggttctccctcccctttgtttcacctaatgtcatctctgtggggtcctgggaggctcttgctttcctggaatctggaactttctggttgctaccctcagttccccatcctccattactacacgcctctgttcaatttcctgaccctctgtatacctcctccatctcctcccatacctgattctgcccctcttttccccctcccccttctctcttcctcccaagttcctgccaccctccatttcccttgattattttgttcccccttctaagtagaactgaagcatccactctttggtcttccttcctcttgagcttcatgtggtctgtgaggtctatagagggtattccacactctttggttaatatctatttatcagtgagtgcatactatgtgtgttcttctgtgacttgagttacctcactcaggatattttctagatccagccatttgcc

SEQ ID NO: 22232 - DNA, 1115 bp, Mus musculus
ggcaagggcagaactggaatgcatttgcccaattgacttcaagaagtttaactacattcatgtgaggaaaatgatagaagtctttaaggtaattctttaggatcctgggaaattctctcaggtaaagaaagattacagcagatgagtaatatatgtcttgagagctatttataaaaattgtaagaggatcattttgtttccatttattaaaaagttaaacttttttactttgcaaagaaaatactacaaacatttttatagtcataactgttaatttttttaaaaagacttttttttttggaaacaattagctgtagccaaattttgtggttacatttttgctatagtggagtttgaatgcaatctgtgtggtaagtctactgtttgtttataaaggtctctgacatggttagattttgctaccttttaaaatagttatttttccccattagccacaaagccaattatggatttgtatttgtgtttttcaatgctaatttttctatgaagcacctgaaattgactagccttttcctatgtagaaaactcaaacatgttaactctgtactttaataaaatgtaaacttgaaatcatgttgtttgttttctattagacacctgactaaagtctccagttagcctttgccagagctagtgccttcttatgtcaaccagagttcaaacattttggcagctatactgatgatggcttgtgattgacaaataaaaatgggtgatttgtggtatctaatttaaggccttgaagtacaaatagaatggctaaatcaagctagttaacatgtataacttttttatggtgagagcacgtagtccacctgtgtaacaatttaaaatgctgttagatacaatcatgtttcagagcacttcccttgaacatagttcttcgaagcttagctgaaattctgattcttcaacatgactcaaaagtccttggtaaccagttttacaatccacttctgtgttgacctcatttgttgtttgtgttttaggagctacaagttgaatacagagcttcatgtatggtaggcaggaacaatatcactgaactacagcctagacaccaagtctaaccttggctttcttaagacaaattt

SEQ ID NO: 22233 - DNA, 1150 bp, Mus musculus
cataaacactcataagaagcttcttattgtatttttggtagtaaaataactttattaaagaatctacatacagtggcattccctaacttatctaacataaattcacatacattttaacagtttgtatatttgtaaacctacaaacacaaggtttaaaaggttctctgttctataagggtctctgtgctcgttatagttagccccttttctgtaatttcattttgcaaatctgatatacaatactcatcaaaacataacttcatacccctcttccctccttcgacagcatttttgcgttctctgtcatgactgcgtacctccagtatgagtggagacatacagcatttgccttttgcgggctgatgtcctcatgtggcatgatgtcctcgaggttcatctgtgttacagtcaattacagaatttccttccactacatgtacctgtatacttcattttgttggtccagccacccactgaaagacactgagtttccctctaccttttgacctctgtgactaacgctgttatgagtctttatgtcttaaaatatttatctcttcaaccctgttttactagtccagtagcatattttgctgggcagtttgatattaatatacatgttttgggctctctttttttcctccttgtgtttcactttgatttctaataattttgtgcaattatattaatttccctggacctgtcaaatccattcttatttccattatttttaacactgtcacttgattcttgcttgcagtttccatttctctgccaaaattcccaatctgatagagcttggcgtctcctcttctagtaagagcccatggatgcttccccttttgatatttagtgctctttggtacacattgcaacctattgaatgttaaatattgcataaaaagcaacagtggcttagagcagttgtcccttttatccatgggggattggttccaagaccctttgtcagtaccgaaatctgtgggtcctcaagtctcttacttatgtcaggttgaatggtatttgtgtatttatccctctgtacacttaatcttagatgaagttgactcatataataaatatgctatgtaaatacttaacactttattatttagaaaataataagaaggctgtttatgtttagtacaca

SEQ ID NO: 22234 - DNA, 2187 bp, Mus musculus
gtttagtctagcaatgttaagtatatttacagaaaatatgcagttacatttatttatatatttggcaagaaatcttttctgagtgatcaatgcatttcaatttatgaaaaataatggttagggggcactgtttattatagataattttaaggtatataactgttttcaaggacggccacttccacctagcggtcaagccgagaggactgcatctaaattgtgactgtggcagatgggtcttcacagaaaccatgtctttattcaaacttcacaaggctatattttgaactgttaactaggcatttcaaaacaggagataccttcaacagactcttctccaagagcaggttttactgtttttttgatgtaattttaagacatttagcaaacatgcatttctttatatgatacatttctttcacaaaacaatttaaaagtaagccaagtgctgcctgctctgcgagtaggaactgcatcagaatcgtgtatcttgctgtacaatgcctgtgatagtgaagagggttcttcttagtgtatgcttgggtacctaactctggagtcaatgaatgcacccaattttttttgtttgtaccccaaatgattgaattgttaaatacaaattaagcagattaacccatctttctcactcaaacagattctttagtatgttttatatttatgtgtatgtatgtcaatacatacatactaatttatattagaatgaaaataaatcgtttgtttctaaaggtagtttctacagtaaggtgtctctgacacatgtgtatcagacactggaccaccatgtattctctgtgctattccatcctgcctgtcacctccatcaaccttagggtatttccctcacctgtctattatagaaggaatcttttgggtacacatgctcagagatgagatacttctctgagaaatcaggtaataaaatttatttgatggatagaattttgaaaacatatgattttatctatgagtttctgaatatcaaagaataccacgttttcatttaaatagaggactaacactagggatcagggaatttagttatgaagagtttcaaaaaaaatccaaaaaaaaaaaaaaaaaaaaaaacagtgtaagctgttgatatggtaagcgaattattttaatgatgtaataaaatatttttaaattttggcatagtgatcatttaatgggaaaataactcaccaaaatgtctccacttgaattgtactgataatgtgaggcatatgtgtaattcaatatatacatatacctatatgtatatacagaaattatttttaatattttcctactgctgtgaaatttaaaattggaaaattttgtgagtgttttccatgtccaatagagcctaattgtttctttttttagtaacttaacaatctcttgagggctgcacctataaattcccagcttgtcagtagacatgtacagtgtttgggataaggtggacacaagtgcacatataaataaaaccttcttcttgactattttaaaccttcactcacatgaggagagcctctagaaatcatagcctctgagctataggtacgtcactcacacaaggagagcctccagaactcatcgcctctgagctataggttgtgtgcctactgtagcttttccaccgctgtattatatagacatttgcatattaaaatttgatttttcccagagataaatattatatagtgtatctatatttagatcaaactgtggtaatatattgatcagaacatagtgttggggactatagcctgaacatgtggacttgcagtgacccaggaggagagcaggggtcagtcccatctgtgtataagttattataactatgaaatcttgtacaaaagcaaaaactggaaaaaaaacaaaaatacagtttttattttgaaatacatttgttctctggagaatgtacttgatcgtctcctcagtcttctaaggctacttaagcgtttaagggacggcagcgtttacttcaaccctacaggtgctactggattctgcattagtatgtgatgttttaaaatcctaactttgacataaaaggttttataagtatttccctgcctggaaaattagtttttattcttctttcttcatccccttctctcgctctgcctctctagacttaaaaatgaacattcatgacattgcattgctccttgt

SEQ ID NO: 22235 - DNA, 1163 bp, Mus musculus
ttttagagtgggccagtgcagaggactgggacatggggaagggcatgacaaagaggggcagaggcacattagaacattgttgtttatatacaaggtttgaacgaggcattgctcactctgcggtactggagagatggtgaggggattttgttgtaaagaagtaatgcaaaatagcatttataaaaccaggaagttatgggaatgacagtaatcctgctgagagtctggccctggagatggtataaaatatgcagtgatgggtctgaagagtgtctagggggtgaaatgagtaggctgtcctaacttgtccaggtgctgtgggagaatacaaggtgactgctgggcatcttaaaccatggggtgagttgaacaagaaggaaaagcttgaaggcagagaccagaagcatggattcatgtctgttgctctttcgtgcaagattgggcgtgactggagtaaatgagtttcagtgtgaatgaatttagtgtgtatgaaaaatacccaagtgaaactgagtctaggtgtgaaacttaggggggagatgggagctgaaattagctacttaggagtcgacactgtggcagcacttgggagcctcatgacagggagaacccaaagtgaaggtgagaattaaggccaggtgcagcttgaagaagagtagacagaggggtggcttggcctgcatggtgggcctctagaagccatgagtggagttccagaaagccatatttcacatgaaaataaagccacaactcaactcaggtctcagggtgatgctttaaaatgtgttccattgagatcctttatttgttttaaatatattttaggtttaaaggaattaaaaaccaacaaactgaaatgtactatcttagaatactgagatccactacatataacatggaaaaatattgaaatctgggttaactaatttttaaggcaaattggtaggattgctgctgatttctgtaggaatcaggactttctcagtgtagcacagaaatggcacctgaggtgatatgtgtctccttgagattcattttaacatttataacaacagccttattgtctttaatggtgagctgatcagattctccataccattgtttgtcactgtattggacttcatgttgttatgtcaggctgggggggggggggggggaggggg

SEQ ID NO: 22236 - DNA, 1177 bp, Mus musculus
aaggggtgtaatgcggcattttaggtttctccatgcaaattcctttgtctttcctatgaagtctttgcagttaccggtggcatttccctttcctgtggtttccccttattttgtgtgatgtaacaagggttgcatcctatagcagtttcttacaatgttttcgacacagtccccactgccttgttgaatctctctctgtactgtatgcactgccaagtgtgagaccataatatgtagtttaatgagaaacggaaggatgcaggtcagtttgcatgagtaaagcccactggggctacataaactgacacttttgtcattttacccagttgtgggtaaatgaagactacaatggcagactgactcaccattacttgctttgtgcaatgttataaaggcaaaacactatgcactatgcttggctttacagatggcattcccaccatgacattaagtggattgtccacagcatactataaatgccatctcttgcaaatttatatacgtaaatatgctcaattaacacttaagtattacaagtataaggaaactactaagcaggcatttatagcaatactatgaaatctccaatcactgttttgactgtcgccttctccttagtgcagcctttctgcatcgtagttgctgcttttttacatttcacactcctgacttcagagttaagtacttgctcatccagtgttgcactcacctttcttattgtacatgcaatgtaacaacacacagttttggtgcttaacaatattcctttttttctttaataaaggatatttatttgaattaacttgattttgtttgtttatatattatcaccagtaacttttcatttcaaaatggagcatagcaatatggtacaagtttagtaagtttattagttacttccttgacaaggggcaaccttgggagagagcttatttggcttagagtttaggggaacaagtccatgacggcctggtcacgaaacagaccccttgtgttcagcttgctttctcctttccgttcagtccaggtaaccacgggatggtgtccacacattcactgaaagtctttcttcgtcagttacacctttgcaaaaacattcataggtatttccaatgctgcattcccataatgattcacaattaaccagattcctggactgtccacccctgaactgttt

SEQ ID NO: 22237 - DNA, 1293 bp, Mus musculus
cggtgcccagtatccacagacactgcttgtctttgctgttcccaagtgttttatactgaagatgggaaagcaggagttaactagatgcttaatctagtgttattattcatacttgaatgtcaaatttcaaatatgtccccgatacaaccaaaataatgtatagtagccgatgtgctatgtatagaaaagatatctctaggttaaaggtcctagttggtttttagtagtaagaaattgctggcgaatgaggattttagggtctaagcaatgaccctagttaaagagtgctttatatagggatatgaagttcatgagacagcataaaaacaatcattccttagttgctcatcatgcacttaaaactttcttccccctccccattcctgagacagggtttctccatgtggccctagctgctctggaactccctctatagatcaggctggcctcaaactcagggatttgcctgcctctgcctcccgagtgctgggactaaggcatgtgcgactacacctgttgcaaaatccattttttaaaagatactggtgtagtatagtgaacactttgtggactctacagtgtgtgtgaacgttcagagggttctcatttgtataaatatgaatgtcgaacaatccttggtgccacagtaagtcctagaatgtggtaagttgcacggtgtactgcagacaccacacactaagaattagaattcagtaggatatagaatgacagcatccacatggcatgggggcacgcacattgatacagttgcattctctagactccctgagacttctttatggaatccactcacagaatatgtttgtatttatttaaaccaatattttgagtccagccttgtaatacactcatcaacagacatcaatctgcacagtgactttgggtctttagtgggcctgtcagggagttttgagctttcttacattttaccagtaaaataagtatagatcctgaccaactgcaggacatttcagactattgcttaagatgcaagcacttgacagggaaagcggagacctttaatttttcctcatctttgcactgaatataaatgattatataaagctaaatgtgcatattgaacattttatttgtgcttggtgttgccagtgaccatcaagactttagatggaagagggtgagaaagcagaagcaccttactgctgagcacactgtgttcaggcctcacgactgcagtcgtgaggcctgaactttatgttagagcatgttaaaatcctgcctaattgcttggaaataggaggcgatggtatt

SEQ ID NO: 22238 - DNA, 1149 bp, Mus musculus
gctctttttgcttcacaagtcagctgttagaactccctctgctaataaccagctttattggcaagacacatttcttgtaacaaaggcagggagcagatgttgctagtggttctgttggctgtgagtgctccctgtctgtgagctcttactcgggctttccgcacccatgaccctaaccctaaccctaaccctaaccctaaccctaaccctaaccctaaccctagccctagccctagccctagccctagccctaacccatccgctcactcatcttcctgtggagcgcacagcccattgcagtaagccagcatggagacatgcctgtgccgtggttttggtttccatgataactaaatgtgtttttatctccacccccacccccacccactattgctcattctgtctagacttctgctacccagcttgtgtggctctgttcctgtcatgcctttggacttcactgtcctgtgcctgaggtctctctcccctctgcttcacccattctgagctttaggatagtcctaagccctgcccagaggaggtggactggtcattctgtgtccatgctaatgggagttgtgggtctgtggcatctgctaaggaggattattcacagttgcatggaatctgtcaagattgtggctatatctcccactatgccatggtctatgctgttttctcaagcagtggcaagaaaggccaggatagcacttcttcgccctgagcagtctcagaaaggaagtggccatggaatgttggcctcagtaaggcagaggagacaccatccatgtccctttcattctctgtttcactgccctgttctggggctctggattctgggcttggagaatgaggatacactatttgactgtcagccctttctcagaccctcatacatcttaccgatgtgagtccaccagattcgcagcagggtgtgtcaaacccagtggtacttctcattaacacctctgtctcattcacagtttatcaccaacatcagcaaccatgtctgcgacataatagatagccagtactttttaaaaatgaattaataaacaaagtaaacgagaaagagttacctggcatttactagtccagtgagctgactgtaagggcagaataaatatcctccagcccttccgattctgt

SEQ ID NO: 22239 - DNA, 2083 bp, Mus musculus
aaactttgatatattcttctgtcttatctttttaattgaactaggatttgtgtttggcagctgtgtgtgtgtgtgtgtgtgtgtgtgtttgtttttgtgtgtgtgtgtgagagagagagagagagagagattgattttgacacaggtattaaggctagcctaacccttgaataaaaagaacacacagtatttaagggatttttcttttagcctctcacttttagttacattaaaaataaaagacccttgtgattctaatatgcttgatttcttaatgtacctgtcttttacttttaagacagactaaatccatgtgaaacattgcaccaagcaatggagagaaagctcaagtaatatattcattattggtaacatccaatttacattgttatggtgcagcacaaactgatgtgggttgagacttttaatcatttttaatgctgattagctgtctcaagaacatttgtaaggcagactgttgtagtttggaagtctcactagtttagattgcaaaatgatagataggctgcaacttacccaagttgactttaaacaaagatgggctgtcaaagacaggatatcctttaaaaatgagctgaagtgagtggctgagccactgtaccctgtccccaaggctgcagtcggggactctgtgcagagctggggtgcagttccttgaggtctgtggtattggattatacatctgcccatgcagggccatgctagatttgcttgggaatttactaagtacaatagtccaaaaatgtttctttgattgaggaaaaggtagaattcagagtatgactttggagttgtgttttgagtccccatgagtaggattccccttcgttctcacctgctcatgtgtggctgctgagcgactgtgcttcatccagtgtggtttgatggacactgaggtcactaagggtgtaagagttcacagaaacaccagtacttatattctaaatccaggcttattcttctctgatgtacaaataagagacacatcagagattcacaaaatgctaatagttttttattttcaaaattgggaatgttccctgtccattatgtggaggtccccagaggtggtattattaaatggaaaagaatagttataactcacattatgtttttgcgtatgaacaaggaaaatgctgttttcaatccaattgtttggattcatacacgtttgaaagagattatgttgtttgaaaacacaaaggagctttacagccatggtggtgtctgtggctgggtcaggtgggagcggctcgaagcccttacctgctgtcctctcagcagcagtctgtcagcagtgcactgtgatttggtgaaagcctgttgacgtcttctattcaatcccaatgttactgcagccatgagacgagctgcacgaggacaggcatccatgtcacgtcttagttggcgatgttaaatggtgactgttttatttaaaactcgggtctgatcactggaaacgattgcttggtgatttgtgatttggggctcggttcattgctctagggatgtttgtgtattgtgtaggtgcgtgtactactgcgctgcccctgtggtatgtcacggttctgtgtaaacgccctccatgtggccctctcatgttgcatgttttcagtggtttggaagttttgtatatttattgtattaatgcagagtgtcataaaataaaataatgtttactggatgtttgtttgtataattttaaatactgtattagcagttgaggcacaaattatacttgtagctttaatacagatacttatttgacttttattaaaaccaatctttgtactgttttatcacatgctaaatatagtataaaagagttagtgtaaaaccctcagcaatacaatccaacagctttcccattgcattagaccttgataggtgcttgacagtgagccctacacatcaaatgctgggactcttgtgaggtaggcaagattacctacaagttcattacatttttggcttaggattttcttcatgccagcatcgtactggtaactaaacccatgcgatttcctgcgccagcttccgctgctgctgtacacacagaggg

SEQ ID NO: 22240 - DNA, 1163 bp, Mus musculus
tacactttaaagcagagatactaacgctttgttttttctgggccacatgtgcatgttatttcaagtactcccttttatgagtttctaagaattaatataataagtaagattttctagaaaaattttaaatagctgtatgtgatctttgatttttgtgggggaaaatagtaatgaaagaaaattccttccttgaatcatctgtctaaaattctaccacaatccaaaacatctttcgagtaaaaattatattaaaaatatattctccattaaaataatgtaatcaaattctaataaaataattcataacaaagaagaaacagaacaaataattgcttattaaaatcagcatttatgggcattttagctttatttgctagctgtacttttgtgttttgttttttaaaaagacattttttgtatctattattttcaggtagactttgaacatgtttaattaatttcaactcaaggttttaagtaagggcttatcttgcagccactgtaattggaccaaataatcacgtgcttcccacttggttattatgtagcgccttttgggttcctgtgcatctgatagaacggctttggactggagctcaggcaaggagcagctagcactaaccttgctatatgaacgtgcttctcacttacagttctctgtaaacaccaagggaaaacactttgtctccgggctgctctggagctctcgaccctcatctgtgcttcagagctgggattaaacgcatgtaccatgataaccagataatttccagtttagttttgaagatggctattttattatttttaaaaacttttgttatcaacaagtgtaaattaggtgacttttctctggttaagttattttggatgcttgtttctttatgaaacatggtttcgtgtaacctaggctggcctcaaactccctgagtaggtgagggtgactttgaacttcagtcctcctacctctgtctcctgagtactgagtatccagtggtataccaaatacagtttatgtgggggtggggtacagcacaggggtttgtggttgctatcaagccctctaccagctgagctatgtctccaactgctgtgtgttttccctccctccctctctccccctctccttccctccccctcctctttctctttctctctctctctcc

SEQ ID NO: 22241 - DNA, 1181 bp, Mus musculus
taacgtcacttaggttgcagaggtgagaggtattctagaagctaagagacagctgcagaggacagagagtaaggtgaatttttcataagacacattcactacaaacactgaagaatatgctcatgatttaggttttcattgtatttaagcatcgaggatgttttgctcattgaaatttgcattctcccagacagattgcaattgaattgattatacgtatttaatatggtaatctctttctttgtctttcagaaatagttgttgctgagagtgtggttgttataaagaaattgttgcaaatgcagcctgcacagcatggtgaaattatcagacatatggccaagctcttggacagtatcactgtgagtgtccctgcgctctgctgactttgttcagtacagtactttccttcagtggtcatcccagagcagaatggttaagagagatgggatgcctggattaagttctggcttagattttgttagggctgaattacagacctgaaaaagggaagggagcatgagcccagcactgggctgtggggaagtggccccatcttggtgggatttaggagcagatagggagagattaaattagtacatgcatgtgcttgagttacgtgtcatgtgtgagatgtgcagaacaacatgctttcccagtgctttcctttgagagaccctagaaacaataacgcccttctcagtaagcacaccagacacctgagatcttctgctattattgagatgtactttaatgccaacaagttttcattttaaaatgcattattcagtaggatttgtgtgctctgaagctgtgcagatattctcattactcttagatggtgatcccatactttaagcctcagcctcccctcagcacctctaacttacttcttgtttctatggctttgttttattcttgatgttttatgtaaacagactcatagtatgtgaccttgctttggaattctttcacttgcatgctttcaagcttttttttttttttttttatgaaaataacttactccatcgactatatttttgcatgtgggaaagtgtgccatagccctgtatagaggtcagagggcaggttacgggagtctgttccagatgggggcagtttgggactacacacagagaaaagtccgtgtacttcccatacataactatgtgtaaacagtg

SEQ ID NO: 22242 - DNA, 1097 bp, Mus musculus
aatatttttgcaagtcataaaacttatttaaaaattgaattcttacttatataatgaatttaaagacttccatttttcaaaagtcatataaacttgtagagattttgagttattaatgtgaactcaaaaacacttggagagttttacatatcctcattttctacttaaaaaaaaagcttaaatatcttcttaaataaagagccttgactagtgacaggaagtacaacaggggtggggtggagggaccagtgttttataaatgacatgtaattagggtaagttattcttatatggttttgtaaaattgaaaaattatagactccactgcctatgaagtgttagcatccacagaggcactggaagtcagtcaggacattttgttccctcctcactggggactccagtgaggagttcacatcttgatgaccaagaatgcgaagagcagggtcctatcctgagaagtcaatgctgtgcattgtttgtgcccacgttttcctcagatcacgcacgcacttggttgatcttaggatgccatttcctgtgttaggcgagcgtttgtgtgtgtgtgtatatatatgtatgtgtgtgtgactgtgtgtgtctgtttatttaaataggtgactttatttaattcccccttctatcaaatgctgtggcttttgctcagattatgagtaatgaaggcagatggtagcctctttgccttcatttagctgacagagagttggcgctgaaaattcatgtcttgaatctacaacttgaatcttactagttttctttcatccggacagtgcatttggggcacattgagtgtcagcacaagacctttgaggtagctggagtatatgacttccaaaatcgttaattctgtggtggttcatgagtcaagtgtggcgttcctgtggggaggtagcgctttcatgcttcagcttccttgcctgcaaagcagaagctgatccctactttgttacagctcgtcctgagggagacaaaggtacaagcgcgccgtgcactgcagtttgcgctttttgtatgttgctgttgtctgttttggttggttggttgttggttttggttttttgaccgagggcttttct

SEQ ID NO: 22243 - DNA, 1241 bp, Mus musculus
ttacaaaggttactttaaattctgatacgagttgagcttttatagaatattgttttaatgacaaatagtggacagtttatcctttcatatttatgatgtttttgttgaatttaaagttattaaaagttattcactatcagttatctgtagcaggcctgatgtgctgcagtccttagattttgaaaggaaagatggatagcccatgggttgttaatgggcagcttctctctgttctctcctttcccctttctccctctttctcccttttactgcttgttaaaatacaattaattgatctcaaaataggtgtattggctatttctcttggttctgtgaccaaagaccagacagaggtacttttaaagaatgcttttaaagaaatacttttaaatcttggggctggagagagctcagtggttaagagcactgactgctcttccagaggtcctgagttcaattcccagcaaccacatggtggctcacaaccatctgtaaaaagatctgttgccttcttctggtgtgtctgaagacagctacagtatagttacatacattaaataaataaaatctttaaataaaaaagaagaagagtgatctctttggctcatggcgtaagagcagacaatggaaatgtcatggtggagagcatggtagcagagttgggtaggacctgtcctctgggtctgtgggcgggaagcagacagaaatgcttgcctgggctcccctagtcagggtaggtgtccttcctcagttagcccaggtgtgtctcccaggcgaccgtggacatttatcatcgtggtaggtagggaagttcattttaatcagtaagccaaggacgaagctggcttaagctggagctcacagtggaagaagctcaaggggaaaatgtgtgtggctgaccacacacggtgaacgcggtgattccagcactcaggaggttgaggtagaagactctcgggttccaggcaaacctgtgctaccagtgagaggctgttgtttagtagtcaggattgaagaggaaggcacatgatggttgttgttggtcggaatttcatatagttgaaacattcaagaaaactaactagaaaaccataaatctagacataaagtcactaagaaggttgtagatgggatgtttatgttaaagagtaaaaacacaactcatatactctttgtaaaaggaaagtatttacatatgcagggcatgaggcctatctccatgtcatcaagttctcaacagt

SEQ ID NO: 22244 - DNA, 1237 bp, Mus musculus
gtgtttttgcaggtttgcagctagaactgtgcacagtgggtcgctgatgctagtcacagtggaactgaaggaaggctccacagcccagcttatcatcaacaccgagaaaaccgtgattggttctgttctgctgcgggagctgaagcctgtcctgtcccaggggtaacctgcttacatctggacttcagaatctggcacacaacaaaagtgcctggcacccactgctgctgcctttcatttataataatagcccttccatctggcagcaggaagagcgcactctcgacattcttgtctctgctttagaatgctgctgtgtctgtcatgtgtgcactcctcgcccctcctcgctttgctaaccaaagaacatatattttactgtccatttcctcagctccccagtccgagtagcattttctctgccctccgacttcttttgacctcatcttccttctgggttttgagaacagtgggtgtgaatcagtgcttggcaatcgtccttcttacagcagtaagcaaaaattagcaaggaacgtgtccgcatggcctctcagcttggtatgtgaaaaggaaatagcatactttttcaaaaataaataaataaaaatggcatctctgaaaatcccattctttgattttcctggtattgtaattggttattgacaattgtcatcatgaaattacccctgaataatcaggtaaataaaggagtatatgaatagcatttgcctctcctaatccttactggctgaactttctttgttccaaaatatttctggtcacactgtggagaaacttctcccaacaaggtgagctgtttgcttcttggagatgggttcactgagcagcctgctcgccttaaacctgagatcctcctgcctctgctcccctgtgctgggaggacaggaatgcacggcatagctctctaaactaggcagacattctaaccgtgctgcagaatggctaatgagcactttcataacatcaggagcctctgtggaaagtaaaacagctctttctgtacagacttaattgtagagctctgattaccaggctgctaaataagcctggttcctttttcctttaaaaatcttggttttggacttttatcaaaactgactagtacacaattgatttatatgctatttaaaactgtatgaaaattagcatatatctataagttgtttatttgctaatttaggcaagaaaccatctttattaaaattattctttataa

SEQ ID NO: 22245 - DNA, 1174 bp, Mus musculus
gagaaaatcacacacagagagagagagagagagagagagagagagagaggagggggagagagagaaagagagagagagagagagagagagagagagagagagagagagagcacttatgtgcacaagtagagagcaaggtcagtctggggtattgttccttgagagacacccacattgtgtctccagcactgggattataagtgtggaccatcgtgcctggcttttgttttgtccaaaatccaaggttcctcctgaaagccaacatcatattttgtagcatgaccaagtcttcttagttctaaatggcttgggttgctatccctggaaaggtctgcaatgacatcagcattccaggataccctgtgccctggtcagctgctcctcaagaatacaactcaggggctgcagagatggctcagcggttaagagcactgactgctcttctgaaggttctgagttcaaatcccagtaaccacatggtggctcacaaccatccataatgagatctgatgtcctcttctggtgtgtctctgaacacagctacagtgtacttatatttaataataaataagtctttttttttttaaagaagaatacaactcagagagatggagttcccaaatgttttcttctaactgccggatggtatgcttagtcctgctgtccacaccaaagagaagattgatcacaaaccccagaacgtttcaattcctgatgacttactaccatggcaaaagaaatactactacagaccacagtaccacttattatgcaattacatatctttcattaagatggcacacagagccgtagaaataggcagagctagcctgtcttttgttctctgctcagttttcctatctgctctggcagaggcttggataggatgatgtcagacctctgaccccaaccgtctcctatagcatagttggtcctggggaaataagggaatgtaaaaggacagacagacacatgtacagaaaagctggggtcagtggcatgtgctcaccgatggacctgcagcaactatgtaagcaactgagaacctttgagcttttattacttcccgtgtgagaagtcacgtctctgtgggaggtgtctctctgggaggagggagctacagttgcaagtttttgcaccacttggccaatcctttgtactcccacccagacta

SEQ ID NO: 22246 - DNA, 1175 bp, Mus musculus
tacatgaaataaattaataaaaaaatctaaaagaaaattaaagatgttagttaatatttttagtgtcaatatgaatactcaaaaataagcagacagtccgtttttctaatttgattgtatttaacttgggtgacattagtgacatcctgtagcatgggagtaattggagtaccattttacgatggatgattagcaagtccttgtttttactttgtacattgtaaataatctcttgtatgatgatgttggacaaataatgatttttttaatttgtgattttatttaattatttaatgctaataattgtagacaactgtgttcttaattataacatgaaaatatagtatgaaaatatataataaaaataagctaacctctcatttcttcctttcctaggaacaaagggacagaactgttttatacttagaaatcttagaatccttttctctaattctcaagttacttactggtctgtattatatgcagcaaagtattgaaattcctaaacgacaaacttaattttgttatttttcatttcaggaaagtgaaaaagacttggaagaagccgaggagtataaagaagcccgtgtagtgctggattccgtaaagctagaagcctgacatttttctgtatgggatgtttttttgcattaaatcctggggtccattctacaattcattgttttcagccactgctgtgtttaataatatgaaaacgtggttctttttatgcagttgcatttatttttctttgcataacttaatgtgtcaaataaatgagttcatctaataaaattgtttgttttatactttaccaaattttcagttggccacttagttaagtgtcattaaatcaggtgtttttgaaggttatctgaagtgtaaatagttcgtagtcgcaggttgggtttaaaactagagtgtgtcagctgggagcactagggggtctctgcctgtgcagtgtcagctgggagcactagaggaggctctgcctgtgcagtgtcagctgggagcactagaggagctctgcctgtgcagtgtcagctgggagcactaggggaggctctgcctgtgcagtgtcagctgggagcactaggggaggctctgcctgtgcagtgtcagctgggagcactaggggaggctctgcctgtgcagtgtcagctgggagcactagg

SEQ ID NO: 22247 - DNA, 1866 bp, Mus musculus
tcatctcattattttgtggaaaaatggagagcgagaatctggagtacgcagcttaaagttatttcagaagttagaagagaacggtgacttatacccagagtccccttgaaggagccagacaggcgtgcagacccgaaccccgcacagccaacacagcgcgcccggtaccctgaaaaccatcagcacactgaccccttactgtactcttttcttgcctgtgaaggtctgtctgtctgtctgtctgtctgtctgtaacacctgtccactcaagaacatagcacaacatggccttgttgctgtgcaagtggtgggtgctgtgttctgtcccttaaaacggtagaaaaaatgataactgtaaggttgccacacactatttacaagtgttcttttgggttcccttagagactgtctgagacttgtcatgggagatgtatcctctctgctgctcctcagaagccatctgtgtccaacagaaccagacttgaatattagccccccaaaaggaattctactctttaagtacaatgattttgtttggtaccaactaatttaagtcattgaaaaaataatatttactcttgcccactaaaatccctgtgtcctccggtccccaggcgtcatctgagcatttctttctcagtgtgaactggcctgacccctcactgacagaatagtcttcaggtgtttctgggatgcgtcctgggttaggaaggaggcacagctttttctcaggtcaggaactgtagctgagttgtcctgtttgccttaaatggttgagagcagcttcactgttcagctctctgaacatccactaagactggaccatgttcctcgccctaccagcctgatgacagtactcactttgggcactaaaatgtaaaatatactccacacagtaagaatgggggaggggagggttgattaagaaatcttattaaagacaggcaagatgaatgtacgtctacagatgtgtgtgtgtacacacgtactctgctccctagatggacacgcgaaattcttgcttccgctagttctaacattcacagctgtctacagccaaagcttggtagcattaaaatcatagggcgatgagtggcaaaatgttagacgtgaggaagccaagaccggggtaggaaagccctctctccagtgcccatcaccatcactgaacagccttaaaagcagaggccagaggaggagagtgaggagggctgagcgggtgacctggtgaccaagttaggaaaaccagagtgttcccagtccttgctgctggcacagttcacaatgaaaatagctttatataaaaagatagcattacagcatgagctgccttagttaggacgtagcaggatgcaaatgggaaaatctagtgtcttttagccagaaaaccattgttctttgaggagtcagcacaggaggcaggtttgtcatcacccaccctgcagatgtcatgggggaagcacccaccagccaggcagacgcgccgtccgctcaaagtgacaggagtgcatccccttgccgtttactttggctaaattgttttaggctattggtttgtaaagatgttttcttaaataatataagacaaagaactcatagtttgtgggtttgttttttttaagtgcttcctaacctgttttggaattgtgatttgtggtagtaatctattcaaatcgactggcagaagccatgcttgagtctcagtagcagacaagaccctagtcaagcatccagttgttccactccagctgactagtttcccaccaggagaacaaggctgctcagagggcagcctccagcccagtgagagacctggtgtgagtgacagaggtcagagagagggagggggatgggcgactgtggcaa

SEQ ID NO: 22248 - DNA, 1143 bp, Mus musculus
ttgaaataggactctacttcaaaagatacctgacagtttactgtcttctacagttttatctttttatcctgttttttacatttttaaatccttcaaaaatagaattctaatatcattctgtaaagcccctttctcctttgtctagggaaaaaaaaatctgaattcccatagcatctaacacagatatatccttaggggtactttttttttttttttactagtttttgtatgtgtatgtatatgtgcatgcatgcatgtatatatgtgagtgttgcgtgtggcctatgtgcacatgtgcctttgggtgcttgtgtgcaaagggtgaaggatgtcaggtgtcctgcctatgattatttgcctcgttcctttgagacaaggtccttctggacctagagtggggctggaccctgttgaaccccaacagcccagtctctgaccctgcacagtgctgaggtcaaaggtgctcacatggccacgccctgattcttaacaggggtgctaagatttgaacttaagtgctcatgtttatatagcaagtgtccttacccatagaaccatctctctagatatccacctctttgaaccaaggtatgggcttacctgtgtctataactatctctgagtaaagcgggtgacccatgagcaggatgtgcctcccataatgcaccagagagacagtcatgtcgtagtaaatacacagtttcctaattattagggaagtccaggatccatcagttacagaattcccgctagcccaggagggttttgctcagtgactagcatactggcctgtctcttgagagaaccacacatctccagtgatggctaagggtggccttccagagaagttccctacctgtgagacccacagagttctgtggcctaaggcctgttcctagaaggggaggggcacttcccacatggtaacacacctgagcaaagtactcctcggagatccttccagcccattcaatgcacaggtccaagggccggcacgggttggccacgtcggcacacttaatcatcatgcgtttgatgaggatttggttctcaggaaagttcttcccggtagggttgcattcacaatcactgccctcactctgggaaaaaaaaccaaaaaacaacaaacaaaaccgatcagat

SEQ ID NO: 22249 - DNA, 1226 bp, Mus musculus
tgatgaggcagatggtcctcagttcagctctgccagcgtcacagctcacgttcagccttttcccatgttggcaagagcttggatgtttacagtaatctctcaggttgttgtaagttctctgaagttcctgtgtctttacagctgttctagtgctgagtgcatcgagtctcccgggacttggaagcaaatactgtttgcactgaaccagatgtgcacatttgcaaatcatcatgtaaccttcgtaacccacgttagttatcctggcagtcattttgctctttccctcgcctaaaaaaaggcctaactgaagaaaaacctccaaccacagccagcaacacccaccccttactagaatgactgagcacctacctgtattccactctctgtcctcccagctacatcccagccaggccaggaagttggcatcgtttctttggagatcccaggaattattggaggagctagatttgaaatgaacccagacagctttcatcaagagccatgtttagccagtgtagccagtggtttcaatgtggttctgagggtgtgggtttcggttcaagtgctctactctctatttcaggttctgctaatcttcgcaaaggaagatagccagagtgatggcttctggtgggcctgtgacagagctggctacagatgcaacatcgctcgcactccagagtcggccctcgagtgctttctggacaagcatcatgaaattattgtgatcgatcacaggcagagccggaactttgatgcagaagccgtgtgcaggtaccttcctccacctaaggtgcttggtaaatccccccaccccatctgctctaaattaatttctttagacagctttggctcctagcactgaccctggactgtagcttcttcctaaagatgcatcccgcctttctatttctgcatgtttaaatttcattgagtttaaagatgtcagctggactcatcctaaaacttaaagatggcccccccgcccctccagagtattgctcataaaagagtcattaaaattcacacagattttattacatgtagtttagatttaaagtagatattttaaacttcattattctgtcccaaaatgagcatcagaaatgtgtgaaacagaaaattttccatacgtgacacagatggatagatacagcaggctacagcagacttgccagagggaagaaggcagccacctcagcaccagagtgttcctgggggcctgt

SEQ ID NO: 22250 - DNA, 1162 bp, Mus musculus
gcacacacacacacacacacacacaccccgatgggtataactaccttaatttaggttcccaccagccttagaaaaggatccctgtttctccatgtgaagacaaatggccaccaacaaactatcatttactggccatttgcatctccagcttattaattggacgctttttgtcactgtttggagttcgttatggatcccaggtcttcatctcccgttggatgtgtaacggacagaggctttctctcatcctgtaggtggtctctcctcactgatgtgggtttgcctggccatgctgaagccttttagcttccagcatcagctctgacatcccttcctgtgcaattgacctttctgcagtcccagcttagacgtctcttaatgttttctctggcagcttcagggttcccaggattctactaagatcttggctgtgctgtgaattgagcttgtgtgcactgtgagagactgtccagtttcattcttctgtatgtggatatgcagttttcctagcaccacttgtgaaagaggctctctttcagtgtaacatgtctggagcgtgtgggtttgctcggtcagtcctctattctgtccactgctctacagacctgtctgcggtactactgcgctgtcttgtttctatggctttgtggtataggccagtgcttccagtattgctcttgtttgctttgcgttgaattgactgtgaaagggtctcttgtggcacccaacccaagaactgccgctgcctgtagcagctgtttaaatagtggtgcacacagcaaaggggctttatcgcctttgggggggctgtgcagtgccccccagagtgaatcagtaggttctacagtcctggggaaaaacaaaacaaagagtcttttgtgtccatatgcaagttgggtgtgttctctagttcttggaattggttgcattgactctgtagatgacttttggtggcatagccattctcactgcctaagccatgaccacaggctctacttatcctccagtgtctacttcaaattttttcaatattttagtttttatattaataggtcattcaccttaggctttgggggttttgctttgtgtttatttttgttttgctattgagaatgggattttttttttcccttgacttttttcttggcaattttgttattag

SEQ ID NO: 22251 - DNA, 1319 bp, Mus musculus
gcagagtaaaggcctgtctgtcacacgggaacttggagcttcaaaagagaaagagtttgaaaacttcagtgtagaagctgtgttcctagaaagtcagtcactggaggaactcttaagatggctacctgatcgacacatgtgtggggacatgtggtttgtagcttgtagaaagcagttcttaagtgggctcaaggtgacaggcacaggagagctgccagacctttgttgttgtggcctgtcactcaccctgtggagagcagctgaccatgtgagcagcgcacataaccactaatgacttcagcgcgcgtgtcctgtctctgtcatcattaccatgacacacagatatcagacatttataaaacaattctatgtgtatacttgtttacaccttttagagcttaggttttttttttaaaaagtcgagaaaccatgggtagtggagcctaattttactatccttgaaataactgcagtaataatagtgaagaattgatgacaggtgacagattgtaggaaattagtctcacactattttcttctgtgaagaatgttgtttgtactacagagtcagctttgcctttggtttgtcctagctgatggagtatttcatatagacgactgagtgcagtgctggcatattcagtatgctagcatttttagttttgataaataccattgcaggcaatgggactgtgctcgagaaatctgatgactagggcagatgggttactaggccaaggcttcaaacatttactggaaatgtcttcaaatgcaataaaaaaaaacatttttaaagacttgatttcttgaataaatgatataaacatattggtcttctttgtatttgcacccaaccagaattgtcccctttgaatggagtagtgcagggtgagtgtggctggggctgaaagggcagctatgtccaaaggtgggaaaggaccagtgaacaaatctagagggccagggtgggagacgttcgttagccctgtgattcttcacttggattgtgttctggtgcccttacatgcacgcacacacacatcccacttacacacatgcacttggaggcagcagaagtgctctgcactgttttctctacaatagaaatcaacattattctctgagtaggtaacaataggccttcagagcagctctgctgggtctcatgtgagctctcctctaccttcagtcttccctggtggaggtgttttgcatggatctttttgctaagaaaatggaaaactagaaaatgtggtctaagactgaaatatatgtgtgtacaaagtctatgctttttttttttttttttttttttttgg

SEQ ID NO: 22252 - DNA, 2776 bp, Mus musculus
gtattgctccatcctcttcatgacctgcctcagcgtgcagaggtactgggtgatcgtgaaccccatgggacaccccaggaagaaggcaaacatcgccgttggcgtctccttggcaatctggctcctgatttttctggtcaccatccctttgtatgtcatgaagcagaccatctacattccagcattgaacatcaccacctgtcacgatgtgctgcctgaggaggtattggtgggggacatgttcaattacttcctctcactggccattggagtcttcctgttcccggccctccttactgcatctgcctacgtgctcatgatcaagacgctccgctcttctgctatggatgaacactcagagaagaaaaggcagagggctatccgactcatcatcaccgtgctggccatgtacttcatctgctttgctcctagcaaccttctgctcgtagtgcattatttcctaatcaaaacccagaggcagagccacgtctacgccctctaccttgtcgccctctgcctgtcgaccctcaacagctgcatagacccctttgtctattactttgtctcaaaagatttcagggatcacgccagaaacgcgctcctctgccgaagtgtccgcactgtgaatcgcatgcaaatctcgctcagctccaacaagttctccaggaagtccggctcctactcttcaagctcaaccagtgttaaaacctcctactgagctgtacctgaggatgtcaagcctgcttgatgatgatgatgatgatggtgtgtgtgtgtgtgtgtgtgtgtgtgtgtgtgtgtgtgtgcacccgtgtgtgagtgcgtggtagggatgcaccaacatgcatggggctgtcatttcctatccaagctgcctgtctctgcaccaatcacaagcatgcagctctccccaggattgccagaagcctcctcctttgcatgagaacagtcttccactctgatgaaaagcatcagtatcagaaactgaaacgaactgagaggagcttgttttgtgaaagtgaagagaagatggagggtcagtgacttgcaaaaaaaaccaaccaaacaaaaactacacctggcaagaaggctaagactctctgaaatgcttccttttccatctggagttcgtctcggccttgttcaggacctgaggccctggtagagcttcagtccagttgattgactttacagacttgagagaggagtgaatgaggagtgaatgaggctcctggcggcatcctaaccggctaacagtggccttgctggacaataggattcagatggctggagttacattctcacaccatttcatcagaactattggggatcttgatcaatgtgcaggtcccttagcgtcagtaaccctgggagctcagacacgatgggggtgagggtgggggtgggggtgggggtgaggctctacaaaccttagtgatgactgcagacacagaaccatggagctgagcctgcttctgcttgccagggcaccactgtaatgttggcaaagaaaaaccaacagcagtgttttgagcctctttttttggtcagtttatgatgaatttgcctattggtttattgggattttcagttcctttattactttgttgtaattttgtgtgtttattagtcaagaaaaagaagatgaggctcttaaaaatgtaaataaaatttttggttttttggttttttaacttgggccaactacaaatactgcttaggtttttttctaacttaattgttaactacatcatgtgaacttaagacattttcatgataaagcattactgtagtgtcagttttccctcatcctcgatcatagtccttcccgtgaagcagggcccttcccctcccccccctttgccgtttccctccccaccagatagtcccctgtctgctttaacctaccagttagtattttataaaaacagatcattggaatatttattatcagttttgttcactgttatcagttttgttcactaatttgtccaataatggaattaacgtcttctcatctgtttgaggaagatctgaaacaaggggccattgcaggagtacatggctccaggcttactttatatactgcctgtatttgtggctttaaaaaaatgaccttgttatatgaatgctttataaataaataatgcatgaactttaaaaaaaaaaaaaacaagttctttcaggctgtgtgtttgtatgaaggggggaggggaggaagagaggggaatcctgctgttctagacattgtgatctgacgcccaccccaccctgtctgttcttttctttctttctttcaattttaaacagtgtgatgctcactccaccccttccttccttccttccttccttccttctttccttccttccttccttccttcagcccctcccaccccccactcacacacacacacacacacacacacacacacacacacacacacacacacaacactaggaatctacacctggccttgtgaatttacactttttctcacactagtttttcaaataaagtgtagttcctgttgttctgccacaactacctttcgttaattgttatgtctaaaattgttttctgtgtatttctacaacgtggtcatccatttttaaaggttatagaccctttaatagtctggatatattacaatgaatatattccctcctggatggcaccttgacttaggctaactcacgtgatttttttttctttttgactatttcagcattattgctttgtacatctgtgtgtaggcatcattggcatttactttac

SEQ ID NO: 22253 - DNA, 1316 bp, Mus musculus
ttggataattaccagcaaggtgacgggaacggaaataaaggtgtccagtgttgctagtgctatgatagtaactggatgtcacttcttatatatctaggtgactttaatatatagatggtatgcacacactcatttgtcatgcaggagggaatctgcactttgacacatttttgtttattccctggccgttactatggaaataatctgattctctgacttaataaacaaagtctgagttggtgggtgttagcactgggcagctggagatcctaatgataggggaggagtccgtagtttagacttaacacagcttttgcctatattttttttcaaattatttgataataatggttagtgatggaaggatgagacagtattacctgtgtaggggaagctctaatacttttcatcttgaacataccgtagttttaagaattatcaaggctgttggaaaacccgttttgatatgggtagcattttttttttaacttgcaatttacttactgaatacatggaccaagactgagcataagactcaccaggactgtaataaaccttacaaagcagccaagcctagacacagccatctgcatggaggcctctgagcaccaggtacatcacaccccttcggctatgcctcccagagagcagagatggatgggaagcaccaggcccaccccatcctgctaggattctcattagctgtgagctgactgtgtcttttagaaattggcaaggtaaggtatgccatcttgggaggcagtaactatgaaagactgacgagaggagaaaggtgtgtttacatccagtagctgtcctgcaaggctggcccttgcacagacagacacacccacatgccctggtcacactgttggatagtgggccatagactgactataggagaataaccgagtcctgtccttactcaggcaacgcagagagctggcatgtggtcagctatgatgcacatagaacttgtcttcagctggatgtgaccaagtgtatttcacataagcaaggcctatcagctaaactgctttgcatatctgagtttctgcttccagtagctatagattaggataaaaacacagtataagatgtatatttttaatacatatgcccttcagcctacaaaattacacactatttatttacaaatgttttttcaaaaattactcaaatcagccaggcattatggtatacacctttaatcccagaacttgggaggcagaggcaggcagatcttaaacaattttttttttaagaaacaagcaaacacaaaaagttttacttaagtccaattttaagaaatatat

SEQ ID NO: 22254 - DNA, 1197 bp, Mus musculus
cctcaaaatataaatcagggtgccatagtgtgggttatattgctgtgaagagacaccgtggccatgacaactcttataaaggaaaccatttccctgcaaatacagaaatagtagattcaagaatttccaggggctagaaaaagtctctttcattttacagttgtcagttcttctaggcctcttcaaattttttattttggttttatctgcatatatatgaaggtatgtgggcacacgcgtcccatctactaccatatgggatcgtaggattgaactcttgtagtcaggcctgatggtaagtgcttttactttgctagaccattctaggactattagagagtcataaaatgaccctagtgaaagtagaaagagataagaaggcttaatagtaaccatcaattccactaatgacaatacatttttaaagtaatatatttaataacattctacaacatagttacaaagtgtatcttgagaaccagtgaaaacacagaagatggataagtgcttatgcttggttgaatgtaagaataaaccaattcttattgtaatgtctttaaatatttttatttagtcgtagaagatgatgaagatgacttccctacaactcgttctgatggagactttttgcacaataccaatggtaataaagaaaaatgtaagtaataacttttctccctctattgaatgaagtatactttgtaaagttgctatatgtcaaaaaataatttctaactaattttcaaaagcaatggaactcctgaaattttaagttaaaatatctttgaagaaaagttacaaaggtaaaatacatatgctgatatcatgttaataatggtttgctctctacttaaggctggttctaaatgccaaatattaatctcatttcattagtattgtcaaagttagttgttagtactaaaagaattttattcttagctagaaagtactgttggggatttgatttcagtgtttcatttgagagtaatttctctgtgtttagtatactcttctacacttgataaattggtgttgaaagtatttgatgagttattaggaaacttcttgaagaatcacaaattttttattaatatgaactataaattgtatactcttcttgacatctacctaaaaaatctaaagtagatttctacttttttaagatgaatgaaagttttgtgaaattttaagtattta

SEQ ID NO: 22255 - DNA, 1183 bp, Mus musculus
agaccttggcttagtctactaagctctgtcttttattaaaactgtaattttagagatgatgagacagcacagttgcttaagtgcttcttacacaaatatgaactcttcacattccacatgcaaaggcagctctggtggcttgctcttaggagtccccagatccatagggctcactggccagcccctctagtctacatggcaagctctgagacagtgagagacacaggaagtaaagcataatgtgtaaagtttgctctctggcttttacagcacataggcacatgtatactcgtgcagacaagtaatagcgtaactgaaatccattgttattcaaatgttaggactcataggctttaaatgagagcaaggagaaatgaggatacacaagaattctgtcttcagaactcaaacctgagccttaactatagagccaaacaatcgctgaaagcctttaagtgaataactattttttgtaagattttacagaattttagcttacttgtgtagataacatttttataactagtgtatataaattaagagaaattaattttgctggtagaatttttttgctaacatatggtgctatatgattaatcaggtcctgtttcaacttttgagcacatacttctttatatagcagaagaagtaaaagaagaaaatagtattgaaattttaaagtatttcttgtctttgtgtttgttgtcattagcaaatatgggttctagaaattaaactgtaacttatgttctccagcatctttagaacaaagaattccaagttcataagaatactgactttgaataatgttatttatataccttttctcttacagtaaggagtctgccaaagatctaggcctttgttaatattagctgagaatttgtctggaaaactctatgttcaattacaccagtggttaaattggatttggtacattttacagtcaggcatacagaatagacttaggtctattcaggatacgctcttgggttaattactaacatttgaaacacgttttgttatattaccttatataacacatttccatgtacactaaggaaatctatgaatttccttaaattattaggtaatgttaaccttaaaaaaataaaaattatttttaaaataccttaaaatattatgtagccaaagtcttcattttgtaattaattgaaaaaaa

SEQ ID NO: 22256 - DNA, 1090 bp, Mus musculus
atatacagtttgcatattaccacctggagagggtgtattaactgatatctccagcaataaatgttttattttcacataggttcttataaatatataaagtaaaactttcagatcttctctatcttggcaatcaaaagtttttaatgtagtttaattctcttggaccacaggtttgcaccatgaacatatttatttcttaaataagacacacacgcacacactgcccccacataacttgggtagaattatcaagttcttggacatagtattagatggcataactcctacctaagactgcgaagaagacaaggctagtttataagctaatatttgagaaccctctttatttacagcacgatgctctccatatgtttttccaaacttccaaaagacccctttatattttctgttgcttgcttacagaggatatattttcaaacgtataaggtcaatgattttgcatttgcaagggtgagatcctttaaaggtaaatggcagagactctgtgcactccatgcatgagcaaggcgtgcgacgtctgttctggggtctccatgctttcactgcacacacacgcgtggctggtgcttaggttcttacttgccttttgttttctccttcagtgactgaagcaaggctgcgtgacgttccatgttggagaaaggagggaaaaaataaaaagaatcctctaagctggaacgtaggatctacagccttgtctgtggcccaagaagaaacattgcaatcgtaaagctgggtatccagcactagccatctcctgctaggcctcctcgctgagcgtgtaactataaatacatgtagaatcacatggatatggctatatttttatttgcttgctccttggagtgaaaacaaataactttgaattacaactagaattaaccgatgctttaattttgaggaacttttttcagaattttttatttaccatggtccagcctaagatcctcagttgtatcaggttttgtgcacaaaagaaaagcacaaaagttgaacgcacctgaggcatgtgctctctgtgcaccaaatactcagatgggcttctttttacaggcctacagtctgtgtc

SEQ ID NO: 22257 - DNA, 1902 bp, Mus musculus
cagatagaatatttattactctgtatagagagaaaagtgcgtataaaacatagagcttacattacatgcacgcagtttcatgtcccataaatcttttatattttttaatttacctttctctaaatgatgtgcatggaatatgccttattacagaaatgctattcataatttgactctgtggaaaagtgcctatgtggtggtagtgctaggaaggcaaggaacagattatcataccagtttacatcaccagttaacattttatattgtgatgtttaaaaaaagaaaagtttatacctcaaatgtgtattttattttgcaatcagctatggggttgggatgggagaacggggagggttgggagggaaagtttatttgctataggcactggtgggaatcttggggggggggacaaaaaacaacaaaaacaaaactctctacacccactataaatgttcttctgtttgcatttctggtaactatgatgaaccagacaaataactctcaaaacgaaattggatagctttattttacaaacgtgcaaagtttatgaagcagggtctgcatctaattattaccagtggcatttgcactaaatgtggtgataatcttttacaatttattctgtaaataaaatgttacactaaaaatacttgtagtaaaaagataagcaatgatcattttagtaatgatcttcagtaaaagactggtactttattggagataaccctgcccagtcagatttagaattgagttcagaaatactgaaagtattcaaacagtcaaagttaggaggagcactggcgacgttataatattcagaccgtcaagaattactttcatttggctaatccctacatagtgaatatttattgtttcttcataacctgggtatctatcttagcctaagcccccatcccacacacccccaaaacaagcccctttactcaattctgctggattattctgtgatgttagacacctgaaaaatactggtgatgtggggatttgtccctgcgtgtgagtgagcataaggagggagcagagtgctcctcctggggttgaggactccatattggaggtagagaaacttgacttggtgttgctacaggaggagcgagggaggaacctgactaagagagatgtgtggaggccaagtgaggtacaggaggcatggctctcaactgtccgtttccatgactacctatacacctatccaatatcagtgtcagtcgctacagaattttaactgggctgagctggctctcttgtgaaattgtgccggttatcttcagacgtctcagttgtttgtccgatcagacgcgtgaccagtatgtggtccaggctgtacaggtgatgtatttggattgtcgtcgttgttcatctacagactcaaaacataatcattttaaagtaccttgggagtgtgtagagtgtaactataatagctttatgattctgatgatgtttttttaaaaatataaaagatggatcttccatgttacaatcacaaaattaaaaccagtatttaaaagtggagaagtattaaaatattacaaatatgctcacttgcttgatttgttttccttaacctcgaggtactgttttaggtgatcttctgggtaattttaaaagtttccttgaattattccaattcaggaatcctatttgtaacattagggatcaagtaactctgcgggagcaacctaatgtttgctaacagatgagagcgggcaaggactaaggtaagcgcctgtcagccttctgtctgtcctgtgtggtatgcatatgtgtatagtgcagtgcaagctaaatgaacttattatgaagtacacctaaaagtcttagagccagagagtgaagcaacataactttttctgagtttctaaactagcaatgctgccc

SEQ ID NO: 22258 - DNA, 2296 bp, Mus musculus
ttttcccaaatgaaagttttataatcctggtctgggaattaccactaaaatgtttggacaacttcagtccaagccctggaatccagatttaaagaaaacaaaacaaaacaaaacaaaacaggtgtagtgtcatgatctttaaagtccaagctctgggcagatagagacaggcagggcctgggggcttactgaccaggcagcctagcctacttggcaagttccaggctactgagagagacccgagtgtgtggccttgtggtcttctgacatctacacattcacatgcaccccaactccccagttttgcattgctgatattctttgtgttactactttgtctttttctgacgtagatcaaagataaatttacaagatcttcaaggaacgtgcaccaagaaggcagcttgaggatcctgacactgaactgaagcgcgggcattgggttctcaaggactaacatgcaatctgtgaattaaaaatctcaatgcactgtctagtggaagatgaatggacatgatcagtgacacccctgcttggtttctggcgctttcagagacgtctgaggttctttgcacagagactcctcagatgtgggaactctggttctttccgtgctgtgttctggagagatctcacgtggatggtaccggtgctctgagcaccacagatgtgagctacagttcgtttctgaaagctaccacaagctggaaactggtgatcagtgtggggctcacctctccgtgggttaaaaatggttttaaatgacactgtagctgacagaacttctgatctttatttattcagtctgggttgtagaactttgcaatctaagtttattttttgtaaactaataattcatttggtgctggtctattgattgggggcctacttcttcatggaagaattacttttattctcaaactacagaataatgtgctaagtagtgctaaatagttcttgacgaagaaaacagtcactgcatttatctctgtgagtctttgttcagagaggcctttagtctagattctgccagctgtgccacactctgcactaaagatatcagagctcttagtgttacttagaggagagtacaagcaagtcggacctctcagaacttagagtgtgggaacagttttttttttttttttaaaaaaaacaaaaaacaaacgaccatttctctaagccaagtttcttttagagacattttaacttatttagctgaactctagattttttggtaaactatcaatctgtatatgttgtaattaagtgtctaatgctaggagtttattggaagtgtttaagaaataaaagaactcaacttttacactgataaaatactctagcttgggccagagaagacagtgctcgttagcactggtccaggaaaccctggcttgctttccaagcccaatgaagggaaagtcagcttacagagccaatgatggagccacatgaatggccctggagctgtgtgccttgttcctgtggccaggagtttggtgactgaatcatttatgggctcctttaatgggcccataaaagctcttagcttcctcagggggtcagcagagttgttgaatcttaattttttttttttaatgtaccagttttgtataaataataataaagagctccttattttgtattctatctaatgcttcaagtttggtcttgggaagctgacatttgtgtagaagatggactctgaaagacattccaagagtgccgcggcagcatgggagcctcttagtgattgtgtcagtattattgtggaagattgcctttgctgttgtatgtaaagtttcaaattgctcctcttgtgacttttcagccagtaccattttatttacctgagcttgtcatggaagtggcagtaaaaagtattgagtgttttatgctggtgactgtaaccaatgtcatcttgctaaattcatgttttgtacaattactaaattgtatacattttgttatagaatactttttccagttgagtaaattatgaaaggaagttaacattgaaaagtgtaagcagtggcttttttaaaattgaggattaaccccaagcctgaggtccagaagttagcaaagtctggccaagtggtagcctgacctctccactgagggtcataaggtcctccctccattatccgttatactatcagcaacatcagcagctggccagtgttgtttgtctcagtgatctttcttacactaagggttttaaaattcagatccataatctcaaccagattctctttggtgatcagatggggcaagttaagaggaagggaag

SEQ ID NO: 22259 - DNA, 1142 bp, Mus musculus
tgtactttgcacatataaaggtacagggtgcagttcccagcacacatacaagccacagctgctcagacgtctttggactagagctgtggcctgtgtgacatcaaagtggcagagcagctgcttttggaacagtcaggaagaatgatggcaacagggagtttaaccaaaaaaaaaaaaaagttggtgattgatttgtgaaaagcattggttaagtattgattatgaaaatctattcatttagtgtttaagttgaatgtatagatttgctttatttattatatgtataacttgcagtttctcagatgcccttggttgtgagaataaataatgtaatgtagttttttactttaatttgagccaaagagtaggagttggtgatcttaattttttttctggtctgtacaattttggcaccttctatttgagattaccgactgatccttgaaataattttgtggtgaaatgtttgttaattttcactcttgagttattaacatttttgcattgtatcattttcagattaggtcaatgaagtaaaatgcttagaacatcagtaggcactgtggggttatagagagctgcacttagtgctctgtaaggactgtgtactgagatgccgtgtcagaaaggcataactgcctactgatctgtgcattatattataaatcaacgtggacacatgggctaattaattgcttttatgataagtgagtctaggggagtagtgtagtttggaggataaagtaattcctgtagagtagctggtcttatagctgcttgtctcagccaaagtgatagcatttatagaagaattggaagcatttgtctgccagctgtgtgaaacagccccattacatacagctttgtgctgatgcttgggtctgtgtcctggcaggactgctgttcctcaggccatagatcatctttgtgttgctaattttgttgtactaaatgacaaaggatgtaatgtagtgagacttggctgtgcataatgaagcgcctgtaagttaagtggcatgttagagacccacactgagcagctgtgtctcactctctccccaggcgtccgccagctggagatcatgtgctgcttcggctgcatgtcagtgttggccaactactttgtgttcatgacattcttc

SEQ ID NO: 22260 - DNA, 1198 bp, Mus musculus
ccacctacaaactcagaggtgggccttacccaactgtaagcaaatcttttacagggactagaaagggcttgctgagcactgccgaggaccacgtagttttgggtagtagtagcttttcagttatttcattattggcacactcaacttcttggctctcagaggaaggtgagtgtttgggtacgtctagggcatctaggacttagggcctgtggaggacatggggagaagaaaaagttaaggcaaagatgggttgaggtggcgtagagcagagcttgtgttggttagggaacgaaatcagggagacaagggaggaaacactcatggctagaaactggcgttgtgtgtgaggttgagagagcattactgagcgctgcctagaaacctcaggtgaccttgaggaagaaaccatgtgagtcagggcagggtcatgacttggatgggttgagataattgtttctctgagaattctttcacctcagatatgtttgtaccttgatttgggcttctcagaagcccccaatcagtagcagaagcctgtggaaatcctgtaataattctggaacgaatatgagatacacttctcagtttttatggtacggttgactggcagtcagcaacagtaagtagagggaaaattacactgatagatctttttcctgctctactttttcatattgcctaagaaccttcattctgtcgtgtagttttataaatctaggggatggccggccatggtggcacacacctttaatcccagtactcgagaggcagaggcaggtgggtctctgagtttgaggagagcctggactacagaatcgaatccagaacagccagggctccacagagaaaaaccctgtttcagaaaaaaaataaataaaaagaaaaaaaaatccaagagaagggtgaagttactgccaggcagagatagagcatcttgggctggccttgggattcttttgtgagaggtctgcttatgtttctgtacagcttggccaagattctccagcttaacatttaatttatgaattaatttggacaatttttacacttcattgcccattctatgtccggcttttgatgagctagttggcttacggccccattaagctttctcagtcatgtagaatctgttaaggccttacatgggcagagcccaaagtacttgacaggatttgacctgacagctttagagttacat

SEQ ID NO: 22261 - DNA, 1378 bp, Mus musculus
tctcttgtgtgtcttttatccctgtcctccgaccctctgctctgcaccctctgctctgcggcaactacgtctcctttgttctgagaacttggtcttgggggggaacgaggattttttttttttaaacaaaagcaacaagtgttcttaactgctgagccatctctagccccacccgtattttatagtgacttttatgttgagggctatgtaaagggtatatttatacatacaatttgatgtatgtgagcatttgtgtatgtcttacaactatataaacgtttatgaagtacccatgaatgtttcattgcctattttttgttgttgctttgagacaaggtatcttatgttataggcttggctggcctggaactctgtggttcaggatactcataaactccaaccagttcccagcctcagtctcaagtgcttggattacacatgagccaccatatctggctttattgcctgttttgaatgtagatgacttaatactagaaagtttttggcataagtgcctaaatcaacagactataaagctatctatcttgacaaagtgaaatagaaggcgaatagtaaaatacagtaggttcctttgttttgggggtttgttatctaggaagaaaagaaggcatccgttctaagcatgttgttccgtgtctgttagagaatggcattccctgtggatttgctggataactgcacgcatgaggaattggaaaactcttctgaggattacctctccagcctaaggtgtggggaccctgaacatccagagtgcttttctagtctcaacattacggtaagcattccatacgtaagacttttaccatctgtccagttccacatgaaattagtaattaccagaaatctacaagtaaaatgtgttaatatcaactaagcaatattaacaaattgaatggcaaatcagggttttggggtatgtgtgtgtgtccatgcgtatgaacgtatgcattgttgcgtgtggggtgtgtatgtgcgtgtgcgcatgcgtatgaacgaatgcattgttgcgtgtggggggtgtgtgtgtgtgtccatgcgtatgagcgcatgcattgttgcatgtgggggtgtgtccatgcatatgaacgtatgcattgttgaatgtggggtgtgtgtgtgcatgcgtatgagcacatgcgttgttgcatgtgcacacagaggccagaggaggacagtagatgcttctgttgctttattctctggagaccgggtctttgatcagacctgaagctttgtcactgagtcaggtgtgccagagagtgagcctttagatccatgctgggagacagagaagctgaccagttttgctaagacaaggtacacgttgaagctgtgccacttaaatttactttga

SEQ ID NO: 22262 - DNA, 1137 bp, Mus musculus
aacttcccactaatcttgaatcgtcttatgtttcagattcccgttagtctgtcaaatgtgggctttgtccctctctatggcggcaatcagacacagaaaattcttgctctctttgcgcctgaagattctcttacaggtcctgcctttgctttgtttttttgtaaattgaggcacttgaattcacattgcgaggaatttgagaaacttacacaaacttcttttacattttagttttagaaacatgtaattctcacttgcatataattaaacctttagtgaatgcagtgggtttgaaaacgggtgggaagtgtgggttagggtctggggagggagggaggatagctgagggtagagattgtctggatgtgattctcagcatgactggacaggaaagcaagcaggaatgggtgtattttattgtgtatttatattccttattgagaagcagtagtgcctctttcaaccctttagacttaaaaatgttaatggccattttttctattttagctgtggcactttaccttgttggtcagtggtgggccattgatgatattgtgaaaacctctgaaccttctagagaggggctgaagcaggtaatacaatcacatccttccatgattcctgtacacagtgatggttgtggtgaaagcagggccgtgtgagcttcctcgggttctatggtcctgcctttcccgaggattaggtgagaaggagcgcgggctatgtgggctagcccacggaagctgcctctctctacttaagcttctgggcttctgtggtggaggagatgctggttgtgggcgcagctgaaccacatgaattgggaggaaccagaggcgtgccggattctgacacctcggataggctgtgttgcccgttcttggttttgttcttttgagggtaaaactcttaagagacatcagattcaaagggaaggaattttagggagtaatatatgagtattatttcttctggatattgtatttattctcataaggaagaaagaagtcttagaataatataccaaccatcattttttcttaatattgtatttattcttaagtatgcctttagaatctacagtaagaggcccatcttacagaagctgggagagcgcatatttggatatttgccagc

SEQ ID NO: 22263 - DNA, 1577 bp, Mus musculus
ggagacagagcttaaatgacaaggcaattagaaagaaggaggttgggtgtgtgtgtgtgtgtgtgtgtgtgtgtgtgcgtgcgtgcgtgcgtgctgaaattcgcaggagctggccgggctgagatgaagcagagctgaccaccagatcagtaagagtagagcccaggtcccagaagagaagggaggcccacgagacacatcaaatgaagaatggcatactcagaatcagcctgagcaacagagtaaagaataagataatatttattttaaggatgctaagtagaaatggcaatacatgtaggtcatgtgtgttttaataagaaacagtaacgggcttcccggccagacggcgggacagacggctgggtgtgcagcgacctcgaacccgtgagccagaaagcagagcttctgcgtcccagggactccagcacaccaccatggcggattctgagcgtctctcggcccccggctgctggttagcttgcaccagcttctcgcgcaccaaaaagggaattctcctgtttgctgagattatactgtgcctggtgattttgatttgcttcagtgcatctacaacatcggcctactcctccctgtcggtgattgagatgatctgtgctgctgtcttacttgtcttctacacgtgtgacctgcactccaagatatcattcatcaactggccttggactgacttcttcagatccctcatagcaaccatcctgtacctgatcacctccattgttgtccttgtagaaggaagaggcagctccagagttgtcgctgggatactgggcttacttgctacgttgctctttggctacgatgcatacatcaccttccctctaaagcagcaaagacatacagcagcccccactgaccccactgatggcccatgatcgtctttcagctgtctctgctacctgtcaatagctcctccatcaaaaactttcctcctgtcgggcggtggtggtgctcgcctttcctccaagctctcaggaggcagaggcaggtggatccctgtgagtttgaggccagggctacacagtgagatcctgtctctaaaacaattccttctccggtttccacaacactccagccaattctctgaccccattgaaagtgcttatggtacaagagattgaacctagagccgtgtgcatactaggcaagtattctccactgagctacatccctgtaaaagtgcctttattgggagttttgtcttccagcctgccaatcaacccatctgggtgtagccacctttatgggtgtgcctagattcccctttgctctgcagtaccagcagccgacatcagttctgcttgaaccatatccccacataagctacaaaatgagtgacccactacaaataacctttttctctgtgtggggtgagctgtgaagggctaaataaacaataaaaataatgtttaagtctaaaaaaaaaaaaaaaaaaaaaaaaagaaacagtaacggccgggcatggtggtgcacgtctttaatcccagcactcgggaggcagaagcaggaggatttctgaattcaaggccagcctagtctacaaggtgagtttcagg

SEQ ID NO: 22264 - DNA, 1194 bp, Mus musculus
cccaacctgtgtgtgtgtgtgtgtgtgtgtgtgtgtgtgtgtgtgtgcgcgcgcgtgcatgtgtgcgtgtgttcatgtgtgtgcgtgtgagtgtgtggagacatgaggtatatgctggtctcctcagtcactcttcacctttcttggaacagaattgctcagtgaacctggagctcactgattggctagactggctgctacctcctcagcctttttacctttttctgtagaagttagggattgaatcacagatgtgcactgacacccctggctcttttactcgagtattgtgattgaattcaggtcctcatgcctgcgtggcgcacagtgtactgactgagctgcttccccagctgctggacaatctgtaataattttataatcgttatgctgaatattatacagtgcttttacatcaggtgttcagaaagttcacttaaagtttttgttcaaatttgagtcatgactggtgattgagttacatatctgtcagtcccttttctgatgccagtggcgaccaataggaaaggtcacaaagaatgcatgcttactcttctggtgatgctttctgttggtggagctccaagtagtacaggcatcatggtggaagatggaacacagaggagaactggatcaaactggctgttgtcagtgtagacctgttgagaaccttttatttttttggttttttttttttttttttttttttcgagacagggtttttctgtatagccctgactgtcctggaactctctctatagaccaggctggcctcgaactcagaaatccaaaaacttgtgattctaatggggagtgtgtttcagcatgggttttagagataaactgtactcataccatatcatccttcttgtacaacatttctcagcatcttagaaaaggatggatgtaagcttgtgggactgaaacactggaaagaataaagtacagtacagagtgcagtgaattcattgcctgagatgggctctgagcttcagctatctgaagatgaattgtaattattttattttaaattaataaaatttagtctgtctaaaatttacagtgttgggtaacttgaaacatcttctgagccgggcagtggtggtgcacacctttaatcccagcacttggaaggcagaggcaggcggatttctgagttcaaggccagcctggtctacagagtgagttctagga

SEQ ID NO: 22265 - DNA, 1186 bp, Mus musculus
atctgacacctgacctccttggccaccaggtacacgttatacctacatatatactggcaaaatattcatacattaaatacgcctgaaaggtaaaagtacaacacaaaagacaatgccaggcatggtgcacacctttcatcccagcactcgagaggcagaggcaggtgggtctctttgttctaggccagtctggcttacagagtaagttccagaatagctaggatgacacagaaatcctgtctgaaaaaacaaaaacaaaaacaaaacaaagcaaacaaaaactccaaaataacaatgacaaaaacaatacctgacctagactagcccaaccaatgaaataacccagtaaggattgggagttaaaataatatattcataaagaagcatggattaggctttgtggatcaatggattagtgacaaggtattataagggagacatatctaaaactcaaatagtattaatataaaagacatgattggttcataatttaaaattttttcttcatgtagatgtttctcaatatgaagccacaagacctgtgtctggagaatatggtcttgctgctgtaccagaacatgaacctggactggacgacactcagtctagtgagctgcaggtacacctttgaccctcataggaaactgtcgtgtttttgtgtcatttgtgtttgttgcttgttttggggatagtgagcactgaacgtggtatcttatgtgttctgggcaattgttttaccactaaagctcattcccagccctgcctggtgctctttattttgcggtgggtctcagcatgttgctcaggtaggcctgtattctagcctagtttgaacttgaaaacatcctgccttggcctcatgaatagctcagactggaagcttttgtacccaaagtttcagacatttattacataagcttaggtaatttcaactgcattcattttcttggtggctctgacagttgattattaaagatttaatgttttttgaaaaatatttgtaatgatgtttacagtattacaagctaattaaaactaatttaaggttacatacatatgtattgtttattattgagacagtgtctcattaagttgctgtggctgacctgaaattcacaaagtctcacctgcctcttcctcctgagttctcagactcagtgtggcaccatgcctggcaagcccctgt

SEQ ID NO: 22266 - DNA, 1135 bp, Mus musculus
cctctcctccaactcctcctgtgtccttctccaactctatctctaatttataacctacggggatcatcttcattcaaaacaccaggttctactccctgatcgccattgtcttgtggccagatcaaaatgccaagtgcatttaatccaacttcagaagtcacagtaagggctggaaagatgcctctgaggttaagagcactgactgctcttccagaggtcctgagttcaattcccagcacccacatggtggctcacaaccatctgtaatgggatctgatgccatcttctggggtgtctgaaaacagcaacagcatactcacatgtataaagttaataaatcttaaaaaaaaaaaaaagtctcgccgggcgtggtggcgcacacctttgatcccagcactcgggaggcagatttctgagttcgaggccagcctggtctacaaagtgagttccaggacagccagggctatacagagaaaccctgtctcgaaaaaccaaaaaaaaaagtcactgtaaatttttagtctcaatactttttatagtccaaagttcaaatacactctgagatgcaaggcacttgtaacatataaaattaaaaatcaaaaaacaaattacatagttcaacatacagacccagaacatgtgttgagggaggaaatgggttatagtgaggaaatactgggctaaagctagacgaaaccatccgagaaaacgcaagtcctgtagctctttctgtcgcatggtgttcttttctctctacactgtatactttgtgtttctttatcctcacttgcactttttcattgtcaacctgcatgtgagtgattgttagcaatgacactgcagagtggttggttatccgtgatttgcagacagtttaggctgccttgaagtctcctctgctgaagaaattgttccgttacttctcagttttgtcttgggcaagttcttcggactggagcaggaatatcaccgggatggtatctagccagattgctgctactcccttccccccaggtttctccatctgggtctccacagcccacattgttttctgtactactgtcttctaagctccgactaggatggctggttaggctctgcttacagcattcaacctttttcctaatctaaagtc

SEQ ID NO: 22267 - DNA, 1854 bp, Mus musculus
cttgttgttattgttgttgttttaaactgcagtaattaataaacagcatggggcacaggacagattctaaaccttccactggaacttatttacacatgcaggttttctctttcctttagaacaaggattcgctgttctttttcatttttcaggctattttctctaagtaactttcgtttatgaaccatgtgtcaattttggaattccaggtcatattcttcttcagcaggtggagcatctaatcattaatattttaaaaatacaacttaaaaagaactattagactttgatcataggaatcttttatactaagggttttaatggtaaaatttggtaaggattctcaaagttttatcttagtatcaaaacaatctccatcttttaggtgtaagcatacctaaacaaaaggagtcagttaattaaatatagtatcaagttagagaacaaaaaatagaaatttatgatcagtggtttatgaagatggtttttgtttttatttcttaatgttagttgtagatggagttcaagtctgtgagaagtactttaggctgcatatctggtgttagtactgttaaagatataactgtggtgtgtgggtacataatttaaattttaaatttaatacttccacatgaagtattagtttgctataatttttttctctatatattttcagatgctgaaaaccttgagtacacttttatcttttaaacacctcaagtaattgaagttaatatatagttgaatttggactgtcgtcctgatcacagatagtgcagaagtgtaggcccctccccaagcctccttaattcttcactgctgtctcactgtgactcttctatcaacagacctccacccagcttgcctgttatgccctgtatccatatttggataggtctagaactcaatccaaacacctttagtcctagatggaaggaataaagctgcccagtgagatgtacaaatgcctagattctgactctgcggtccctttgggtcttgtatactttaagacagggtttctctgtgtagcattgactatcctgtaaaccaggcagacctccagctcagatctgcctcttcctgctgagtgttgagattaaagacatgcagcactaccacctggctatttgatattttagaaatatttaaaaaaaatgacaattggtttttaaatggttattagaattcatagaaaattggtcagtggcacttggggaataccacatactttgatttgtatttcagttagagactattttgagaccaattagaattgtttttgaaacagcttgaaccttgtgagagaaatgttgagaaattgagtcatgaagtacttgtgagtttatgctcagtcatttcagtctttggtcagctgattggtgatttcatgtcttacattttaatttagggatgttggtattttagaaaagtctgattaattagttaagaccttaaagcagcaaaccaaatagcaaacccttgaagttagaacacttgcacttacctgttgttttaattttggctagatgttagataatttcattctaagtgaaaattatactttgaccatttttttttttttttttggtaaaagctgttataaaatagatttgactaattagtaaatttgccaaatgctgatgctgttttacacgtttagagaaatttgttaatatctcaaccagggatagcatttgaaaggcatgttaagattcagaaattgatttttaacacacatttaaagttttctggatatgttgttttggtattttgttttggctcctgttccccttccattacttttttaaatgagtgttttagtagattgcactcactggcagctcaatgtat

SEQ ID NO: 22268 - DNA, 1120 bp, Mus musculus
ctgggcgtgccgcactccaggaacctcctgtatccaggaatgcagcaaccctgaacttgtcctttgaggtatgtgagtctccactgcatagacatggtgcaacaggaaatgtgactagacaggaagggtctgagcaaagcccagacatcctgcagcttcaagatcctctctctgtgcagcatccctcccttggggtacaggacaggtcccctctggaataagtagggtcataggacctactatcaggtgagataggtcagagaatttcgttaaggccagctccaagacagtttattccttcctggtatacattacatttaatacatcaagatgcctaggttttctgcaggcatttgcttggcctgtattgagcctagaatgaacttcacctcccagggttattacctttcatatacatgggaactgtaagctttctattcccataagtgccttgtttctcctgtgctcttcttcctaagacaatctcggcctcttcaacctctattcctggctccctgacataatgatcaagtcataagcttgctctccgatacagcaatacctcagcttcctgtatacaatgtatatgctttggggagggctctaatagagatgtatcatgttgctctctgatacagcaatacctcagcttcctgtatacaatgtatatgctctggggagggctctaatagagatgtatcatgttgctctctgatacagcaatacctcagcttcctgtatacaatgtatatgctctggggagggctctaatagagatgtatcatgttgagtacatatgaagaagcacttatactttctcttcattctttctttgcttaaaaaaaaaaaaaaaaaaaaaaaaaaaaaaaaagcactgattggaagcaatcccaatgtagacagaagtaatacgtactgttttcttctgtggtacagaattttccccatgtttgtttgcaggatgccatggcttttaataagtttaatgttcttcactggcacatagtggacgaccagtctttcccttatcagagtaccacttttcctgagctaagcaataaggtgagtaattcatgccattgttatctgtacacaaacatcttcagcatagcttcaccag

SEQ ID NO: 22269 - DNA, 1142 bp, Mus musculus
cagtggtaggtattagtacactgggcacttccccagggatctggggaagaccagagcttgcagctctgcctgctttgatccatatttctcacagtgctgtattaaaaaatagaacctaaggcagatagccacctttacattgtgagtgtgtttaccttgtctaatgacggataattccttaacatttctctccaccttagtactttaggctaattatacacgtctgtctgtgccatgagtaagtggactgtagttggaccaaaaaaacaaatgagccgttggaccatttgagcagtcagtttctggtccttagatgtattctaagcagtgtaagtgtctgattgtaccctggtggcatgatcagttgtcttgtagctgtcccccgctccatagtttacaatgcaaatctgtctcaagatcttcacttcgctgctgctgagagcaggagaattttctgcagctgtttcaaagttgtggcctggccttgaatcctctattaattactgtgtgagccagagggaactgccctgcaagggtgggcccccagccggcaggggaactttctagactcccgctcattcaattgatctaggcatttgggcttgctacttgaccattctcgccctgtgaaatgtcccacactttgaagcaaatacaattcacagcacagtacacacaaaaaccctggcataagacggggaggttcttcttattttgtgagccggttgccctggaaacggataacaaagggcagccttccacttctggtataatgggggagcctcttttctcaggcttgacacctgtctgaataagagtgattagagccgcataatatccctctcttggctattgaataagtggttcacatacccaaccctgtagaagttagaagatggtcggtcatgtctgtatgttcttgtttgcatctactacatttttaaggttttgtaaaactgttatttttttttcacgatgtgaaactgaaggtcaataaattattagagattttctcttcattgtattgtgagtttttatttgacagcaatgaaaattttggaaatgtgttttctcgtataatcaacgtgaagattagttcacgtgttttctgaacgtttcatttaaccatttagcaccatttt

SEQ ID NO: 22270 - DNA, 1050 bp, Mus musculus
agaaagaggtacattcagtgttctacctagggctgcccccctcttgactcagaggagcaggaggtaagaatgtgggggtatgcagagaccagctcctctaggctgctgatcacagtgtggatgttgtttgccttagggagcaacaaggatttattaaccccccaacagggagcatgacacaggattaagaactcggattatgtttaggccccaactgtggaattcaacattatactctcgctctaagttataaaacacacacagtaacaaccttctctttagatccacgcacggtcttttctgcttcctcattccctgaagctctgatgatgtctaaggatgattcattccggtgagctaatattagacattctaacttccagagagatgaattacagaagaatgattgcaatatagagagatacatcagtttgaaattcagaagcctgagaccagatggacataaacagaatcccagagtgtgacactcaggctagttcagtggtaactttgacttgggaagccacttcccaacttgaacatgggctggtatccctagaagggcttggttgccaaaacctagaccccttcacttagagtgataataattcagtctgggcctcgcccaggagctaacaactgaattggactgagaccaagagttggcactgccaacatgttcccaggtgatgctgatgatactggtgtgggtaccatatcctgagatctgctgacttaaatactcactctgatcctttacaagtaaggaaagcagaatgcagaaatgggagtgttgcctaaggcagcagtgagaaaaatggaagccctgtgattgaatttaaagccaatattctttccattcaaactgtgactctattattactcctaacaaaagactgagtgcacccacgctaattcatttacttgagaacaaagagacgccaacccctccacccaccaaactttgacttcttgcttggaggctattgacattgaggagtcatgtgacttttcttgcttcagcttcagcaaaatgatgatgatgatggt

SEQ ID NO: 22271 - DNA, 2712 bp, Mus musculus
tatgaatggaccccccacacccaccagtttaaaacttctcccccaaactatttcttgtcatgacatgagtcaaagtcattggaggcaaattacggttcactttgtaagtagggactcatttaaagaatctaaattccaatttggacagcaaaaggttaatggtgcatagaaaaaatatcccagcagcctacaaatctaagcataattatgtatgaacatgaggcttttattgctgtcaaaattaatcacttttcaacttccagctgttaaaacccttctggaggctctccaagaaattcccctacagttactcttccttcaattaaactctgtgcagttcacaggctcctgttacataagcggcaatttaaatatggacttattgggtcttccagtttttctccctcccttcctccttccctccctcactccttctctgtctttcctgtctttgcttaacactataaaatgacaaagcatgacgttttcttctgacccctttagcacagctcttaatcgtatagtttaagaagcaggctgtgtgaggttaacgaatctgtgctccttccaatgcgctctaggtgtgttaagtgactagcgatcagtattgttagccatttccttaggctgtccctctgaggtgtgtaaatgttatatggcttactctctttctcaccccactattcttctgccccctcaccccataaactttataggaagtgcagtttacaaatcttccctaatgggcttagtctaaatttcctacatcgctttctctggagtgacggtcactcccctcctttcgtaggactgcgtgtccctatgttgcttaggctgctcttgacctggtgggctcgaggagatcctccccctcagcttcacttccttagctacacacgcagtttgtcatggtgagggtgatcgcagccatctgaggtgtctgaagccttccagtcaccctggaagagcttgtggtccctttcttccatcctgaaaaaaaatctgctcagaaatgagttgagtctgggagcgcagatgcccagggggcatgagtataaatcctcaatgagattcataaattgctgcagcatgttattattggggcttatgagtggagatcagcccacatctctgcacttgcctggtacagactgagtgcttgcatgtggatagcatgctgggtgtgtgctggcttttttttttccgtagaattctgagagaacagtctttatattctttctcagtgctctgtggggatggataaggataacagctttacttcacaaagacacttatattatttattttattattattattattattattgagacaggtttttctctatgtagccctggcagtcttggaacttgcgttgtagaccaggctggctttgaattcaaagacagccctgcttctgcctgtgctgggattaaaagggtgagccatcacaccagcttggggatggggaattttaatccttctcttcctctcccatgacatcagggcacaggtgctaaactaccccagagtcagcaaggtcagcttcattttactgagctgtcactcatactgaaggggcctgccctcctgtgtccggtatgcaaagcatctttcctggccactccggtaatctttgcagcctcagcctcatcaactctgcttcatgctgttcagtaagtatgtgtgcaagtgctatagggaacagacgcctgtcgtttgaagaagtctctgccatatctgctgtcatcctctgctttcccgcaaaattaatgttcttccagatgcaaattccttcccgagcctctctacctgttagtggcatatggcagaagatctgaacccgggccgggggcatgaagacatctttgaggaagagagaagggatattttgtctgaaaaacataaggatccagcaaacacctgtgttatgcgttgttctaaatatgcagtcttgtgctgatgtgtgtttatgtggtcaggaggagagacagcatccagagggggaatctatatcccattatccccacccagactctaaccggcatatcccagaagccccaagctagggctaatttgggacactgaatggattccttgtgcaatcaaagtctatctgtcccagaggacagggagtaagctgtgtgagttgagtatggtatgtccctgagggtggtttccaggctatgtagccaccaacagcctgctgaccctaccacactcacactcaaactcacattcagcatttgcacagagaaggggcagattcacaagtcaccgtcagattctgtctctcagagctgaaaagaagtgtgctagcctcctgtcctccttcctaagctggctgcttagtttctcatgtggctgagttgattttctcgatcaggctaatttagacaaattttcccgaagccgagggtagacagggttaagattaaaaatggttctgacttttgacaactgaaggccaagaacctgccagcctcttacagcatgggaagctttaaaaagctgaggaacaggcctgaggtcatgtttgggtcaaagacaggaaggactgagggtaaagtattttacctttctatctggtacttaatatgcctcctaattgcaggacattccttaggcatcgccacacacgtaatttctgctaattggcttatgtaacacatgcatgattattgcttttcaatggaagcaactctgtgcatt

SEQ ID NO: 22272 - DNA, 1096 bp, Mus musculus
tgtgatcctcctgggacagtaaagccacacagggcagcaagagcagcctttctgttgccggagatattctgtgggtattgattcggctccctctgacttacttacaatgagctcccaacacaatcgaagtgatgtataaaaccgtgaggctggagcttcggccaagcagaggcagtatgcaatacataaaagctggaagccccccttccccccccccccccccgccgcgcttctgtgacacttccagctggaagatgaatcggagccacacattccagctctgcttgggtagcacggaaatatgcaagctgcaatcatctaggtatgctcactacagctaaagtggtgctgtggtgccagtgccacgtgccgcgaaggctgccagcgagcattttttccaaggaccgattattgggaaattcagcctttcctcctctcgctccccaaccattcatggaaaggttgccatgtgccaggaagcccgactatttcagtcagtcatgaagccatctaagcacaggtgttggaagaggtcagcctttgagccgtgatttaatacttaaaggtttgtggatagtaccttttacattagttgcctaagtgttagaagggtccctagtgtggggtgaacacgtcctcatagttaaatcgggaggctttctcttaaaagtgctcagtgtggaccaaaagttacataagcgctttgccttaaaggctatccagttggtctttcactttagttcaggcttaaagaacaaaaatagctttctggttttgtctccttctggacgagtggccatctgtttaccgtttaatatcaccagctcatgacttttcaaggaactgcgcaggatttcatggttgtgcatcagggacttccttcccctagttcactcttccactgtggtcccttccaccgggataacacaaaagcacttccctgtctcttttggtttatctgtgacctgcccccaaaaacacatatatgttattttaactcggcagttcataacctgtgggtcacgacccttgatgtgtcagatatcttgtatatcagatattttcattataattaaaaaactgtagcaacattagt

SEQ ID NO: 22273 - DNA, 3820 bp, Mus musculus
tcgtcggtataggtaaatgacatgaagaacatctttataggcaggggatgagaatctgagatgaagaaaagaggctcccctgatggaccattctaagctactgtcagaagcaggatccatagaacttaaggacatgattgcaacaattatcagacattggcctcttaggtcatggtgatcttttagtattttggctttctgctgtcctttcataaaggaacctcatttttagcttctattgaagatataaaatcatctcatagtattttctcattactaggagctgtaaatcacttcaaagctgtctttctccttgatcatttgcatatcaaagtatttctcttgagtacggtgatctctccccctgtggtttgctgtgtaccagttctctctggatcctagggcctagggaagtgtggattccaagtgactggtgtttttctacagtagagcttttttgttggctcttacctgggaggacaatggggaagggccagggccatcctgttctttgctgggtgtgacctttcctgctctgcttcagggttccatgctgaaaccacctttagccatcatcgagtgggactcctttttacattttggtgatttcaatattgtttttgtatgggttttgagtttcagtcctaaatctgtgtggtgtgacagagggaacctctacacaaaggcctgccaatctgcaacctcttcatgctgccactggttagatcaacagttcactctagacactgaaccttgcctgcatgcgtgctagtgtcaccaccaacatcagtatcactgtgcaccagcatcagcatcactgtgcaccagcatcagcatcactgtgtatcagcatcagcatcactgtgcaccagcatcagcatcactgtgcaccagcatcagcatcactgtgtatcagcatcagcatcactgtgcaccagcatcagcatcactgtgtaccagcatcagcatcactgtgcaccagcatcagcatcactgtgtaccagcatcagcatcactgtgtaccagcatcagcatcactgtgtatcagcatcagcatcactgtgcaccagcatcagcatcactgtgcaccagcatcagcatcactgtgtatcagcatcagcatcactgtgcaccagcatcagcatcactgtgcaccagcatcagcatgactgtgtaccagcatcagcatcactgtgcaccagcatcagtatcactgtgtaccagcatcagcatcactgtgcaccagcatcagtatcactgtgcacagctcaatctccatacgtcaatcgccagatcggtccaaaagtgtcttgtctgtgtgtattttctcccactttaccactccactctggcttaagccttcccacctgctactgtgtactgtgtggttgctggctttgggaactcccaaactttccctctgtatttcatgtttctgttggcctgacaagtatctctttctaaaaaagtactagtttattttatgtgaatgaatgttttgtctgtgtagctggtatgtgcttggtgcccatgaatcccagaagagggtattggatcctctggaagtggagttagttacagatgcttgtgagccttcatgtgggttctgggaattgaacccaggtcttttggatcccagtgattttaatggtcgagctatctttccagctccttcagggcctgagagaggtcctagaacccctaaattccccagtgactcccctttgttattctgagaagtttcagcttcaacttgccattctgggaaacacaggaccctataatccacctgccttccgggatgaacacatggcttcacccctgaaggcagtgcttaaggcactgcatgattctccacttccaaacgtgatctgtattttctgcccacctacctctttgcttagtcattcactgtattattccctattctgtgctgagcacgagtgtgctctctctctctgtctcctttctttttgctttttttttctcatctttcttttttttttgtcagttttatgtatctttgaaaattttattgaatgtaacctttttaagagtcttggatgcaatgtcctttctttgagccttgaaatctgaatcatctctttagtgtattgtggcaaatgacggtgtttctctgtgtattcctagctgtcctggaactctttttgtagatcaggctggcctcgaactcacagagatttgcctgcctctgcctctcaagtgctgggatcaacagcatgtgctaccactgtccaggtcttgatttcttgatttcttgatttaaaagaatgagtctctgcataaggcttgcctaggccatcagctacaagcttcactggacagtgtacagacagcatagagttggcttcatactagggattgagcatctattggtggaataaatacatcaatatgtggaatattgcgaactcaagacctcttcctatactaaacttctctaaatgtgcaagactctcagtatagtcatttcattctagatagtctctgagtgttgccagaaagtttaggggcaaagagggagctatcaactataatggccgtgagtggaaaccacaggcactgagcagcttaatggaaaaagacaagttctgtagactcttcagaaaggcatcaatcacaggatgacggcagctttgggagacagtgaagagatgcttgagtaggagccagagtgtgaaggagaaagtctcttagaattggttttccaaagccagagcctgagtcacagttagcacacctaggaaaggcacatgtgtgtgtgtgtgtgtgtgtgtgtgtgtgtgttgtgagggtgtggcagtgggttggtattatagatttaccttgtttggactggtgacctggaggattgtgcctgctattgctctcctgatgggattctgttcttctccctctgggtgttatgcgactgcttgtggctcccagagagaatattacaaacaccactgattatgttccttctcaggtaacattcttctgctgtaaaatatcctggctgagtcatgtttaaatacaccaaagtgtaatgtggtcactgtgataattctgaaacacaatactagcgtcttaacttctctcttggcttttgcagcatcagagatccaaaatgattcagtatgacaaatgcttattgaaggcaatgtcgaaccactgtgttgagtctctaattgtcctcaggagagaaagcacgcagacatgtacagaatgctgggcaggtctcaggcttccgttctaatgacgcaggaaaggagagccaatagagttgggtccattatgtaaccaccttgggcttaatctctttgtcaaaagagtcctaggatccctcaggctgcagacttatcaattgtagaatgtctcccttctggagggaaatatgtcacatgagctccatcacctgtaattctgtcttcacatttgctgtttcatcttacaagagagccgtgatccctcactagtaggcctccacctactgatagccagaagcatgaggggcggaggagggaactgcagggttggaggaggaaggcctgtctgtgttccagggcaactgacgcatctcctcagaaaataaaaatgtttttccaagagctctctgatggcactggccagaatgaggttatagacctcggctacgaggaggttgacatttttcagctcctgtgataaagtgtaagaaagaaggggcaaagactgagttggggtcagccagccaacaggcttccttattggccatggcctcgcaggatgtaaccaaggaagggtggttaatgagttaactcctgggtcagcgccagac

SEQ ID NO: 22274 - DNA, 1070 bp, Mus musculus
aaagggaaaatttttagggttttgttgttgttgttgtttgtttgtttgttttgttttggttgttttgtccaagggatactgtccattacacatcctggtagggagagaatgagggtaagaagaggaagtggctgatatcctacctctgcaggcgggaagcagagagcgatgaacagcagtgcttgcccaactctttacattttctccatctatgacatcagctcacagtctacataatccagcagactcacggccagatgcttgtcccctaggtgtttacaggttctgtctcaatgacgatcagcactaaccatcacagtgaggaaggaaagcagagattgtcctggacaaggtgcttagcttgctcccccctctccttcacatcataatgacaggctcttccttttatgtgggttcccctgcctttgaggtatctcagcctctctttgcactttgtgtcagagtggggtgcaagactctacagaggctaccacgggacttctggcctatcagagaacgccagaccttagtgtcactgttggaacggtagattctgaagatatccagaagctaagaggaacacagagaggggacaaggagtcagataccatgaagtaaacaggtaagtttatggaggaggcagtagaacctgaacattggtggaatgagcatcctggatggagctgccatacttaggtagtggttatttttctcctgtgtcttgggcatcctcccaatgccctgctgggctaccatcttctttcctcctcccgtatctctgtaagtgccccattctgggagggaatggcatacaaatacttctctctggtcctcagtaactatggagcttgactcaaagaaaagaagagcatttcagcctaacagtgagctcttctgttcctaattagagtaagagagggaggctgacaaagaacagtccccgcagctctcgcccacccgagctgtgcctcaggaatggccaccctcatggctagctgaagaaactgctcttttaagacaagatattattctgtcctgtgcacaataccccagtacctggtgccaggact

SEQ ID NO: 22275 - DNA, 1109 bp, Mus musculus
agaaatgattccagacgaggcacaaggacactcttttgcacctgagtaaagcctgcagcacagcctctgtgctatggtccctttgctggtggctcccaccctgtgttcgtagctctccttgatgaaagtgagtcctgcctctttggtcatctctccagtgaaacgttctgctcacatttgtctgttggagagagccaaggtttctggctcagcctgttcctcttatgtccaggaccaatgacctcaccatgtttggtcaattaacacgctgtttccaaatcagcatctatggatgatggatacattgtttgttctagcatgacgattgtgtggccaaagatcacctctggcaccagctttgcttttgttctgaacacattatttctcatcgcaagtttgagaacaatcggcttattgatcaaatgtaagaatcaggggcggactttgccagactaaggctcgctgggtgccaacctgaaagctggtgaatctcctttttggagttgcatctttgggcatgagcatggtgatgagagaatgtgcctctaagttcttggctttttgttgctgtgccttgaaaataccgttctcatctctgactgagggacaacacatggtaaacagctcaccaactagttagagcacaccaggttggattacttatgtcttctttggttttctgttgtgtgtactttttgctaccctgctttaaactcctggtggactatgctatgagcccccacccagattcccttagatttccagataaaatgcatgcacacacacacacacacacacacacacacacacacacacacacacacacacacaaacgctggttaatcttaaatgtctttgctaactcaatgagttccccagttctcctgattctccttggttcctccttctcaactcttaagtatcccacccccatcctcagtcattggtcactggtatttttattgattgatcaagaaccaattgggaacaagaccttagcatcagaaccactccctacagttctctctccttgtgtagacttccccaccccagttcctccctgctgacttggcaggtaaggaagcatcccacttaggtgagacaccaaa

SEQ ID NO: 22276 - DNA, 2934 bp, Mus musculus
attctaccatgccactcacatatagccaaatagctcagtcttacttattatgtgtgtatatgtgtttgtgtgcacatgtgccagtagaaatgcatgtatgcatataggccagaatttgatgttagatatcttcttctcttaccttattttttggaaacagggtttctcactgaacttggagcttgccagttcagctaaattggttagccaacaagcctcagggatcctcctatctctgcctctgccccagcttgttttcttaaaacataggttccctgggattgaacttgtgtcctcaggcttgtgcagcaagccctttactgactgagccatcccctctccttaagaggttcaggattttgttgaacttgccctgtgatgggagagctgccatcagtgtttgatgatcaactttgtgacgtattttctcagtagtccctacctaaaggaaatgatctatcaggtactcattttggtgacgagaggacagtaagatgctggtgtgtgacatgagattcattgttctctctcaattcaggaaaggtggctgcaggaaatggactctgtgtttattctgctctctctccctctctctgggtgtctgttggccttggctcagcttcgagctttctgggaacccaaagccctggctgatggcgttgttggacctgggttcctctgaggaagatctgtctgagagagaagaggagataaagctgagacgttaaatgtttccaacaaaagctattagggcagaatttcctgattcagcacttcccggcattttttgaggtttctccacagacaacgtacagttacttttttttgtatgtgtgcatgtggttttctttatttagtttttttctccccctaagcttatgggttttctttgatgagatggttgtgcaatcctggcattgccaggaaacgctggtaagttgctggtggctgcttacgctcagtgccaggggagacccaagcatggctcctgactctcagtggtgggcagaactgctatcacctgtgtacccctgagctgggctcctggcagctacagctcttgagctctgtcccttgctagcactgtggagcttgagtttattgacttatgagtcacatggtccttggcttttgtgctgggttgagctgtatcttcccacagtggtatgctgaagtccctgttccctgtacgacaggatgtgaccagattattgtgagacattgtttctgttcagccgttccactcctgggagctaataatctactcggaggcagaaagccttcataggaaacaggtcacaaggcacggcattacagaatttcaggaccgcagaatctgtgccctggagcagccaagcagtccttgacagtggcatctccttagacacacagctgggttcccagaaagccatcgtctggcctctctccctagactggtgagtttctctgtgcctaagctttcttctttgcaaagctaggtttacttgtacggattttacgcttgataagagaatggtcaggcagagggagacaaactgtagcttcaagaggacagagtgcctcctcactgaccagggaagatgtggctggtttatggaagaagaatctcatgggcggacaaatgctcgaagctcaccgacaggacccaccaccaagggattagaaaggactgcacatggcccctgacataaagaggcttatttgtctagaggacctcatctgtcaaagtgagctgggagaggccatccgagaatcacagtgttttgccaggtgttaaggaagcactaggtcctgatcctaggttgcagtcctgtttgtggggctcccctgcttccggcgctcccctgctttggagatttctttctttctcgtttcatcctctgtaaggacaaagacaaagacctggcttcagggtcctgccacacacgagctgtgcagccgtttgtgagatttcaagtttgcttgtgctcagccttttcattttcataaacgagaaaaataagacctgcttttaaatgcttctggcctcaggtctaaatggaagccagcatagcatgcctatcatagcagagagtgattggtcaatgtccaccatgttcacataggtgatttgactctggtatggcatctggggcgagtggtgactcttagtagctggtcttgaaattcatttcaggataggtactgtccactttgttcaagagttggggtagcactgatctctgagaagctgaatctgaagaagagtctagccaagggatcttggctttctccaaagttcatggacttaggctagcagaccctgaacactcatgctgtggccaggggcagcaataatgactgcctgggcccatattacttcttctcttctgccactggcctgaaccaatacaaccaattgttccactcttccatttggtaacctggaaacttctgaagatctatgacaaccgcattgccatttctgaggagaaaatgaacaaaaagacagctatgtggcagaggcaaggatcaggcaagtctccaaaatttggcagaaagggttggggtttgaaagacaaatgtaactagaaaaagaacttgttcttcctccttctacccccatccccacaaccaccccatctctgggattctatttccaagatatttaattttgaaaacttaaacaagaaagtggttttaatcttcaagggctctcattaatcaccgtgcctggcccagtggagagagagagagatgactcacttttacagttgatttcgtggtaatggagggtcaaggcctgcccctacactgcccctttgtcgagctaatggagaaagctctcactgaggaagcacccattctggagcaatttttcaatggaaaattgctgacaggaatagccaccgacaagaaaagatttctcttagggaaacaaagtaagtggctcgg

SEQ ID NO: 22277 - DNA, 1207 bp, Mus musculus
ggttgccagtgtctcagcttctgtgatgcgtaaaaacagatgaaagatgaatggctgtcttccaacagataatacacaatttgcatatcagaatctgaacacacagaaatgacataactctacgtgtttaataaccaatacacaaaaggacagcaaaaggacagccgatagcctgtaggtctatcctgatagtgtttgaacttccatttatcctgtgagatgggcaagtgtaccgaacacagcaaagtcatcacaagccaacagctcttgttaaatataaaagaaaacaaagcgaaaactgaatcttagcctctgcccttgataggaaagaacctgatgtggatcatcaaaccgaggacaattaaaaacaaaacaaaacaaaacaaaaaacaaaaaccagacctatacagaactggagctaatgagtgataaagaaataaaccgctcttccacaggaggcctacacgccgccgtctgtgccgccgccatgtctctagtgatccctgagaagttccagcacattttgcgagtactcaacaccaacatcgatgggcggcggaaaatagccttcgccatcactgccattaagggcgtggggcggagatatgctcatgtggtgttgaggaaagcagacatcgacctcaccaagagggctggagaactcacggaggacgaggtggagcgagtgatcaccatcatgcagaacccacgacagtacaagatcccagactggttcctgaacagacagaaggatgtgaaggatgggaagtacagccaggttctggccaacggtctagacaacaagctgcgtgaggacctggagcggctgaagaaaattcgagcccatagagggctgcaccacttttggggccttcgtgtccgcggtcagcacaccaagaccactggccgcaggggccaaactgtgggtgtatccaagaagaaatgagtctctgggcctttgctcttaataaatagtttatatacctatggaaaaaaaaaagaaataaaccaatcagattcgagaatgacataactcctgcaaagccctcacccctttaggaaggtcatgaggaccctagagcactggcctctgaagatctattggagagaaactgggagcatttctgcagcaagacatttgagaagaaggaagaagctcatgtccctggggacggcagaaaccatacatagaagtgagaggcagagg

SEQ ID NO: 22278 - DNA, 1195 bp, Mus musculus
taagctgcacacccagactgggcagattacactactctgttccccagctatgagatctctcgctacttgtggcttctccaagccgtgtggttctgctctgctccatcttcctcacacttcctcttcttctgtcttctcctctctctttcactctctttcccccattctctaaaacctccagccccacgcttcccttccactgcccagttacagcctttatttgaccagttaaaatggggaggaggttcacatgaaaccacctgagtgagtgatcctctcctcttgaggaagcagaattaacatcagaatacaaaacagcaccagggcaacccacaacagtgtggtacagccaagcttgtgcaatgaaatctaaaatagagctcccagacaggttcctgtcagcccactgatcagcaaagacattgattgattgatctcagtagaacaaatctcaatagatgctacagatagatagaaggaccgcctacctcccgagattttttttttttgagcatgccattctgtacccaaagaaactttccctagaaatttgactttggagacgcagctccatcagatcacgcgatgaatatgtaaggatgggacgttgggcttctgaggtggaaatattatatccttgcataactctttaccctccctggtgatgttgcagaaaggggcagaaccagaggcacacagtgagaggtgtcttcatttgaagggggaaggttaatgaccaggctttaaggccctttggggggtaacgtctttaagaggggttgccttgctgcagacacactggtgtatgtcacatggacaagtagacacatcttcaagaaaacttcacaaacgcagccgaaaacaaaccaggtctgtaaaaacgtgttccttacattagctcatcacccccttgtcaagaagaatcgaatctccaggtaaaaaggcaaagcagttgatcctttccagaaggcgaagagaatttaacttctttcctttccagaactgataagatctcaaataaccacatgggtctggctcacaggaggggccagacctggctcctctgcagagctggtagttgttagagggagccggggactacagagaagagggatttcaaaccaccaggctgtacttacgcttggttttacatcaggctttctcagtgggtgcttacctcaccagcttgttatgc

SEQ ID NO: 22279 - DNA, 1165 bp, Mus musculus
atgctcaccccctggaggggtctcattttgatttggcaaggactagtgagagtccaacagaactgaagatagacatttctcagcctcctgatgtcaactctgaactctggacaacggggccgggccatcagagacctgctctccaagaaaacagcaaggagtcttataaaaatggtaattgattctttacacatcttctgtgtgatgtcaatgtgaaattggtcctctgagtggttggctcctccgtagagtgaatgaaccctagtgaagttagcttagggatggtgggagcaatgggttggaggtttctttgggaagcctgagtcccctgtactcctaaatatctaaataaacgaggccttgtggtagggcttagagcagtggttctcaacctgtgggctgtgaccctttgggggttcaaatgaccctttcgcaggggtcaccttagtccatcaggaaacacaaatatttgcattgcaattcataacagtaacaacgttacagttataaagtagcaacaggaataatcttatggttgggggcgtcaccatgccataaggagctctgttaaagggtggaaggatctggaaggctgagagggagtggcttagtgtagtcaatgggcatggtcaacagcggtttctttttaggccagtggactaagtgacctccacttaaaagtgatacactttggtatttatcctccgctgtagttagaccctgccacgtcttgatgtgtgtctcggttgctgggactttactgtctatccaggtgatttcctgtaacatcagtgaagttttctgttgtactattaagcactaaggaaggaactgttaacatcatttgtcattgtaaaaaaaggtgttgtctccccataagtacctcgtaagaacacaatttgctaaccccattaaagcatttgccaactataaaggaagggcagctagggtttccaactccgtgtgaatcccaatgattgaaatctctgtccattttgaactgttttccctgggatgggaggtagggaattagaagaacttgaaacctcccttcagaaaaacagatggtatgcaatcgcataaacaaatggctggccacaaggataggaaataaatctccccccactgcaacgtttcagaaacataaaacaatcaggagttacag

SEQ ID NO: 22280 - DNA, 2245 bp, Mus musculus
ccatgacacggaatgacagcgaccctgtgccggagcatgtgcccgctgaactcccagaggagaagacagagtcaccaacgcagcccagcgacacggacaagaactcctaactgggtgttgtttgactctattatggagaagaaggcagcttcagtacactcaaaggataattaagagaagttttatggaagagactggattaattaaaattgggacataagtacctgtttcaagatgtggttttccatgtattgatttattttatgttgccttcagctagaagatcttagttggcttggtcacagtgtctgtttaccctggatgtgttaattctgaccttaatggagccaaaatctctgttgccgtggggcctcgtggccctctggagaggtttccaagcggacagagtcctgccaagtgaacagagccccggttttgtttcctgcttctagcctgggaaataggaagagcaaacagcaacaacaaagcatccatcgctgtccccagtgtcctggggagcttcctgtcctctcgctggtcacttcagagtcttgagtcatatgccttcctcagctgtttgtgggactgtcttccaagtgtggcggatcactgaatattgcccctggaagtgcgtttagggtgtgatgagtctgttttgtcacctaaaaattgtgccctccaccagtgtgttctttagccttgtgtgtccagagagctctgactgaaccaattcccgcccctcagcctgcttccttccttccgtcttcaccgtgctttggttgtcctctcctctatagtaaaggcctttcagcctgcccatgtgctttggcaaagtgtatcatgaatatgtaaccctccataacgattctcttatctgtccttcacatttctttttctctgtccttcactttctgggtcagactcaaacggcagcagtttgctttgagaatttatgtttctgaaagttcattgtaaattatatttttttataaagagattcttttcttcttggctttctgaggtgttcctgatgggcagtcagtggctttgaccagcatactgactgcacggctgtgacttccgtgccttccttcagtgaccccacttaggttaataaatgtctggtgatggaatcccgagccgaggatgtccttgggggaaagattgtaatgattctgcctcataatctcacttgtgtaaatttagggttttttttttttttctttttcccaagacagggtttttctgtgtagcttttgctgtcttggaaatcactgtgaccagactggcttcgaactcagagacccacctgcctttgcgtttcaagcgcaggaattaaaggtgtgttccaccatccaactaactgtaggttttctgaaagcacaagggggtacagtaagactgttctgatgtgtacccatgttcaacagtaggtacagcgtcctttcatgagctgaagcagttctgcagtacagcggcttgtgaggtgcctggcttgctttgagtaaggaattatttaaataactcttgttaggtatgcagagagcttacaggagcagttgcgagtctgctggaagctgtagctgccatctcctgtgcacctctgcagcgtttcttggatcatttcattcttgtcatagctatccaagggttgaatcattctcttatagaaccctgaattaattaaagtcactcacctctccacgctgctgtccttatcattcctgcactgggctggtctgtgagggccttaactactcgttccctttgacagacgagagtgctgcagctcctgtaaggaatgtgtagtaattacaaacccttaaaaggaccagggacctcagagtcctcaatgtagttgtgttcaggagtgggcttttgttttgttttttagtgacaggcttctccaggtaaccctggctgtcctggaattcactatgtagactgggctggcctcgaactcacagagatccacatgcctcccagccttccaagcgctgggagttaaaggtgtgcaccaccacagctcaggagttgtttttatattccctgaaactattacctgctatgtgaagtgttttaacacaataacatgtttcaatatataatgttggctttaagagtcaaatgcctaatcatttttagatttgtgattttaagttgggaagtattttatactttactattgatgtaaaaataatgaattgttgctgggaactagtcatttttgtttaatttattatgt

SEQ ID NO: 22281 - DNA, 2317 bp, Mus musculus
ttatgtgccataaggaaatcagaccagagtccaagttgtatgcaaacaaaaaccatccctataattttattctcataagcatattaataaagtgtaaatggtgttttatatgatctttgagattctcaagtgcaatgtgtttaaaataagcttacaaaggactgcagaacaacttacttctgcgttaattaactttatagaagttgtgattgttttgatgaattaatgctgtagatttaatttatttttatatggactacataatgtgtgccttttaaaacaataacaaaaaccagaaatgtgcctctctagtttgtgttaattaatgtgcctcactttctcctcactctggatcttgtattcagattcatacagtgctcaagcatatttaaaagatatttgcaatttttaaaatacttttggcttgtaattgagaagaaaattcaaaataactaaaagataatttatacttaaaaatcctgtctcatttctttagtgatgtaccgtagccactagaaaaacaaatcagcctaatggaatatgtttactgggaataaaattacctttagatattcaacattgacctcattataaatgcgtgaagcagacaagctctgaaactgtggtgataaattggtaactggtattttaactgtaatttagcatttcccttgaccctacttatcaaagagaatttacacattattgtgttgtaaacacaagtttcctagcattttataaataattttttgaaaagattcattttagcagtgagagaagtactgtcacttgttttattttaacaattagaaagttgtcagattcccatatggtaaaaataggtcaagtatgtgaagtggtgaaggattggattaagagattctgaaaatgaactgttcatacagagtagtagctttctagcaaattccgattaacaaaagaaatatatgttttagacaaagtttcataatttacaaatgggaatttatgataaataccaacgtctttttcatttttcatggaaatgatagcttgtgttatatctggtaaaccattatataaaacactaattttgttaattttgttaagctttacagaaaataatatccctattactagacattaatataacgtcttgctatactaaacacagcagaaatctattccttttcacagtatgtaatacaaaatgagcattttatagtcagtgttactccaattctaaatttaggtttgacttaggtagacataagacaatttgatctttactaactagcaaaattagaatttctaactcttatgttctttaaaatgccagttacaattacacttactaaaatctgactaaatctgcttttattgggcagttgatgctttagtatttgaagtttgacactgctgcaatgtctgtttttaatcaggtgttaccttgagatgttaaactgcttggaatggttaaccttgtgcactttcttaatccccatagcctttatactgagtgtcaacatgcaagtttatattgggtacaggttacaattttaaagccatatgagtttatagtgattcttttttccatttaaaaattcactaatgttaaaaaaaatttaaaaaaagaggcccagtagattcagtgggagactatcttatctagcaagctggttcttgcttgtgtacagtgataactttgtagctgcttctttaactaagaatttgtaaacacagaactcttaacacatgtgagcttttaaggatcgttatttactactttgggttgtaattagagcacatctatcttccaaaattttgtaaatatttttgatttttttcataacatgtaaatattacataaaagttgtattcctaataaacatgtaatatataatttagcaattgactttgtgcctttgtgtcccttttaatagatgatagatgttaggacagtcaagcagaggaaggagattgacttttcacaagttggaagtttagctggctggggtcttgccttgaggtcaacactccctttatcccagttagtatcaggttctccttaaacttttcatctcctagataaacactgggcctggccaagctcctgatgcttctcacattgaaggcttggtcggcttccttgctcagctcgtttgttttcattatagatatgcagatgatctcttcgatcattaatagccacacaatagagtcaatattctaggctgtcctgaaatctgtgccaatgcaattaatccaaaagttttcaatttagtctcaagcagacttttaggacagggcaaaaaacagccaccatttttgccaaact

SEQ ID NO: 22282 - DNA, 1304 bp, Mus musculus
tagtactatgggattgtaatataagataaacacctgcaatttagaaattgaaagtctgaaatccaaaagtctgtatgatgataattctcaaaacagtttggttgggggggacacattttcgatttgaagcttttaggatagggatgatggaggttgatgaagataatgcaaatactataagataggaaacactccaaaatctgacagaggtctgacaccaagcggtccaaacacagacaatatttaagttagggtatataagcatcaaagagggatttagaaagcattgtagtaacaagtagggtatgaactgttattatttggaggaacataacagcaaaaatctaacatgatggcctgaagtgtctgattggtaaacctattaaaaaatgatatttgggctggagagatgactcagtggttaagagcactgactgttcttccagaggtgctgagttcaaatcccagcaaccacatggtggctcataaccatctgtaatgggatctgatgacctcttctggtgtgtctgaagacagtgcactcacacattttatatatatatataaaagaaattggtatttgaaggtttttggaggctgcagtaattacgttagcttttcaaatcaatggcctttaccttttgatatttcttaaccatcctgtgtcttaaaagtcagttttatagccttctggacttatgtgtgtgtgtttcacattatgttctaatttgtttcttggtgtctttcttaacctctaggtttatacttgtagaattactgaaaccagtaataagttcttttgtgaaaacctaacatgaatctgtccggtatttatggtatgactcttagtatttgtatgttagaatgatttaacaaatgaattatatctgttctaggtgtatcacggggtcccagcccggtcagccttggaaaccaggacactttacctgtggcaatcgcccttacagaatctgtcaacgcctactttaaaggagcagatcctaccaagttagttttaaatatacatcagcacttgtgttaggtgtggggcaggaattggggcttagtggtaaattttaaattattctttgatatttttttttgtgtagttggctatatgtgtgtgtgtgcgtatgtgtgtgtgtgtgtgtgtgtgtgtgtgtgtgtgtgtgtgtatacacacatacatatacatatatatatatatatatatatatatatacacatatatatatatatacacacacacacacatatacatacagacatttcctacacacatgttttagcatcttgcttttgag

SEQ ID NO: 22283 - DNA, 1164 bp, Mus musculus
tacgtagctacaataaatagtaggctttattgtacaaggtgggacatatttgctttggtgcatgttgagatattagatagctgattctaggtcattgtaataattttgacagaatagacctacattctattcagaatttcttacagatttcacttgttttgatctcagactgtttagaatctattagctctgtctatcaggtagctcatccacattgctgcttttcttcagttgtaaatccagaatcattgttctccacactcaatttgagtttagcaaggtttgatcaaagaagattaatccttatcactttccctgccaacaagatgttatattgtaaactctgcttcatgctgttggctaagtctattgactatatttctcagtgtgtcttactatttaatcacattgattgaactgttagaattttgtagaacaaaaataaatggttttatgctaacaataatctttctaatcattgttcttaaaatgttactctaggaaagggaccaatgatttacttgcttgggatcccctgttcggatcgtcgcttgagtcatcttcagctccactaacttcgtcatcatcgggtaaaaaaaagaaccctgataaaataaaatatatgtatataagcgatgtcttatttttgggaatatagtagcagcattttcccccgaatgatactatttattatgtttaatcatctgtagcttttcttcttaagtttgtcatccagtaatagtgagttccatcactactaccactgtaaaagatggagccccagaacacttaagaatggaaatcatcagaaccatctctcttctgtcagcggcttctaaagcactgtctatggagctatgtgcagatgcaatattcatttataaacactagtactaataaagattcttactagttttttaaataaaggaattctgattattggaaagaattgaatttcatactttacatgacttggcttaagtccatttgaaatgccacttggacaggcttcctggtgagtaactcatgtgtaaaggcctctgctgtggcaagcccattaacaagcttgatgtgttgagtctagttcagtgctagttccacagatatgaccatatctttaaaatactacttaatagcacaggcaagtgttgtagccattcaggg

SEQ ID NO: 22284 - DNA, 1207 bp, Mus musculus
cttctggggtgtctgaagacagctacagtgtacttatatataataaataaataaatcttaaaaaaaaaaaaagaattagtcttcagaggctggagagatggctcagcggtaagagcactgactgctgttccgaaggtccggagttcaaatcccagcaaccacatggtggctcacaaccatctgtatcgagatctgactctgtcttctggggtgtctgaagacagctacagtgtacttatatataataaataaataaatcttaaaaaaaaaaaaagaattagtcttcagaggctggagagatggctcagcggtaagagcactgactgctgttccgaaggtcccgagttcaaatcccagcaaccacatggtggctcacaaccatccgtaatgagatctgatgccctcttctggggtgtctgaagacagctacaatgtactcacatataataaataaatacatctttaaaaaattagtcttcattaatattttagcacaattgaaaagcccccccattgaattaataataaagaacaaaatgagggtttaccattaaaaggaaatgtctgatgacagaagttgtagagaaaatgtggctaagtggagttgctgtaagatggaagacagtgcagcaagcactttgagacagaacaaacatccagaagaaaccaggggaaaccagtgcaagcaggtatagcatacagtgtggtacttactcctgatgagctgcagagcccattggggatcactgtagtcatcagttgttgtttgatgtagcaaaagatgctcactgataagacctcactcagtgcagttcacactggtcagatgctttcctcagagctgcagaatgcagcagaataggctaggacctccttcagtagctcatcactattaatgattgcatagtagtcagtagtatattctgagaatgtgaaactactgtaggactcatcatttaaaattcttacgtagaatacacacaagtatttacacatctcttctaatttttcttattacttatttatttttgagataaggtttctctgtatagtcctggaactcgctatgtagaccaggctggccttgaagtcatggagatttcacctgtctctgccctctggagtattagaattaaagacatgaaccaccatgcccagctcttataatttttaaagttacagtccatgttttcttttataaagctaa

SEQ ID NO: 22285 - DNA, 1169 bp, Mus musculus
ggggataacatttgagatgtaaataaagaaaatatccaataaaaaatataatgtccttgagcctgttccatgtagttgtaattgataggattcatttttttgttgttgtatgagtttgaatgtatattgtatcttatttacttagccatctgatgatggacaccatggctgattccatgtcttggctactggaaatagtactaccataaacttaggagtatgaatatcttttcaaaaacaattttttaaaaaagtttggatgaatcattttttttagagctttttagtggttgtcagatagttttaaaatatatatgtttttcactacacccatagttattatctgcaaatagatctggaagcagcctcttagaaaactgcttttcagcctttgtctagttttatcactatcttctagtgctttgttacaatttgtttggatttgttgtcatgtctagtctgtcttgatcctcagtcccatttcttctcccccatctctatttagctttctagttgtttgctgtagagactctggttggtttgtagcttcttataacctggattttgctgactgtatgtattcctatacatgtattccttcacttctctgtgctatttaagttggtacttagatctgtaagcttgatcagacttagattcaagagattttgtttattccctctgaatgcacatgatgttttcctttttatcctttaaaaaatactgatgtgggctggagagatggctcagcagttaagagctcttctgaaggttctgagttcaaatcccagcaaaaacatggtcgctcacaaccatctgtaatgggatctgatgctctcttctggtgtgtctgaagacagctacagtgtactcacatataataaataaattaattaaaaaatattgatcttagatcattggatagccaaactttactcttctttaaagaggcactatatcttaatatctccttgcggctttttatgatattgagagaatatggccatagttctttttttaaattcatttattcctgttttaaaaaattgttttatttacattccaaatgttgcccaccttcccagctccccctccaagagttcttctccccataccccttcccctttgcctctgagcgagtgcttcccccccttcagacccatggggca

SEQ ID NO: 22286 - DNA, 1194 bp, Mus musculus
aacactgaatggatcttctagcccaaagttccaaagtctttccccaaacatggtcaggttgtcataggaataccccactcctggtaccaatttgtcatttttgttgtgctttttttttttaactattttaaaaatgatttaatgtttatgggtgttttgtctgcatgtacatctgtatcacatgcatactggtgcctgaggaggctctagaagggtgcattgcatcccctggcattgtaattacagatagctgtaaactgtaagctatctgggtgttgggaatcaaacctgggccctagaagggcagcaagttattactttttaaaatttatttattcctttctcatatattacatccaaacctgttttccctccctttatacctcctattccctctgcccacaaactcccctctcccccagatccactcctcctctgtttcccttcaaaaaagaacaatccttctaggatatcagctgaaaaaggcagaacaagttacagtaagactagacacagaccctcatatcaaggctggatgagacaacccagcaggaagaaaggatcccaagagtcgatacaacagtcagaggcaatcccccactcccactgtcaggagtcccacaagaactaagctgtacaaccatacaacatatgcagaggatccagctcagacctacacatgctctgtgattgtcatttcagtgtctgtgagccctgcttagtggattctgtgggtttaacacagcccacagggtcctcaacccttcttctctgactcctacaatcctttctcccctcttccacgaagttccccaattctgcctaatatctgcagtcagtactcttaacctgtgaagtgcctctctggttcctttaccttttctggttggttggtttttggattttttttcagacatgctctcactatctggccctagctgttctggagctcagtatgtagaccaggttggcctctgccgcaaatatctggctgcctctgcattcccaggctggaattaaagatggtttgcctccatacctggctctttcatttaactttttttttttttttttaatggattttcaagacagggtttctctgagtagcagagctctgtgaccacatgacttccaaattacagagatcctcctgcctctacatcctgagtgccaggattaaaggcttgtgctgcc

SEQ ID NO: 22287 - DNA, 2393 bp, Mus musculus
ttgctgacatgtttataaagaaagaccatcatacttaatagtctttggaggtttgtaaggtgtttttttgttttgttttaatgtattttattgattatcttcccggttagtcgattatttttcctcctccaattgttttaccagaccagagagagaaataaaaacctctcctcacacttggtatggagactcgactgaaaatgagttgagtttggtcctctccttttccaaacactcagaacacaaaagtggaatcttctccctacataaaattttgcaaagttggggtgccagaattaaattatgtattaaactcttgtctccatttaacacctttgcagtgaaaaactttttgcttcatatagttaattatattcatattgaatgtattaacagatagcagtgcaaaagcattcttcccaagagaagagtgtaccatgcacgtctgcaccccaggcccttcctgagtcttcaggtgcacacagccttcttgtggagctacttttgcaaatattacaaggtggggggacactaattgttgctgctagtgctgtctaataacgtggtcattggaatctaaggaaactagggtctgtggttaacaccctgggataattgtgatgggcagatgcgcagtaatggcctgtgttggtaacaatattatctagttcaatgccatgcagtagcattgtatagcaactagtgcatttcatactgtattaaatatggcactgcttctaagcctcgttccagttaagtttcacatgacagttagctcctctgacctgtctttctaggtaactggaaatgaacttcaggcttgatacagatcttctccctgttggtattacatatatagagataattctcaatgcctaattaatatacttatacatttgttaaggtatgcgcataattacagcaactgtttttatagtttgtatcccagagtatactgtgttgaaataagaagatgcatagcagctgaatgcatgcatgactttgagggaagttaagactggttttcttttcccatctctgcacattgaaaaaccaagccaagtctatttgccaatgatagatcactaattacaaagctagtagttctcctttgggtaagagtctgtttgccatacatcactcttccactgtggcttggtattgtgcagattacctctttgataggtctagtcaccttgttcagtgcctgtctaacatggctagctacaaggcaatgttgtctcctcctaatgtccacctcagtgacgaggttccacactgtctcctcacctcttgtcacggcttccctatgtggatatataaagaaccaaactgattcgctgttgttttttttttttttatggagataataattagataatactatgtaattaattttactcagtagattatcatcttaagagatgcttaaacatggtaaatcacttcatattatgaaagttttacacttagtattcatgttaacattgggtgcaataacttagtagtacttgcttagttataaataactggatctttctgctgacaacttaggttgtatgagttatgcttaaaagctttaaatcggatgtttcctgtacctgccacactatgttagaatgtgtccttcaaccatatcctgcaacttctcaaactgtactaaattgatatttcttgaagtctaactctgtgctaacagatcttcattttaaatagaatacggttttaatttttgataagctgctgaattttaaagagagttttttggggccaccaaatattttggatcatgcagagaatatatattgtactgtagtaattttgtatttacatttgtatgatgtgacataatagatgtgaatgttaatcactgcttgactatgttaataaagttgtttaactatagacgttgcactcttgatttttaatggaaagaaattaccttatctttgtctccttccattttgtgtcctaataggtttggtgggggctttgggggacgggcattaaagtattgtgtgctatgtttttatttgttttgatttgccttagcttacacattagtgacccgttgttatccaaacaactttttttttcttatttatatacaacagtaaaaaagttttgcatacattttaggtaactactattgatgcttttctatttgagctgaggtgattaactgcttatgggtgattaactgctctaccaagggaaatggctgaaggtgaagctggagccacagagttgatggaggagccgtactgggtgtgaggagttccagttggagctgctgtcctgcagaaaattaaggcttagaattttttgagttaacacttccaagtcatttcctcttcaggttgtaatcacctcacgtaattgcatgttaccaa

SEQ ID NO: 22288 - DNA, 2459 bp, Mus musculus
agagtgggaggctgcagcagtaaggtggctttttatcaaaggtttttatataaatttcccacgttacggggccttgttttgcatgctgatgaagaactacttaaaactaacagttaaaatcagcttgcctcccctagtagaagcaggttcttggaagttacaatttaaggtacccccaaaaagttggaaataaaaggaaacaaatttgaacaacgaagcaccctgtgacatgccgacgcgccactcctttatctttgcgggctgggcagggagggaggaataactggggtcggggatcaaacgaaaggtgacatctaatttcacattaaaatgttagtggatataatttcatggttgtacttcttagatttaatttctaggccaacacgttatcttaaggtgcagttttaaggttcaggcatgcgctctggctcatagtgtttgaaagtgatgtccattagtgggaccgtagcatgcttgcctcgcatagagtgcagttggtattcatttacctatgtgcgccagtttgggttgccgttaccagttcaatatagccctgcatttaaaattccttttaagattcgtggattttatttttattaagtatatagatatataaagtactgtagtttacagctaggccttgagatatctttttaggatctgttaggaataagattgatattgtattgtgtgtaacctgcacaatgtggaaagctgatgaacctgtgcctccgtgctgtcagtgtggtgtgctttctgcatggttatatactactagtaactttatcaaatttcaaattacatggtaaaagatctgtaaaggctgcatccatgttagttggcacataaaggcaattaattgtagaagttgaaacatgatcgctatatttcaatgtttattcccgttcaacgtactgcctctaagctttcctttaatttctttatttttatttttgttcgaagcatgatcttaaagctatgtttaagttaatggatgtaatgcagggttcctacactgtattggcgcatgttggtggccctctgtgccctaagcatatgcacatggggcacatacacagctacagagtgagagttggtttggatcctcttcatttcatttgtttgcctttctgttatttttccctctgcttctatgtatctctgtgaataaatccttgttaagttaaccctttgctcttcctcccatgtgtattttcttacatactgtgaatgtgaagaccctaactggtacacttgatcttatgtccatatgaaagtgcaaatctttattaatttggattgcctgagcagtgtgtatcccatgatgatgaagggaaatggagagatttttccttttagctctgctggtcagagattaagccacacctttccatttttcaatgctgcatatttaatctgcaaaaaaaagttaagccataacagcctttttatattttaatttgtcacctttgcattgcagaataaatacccaataaccgtttttataggagttgctcctctttgcatggttctgttctatagaagtgactgataacagccattgcactgaagtgtgagctgtccgtgtgtgactttataaatacagttttaaaacatttcacatgcatggtagcacgcagagggttttgttgtggatgtgtttgtttgtttgtttgtttgttttaacatgttcttttactttcttttcttctgttttggctttgcaaatttcagtctgtggggcctgaaataaaaccatgtatagtgcccagtctctctctcctattttttatttttttaagctagactcaagggtgtgtggtatttcgctttttagtacattactttactggaagcttaaaatttgcttctcagttggcctttagagcaagagtggaatagctgttttattcttaggttgtagaatgccttgtagtgcttcatatactttggggacgtaatataggagatagtcttacataagtaatatagaaacagccacatttgtccattaatgcataagaagcaaagtaaagttttctggatctgtgataaacaattctttgttaattaaaggcaattttattacctgtctaattaagaatatatttccaagttagcagttatgcagctcaaaagcagtatttggctttatagtaaatttgtttctaaatctaataactttaaaatagaaacttaagtaaatatggcttacaccctaacactggggtggttttcttttctaatgtagctttccctgttgaggctattgtttcttcttaatttatattatattttaaacaacatagtatatagcacaggaatttgcagaagccatttaagttttttgaggtcagcgctgagttagcatttattgttttgatgaaacgtgacacatcatgggatatatatatatatataaagaacttaattcttgtggtgcagtcttgatagtt

SEQ ID NO: 22289 - DNA, 1221 bp, Mus musculus
agctggggctagctgagtattcagaagtcactcttagcttttgaatgctttccaatgcaaaacaagaagtgtctctgtccaaggttaagggtgttaatctatgactccttagccatgaacttttgactacgttcacagtaccaacgatgagttctttcctgtggagcaggcagcctttgattatataggagttggttatggttactctgttaaccgtcatgtggcgactgtacataggaacatgccggcagactcacttccttaaactcagaaatctgctcttatgctcaggttacatgtcacgcttattacacacaaactctacatgtcctctcaccttctgtacagtttaaatcacgtctagactacttatcatacctgatacagtgtgaggttacatttttctgatgaattgacaaattgactgtgaatgaggtttgaaagaaccggttcatagtgagacatttttgcttgctttaaagcacttatattctctactgtaatctaaaccttaatgtgtgtgcttgattctttttagtgtctctcgtctgttgccacagccttgcagtctggcttccttccatattgtgaacctgtatatcagcgttgcgtaaacctagttcagaagactctggcacaagccatgctaaacaatgctcaaccagaacagtatgaagctccagataaagattttatgattgtggctcttgacttactcagcggcctggctgagggcctgggaggcaacattgagcagctggtggcccgcagtaacatcctgacgctgatgtaccagtgcatgcaggtgagaccacaggcgtctgtgggtgactggggcctgcgtcttcgttgttacaagaagctaatttttcctgatttcttacaggataaaatgcccgaggttcggcagagttcttttgcattgctaggtgacctgactaaagcgtgcttccagcatgttaagccttgtataggtaggaatgttttctgctttgggtgtggggtgttctacctgttttaactgtttattttatatgaaaaaaagtgcacgttgtacaggattggggcaactatgtcatttttttttaacatctactgagttaccactgtatctggggatgtttgaatagtatcagtttatagagaatgttcggttctaattgtttaatttatgtagcattcacttataacaatatgaatttgcttttttgttttgctttt

SEQ ID NO: 22290 - DNA, 1251 bp, Mus musculus
tagaatgcttatttaggttagaccctatgtagactccctgtcacatgtaataggctacaaacattcagaggtgatggacaagcatgatgaatcctcatggcaataagtcatgccttaattgacagagatttgggggtttcctttattttctttgagttttgggggttgttgtttttagtttgttttctttaagtccatcttcttctctctgtggtttattttaaatacactgattcaggttactcttattgcagtaagtaacagttggcagggcctgctaactcagcatgtgtcatagactccattgtccctttcacagggacctggtgactgcagaaggggactaggtctcatccaggaaatacaccccagaatcccgtgcgggactcaacccatatcatgttccggctccttaacttacattggcattaatagcttaaaggagaatagccactgacagtgtctgtctaaaataacaacagggtgatgttgaggaagatgagaccatcccggatagtgagcaggatatacggccgcggtttcatcgctcgaggacagtggctcagcagcatgaggaggatgggattgaggaggaagacgatgatgatgacgaaattgatgatgatgacacgatttctgactggaacctgagtaagtgaggcttcactgcttggctgtgcctgaccagcttttaatttagtgtgattttttaaggcttatccgttttgtagcttgtgtccatagttcttttctatatcagttggtacatatttgcattatgtttcccattttggtgtggggagtaatgatccatgaagattgaggtgcgggtttctttgtggtctgttggcaaatgtatccagtacaaggctgctgggtgatggcactgaccacagcgtgtgctccatggggcagcatcagtgtttctcatgttcatgtctcctgtcctgttgtcactaatgaatatgacttggaatccttggtttttatttcccttatagcatgttgttgtaataatcatcacgtttgccttgtttgttggattattccagtttactgtgtagccctggatggtctggagctcactatagaccaggctgacctctgaattgtgtcagtccatttgcctttagcttgttgagtacatatattactgctgtgcactgttactgtaccctgcacatcattgccttcctaaaaaggctttttcctgttttcccagcagtttttgtgtgcttgatataattacca

SEQ ID NO: 22291 - DNA, 1177 bp, Mus musculus
tttggtttggtttggtttgggtttggttttttgagccatggttcttctgtgtagccctggctgtcctggccctcgctctttagaccaggctggcctcaaactcaaaagatcttcctttctctgttgggatcaaaggtatgtgccaaccaccacctgtcttatccttagtctttcgatgggtcttttattacagattcttaagcttgtcattcagtggtagagcggctgaaggcattttggtgtctttctttaggtgattttcatgaatttttgttaattttaattagtggatgtatcgtaggtattatagaaaagcaaattgtagggtttttgtacagatgtttggtgaagttttaaaaattggaaacggtgtgcaatgagatgaaaagtgtctgctgtgtgctgcctgtgatgcacaccccacactgaggcgatggtgactgaggtagcagcctgggtctcttggtgggtttgaagtgtgtgttatgcatgtgccccacacagtgcattatgctctaaatgtgtgttgtctttctaggtattttaattacaaccatagcctccaagggagagctgcagaattggcctgatctcttaccaaaactctgtagcctgctggattccgaagactacaacacttgtgaggtactgctgtttatctgctcatagcatgggttaactctgggaaagtgcttctgaaatggacaacttcaaagtgcagagcctaaagctccctttgtattttatacttgttaaccttttactggttttctgggaataatatgacaaaaatctgttttctctaaggaaagattttgtctttctaaagttattcttaaatgttacactcatgtgattaacagctgtttatactacatttaatcaatttttaattgtatatgtggaaatgttttgccttcgtgtatatgtgtgtgcccatgtatgtgtttggtgctttcaagatcagaaaaggtcatcagattttcctaaactggctatggaatggttttgaattactgtgtaggtcctgggaagcaaacttgtgtcctctgcaagagtgatgagcactcttcccttccagcagctgtctccccgcccctccctgatggcttacatacataaaaaaaataagctgaaatttcccaaagcaccagaccataaactgtttttgtttctc

SEQ ID NO: 22292 - DNA, 1170 bp, Mus musculus
cttgatttgcagcaaaccaagatggagtatgagtggaaacctgacgagcaagggcttcagcagatcctgcagctgctcaaggagtcccagtccccagacaccaccatccagaggaccgtgcaacaagtatccttgccgtgcggggccgggcctcacgcagccgccgcccgccgcccctccgggccgcggcccccaccccgccggcctcgtgcacgcggccgcagcccgccaggcccgccaccgccgcgtggggctcggctgccgcttccgggccgccgccggggaggccacacgtgccgccccgccacgtccccgctgctgagcgggagcggccgggcccacacaatgaccggcggggcgggggcgccgggcctgcgagcgggctgaggcgggcggcacggcgcggctgggggtggagctggcgcggggtttgaactgtcgggagagagagaaggcccgcccggagctttctgcagaggcgcctgaatggccggcgactctggttggtgctcgtgggaacacctgttgcagcctccctggcgctccagtgaggtttgcatgggcgacagctacccaaggggttgctgtgggctgagtgctggtgtagaggtcctgttgtcacagttggagaaacgaacatttgcagggtgcacggatggagagctgcaggctccagaggcaaacagacccgcagatggcagcctcttacccctgttaagtccaagcaagttaattctttaagaacttagatttgtgtgttcacaccagattcccttgtaatgctttccagtaaggagcaaaatcatctaatagggaattaggtaaattaagtgagatcctgctgtttgagcttatttcattttttttttaaaatccacagaggtgacgttacaagagggtttgaagcagtactgtattgctgtaacctcagtcctctagtagacgactgagtatgacactgcccgtttaaaaatggatagaacagtgacgtaaatctacttgaattgtttaaaaagccattttgttggaatacctttgatactagggaaaaaagtagttttaggtatagtggagcttttatctgaacatgctataaacaccttaattttgtgttgtcatagatttatgggtagtaaaagttgaaaaaaaatgttaagtatcttacgaaac

SEQ ID NO: 22293 - DNA, 1194 bp, Mus musculus
tctaagatgtcttttgggttttctggttctagggtactagtatcacctaccatgtctgtctgtgccactgtagtaagtgctttagactgggtggcatccctcctggtctatagatggtgcctttctgctgtatcttcatgtggttataccatatggcggagtaagagaggaagtgccaacagtctgcctcagccttcttctgagggcaccctttcactccagagacccacatgttgctgtggtactgtgtcctcgtctgaccttctcatcagctccgtttcacatagggagaccgttgctcagcaagtttcctgagaaggtgaaacagacagatgagccagcacacagggctctgactgtggtcagcccaggaacccaagcctaacaaacaggtcaaaggcatttctgctcttacagaggaccgtggttcaatccccacgcccacatggggcctcacaactgtatctccaggttcagggcttttcataccctggtgccttgggcaccaggcacacatgtggcatatgtacatacatgcagacaaaaacatgatacacaaaatggaaaagaaaacattttgaaataatttcctttgctgtgtttgtctgctctgtccatcctcctgtagccgaatggttactgagctgtgtgcgccccgttaattgtttgagctgctttcagcaaacaactgcacggttaggtcagcacactgctaattgcatttctaactgcttacctttgttttgttttggttttttttttttttgggtttttcgaggcagggtttctctgtgtagccctggctgtcctggaacgtactctgtagaccaggctgaactcagaaatccgcccgcctctgcctcctgagtgctgggattaaagtcgtgtgccaccacacctggcaccttaaaaaaaaaaaacaaacaaacaattaatttactcttgaaactgtgctttctcatctggcccttgagagtggctctctcgctgtgcttgctcctcctcctgcttcccttagcacatcagtaccctgtctgtgagggtaggttgggatataagtgagaagtaacagagctgtttcagttagaacaatctaacagtcagatggcatgcttgttatcaaagtgacgtgtagtggttatccccatatgctagcaattgttttcttagaaatcagcttggtttcatattgac

SEQ ID NO: 22294 - DNA, 1111 bp, Mus musculus
gcttagatcatgggtgggacagaggaagggacatgacacagaaaaggactgtcagatgaccacacaacttctattgccagctcatctgatatgtggatcccaggtgagggacagaagggatggaagacagaggaaagagaaagcaagcctgtgcctcttctcatatctggcaatgtgtctggaagagatatatgtcttcttcattgttctgtccctatggccatcttctcctcagggtctaaactactgccacatgctgtccccttcctgtggcacccactttacaagtgaagtcaacttgctcatggaagacaccatctgcctcagggctttggtccctggtgcatgaacagtctgtgatccaaggcagctggaaagctgaggctcccagaagcacctgtaactccaaaggtctagctctcttactcctcggggtatgatgacccaagctatgttccccagtggctcttgggtacccgaccaggccatggctgagcttggcaatacatcttcccatagacttcctggccacacctggctcgctgccctccatttgtgtccctggcttcactttcctcagagctgctgtgctccaaccttgtctcttgagcttctggaaagccatgtaatctactctctgtattaactgctctccaggactccatctccactcggctcaggcccacctatctaccttctcagagaggaagaagatgcctgcggagtcactgctcctcaaagcatccttcatgtttctctgcagcccattctgaagtgtgggctgtggaggctggcccctcttgcctcagacgtaagactcttggtgctgctcccctactgcgaaaccttctgtaagggctgacatgacacctacctctgtaccctcactgacttgtgctgatttgctttagccaaacttcctggccagaggcagagagaaggtcattgccttcatacctcatggtcctctgttctctgcccatgggcaatggtgacgtgagctgaagatcccagaaaagaaaggcatgtttaagttaaagtgtctacaaggctcattgattagaactttgtgattgtggggaactggaatgttacagatccagagccaaat

SEQ ID NO: 22295 - DNA, 1153 bp, Mus musculus
tcaaactatacaaggacaaaccctgtacttggaagtcatctctgattggggaatgtaaagagatacctcccaaagtacatcattgtcaattgcgttttccccctactgacatcaaaagtcagggtaggtaaagacatgcaaatacaagtttcatttcaagagaaacagcaggagaagctctggcaaactggataatttcgattactgaatggtacatgttcattactcattatttataaggcgatagagaaccccccccccacacacacacccgtgcctgctgggttaatgggaaaatttccagtaaagcctagcgatgccaatgctctgtgtgtgctgtgtaaagcccacagtgaactagaaggtcaggccttcttaattcattagtcggtaacctattagttctgaaagctactgagtctgctttgtcatcgttttcccagagcattccccagagtagcactctctctgtaaaatattgagcttattaagagtttttggacctctgattaacgttcacagcaaaaagctgtgttaagtaaattaggcactagataaatctaaagtgattgtgagccgtcgtcagctaaattaggacgctgatggctcgcataacaagatgcaaagcaatagtaattaagaaaaataatcaccttggctgctgagagctcaggcttggcctcaggtgaagcaaatctccagctatgtcttgtaaacagtgaggcaaatcttactgttttgtccttttatgaaggagtgggcttagatcctagccctcttggacagtctagtggaatggtatgtgtaaagagtaaccttgattgcaggagaacaacagtatcgtcgttactgttctgttgctgtgaagacacgcatgaccaaggtaacatagaaaagaaagcatttaaccgggggcttgcttatagtttcagaggataaaatccctgaccacaatgacagggtgcatagtagcagacaggcacggtgctggagcagtagctgagagctcacactttattagcaagttagaggcagagagagtctgggactaatgtaggcttttgaaacctccaagtccagccttagtaccacacctgcccccaacaaaacgatgcctcctaatcctttcccaaatagccccaccaacttagga

SEQ ID NO: 22296 - DNA, 1221 bp, Mus musculus
ccttagtagttttaactgttgaccacactgtattgtttctcttctagcatctacaaggcttcttcctagattcaacgtcattcaatattttgatggatatgttatttaccaaaggcaaatatgaacgtaagtattacatacagtctgaggttatggaaaaactcccccggaatagcagctcgggtgggaagcgccttagaggtgaccttagattcctgttgaggagccccagtgtgacctcactcctgaagtttgaaaacatctctctgtgtgtggtggctgacgagaaccaccccagattatctgaaaccttagcaagtttctgtgcgttcttcctacctgatctggctccgtgctatttgactttgaggaagggctttcatcatgttaaaatctgctctctggtaggtggtgctgaactgattagaattttggccactgccaggaggtgcttttaactgctggccgctctttccttcattgcaggtgcacttcaagtgttgatcgaaatgaaaaaccaagatgtgaggttcagcaaagaaacctacatcctcgcttttgcaatctgctacaaactggtaagagcgtttccctaaccctctgggcgctgggcattgaggaggatctgagagtgaatttattctccccctcccccctttctttctctggttcctttaaaatctactttccatctggcacaaatacttcaattttaaattagatcttgaaaacaagagacaagtccctgctgggctccagaatctctgctcggttagactattctagatcaggccctgctcccctctggaaatcatcccatccttctggggtgagctctacatgtgattgccgtcatgtgttctttctatgtatgggcgtttcacacaagtgcctatctgtgcactgcatgcatgcctggtgcctgtggaagtcagaagagggtatctgaccttccgaaactaaacttgcaggtggttatgaaccatgatgtgagtgctgggagttaacccctatcctctaccagtcagtgctcttaaccacttagccatctcctaagccctgctaccacgtagtctcgatttgttctgctaagcctttgtaaatctttaagccattcttagctataggtctgaaggctagtttactgccctcaggatgaggtcatccttcccagtcatacagcactaccatgggtcattccaaacggtgactcccaggtag

SEQ ID NO: 22297 - DNA, 1615 bp, Mus musculus
ggtgcagctgcactgtgtgtgccaaggtggggtgatgtcgtgtgcggggctgcactgctccctggggtgatgtcgtgtgcctggctgcactgctcacaccttggtttaacagctgagcaggagagcccagcgagaggcagctgcccctgcaggacagatgcagggcaccttcctgcaagcagatggagcggctgttagcggaggactcagttgcttctcactgtcctcctttctcctgcctgtcccttacctttcgatttccctttgcttccaacaggcctctcggtctaaactgcaggagctgaacagagttgagtctgaaagtcttttgactctgaccacccagcttgtaaaagaaaaactccccgcctgtgaggccgaggacctggccacctacgagcagaaactccgtgagtggcacctggagcgggtgcagttgatccagagggagcaggaacagagggagaaggccaagcaagagtaccaggcgctgagtgcggcagagaaagcagcctgaagttctgtgagccacctcagtgttcagccaggacagcatggggctccgccgctactgtccagttcttttcttacaggaagctgtgcatagcctgaaaacaaggatggctctatgccaagacactgtctgcccatctagatgtcaagggccctgaactaagtgacaaacggttgggctgaagcccccacacagtggagtcctgggtgcagactgggaatatcgggtgagcgtgacgggaagctatagctgaagggtcggctctgcagcacgggtgtttgaatgatttcctgcccttggccatgtgcatggagcaccgagcttcatgaccaggtgctggtagactcagaaccacccacgttccagaaccgggtgcttgctcctttcacccgcttccaggactcagcaccagtggccacatgacctgctgtcagtgtgacacatttccactgttaacactggtctcatattctccctgtgcatatgtgccatatatagctggcaccttcatggtctgtccccttcccatcactgctcagaagcagccttttgtatacctgcctccccaataaatcctacccatgtgggctgttgtgtggtgtgattttgtggcattccttggccagtcacctcaagaacccttacacctgagaccctgtgaccatagtccccctcactagtgcaaaacaaataccctggtgatctggccttgtgtattcacacagccccactacctctttcccatcatgccctgccctccccttctccctttgggagaagtccagcacagaaggtctccagaccacaagctccctagatttctgattacagggatccacagtgacacataatgtaaaagcttttggggagaaacttggccctaggagtgaaacccttatgctctgacttcagcatatcagggtaactttccacacattgtcagatttgtaaatgagcctttggtatgcgtgtgcacacacagggcaactttagagcagacatttctatgaagggagaaaacgaagagggggatggtgttaaacctgagaactgcgagagaaataccaagtccacaatttttgagccaaatctgaagtaatt

SEQ ID NO: 22298 - DNA, 3268 bp, Mus musculus
ttttttttttttttttagctactcgagaacttttcatagatgaactttttaacaaatgttttcatttacaggaaaacgcaaagaaaattttgaaacgatggtctttctttttaattattattttaagtgttttttgtaagacaaaaattgaagtttttttaaggttctggcaagatttgaagtctgatattgaagtcatgatatttatttttaaaaacctgtcactaccagaaacggtggtacctcctgccctttgactctcataccgtgaaagttgagtccgtgctgtttgagagtgggtaggtggcggggtaggctactgtccggggcatcacccagtgctatcccctcctcctttcaagattattcaccatgaggtaaaagagccaagttcagaagtaccctagcacccagtttgcttgggttggttttttgtttttgtttttcctggaaaacattcagtgagagaagtaatagattgaaaacaaatgaattctcaacttctatgttgaccatgtagagagttcagacataatgtctgtcgatgtcatcactgaaccacagacttgcgccgccagatcgcgaggaaaactgtcgccaagtttcaagtggcagattcacgtcccagggttcagaggtggcaaacttctcagtggcagctgtgctcggtcatgctacgtttcctgcagactcttaagatctacggggtagtgaacaatgacctcattttattttctatgttagttatttatttcaaaatttacattttagtttattttcgtctgtaaagcgtatgtttcgcactgctcttttactctgagggtttaaacaatatttctccaggggtttcctcactgagaacccatgcagtctacttaatgctgtgaatcacattttccaaatgtttaattttttaaagaaaattaatattctatttttgttaggtgtctctaggaatgcagcttttttatttattatcctgtttctttcaaaacccgtaacagtgacacgttaaaggtacaaaactgtcctatctgatggaaaagtcatcctgatgaaaacagagttcgttgcctgtaagcccacttgcttctcacttcatcagacaagctcaatacacacaagatagtaatttaatgggagctgttaggctggtccacacgtgaagagaaacaatttctagccttcttgccaaatccagacctctggttgacttttctttcatagaagatggagttatcttccagttttccaacttaaatttatttagcctttatattattttgttttaatatatatatataaataccttagaagagccatagccagccttcagttataaccactcgacccccatacctcttattgtttctacagaatctaatggggaaaaatgcttcacaaaactgtcactgatccattggctctgattcctacacaatctggcaggcaccctcctgcacccctgtcctcagtgatggccacggagccgagccgaggacaccagggtgaagtacatttgctttacaaggggctcctgacctcccaggcacctctcctacctgtgtggctaatctgatcttgctagttccatacatacacaattagtttagaggtagccaccacaatgggaccgtgtacatttgtggtgaaagctaaaaaccgacacagacttctagaagatttgtgcatacgattcttaatccaattgtatagattgaatatttgagtggaaggcatttccaccctgtttaaatgatggaattctattgagctagcactcctgatcatgacctttttagtagtatttgtaaacaaaattctacagagactaaatcttagcgataatcctccatttcaattttaaccaattctgtcctctttttccaaaccccgaaccccatgcatgctttctcagtcttgtgatgggactggacacagtgaccgacccctcgcccaaacaccattttccatggaattcaaaagaaaatttttttcccttaacgttacatatcatagtgaatggtttccccagtgtatatgaatgttttaagtgtttccaatagcttatgaaatttaggagctttctaatactcgttttataaatttaatcatttgctaatggaaattttaccacctcccacttctgttacaaatcttagctcccggagcggcgctacaattccagagttgttctgctcacccccctctgtcatttgtcacaggaggtccctgcttggcaatgacatttgtgagttaggataatgactttccttctcttctttttttcctttcgtacttaagatttaggagaaaaagattctgtttccacctgagaggaactgtaagcttttatcatttaaccagctgaacaccacaccaaaagcagcctacggatgagcaccgctttggtagcaattaggttttattcacctggtattaaaactattcactatttcaaaacaaaaacaaaaaccgagactttatgaattcatttcaaggcagcatcaaaaaactgaaaaggaaggaaaacaacaacagctaataatcggcttctccgcacgtgtggagctccggagaaacaggcgccccggagaagtggctctgctcagccgcccgcccacgccgcgccgccggtccttgctttcccgcatgcgcccgcccgcggcaacgtgcagtcctacgtccggctgcggagaagtccactctctctcttgttatgaatggtgtttgtgtcggtctgcagctgtgtatggtattatgtcttataatcctgcatcacttccatcctatccagtcatatctaatgtagaaaaattagtttccagtgaaagtaatatgtagtgcttttatgatatttgtgtgcaatatcccctcttctatcaaggatatttgatgtaaaggaaaaacaaacaaacaaacaacagaaactcagttccacaataaaatacaaagtggcaaaagttcactcatgtgttgagacatctttggcttccttgtcatttggactttgcctccaggatcaggcgtttcattggtgggctccctggctttatttgggtgatcagtcaagagggccccagctgatttttgcaacttattttcggtgtcttttaatagtcaagccaatagctcctcaggggaaggacttggtgcccacaagaaggagacttctgaacacaatttttgtaattaagtgggcatttgatggctggtggaccacaccctgggaggcacccatcccagcagtgacccaggtcactgccag

SEQ ID NO: 22299 - DNA, 1150 bp, Mus musculus
ccctccgtaggtgactctgattccgacacatgactccgaggtgatgagggagtggtaccaggagacccacgagaagcagcaggacctcaacatcatggtcttagcaagcagcagtacagtggtcatgcaagacgagtccttccccgcatgcaagatagaactgtagagaccgcagccggccacaccacaggatttgaactgtgtttccagaaattcttgaatttgaaactaccttttctaaaacgtccattcatccaattaagtcactgaacagttattacctgccagatgctatactatgtcatggtgatgcaagtcactgatagttctcaatttttgctgactgctaagggaagtaaccatattcccacaatagatttcgagttactgcaaaattgcctacccccgttcatctctgctgaacattcggaagccatgcactcacgcacccaactgacttctgctaggtattggcatttatcatagagagagaaagagagggaaagagagtcagcgggaggggagggagagaggcgggagagagggacaaagagactgcaggagagagagagagagtgagaggggaagaatcagaaagaaaaagaatgcaagagacaaaggtagagagttctgatgagatgcccagggagagagagtgggcaagatggggtatagagaagacaccagcaaccaggtctgcattttctcagaccacagctattctgtggtctacacaggtggagtttcccattttcatcagagtcatcagaaagagtcttattctcctaaagcgtgtttctaaagaacaaaaagaatgaagcctgttacgagggcatgagctttttcacgccttaattcaatgcctttgctattataaaggctgcacacggcataatgtagcaagtgtagactggatgagtgagtggtttgcgccccattcagaactctcagacttttcgaacacgtgagtaggttgatctaaggcatgctcccagcatttgtctacccaagtccacaccaagtcaagctgcatgcagcaacacccaagtccaccccggttaactgaagcaaataccaaagcaggtgggagtacacatgggagacattttgccttaggaagtgacttgaatgtacaaagacacctgatgca

SEQ ID NO: 22300 - DNA, 1134 bp, Mus musculus
gtggttaagaaggaagacaaaacacccctcaagaaagacgagaagccaagaaaggaagaggtgaagaaggagatcaagaaagaaatcaaaaaagaagagagaaaggagctgaagaaagaggtgaagaaggaaacacccctgaaggatgccaagaaggaggtgaagaaagaggagaagaaagaagttaaaaaggaagagaaggaacccaaaaaggaaatcaagaagatctccaaggacataaagaaatcaactcctctgtcagacacaaagaagccatctgcgttaaaaccaaaagtagcgaagaaagaagagtccactaagaaggagcctcttgctgctgggaaactcaaggacaaggggaaagtcaaagtcattaaaaaggaaggcaagaccacagaagcagctgccacagctgttggcactgctgccaccacagctgccgtggtggctgcagctggaatagcggccagtggtcctgtcaaagaactggaagctgagaggtcccttatgtcctcccctgaggatctaaccaaggactttgaggagctaaaggctgaggagattgatgtggccaaggacatcaagcctcagctggagctcattgaagatgaagagaaactgaaggaaacccagccgggagaagcctacgtcatccagaaagagacggaagtcagcaaaggttccgctgagtcacccgatgagggaatcaccaccaccgagggggagggcgagtgtgagcaaacccctgaggagctggagccagttgagaagcagggcgtggatgacattgagaagtttgaagatgaaggagctggttttgaagaatcctcagagaccggagactacgaagagaaggcggaaactgaggaggctgaggaaccggaagaggacggggaagacaatgcgagcgggagtgcctctaagcacagccccacagaagatgacgaaagcgcaaaggctgaggcggacgtgcacctcaaggagaagagggagtctgtggtcagtggtgacgaccgggcggaagaagacatggatgatgtgcttgagaaaggagaagctgaacagtctgaggaagagggcgaagaggaggacaaagcagaggatgccagagaggaaggctatgagcccgacaaa

SEQ ID NO: 22301 - DNA, 2310 bp, Mus musculus
atatcaagttgcaataagaccaggcacctcccctcacattaaggctggccgaggcagatgtcctagagagctaggatcaaaccaaacatgcctggaaaaaagaaaacagaaaagtaaagaaatgattcctaatgatattctgctatcctcatagacaggagcctggcataatcgccatcagagaggctccatccagcaactgaaggaaactgatgcgagccacacagccagacattaggcagagctcagtgagtactgcagaagacggggaggaaggattgtaggagccagagggatcaagaacaccatcagaaaacccacagaatcagcaaaccttgacgtaggagtccacagtatagtctgatcagattccggcatgctagaggttttaatggctgtagcccatgtcttataaaaagtcttataaaaagcttaatccccttccattttgcagaagtctccgtctctttcaatggactttctgcctttcagggtagaatgcatgattgtggctaacgatgccaccgtcaaaggaggcacctactacccagtgactgtgaaaaagcacgtgcgggcacaagagattgcgctgcagaaccgactcccatgcatctatctgggcaagtcacaagtgcgccgtgaactgttttagctggtaaaatggaaggctgagtggaagtctgtgccattgttactgggtgtttgaaaatactgctggttcgttcctcctgcagttagaaagcaatatagtgtttactaagagctgctgtgaagggttgctaagaactgtccattgtaccacagtgtacacagtggtacattcctctggatattttatttttctgtttactttaattaattcaagccattaaaaatagccaatatctgtggatctcttgagagtcaaacattatgttaaatacttgagtgttacatagtttgaatatttgtaatttaaggtacagtgaatttccagagagagtcagtcttcatttgaaagttaagtacatttgcattaaaggctgttttgaacagaatctaaaagcagagcactttagaactggcacgttctgggtactggcttagtttgccaaaactcttgcacatgctactcatgtacaaatgtgtaaatatttgaataggtcataatgtagattgtttttttcttttttctgggaaagtaaatttacctggttgacatataaggtgaatttctttgagcacatagaaagtagaaaatgaaactgcttgcaggcgccgggcgtgcatactgaagagcattaacattgtttctgtcttcaaggaagtcatatttaatggaagacagatgcaaaatattaaataataaaagaaaatgattataggcaagaataataataggtatagggctagttaacttctatttcattcattcattcattctctctctctctctctctctctctctctttctctctttctcctctttttgacacatggtctaggtagccttggctagcttggaactgaccgagatccacaggcctctgccttccgagtgctaggattaaagacaccaccacaccctgctctaagttttccttttaacatttgttctgtacactcatagagtagatgctggactcaaagctttttacatacgtgatttcacgtcctcctgaaagctctatgaaatggctactgttgtttacctcatggctgaagaagttggaggtgcacaggatgtcctgtaagcacacctttgatctcacaaccacacagccttgctgttggacctcactgcgatctgtaggaaaactactctgaatacttaggaagctggtgcagaaggatcatatagctaaaccactcagacaaacaaacaaacaaactcaaagcccaaacaacaacagaaacactgaaagaaaggaacatacaaattatccataagtcctttaacggttttcgtatcgatctaggaagatgtgttttcagttctactggcaaattcatgcatttgtaggtcttttgctgctcttttaagggacaaagtttcctgagctgttcgtatgaagctgtgaaaaaaggctagaaaggaaactgtctgagaggaaactttttggttgtgttgggggacccgagattctagcatacattgaagatagggggcaggcattggtgaggagcactgtggctgtttgtcgtcttctgtgctcacttctctcattttccttattcagttgactcaggaggggccaacttacctcggcaagcagacacctttccagaccgggaccactttggccgcatattctataatcaggcaattat

SEQ ID NO: 22302 - DNA, 2400 bp, Mus musculus
agtatccaaactgtcagcttcctgcttgggcagcaagcgttgtaatcactgagcggtctctccaggtgctctctcccctagactgtgttacagaagccgtcttattagtaagtattgaagctcttcttgcctagggattgggtcacttggttttcctttttgctaattgagccccaggccttatgtcagctaggaaggcactgtaccatccccagtagcaagatctaaacagtatattacatttcagctttcttaccttcctaggtttcttctgatcagcccttgctaaaagaagagtgtaaaaatgggcccaaaggagcacctgaggaagaggtgaccccagtctcagagtttgtcttcagtgacatcttcattgaagtggatgagacactataaagctctctcctggggccccttctttttactttctacttttgtaatgagtttgagatttccagcgaccctgactttcaccaagcagaaaagcaccactgtctgttttgatttaggtcaattttgaatatttattgagcttcatttgaagcttttataatcagtgggaaacatttctttctgattgaccctgcatttggaaatatcaagcaattaagactggtctcactgacaggcattgtagcttgtttacatttgatgtcctctgtgctgagcgcacctggacttgagaactgtgtgcacgcacatctgtataaatcgtagtgctggcacactgggagcttgattgtgcttaacatttgctgcccttcttttctaaaggtggctgtgttttgtttctgtattttgttttgttttttattttgtttttttctttctttcatttttctttttcttgagggtgatcagttgcctgtaacaatatgaaagcaaagtgtgaaactccactttggtatggtaaagttaaaacttttctatcatcatctatttgactgaaaaaaaaaatgtatatttttctaattcatggtgatgtaacattagtcctgattgaagatctagtatttaaacttgctatttataaagtcggcacatcaaagagatttatttttaaattttttatttaaaatatatcccaatttaattattttcactcatcaaatttgggtaaagaaagcattaacaaataatttgtctccttttcctctttactttaaaagctattttaaaatgtcataattaaaaatgtttagtgttcatattttgaatacttttctcacactttaatatactgaatttgtactgtgaatattttttgcttttcttattctaatctcaggattttcattggaagaaaaaaattaacataaaggacaaattgtcttgtataattgatcttttttacacacacacacacccttaaaaaaaggtttagtgatagctattttccctactaaattctgttcacaggacatgtgggctttcagccacagaacatgaatctgatgttaaagcagaaaataaggcagccagtgaggtcctcattatgaacttgggtgtttttaattttgagtctttatgatttatgtgtcttgttttccctaacagtttttcccctggttcaaattaaatgcttccaagagcaaatgtattcaactttattataaaaccttatagattgatacatagaagtttttccataaaagattctttttgaactgtgtagcccaagtggtcctggtagcagctgcttaggcaggatgtgcctaagattcaaaaactgttcagtgtattaggaaatgagcaatacttcagttggaaaatatttttacatctaggtaatttttgtttttcatattgataaaatggtgaccacttttcaagtttctaagcaaacaagggtcgaactcaatgagtctagagtgctgattcattgaacttactgtgagcctgtttcctgttctgtggcttagagtcaaatgtatagtttaatgtctgctataaagggagatctataagttagatggaaattctcaaaagtatgcatctatttcatgtgactaatgtcacaaaatcatggaggtaattcacattgctatataaatgcctttttgttagtttttaaaatgtcatgttctgtaaagtttgtttgtttgtttttgtaaatgttacttgggttagatcaccgagactaaactattatttatccctgtataatatttatttttttaacctctgtctcatttatctgtaataaactgattttatggaagatgtaatttattgtataaagactacaggggcatttgttgtatagagaatcatgtcggtcaacaaattgtcctgctgccactggacaaaccggtgctaggaagagaaatacaatcagtgtgcttagctttaaggtgggaagatttgtgatggtggaaagatgttgcaaggaatttgtta

SEQ ID NO: 22303 - DNA, 1189 bp, Mus musculus
tgattattttatctcagtcatcatatcatggttattagactaggattaaaaatttattatgtagaaaaatcccccttactctgcaatatttctagatatataagtaagaattcactctgaataagatgctaagttgtagtcagttccttttttattttcatgtcttatattttaaaagaatgggtggggctggcatacagttcatgagcacatttgtgtatgacttttgaggccttaggttcaattctaatgccataaaatgaaatggtatagcatcatcctcattgtcattgttgggcgttgaattaagactttccatgctgggtaagcgccctaccactgagctacagccttagctcgggctctttattcagtggctggaactgaggttttactgtgaacagtaaggctttcactgagatcatcctggtgcttacatgatgatatctgtcactctggttacagatccagctgtccacaactatggaaagaatcaagctatcccaagactgtttcgagtcgaagaacccctctctcttctgcctctgagtgtgaaatagagcacagttggaaaagaacacagaggaagacgaaaccaaatctgaccaaagggcgtggatcaaaacgaattcgaggtaagactgctaagaaggaacctagagcttccaagtccgtgttggtgactcttcgggcttctcagaaagaggatgaagatgatgctgaggattttgattctgactatgaggaagaaacctatcatcttgccccagaagaattaagcaaagcaccagtgtttgtacctgttggtctcagatcccctgaaccagtttctgctcagatcgaggaaacaatggaagaggtagtttgtgttttgttttgttttttcaatttctggcactttcacccctttaatggatggttgtttcttctcttagatttattagagtctgaagagttctttctctaaacatcaatgtcaaaagtaattatttgggacttagtgaacaccgtaaggaacacagcgggagtggcctgtatggcccgcactcagttgtcagccccttactccacagggctacgataggaagctgcttatccttgtgtctgtaagctacttaatctggcttttgactaatttgaagaaagtcttggcaggtgttttctatgtttggttgctaaagaagataga

SEQ ID NO: 22304 - DNA, 1124 bp, Mus musculus
cttttatagtatcatgtctgcatggcactgtagtgagtcattgcacttcttgctcagaatggggtgaccttgttttggctgtaaatcatgaatactggatgcccagttcaggtcataatttttaaaacctaagtggcttaggcatatggcacaatgacagtgcatgcagatctttcaggttcagtcccagcatcccagagaggagaaatagaaatgggaatattcgttctttgattaaaatgttttaagacattttatagttaaatattaaatctcatgccaggggttggtggctaacacctttaatttcaagctctctaggggcagaggcaggtggctctctgagtttgaggccagcctggtctacagagtgagttccagtgggctacagagaaaccctcactcaaaaaaaacaaaacaaaataaaacaatctcactcactcggcttcgtcttttcaggcaaactcttctcacattgaaagtggagttgcagttgacatgtcctccagagtgtcagagtgccaagtgagtgaaagtcaaggccacgcagatcctgtagaaaacttaagtgttaataaagccagtgttgttcatgaacagatgaggtgagtctagttttcatgagaaaaacatgaaccatgtcaaacacagtttcttattgttacatacttggttttattcaaagacattctgcgttgctgttgtgttttctggtgccttttcatgccaggcaagtgttgtaccattcttatgttctctgaaacagaactttgctaagttgtccagtttggcttttaaacttgcttataggccaggtaaaccataatttgtgatgctgctgtttcagccttagtagctgagatgaagcttgtgccagcagtcctggtttaaaattatctcattctgtatagggtgtggtggcttgtgcctttaattttagcacttgggaggcagaggcaggagctctctgagttcaagtgtagccaggactatgtctagaaactctgtctcaaaaacaaaaacaacaacaacaacaaaaaaaacccaacttacccaaacccaacttgttccttatctttaggctcataagtttgttgtctcctttgaacttagtaatattttac

SEQ ID NO: 22305 - DNA, 1136 bp, Mus musculus
agctagacagcaagttccaggcgagcctggacaacacaaagcctggtctgaaagacagacagacaaaaaggacaatagagcagtttatttacctttagtccaaaggtattttgaaaatgctgtaaccggaaaacaggttggcatttatttctgtaccttaaaatcacatttggaaaaatatatatttcaaatttattatcctttttcaaatatattttatattttctgtactaagtgctgtgtaaatcttagaatgcagtaattaaatctcatctactgtttttcatacttgggtttttagtgtgactgtattgagaatgtcttctttcagtttaactgtagaagttttgagaacaaaaggcccctgcgtcgttgaagagaatgatcctatatttgagcgcggctccactactacttactccagcttcaggaagaactactactcaaagccatggtccaataaaggtaactaatgttcatcaaaggtcttttggaataaaatgaacttttatttaagcttctgacttcttgtaaataaaatggaacctgccacgttggtttccactcagatttattggttcccctccccttcccctactatatctttgacttttgatcattttgcctggaatctgtttcagactgtacagagaacctccatttaagtgaatagttggcagtgtttctgtgtgagcactaacctttgtgccggtgggtcattgtttttgtaggatttaatcatagcagtactcgccttgcagatgctgttcccgcagcagtcacggtgcctgcctgtaacacagactgaggggcttaggcagggcggccagggagtgtgagtccagcaacagacagcacaacacgacagcaacagagcacacaggcacatttcatggttttccttactgctttttactttaagaatggtttttaagtatggtagcatatagggcaaaaggaaattttttgtactttctccctcctctgactattaacaacttgtttttttttttttaaggtaaattctgtcgggcttgttacattttccctcacttcctccttccctttcccagtgttataaataccagggcccctttagtccagtaaacatttttccaagtgcttgtctgtatgtc

SEQ ID NO: 22306 - DNA, 1193 bp, Mus musculus
gttttaggacatgaacacacacacacacacacacagagacacgatgttaaaattaagtcacactaaatatgtattgtaaatatctgacaaagtactgacatatttaaaatataagaaaattattgtaactcaataataaaactaattttaaagcgagtaagctgggtctggtagtcctggctgtggcacatttctggcagtcggatggctgtgtaggtgtgtcagctacagcaatggagggaccccttccctaatgcaggagctcttaccccttctctgcttccctttagcgcatcatgactgatcagctagctgaaaacaaactgctgaactaaagaagttttctccttagtggatgaagatggagatggcaatgggaacatgaacttggccctcccatatggtcactgaaaaaccccaacaagccaattcaggatatcccagaatctttactctgatggaaaaaaagaagaaagaagaaagaaaaaaagaaggatgcaaatcctgtacctcgcttggcctgtgcttcattcagttcttgcctccaggcacctgctttgagtccttgccttggcgcccccagcgatggactgttagctgtgaaccaaaagagctcttccttttctgagctggctatggttaagttttatcacaggaacagaaaacaaactagggcagtgtgcatttgaaaatgatctttttcatgtgtacacatcttgcttaggaaagtggtgttaaaaaacattacttcagggctggagagatggctcattggttaagagcactgactgctcttcccaaggtcctgagttcaattcccagcaaccacatggtggctcacaaccatccgtaatgagatctggcgtcctcttctggggtgtctgaagacagctacagtgtactcacatataataaataaataaatctttaaaaaaaaaaaaacaactgtcttcttaaaacaaaacaaaacaaaacaaaaaaaacaaaacaaaaaaaacattacttcaaaactcgaggcgggacagggtctctggctgtagaaatcatacaattcaggatggaactagggccttcgctccattggcttatttaaggacttagtctttgactttagtgatcccagagtttacctcagaccctcgtctgtggctccagtggtcccagagatcaccttgggacctggcctttgatct

SEQ ID NO: 22307 - DNA, 1213 bp, Mus musculus
attactgcaagcagttgaagagcaaattatcgcacatcaagaggatggtgggagattatgacagacggaaaccttagagagatgccagttgcgggagaagggagaggtgcatctgcctgcacgatgtctctgcaattctctccagaggcaaactgactttggactctaatctgggaagttaaaactttgtgatcattacaaagtttccgtggctttaattccatcagtttcctatctccagtattgaagcattttataaatggcttttgataattgactgggctgaacactccaattaaggattttacagtttcaacattgattcttgtattaagaattaaaatgttgcttgatattttaaatgtcaagaaaggtcctggtgtgagctgtgatgtgtgttgagctttgatgtgaaggttcacacgccaggcagtgtgttcctccaggtagaccgtctaatcaatctttgcagcagccctcaggtgactgttatttagaatcaggttgtttttggttttccagacagggtttctctgtgtagccctggctgacctagaacttacgctgtagaccaggctggccttgaactcacacagcttctctgagtgctggttcaggagttaacgtcgtggaccggtatcatcacttttcctgcggtgacttctccaaactgaaactgctaaggcagttttggctaagtctgttttatgactgcaaatgacagcattcctgcctttgtatttcaggggaaatacgatacattatatcggccacgttccccaccactgtttttcttatattgacttttaacaaatgaataggattatttttggctttacattttttcctaacacttaagatcatataaaattaacaagtatgtgaaatttaagaattgtaaatatatatttacgtttgaaagatgattttaaatccagggttaaagtgctttttatcttgtatagtttacatgctttttttttttttttttgataacccactagacctttccattgtatcagagtatccaattacatttacaattatgacttgaattgtatttcacaggaatgctcaagttttgtacatattttataaggtattaaacctgatgttctctttctataatgtgctcatttgatgtcattagtactgttctattcagttgtgcaaagctatactaaagtttcagtgtgtgaactaccttgggtgc

SEQ ID NO: 22308 - DNA, 1253 bp, Mus musculus
tattcacagttggtcatttgccttgtattttttgtgtgtgagtggaaagaccacttagttcataatttcaaggagttttctgtttggttcccactgatgtcttcgctgtgactctgacaggttgaaaatggaagccctgactgaccgagagctggggctgatagaccctgacagtggggatgagtccccgcacagcggagggcagccggctcaggaagctcccggtgaacccgcgcaggctgctcagaatgccgacccagagacctggtcccttccgctgagtcagaacagcgggagcgatctgcctgccagccagcctcagcccttttcctccaaagtggacatggaagaagaggaggaggaagaggaagacataataatagaggactatgacagcgaggagacatagagaacagcctgccaatcaggttgctccttgagagataaattttagtctattcagtggtacttgaacacgtctctgaaggacaagcaatttgttaattgctcagttccttatcgtattcgtcacagcaactgacgactgtcatcttgaagtaaagcaggtctcaagtactcagtgcttagtatttatttagtcttgtgaatggtttgaggagaagtcacggtgtgaagtgtatgaatgttgtactaaatatcaaaatgtgaaggagtaatccagaatatacggactttatggggtgttggaaatttgatttataaaacagtttaggatgcaattatgagtataaataaaccttgtgccttacttacagtttgcatctagcttttcggataccatttttggtatgttgtacagtggaatattttagatacttctggaaagtatttacataatttatatcaaaattaaaaacgttggatttcatcttgttcttcttatcctttaacattacctaccgcgcactgtctgccttgggtccaggcaaggcaagtagagcaaatgttctaaaatgggaaggagctggtagcacctatgctatgcctgcttcctggcctcagctaggtggccaggcgggcggggcactgcggctcggccacgccccgggagctcggtcccagtttcggtgcccgcggcagagcgtgctgttccggcggccgcgcaggtgagtggggccgcgatgcggcgacgggacgccgagcccgcggggtgggcctttcgccctgggcacacatccccggagccgcctccctcccgcggccaggctgaagcgggagcacgcgggcgcgcc

SEQ ID NO: 22309 - DNA, 1253 bp, Mus musculus; identical to SEQ ID NO: 22308

SEQ ID NO: 22310 - DNA, 1144 bp, Mus musculus
cccaactcatagtgtatattttatcagagactgaaaatagcaaaaactggagttggtctaggctggctataaaatagctgagctggttgagagcaacaacaaagatgtaaacatccccttagtggtgagtgagcagttgatggcattccgcactgctacaagccgagatgacgacggtgccaaaagaacccgtgacacttaaatgtggctaaggggtttccccgtgtttgtgtgatttcaggcatggttgccctatgttgcctaggctgtgctagaatttgcaatcccccaggtgcgcaccaccatgcctcgcttcttcctagctgttttcgggattacaatatacagtacatagcctgttgtatggttatactaaaccgctatttttaattttgtatatgtttatatgtacacacatgtatgcatgtgtgcacacctactatagaatgtgagggtcagaggacagcttgtagacattggttctcgttcattatgtggagtaggaccaaactcaggtagtcagtcctgcttgacagcaagcaccttcaccagctgagccgactcactgcacacgtagttcttaatacattctggtgtggaaacagggtctctacagtatatagcccacagtggcctcaaactctgcctccccagtgggattacaggcatgcgctaccacgccaggctactaacgggttttatattgctcagagccttgagaacacttgagatacatgtactagccttaatacactggtatgcagttcctgcctgcgtgcagggtaagaagatcctagctggatcagactcgagctttgcagattttttaaaccatttttaaaaacaaaaaaaacaaaaaaaaaaacccctaaactataaaacacatataccttttgtgtttataattgcttttctttaatctgtagcatttttcaatagagaaatgttgatgtttgacagtgacccactgttcccttcatgccgtacctgtgttacgttccctaccccagaaggtgggtgggttgtcttagtgactttcctgttgtacacatgtgtgtgcttgatatgttaatacatcaatgtcttccctgaataaacatggcgtttctcactcgtggaccctatccttggaagatggtccagt

SEQ ID NO: 22311 - DNA, 2642 bp, Mus musculus
agatttaaggccagcccagttacaaacagctctatgccagtctgtcctcaaagcaagccccacccatctcaaaaagcaaaacaagaatagtttttggcatgggagcctcacaaaggcatagagaacctgttaagaatcaactactgagctgggtgagctaggcaggggcagagaggtatctatgagtttgaggatatcctggtctaaaaagtaaattctcaggcagccagggatataccataaaaccccgtctcatgaataaagacaactacttgttatattaggaatgactagtaagtaaagaaaaagtgctaaggcagaatggcttggtccagaaagttagctctaaagggaaacagctggggaaataaggatcaacagggttggttatgcagacttcagcatcgtgctcgtccttggggctgaataggcatctttttccccacagggaaaaaaattattttggtttttgtttgtttgtttgttttttgagacagggtttctctgtgtagccctgactgtcccggaactcactctgtagaccaggctggcctcgaactcggaaatctgcctgcctctgcctcccaagtgctgggattaaaggcgtgcgccaccacgcctggcccccacaggaaaattttaatctctctctttattaactttttatgtggatgagtgctttgcctgcttgtcacatgtgtgctggtacttcgagttcagaaggtggcagtctcctacagttatgtgattgtgttctaggtaaacctgggtcatctgcgagagctacaatgacccatcttttagccatcatctcatgctttaagaactgcacagtgattattttatcttttgtgtgtttgataagcatgcatgtgtgcactcactccacagcacatgtatgtcagtggacaaccttgtgtcaattttttctgccagtgtttttgggggaaatatgtcaagccactctgcttgcccatgagtttccagagaccctttgaccttactgtagagccccgggagtgcagatacatgctcctctttatactcactggttttggggtgtctttggcagagtagtgtatctttttttttcttttgggggaggaaagggtttattcggcttacacttccatactgctgttcatcaccaaggaagtcaggactggaactcaagcaggtcaggaagcaggagctaatgcagaggccatggaaggatgttccttactggcttgcttcccctggagtagtgtatctttaacttctgagcggctcagttgttgctctgttgctatgatacagttctctgacaaaagcgccttaaaggagaaaggcctcattttgccttaggatttcccttgaaattcagtccaccatggtggaggaggctggttggtcgcacggtccttgtactcagatacagagaatgaacaggagtagggtggagctagacagccttaaagcctaccccagtgacccagacagagtgacacttaagcctgcggggaacagttcacattcaaaccacaacagaggttttaggcagaatctgctaccaagctcacacagtgtttgtagttttggacagggctgtactggaactcactatggtcttgaactcagagctcacctccctcacctctcaagtgatgagactaaaggtgtgcaccaccaaatggccttcttatagttcttagaaattgtttggtgctgggatcaagcctagggctgtgcacataactgatgcacactgagccacagcctgagtcccagctcttagtcctaatagagtgccctgttgcccaggcttttggtgctgttacctctaggcttaacttttttctttctttcctacatgcctaagcaggttatctcaggctagccttgaacttatcctcctaaggaccccatttaggatgatgggcatgctccatcacgctaatgcttgttcttcgttgttgtttgttttagtctttttaagacagggtttctctgtgtagctttggctatcctagaacttactctgtagatgaggctagcctcaaactcagagatctgagtgctgggattaaaggcgaatgccaccaccggctggcttaactcttgggtttttaacatagctcacatttcttttactgtgtgctcactttccacaaattagcaataagtatgattttcaagtctgatttttctcatgggccactgttttaaaatgcctttggttgggggtggggtagaaacaatgtctacccacctgttcaaaggacaaacaagagtgggattccagagttcatactgggaagcccagtgagcctattaataaggcttctttacaaagcactgggtgagagtttacatgcaggagcatgggtaaccctcaagtagccacagcagaaagtctgcaccccacatggatgtgatgccctcggagctgtgtagatggagttctcttctagtaccctactcaaaaataatccgcccctcccacaagccctaaggccatgagcaattagggttaaaatcgggcccatctacacagctatgggggaatcatgtccatgttgggttcctatggttagatttcacatttgactttcttgaatgtattgattgcatcaaggaaaccctatctcaaaaaaataaaa

SEQ ID NO: 22312 - DNA, 1185 bp, Mus musculus
tgctcttaactgccaagccagctctcctgccctctgcccagcggttcttactctgtgttaatggttagcaatgcctgtaagttagataatgctctggagtacagtgagtgaacaacctttctgttttactttcaggaatattgcccaagaagctcattttttagttgcagcgaacaatggacagtttcactgctgaaataaatgatccaaaggcaaataatggaaaaaatagtgaatattaaatgctataagagagaacttgtaaatattctacagatgtaaaatatgtaaaactacgggttatttttattaaatgtattttacaataaatatttgtgatttatgattagagtacaaggataactgcagtctctaaaatgtaattgacagtgcattgggagaggcttggcatgcgattcctggttattctgcagctctgggtgatctgccactttaagatcattaggtatagtattgaaaacagaaaacaatactgttagcagttttgcaagagctttagcctacttactacccagagtaagccctgaaaagatggccctgacgcctccctgatgtcctgtcatctcgaactcactacgctcctcctgcacgcacagccaggaccttggcactgctcatcccattcctttgaccctcccccaaggaagaggcctcggggagatttgtgtttgtcttccatggttttgtactgctatcttcaaagagttccatctcaccttatggcagcctatgcctttgatcctagcatgtatggaagtggatctctaagtttgaggacagcctggtctacatagtgagctccaggccagccagagctacgcagtaaggtcctctctcaaaaagcataaataaacaaaataatcctactatagctcatactattgctttctgttttttacttagaaactttctttccatattaatagatctaaattgagttgatttaattaccatatgataatatagtacataaatagtgtaatttacctgtgctttgtttatggactattatttttttattgctgtataaattttatcatgaacatggcacgaatcgccaggcatagtggtggtttgtccctgtccaaactcgggaggtagaggcagttggatctctctgaattcagcctggattcagagtgagctccagagctacgtagtgag

SEQ ID NO: 22313 - DNA, 1180 bp, Mus musculus
catggtattcttggaaaagaacatcagctttacaaagaagtggtttttctcaggcacggtgactcctgcctttaattccagcatttgagaagtgaagtccaatctccattaagtttgaggtcaacctgatttccatattgagtttcaagctatcaggaactacacagtgagaccccttcagttgtttgtgtgcattttgtgtagtaaaaaaggtaaacagggaggtgtgcaagataattatgaggtgtgatagggcagcaacaagactgttcagtcggttcggatgagtgccggcgagcctgatgccctgggttcagggcctaacgcccactgactctagaggagagaactagcctgacaagttgtcctgtgactgccacatgagcttcgtggtgtacacacacacactgaatatttatttaataaaagtgttactgattaaaaaaaactttttacttgtagatgaagaaaaaactccagaacagattatgcaagaaaaacagatcgaagtgtatgtcatattttaatcttttatttgtggcttttactaagatgtaatcatatgatctgtgttccagggctgtctttctttcctttaggattctagataaataagtcaggtctaagttgggagcttggtgatttgcagtggagtatttggcactacggggtgatcgcttctctgctgtctggtatgccctacatggtctatgtgcttagcaaagcaactcggctcagcctgccagctctgcagacaggcttctgggcggtgggcagtgggctgtggttttcttctgttcagataaaggtgttcaactttctccccaaggagaagctttaacacagttcagtaaccaccttgacattgctgaaattcgttcctgtttcttttatagtaaaattgaagagctggagaatgaaattgaagatgtaaaaagtaatattgaaatgaaaagtcttgcactgagcaggtaatccttcctttactactaaagataagactcgggctagaggtaaacctgagcatcgagggaaggctgcggccggagggccaaactaagctgaactaaatgatgattagcagccaagcaaaatgacacaggcctatgaccccagcactcaggagactgaagctggagggccagagttcaaagccagccttagctactacacagggata

SEQ ID NO: 22314 - DNA, 1484 bp, Mus musculus
tgtacactagttcagaatttgtctaaggccgtgacaaaggcataactccaatagactgctacatctgcagatgcagttggcaccatgtgccgcctgtacataggatacctaccgtgtttacttgctcttcaataaaggttgtgacttctcattttacatagcttaactcatttgaatgttgttgcttctgagtttaggctaacggaagttgtcgaatttaggagtatattaaaaactgcatctagttttaacagtggatccaactaatgtatatatctgtagcctatatgtctatatacatccttcactgtgtgtccttatatcatcatgtcttctgcctcactctagtttaaactctaaatctaccagctagtcctttgttccattttccagtggttgccacctttaaccactgtctcttggtttgtcaactttcagatctgaaaccaagtatctttttttatgtaattatttatttgttcttaattggaaaataggatgttcaaaattaaaggtgtgttttaaaaagaatttgcccccaagtctcactatcaacagataagggtgtattcttgtatatcctgtatagatataatcatgcatatactcccaaggagatatttttatatgggttcattttatcaacagtattcctatcagcattcctttcaatgcctatattgcatttcctagtgtgaacaaactgtgtgtaacatagtcattccctcggtgggattcaagtgcattctctcagtgccctccacagtgttcttaaatgatgtttaatgtcttgcttggcttcattcatagtagctcttccaggggtgtgctttgaattctgacagccagatgggtgtggctgccaccataccaaggcgccactcctgtcttgtaatgccacctggaaaagaatcctgtctcatttgctgttttaatttatacatctgatatcaagttgaataaaatttattggtggaaagctttcacaattctcatttgcccttttgactgtttatgttgtctttgcaatatggagactttatgttgctaataaacatagttttcgattttcagccaaggtcggccaactcccaagtgtgcacaccttgtaatccagcccaggtttttaagtgtacatatctgatctaaatggtgttattcccctgtaataataggactttttttttcttttctttttttctctctcttttttaatatatttttcaaaaaaggatgtccaatcccctggaactggagttacagttataaactgacatttgcctactgggaattgaacccaggttttctggaagaacagccagtgctcttaaccactgggccaattgtccagcccatgataggaatttttaaaactgagttctaagagtttctgtggctacatacggcttaacgagtgcatctgcgtgtatcttgttacttggaaactttttttttttttggtttttcgagacagggtttctctg

SEQ ID NO: 22315 - DNA, 1140 bp, Mus musculus
tcagagttgaggctcacaagtgaactataaattttcaatgtaaatagaatattttcaaatgtagaaaagggtggcaaattttaaagggatgtattttatctttcttgcctcagttttgctcacttgtaaagtggaggtaataatattgttctctatctgtattacatagctatatcatgtatctgtgaggaataaattaatttatacatgtaagggtttttaattatatctcatgtgagtatgcagtaccctttaggtggcttcatgccagaaaggttcctcattattatcagagtggcaagttaaggacttctgttttcgacaccaagaacatctttaaaatataattatctttctaactccattgaaggtcttttttctctattttcaaatgattatagcataaaaattgctcatagaaaacatggtggtatacacatgtactcacatagtgcgtctagtcagaaacagaaagatcaatatgagttctaggctggcctgagctccatggtgaaacctggcatcaaaaataaagtcctcatgaacaagatttttaaaagactaaatcattaattacggctagaaaactagtgaaaaaaatggaaaattatactgcattggaaaaagatttgagcaaacagccaggcatggtggtgtatgtctttaattccagcactcagaaagtagagactgaggggtctctgagtatacaaagctacatagtcagactgtctcaaaaaaacctagcaacaaatgatacatagtggaatgtggttaggcagatagtcttggcgtttctatttaatgttaaatatgtgattatttaacctttaaaatgttacatagttatcatatttccttctgggcattgtttggtttcttttaagacatgtcttgatgtgttaggcctgagcaacctgaaactcactgtagaccaggtaggcctgaaatcccagaggtctgcctgcctctgtctcctggtgtggggctcagcggcacgtgctccactgtgctgcctccttgtaggttttacttattaggaaatacttactagtaaatggatatgactgaagttctttgttgttgtttctatttatagtggatcaaaatatttaaacatgcagttgctggatgtatcat

SEQ ID NO: 22316 - DNA, 1132 bp, Mus musculus
tgcatttagaaaatgtgttcttttctctttgtagcattggactagtcacagcagtcagccagtcaccattcattttggctaaatcatggtctgaaaaaacagcatctagttggatgcttgatatttttccagctctctgttcagagttcagtttagaatggaaggcaagtagacccaagtgggtggtcactgtgctttgtggagattgttaagtgcaaacatttaacagttcggacaggtcttctcattagcgtgattgtgcatgttgcatacatcacggtgtgcaaagggagcagttggtgacatctttaattcaggacaaaagttcgagtttcccaccctagtgtatatgtgtcaaagctggtgagttcatggggaattgccatgtgctgtgatgggtagaggttgatggtagtccctgtcgcagcccaggtagattcatgagccatcatcagtttctctttctcaatatcagacacacctgcagctttatagctcttcccttatttgggggggggaaggggtcttgtaatgttgctcttgttttgatcttggaatttgcagtccagtgtctgggttaatggtctgtagaatgtgtttttcttcctatgaagccactgctcattttcaagagcaaaagtcagtcaaccagactgtcagcccacaaacttgacccgaccacctcctgactgccaggaaattgattccccgggttgactctgggctttgcaacctccagcggtagcattccgccacaccacatacaactgaagagttaatacttatttgtaagctaggtttgtggttggcttctgctctcttcttcctttctctctttcctttttctttttgtagcacatcatgtatgctatcagatacaaataactttaatttttaaaaaggatctgagattgcttcgtgacaagttctgttaagtggtttttttttgttttgttttgttttgttttgttttgttttgtttttttccttcaacactctctgcaagataacttgcaacttaggcagttgcctgaatttctcatctcactgacgtgagtacaatagagctttcatgtgtcagaaggcaggagtcattgagttatagcacacctgtcctactgaatgccctttt

SEQ ID NO: 22317 - DNA, 1258 bp, Mus musculus
aggcaaaagacactgtcaataagacaaaaaggccaccaacagatgtggaaatgatttttaccaatcctaaatctgataggggactaaaatccaatatatataaagagctcaagaagctggattccagaaattcaaataactccattaaaaaatggggttcagagctaaacaaagaattctcaactgaggaatactgaatggctgagaagcacctgaaaaaaatgttcaacatctttaatcatcagggaaatgcaaatcaaaacaaccttgagattccacctcacaccactcagaatggctaagatggaaaattcaggtgacagcagatgctggcaaggatgtggagaaagaggaacactcctccactgctggtgggattgcaagcttgtaaacccactctgtatgtcagtctggtggtttctcagaaaattggacatggtactctagaagatccagcaatacctctcctgggcatatacccagaagaagttccaactggtaataagaacacatgctcctagacttgaccatttctatcgtaagttaaatagtgaaaagtcttgaccagagataaaccctattcatgatcttctctacataggactctttggctgttaaagaattaggcttgcctttgtcgctggcttttgtgtgtgtgtgtgtgtgtgcgtgcttgtgcttgtgcttttgcgtgagtgcgtgtttaagttctcagaatttcctgagaggatggagtgccattgttatttgtctgccttgtgcctgacacagcggaatttatgtcaagagatgacccaggatggtagctagccactaccagcttggtgattgattacaggattgaggggttgaggacagcccaagacttctgtgaatcctgcctacagatgatggttcaattccagctccagttgagacctagtgcaatttccctacagatgtgctttaggctgatgtactcctgtcctttgatggcaggacagggaggctgtgtgcttgagacccatctagaccttgccctgtttgtgtctttatttgactgcttctcattctttttcttttgaataaagttcaaaccataaaaaaaaaagaacacatgctccactatgttcatagcagccttatttataatagccagaagctggaaagaacccagatgtccctcaacagaagaatggatacagaaaatgtggtacatttacacaatggagtactactcagctattaaaaacaatgaatttatgaaattcttggacaa

SEQ ID NO: 22318 - DNA, 1192 bp, Mus musculus
taaaactaagggccattagtacccattttttcccttctggaaatgaaatgctttttatacaaccaatattcaaaattgtgtgcccgactccccagcagtaagcaggccttaaattctcccatgctttttcttctagttcaactgagatagtgggatatagttcctacagaggaggcttaaaataactgtccaacagcctccttccagaggggaccaagcatttaattgtgaatttagggtcctttttgtgctaagaaccaaacccagttttccaagtatggctggctagtctctcctcctctcaggagaaagttacaaatgggctgtggaatttgtacatttgctctcttaaagcgatggaaggactcgtgttgaaattgctttaactaggttgcggtgggccttccctctagctgagctctttggtggtaattaagaggaaagtgaagcgcagatacttttttctgaacgatgaatacaggtttaccaaatgaattgtaatgataggtgcgagcccggcggggaggctgaatatcccctgtgtactgagaaacctataatcagataggtactgttgctgatggctgagatgccaccatctatgccttttagacccttgctttgagatgtaaggacacttgatggcgcacatttagtgactgctgctttttaaagtttcttgttggcttgggcgtgaacgagaagctcatagaagagctccgtaacctttgttacaccgaagcttcatggatatttaggctttcgctccggccccattgtatgggcgggtgactccgaagcattactcatgggtctcaggcggtcaaaataatttgaattttcgcagctagctctgtttcgtatggtccaaatagctgcttacaaacccagaaaatgagggctcagttggagtgggattttgggcacgtggctcattttaactcaaactcaatggtggcagcccctctatggtgctcagtgccaggatggtgagtcgactggagccggctattgcttgagcttaatattaactcttgctttgggaattccttctcttctctttgcctgttaactttcactttcacttactaatagtttgggtttttttcctcctgtgcataggtttgtgtgtgtgtgtgtatgtgtgtgtgtgtttgtgtgtatgccatgtgtgtgcaggtggatgcctgag

SEQ ID NO: 22319 - DNA, 1154 bp, Mus musculus
atttcgccgccagctttctgaaccctgtaattcttttcctcctttgccgacaatgccaagggaagggcgtcctatgtaccaacgccagatgtctgagccaaacatccccttcccaccacaaggctttaagcaggagtaccacgacccagtctatgaacataccaccatggttggcggtgcagccagccaaagcttcccccctcctttgatgatcaaacaggaacccagagattttgcatatgactcagaagtgcctagctgccactccatttatatgaggcaagaaggcttcctggctcatccaagcagaacagaaggctgcatgtttgagaagggtcccaggcagttctatgatgacacctgtgtggtcccggagaagttcgatggggacattaagcaagagcctggaatgtaccgggaaggacccatgtaccagtggcgaggatccctccagctctggcagtttttggtagctcttctggatgacccttcaaattctcatttcattgcctggactggacgaggcatggaatttaaactgattgagcccgaagaggtggcccggcgttggggcattcagaagaacaggccggcgatgaactatgacaaacttagtcgttctctccgctattattatgagaagggaatcatgcaaaaggtggctggagaaagatacgtgtacaaatttgtgtgtgacccggaagcccttttctctatggcctttccggataaccagcgcccactgctgaagacggacatggaacgtcacatcaacgaagaggacacagttcctctgtctcactttgatgagagcatgacctacatgcctgaagggggctgctgcaaccctcacccctacaacgaaggatacgtgtactaagatgagtaacccgtcaagcaaggcaccccgtgctttgcctcttttttttcaagatgcagagaatcaccgaattctcttcaatgtttgttttatttctgttgtttgtactttattttttaaatgataatacaaaagggggattttcctgttgcattattctatggtctgccatggactgcgcactttatttgctggtgggcaggagtaatctagacattcattctttgtaacaggaagatggcggatgagtgggcagaaggagctgagggattcc

SEQ ID NO: 22320 - DNA, 1181 bp, Mus musculus
atggccgctatcacccaacctcccactcctcaggtacctctaactattacccccgtgattccttcaagacagaggatgtttaacctagtgagaggagccttttatgcccttaacagaactgatccaagcgctactgaggactgctggctatacctgtccttgggtccgccttattatgaaggaatcgccttcaatggagatttcaacagaaccagcagccatacttcctgctcttggggtacaggacaaaaactgaccctgactgaagtatccgcgaggaatccaggtctctgtataggtaccccaccttccactcacaaacacctatgcggacaaattcagtccgtgtctagaaaggaagctaattactatcttgtaccttccccggttggatggtgggcttgcaatacaggacttactccctgtgtatcaactaaggtttttaattcatctcatgatttttgtgtcatgatccagctgttaccccgcgtatattatcaccctgcatccagtttagaaaaaagctatgctggccggcggttaaaaagagaaccaattactttaaccctggctgcattcatgggaataggtatggcagtaggagtggggacgggagtgttagctttgatagaaggaagacagggaattcagtctttgagggatgctgtcaatgaagacctagcggcaatagagaagtccattgacgctttagaaaaatctttgacctccctgtctgaggtagttttacagaacaggagaggtcttgatttgttgttcctaaaggaaggaggactgtgtgctgcccttaaagaagagtgctgcttctatgcagatcatacaggaatagttagagactctatgcagaaactgagagaaagattagagcgaaggaaacgggaacgggatgctcaacgggggtggtttgagtcgtggtttgaatcacgaccatcttggataacttctttaatttccgctgtagccggaccaatccttatgatatgcttagctttagttttcggcccttgtataataaatagaggaatggctttcatccagagtaaaattgatacagtaaaactcatggttcttcaaaggcaatatcaacctatagttcaggtagatgaagagttaggggacaccaatctctaaaattctatgattagaattagtctaaacagaag

SEQ ID NO: 22321 - DNA, 2201 bp, Mus musculus
actgtccaggagatgagcagtggaggctcttaaaaaatgctagttactgagttttgtattgttttactttttttaaaaaaaaaaaaatttcaatatatacagtttgatgatgtgcttgaaatttgtgcaaatatacatacactcttgtaaagtgcaaatgatgtaagacgttttcacgttgacttcacagggattgcagtgattgtggtaaatcctcactactgggttttcttttgctcactgttttggacatgagtttttctttaaaacagttttacagattaacattgcttaaataagtgattaaaaaccaactgacaatgcatgctactgttcttccgaagaagagcagctgtgtggaatactaataacgtattcagtgttcagaatcattgggtctgccagaaaatgagcatttcttcttaaccttccttaacatttccaagctcatgaataatactgcagtgtgtcttgtcagctgtaggtggcaaagaggcccttagaaaacggaaattgagttttcacaaacaggctattggagcacaagctgaagctgtagtgccttctacaatgtgtggtatactgttcctgggatttgtatgtgctagtcagtttcaattcatttggaacctagatggctgtgtgctattcacccattgggaagtgttcagttgctgtgtcataagcacttctccattcagatgagaaaaggaagtcctgtttacaagctctgtggaggttcaaacaacagtgtcgtttggggaccaccagttttatactgtgatgattaaacaggagacatgctcttacatggtcagaggatgcctatgagttgacttcattggatggccttaatattgccttgcagtcattttctcccaatgatgcagaaattaaacttatggaaggactaggagcatatggtaaatttgtgtttaatgataggcttactggaatccatcttaggtccaccttcctgcagaaggagggcaggagtaaagcagcatctgcgttcatgttttctccagagctgtgcactccgcactaaccgtccactcatcactgtcacacttccaaagcaaacagaaccccacttccaatttgcaaaggttatttgaaaatcaagtgtgattattttagcagaacctaatacaatcaaattactcagttgccttacctcatgaagagttatgttcacagactgaaaaagccaagtagcactttagttccttggtttcaatttgagtctttttttcatattaatcagaagactagaaagaccctttctgcaaatcacaaagcctggttcgattatgaagctgcttaatcatcttcaggtgtttagagttatggtgtgtgtgtgtgtgtgtgtgtgtgtgtgtgtgtgtgtgtgtgtgtgtgtgtttccttttttgtcactgtgtacattaaactttggaaaatgctttactatgtaaagtatagatggccattttaatcatttagccacatatggttggctaataaacagcttattctgatagagaaacatttggacctgtggagagattgttaaggagtgtctcacttcaaccgctgtcttatttatgaaatgtaagtagactagagcaaatgttggaatcgttgttattttttagtaccatttctctaataaagttgagtattttagcggaaagagtcttcagtttctattccgctctggtttggcgtgccgtgtggagggtgtctgcatggcctgtgcaaacctttgcagtgtttccagagcggccctttaaagttagggcatttcctctctggaagactggtaaaatgttttcatggtggagattaacacttcattcctatcgctatttacctttcattcgggtatttattttgctcaaataattattaatgtagaaaatggttttgtaactcagaatgagtaggaggaatacaagagaaaatgaagtcagatgctgtgggatgtggtctggcagttatgtgggagggaggcacttggggaggcgggcactcctggtctttgtttttgtttttgtttttggttttttttgtttttgtttttaattcctctactgtttttcaaatactgttttttacctaagatagatgctgtcagaaagtgggggcggggaccataaccgtctcctactaacagccagtgtggttgtctctttttctttctagacaggctgatactg

SEQ ID NO: 22322 - DNA, 1135 bp, Mus musculus
aatgttttaaaatggctacgtaaaagttcttgtgtgatagttgacctttgagactttgttgtgtctctagagtggcatgttacatgatttccacatagtgtgattcctgtctgtcgactaagttaacttccaaaatgctttacgtatgatgtttaagtattattctcttttgttagtattaaacgttagatcttttcctcctaggactattttttccacttattaatagatatactgccaccaggtggcagcatgttgctatggtaacagctacaaaatgagacacttcctcaaggttgtttatacccttatcccagatgattctagaatgatcagttaagcctagtcttttaaaaacattttaaaataaatgtcttaatacattttaaagttggtttttcattgcatatacattgataaatgaatatatttcctagtttgaaaaatgttattttacagcttatttttcacactagcctattaaaagataataaaaagctaattgtagtgttcattggatgctggtataacaggccaaatttagttcttagttgacttgaatttctcaccttatttacttcttccagtaaggttgtgagactgttagactgtggtacttaaaactggctcagaaccatgaagttgaaaagagtaacaccggtcacaacatgctcaacatagaagcactgaagcaggtttaaacagccttttccctgggtatcagcctaacctgtgactgcaccctgggtgcaagtgattttgttggtcatgtgggtgccttcatgttattgtaccatccagatactctgcttcacagcatcaaatgatttgaatcctttttaattagtaatataagtttatttttccagagactctgaaatgcttgttggctttcttccattgcgtgttcatgctcactagcttaataccctttctctctctctctctggcttgcttgctcgctcgcttgctctcttactctctattgctcctgctctcgctctttttagacggtctatgtagctctcaatatatagaactagctggcctcaaactcagaaagatcatgtgactctccaaaatgcttggattaaaggtgtgtaccacaatgcctggctccttttatgttgaaggg

SEQ ID NO: 22323 - DNA, 1193 bp, Mus musculus
ccggtggctaactgcttctgggctgtgtactgcctgggaatgtggttgacagaaccagtgtcactccactggagaagactctttttttctcttcgacagcagaaacactgtagtttgaaaggaaattccatcatatcattaaagtccttcttgtaacctaaacataaattttggggtgcagctaagtggtagagtcttaagacatgagaggctcagagttctaagctcccaggtatttgtgtgtgtggagggggctcccagtattcttaattcatggaaattttatggtggtttttgttgttgtttttttgtggggttttttttttccctctcctttgccgtttgaataaacacaatgtacctatcttataaactaggcattagggaatgaccctagacacagaacttggggcatgcctgtggaggactcccttggttaagttaactgacatgggaagaccagcctactgtgggtggctgcattccgcattccctgggcttggaccctgaactgtataagaagagaaagtgaactgaacacagagctcacctctctctgctcctggactgaagatgtaagaagaccacctgctctgatgcctgctgctgtgacttccccacgactgtgtaacctggaacagtgagccaaaataggaccaaaataagtcgtccttcaagtttatttgtcaagagtatttcatcacgggcaataagaaaaacaagatgctacatcatctgggttatgttttttattttgaaacattttttccctttttgttgttgttgttgttgttgttgttgttgtgctgggaactgaatgcaactctggcttctggaaaccaggcctgtgtatggtagatccatacattcacagaaagaaacaaatacaacagctgggcgtggtggctcatgcctttaattccagcacttgggaggcagaggcaggtggatttctgagttcaaggccagcctggtctacaaagtgagttccaggacagccagggctgtcttgaaaaacaacaacaacaacaacaaaaaaaaacaaaaaaacaaaaaaaaaccccaaatgcaacaaatctttttgaaaagtctgtacccttgggacagacttgaaaactgcttaaattttcagtgtctcatacagccgtggcgatgattgatttgcatacctgaccggcttgagctgtgtttgt

SEQ ID NO: 22324 - DNA, 1169 bp, Mus musculus
tgtcaaggcccgcaggatacacttcaatgctgtttgtcttttgtagtgagctttgtgattctcggcttctgtcacacttacttacatagctccacttagatttggggttctttcccttctaaaatttaatttctaaagttaatattattatttagataatatttttaaattttgtttcaactggcctagtatataagttttgtgtcttgcactagaagctcaaatgtcaagtcttcggttgcagtcacagtgagagaagcagagaacttaggcatcttttgggttctcgacttttagtatttgctatgtatttgtttctgcttgttttgcttatatatatatattttttttattttgtttgcttgaggcaccatctcaccatggagccagattcgcctggaactcatggtaattcccctgcttcggcctcccaagccttaggggcgcaggtgtgagctgcctcactcagctcagttctcacgtttctaataagactctgaccttgcctccctgaaagtggtaggtcggccctgtagtcacagtgtgttgaagtgccagggggagagatgacatccactggaacttagctttgaaaactccagaaaagagtgcgttggagcagagcgtttgcgaacagctgctcccaagtgttccgtgggcaaccgagctgtgggaaaaggctgtccagcaggctgtttcatatggcgactgttaagtgaacctccagatctccaactccttttattgggacctaagtttccagctcagagtagtgagctcacagcattattttagccttgggagtctactccaaacggaagccaagtaggatagagaggagaaaatgtaaatgagctgtgatcggactttccacagggctttgagttgtttctccacacatacctgaggaatgactttcctggcaggaaacgaaattagagcctgtctgttctttagacccggtggactttgtgttcaataaaatattatgtcgtgtaataaagttatacagagtaccaagagctggtacacagcagggaagccctttgtttatgtagtttgatttgatttttacaaggctgggcatcaaacctccggcttcttcacccatgctagcaagtgctatgctctcccagctgcttttatggtggtggtagaaacctctggaa

SEQ ID NO: 22325 - DNA, 2271 bp, Mus musculus
aacttttatcatcatatttgtatattagacttagtacagagtatatttattgaatagtagggctatttattggaaagttcgttagctgcaggtttccctaggcagtggtcttgagcggggcgatgctggtttagaagacacgtgcttggcagcacgtcagagagaagcgctggcacgcgctaccatcagtgacgcgtgtctatcgagagtggcacttggaagatactgtgaatgcccagaaagcgaaggcagtgtgctcaggttttctgcatagattttttaaactaagcttgtctgtagcttcgtgtttatagcattcgcatggccagttaagtacataatgaaacatacttagaaatccttaatgatgctggtcaggtcagtgacattactgccccatttaattatcacagcttaaatgtcacaatttcattgctggaaaacttacctagggcagtatctcgttacatttaaagaagccactgacgtgtccccagattccgggtttcctaagtgggatttaattatgtgcccatcaaagacgacgacgacgatgactatttttcttgaccattatttgatggctaacagaagcatccatctctaacattgctcacttgtgtaatcctttggtgcagtttggcttggcatgtcggttcttatgcttaactttaatttattgcaatttaaacgtaacaggagacttcaactgtcttattttaaattggatgccacactgtgcatctggcgtgtgcttagtaggaagaaatgacacgagctatcgatgggaggactcttagtgcactgatggataagaaggctcatttcaaatggaactggcttattaaccaaaaacttggttcgtatcccatcactgcattagagaggaaataagtaggaacagagagtagatgccccatggaacagatcctggagctgttaaaggacaaccagagcgcctgggaacacagatcagtgcatagtgcttgcccagcatgtgtgaggccctgggttaccccttccctagtactgcatgcaaagggaatggcggtgagtcccagcacgtgggaggtaagggtcaggaccaggaattcagcatcactcttggctacacagtgagtacaatgctagcctgggctacaggacccctgtctcgaaaacaaaaacccccaaacaccccagtagaaaaaaaacccgacccaaacaacaacaaaacagacaattagaaaacctcatgacttgctctagatttctgtatttaacaactttgggaaacaaatctttgtgaagaagataagctgaataggcctgtcttgttaaaaaaaaaaaaataaggctcagatgatttcagtggtcttgggagagaaggatatcccttctctttaactctttcgggaagcagacaaggaagaaacagcccccaactcatgtgagcagtaggactcggataagaattcccagcttgggaactctatcttcatgtgctgatgccccttgctgaaggcagctcttcttaggtgggacacaggaaccagtgcatctttcactgcacgtttctagttttgtttctttgggaaggaaggaccagacagccagatgttgtctcccatttccacagattttctttccagtcaggacacccttcactcttcgggtctgtccagcacatcggaatcatcacactgcaagccatttcaataatttttttggtatggtctgattgtgctagctgtcttaaaagtttaagacacttccccagtattcttccccttcttgttgagaaacagggcactgagtacttccatgtgttctgattagggatgcctgacttccacgtgttctgattaggatgcctgacttccatgtgtcctaattaggatgcctgacttccatgaacccatttcaatggtgtagctgacgctgtgaccgtgctatgcaaaatccactgtgtcctttctatggaaatggaattttcatttactatatcaaattgtcaatctagtttttataatagttgactcagatcctttataagatggcattatctgtcctttatttaaagtatgaatagtacacagctatgttgtgtatacacagaagagactttgtaacctaaagaatatagcagaataagttgtacattcctactgactgaaacagtggttcagtcataagaagatgctgataaatacgacttgaccagtctgtcagcccaaaggaacggacctcagttctcactgcttatattttgttttgcacagacattcatca

SEQ ID NO: 22326 - DNA, 1241 bp, Mus musculus
cagtacaggggctccaagtacgtgctgttcagtgatttcaaccgggtgggctaagtcatcatttctgatagctgtattttccatggtaattatcaatgagtgaacactgaggtgcatctcatattttctctctctctctctctctctctctctctctctctctctctctctctagagtgtctctggcttaagactcactgacacatttctaaagagaacatacgaatatgatgacatcgcgcaagtctgcgtagtctcagcagccgtggaagtggaagcctaaagaaaattcctaatgttagacttcttgtttaatcacagaaatgctctctgtatttcgtcagctttgtgcagtgatcagtagtgaaaacaagtatatgttatttaaatgtttcttgtaaaacagttcaattttaaacgtttgttgtaaaaacactacttttatctttcaaattatattctagaggaacaaaacatttctttattttctgtatatattttgtgtcctttaagatacctgtcattttttttgttttcaacaagctcatctttgaggctttttgtctaacaagtatataaaaagcagtcagcgaacctttttgtaaagggctgggtatcagatgtcttatgctcggtgaacagatgaattctgccatctgagtaggcaggcaggtgtatccgtggttgatggacctgcttgccaaggcccctaggctacacactaactctgctggaagacaccatttgctttaggattatcgaatttccatgatacttaatatagaaagttagttgaactaatcatggtcaactgcattctctttcctaggtgcttagtcaacaaagagaggcctgtgtaaaacaattcagccagagaaacatttcagttgttttcaaaattgttgtatggttgcatgtctgtcttagtgtacacataccaacacacgttaacagacactcgagagcaggccaggattgactgatttaattagctttcaacaatgttagcaattatttcactttaatctaaagactcctggggtcttccctactgaagaataaagagcttattttcataatatacatttaaatgattccaacttcacatctgatttttttctttctttttttttttttttttggtttttcgagacagagtttctctgtgtatccctggctgtcctggactcactttgtagaccaggctggcctcgaactcagaaatccgcctgcctctgcct

SEQ ID NO: 22327 - DNA, 1204 bp, Mus musculus
ccctcttctctttctttctccagggtctcttgtaacccaggtggcctggaatttaccatgcatctgaggatgaccttgaactccggatcctcctgcctctgcctcccaaagtaatgggatttcaggcattcattgccattgtcatgataatttcttgaaaagttgaaagttaaattaaaaagtttaatttcttaaaaagttaaagaagatcagtttcttctaggaatttatccaggaggaataaaaatacatgttcgcgtcttcttcctcggcgctgcctacgaggtggctgccatctgttttgcagcatcatggctgccctccggcctctggtgaagtccaagatcctcaaaaagaggaccaagaagttcatcagacaccagtcagaccgatatgtgaaaataaagcgaaactggcagaaacccagaggcatcgacaacaggtgcggagaaggttcaagggccagatcctgatgcccaacatcggttatgggagcaacaagaaaaccaagcacatgctgcccagcggcttccgcaagctcctggtccacaatgtcaaggagctggaggtgctgctgatgtgcaacaaatcttactgtgctgagattgctcacaatgtgtcctctaagaaccgaaaagccaactagaaagagcagcacatctggccatcagagtcaccaatctaccatgcctggctacgcagcgaagaaaatgaatagatagcttgtgtgcatgttttgtgattaaaataaaatcacaaaaactgcaaaaaaaaaaaaaaaaaaaaaacaacccacacacaaacaaaaaacaaccaaaatccaaaaaccaaccaaccaaacaaacaaaaaacctacatgttcacaaaaagtttgcttatgaatgttcaactttaaccaggggtgggaaatactttagttgggaaagtgtttgcattgtaagcataaagacccgaggttgatccttagaacactcatttaaaaaagtcagggccagtggtgtgtgcctgtaaacccagttgggggaggaagaaatagatgggtttcttgggttcagtagccagccagtgtagactaacctgcaagccccaggtctcagttaaagttccgatctcaaaaacaaagtgaaaggctgccgaagcatgacacccagtgtttacctctggtcttcacatgaataaacaaaggtgcacatgttccggaaca

SEQ ID NO: 22328 - DNA, 1174 bp, Mus musculus
gtaaaatgatatcttgataagaaaaaagaataggctaaatattagaagtggttttaaaatttagtcttatttctaagtgttgaaataattagagccaaagccaagtgagtccttctttagtgacagaacaatttgaagtttcagtgcttgcatgaaattaaatatgtctaaaaggcttaaaaataattgtttcattattcacttgcttatcaggtttctgttttcaatgactcctcagtggtaatcattattccagaactagattgcaagttaataattgttaaggtctgaactgaggctttactgtatgtgggagaagaaacccgagtcccctctggtttgtggattatcagtgtgaggttacacacactctttgacctcactcctgtatgcctgacaaggtgtctctcccacgtggattagcttctcttcattgtttcagtatctgtgctctgcctgatgaaaacctctttgaaatcatagaattttatagctctaagggatctagtccaacttcctttctttatggctgcggaaactgagacccaggttaagtgacttgccagacttacctatttcctttcagattggattgcatgatagaccggtgctgtaataaccatatctcaggctcagaaaagccctctgttgacgttctcatgatattcttacggcgcaggaagaaatgcaatctaggagataacactgtcaggtggattcagagcaaattgaatacttttgcccaaagggtgctttcttgtcaatttgtgtctgatttttttttaaatttatttaactctaagtggaaacataataggaatacttgaaactctgtacattagtccaataagtcccaaatctgtaggacaagacagacagaatggtttgtgtatcttaaactgcactctggacaccgaggcatggtcttcatgttgcttcttggtctgggaattcttacacacatttgctcttaaggccttcacttgcttggatgaagtccattcacgttatggaagatcatcgcaaagactactgacctaagttaatcatctacaaacaatacaccatctagactagtgttgcctataacgctgggcaacacggcctggagaggtcaccacacgaatgaactgtcatacggttagaggctggaccagtgttatccctgtcagca

SEQ ID NO: 22329 - DNA, 1766 bp, Mus musculus
agacctgaggcagcgcagatcctacacagttgatgtctccagtcacagcagtgttcttgcccataggtcttactccagtgccactgaagaggactccgcaaaacaaaagaaacagaagtatcagaaaaaagaaaagaaaaaggaaaaaaagaacaagtcaaagaaaggaaagcatcacaaaaaggaaaaaaagaagagaaaaaaggaaaagcgttcttccccttaccattctgaactcaccaaaaagtaacagcgtcttgggcctaactcagaaaattcaagaattcagtgtttttaactgttgagccttccttggaagtgctatgtgattacactttgcaggaagtcccagcctcttccataaagacattctcacctattggggcccttctctctctgaccatctgtattaaacccatctctttacttagcagatgtgcctcaagtatagacatgcgtacttacaaagcacatcattcttttggtggcttaggccggtgctgtccctcggtaagtcaattagcacgtggctttactgcagtcacaggaatgatctacttagcagctctgagtcgtgtccgccttccagtggcacagctgcctcggcaggagtgatttgctcttgatactgaatagctttatgtactctgtaatgtataaagatagtgagggtcttcactgttgttttttaaatctctagactttctaaaataacattgaggataaaattgctttactgatcttaagtagtaagtttttaaatgaatgggatctacaggaagataataatgaaagtatttataacagtgccgttgttttatgaaatgcatgtttctggcacttgcctcccatgtttttataacaattaaaacatccccttttttaaacaatcatttaggttactaggaagtctggcagagagattctatgctagtcaagattattagggtagatcctgggttgatttacaaatgtgccatattggcatgtcttaggtgatacctcaaacacagagctttttgtgtggtagcagcaaaatcctcattaaaactgattttaattgtatccagtgtatatgatgcctacatatattcgtgttatgatagtttttatgaatgtgtgcatatatatattttttttctgaaatggttttagagtgagtttcacactgaacttctggctcatggataatcaatgttgatatttcctcttccacgtcggtcacagatcttagtagcactgtgaaaatttttaaattaagatttccattctgtactttttaaaattgacgacttggagatagcatcgtgaaagcctttgtgtaataatgaaatttgtatataaataagcattttcaatgacatgtcagtagatttaagtgtctctgaggtttttaatttcatggttatcagtatagagtagtttgacatctaatagtccctaataccaccaagttaatgcattatgccataaaaacattgatcaccaacctgctatcatcgaacagccccgaagcctccgagtaccttgctatggttcacttcatacatcttcagattggtaagtgcacgtgtggctgcgggcaaatttatggccataaaatgagatgcgtacacttggccttgcaggctggagggctttagcaattgttcccttacccaaactgacattccctgattgactgaggggtagtcctaggaagtcccttaatgtaccctcatctctgctcaggttacacagaagctacgcccacacccttccctaca

SEQ ID NO: 22330 - DNA, 1577 bp, Mus musculus
ctacaattttgaaaggatgtgttcccttgagaaactgggcacatcagagcaacacactcagggccccaaaacactgtctgcaggaggctcttagaagtgttgctgtggagagattacagagcccagtgaggcacgtgcaggaggattgtctgtctctctgaccctgtctgtcctctgtcctgcagctggccctgaaggacccggtgcacacagtgtctctgcagcagttcatctatgagaagctcaaggcgcagcaggagatcctgggggagcaaggcttccagtccctcatggaaacggtggacacagagattgtcacccagctgcaggagtttttgcaaggattctaagagcacgtgtcatgtggccaccatcccttctgaaagaagctgagtaacccagcctgccatccatttatgagcctgctgagataagatcatttgtgtatgaatataaagaaaccaagaccataaattttttactataaaatataaagaataagtataaatcccaaatattaaagtcagaaaactattcctcaaaagaatttaattttatatttatgaggggccctgtgctgactagaggtgcatttattgagagtagctgcattgtctcttgttaagaaactcgctgattatctttgaatcatgagctcttaacacttgagaagatgaaggttgatgttccagatgtttttctgcaacccaaaattaattaaatgtggttgccttatcctaattttttttaagctaatgaaacaagtttgagaaatgagaatgctgtgcaaatgatagaattccatttgtgcatagcaacatcccaacagctgccctctacctgggtatctcacaagggagctgtttgcattcgacagagaatcaaatgcttttattttcattctagtagtctgatagaggaatcagtaaaggcacttttaactttactctgagtgcatacattgcaaggcacactgaagtgaacctgcagtactgtagtgccaagcgggagagccctggtgagcctccagccctggctcctttgctacatgtgaaggccagtagccctgggagcaccaggaagaaccagataactccaagtccccttccactgtgacagtcgtgcttggctgtgacaggctacccagtatttacccatctcaggttcctcagtaccagggtgtgtcagcacctcagtgccatgggtgcacctcagaggacccagcagcagtccctgggtactagcactgacataactagtcttccttcctgtccctccattgcactaagcgtgcgagggagagaactgacgccttactctgcattacttgccattgtgaggaacctttagtgcatcatctcctaggaaatactgaaaagcaagattggaaatgtcgtatctttctatagagatttgggtacagtgtataactgtaggaaaaccactacccctttgtaagctatggaacccatagtgtctacggatatatgatgttttcagcaaagaaaatatggtccaattaaattttccaaagatacctcacctttgacttgttgtctgttttccttgccacccac

SEQ ID NO: 22331 - DNA, 1181 bp, Mus musculus
gttatagagttagagtcaagaatagcatgtacccactcctcagaatagtaagtaaaggctgtatactaagaattagaatgaccttcataattacactattttaatgaagagaaatggacttgggacaaatttgtgttaaaggaaaaacattgaggtccaaggataaagtcacagatgtgcactatgataagtcaaggccatcataaaactgttactttgaacttttaatgagtatattataatgaaacactgctttaaacttactatcaacatcctctgtaactcccattttatgtaacagtttatgtctgaggtaattttctaaataactttttgtctaaaaaggtataaaaagaccagaaaaaagaaataaagttgttggttgaatggtttggcttggggagctttaccccatccatccatccgtctgtccgtccatccacccacccatccacccacccatccacccacccattcatccacccacccatccacccacccacccacccacccacccacctgcccgtccgtccgtccatccatccatccatccatccatccatccatccatccatccgtccatccaaatgtgtctgtctgtctgtctatatgtttatgtgtagggtatgtgtgtaagtatgcttgaacactgtggaattgattgtgatagatggtcgggctggccagagtgtgggtgtatgaatgattgaatatatatgcgtctatgcgtatttgcctgtacaaagcatcttaatttttttctttccctttagtctagttcacaaagagttaaccagataaactagagaggcttctgactgattccagagaaaggaaccctagcagtaaatcctttaacttcattccctgctgctaaatatctgttgtttgccagatattagcgcttatcaaaacacaagtgacagagttaagaaagagttaagtttttttgtgcttaatgaagcacagaacagtaagaaagagttaagtaaaaataaaggggtggggggagggctgatgagatggctcagcgggtaagagcactgactgctcttccaaaggtcctgagttcaaatcccagcaaccacatggtggctcacaaccacctgtaatgagatctgactccctcttctggtgtgtctgaaaacagctacagtgtacttatgtataataatcaatat

SEQ ID NO: 22332 - DNA, 1179 bp, Mus musculus
atgtttttagttcagcaaatacttaatggaacatgttgttaggcattttcttgtattgtagttaatttttaaaaacaggttgctttgctctggtcatcaccaagagggtagtagaagttagatgaatgagataaatgtcaaggcagaatgaggggaaaggaattgacggacagctgtgttgaatatacaaaattaagtagatgagttttttagaaatttacaggtttattgtaaagtgacaaaactatgaagaacacattgtcctttgcctgctttgaactgaaaatgcttcagatacagctgatttagtttttaaaaatgccttataatttgttgctaaaattgttaccattttatttaaaatgttaagtttaaattttggaattagttttgttcattgtaattttgattacaattctgttttattaggaacaaatcttgctatttcaaccatgaatttcttatgtgaaatatcttatttttaataaaattttgatgtgttttgtgaatttacagactactaaaaacttaaattttattcttaataggcagaagtataggtacagataatgtgtgtcgagatagactggaaaagaccatcattctttttactaaagtggtaagctttctcttttagttatgtttgtttacccaagtataatacaccctcacaattagaaaggagatatatttgtaatattttttgctttaatgaaaggaaaattaggtttgtggaaaactgaaaatagcttttgtatctttaaactatgtatagtaattaaatttacatacccaatgtcatagtttacatcctagcactcacaagcgtttggttatgttatcagcactgggcaaaggaaatcacccaaaatgagtattagaaaaattgagtcttctaaagttcattattcttagatttatcagagaaaagcaggaaaaaggaaaatagcagttcagccagaagcggatgagacgcagctggcagcagctatactattacaacgtgtattcacagtgacttcagattatcatcacaactaccacaccttttgagtagaatttatggttttactgtactaggcaatgcatataaatgctagagctaagttttctataatattttgtgaaagttgatgtttggagaattagtaagaaataaaaagaactgtgtggtgccac

SEQ ID NO: 22333 - DNA, 1185 bp, Mus musculus
atcatgtatttaaaggagttttattgttagaattcatagcattcttgattctcttgctactgggtggcattctcttgtataataattttactttttttttttacagtgctctctcagaagaggaaaagtcaacattgcgtgcagggctcatcaccaactttaatgaaccaataaaccaggttagtgacaaaaaaaaaaaagaaagctgagtggagagtttgaggccatcctgagatacgcgtcaggtcccctgccctgcccctaccaagaaagaaagacaaaaaaaaaaaaaaaaaaccctgaagagtcaaacttgtaatttgtgattagaaagacattttgatagctcttagagtctatggaccactgcattaaatagtttagtgtagttttaataatatttgctcaacatagttaattcctgagagttaatttcaaaatgcgagtgtattatttatcccttgcccttgatttcctagttactccccatggtctctctctctctctctttctctctagattgcgacccagatcgcagtgctgattgccaaggttgctcggttagactgtcctaggcagtggccggagctcattcccactcttgtagagtctgtcaaagtccaggatgaccttcgccagcacagagctctgctgaccttctaccatgtcaccaagacgctggcatccaaacgcctggccgctgacagaaagctattctatgatgtaagtatttaacatgattacatgtgattatgacaatagtgacatgtgtataaaaatgactcatttttcttgtattaatatttttggaacgattttgaaatctttctaatctacactgcagtggtatgtatggaaagctcacgtaagtgtcagtgaggttgcttgtggtaggaaacactttgaaagcagagaaattggtttgagattgtcagtgtagctgagatgtgataacggatctcttcagcaaagccgttcaaaaggggatggttagcagtaagattggcgtgtatagatagttgatgggtgtaaaatagagctacaactgaaagattatgttagttacctgtgctctagtgatgatgctcaacagaaacaactcatgggaggggtttattttgcctcttggtttcagtccaacatgacagggaagacagagctgatgttggcagacattatgtggta

SEQ ID NO: 22334 - DNA, 2897 bp, Mus musculus
acaacggtggtccgactgtaaaggccacttgaacgtttttgaaatctttttttttttttttttaacgttttttgaaatcttaagtgtgtggaaaatatcttgtccttcatctgaatgacatttcaattttgtgaaacactcctttgtcgacaaaatgcttctagaccaagaggcacaactaataattcggactagtgaagtattttgtttcatttgcccaaataaatagtgattgcttttggatatccttgccaattttatttaaagattgtggaagtgatccagaagtggaagataggggaagccacagaatttcctttaacgcagatcaattttcatagcaagactgagcaattttgaaccctttgcgtgcatgcatacctcatgagtgattgtacatactttgcctactcctagagacactcgtgcttactcatccttctgtgccttggctaaggctattgaccctagatttctaaaacagccgagattaattacattccttgtttgtgactgtaaattacctttactgtgtgtacatttttactgtatttgagacatttttttgtgtgtgactagttaattttgcaggatgtgccatatcaattgaacggaactaaagtctgtgacagtggacatagctgctggaccattccatcttatgtgtaaagaaatctggaattatgtgattataattttcttagcattttctttgtaaaaaaaaacctaaaatatgaattagttggtgtatagtaaaaagtaaagaaattctgagaggagttttattttaggataatacatatatacatatgcagtgtgtgtgccagtggtgttaacaagactaatagtggaatttggtccttaacaatgccattatttaagttgaagtgtttattaactcaccaaaatttaatgtactgttaaaggaaactggcttctgatgcatgaacatttgtatgtacactgaaagtaatccctaatacaagttagataaaccaagcatagacagtatgtacccctgagaagtgttgatgacttatgaggcaggttattccaagctccatctaaacctagtatgtgatggtttttgagaatcatatttcgcctgtagattgatggcaaaataggctactctattaatggcagcactcatttttagctgctaatctaagaaagaaaactggccaattttcatgtaaatattgtttaaagatatatatatgtatatctctaggagttttcccttggttcccactatctagtccagtaggttaaccaaagaacctcccatggatctcttaactctagggagcctactgatgactcagtgtaccgaggggaaatccatgaagagtcatgagccaggttctttacttcactggtcataaatgatgagagtagctctgaggaatccgaacaccatggtgaaaactctgtaaacatgaaatctaaatcaaatgtagattttttcacaatatgcttattaataaatgaaatttatgaaacgaatttagaaataatgtacttcaatataattagctttgttttggaaggaactcaggttttcttggagttttatgctatattctatttgtgtttgtttcaaagacgggaggaagaatgaaggactatttctattgaccttgcagcagctgtttaaagaaggtaatttttgctgggtatagtggtgcatgcccttagttgcatccagcacatggaagcagaggcaggtagatagatttctgagttctggaccagcctggtatacatactaagttctaggacagccagagctatgtacaaagaccttgcctccagttctgagaatgtctcatatatagtgggcaataaagacacaaacttgctcataacttacctaacagttgagctttaatgttactggcattggacaggtattatctttgaaggtctttatagatacatgtttccttattggcttcgtcctgatctgtagtcagagtacatcaataaatatcttggtaggtaaaatatgattcagctttacggagggaaagctttagttggaagaaaataagctgagaaagcctagtctagcagaattgtttccctaaggtagagaatggtacaagtgaactgtgcaaagttgttctgacaataaacaaactttaagaacagttctgatcaatatgacaaaagctgcttttgcagctaagcaaatgtttttgttctagattaaatattctttagaaatgtctcaaacttaaaggctgctaactattcatagctactataataagtgtttactatatgacttagaaactggattttgaaggaaaaactgtaggcgagcaatttatattaagtttacttagcattctttttctcaagtaattggagatattccttttaagttttaagtataaatagagaagctagtttagtttccttatataaataaaacagctaatttattaaaatatataaacagcatttatcttttatctgacaatttttaaatagcttaaaaagaaacaccaggtagtagaattttaattatctagaagtcaggaataaccaggaacctgtagttttagtctgttcttttaaaaagctgaaaactaaaactggaaaacttactttgcacaagtataaccccagaatttatttaggaggctgaggcaagagtctgagattaaagtcaacctccaaaagaccctctcattcaagaaaggaaatgaatcataaattaatgagaccacctatttgattgacaaaaccctccagagtttttctaaatctgaaaattgtagatcttgtctcccttaaggaaatatgtgatttaacatgagtttttactttctaagcttctgcattttacaggtagtcttatgcagaacttgcctgtactgtcattg

SEQ ID NO: 22335 - DNA, 1161 bp, Mus musculus
cgcggtcgccagctgacgtcagcgccaccggttcagccccaggccagagcggtgctcagactctgcttgctggagtgggcggggaggggcggggcagggcgggatccgtaagtgattgacaacgagagggtcggatcgctttgggtgccggagagggttacagaaaccttggggtgagggagcaggttaggagtttttaatactaagattgtcgataatgatactttgtagtaaaagacaacaactttcttttttgtaagttcggtacggcttctgtttaattttaaacaaaaccaaatataacttacatattaacttggatatttcaaactctatttcccctcttttgagaaaggaagagactgtaaagtcttgcagatttttcggatgaaggaacagaaaggtggtttttgctggatactgagacctttgacttttgttactaaaatccatttttatttttgacttggcacaggaaagaaatctaagaagctctcatgcagtgtaaagcagagatcaaaaaatagggaaatataagtgaaaaagagtcaaattcgaaaatatctgcatgaaaaccatcctggacacgatagctctgggttattgaggctgacacattagcctttgaagaaaaatgttggctttaaccatgatggcatctttactaggcttagagctgtttttctcttaaatctgtcccttttctgtgcctgttaacagttaacttcaccgttcacatttgtttttcttgacttaattaaatcattttgcttagtcatagctgagagttttgttcgtcttctagctcttggttaatgtgagtgagaatcacaaatttattagctatttttgtgtgtagggtgtttaggcaacttgaggtgtgggtagtggacctgggacagtcctggatgaaggctctgaaaaggggtcactgaacttcctggaaaacttcagtgacttgactaggttaacaaagaaaggctgctttgattggctgctgaagttacctctgctgttcattttaattgactgttaagaaacatcttctggagctagagagagatggctcagcagttaagagcactgactgctcttccagaggtcctgagttcagctcccagcaaccacatggtggctcacaaccatcagtaatgggatctg

SEQ ID NO: 22336 - DNA, 1605 bp, Mus musculus
acggcaagaaaacatcgcaaaagctaaacgactaaagaaggattgaaggggcgcacagactgtagccagagaaaaccactctggaaaacctgcagctttggaaggactctcacgaaatttccaggctgttcctgatagtattatttagtgaattaatctgaccgtacagaagagtcatgttctgacctcaatactatagtaacttttaggcttggaaataaaagtttgttggtatctactggcaagtatttaagttagcatttatcatacaggtggagcatacctaatgtgaaaattcaaagctcagaagcactgtaaaacctaacacctgtgctcagacatgatgccaagagcggaaaagcccacagcccacttcgggatgggttgcagtcaaaatacaggtgcactaaaaatacatcaagttatcttcaagccatgagaaatataagcggaccttgtgttcagaattggatcccatcctcaaggtattatgaaatactttaaagtctgggaaaaaattaaaacactccaagccccaagcatttctgtctgttcaacctgtagtaaaaattctttaaactgacactcatttgccattttggagcttaaagtattcaagtgaaaaatgatgagaaaatggttttagaatatggtagtttaaatggggttcagttctagacagaggatattaggaatgtaaaagaattaaccggaagtgaggtttacgttggctgaaaagagatacagtatattaatcactttttcaaaattgttactgcttatttttttggaatggaagcattactttctcaaaggaaaattttattaatgagtatggctattttcattcttctgacgttagcttttaacacagctagtaattatcaagatactgcattgtaaaacataactttatataggattcttattgccttgaccatgttcaataccatgtactggatagaataggttttgtactttgaacactgccatttgcttcaatgtgttgcagagtaacatgctgtagagccagcagtgcagatgccttgtgctggtgacaccttgggttctgttttaaatgtaaacttgttaaatgtcaccggataattagctgattacatagacactacttttgtttttattgtttataaccaatatagtagtgatgtcctgttactctttacttaatataggttcaaagtaaaaatcagaatttcaaatttatgaagtcagacttcataatttaagccagtaagggtttaaatttgggaacatgatttcatgggtataacagtggttgcagggactgcaataaaatggcagtacaagctgggcaccttccagtgagtggtaatacacacatgagaaattaatcatggcttttctaaatgcattgtcgagcaacattcactgcagtattgaagtgcttattactgttttctgcatctctgataattttaagttagaataattgttaagtcttaataaaaatgaaactaaatattgaaataaatttgatacctttttataaagaggtcctgagtttttgtcttttggtgggaggagtattcgtttaaattacatatgtcatccaagttaatgttt

SEQ ID NO: 22337 - DNA, 1199 bp, Mus musculus
tgtcccttgtccctatattcccttgaggtagtgacccagattggtgacagaatccaagtctgagaggtaggagcacagaatccaaccccgtgtgctgtgggaacagagtggcagcaaggaattgggtctcctactagtaagggctgtggatatgggcagtcacagcagctgttggcactgataatatatacgctgtgagttttaggagtcacacatttcattattattttttattagttattagtgtcctacaggattaattggttactctctttaaatagaatctagatttgttctaagaaaattaattttgcttcaatgctagaaagtataaaatttgcagtagtttaaaaactacctttcccaccatataactctaagcaaaattcattattttttctaaaaatttaataattttgccatataatgtggtatgcaataatcaaaataaactagcccatcatagctatagtagtgcaggctcatgtcaaatgttcgtttgattttacagggcagactattcgagagaaaaggattgtagaagcagcgaacagaaaagaggtagactatgaagcaggagacatcccaaccgagtgggaaggtaagtgtctgcctccaggaggatgctgggaaaggcaagccacttaaggcgatctgggaacttagcaagagtgcacagaattactcctccatggagacatttttacagctttgtttccggaacattgcattgttttgaaatctgtaaaagttgtgaagctccagcaggacttgggttggggtgaaacaggcagatcaagctaaccctaaccctaaccctaaccctgtaaagtcaagggagtcacccatgccttgccctgcccctgccctcccacccgcacccacacccacccctacacccgcccctgcacagcctccaggctggacttctttttccaggattcactagtccctgaacttggggaaatattttattttaggtctccattttctgtcttataactagaggagaacacttagcccaggtgctgttttggagtatttctctgacttacaaagacaatgttaactgacttccttcttaaaacaagggtggctaacataggagaattggaacacacagtggatttcatgctagtctggcatgaggccctgcctcaaaaacagtatttttcatattaaagatcaggtagtcaaag

SEQ ID NO: 22338 - DNA, 1078 bp, Mus musculus
tttaaataaatctacattatctttacattgcttttgtttttaaattagcagcaataccgtttccaaacattctaattgatgttaatctagcatatttcataatgattatgaggctaaaattatgaaatacataaaatagattctcctttcttttataggctccagccaaatcccagttaaacccagcattcgcggacgcctggagcagcagtgacgaggatgggtgactgtcagccctggctccttgtccatcagacttccacgacagtgttgtgtgcacttcagcacgagcagggttgttcttcccgttattgttggttttgagacagtgtctcacgatgtaaccctggctagcctggactagcctggaactctgtatagagcagactcggctcacactggcagctattctgcctctgctcccaggtgctggggttagaggtgtataccacgtggcccctcctgtacatgtgtgtgattgtttgtttcattgtttgtaaactcttcagtcagtttttaacctgttaatcctgagtttgggatatttccctgtgtgctttaaaatgagatcgatgtgtatgataccctgaaatatacttttctgtcggttaattaatcagaacttgtctccttgagcgcattcaccagggtggtgggccagcccctacgggcacagcccaagaacagacttgttattcccagctgggaccttcatatgtgcatccaaggagctgaaagtatgacccaggaagctctcagctctgactcctgactgtgctgccagcctgcccttcccaccttcagggaggagtttagcaaggaggattagagaaacttgttgcaacagtggcatcataatgctagattttttactcaaactgaatggcttcatgtaatcgagcctcttctccctcatattgaatgttagccactcatgcatcttgcagtgtgaacatcgtatcacataggcaatccctgaccactttgtattgctctcagagggcagcttacactcagtcttaattccttcctgtgaaactcagcaaaatccatgcagggatgtagattaaacatgaaa

SEQ ID NO: 22339 - DNA, 1214 bp, Mus musculus
tatcgggttccagctaggtttggctcactgggctccgaggctgcagagctggtgttccgagtggactcgcggcagggacagtcccggtaggttttgggcagcgccatccactgtgtgccggcggtacgcggcgcgatcagtcatgtccgcaagcatccgagcgcccattggcgaggagaaagtgttctttcctcctaggtgctggaggcgcaaccccgggtagtgaaatccaggacacaaacagccccgcccaccacacagttcctgtcacgtgccctcgcaacgtccaatcagcgccccgaagctccgggcttgtgattcaaactgcggcgcggcgagctccgtctggagtccccgccggcgttgccccgcgactgctgcgcgttggcaatggagcaccgcgtagtgggacccgggccgtaccgggccaccaggctggtgagtgagagtggggccgagccgaccccgcgccgctgtcaccgccaagactcgggcagtgtgcagtcgctcgggggttgccggtgctggtggtcgtgtgcctgctccggtcgctgctgcacactctgtcccacagcgggcagacgaggcccggagtcagccctaccaaggtggcatgaactacttctgccgccggtagttggatgctcggctttggacggcgccttcagccttaacggggaaccgaacctcaggcgatcgcgttcccctttgtcctagggacctactctagcttccagggcaagatcgaccgtgggtggagccataggaccacctatgggggtagctcttgcggactgcggtgctccaggcagggcgtgactccttcctgagtgacactgttgacacttgacaagtgttctttgtaacggtgcactgcacggaggtggattgcccctctaaggttcctgcccccggagtttcagttgtcagcacctacttcaagtagcggatcagctctgataggtgatctaaaagctttgctgatgcaccagggtaagggtctttcttgtggaaacaagttttgccactcagaaacttatttctaggaggaagtacttttactgacttctccctcaaacggattaggacaatggaatagacagaaggttttagaggactttgagttttgtctgtgaagactcatagctgcattgccttgcaataaagtctcacctgctctctactctggaaaaggtggggatgaatatccaaac

SEQ ID NO: 22340 - DNA, 1200 bp, Mus musculus
tgtcctaggcatccttagctctccttgtagggcactcatttttctgcccctagcagttgcttcagactgggttgctttccattgttgtatgtatctgatattgctcataaaagaggattacttgaagttatatgactcttattttgaatgattcctcagttgggacaacgtgaattaagacaagcatttctgcacttgatctttcttgaatttataaaaattgatttcactggttagttggatcgcccccaggaaatagcagtgccttagtgactctgcatttgctcctctgctattcatcctggcacagcctggtcctgagagtcattccctacttctctgagcccatgcaaagttagcctagaattctaaccacgattaccagtcaaatttcaagtaggcaagtcaaaacattttttataaaccatagcattttatactgacagacatatgtattctctctcccactatcccaccccttttcgtcctttctccctccccaccccctcttgtcctcccccccccccccgcccccacttctgccaaattagaattctgagatgtggttcaagcgccacagtattgctattggagaggtgccggcatgccgcctcgtccaccgcagacagctgaccgaggccaatgtggaagagatctggaagtctacgacgttgtcatagtacgcacatttgacatctgagaagcctagagatcttctttccgttttatctctttcctactctctgcatatttagtgttctgaaatcattctcaaagaaatctcaactttgcgtaacctgtacttttgctgttttataaatataatttaactggattttaagaagtttctaatgttagatatgcagtagttagaacaggagtttaaattattttttaattgttatttaatatatttgcatatgctcttgctgtgtagtcgccaggttgaccttgacttttctgacatgctgctggaccctttgggtgctgggattacatgtgtatgcactgccgttcccagcctgacgtcgctaacctttgagtagcactgaaatcttaagtttattaaacatataatggaaaatttagccttcagtaattttactttaaaaaattgctttttggaattcagtttgttatatgattaattaatttaagaagtatgcaatgataaaaatataccatgtatacatttatcat

SEQ ID NO: 22341 - DNA, 1720 bp, Mus musculus
tgtaaaaaaggtaattggatttgattatagcatactatatatatatatatatatatatatatatatatagatatagatatagatagatagatagagatatagatatgtagctatcacttggaacttgtgtgtataatgatttattagtaagaaattgaaagtttttttccaaaagatattagtctaatgcacaatatacttttagaggtgtggtgacacccatggtgcccctccttggatttgtctcctaagtattgtcttctaagtctccaagtaccttgaatatattttcatattctatagtatttaaaaaatgcagttgtagcttttggctctccggtcggcaccatggcggtcggcaagaacaagcgcctgacgaaaggtggcaagaagggagctaagaagaaagtggtcgatccattttctaagaaagactggtacgatgtgaaagctccagccatgttcaatattaggaacatcgggaagacactagtcacgaggactcaaggaaccaaaattgcctctgatggcctcaagggtcgtgtgtttgaagtgagccttgccgatctacagaatgatgaagttgcgtttagaaaattcaagctaaccactgaggacgttcagggcaaaaactgtctgactaacttccatggtatggatcttacccgggacaaaatgtgctccatggtcaagaagtggcagaccatgattgaagctcacgttgatgtcaagacgaccgatgggtatttgctccgacttttctgtgttggcttctctaagaaacgcaacaaccagataagaaagacatcctatgcgcagcaccagcaagtccgccagatccggaagaagatgatggaaatcatgacccgagaggtgcagaccaatgacttgaaggaagtagttaataaactgattccagacagcattggtaaagacatagaaaaggcttgccagtccatttatcctctccatgacgtctttgttagaaaagtaaaaatgctgaagaagcccaagtttgaattgggcaagctcatggagctgcatggggaaggcggcagctctggcaaagcagctggagacgagacgggtgctaaggttgagcgagctgatggatatgaaccgccagtccaagaatcagtataaaatccagatttttaatagtgacaaataaaaagtcctatttgtgatcaaaaaaaaaaatgcagttgtagcatcttgatttctatattgtggcaaaaataaaattaaaacaagtgaaagtaaccacagtaagcagatagcttccagggactgatgggttttcctgatatgccacatggtgctctgccattctcatctgtgttgctatctcctgtcggcttagtgatcacaatctttagtactcgcccagtgctgcattctctgtacaatttactgcaaaggcagttacagagaagaatgggcagctgcactagccatcaactaaggcttccttcggttctctatggtgcactttgctcctttcatgaacttctgttctctttgcactactgctgtgttagctactttggaataaacatggccagtgctacttagatggcattctcggtagtcaaatgagagaaatcccttcaagtatggctgctttctttcatttccttcctaaatgatttatatctaaagtatttacaactaagttctagaggttggttttcaatattttatatctctctcaatttat

SEQ ID NO: 22342 - DNA, 1101 bp, Mus musculus
ttatcatggttaggtatgggccttgaattcctgatctttctaagacttttatcatgaatgggtggtggattttgtcaaatgctttctccacgtctaacgagatgatcatgtggtttttgtctttgagtttgtttatataatggattacgttgatggatttctgtatattaaaccatccctgcatccctgggatgaaacctacttggtcagcatggatgattgttttgatgtattcttggattctgttagtgagaactttattgagtatttttgcatagatattcataagggaaattggtctgaagttctctatctttgttgggtctttttgtggcttaagtatcagagtaattgtggcttcatagaatgagttgggtagagtaccttctgcttctattttgtggaatagtttgtgaagaactggaattagatcttctttgaaggtctgatagaactctgcactaaacccatctggtcctgggctttttttggttgggagactattaatgactgcttctatttctttaggggatataggactgtttagatcattaacctaatcttgatttaactttggtagctggtatctgtctagaaacttgtccacttcatccaggttctcctgttttgttgagtatagccttttttagaaggatctgatggtgctttggaattttcaggatctgttgttatgtctcctttttcatttctgatttttgttaattaggatgctttctctgtgccctctagtgagtctagctaagagtttatctatcttgttgattttctcaaagaaccagctcctcgtttggttgattctttgaatagttcttcttgtttccacttggttgattttgcccctgagtttgattatttcctgccgtctactcctcttgggtgagtttgcttccttttgttctagagcttttaggtgtgttgtcaagctgctaatgtgtgctctctctagtttctttttggaggcactcagagctatgagttttcctcttagaaatgctttcattgtgtcccataactttgggtatgttgtggcttcattttcattaaactgcaaaaagtccttaatttctttctttattcctt

SEQ ID NO: 22343 - DNA, 1179 bp, Mus musculus
atggatttatttttcaaagtcaggatgttcaatgaatcctataatctagacatacctcccaacaaactggagacctcccagttgatctttcattggacgaaaattctgttcaccaaacatttgatgtacctcctagatttgtgttagtatagcatggcaaacattggggtttggagcacaggagcaagttccaagtcaggttcttcttgggttgatccgctgagggcaggcgggacgagtgtctttcttccaaggtagcaggattcccaagcatcaaggcctatgtaccacttcagcttcaaattccccttttaatcataatgccttccatattgaacagctcacgtaattatcttactttaactcgagtatctctttaaataccttctctccaaataaacaaagctacaatgtaagttagcatctccgggtagtttggagtgactcatgaagtcgttagcatcggcctctcagccacagccgttgtttgtcctacactcacaaagacaagtccatccttctccatctttctcatgtgtggagactcgtgtgcccctgagaggctgatagctgtatggcctcagctgctccaggggctggagatgcttcccagcgactggtccatgagttaactattttacttcttccttggggatttccaccgagagcattcgttacatgaaaggtttaaaatggcatctcggtttgggctgtagtcctgtgactaatgtgtaccgttagtccaatgtcacacacaaagagggaaataataaaaattaaagggctgtctttaacatagtttatcataattaatgatcagtgctctattttgtgggcacatgcatgtctgtgtggatgtgtgcacatgtgtgtggagtggttatgtgtggatgagtgaatgtgtgctcacttgcgagtgtttggagggaagaggtcaatagcttccttttccaccttttatttttttggaggcaggagctctcatcaatcccgctagctaggctgcctggacagaaagctccaagaatccttgtctctgcctttgcctccagtactggaatgacagaagggcattgccatgttcaaattgtatgtgggccctgggaatccaaactcatgtctcatgctaacaaggctggcacatttccctccagttgactggttttaaaactgcacaat

SEQ ID NO: 22344 - DNA, 1144 bp, Mus musculus
agcaaagtttcttgacagtaaaagaaagccagctgctccccacaatccccagtgaccccagtgacaggagggtaaaggttaagatcagaggttctgacatggaccagctgggttgaaatccaccctctggtccttgcttcttggatcacctaggtaactcagatgtgtatgcagtgggctcctcttctgcaaactgctaacagccacaccgcatggttgatgacattactatgagacaatcctacgcggtgcagctaaactgattgggagtgtgctacaagcaaagcaaaactcaaactcaccagcttctttaaaataaccttccattattctaggtgctagtccaatcagaagacatgtttggtttgggggtttgagattatagcccacaaaacatccttacatgtagaaaacagataggtatgtagaaacatatataaacatataaacagataggcatgtagaaaacagataggtagccccttaatttttttttttcaaatgcaaggttgtatgaaagcaacttgttactcatcagcacctggaatttgaagtttgagatctgatggttgcccactgatgtctctgtgttttctgtggctacaagatgctttctccctaggcagcagcgtgagtcacagagatgcccagttggcagtacaatcagagaaacaagtagtgggtgcactgcagtgtgctcagctgtgatgttctgtgggccaacggaattaactgcagttttccttgatgatattttaccttctgatggttttgcttgggatcggcccccatcacaagtcaaagaacacccagtatgctgcctagcacacgggcagacatgttcagcgtcagcagctgttgggcttctgtgtgtgcgtgcctggcattggatgctcttcctgtcataaaaaagttgtgaccttgccactcacccgacagatggcattgcctgattaaagtcaggccatatttagaacatttctgtaaaggctttgtcgtccagagaatcattactgcctactggtgtggtttctcttcaacaattaaagaagaaaaattgttgggcatcttctcagaaggacttttctattcccctggttttaggacaattggtcttgtactttcataaggaaacttgtcacac

SEQ ID NO: 22345 - DNA, 1239 bp, Mus musculus
tctgtctcttcctcacttgcttctttttcctttgtccttccttcctttctcccctctcttctttcttcctctctcctaagttatagcgatattaagaagacatgtgatgcttatatgcatttaaaaagagagatgaatatcatatccattgctgctcacattacatcagctaaagtcaggtgactgtgcctgtcccttggggtgcaatgacgtgcagacttaccacttcccttaaaggagaattggaattctgaaaggtcatgttggtgacaattacacttcctttcttcaaatgttgcttgaatggccttctctttgcttcctccccaggtcttccccatcagcctgtgccatacctctacctgtgtagtcctcagccatgtaaatggctcaaggtttccctatagtgtgtgatggttcttgggctttgttcatcttgaggattactgttgtcctccatgagttactgacagtctcagagaggggagtactcgaaaacaaatgcacttagcatcttgtgtatctgacctcaagcattacacatcacttctgcctgatagacaaccctgcaacagagtaagaagcaactataatgatgtaaatgatggcgactatcagaagctgggtgtgattcctaactacaagctcggtaactctcacttaaacccatggtgacaaatatctgctttctgacccttaggctctgcaaggcagcagacctagcgtggggtaagcaaactttaaaacatgttctgggggaggggagttggtcttctgctttgcaatcaaagggctctcatataacattctatctgttcagtacctaaagaaacacatacactcttccttggcatatttgcttcatttataacactataaatgctatttttaagtgtcttgtgttcaggtggttgttacacttgaaatggtgacaagctatatatatatatatatatatatatatatatatatatatatatatatatatatatatatatcaaaggggagcaaggaagtacttgatggtttttctggtcctttccctataggagcatgagttgagtaagctaagtgtgactttaaataggacactgggaggaatcagaaatagtggcacagtggcagaaatcccacagcaaaatccatccttgtccgcactctgtggttatacaagccaggattctttctagactaatgaagaaatcgttgaaaaatattaggcgaacatgcagttctgga

SEQ ID NO: 22346 - DNA, 1107 bp, Mus musculus
acagagttctggtccagaaaaaacactggccattccacttagaactattttaacctggatgctcttgatcccatcaagaaaagaatgtttactctgaatagaattctgtcagtcaggaagcccgaggattaaaagtgaagtatccaaatgctagttagtcaaaacacagcgggaagaaactcggtcttcagctgtcattgttctgaaggataaagcaaaactgaaggtctacttgacaagttgttagcacaaccaacccaaggtatttaagagaacaatggtttctcttaggatgtgggccatttgcttaagcactttcaccttattaaagaaaaggagccaagttgtagggtttttttgtttttttgtgtgatagtaatgatactagtaattatttagatcttttttagtctctgtgtcccatgcatatacgtgataaaaagagtaggatatattatttattaaaatatactatattatatattcacatgtatttaaaataatatatggtggggcttccttcaagaaatgagatccctgtgtaagagcgtcttgggtgctgaggagacaatgaactgcaaagtgcataaggatcacagcagagcgagccatcttcagagaaaccccgccccctcatcactggctttctggtatcaccttttaaattgtcctgtagtaagagaaaatctagtgccaagggacctgtcactccagaggagtgctcagtgggctctttctgggtgtgcctgaaatgttgctgatgcttcatgcttaataactttaatgaaaatttaataaagattacacatgctcacgattatagacaggctgtttggtggcctttgcttatacatttgatatatatataatatacaattatatatatatatatatatatatatatatataatgaatgcctaggtattctgacttttttttaaagctaaaacagttaatttatgcaccctgcctccctaataaaaagactcctagtgaaaatgagatttgtctgacgacatgtatgcatggctcttttattagctgaagtatttaatagactagtaagaagccattttcttccttgcttgcttcatagcttgcattgct

SEQ ID NO: 22347 - DNA, 1428 bp, Mus musculus
cttccactcctccacctgccaggggagtctgctctcccacattgctcccctcactgtgtgcaaagtgagtatttattctgtaatacgttaatgtgcattacgtccagtgttgtcttaaacctcataggagctcagtcgtcagcctctgttgtctgaagtaaatgggagatatataaatacccagtagctaaaacagtcaggtcttttccaggcattttcctacccactgccttctggtaatttcctcccccccccccccccccgccctgtctcaggagacatgcattcacaaatgctgtccttgtagtcacccgaacatttcaccatcattttattgttgctcacagccagttacaggaagaaaaacattttcgcatcctgttgcttggtttaatgcctatgccagcctctgcacttgttcacttgatgggggtcttaccaagtctgtcactaccattctgaccgaggaaaaagaaacaggttgtcagggtagggctgaagttcaattcttctacatggttctgtcttctctagctttttcctctgaggttgcagaggaaaagcatgctaagtgttatataggcaggtcttaagactgtcagctgtctctatcgacaaataccaggacagctgttgtttgaactgcccagggaagcgagacctccgtgaggagcagccctgggaagtggttctgagtgtcgaagctgctctctcctaatggacagtctggtaacatgtggactttgctattgattcttcttgctccatcagcttgtcccataggaaggactgctgcagacacactaaaggagagtggatgataccgctggctccaggcggatcgttatgcgatgggatctaaaccagtggattgtgtgagtctgcctcagtagaacattaagagaggaatccagatttcagctccaggaactctgtgaatttatggcttagttcccagggttaacttgctgataccagtcagcctcgtgcagcatgtgtctagcctagaccttagttgtcttcttggtgtaaggtttggagcccatgctaattttcctttatggcacccaaatggggactaaaggagagggtggtatatgaccaaatggaaaaggaaacgtttaagaaaagtcctaagtctggaaaaaaaatatgaataaaacttctccaggaagttggaggctagtgactgagaaagtaagtcatcagccagggagatcacccaggctgcgcacaaaccttgtttcaagttcttgaatccaaacgatgcttagagcctttggtacagaagtgtttctgatctgtggcatagggcgggataaaaatcaaataagtgatcattggcgggctagccacctttccttgtgaagagtgcatggtgcacagtcagcctttgtgtgaccagagatttcacaaaacctggggcac

SEQ ID NO: 22348 - DNA, 1181 bp, Mus musculus
gaaaaaaaaaacttgaatgaaacagattttacagaaagctttatgataatttttaatgcattatttatttttttgtgccatgcatttttttcctcaccaaatgaccttacctgtaatacagtcttgtttgtctgtttacaaccgtgtatttattgcaatgtacatactgtaatgttaattgtaaattatcggttcttattaaaacatcatcccgcgctgggatggtgttgacatatttggaaactcttggtgagagaatgaatggtgtgtatacatgctccttgtacatttttctgtttcttctgtaatatagtctcgtcatcatagagctcgtttatggaaaaattcaagaaaaatataaaatacataaagatatataaatttaaataacatagctgcaggtctttggtcccagggctgtgccttaactataaccaatactttcttctgttttgctgcaattcaaagttaggtggtagtgaggctcgggctgggcgttttggagccgtgctcctcattgattggattgcaaaactatagatcacggctggagaaccttctgacccttgtgagacaaaacctctgacatacatgttgccacggagcacaatggcactggtggtgcgtatttaccagctgagtgccgggagctactacacctggatacacaggattggttttcttcttcccaaaccacacaccaagaaaacattcttctctagggactggagaatggccttctggcttctggtcctcacaggaagatgaatttgatttgaaatgggagccatagttcactgatctcgtcagtcctgtgttcaccggcttcctgccatgccaagacattacactattttaaatactctcctcgtctccaagactaaccaaatttagaaatatgtatgatacatagtccatatgtgtcatacatatgcatacagacacgtgcacagatatgtacacgtcagtcacctgcgtaaacacagttatatgatgatgccaattcatgtaaaataaagaatccatgtctctcgaaaattgtttttgtgtgtccacgtggaattgttaagcatagccttgtacagtggccagtcctgaaagccacaagagcttccttgtggaaaaggtggccacctcccaccatagcccagcccttagaatatgtgacgtagaaaaaagaa

SEQ ID NO: 22349 - DNA, 1688 bp, Mus musculus
caaggtcttgctatgcagccagacaggcctggaattcttctatgtagcttagagcttacctagaatttaagatctccagcctctcaagtgctaatagatttaggctaccatgttcaactaagaatagattaattctgttacagatactttgttagataagttggtcagttgcatgtgactattgaaatagcttatttgggggcatgatgtacttgtttcaggaattttcagggtaagataatgattgttaatttgcttgtttttgacattttagttacagaagaatggtctgagaaaaaatggtattttgaaaaatggcctgatctgtgacttcaagtttggaccctggaaaaacagcactttcaaacccacaattgagaatgatgacacagagacaagtagcagcgacacgtcggatgatgacgatgtgtgaaggagatcctcacagctttagaaatgttagtgtgatacatctctcatgcagtttggggtgaattgtaaaaatgaagaactataatttatgtagtgaacctaccccattagaagatgattttttgggggacttcgatatgaagaaaaccaagaatgttgtgttgggctgtgttgaacattatttctttgtaaatgaatgttgtagaaatgaggactttggttgatccaacattgactttcttcatcactgcagcatttctcttgactagcaatgtgacgatgtaacaaatgagattttctcatttaataataaaaaattgtgtgatgttttgcaaagcttctgtcttaaaatgttcaggtcttaaggtacaaggcagcttacagttttgcttgcagagtcctatctttttcaaactgtggaaatcttcaactctacgtgtgcacctccttatccactccccctaaaacaaaacaacagcaaaaaggaaaatgtagcatgttggctaaaaccggagcagagtgactaaaacattagcttcttgaactcaactcttgtactaagtcacctttccaaacaaattcctctttagtctttggtagcagtgaatgtgggagaggagacatgccaggcgctcttccaagcttcaggaggggcttgtcaggagctttgttcggtgtgctgtcagatcaggattctcagaggggattgcaagagttgtgggaaaacttattttgataaattattacacatgcagaaaacctgatcactgactggatctgtccacaacatggaaaataaactggattttcagaatattgttgttctttgtagtgttcaagatactggtctctacacatgctttatttcctacaggtttatacttttctttgttaaaatgcaattccttgagcttagaaaaagcttttaaagttttatcaatttcacaaagctatttgaagaatgttgacttctcacctgcacatcaaatttagaatcatttttgtttagatagcatgttagaccactaactataattgtagccaattttcaagcttggtttactctcaggtgcttttatattcctctctcccaacctcatttatattctgcataggaggaggtcagatcccctggagctggagttgctagtagttgtgagctgcctgataggggtgcagtataaagaccttgtctgttataaagaaagtagtcatagaccaggtgttttggcgttttatgccagactacaatattt

SEQ ID NO: 22350 - DNA, 2809 bp, Mus musculus
aggtttctttaaactgcacaaacatgcaaggattttttttaaaaacagaaacttctctcatgttattcaactagagcacttcagtttacaaaacagcaagaccatctgtctggaagccggcgcgaggagctgtgtgcaaatgaaggagacacttgcttggatcctgtttcaaaattccagaccagggctaccttacacagaattggtcattgtactgccgggggacttctgtgtaaacttttttttttctttctttctttttttttttttttttttacaaaaaaattggcatttgaagatgtggtattcatatggggttttgtccaccattgtcaagattgtaatattaaaaatcatactggtcactggtaatttagtttgttccgaggcaattgacttgcaaggcacagtctacaaagcccaggaagttgccacagtggtttacattttgggacaccttgtttggagcactgcagttcaaagtgttaatatacttagacttctagatggtatacataacgcagacccttgaagctactttgtttagctcaaatagttggaaagaaaactgtgagtttctgtctgaagtagaatggtacgttaccacttttaagttttaaaacgtgacagatgttcacgtgcatctcagacgtgatttcacttttattccaaacatgagtaagaagccattgtcatagctttgaccatttttgctttattagacatgctccttttaagttttcaggtgagtcaaactctacaacacagtgttaggatataagctttacttttacagttaaaacaattactttttgcaccgtcttaattaaatattttgatttttttttttattttcctagttgtgttgctgtttataagtgtgagtcgcttcaaggtcgtgctgaagagtaggtaggaggtagtggtcctagtgactggacgggagggtatttattgcacaaactgtgaactgcaatgacatccttgcttttggatggtgtgtattgttttcctttgcagcattttaatgaagattgctttgaagtgtttacgcagtagcacattaagtataaaatttagtttagcacagaggacaaagggtagttaaattaataacttaaaatcagtctttaacttatacatctaaaattgagtattcctgtatgcacacagtaaacaatgggtagcctgggctccatgttgctttctaatactctccaagtggttagctagctttttattgctgtgctgtgctaaactttgaaccttggttttttcgttcccttcagtagactttctttaatgtaggaggataccgggcatgttcttgcattgttaaaactatatttttcactctgggtttaccgtggctggtctgtataaatgatttatacaaagataactgaatgctaataccagttgcacttacatgaaaatgcccattctctttggctggcacagtttatctatgcatcgctggggtcttgatgtaagatggaaacagtgtttctcatctagagttttgattatcagcaagttgaatggacactttagttatttaaatagagttttgaccaaaatccagaaaaatgatatgagagaaataaattccagctagtttaacagatttttaaatgctaactggattttagcctcttagagagtgctacctagctggtaacgtttacttttaattccttgttaaaatgaggcaataatttgcaagatttttgtatatatgtgtacagtaaattcttcatatctttttagacctaattcaatattttctgactgctcctgtcatgtatgatacatttttgtgcatgcctgatgtgacattcataaattgtaccactatgactttatccatgtaaaatagctatttattgaatttcttccaacagctggacttatttttttgtctccatttgaacatcttaacagagaatttgttactgtttattaaaagaattgagtttgaaagcataaaaaatctgctttgcaatcgtatgaagaaaaacaatgcctttattatcacgtgttaataagcacaattcttatagcaaacggtgatgaattctttgtttctttcatttgccgcaatattttcatatgaacaaaccaaaaatccatggtgagcagtggcggtgtcggctggcccatcctgtgtgtccagggcactcggaggatgtggacgttgacgagtgtgacctggtgctgtgactggagcaatactttactttcgtcacgtgtgcttcgccgtgctatgccggccttttaatgtttagttttcctcttgtcatggtcaactgctgaatttacttgaaggatgtagaatactatttaaaaaaaaaaaaacacaaaaaacctaaagtctgtacaattaggtcaaagaattgtgcaatcgcttcctttttaatttttaaaattgaaggtcacaaatatttgcgatcagacctaatagagtagtagcgctatttaatttaaccaaagtctagtaaatacttcaacgttgaatgtaagctaacaacccgaccaccaaggagattgtctgcccagagtttcaaagcacattgtctacgaatggaaattgaaataatttataaaatattgacattactatgttttttaaaaagttcctaattttttcactaaaaggagggaaactattagttttattgttaaatatggtagatattaatattcctcttagatgaccagtgattgcaattgtcccagtttgaactaagtaccctgtgagtatgaggaactagtgacaatcagaacaagttttagtatccagtgttca

SEQ ID NO: 22351 - DNA, 2292 bp, Mus musculus
ctacagctcgtgcaggaactgcacaccgtgcctttcacaggactggctctgggggaccaggaaggcgatggagtttgcatgactaaagaacagaagcataaatttatttttggagcactttttcagcaatattagcagctgagggctcaggatctattttgatgtgtcacttcttccatttcacctagtggtcacagcaggggctctgcaattccctttgggttaggtttttgggtttttttttttttttttttttttttttttttggtttttttggtttttttgtcactggctgtaaaaaaaaaaaatcattgcctggtcagagtgtgtatgagaagcagtaaatacatgcgtttttaaagttaataacttctttataacccacagctgacccccccccccctttttttagctcctggtttattgtggttcactgtgcattttactgtcggcccgttcatttcggtttttttttttttggaaaatatggttctgtattttcacttcaccttcattcgtgttgaatattcagggaaaggtgatctcttcaaaccagaaaaaaagaaatagaaataggtgtgaagtagttcattaagtctgtgtctatcgcaagagctctgctttcttctctcggcatgctgtaaagaactcgctacatcgactcagtctctgccctcactgtgcgggttaagcagaaactcacttaggagtctgctgttctcggatgcagcttacaaggcagggcaagattgcctgaaggttgggtgaattatttcatattattttgctagcctataggcagttcacaccattgaaatctttctctctgtcacgacccatcactcaccccgctgatcattacataactactgttttccttctgccgtgcacgatatctttatacgagactgggctgataaactcactcatctaccgatcgatcagtagcgtttttaaacaaatactaaatttgctctgcatttagaaactgctcagaaagaaaagtgaggttgagtttcatttacacacgaattcctggcatttgcacagctatttgtcctggcctcaagttgaattcagatgcatggaatcaggaaggaaaaaaacggtagccctttgtatgtgtgtcttctaaatcaagtactggttagctattaaatgtaactttgagatgttaagttttaactcttcagaagccagtgtgaaatagaattggttattctcaaagactcaggataaactaaataagctatatatatatatatatatatatgaagtacatttggaatgtacaacacaaattggaagtaaaataagttccaagataagtttacagggatatattgcaaataattttcaaaggcagttttatgtgaatgtgcttcttagtgaaattttacattcctttgttttgaaagattggcaatatttgaagagttaaaaataatacagaaatgtgaagtttggtaatgctaaatgtattgtacttgacttttttctttttactttttactttttgactacttagaattttcacaattctaataagattgtttccaagtctctcatgtgcaagctttaaaggacgcactcttgccatttaccgtactggaagatcattcggtcagattagcactgtgtctgacagagatataaactgtagaaactgagggacctcagctaatcagtattaccatgtagatcaacatgcccgccacatttcaaactcagactgtccccagatgtcaagatccactgtgtttgagtttgtttgcagttccctcagcttgctggtaattgtggtgttttgttttcgatgcaaatgtgatgtaatattcttattttctttggatcaaagctggactgaaaattgtactgtgtaattatttttgtgtttttaatgttatttggtactcgaattgtaaataacgtctactgctgtttattccagtttctactacctcaggtgtcctatagatttttcttctaccaaagttcactctcagaatgaaattctacgtgctgtgtgactatgactcctaagacttccagggcttaagggctaactcctattagcaccttactatgtaagcaaatgctacaaaaaaaaaaaaaactctgggttaaaaaaatttggcttaaatgtatcctttgttattttaaatatatcaagatattttaattaaaatttttacccctttgaaccaattttatagtatttgtacctattttggtgttttgtctttatagtaaataaaagtttttgaacaaaagttaactggtattttggct

SEQ ID NO: 22352 - DNA, 1192 bp, Mus musculus
atgtgtgtagtgtgtatacaagcaagttgagaaacttaaaagataagggatgtgtaactgtaaagaaacactccaatttgcattggttatcttttactgagcacggagcccgcccttggagtgcaattgatataatatataatcagtgtaactccactgatggaaattgattttctcattcccaacatctaccttttgttttgctctaaaggagacaaatgacaggaagctggacggatggaggggtgtgtgggagaagttgagggaacagcaaaaaaaaaaaaaaaatctggtaaaaatatactgtatacaattcccaataaaaaacttttaaaagtgaagaaatgactcaaaaaaaaaaaaaaagagagaaggctagagacttttggaagaaaggctaacataatgatttgcagagcaaacaaatacccattaattagtcattgtaaagttctttgttatattgacaattcagatgagatcaaatggatcaaactgcagtcttgctctctgcccctccctcccccttttcttgcctctgttgcatctctatacccccagctctgaattatgaccccttagctgttggtcagctagtttgaaaaaacactgccaagggcctggctaaaagagtctcaaacacactagtggttgatgtgctgaagctaaagatgtgtttgtctcttgctcagggtgtgacaagatcgaatggagggaaaagacttgtaagggcctttgttcaattgaagaccttacaaaggtgcttagtaggtctgctgaacgactatttaaatgcaaatcctacggttgttacttcccattgctgtgaccttggaaaagtcttgagtttcttcatctgcaaaatgaggaggacggttctgacctgctaagttgcaagaatgaacttatttaaaacagcgagagggtttgacgcactgttcagtaaatatcaggtgtcctcgaatgactcctctgccatcgcacctcagtagacctttctgcattacagcatttatttaaaagtttgtttatctgaggtggttgtggatagaaggaggtgaatgttttataatggattcacctgccttggaccatgggtggggaatccgaaggcctatactgcctctctcgcatacatgacttatcactttgtctgtattggctcagctcaagccttgccacacagcaactc

SEQ ID NO: 22353 - DNA, 1130 bp, Mus musculus
ggggaggttggttgccagggcagagatgaaggttggggaggttggttgccagggcagagatgaaggttggggaggttggttgccagggcagagatgaaggttggggaggttggttgccagggcagagatgaagggctgggaagacaaatggtattgagctactacataatgtgaaatttacaaagaatcaataaaaagtttaaagaaaaaaaacccagcgtggtgtgggcatagtcaagagtggtaaaaagactagagtgcatagaagtaaactcattatatatagccaccaatctttgacaggggcactaagatattagaggaagcgcagtctcttcagatcgaggtgtgggataattggatatccggttcttcctctctccacattttgaaaaatcaactcaaaacagattaaagacatttatacattattggttgattgattgagtgattgattgattgattgagacacaatctcactgtgtagctctgccagcctgggaacctgcactatagataagcttgttcttgaattcacagagatctgcctgcctgtctctctagtgctggggtaaaggcatgtgcgccatactcgactagagtaaagactttaactataagccttgaacctctgaagtcctggaattaagtagggaaatgctttaagatactggagcaggtggggagtttctcagtgggatcccgaagcacagagaggaatgcatgcaacatgagcagacagacagacagactaaagcaccacagcacacttttaggttcagttgagaaagaaggtcgactgagtagtacaatttcaaatcttacacccgataaggaattaatactgattttgtgaggaattcaactcagtagaaaaatataaataatgtttaaaggctagcagacctaggtagacatttctgaagagaagacatgcaaatggctaatatcatataatctcactggtgaaatctaaaaaaaaaaaattattcatagaaagttgagagtagacgttctcagaggcttggggtcctgactgagggaacaaagaaagggtgtgcactgggaccccgttgtacagagacctgaataatatatctgctattcttttgcacagcaaagtaactaag

SEQ ID NO: 22354 - DNA, 1139 bp, Mus musculus
tttgaaatacaaaagtaaaataaagtatatgcaaaacatttttgctcctacaacgaccttttaatactagttattattaattttagaacacttaaaagagacattactgataatttttctggttataaataaaaatgtatttttatatagaaaactaaaatgaaagcaattaaagacagttacacacacacacacacacacatatatatatatatatatatatatatatatatatagaaagagagagagagagagagagagagaggaagagagagagagacacctaaaaagtatttaggagttggaagaaaaattaacatgtttctcattttgctcatatattatcttgggttcatttatctaattgaggtgggtcttagacattatataaattagataatacttatctatataagacttttaaaagttaaatgtttgtttccttatagttcctccagataaacctacaaatttgacttgcattgtgaatgaggggaagaatatgctgtgccagtgggaccccggaagggagacttaccttgaaacaaactacactttgaaatcagagtggtaagttactgcagatatgctggactatgagacactgtggctgggactttgattttgtcggtagcagtactgggtgactgttttgggacatcacgtgctctgacagtggagttatgtgctcttcatgggcgctccgagcagtgtcggcagtgagcagtgtgcacactctaccccaagctgccttcaagagaagccagccacattctgtccatagatactgtaatacctagctctacatgacgactttcaaacacaaccacatgctgtttcttagtcagtgttctctcactgtgaagagataccatgaccatggcatctcatataaagaaaaacgtttattcagggctggtttacactcagagctttagtccactcttggcacagcgggaagcatggcagcctgcaggcacacatggtgctggaggaactgagagctctacatctggatcagcaggcagcaggaagagagagagagacactgggcatgttgagcatctgaaaccccagaccttcctccagtgacacccttcctccaacaaagccacacctaccccaacaagggcacatct

SEQ ID NO: 22355 - DNA, 1104 bp, Mus musculus
tgttgtctgggttattgtgagtcactgaaaagactcgaagcctcactgtgactagacgtgtgactttgcaagttacgctttaacgcttagtatctctgaaccacgggctctctgtatggagagaagggccagtacttttctaaaagactaaactacaaataaaaaccctggtattaactttattaacaaaaggacccttacagaactgtacagagaatctagttcagccttaactaccagttagttgtttgttacttgtgctcaactcagttaactgtctcgttacccagatgtaaattagttcccgagtttaacttcacagggctgttgagtgctggcagcccagccagagcacaggttcctcctgtgttccaggttctaacacagagtggcgataatagctgctaatggtgctacactgcatggctgtaaagtcgtacaatagcatttaagaaaacaaagcactgctccatgtatgttgtttaattcatagagaaggggaatcactagggttggctgtgggtagagagctcttgccgagctgctgtccaatcttgataagcttagatgtctcctttattgaccttagcagataaaaatcctggggccggggcaggcagcctacgaggtatggtcagctctcagagacaaaggtctcaaggctcagtgccccgcaagagtcattattagagcagaatttagaatggcttacttttttatcatagagatcaagaaaaggtaaaattgctctttttaggaagacaaaggtgcatctaatgttatgaatgtagtgaaggaaatagattcctggagaaggtatatacagagtaagaatgaccttgtaggtacataggatatatatcttataaaagaccactttcctaaaccatgcttcagttgtgtgataaatgtctttgataatttggaaggattagaaataaagaaagtaccatatttaagatttttttcttttagaattgagcgggaagcagcctaactcatttttttttcccagctgctctcaccgacacagctgtgcattagtgctccgcccttgatctcactgttggaccttggcaggccacaaattagctaaaatactgg

SEQ ID NO: 22356 - DNA, 2797 bp, Mus musculus
aagcactacatgaactgactttatcctctatagctggaggactctgtgctctttcagaatgtttgcactgccgaaaacaaagtgtgtctgagtttataaagctgttggtttgctacatagaaaacgggggatttaaatgagccacaatgtcatggcatcgttcagctgggctggttttgatgagactgaccatccagatgccagcgagaaggccagcagcatcatttaaaagtgccctgtggcacagtgtccagattatgtcatctagaagacgaaagaatggaggggtggctcgtttctgggtctgtcagagaagcatggcctgctccttgctgttggtatcgatgccggttactactgaggaagaggataaactttaaagagaagcaacatagaagcacccgctttcttatagtcacctacagcctcccaagaaactgcttattattgaaaatgtctttccgagtcaatttcatccaccctatagtggaccaggctggcctcaaactcagagatctgtctgcctctgcctctgcctctgcctccagagtaccgggatgaaaggcagtgcaccaccactgctccacttacgaagattgctgtttttaaagacttaagttgttgacatttttctgaacacacataaccacaccagggacagatgattctagagactggttgaggaagcactttatccagaatgtcttcaactttaaattactttaattgactccaccttgttttgattttcaagaatagcagggtgtttgttgaagggtggcatttcccagagcctcatgcagtcccagaacacacatcccaaccatgtcagcgaccaccacaatgacagaagtcctcctacagagctgaggaagctggaagggtcctgctagtttgcagggtgggctttgaacccacagccctgtgcatgctagacattcactctaccgctgagctgctcctccgcccggctcattatgtcatctaggctctcgtgatcctcctggcccagcttcctgactgtctgggactgtggatgtgtgctgtcacacacccaaccaggtctttttaatatctgccatttatgaggtagagtttttacacgacttaggactatcttaaacctattccttctagttgctttattaaggaatagcctaggcatccagtgtttagcactaaagccattaatgtatttgtgcctaacttcccagtgtgacatggaggtgggggctaaaggtagacactgggcagacaggaattggctgagcgccgttagaggctgatcactaagtgtgctcacaggaaaagggttgaagtttcagagcatgggcacccagatcatttatagcggttaccacacagtgcctaggaggagttgatatgcacttagttggatgcagtttcaccttttactctcagaaggttgtttatattctacttgctgatgtgttatcatttatatttttatactgggtagtccttttctgtgttctttcacatgtataatcctcgtgagactgtacatgctttgctctggtatattcagttgcctccttggcaaaaccagcctggaattgccaaaatgccggaagtgaagggagatggtgaaagtcgggcacaggaaggccaggtcaggggcagagagaccagaattcacactacaaggctggcaccattgccattcaagttggacgtcaaagcctgatcccagttaggactgagttttctatgtatatatctgccaggaagttaacacttgctgaatttctcatcttctcacagtaagcagtctagttatgggactctatccatgttcagctgtgacttccctcatatcagacagtggtgctgtgaacgttgcagtgtgaagtctgtactggctagggatggtagcccagcgtgagttcaggcatgaacatagaggccactgaaggaagagcctcctggaagcaagttggcacgttaaatcccagacagaaagtgtcccagggagccagggcctccgccagcagggagggggtgtgctcactgcaggaacgttcatttagaagatgtaccatggagcacctccctttgctctaagagaaaacccatcttaaagttcatcttgaatacagacttcgctcgagcatgttttagaataatctggatgctgtaccttgtaccttaggtagcagagaaagtaatctggcgtctttctgtaaaaccgtctaataaagctagttctgcccgtgggctcgtattctttcgtgtgtaaaaatgtagtgtaaggcgcaccagagagcagcctggcttgtggccagggctagtccactgcttcccatgcagttgcctctcgaggactcaaagaaaaaggaaggtttaatgctgagtcgccgttacaaaacctagcgttcccatcttttcctcactcaaacataaaatctcagtcctttgaaaagcatgagtcactactcgggggcacagagaagcagaagtaggaaaagtgcagcccctgcccccctcgttctcccgccttcagatcattccatctctgcacagttctgctgtggtcatcagctcggccaggatggacggtttcgggggggttttgtttgtttgtttttgcttgtttgggtttgttttgttttgtttttctgtttgtggtattttggttttttaagacaggatttttccgtgttgccttggctgtcctggatccgcctgcctgctgtgccaccactgtctggtgagactgtagttcttattgtgaacttaaagggttaaagaggtagaaggatttactggactgtag

SEQ ID NO: 22357 - DNA, 1061 bp, Mus musculus
ctttcacccgtgtccacttcagcgaaacgttccttctcgtgtctgctttagcaaaacatccaacacagctgactttccaaagaacacttacgtttccacttcatgggacactatcaaagctgttaaaagtaggactgctaattagacatcacatactatttttaaagctgtctctttttttctactcacataattagtaaattatggcataaatttagacctagtaatcataggatgcctcattgttatagacatatattaaccaagtagaacaagccagtagactttagcctattacgttcattcttctgtttcatgtccctgagtttcttttaaaagcaagtttttaacacaacttctgtctagtaaagtttttaatgagataagtagaatcaataagctgcaaaaaaaaaagtaaataaaaagtaaaggtcaattattaaaaataacctcttgggctagctttcggctataggtactgctggtaggttactttgcccaggtaagattgcatttttcaaatgtgcctttcgatgagttagaacacagccatcaaatggcaaacggtataagtagttcatagacaaaagtttgttttcctgtcacatgcagattagcatatgctcactcagttaacgaggaaaaggtgatggcaggctccagatgttactcggtctaactcttagggctttttgccacctgtaagctcccacaaactggtcagttttggttttgttgttgttgttgttgttgttgttgttgttttccttttacttaaccagttgtcaatgctggtgagggagggttgggatggaaatgtaccaggctggttgggtaggaattcttagtcctgtgattgctcgcttagtctggttgctgcagactgcaagtgctgctacgtaagcaggacaatgtgacgtgccagaaagaaagggatgttggaggggttggaagctctgtagccttaatgcttgtgtgtgatagactttaaagcaaatgcactttgctagcctggcgcggcagtaggcattaggcatggcttcttacacctttgctcttag

SEQ ID NO: 22358 - DNA, 1190 bp, Mus musculus
tacagacttctctccattttataatgtaggctgtgagtttctcatatacagcttttattacgttgaggtatattccctctggccctgtattctctaggacttttattgagtcatgttggatttagtcaaaggccttttctgtctcgaaggcccctggcaggtgttgacgcgatgtgatttctgcccagtgctctgaatgtcaaagtgaagaaattcaatgaagcgtgggtaaacggcgggagtaactatgactctctctctctttttttaattttggttttttttaattaggtatttatttcatttacatttccagtgctatcccaaaagtcccccacacgctccccacccactcccctacccacccactcctacttcttggccctggtgttcccctgtactgagacagataaagtttgcaagaccaaggggtctctccactgatggccgactaggccatcttctgatacatatgcagctagagacatgagctctgggggtactgggtagttcacattgttgttccacctatagggttgccaaatgcctcgtcatctaattagtgacgcgcatgaatggatggacgagattcccactgtccctacctactatccagcgaaaccacagccaagggaacgggcttggcggaatcagcggggaaagaagaccctgttgagcttgactctagtctggcacggtgaagagacatgaaaggtatagaataagtgggaagccccagtgcccccccccattccctgagagaggttgggatggggtacgccggccttgagtggccttactctacacaaaggataaacaggttgagaaagaagttagggaaacaacacccttcacaatagtcacagataatataaaataccttggtgtgactctaactacggaagtgaaagatctgtacgataagaacttcaagtctctgaagaaagaaatcgaagaagatctcagaagatggaaagatctcccatgctcatggataggcagggttaatatagtaaaaatgactatcctgccgaaagcaatctacagattcaatgcaatccccatcaaaactccaactcaattcttcatagagttagaaagggcaatttgcaaattcacctggaataacaaaaaactgaggatagcaaaaactcttctcaatgctaaaagaacctctggtggaatcacca

SEQ ID NO: 22359 - DNA, 1721 bp, Mus musculus
ttcctcccgaggtttcttttctcccgacatctttaaaaaccagtctcagacgttatgtcatttcacttctacagaccttcatagtcagctaatagcccagactttgaacctagttacatttaccatggagctagtctccaaagctctggctcacagaaacgcccgtggccactgggctgcatgggagcccgtgctcgaggaactctggaacttcatgactgcacactcgccttccgttagagacgtctgagtcagagccaggtgatgtaagaaatgtccctgacttgttctcgctatgttcttagtagtttcttttgtctttgaggacttgagagacatttccactccttttttttttttttttttcttaccaaagacgttcttggatgctttaacaatcaaggataattggctgtggttttgcccatttcatagataaaagataaaaggtaaccaaccggcaaaggatgctaccctccagccgaaaaagtaatacggattcatgcttttgttgtcttaaggacactgaacaatttagacctcttcctgatgtcctgttggacaagccaaatgactttgtctccttccacttttgtccttgttttccccatgagcctcctttggccttgccacagagtcagagaactctgcgcacgagtgtgtgtcctggctcgtatgagaatggagggggtaggaacccatgtgcagccatcttaccctttctttctctctctgctctcatctctgaactttctcactccgccacattcaccttatcactctgctgctacggccggccttcagcctgagcttctttaacttaaacacacctgaggacactcaaagttaaaatgagctgtttagggagagatcttccttagaaagcctgtgagtgaacttgagttgtgctaatattaaagctagaaagggaaaaagtagaggtaagctttatacctgtgggcatggatggttgtgccaagtcattgccatcagcacactccagaaatgtgcttggaaggaggactacgtcattgcagcccctggaagaggctgttttaaagggaaatgcttcgtctacattaaatgtgtctcagaagtgcagttccactactcactgtagctgtgggctagtcctctgcttctacttgaaacttaccaaggaaatgtttgatgtgtgtttttaattatcactcccttaagtgttctgtttcaataactgaatagtcagcaatgcacatgcctctggaggagttaaaggcagcacgcatgtcctcgaggagcaccttgagagcagcatcgaatccttgggggtgggcggcgtggcagagggggaggggctgctcagaggcaagggactcgtttccatgtccccgctattcccccagaccgcactccccgtgctcgctattatgatatgtagtagagatatgttacatgtatttgcttctgtgggttttgcagatcccctctaaagcgcgttttgtgacattcagctgctccgggctgttcttctttcttcttgatgatccctgcagtattgatttcctgtggctcttggacagaaagcataattgcttaatgtgggaggtaattagtaatacactgggtgctgcagacatttataaagtttccaaatttttcatttaagtatgaatattcaaaatgtcaaatgtttacattcattgatgtcacggtgtttggttttgttttctttctgtttt

SEQ ID NO: 22360 - DNA, 1224 bp, Mus musculus
caggcaggcaggcaggcttcagtgcccagcttatcataacttggtgagaagcacttgaaagttttcttcgtctataaaaggtttagaacgttcctaattagaaggcgtcgtcaggttgtaaattgtcaggttgcaggagcgatggagatggccaggtttctgcctgatgaggtctgaagaagcttgcttttccccatcccatcccgtagaagtcctgctattggcttatagcgcagcccttgccttggtgtgcctgtctcctgtgacagcctggcacggagcgcctttagcttctttaatttctttagctacagcaaagttaaggttatttccctggtggaagacttcaattctggggtctttcgtctccagatgtttttttttgttttgttttgtttctccttcaggagaaacaaaaacaaaacttcccaaacctccaaaactagagtcatcttgtcaagggataggcatggaaggggtagctttcactttttttctttttcttttttcttcttttttttcctgtatcgtgtctgtcacttgtagaccattgggtcaggcaatttacctagttgtaagctgttggaagtttgggtggtgggactctggtttaagtaactgacatagtcctggcgagttttcaaggcgactgaactagtggcttttgcatcctagatacaaatcagcataatggttcctcagagataggaaatttccccaggctttaacttaatctcgctgttctagactattcctctctcttgcttccagcctgaccatttaggtgcctataatcttataaaattgttaaaattttagtacctgttttttttaaatgcattttctctctctctctctctctctctctctctctctctctctctctctctccttccttccttccttccttccttcctttctttctttctttctttctttctttctttctttctttctttctttctttctttctttctttcttttttgagacagggttactctgtatagccctggctgtcctggaactcactttgtagaccaggctggcctcaaactcagaaatccgcctgcctctgcctcccgagggctgggattaaaggcgtgtgccaccacgcccggtttaaatgcattttcttaaagagttcctttttttttttttttaaagaaacttctttatttggaaggacccccccccccccccccccccgcgccacctttcattga

SEQ ID NO: 22361 - DNA, 1871 bp, Mus musculus
agagagctttcagcctggcttaaacttttcccctttttctgtggagcatccacaggtaagagttgactatactggcagaaagatgattaagcactttgtaagtataggttatgtgaaagtgattcataattacaatgtgaatatgttccatattctgttaatgactgctccaacatcactctgcatacccattttaatatgatgatgttacgtgattttgttacacaagtactttcgtaatttttacccagggtgatgtcttttgaagtggtcattaaacattatgtatatttgtgtttatgtgtgtttgtttctaaataatctccattaattcatcaatatctaaattattaactcctttagtggatttggcaaatccttgaagaagagaaatttgagagatgatatatatttgatcctgtgaactgaagtagagtcgtgtaatcttttttttctggtctttgatttgacaggcctatcgttgatttctgttttaatttgcctccttgcttatttatttatagatagagtctcaccgtgtagttttggctagcctggagcccactatgtgaactcagagatctacctgcctctgactcctaaatgctggaattaaagacagttgccaccacatctggtcttgcttttgttcttgtgatcagtggttctaaaactgttggtaagtccatatacaattacctgaacacatgaaaagctactatataaagaacaatagagagttggcgattttagcccaatattatattatgtcctgaacataacttactgtttaattactaaggattattctgtattttagccaccagttgatagatacagagtccactgatttagtgcacactgacggatgacggacttttgtaccttgcttgagtgctggggatggaaaggtaaataggacagtcccttccctaaagaagctcagagtctagtgaaggaaaagtaaactagatgttacatcatgctaagtgtactaatgcaggcctttggtcagggagaagggcatggcttagacctataccatggtagagccttggcttctcagttaactcagagacaggaaatgctaggtgttgcctagcattaagtctataatcttcttctccccattttccaacttgatctaggggagtagagactcaagaatgtgtgctcgtggtttgtctgtaggtaggcctgtgatggctaggacatagatggaactggcagaacccgtctcttgtgtgtgtgtgtttgctgtgcagtgatcactttataatgcctgtctgtgctgcatagaccttagacttagacatgacaaaggcttcttgatgttgtaccctgaggacacaccaccatctctaactgctttccccaaatccttctgtgctttcaaagtggctcccccattttaccctctcttgactatgttatttgagtgtgttgcttgcttcttgtttgtttggtttttttgttttgctcttgttgttttgcccaggatcctccagataatacccatctgtgtccaaaccagaactgagaaagtttttcttttcgcatggtcaccaggtacatgcctttgatggcagatgaaacaggagcccttggttattgttgaacttctcgtctctaaaggtttgtttgcttaattgtgtgtgtgtgtgtgtgtgtgtgagagagagagagagagagagagagagagagcaccagttggagtttatgtgcactgtgtgtgtgtaatgcctgcagagtccactagatagcatcatacgtaatctccggaacagatggttgtgagccactgtgtgggtgttgggaaccaagagcctgggtcctctaaacgagcaagtgctcttaaccaccaagccatc

SEQ ID NO: 22362 - DNA, 1185 bp, Mus musculus
atataacatccttgaagaaacttcagaatctttgggtcaccattggtatctcagtgtactctggtctattctgtcaacttctctccatcttgataactcctttaacatgagatcagaccaggagagcagattagatggtgttgactatgagacagtgaatctgctagcttctgtgaattcaaggtttacagaggcattttatctagagagacaattccactacttgaattaagcattcagatagatttgcatattattgcaagagaccagaagagaaagattaaggaataaagcattttttaaagataaatcttaatacgccagggcttttatccataacatttctgggtgataggtaaatattagtcatttactaggtgaggaaactgaaattaggaaagaaatgtgctcctgggaatgtgccagaagccaaccaatgcaggcctgcatatctgactactcaaccctgtatagtgttggtattctgtctggactcctcccccacagttacctggaaacagccaggtatgctcctccccacggttacctggcaacagccaggtaggcctgacccactaaaaggggctgcttgctccctcctctccctctctctcttactcctgcttctctcccttgctccccgtctctccccattcccttccccctctctccacatggtcatggccagcctctacttctctactctctccttctctctgcctttccctgcctctactactctcttaactcccctccccatgccctaaataaactctattctgtactatacccgtgtgtgtctggtccctcagggggaagggatgccttggcatgggcccactgaggcacccccttcccccacaccccgccagaacatagtcttacgttcttttctctttctctttttatgatcacatcatccaggactccaacctgctacaccgaagcaaggattacaggagcattggagtagacacttgtaggacaagcagatctctgctgggtggaggggtgaggtcactgtagggctgtacaggtgcagcagatgtggagatgagaggaggcgtcaggcaaatggcagtgcctttttctgttgatgtgttttgttacgcaatgtaaatctctctcttttggcatatatgaacttagatgaaacatttttttaatttttatttttatgtgtgt

SEQ ID NO: 22363 - DNA, 1172 bp, Mus musculus
tgtatataaagagggggtaaatcatttataatcaatattggttcagactttgcacaaacctttggcatgacctgcagatgatctatctgtatctgtatctgcactggtgataaaggctgtaagaaacccggagacaagggaggatttcagtgcaaggaagcggtcagggagcagtgtcggtgaacggggttaataaaagtctgttcactccagcgactcagtcttggctatggagaaagactcgggaggccctaaaggagtggaagcaaggagagctgcttggaagaggtgcaatggaggtgtgccagcgatttcagacttctgggctagcaggccccgaatgaatggaagagcgctgtaccgatgctgtgtggcatagtctttggtggggacatgcaggagctgaaaagagaatgctgtgagcataggcccatggggggggtgggggaggggatgagcagcgatgtagaaaattgccaccttccgaggattctgcttcagtgtccaagacgtcgtcttcagtgcgttaataatattgaacctttactgttgtcagtaaatgagccgtgagacgtactttgagttgtaggattaattccacaatttgctagctgtagacttgaccaaagattaagaccaagggataatagaccaaagggcaggacaaagtattaaatgagttgaagaatatgactgtcgtgtgcagatggaataaagaaagcttgatttagagtttattctggctgtttctcttaaagagcagagcatgtaactttaaaaaataagtacgagacacccttagagccataccaccaccccggtacatgttttactttatgtatgccacttgtgtaggtcagctggtgctctgcaaatcagaaagctggttcctccctcagaggcaggggcagagtttgagtgcctccagctggtgctgggtgtgaggcgcgagctgcactcctcattctggaccagttgagttctgaggtgtggaaagaaatccctgctgctaaaatgatgttaatgcacgtggtctgcctcccacaccaccaaagatgaactccataatgtgctagagaactcttctcactagcagcccttccagaattagcagaagtccccttcgtgacccaaagaagcaatataatctttaaaacagggcagtggttgct

SEQ ID NO: 22364 - DNA, 1195 bp, Mus musculus
cacacttaaagagaggaactcaggtcccgctttagacaagtcttaacaagtagcaccgtccacagctttagctttgattgatatttgtcttcgagttgcaatccatagggaaaagtttgtttcctctcttgctacctctaaaaacacactgtaaaaaacagacaaagcattgaggaaacaagctaataaccatgttctctcacaggcatgcttgtagtgtccagaatcctgagtatggcacacacaggggcctgagaagcgggactcggttaggcatggatttgctgcctgacagacgtccttacaggacgtgagctggtgtgctgccttcctcaagtcagtctcttctctaaaaccagggaaattggtttacctagctctaaaaacatgtcactgcatccttagaatatgtcctttacggccgttaaggggaggtgggggggtaattaaacctttcctgtaactgccagtcatgttcttgtgctttgcaacttctctaatgtcttattcctcctggttggattcacaacaaactcgtgaattccttttctgtccaggcagtataattcgttgtatgaggcgtctggaagaactgcttcgacagatgtgtcaagcagcaaaagccattggaaacacagagctggagaacaaatttgctgaaggtcagtaactagtttataagccttttatggtaatgtaggcaaatcttgagacttggaacttttacacaacttataatcgggacattttaagatatctttagctggagtatcgtggagcgtcctctaatagtgtatatattaaaagtggaatatttagatgggacatttttagggttttgttttatatattacagattcccaattacacatatttattgactacttagtatgtgtccagcattgttctaaaacctgtaagagagaatataagtgcaattggtagagcttctcttgtaatgtgagggaggtgtcggtcgatggtcatttagtctgcaaggaaaggaaagagacgacacagagatgacgtttaaggctttttcctatgcccggaatgtttgagcaacatgagactagtgtggttggaacacagtgagcatgagtgagagatgggagagaaacaaagtggccaagtctgtagagtagcaggaggatgcagggagacaggtaaggaagaatggtaaagtgtaaagagg

SEQ ID NO: 22365 - DNA, 1182 bp, Mus musculus
ggcgtcagatctcgttacggatggttgtgagccaccatgtggttgctgggatttgaactctggaccttcggaagagcaatcgggtgctcttacccactgagccatctcaccagcccttccccctgtatttaaatcatccatttcagaatatgattgctttctttttcttatagaaccattctcttgccacagttagaaaataagtaatatttactgatcgtctgatttaaaccctcattcacctaaccctaaaggtacactcatttagttattcatttctgcgtactaaatataggtatattttgtcttttccacgtatttagcatatcagctagtgtttgagaacttttcaggtacgcctcttctctcctgaactgcatctaagctcctacagcacacacacactagactgtcgtgaaattttaatgaaggagatgggcaggatgaccttaggaaactacttttatgtggggtgttgttgtttatcccacattacactatccagtttattgttaaaccgtctttccttttgtatgccttagattgcactagatatcaagtctgcaaagagagaactgaagaaggcaagaactgttctgcaaatggacgagctcaaatgccgcaagcgcgtgctgagacggctgggctttgcgacatcgtcggatgtcatagagatgaaaggacgggtggcttgtgaaataagcaggtaacatgtccttccacagagacttttaaattatagtctatagtgtacacggacagcacttgttagaaaactgctgttaagaaggtttcatcatgctttcattgtaaatacatttggaccatgaagttgagaaattagaaaaagtctcgtggatcccagtaattaccataggtatttctagctagcctattgctgtattttctatgaaacacattttcttgtgtgttgagattcctatataatttgtatttattatattgtagtttatatatcatcttgtgttttttatactttgaaaatgttctgccttgacacttaactctgatgaccgtaattcttatatataaggaggacacaagagagtgagcaagttttactcaagtttggggtaagaggaagatacacaatggcgtatgataggctgcagcttcagtttgggtattttgcatctacagattcagctcacttgtagatag

SEQ ID NO: 22366 - DNA, 1134 bp, Mus musculus
ttgaatttgctttgtagttagtattcttaagttttgattctttttttttttttcttgatctagctgaaaggtattttgtatgcctttagctggtatttcctagtaactggctatctaaaattgacagttgttggttaatgcacagtgaagtcagttgagactaaactttaagtttcataagattctcacaaacttttcatctttgtttaccaaaagtccatgtttttgtttgtttgttttgtttttcaagacagggtttctctgtatagccctggctgtcctggaactcactttgtagaccaggctagcctcgaactcagaaatccacctgcccctgcctcccaagtgctgggattaaaggcgtgcgctaccacacctggcttaaaagtccatgttttaaatgatatcttgaaatgtgtaaattatttgtaaactctataaaaagagaaaacatcaggatatatttttttaaccagattttctcccaaacttgacaatgtcgtattcagatttcctctggcgagtacatccagatgtctggtcgcgcaggaaggagaggcatggacgacagagggattgtgattcttatggtagacgagaagatgagcccaactattggaaagcagctgcttaaggtaagaggccattctcccatcaagggtcctgggaatgcacatcagtgacttggccatatagctgggctcttctcacactagatcataactgaaaagaacccatttattctccggcatcgctggttacctgtgctcaggtaccatgcatctgtcttgtcacatcttccctagacacttcttcaccttgcactttcccagaatcctttctgcctcctggatgtcccacctcctatttcctgcctaagctataggccatcagatttattttgttttgggttttttgtttgtttgttttgttttttgagacagagtttctctgtgtagccctggctgtcctggaactcactttgtagaccaggctggcctcgaactcagaaatccacctgcccctgcctcccaagtgctgggattaaaggcgtgcgccaccactgcctggctggccatcagatttattattgacaggtgccacatccatacagacacaagatattctctacag

SEQ ID NO: 22367 - DNA, 1194 bp, Mus musculus
gtgacatgcctgtaataccagcacctgggagatgggggaggcggagctagaagaaatgagatcagtggtagtgtaggctacgtgccagggccttgccctcctctccacataagcagctcagtaattatcatcatcatcattatattgttattactgttacttttttctgtggtcttttgagacagggtttctctgtgtatccttggctatcctaaaactccctctgtagaataggctggcctcaaattcacagagctcacctgggtctgccccctgagtgctaggattagaggcatgaaccaccactgcctgtctgactctcaataattatttaatatgaaagaatatatagaccttctggtttacaaaggtaacagtcatttttaagttaatttagttttataaacccataaatgtatatttgtaaaaaaaaaaaaaaagtaagtattaaataagcaagtgaaacaacactgccttaactaatatctcttcaaaagtaaatgtggttgtaattttggatataccagaaaatttaacatttaaaagctaatgtttaatatgtacatacctaatgtaagattgggtttttatttaaagaattcaattagtctatatcggtgtttctcaactttgctaatgctgaaaccttttttaatagagttcatgatgttgtggtgaccccaaccatatgtcatttcattgctacttcataactataattttgatactattaggaattataatgtaaatatcttatttgtgaccccaaaggggtcgtgacccacaggtttagatctgctgatctgtgtattcatgataaaaataatgtaagaaaacagcaacacttttacttttgccaaattcctacagatacttctgagcatattttctatttgctttaaaaaccgtgagtcctggaccaactagtgggttaaggctcttacccctgagactggcaatctgagttcattcccaggatccaaatactaggattagacctccaaacaattgccacggcacacgcatgcacacaaacactcacaccactgagcactgcaaataatctcactcagatcttgtgctaaacaaacttaaatatatcatgaaagtataagaaaaagttaattattaaaataaatattaagatgcaaagagaaaaaaataacgtggaacagagagacattttttgaaact

SEQ ID NO: 22368 - DNA, 1173 bp, Mus musculus
aataatttgtagaataagatgacacgtacgtagggtgggattgtctctggtttttctagcatgtcttaaatattacctgctttctaacaaccccctcttatgttccagtccattctgtaagggaacccactctctggaaggtcattgcattaacccctctaaacaacctaatggcttctttggggcctcagcacctctcgacctgctgggttggggattgaagcctcaactatgagttttagtaggggtcagtccatagcaaccccttccccaagagcacagggatgaacatcttgatgggtgtcattaattatggctctggtctctttcaggtgaaaataaacatgggtacggggcaagaaatcctcctttctgagcaaagacttcgtgtggacgatttggcttggcattcgttggagctgcgctatggcaaggatgctgttctcttggtcattgacaagcactttgagacaaccgtccggctggcgggtgggctgcgtaacttcacctttcaccatggaatctatataggaggccgtggggggctcagtgtcccttacctggacaggaagatccccaacttccggggatgcatggaggatgtggcgtttaaccagagggagatccttacgtcccttaggtcataccctggctttaagaaggtgtctgaggtgtcgctggggtgtaacgatgagttttttgctgggaaggatgaagctattagctttttcagctctaggtcctatgttacctttccagaatggaaggtacacggggaagggttcctgagatttgctgtgcaaactggaaccctgcaggctttgcttttatttcagtccggcagaggaagagattttgttgccttggaaatccatgagggtctactgaaggctcacgtaggaaggggcggaacaaaaactcaactctcttcattcagcttggttagtgacaacaagtggcacgttgttcagcttaaagtcaccgggaggcacgtggacatcatggtggatgaacacagggaaagggcggggctgcctctgcaaagccaagcgtttgtatccgaaggccccctgttcatgggtggcctggatgaccggatgtgggaaactgtgcgcggcttagaagttgtgtctatgcctgggaaatctgttcgaggtatgtctctgaaaggat

SEQ ID NO: 22369 - DNA, 1100 bp, Mus musculus
tgcccggggtcagtttgcctttggaatactaacaagaatgatgttatttctcaaagagtatgttggcgctagccccagttcttttaaagaacaaaacaagacaaaacattttgactattatttccaagagcttttaatttcaaatatgtggcatttttagattaagattgatatatccaaaataagtgttagtgaatatagaagctagaactaagtagcttttgctgcaataacaagaaaccctcaagtcccagtgtcttatgataaccagcctgcccttctcacttgcactatctgacaaccgtgggttggctgtggtctgttgttcataccttcgttctttcagaatctagctactggaacagcctcgctctagtcatgcgtggaaggcagtaaagggcagtgtgatggtggaccatgggaaactgtgcagcttgtattctagaacgtcctttgtattcacataccacaggaggtagcttgtgaccagtgtggtggataaactgaatatttggaactgtgttctaactgctatggtgcactgacatgcaaacggaaaactgtgtataatactggaagccaggtatgttttcctaagaaaacaaaccacctttagcctagaacacatttatgaataggaaattaacacaccaagccaactagaaggtcccaggcaagcaaggtcttgattaaataaaatccagttgcttccagatttgaattgtttgctgccccttctgatttcttctgcctttgtgaacacataggaggtacctgacaaacttgtcagcgatggcagatatgggccagagcaggagaggtgttctatgggagctcagtgctgcacaaggaaacggaggcaggctctagtcgggaaacaaccagtcccaggccacagatcaggggacacagtgtctggtttgtcccctcccatggccctttcttctgcagaacatgtgcctgccattccagaggtgtggttgaaaacttagaatcaaaggacaaagaagaaattattttatcatttgaaaggttgtatacaaagactgtgtatctggctttgtacacaaggcacgcccctgatataataatttctttct

SEQ ID NO: 22370 - DNA, 1995 bp, Mus musculus
gccaccagaccccttacctttacagacatttacaccagatgtgcctttatttgtcactggagagaccctcgtggcctctgtttcctctcagaaaaaacttagggcttctattaaaaaacagacagaaactccggggaatctgacccagggcagatggcaggggacagattcctggggtcaactcagtggcaaagagccaaatatagatgccaaggtctctcccaccagggtcatttggccatatgctgccaccaaagtgggggagtccctttccgggggagccatgcagccggaaatgagccgtcaccctctggtggtcatcatacctttggctgctgtgttcctcctcctgctggtgactgtggtggccctgtgtgtttggctactgagccgaaaggaggacaaacccaaaccacttacccagccaaagacaaacctgaagtccccatccacaggctctagagcagagaggagtggagccattcccacggtcacggtgacaccccttattagaagcagcctggctcctagtctgttccagacccaatcctatgatcggccagcccctctgggggcggagcctgtggagaaatgtgctccttgggacgcatgggtgaacttggatcctgacatggccaagctctgtcgacaaaccaaccccgcactgaaacacaaccagtactgggtataaatggggagcccccctcctacaccacctcatactcattctctctccttcgctcccccccacctctctctccccctttacccccctttccactttcccatctctccccttttccgctctcctcccctcccccatctcttgctgttactgaccacttactgtgtataggtacgaagatcaactcagggttataacgatgaaggaatgcgcttcgaatcaaggaaagctgtccattaggtgtagttacacacagggcccactcacagcccagtgctgttggtgagtgccgtaccttgcactcctgggccttccacagtggtcccttgccaggacctgccactctgttaagaattaaactggactaaggtactgctgagcagtgggacctcattggaagcagtgcctttaacttggagctcggagttaagggaggacggtgtgggtgcttttcatgggagattcaccctcacggtgagtcagcaggaggtgccgggtctctctccacacaagatgccatttattacatcggcgagtttgtttatggaatatttatgtgtgtggagtctcctcaggttggtttcctcgtgcaggaaacgccttgttcagattacagggcaaactgacctcctttgaggatagtccttaaatccgacgtatttttatccagaggcattgtttacagaaggatctgtaaagtcaagaaatatctgaagctctgaggtgtagaaaggtgtgttaaaagctttttattttttgatgccttagtttggcatctttttacaataaatggaagtaatggcaaatttgtatttgaattgtctacttgaaccgttgtccaccattagtttctgtaagtctaaaatgaagctttcagtacttacactaaggcagccttgggctgcagagtataacacacccacaaatgtgagactgaggcttgcacaaatgattcagatttttctgtgaagagtaatatagtaaagattttaggtttgtgggctacacatggtctctgtcatttgttgttcttgtgttcatctttcctaaaacaaagtttgttttaagagaatatacaaaaagaaatccttagctcttgagtttggcccatacgttatgtagtctttgccaggctttgctttaggcagctggagtgtgctgaattatgtcaactagtgaactcagtagagatgagcattccgaaggtggctctgggactcagaattatcaggggtggtagctcttttgtcccttctgctctgccatcctcaggctctttatggttatgagatggctgccccagcacccca

SEQ ID NO: 22371 - DNA, 3214 bp, Mus musculus
acagtcaccattttgaattccaaaggctgctgaaaaagtttaggcaaatactgacggtacccaagttcctgttacttagctatgtcattgggatttgtgcatgtgtgtgtgtgtgtgtgtgtgtgtgtgtgtgtgtatgtattttaattaattgttgtctttgaccacaggagctcttaccaaagtaaaggagagtaggcgacacgtggaagaagggaagatggaggtccaaaaagctgacggcattcaagaccgctgtaacactatttccttcgccacgttggccgagattcatcacttccatcaaattagagtaagagactttaaatcacagatgcaacattttttacaacaacaaataatatttttccaaaaagtgacccagaagttggaagaggcgcttcacaaatacgacagcgtctaatgactgcacatgggaccgcgctcttgttttcagttgaacgataatttccacagcagaacaaaacctgccttctcagagctgttgccaactctaggtggtacaaggacggctttgtgttcagccgaaaccggctggatatataattatgtaggaaagaagcagttaatatggctatgtagcagaaacagtaccacactttgtaactaaattatactatgtatgcctacactaccattgtaacttttggataatgattatactatttgccttattgctttttgaagtatgggtatattagtgtatactttgtagacctcaaaacccatgaagagtctcaaagaagctggctggataaaagcctgctgtggatgcctttttagtctcagagatcgagactacctaaatccaacctattctctgtttacaaactccaaccggagcagctatgcgactttgtgcctttagtccgcttgttttcctttctgtcccacctgggttcgagcccccaacgtttctgatggaaagagcaaagggcgggcatgttggtgacaagccgatgacaagctcccatttctgggggtggtgggagaaccagtggccatcactttgcacaggaagcatcgcctggtaagatgctggcagttacagaggcaggagacgcttctgccgtctctggatgtgaagtctcgtaggggagaaggcagtgtgccatattccctcacatctgtagttcacggcctcgactcaagggtcgcacggattgggcctgaggatttcggcagtgccctgagcacgtggagaaggaggaatccgatcggggataaagaacagaaacagtgggtgacaacgcactccatcttagtttgggggagggtctcctgtcttcctttttcttttttcttttttcttttatagcttgaaattttaatgttcagctttttgtttcggtttcaaatggatctacactgttaactgaatgagactccactgtgattcactcgtttacttaatcaaaaaaaatttcagggatgtctgtaaatttcagtgttgtacgcgatgagaagtgctgttggttgatttaaggagggaccagaaataatttctactattccagtactgaaagaaaaaaaaaatactgatttatactgtttttaaaaactaagtattgataaagcccccctcagaacatttaaccttaaaattattttgaatatcgccttttattattagaagggagctgcaaatgactgacaaataccaaaaagatttacatgcaggcttcatctaaaaagcacaaagaggttctggtgtgaaatgcccaaatctcaactgttttttgtagttgctgagctaaataatgtgattcttgagtttacagatgtaagagctgtcactgaaggctgaggtccctgcatctgctgtccctgtgaactacttccaccaccccggaaaccctggtcctgacatggtaacgtgggggtacagaggccaggctcagagggggtgagccacagttatccgaaagggtcagcttgcagaagggtcaagcaaggaaaggcgagtgggataattacttcacagcacattcactctctacaaagaaatcacatatgggttgacattttaagaacggatgatgatcattttgacctctggtcaaatccttgtgcttcagaactctgaggcggacgtggcatcctgtggcgctgtctttactacaggcacgtgggactgccgccaaaagccatgctctcttaaaaagcaacttcctctcttggattgcaaagtacagcgagataaagaaaacgcatatatatttaaaaattaattttattccagaattttggaggttacaatgatagcatttaagtttgaattggtgttgaagaagcaagctctctgcgtttcagatgatttgagcgtcccatttatttgcctctttgttttgatggtggtttgattttttttttcttttaataaaattactaaacttgtgcaatagtagcaaggacatccatcacctgaggtgtctgattgtgctttagccagggtggacatagcttaaatcataaactaagattaaagtccagagaagtggaaagctgatgctgcctcctgctgagatagcgtttgtcctccctaaccacacagcatcatctcaccggctcgtgggacttgacgtgaattctgtgggttaatgcaccaggcttactagtgtccattttcatccaagatccttactctctaacgttcttggtcctattgaagcatttcagtatctaagcatactgcaatgttaatacccaagagaaaagccattacgtacgtattctggtcacacgatcggtgtggcaccgttttatttgttactgttgttgttttattttgttgtttctgttttttaaataaactatcacaccctccaagccatcgcttgtcttttatttctagaacttgtagttttggtatggaattatgtataccacgagggtgggagggtggccctgatgagcctggtcttaactattttaattgcaggcagggagttgtttatgggcggtagccatggtgcagtgagactggtttgacagtcatgcatagttttctaggtggctgtatctgaaggcacagtcacaccccgaatggagaaacacattggaaagtgaagcatcaatcagagccctttggcttgaacagtgcaggagtgcttttcccagacttctctgctacactggcttgcatttactgctaacaatacagcaggctctcaaatgctgggttgtaaccgtc

SEQ ID NO: 22372 - DNA, 1156 bp, Mus musculus
ctatatgttgcttcagatgtagaagcccctgaattgtgactctggactttgtaggcaggccaggctgcaggtcccacactgaagctgagctgtagaatgcttgtggttgtcttccattttatttctcagtataattctgtcagtttgttttgtctttaatcatcttgctttcttttgacaagtagttctgggaggagccaagcgacgtttcatttaaaaggcatcatttaaagagactgcgctacaccccgagcgacagagccagtggtacagtttgaggcagggtcttactgtgtgggccagaggcctgggatgtgcgatccacctcagaacacagctcttgccggtgtgagtgcacgttcacacctccacatactgtttacctggtctcacctatttcaggtgtgtgtgccttgttacctcaaaaatgatttgagcccttgcacgggggccacatgtttcatggacatgtctcctgctcatctctctgtggcagacttgacccagtatgccagcaaacttgaagtaagtgggtcacctgggatccaagtggaactggctcctggcgctcattcttccctcagtcctgtccttttacagccctgagttgtctttgcagaatgttaccgtttgcccatcaaatgaacccatacattcccgaagcaactgtgtagtaatatttagggttggagtctgacaatctgtgtcaacttctgaagcatctaagtagatggaggaaaaaaaagaaaagaaaaacataaactccctcccatatttgagtttgtgtttagactttcgaataccgtagtgtgtaccttttcaatatttaagataagaaaaccatacatcttaaagtataaaaggttttacaggttcagttagtaagttgaattaggtcagtaaaaggaaagtgtcacacataaacaaatagtttcctgtatacattcagagtaccttttgaattacgcgtttgaaaatgtcaggggctggaggggtggctctttgtgtaagagctgagcaggagccgagcgccaggatctgagtttggatctcagcatctgtttcacaaagctgggtacggcttcagctgccggggatcccagtactctgggaagagaggagccagcaaggtcaccgcgcctgctaactctggtct

SEQ ID NO: 22373 - DNA, 1166 bp, Mus musculus
tgtttaaaataatgcttaaattcaaagagttttgcttctagtgaactgtaatcactagaaaattttgcctctaggtatagctaatgtaactttaccttacgtaagaaaaattttattgtttctgcttctatacaagaagccaagagttttaatctttcagtgtatattgtttcctaagtgaaaagtattttattaactaatgcttcttaaagtttaccttaaatccttgctctcacccaaaagattcagagacaatatccttttattacttagggttttagtttactacaaaagtttctacaaaaaataaagcttttataattgttattaattggtaattaaaaattggttgtgcccaaaacaattctttggccaaaaagaaaacattattgtaaagtcatttttctcatcctcccagccaatcgttggcccatgtgggcccaactagcttctgtggggcggagtcttaagacacagtttcccctgttccagcacagatgatctagttgtgtgctgtagatggtgttttaaaatgctgaacaatcaaaccttaatttgtatattaatactcaatgccatatctctgagctcgcaattgcttaaattgttcatccctcagatactattaattctcaaatttacaattgcttatgcatatttctagttaataaataaattatgaacatgtgactcttaataactttgcaagccttctagttacaactgctccttaagaaaattgattaaaagtgcaattagtcactgcccctttacagccaagtatttaaaatgttttgtcaactagttattaattcaaaagtttaggtattgtaaaattttaaaactttaacttcttaaaagacaaaaaagagagaaattgtatccccgtgcatgctatttagtgcattcccatgcacactattaaagtcttacctttattttcaaaatctaatattttaatgtcaaagagtttaataaatgctttatagtatcttaaagggatctacttattggcttatagattaatcctaaaacagctaccttattagaaaagggaaaaacaggttttctccacagaacgctgcagaagcatattagtaaattcgtgtgacgagctggtaggtaagttgactcatgtcctgattaaattgactaaaaaactaaat

SEQ ID NO: 22374 - DNA, 1129 bp, Mus musculus
ccaccctagcaagctaactttcccttaagatttatctggtagtttcttcatgcttagatttgaattggaagttttagagaataacattatagacggcattctgtcttcagctcttctcatcaggtacctgatacctgtagtttattttattgttgatggttcctcaaattcataaatctgaattctgttttcttcacttgtcaaaaattcatgaatttgttaaaccatagtatccagtatgtattcactgtacaatctatttcattacatctttgcatatgtttttagagatcagataaaaaaaaaaaaactaagttgtctaagttgtttctttatcgaaagataatgaatcaatcactcagtctggtagctgtgagaccccaggttggggtcttcacggggaccttgctgcattggaacatggtggggagggatcacttggaaatagtgagatcaggaaagagacactgaaaagaggtgacttttataacaaagtgacgtcttctatatagagtccctccctatggaaaccctgtcagggggatggcgcctcataacctaagcacctcccaactacaccggcagccggcgaagctccaggatgggtttgggaggggacattcaaaccacagcgcaatgttagtatggcttgctgtcctttgtttttagagccatattattaggcagtgtttttcccttggtggattaaatgtgtgaatcctttcctgagtggcagctctggataggcgtctgtacagacattcacttttccgtgaggaaattagaggcaggaatttagatgcaggaaatgaggcagaagaagccttggctgaggaggatgctggcttactcctcatggctcactcagcctgctttcttatacaacccagcaccacctgcccaggagtggcaccccacatattaaaccgggccctctcacatcaatcatgaattaaggaaaagccccacaggcttgcccataggccaatgtgggaccatttttctttaacgtttggttgattctctgtgaatttcacatcatgcaccccaactcactcatctccccatccctttgtatccaccccccacccttgcaacccccacacctccaaatgaaaacaaacgtaaa

SEQ ID NO: 22375 - DNA, 1099 bp, Mus musculus
gttctcagtcatcagatctttaaggtgttttctcttggctttggttagattctccaacaaagaagcaccagcttggtgaggataagcctggtagccagggctcagaggctactgtagggctgggtacctggtatccctgctacagtcgcaccatactcttcttagtgctgtgtgctttgcctgtaactcatgcctgaggaattctagaggcgagaccctgtttggtcttttcaggaaaaagatgtgaagtcttgggtggctgggccattcgttgtctggctccctgaagctggagagaggacctgaaatccaatcccgtcttagaagagctttgagttagtctgctttcggcagtatgctgtcctgcacctggggtgctgtcccttcctgtgggggccatttgttcatttctctactctgcttgtttaggtttagtgtcaggcgtgcagaggatcaactacagtcttgcatgttcctgggaacaggagctgtctttgatgtctaaagcctctgcaacaatttagaaattattttaaaattttatttgggtgcagtttcaggagcaagtattcatcctgccccttggattagaagtccgttccttcttttcctccgtgacagtcttccggcccaaaggatggctactacgtctgtacggcatgagggcttccgcagagcagcggtcctgagcgacagtctgtgccttttgtgtctctagggaggggtagcgttgcaggtcccagcgtctgctgcagagaggcttaatgagcagatgcagagtctccttcttctcgtgcatgtacagggagcagtacccttgcagtcaggaggagctgggcgcgctagacgtgggtcacgagctctcccctcctctcagtggctttggaacccttttcactgtctgcttaccttgggtcactggccttctcctcaggaagagcaaggcgtctctcaggggagcatgggcgatcagaaaaggggacccacagcgtgcagtgtgcttttgagtggctcggtgttttcacgagtgggtttggctgttaactatcagcatcctgcatctggattgctacatggaggctgtcggagcctaccggag

SEQ ID NO: 22376 - DNA, 1203 bp, Mus musculus
attctgttgggaaacattctgttcacataatggcggtggtggcggtggccgtggcggcgtatataaaatggattagtgtttcacttttaactaaatttgtatttcttcactccttaggggaaaaagcgtatctgtcctaaaactgatgtgggcgaagccctgacagggaggtgcttttgaaagcatatgaagcttgagttctgttacagacaaccgtgcctagggattgcattgttggttttagtggataattctgccattatgaaagtttatacttaaaaatcagatttcctatccaactattacaagataaaaatcctatattgaaaataagcacatattttcaatttagcttccttttttaatctcctagcttccttctttttgactctgatctctctgatctgtaaatcgtgtgacagatctccaagtctggataaccaggcatatatgagaatcctggattggtctctttaaatctacttgttccctacgttccctaactttgaaagccccactttcagttaatctcgaaacccccgtatcaggcctggtgaatactcctgatcaaggatggctgactgatgctcagaccgggagccacgtgggcccctggtctggctcggcgcggcagcactctcttccattcagagcctcagatgtctgcccctctgcaaagccgtgaggccagtgtctaaagctgctaagcatgaaattccctgcttctgtttgtttcttttgttgccacgagttaatagggacagagacaggagacagcccagaacaaagcacaaataatggagtatttcaccccaaaaaaggaatgtgggttgagaaatacaaagagtactgcaaagacagacttagtgtcccgaggcactgtgatatatctgccagaagccccagcccagggacaattctggaccagatccttcatctgtgagctcccagcctacatggcccaaaggtttgacccgtgttctatgaaaacagtttattgttttcctcacgagggttttaaagggacgtgggatttttcacctcaaaaagtggattactcttgccaggcagtgaagtcttccgggctgtctggtggtcagcccggattagtatttttgttacacttggtgtggtttgatcttacactcttctcacaagtttgcaagaactcaggggcttccatgactgtgggatgtgtttgac

SEQ ID NO: 22377 - DNA, 1206 bp, Mus musculus
gttgttgttgttgctattggtgggacatctggcagtgtttcagatgctgaagtaaaaggttagaaaaactgtagagcagcagatacacacttgagatactactgaaatgtgggtttgaatgaggttgtctagaaacaatggatagagagcaaagaggggtgcgaagcatcaactgtatttcattcacccattacatatttattgagtgttttattgtgtctgccactgagctaggctgtagcatagcatcagttaataaggcagacacgcatccccacccctgagagtttatattcctgcacctcttaaggactcttaatccaggcaatatgataaataatgatactcgtagaatagttttgttagattattaagctagatcccacctagagaaatgaggaagtcgtgtacgagaaatgccaataagttatgcagactaatcattacttcattggttcttcataagattctgtagaaactatttttttttcaggacacataaaaaagagagagtgctgtggacctttgtctcaagaaggacagtgatcacactagtagatgtgtgtaggcgtggtcatctgagagtgaaggagattctgaaggggttggggggggtggatagaaagaacacctccacctccagagcactggcattaaaggtgtgtgccaccacagccaggccctagggtcagatagtgtaaacatcagagcaaggagtactgtggagaagagcgaaggttgtagcatagcaacgaagggattactttacctgagagacctgcgtgcttatggacccaacgggaggtcttcaaagtacataacacagaaaataggagacaaatccagagtttagatgagaagtttctcttctaccaattgaacattataggctggcagttactctagagatagtagacttgaacaatgatgtccactgacacgaccgagttaacttttaaagatcactccacccaaccatagaagacatccattcctcccaagtgcctttgaacatggactaaattaagtaattatcaactataatacataaggcaaatatcagttagtttatatggactcctaacctaaatatattttcaaattctaacaggcatatttaatccagcctttaaacatttaaaacattggcatctgcaaaaatcatgccgatggagttgattgaggatgtcctcctacacacacaca

SEQ ID NO: 22378 - DNA, 1133 bp, Mus musculus
cttttgtgtgtgtgttaaccgactatgtctcctttacaaaagaagaaggagaagaagcagcctaactatccctttttgattcactaactgatgtctgtcaatatggaaaattcacattgcgtgcaaatgattccaagcctgtatgcactggaatgcacgagaacttcattttccttcccacttgtatcaactttaaataattttctcaggtgattttgcttgaaaatagaatttatataataccagtttgaagatattttaggtaaagcactttccctcgtcaacacatatcagcacatatcatacagttaccttttttggagtattttattgggtctggggattcctcggtagacctaaggtctgtagatgcataatgaagagctcaccctagcttcagactggctgcgaaaagaaagggaagcatccagtctttctcttaatgacaaagaggctactctctatagtgtgtataaagcctggttaaaatactcttaggaatgtttcaagaattaaatcaataccttatcattagcataaaaatggagttgtgaaactgaatcttccgtgttgtataaacaataacctcaaactgggttggaaacagcaggccagggtaggacatttgaaagcagagtcccatgttccttgaaatacattttagatcttagtgtggaaatgtctttgggcatctttttgctattcttcctttcattttgataccacttggtctgtgtcttatagctttatgaacacttgtttgtttgtgcccacgagtttggcggtgctttgagtgttagaaggttgatttttcaccctgcaaaaatatctgtgacttttaaggggggtggggaattctgcttaaaaaataatcgaggaagacacattcagctacctcggaagcgctaacagcctgacatggttaagaaaagacagtgtgctcttaggtttcttgattcctctcttcctgaaaatcactcgattttgttttcggggatggggtggggggagtatgtgccaggatttgcctggtcgctcgagtaaggtttaagaattcacttgtttattaaggtaactgttaacttaagagtggatgcatgccagtgagatccagagtagagccctgaatgggc

SEQ ID NO: 22379 - DNA, 1146 bp, Mus musculus
tatcatttttacttcttaaaatttaaaatataattatatagtttacctcttctcccgctaagctatccctttcaaatccacggtcttttattatttgttgttattgttacaggtgtgtatgtgtgtgtgtgtgtgtgtgtgtgtgtgtgtgtgtgtgtgtgtgtatgtgtgtatgtatggaatggggagaaaaaaacaaatgtaagttgcaactttcttagtccatttaaggtgtgtgtgtgtgttagttatggataaccatttagggtgctcacttctgggaaagatgaattctccctctctcagcagttcttagctcttcatctagggataggaccccatataatctcttccattcattctggcatgccaactggtggtgtccttgtctaagtattttttaggctaccatactttaaggtctcacaggttcagttttcctgcattgtctagagacgacatctttccggagacttcctggtcctctgggcctcttccctctcttgtatgacgatcgatccctgagccttggatgtaagggccgtgttgcagctgtattggctggctggacctctcccagtcagggtgttatctgcattttaagtagttgttggtttgtttgtttgttttttcctgtaatgctgccagtcagtctgctgtgaagagaacaatctttgataaggttcaagagctatgctaatctattgaaaggaggataagcatttggaatagtttaagaccatggcaggattaggttcttttgtaagatctacgatcctgcttaccacgggtgggctcggttttcagtgccaggatggatttctcttctgtttaataaccaatttccaattaggtagttattggttatccctaagctatcaatgtcacacgtcaccttttggagatacttgtcatacctggtggtggttgtggctcctacgcttcacagctgggtaggactatatactgctttcctcttttggcagtttgcatagcactgtacagtataatgaaagctagcccccggggagacggcatttggatcggatccagatcgatcagttctctcaagttctgtcttcagtgtatggtgtcttcagccaattctggggcaccacaaagggtaacggtacctatattgtctgg

SEQ ID NO: 22380 - DNA, 1224 bp, Mus musculus
tctccagaggagagtcctcagaaccctgcacagtgctcaaatgcagtatttgtgatttcatcttgtaaatggattttaataaaaaagaccccacacttctttaagcttatatatatatacatatatatgtatgtatatatgtatatatatatatatatatatggcatggcccagagaaggacccatgataattcattttgtctaaagtatccttgaatatttttaaaactgtgacgatccacaggcagcacaaacctttaatccacatgagcagttaaacgattcctgtttttattttgtccctcccgtgctcatcttccatgaaaataaataaatgaatgattttttttttccgggctttgctctccctgcaagttcattaaatgcagaatgttgtcttttgaggatcttgtggccgaacgctccttgccatctgttaaatgacttcccgttgtctgtgtgtgttcatgtgcgccagtgatgggcttctccacagcccccgagactgtctgaggcgtcgcagccgtcagaatgaaaacattatcaatcagtacccaacaacagctgtttttgacaagtttctgtctgacgcctgatgctttacaactgtcaataaggctctttctttgtctagcaggtcgcagctcgctgtcttactgcttcttcttggcatcctggactctgtaaccctagaatttactgtgtttgggaaacccaggtgggggaggggaggggggaaaggggaggggacattcgtcttgttcttacttttgtgtgaggtgccacaggtgtcttggtttgcatattcaaagatataggaaaacagtctgttgtgtatttcctcagtgagcatcttgttatatttatggaagtgacccatttttgtaccttcttagctaaagcggttgcctctttttatactggcaattaatttatataagactttgtatctaccatagtttacagtattggttgctggataactgccatatcgccctgtctttctatggagatttactctatccagacttaaaagttgacaggctcacatgggcatttgctaggcaacaagaacttgccctattcacaatttatatgatttccactgtcttgcaatgaaaataaatgctgagtagaacaggcgtttcctgactgactttttttcagccatagcatttgaaagccccagatttctgcttactttgtgtcgcctgtttaagtctt

SEQ ID NO: 22381 - DNA, 1180 bp, Mus musculus
tcattgtgggtagctatcacgaggttttggtaggtttgcagtgaatctgtgattgcttcaggtaggaatatcattttgatagtattatgatttccagtccattcctatgggatacttactcttatatctttaatttctttaaaaaatatttgtccaggcggtggtggtgcacgcctttaatcccagcactcgggaggcagaggcaggtggatttctgagttcaaagccagcctggtctacaaagtgagttccaggagagcaaggactacacagagaaaccctgtcttgaaaaaaacgaaacaacaacaacaacaaaaatcattttgactatgcaaaacttttgccttttttgttaaaaattctgttttattctttcattaagacattataatgggttgttatgtaactttctatacagattgttcattgttagtgtataaaacacagctgggtttttgtgtgttcattttgtactcatccagtttgctgaattagcttattagctacaaccaggatttcttagtggtaatcttggaaggttttctacataatgcttcatatgatctggtaacagataatcttgttttgttttttttcttctggtgctctgttgaatatcacaggtgggctgtgacatccatttcttcgttagaggaaaggatttcagttcagtcattgtcattgttcccatccatgctgtgtgcatagccttcctaagaccatagagaggatcagagccttactggttaagctttggaaatttgattaagctgttctaagctgtgccattttaaccaggattttacttggggtttgtgggtctttaagttgatattttccatatttagaaatcttttagtttttctatttcttcttgtgggtttttcttcttatgtgtgtggatgggggttttgttttattttgtttctcttcatgtgtctctgtctaccacatgcgtgcattgtacttgtggaagccagagaggatatctaagattccatggaattggagttacgtaaagttataaacttccatatgggtgctgggaattgaacccaggctctttggaagaacagccagtcctcttcaccactgagccatctctccagcctcttttctacagcttgtaaactcatattatactacatgtttagtcgggtagttcagtgtgtttagtttc

SEQ ID NO: 22382 - DNA, 1212 bp, Mus musculus
atatgtaaaatatgcagggaaatttattgaaagtttgtccaaatggaattaaggtaaaaatatttctactctaaatagcataacaattttaaacttgtacatttcatttaacaataatgatcgttacggcagattgtttatacatataatttttgtaggtaagattctttatataaatgcagaacttttatttccaaaatatgtttccaaaaatgttattctgacatgtcattaggctgtatgaaacttacacttttgaaatgttacaaaggaaataaatgtgaaaaataatagcttttatatagagacaggaaccattaaagcttgcagaatagctatattaaattgctggaagaacaaaagatctttcgtctacagtattcagccatctctattatctgtgattcttcagcaattaaaagcagattattttcctctttgttcctacttagaacacttgaacaatactgaagaactgaactgactggaatgttttatctttcaaaagctttaaagtcctatccaccaattagcaagatacagtaaaggtttaaacgttaatagccacagcatggtgaatgcatcgacctgtggtactggaggtctgtgtgccagctcctgttgtgggctctggagagtaaccgtgtctctgctgttcttgcaccactacctgctgggtgtggaaagtttgaatcgtactggacacttgtttttaagagtttcaaatttttgcatgttactatattgtcactttggctctcattaagttagagttgataatattttatttattaggatttatataaagcttattttgctattttcatgacagctctagtatgaaaatacagatcagtctcttagtaaccaaccaaagtgcttgtgctgtgtgctgtgtgcttgcagcaagctgtttgtccagcaggtttcatttagcatagtatagccaaccattaagtgtttgttctgtctttaagtgtttgttttgctaattggggcatagaactttaaagcttttgtgaggtaaaactttgcagtcagttctggttttagtttggaattttgcttggttttgatctcattggtagtggagaatatcacactttatgttacagctttttaattggccaatttgccagattgaaaagacttcatctaaattaccactagcttgttaaatgatttgtgtccatcattttgtagtagattctc

SEQ ID NO: 22383 - DNA, 1401 bp, Mus musculus
acaggaaaaggggctgtaggcaggttagggcactgcacagaggtcctaccagactgaagcacaggcctctctaatcacttccctgtgctcatgtagcttcatgactgatgggaatccagtccaccctttctcttagtgatgttcaagtcggtgcgtttgcgaagaagtacagtttaaagctaaaggcattccgcttatcctcttctgtaactgcatcatgtcttgtgacagcttctggtctgtcacctcctgattggagttagaggagcctgcataggggacatgtatttatgtccgtgttctctgtgcctcatgtcccttatgttgttagaaagagtgcacatctacatatagatgtgctatttactgggctcatttgttcagagtattttattctcattaacatgcattttgaatacctgctctcgttctggtttttaggaaatatatgaagaatcaacctcatcttggaaaagaaacaaagagtgcttctgggcagctggtgactagtcaagtgtggtgcgctaagtctaaaatttgataatctcatagctaacacaaacggagaatagccaagtgcatgagtgtgtgggatgaggggctgcctaggacttaaagatggggagaaagggcttgacttaaacctgtgataagatgtctgcaatagactcagccttctgtgactaactcctaactaaccagctcgcagtgcgctgcagccttccttttaccttcagctgtctcaggaagaccttgctgtcccagagtgtactgagagcatcactatcaggcatgtgttaccaaaaaactggcagaatcagaaactcatttacataatgtaaaagtgaatctaaataaatcatgatttaaacagtctaaaaatagatcctgtctcctttttagtcaatgataataacctaagggattagttgtcaatattctcatcactgtacaaattagcataaaattgttataaaactaactagcaacaaggtggtttatgttaaaatgatgtatgtttaaaagttggcccacaattgcttgaggagattgtgcagttatttgttaaagtagtttagatagttttcataatgtttatgtaacaatagcctgtgtgaagttaagactaaacaaattaaattttctgcaagatatttatactaagcatccagtttttgattggtgaatttatcatggcaggtttgaatatacaaatctcgtacactttgtgtttccagctttattgacatatatttgacaagtgaaatacacttaggttctataatgtggtgtcgtgatgcttgtgttgtggtgagatcgtcacaacccagacgattaacatgtccatcacctcagacaggttcactgggaagactgaaggtacattctaagctcagaaag

SEQ ID NO: 22384 - DNA, 1202 bp, Mus musculus
tggcgcggggagggctctgggttcaccggaagaggctcagtggcggcgaccctccagcccgacgacatcccttgccgctcgcgcaggggccgcggggatgcaggcgcaggcggctacggagcggagaggggggtggcctttcattggctgggcgcgggttacccaaggaggaaacgtgggagcccgggtggctccgcatccgccgggtatagggatgatcccgtcccagtaaagctcagtttgatcctgggagctggtagtgagacagggtcggatttttcctaggaagtgggcaaatagagtgcgtgggtttgtgcgggggagactgggggcttctgctagtgtggcatgattatgagtccacattccgcgaggccggctcccttcattagagccacagcgaggctctcgtatcacctttcctcctggcaggtgttgaaattgagtatgatttttagagcagagggtaaaaatcgcgatagccagccaactcaaacaagcccagataagaaaattagacgtgtgtgttgtcttttcataacaatctttataaaaacaaaacatttttcaagggtgttgggttgcgtgtttacggcatgcggacagaaggatttccgtgaaaaacattaccgggtcaagatctattttgccaccttaactcacctttttatactttatgtgttgcaagcgatccaatgcttttcagtgcaagttcctgtgtctgtggcaggttagctcccatttaagtcaccactaactttcttaagcagttgaaagactggctttactgggaactaaatccagacattattccacacaaggttttgcgctattataaattatttccatgaggttatagcatgtagattggttaaacatagtataaaagaaaatggtcaaaaggacacacacacacactgttaacttggattcttctagtccctagattttcttgttccacatgttttccatcataatagtttaggacatgaccttaccaggcgaacctggttcttcggtcctcttccatgcatcatttatcatatgcttctgaaaaatatagcctctttttctaactcgcttcttttgcctccccgcttcccctttccgctcccagctccttccctccccctctcttcctttcttcctccttcccccttccttctttcttccctctgcacttccctctgctgttgtcttcc

SEQ ID NO: 22385 - DNA, 1167 bp, Mus musculus
atgaaaatcaaaacatcagctggccgctttcttgatctgcctggtgatgcagaggtgtgcatttacattgctgacccaacccatattgtgtttaccagccgaggtgtgggcagctgacctggcaaggtccccaggagggaaggaggaagcagagcggcagcagaagctggaggtgcttgtatgctaatttagctgcgttaaggtttggtaatgtcactggagatgatgaaatgcagccctgttgcctagccacaggcaggcgggacctctcaggttgcagggtcaggagcttgagcagatggactgtgtgtgtgtgtgtgtgtgtgtgtgtgtgtgtgtgtgtgtgtgtgttcctgtgcagctgctctcctggactgcttgcctcagggaagaaggatcctagtacgcttcagtggcctgaagcacttagtgataattttaggatcgagttgtcaagtattacataaaaactggtcacgcgcaaagaagaaaaatgtgagtgagcactgacattcacaaggagtgacagaggacgcagtccactagagcaccagacaggaccgaagcagaagctccagcaggacagaagtggcacctgccctgcatcctggttctcagcagcagaaatattagcattgttgactagagaggccttgcatgtggaagtctgtttggggcattgaaggatgtggaatggaatcttagacctttatgttgacgataaaggctgtatgttcatgcagataaatatgtctttgtgctgcaagtaccagagggagccctgtgtcctagtttcttgttactacagtggagtgggtaccagaagcagcctagtcctgaagagggggttgctttactcaaagttttggaagcctggataactttcagtctctagtcagtgtccatggaaaatgcatcttccatgggaagcaggcgtgcgggaggaagcatctctgtgtcttgaatctggacgtagggagagctgtgttctaacaggctggctgcttggactgctcataagaaggcagagttttgtcaagagctacttaatcccattgcagggtttctagtgatctgaggaccacggattaagtcctgcctctttttggtgttttttttttttttgttttgttttgttttttgttttttttttgttttgtttttttt

SEQ ID NO: 22386 - DNA, 1192 bp, Mus musculus
tgtgcacactgggcatgccctccacatcgtgcctcatccttctgccccttgactttcctttgtccctttgtggtaccactttctctccctctgctggctctttacaaatgtgcatcaattgagactattttctagcctggaaatgttgcttttttgttcatgcacttaagggttaaagctctgaagagactgttgcagtatctcagtctgtgggaggaaagaacagctcctttttatttgtttcaaacatttaataatttgttgcaaatgtggaatggttagagttctaatcactagaggctttccttccagttgtacaccggcagatgattctactgaagtcatccatctgctactattagccactactgcctatgcctcctaaagactacaagttggtttcattttatgtacaattaaaattgcataaagagaacaatccagaaatgacgtgggaaaaatgtccataaattgagtacatttgttttgcttacacagtttccataatatacatcttcctgatttttatcttagtacccaaagctcatgggaaaaaaaagtcgttgatcgcttacgtgggggattctactgtgctgaagtgtgtatgtcaagattgtcttcctttaaattggacttggtacatgggtaatgaaaccgcacaggtaagattgtatttcctggggctagtgagacagatcccttagtgagtgtgcttgccctttaagcaccaggactagagcttggatgcctatatccatgtagagagtgagacacacttgtaatccaagcattggggatgcgagacaggacgatcccagaggcttgctggcctcccagtcaagtgttgctagggaactccagattcaataagagactcgctcaaaaaaccaagtggattgaagtttcgaaggcactggatgacagtttcgaaggccttcatgtaatccacacacaaaaacatgctcacacccttacagacaggtacacccacatgtaaacaaaaatgacctttttttccctctgatttgaagaaaaccaaacaagaaatcttttagttcataagtaagagtatagctgacttaaaattcctcggaaaactaatatttctgtcctaactggtaattaccaagtaaccacagtgataaatggagctgtccttgggcattctcgggatatcaccatatgtgtgaag

SEQ ID NO: 22387 - DNA, 1101 bp, Mus musculus
ctacctaaagatgtactttcattttgtaattgctttccattaaagcaaggtcaattgtttcagctgtgttctgtgagctgtaacctagataataaactcccctctgtgggtacagggtggacaccagcaaaatcacttaataatccacaaataaatatcgccgaagatctgtttattaccaaagaatttattaaagagaaagcgtttgccagttgtcttaagtgtttgcctccaccagacatcttacctatagaagtatttatcacagttttcatgtgaagtgtatccagtgttgagtgtgatttctctaggaaatggaaagtatgctttcaatatcggtggctacactgcagtctagacactaagataaacttgtgctctataaataatggtgcaaagtaagggagttcaaatgcttgtgccatggccactacattaccagagcttctcatcttcattgcactcatttctgctctttctatcccaagccgaagagcttcccagccttaagtagaacattttccttgttctttgtcattggggtttggacttcaatagtcttcagaggccagatccacgttgtcacagtacaaccccgctcgctacctgcatgcctttgtggctcatggtttctgggtgcctttatgtgccatctctttcctggtaccatacctggctaaaatgcattcttagtgttttccaataataattcctttgtctagtatacaggaggactagtgcactatctttatgttgctgcgaatgccttagacttaacttcaaaattgtatctgagatactttatgaacttagaaccaaatcacgtcagaattttaatggacatggaaacttgtcaatggttttaaatgaaataaaatgtgccttggatggttggattaaatgtcccttgtgctgctggcttttgtgatacactgcctgggaaaacagggctacaaagagagaccaacttgggatgatagttaaaaacaaaaaacaaaacaaaacaaaaaaaaacatggttcttggtgattctgggattagaggttgggtaaaaagagtccaccggtttaaaaatggaaatgtatagaagtgtatgccttt

SEQ ID NO: 22388 - DNA, 1200 bp, Mus musculus
ttattacttcctagaaaatgaggatattatcaattatcttttgtcttttaggtagccagtcatagcacaagatccataatcttactgtagttggggagaccgccctgcaccccccaccccctttacccattcctgtggccccacgatggtgctggggaatgaacaccaatttaggactttttttctggcttgatttgtcagtagtaagcatgaatataacatttatcatccacacactgaaaatgaaaggggatactatatacagcttcactgagatgtggagagtggcccctccggtctcacatttagcccatggcgaggagctggcttctctgtggatgctctcacagtgctgcagcaaactggaatgattgatggcaatcagctttcatggaaataactgactgtaggtaaggcagggaaatcaccaatttcagtaaatgtcaggtgagtgccaccatggcgaagtgcctataatggcatcatttgcccagcttcaagttttatttaagtatcttcggatgacagggtttgctggcattcggaaagtgggatgcacgggatgtaagagagaagctggcggagaacattccgcttttgctgctgtgtggacgaactggctgattccttggatttgtgtatcttctggttcattgctgtagtagctgtgagtgagtgtgagtgagtatgtgtgtgtgtgagtgtgtgtgtgtgtgagtgtgtgtgagtgagtgagtgtgagtgagtgtgtgtgtgagtgagtgtgtgagtgagtgtgtgtgtgtgtgtgtgtgtgtgtgtgtgtgtccagaaagtcaagaatggcagattatgcctttactacaaaagttaactgtgtgtgaaagtcacgtacaaataaaatgggcacaagtacttttaattccacgaatgatttatagtctgtatttcttactcctttgcacctcagtgggaacctgttatggaaacctgtttatagactgttggatatatatatatatatatacttgttttaaggcattttcaagaagaattacttatataattttcatttcagaatgatatcacaaattatttttctaaagtttatttaagaaacatgaaaatattagatttattacatatataattaatgataatgctatttaatgttaaaaaaaaagaatagctgcttatattttctaccttttaaaatagata

SEQ ID NO: 22389 - DNA, 1453 bp, Mus musculus
ttttgagagcttgtgtatgtatctgtatttagtgaaataaatggtcatactgaatattaggttttatgtggtgctagtgtggacattttttgagcatactctaagtcattaagttaataccagtagcagaatgcttcctgtaggcaaagcttctcataactaagtagatgctagaagctactgaagaatcagtttgtagaaaaggatggatcataagtctcgggacgctagaagctaggaaacagtgataccggaatagaatatagagttcacgaaaaaaagcagggaaattgggagtcagggatttggtgggtcagcgtgtccagcggtcttcctaccctcccgagtattctgtttggatcacatttatcagtgtgtacacaggccaacgctgttttcttccacagggttctggagcgaagcagatgttactcgaccttttgtctcccaggctgtgatcacagacggaaaatacttttcttttttctgctaccagttaaatactttggcactgactgtccaagctgatcaaaataacccccgtaaaaatctatgttgggggtcacagagtcagcctctttatgagaccgtggaggataatgatgtgaaaggctttgatgatggtactctcctgcagatagttcactttctgctaaataaaccaagagaagacggagcacagctgttggcaagccaggagaaggaacttgatctgggaccttgacgagatttaagtttcaccagaggaacaataaaatcatttaaagattgtgtaactgtctgctattaaacacattggtttttgaaaaaccagatttcttatgttgacctgtcattaaaccttgcattctggtcaatttcttgactgaaagatttagttttagatgtaaagatggtgacctccacacatttgcttccccacccccaccccatatgtgtctgtctctctaaatatatgtttaaaaagaaaaaaaactacatttgtgtatcgctaataacagtattgggctatctttaatagcttgctattttgtgtcatttaaaaggcaatacagtggggtgctaaagagaaagttcttgcttttccacagagtctggttttgatcccagcccttaacttacatgtggcttaaaaccctctatgtcctgatccagtgccctcgcctgacctctaaggcaccaggcacacacatggtgcatagacacatgtgtgcaaaacactcatacacataaaattaaatacattgaatgtgagtttcatgttcttttaaattgttaataacaagagagttttagagcattcttcaaacagggctgttttgcacaagctacatgaaggcttttaaataaaatgtttgatctttattttaaaaggaatgaaaaatggaaaatatgactaggctatagtggcagcatctttttaatccagcccagtgaatgtttaggggcattt

SEQ ID NO: 22390 - DNA, 1131 bp, Mus musculus
aacaattcctgccagttgacctcaagttccgggtcgcggcgggcgaaaatggcggcggccaggtattggaagctggtgccccgcggccggggattgtcccagaatgccgctgctaaggcgtccgctacggccccggaggtgagagacctggaggtcgtggcgacgcccgtcgcgcggtacccgccgatcgtggcttccatgaccgccgacagcaaagcggcgcggcagcggcgggtgcagcgctggcaggcgacggtgcacgcggccccctcggtggacgagaagatacggattctcaccaagatgcagttcaagaagtacgtggtgcatccgcagatctccgccttgaacgccgaccgctggtaccagagcttcaccaagaccgtgtttgtctcgggcctgccgcccgccccggcgctgtcgccgccgccgccctcgctcgacctcgccgccctgcgcgccgccgtgtgcgactgcatcttgcaggagcaggtctacgtgcggcgccgccggccccgctccctcttcgatcgtcgccaggccctcgcctcctccatcctggaccaggtagtgaggacgctcgtgaacctgctcgctccactcaaccctgtcctgagcactgccgctctcggtgagcttggaactcccaccctgaacgggggaagtggggacgccgtcggccaagctttcctgcaggttcagtagcactcactgagttaggacttacggaccaagtttcaggcggcctgccctcctaaggactacttgttaaagtttagtctcacccgaagctcatcacgtttccatgctttgatcaggttttgtgtctgagcagccaaaagtttctaagagacggttgtcttttgactgcttcacacgaaagctgggtgaccatgggtaaaacatcaacctctcttactttgccttaatatcaagatgagaattactgtaatactgtttggccctagaatgtcgaaaggtaaataagatattatcagcgttactaacattttcttagcatttactactgtgtgtcgatccctttcccaaatgttctaaatgccacctacttaatcctcataataacagagtacatatcatggattcattttataaatgaagagtgaaaaa

SEQ ID NO: 22391 - DNA, 1224 bp, Mus musculus
atgtaagaaaaaaatggaagctacaaacaagacaatggagtgtagatcattacatggcttgtatcacatggaatcaagtattatcaccatctgaataaataactgtgtttcccttgcagaaagagtttaacaacgactgtaagctgaaagagagaatagaggaaaatggatacaacacctatgcatcttttaactggcagcacaatggcaggcaaatgtatgtggcattgaatggaaaaggagctcccaggagaggacaaaaaacaagaaggaaaaacacctctgctcacttcctccccatgacgatccaaacatagaagaaaacactgttggtggatgcagtacaaccaatgactctttggacagaaagagatggtatcctcactgaagactgtagctcaaaaggcaaagacatagccctgaattcagcttgtttaaaggaaggaaggctttggatgtttttgtactcactgctgacatacaaagttcttttcactagctctgtgtcattgtgtcatgccttataatcaagatagaggcaagtcaagtttggatggaagttatcctcaagtgaacaatgttgtggtgggggctgggctttttttgtttgtttgtttgtttcatttttaagtttttgtttttgaacttctgagatagaacttaaagaacatggaacactctgttgaatgatctttgggaaagttatttatggaatatgaacacatatcaaagactttcattgctcattcaagcctgatgattcaatgagcagtaagacacgcaagcatttactggaaagcacttgggtcatatcatatgcacaaccaaaggagctttgggtgtggcaccatggaagaattggatcagatttacaaatataaacatagtagtatgaaactgtcctaatacaaatagtatggtatgcttgtgcattctgtctccatccttttctatttccttctaagttatttatttaataggatgttaaatatcttttggggtttaaagagtatcttcaatgctgccctctggtttaccttttctctctctctctctctctctctctctctctctctctctctctctctctctctctctctctctctctctctctccctctctctccctccctcccccctctggcaccatacgcacattcatgacaaagtgttttaaaaccttggcaaacacttcagaaataggagatgagatcaaggaagcagt

SEQ ID NO: 22392 - DNA, 1330 bp, Mus musculus
atctttggttcttaggtcattgtcatgaagaggtcccttggcgttggctacgctgccgtggacaatccgatcttctacaaacctaacacagctatgcttctgggggacgccaagaagacatgtgacgctctgcaggccaaagttcgggaatcctatcagaagtgaagattgaagatccagccgatgccttcggttgcaggaacagagaaaggaggcgttcatagatgagcaaagctctcaagacccaaagaagcctcacaaaacaatggagattttcaagatcagcaccccatgcttctcaaaaagcattggaaattctcatcgcctacctatgtactgtcgccattgcccaaaaagcaagagtattttgtccacagtgaaaaagcagcctcactttagatgcaaccccactggattcttaaaattccctttcagtagctagaaatcagttcagaagttgaatgttcgagatttcaggatatgggttggtctgaaaaatattacacaatatgatcattgtagacacctgcatttagtgcctttttttcttttttcttttcaccagatgtgactaatttgaaacctttatcaactcctgacctgttctcttgcatcttagccatactccggattgatcatgccaaatctgcagcaggttatcagccttcactatagactctagattccaaagatctattttctcacttctattttaatatgtaaaaggtctagatagtttaagtaataacttaaacataataagttgtatttttgaaagtcccattgccaattggtctctttaactgcaatcaactaagtgttcttgaatggactgtattaagtgcgcttgaatggaatgcaaccatctgagtaataaatgagttcataaaagtgatgtagcttcgtctctgatgacaaagagctaacattaaatggttccactcattaacactggaggaagacctactactttgtaataggtcgagttaatctctcttcattgtttagaagatggaattacttttcaaagccactgtaatttgtgaggtcgtatataatttgatgacactgaaacataatagcagtacttttagccatatcttcagtgaacagtgaaaaaaggaacatctttcatagaagtttagattttctttgtgactttacctcttacatcaaaagctctttagtagagatgaatgtggctcattattaggattctgtctctctgtgcactcggtttggtaccaagtctcccaaagcagttattaacccatacaaggcttggggctagggcttaattggtcaagtgcttgccttatgtgaggtcctg

SEQ ID NO: 22393 - DNA, 1150 bp, Mus musculus
gacctgtagagaataataactataaacaaagttttcggtcaaatttagagttatttgcaaaatattctttgctatcaagaagggaattagttggagccaacaaaccccatagcaaagccagagaaacacagagctcttggactttgaagctgaggagaagggtgaccctagaggaagaccagcagtctcaactaaccactgagtaaccaccaactaaccaccaaccaggcagcatacaccagctgatatgaggccccaacacaaatacagcagaggactgctgggtctgggttcagtcagggatgatgcacccctaaccctcaagagactggagaccccggggattggggaggtctggtgggaaaaattaaatcatctttgtatatccacgtggcagattgccataaagccccttaaataagattttagaggcagaatctttcaggattaaaaagacaagactatgtaatattataaaacttaagtgaaagttaggtacagcatatcagcctgccttcctgtaatcctagcacagggggacgaaagcagggaggaccaagggttccagtcccaaatgcaaggccagccagggcagggtaggaggagcctgtctcccatcacagaaagacagaaggattctgcgttgaaaaatacagtaagatcagactagcaaatacacagtactacacaaacaaagagaatgggggggaaatatcctaaactaaatattatgcgttactctccagatggagaacagtattagaagagttttaccctttgagcatttcctaactccttgaagttggatatctttaaggcagtcttagaaatttcctctaaaaatcctcatatttctgctgaaaaagatgaaaaccaatagatttatttctgctgcaagcacatccgcgtctccgggtcattgcccttctcttaagcacgtgcatttcttaccacacacatgatgtacgacaggattgcaccagaggagccgatgagcgcgcccacgatggtcagcaggttgttgttgagcaggaagccctcggcacacagagcccagcccgagtagctgtttagcacggtgatgacgacaggcatgtcagcaccaccaatagcagccgtcaaagtcacaccctagccagaaaaaaaaaaa

SEQ ID NO: 22394 - DNA, 1168 bp, Mus musculus
ctggcaagttagaaggggattttgttttgcatgttttgtcagttcaggtgttagttcctactttaattgttttaataatctgttttattttatatgtatggatgttttgtgaacaagtagtatatgtggaccacatgcatgcctggtgcctgcagaggtcagaggaaggcattggacccccaagaacaagagttacacacaggtggttatgagctgccatgtgggtgctgggaactaaacccacatcctccgagacagcaacaagtgctcttaaccactgaacttttgtctgccaactcccagatgttctctctcaagactctgtctggccacactttctatacttacttccacatctgaatgttccttttatcatgggattatgagaagagaactttaattttgcttgcagatattgtatcgtagaagtactttgagcacctatacagtttgttacttagcaggtactccgtatgcggtttgatttgagattcagtcttcctgtgtagtctagactgacctggaactactgatccaatcagtctagtctggatttactggtgtgtctgtctgtctgtctgcctgcctctctctctctctcttttaatgtatgtgggtacactgtcgctgtcttctgacacatcagaagagtgcattggatcccattacagatgtttgtgagacaccttggtgtgtctcttgaaaggctagggggtacagtcttaccagaaagaacaattccgtcacaggaaagtttgaccttgtgtgctattttttatactcactgactctagaacttatagtctttcataaactgcttctctattttacttattatttctaatttgagtttacttggaaaaggataaatctcatcaagcaatgtagtacttgagcataacagataaactttagcatgctttggatagtattccatgtgatgagagcaagaaggatgttattctagcctgttataattttgcataattctatcaagactcctggcattaattacaaggttagcagctgccaaaaattgaatatttcagtgggaaaaatagtattttaagactacggatactatcaagattggttagaaattgcataaagcagccagaaagtctcctgccatgtacgttatgatgtaattttatacttaaacatttca

SEQ ID NO: 22395 - DNA, 1212 bp, Mus musculus
gttttgtctgagtttctatcctggtgggaggtactgataaagtctatgaggacaaaagatatgttaggatagcaattatggatggagtagtttagcttaggtgataaagttgggccttggtgcaagtggtatttgtgttgagatgtgagttctgatgaagagtttgtgatatgataagcaaggagacgacaagctagacagagagagcagggcaaagttcctgagatgagaaacaccttctttcaagagcaatctctacaaagccagtgtgattaaaatgatcagaacaagggaattaggaagtgacatttggagaaagtggtgggctagcctgtgtggcctctgcaggctgtagtgtaggactattgatctaattctgtgtgcaaataactaggattaatgggctccagctaaagaatggatttaggggatgctgcagaaatctgcttttggtgggagtgcttttgttatagtttaatcagattctgtttctctatggaacaaagacatagaagtctatgctgctaccggtagcctgaattgtgcgtaccttatttgcatatttaaaaataaaaaaaaagatgaggatgaaagtaaccatcgttattaggtaaggtcttgaagagtctttgatttaagtaatcaataagaatgattaaagtaacaacagagatggcagtagagaagaaacccttactaactgtcttagttagggttttactgctgtgaacagacaccatgaccaaggcaagtcttataaaaacaacatttaattggggctggcttacaggttcaggccattatcatcaaggtgggagcatggcagtatccaggcaggcatggcgcaggaggagctgagagttctatgtcttcatccaaaggctgctagtggaagactgacctccaggcaactagggtgaggatcttatacccacacccacagtgacacacccattccaaccaggtcatacctattccaacaaggccacaccttcagatggtgccactccctggtccaaggatatacaaaccatcacactaacctaaagtggggttggaggaggatggagggaagagtttgggagaggggacaatctacaacttagtcacagaccaagtaggtctagtaggatgaggtcttaagatattagtacaaagacattgatggccattgtggatggattaatgccagtggaaaggcagaggagaaag

SEQ ID NO: 22396 - DNA, 1197 bp, Mus musculus
aagtacctctaactattacctccacaatcacttcaacaagacagaggatgtttaacctagtgagaggagccttttatgcccttaatagaactgaaccaagcgctactgaggactgctggctatgcctgtcctcaggtcctccttattatgaaggaattgccttcaatggagatttcaacagaaccaatagccatacttcctgctcttggggaacaggacaaaaactgaccctgactgaagtatccgggaggagtccaggtctctgtataggcaccccaccttccacccacaaacacctatgcggacaaattcaatcagtgtccaggacagaagctaattactatcttgtaccttccctggttggctggtggacttgcaatacaggacttactccctgtgtatcaactaaggtttttaattcatctcatgatttttgtgtcatgatccagctgttaccctgcgtatattatcaccctgcatccagtttagaagaaagctatgctggccggcggtcaaaaagaaccaattactttaaccctggctgtattcatgggaataggtatggcagtaggagtggggacgggagtgtcagctttgatagaaggaagacaaggaattcagtctttgagggatgctgtcaatgaagacctagcagcaatagagaagtccattgaccctttagaaaaatcttcgacttccctgtctgaggaagttttgcagaacaggagaggccttgatttgttgttcctaaaggaaggaggactgtgtgctgcccttaaagaagagtgctgcttctatgcagatcatacaggaatacttagagattttatgcagaaacagagagaaagattaaagcgaaggaaacaggaacgggatgctcaacggggtgtggtttgagtcacaaccatcttggataatttctttgatttctgctgtagccggaccagtccttatgatatgcttagctttagttttcggcccttgtataataaatagaggaatggctttcatccagagtagaattgatacagtaaaactcatggttcttcaaaggcaatatcaacctatatttcaggtagataaagagttaggggacaccaatctctaaaattctatgattagaattagtctaaacagaagaagagggaaatgaaaggaaattaaacaaataaaaagtttaaactaaaaacgtctggg

SEQ ID NO: 22397 - DNA, 1195 bp, Mus musculus
tctgctgtgtgattagaaggaccagccatatataccagagttaggaccctggtcttaggcaactggccacaatggatcttctttagccaagactcaatgtggctaggcttcgtaccttccacattttcactgaggaactggagcaattggtcagttgcctcctttcaactccagttgccctgccttttggacacctgaagactacaactcaggcatggtttgtggggcttaacaagtcagcctcacaatgccagtgagccccaggcacgtgagcgcacgagggctgtgccgttgagggttctgtgggagcagccctgtccaggaactgctgctaccagctcaccacaggctctgtttgaacaacatcatcccagtttccaggtgagggaacggaggtgtagagagaagaggtgatggagccgaggatacgcccagaacctgtcctttctgggctctccctgcctttccttctaggcctagaagaggaggagatggggggtgggggggagttccaggccaggaactttgagaaccacagacaaggcatcatgagatcaggacatctaaacagggctgagcacatgacccagaaaatctgctctgagtaccatggtccttcagccaggttcagtcagctcctgactagtctctggggagcgctgtgggggaggggctccttggggctgtgtgagttttactgctcagctcactgatgtcttgcttagtggagagctcaattctgtatgccctgggttcacagtagtgtggtggtcaggaggggaggccttggagtggcctcctaatggctctcctaatgaatggcttagctgggaactgacaagctgaacagttcaactgcatttaagtccaccaagcacttcttttcatctctggttagaaatgacacttgaactatgcttccggctctagggaggaatattttacatactatgaaaattataggtgaatgaatgcaggaggagaaagagacttattaagcacctactgtgtgccagccttcacactcaactcttggcattctctggccttaccctcacaccactctgtcaaatcattgattataattcccatttgtcagatgaggaaaataaaggtcagagaagcactgtgttgtccaaagagaaaaatgtagttgagctgctggttccatggccagtttttgttttgttttgtt

SEQ ID NO: 22398 - DNA, 1157 bp, Mus musculus
ggtgagaccctctcaaaataaattaaaaaaataaataaaataaaaaggtcagtcccaaaggagaataaagctttcttaggcacaaaagtgacccgccagaatctattctagttatacatggtataatacacatgtggatcctgaaatttaaaatggcacaccatttactgtcacatagaaaagaaaattggtgtgagtgtaataaaacacacacatgatttataatctaagaactaaataaaaggcctgagtaagaagagagactggaacaaagtcatgggttctccttgaactgtcacagtgcattgcaattgaagttttggcaatgaactcagcctcagtatacctgcctagtacacacgaggtcagttcctagcaccaaaaatcaaaataaaaagaaaagaaaacagaattttttttgtaggtgtcaacaaaattccaagtatatgtcaaaagaagaaaggcaagggagctgaggcacttgggttttgaaagatgtgtgacaggaatcagtacggtgtcggaagcacagcttccaagctgctctgacattgctggaagattctagcccaggtggaaccctgagttccagggcagccagggctacatagagaaaccccgttgtaaacaacaaacaaaacattacacccaagcggctagagatggccactggctgagaacattggttgtgctaccagaggatcagggttcaagtcccggtgcccacgtcatgactgaagtgtcccacgggatccagtgtcgtcttctgttctccatgggtaccagacacacacgtggtacacagaaatagaggaataaacgtccatacacacaaaataaataacttttaaaaatagaatcatacctaactcaaaaatcagctcaaactgaaccatttaaatatgcaacatgcatcaaacccacctcagagggaaaacaatgagaatctgaatatgaatatgcgacatgcatcaaacccacctcagagggaaaacaatgagaatctgaaatctagggttaggggaaaaaagagttctgggatttgacaccaaaagctcaagaagagcaaaaaattacaacttcatcaaaaattaaaaacaaaaccaaaccaaatcaaacaactcccccaaaactttcaagtcttaaatatataccta

SEQ ID NO: 22399 - DNA, 1156 bp, Mus musculus
agcttcatgatgcagaagaatatagccaactctatatgaaaaataaatattcaaaacgttcctgttataatttactccgaagggatgtgctggtaaatcagtgacagaacataggctcagtacccctaaggtacacactcacattgtatttgtctttgtattctataccatagacaggttctcagccaatggggttgctactcttttggggatcacatatcagatgtttacatacgattcataacagtagaaaaattagttatgaagtagcaatgaaataattttatgattagggggtcgccacaccacgaggaactatattaaaaagtcacagcattagggaaggtactaaatatctgagaaactcctgcctgagaggtattgccacacttgtggaatcaagttaactaaatagaatggcttataaaatgtttgtaagcgagttctggcagtaagcaggctggtgtgggctgatcacatttcactcccccctctttccaggggagcagggatcggtgggcttggcataactgtggaggggccgtcggagtcaaagataaactgcagagacaacaaggatggcagctgcagtgctgagtacattcctttcgctccaggggattatgacgtcaatatcacgtacggaggcgtccacatccctggtgagctacccccttgggcagtgcttcaaagaataagtgatagcgcatgaaaacagattaaagatggttttgcccatcttcctttaatagaacagtgtgactttggagaaaccttaaataaggaccacagcaccaagaacactataaatctcattcgaacccagcaacatggtagaaagcgttgacttgggccttcagctagaaagagcggctcgtgtgacttagtttctgatttaagcaaaagtttactctttacaatattgaaaatctctgtttttaaagtttttattgttgttgttattattattaatatatatttgtggttgtaggagcttagttatggcatgtacacgtaggtatccatagaagccaaaggattttgaatctgctgaaattggagttacaacagttctgagccaccctatatgggtgccagaaattgaacccaggttatcaataggagcaataaatgcttttactcactaatccattcc

SEQ ID NO: 22400 - DNA, 1204 bp, Mus musculus
tccactgccagtctgtgtcagtgcctaacaactggttgagggcatgtgtagtgagagctggggacctccttctggcttttcagagctgtgtctcctccccctggctttgcagggatctttttcttgggctgctggtgcctgttggcctcagctcttgttctgtcgtttggagctgtcccctcaaccagatgcacactacttcctcttcccactgtgtgagcagctttcttagcattccctgtcgcgcccttctgcacattttgaccagtgtggtttcccttcataacttgttatactgcttaaaagtgagagacaggccaactggctggctgttgtttggggaggggttgcaaagctaaacatggttgatccagacactcctttgagcagcacccttgccagtgctttgagatgcccctctgcctggcaaacatagacagcacaacatagtatggcctgttctgaggtaaatatccacagccaatgcctctggtcttttttacaggtcctggtattgcccccactgtgaaaactggcgaggaggtgggctttgtagtggacgctaagactgcagggaaggggaaagtaacctgcgtgattctgaccccagatggcaccgaggctgaggctgacgtcattgaaaatgaagatggcacctatgacattttctacactgctgccaagccaggcacctatgttatctatgtgcgctttggtggcgttgatattcccaatagccccttcacagtcatggtaagcagggttccttctcctgagccggctcttactagcagaagcagtcacaaccgtcatttgttgaacccttatttggccatcttccctcacacccttgatcctaggtatataatcgctagaagcagcaattttgggggaaatctcttgagtcatggaggcatctggcatgccaaggaagttaggcaatatcctcctgtaagccagctcagagggagacagtttcacaggaacattggaaaacagtactaaagatacatgtgcctcttttcccatccccactgctggagaagggggatcctcatgctcttgtctacacacttgactgatatctcaggatgcacagagcctccagccgtgtttgcatgagattcagaagggggaagtgtgttgtcttttatagccagaaagatctggaatagaagggaactattgtgtgaacatcccaggt

SEQ ID NO: 22401 - DNA, 1132 bp, Mus musculus
gtgcggttttcccccacgttcaaagagcaagatggacggctattggcaggcctcctcctgactccaagccaccacttgtgcatctggtttctgtctagggcaaagccacccgctaccactctgtgccacttaaaacacaccttcttttctaggccacaagcaactaaacctctccaggtgtggagcctcttgggactcagtcattgctctctgccgcctccattttcctgtgggcgacattgggaattctacaagcaccctgttgaccaagtgttttctagcaaatgatcagtggaacttctcagggccgtccaactctctccaggcccagtcacacaaagccccataaatactcgtggccacacccccaaatttaggcctcattgccttgtagagttcccagtggttccgcccccccatagctcccccagcccacactgctgtccggttaccaagtgaacgctctcgtgtttttaggttacagaagaggcctatgtccctgtgagtgacatgaacgggctaggcttcaagccctttgacttggtgattccatttgccgtcaggaaaggagaaattacaggtaaacccttgtggggctcaccttactctttatttgttgttgcatctgaggcccagagcagtgcttgggcggtgactactgtcccttatttccccagccagacaccagaaagtgtttctctgaagaggtggttgtttatagcttgcattacattgctgaggaagcttgtgtttctcctcaggctaggaacttctttgtttagatacctcttgctgccaggtttctgtttctttttccatgctttctctaaccactcactttccaacctgtctgtcactcagatctgtggtatcagttcccttctgggagcccagcctcccttctcctgcttctcttactgctttgtggtcttctcagaccctctttgcacttgtaattggcctgttagagataccatgtatttatttatgagctaattgcttgctgcattttgtggaaaccaggtggaagccatagaaagccaggcagtctcagttttcctggggggaggggggggcacttggacacttcaggcagcatgagtgttctgggatctgaggacctctggtgaag

SEQ ID NO: 22402 - DNA, 1145 bp, Mus musculus
cctctttctgtttctctccaacagacacacacacacacacacacacacacacacacacacacacacacacggcatctgatagaaagcatgtggtgttggtcttcctgagtcagcttgacttcagttaatatgataatttccattcatttgttttcttgcagatatcctgatttaaatatcctgatttaactttttaaatattatttcattctatatacatagcccattgaattgagttgtgtacagaaagatatttagtttagttcttctgcatgtcaaagattcctctaaaagtgttcacagggatttgtagctcagattccttccagctccttgtctccccctgaaccagtcataaccacccattgtcctgccgtggtcattatatactcattgtcagaggcacatgatcttcatacacctgtgggtaaaagattcttgacgtcacatctccaagtgccatgtagaccatgttctctagacagcccagcgagcacatgtaataggagctctgttgctttttctcagatgataacagacgctgctcccaagtgaagctgggctcagctgctgacttccttctggacatcagtgagacagaccttagcacactgacagccagtatcaaggccccatctggacgtgacgagccctgtctgctaaagaggctacccaacaaccacattggtgagctttggccagcatggtggggtgtgggagggggagcagagactccttaggaagtgggtgatccgttggaggttgctacagtaaacctgtatcacacgcacgcttccctatcagtgttaacatctgtggacgttggattgttgcaacataagacagtcctgtttccaattttgagaataagctgtattagtcacttttcccactgctgtgacaaactaccctgcaaatgcagcttaagaacggagaggtgtattttgactcatagttcagtgatacaacccatcatgatggaaatttttatgtgacagagagcaaaacagatgaatgctgttgctctgcttgacttaatctttattcagtctggaaccccagccccggagagagcccaacattgaggctggctctccccacctcagttaacctaatctagaaaggccacccatcacagacatgca

SEQ ID NO: 22403 - DNA, 1981 bp, Mus musculus
ctggcatgtgagcccaaatcaggttgtctctactgatcatggccacgatttgccaccagtgaaaggactctggtgccatcatcccagctcggccagttatccctcatctctctacctttgtcacatctctgcttgtcctgattggtcaggtcagtaacaacctcctcttcccgcagggtccaacatgctgttgattggggtccatgggcccaccaccccctgtgaagaggtctccatgaagcatgtgggcaagcaacagtacaacgtcacctacgtcgtcaaggagaggggcgattacgttctggctgtgaagtggggggaagagcacatccccggtagcccctttcatgtcaccgtgccttaaagcatctgatagccaatgctggacgtgtcccttccggttgcttttgttgctagtttgtaattcattttttacaatgtccacagcctgctggtgggccagcgtccccatcccaaaccttgccgctcactccaagtgccttggtgccctagacttgactcgaggtcatgtgggacatcttcagaaagcaagctggggccaaaaaagtgcagagccctctgcccaaatcaagactcttaatttcaaaggtcattgcagacggaacaagaacatggacaggactgactggctctcctaagcttctggtctactcaagcgataaccaaacaagaatgtcattgcagaagggggtcctgcaccccacttgccaaagaacagtgcaacccactttcctcaagactagacaacaaataagaaagtctgacccagattatactccatgcctgggcttcgtcttggggccctgatcactttgacttcatcctaaagccagctctggagcagaaggcatgcagaacactccataccccatttttggaattctgtacctgcctacttctttattaacagccttgaaggcatgtgctcatggccaaatgcagggcctctgccagctgcccccagagttcattgcggctgctaaatggcagagaccactgataaattatttcaggacctcctccttgcaaaagctggaagggatgggtacccctcttatgacccatgagaggccttaatgaccaagacactagcacgtgcacccacctgaggtctctaaaggttttggtgtaagcattgtcaggctgtcaaatggctggagcgagtgttacacacacacacacacacacacacacacacacacacacacacacacacaatggggtgtggtggttctcatgaatgtggcaggggtggagtaggtgtcccgcaccaaggcacagcagctggagaggtgtgggtgctaaaagccacctgttaggacctggagcagctgaagccggatgtgaaaggcggaatagacacggagaccgaactggaatcaaatgccgactataaagtgtatcttataacttattaaataaaatgtttgctccataaacgctccctgtcattcttggagtggaatcagtggtgtgggcctctgatcactccccacccaccatctctttgagtgcagatgttatttaacaatgggccagtccttttcttgcaaagggtggtccttttctgagaagccagggccaacctcaggcaagggactcaagagaacatgcgggccatgataccatcgtgacttcttaggaaccctagatatggagcccaggtagaggcaatggcttttaattaagcaggcctcttgcctgataccatcaggaatctgtgttctgggaaatgttctcagataggatctctcacatgcccctgcacccttcgacccagtactgagtgcctccacctgccctcccgaggagaaacgattgctgatgttaaccctccagctatgaatccttatagtggtcgggtgacggtttacatatgacagaacaaacatgggtacagtttccaccaggcatacagcccagacctcatatggggatagagttgggcatataccttctg

SEQ ID NO: 22404 - DNA, 1123 bp, Mus musculus
gaaatttaggctgcttcaggagaccatgtttatgactgtgtccatgattgatcggttcatgcagaacagttgtgtgcccaagaaggtgctgcagctggtcggtgtaactgccatgtttatcgcaagcaaatatgagatgtaccctccagaaataggtgacttcgcctttgtgactaacaacacctagctaagcaccagatcagacagatggagatgaagattctcagagttctgaacttcagcctgggtcaccctctgcctctgcacttcctccgcagagcatctaaagtcggagaggttgacgtcgagcagcacactttggccaaatacctcatggagctctccatgctggactacgacatggtgcattttgctccttctcaaattgcagctggggctttctgcttagcgctgaaaattcttgacaacggtgaatggacaccaactctgcagcactacctatcctacacggaagactccctgcttcctgttatgtagcacctggctaagaatgtagtcatggtgaactgtggccttacaaagcacatgactgtcaagaacaagtatgcagcatctaagcatgctaagatcagcacgctggcacggctgaactgtacactagttcagaatttgtctaaggccgtgacaaaggcataactccaatggactgctacatctgcagatgcagttggcaccatgtgccgcctgtacataggatacgtaccgtgtttacttgctcttcaataaaggttgtgacttctcattttacatagcttaactcatttgaatgttgttgcttccgagtttaggctaatggaagttgtcgaatttaggagtatattaaaaacttcatctagttttaacagtggatccaactaatgtatatatctgtagcctatatgtctatatacatccttcactgtgtgtccttatatcatcatgtcttctgcctcactctagtttaaactctaaatctaccagctagtcctttgttccattttccagtggttgccacctttaaccactgtctcttgggttgtcaactttcagatctgaaaccaagtatcttttttatgtaattatttatttgttcctaattggaaaataggatgttcaaaattaa

SEQ ID NO: 22405 - DNA, 1324 bp, Mus musculus
tcatggaggccagaaaaaggtgttggataccataggactagagttactacaggaagtgtgagctgccatacgggtgctgagaatcaaacctgggtcctctgtaaaagcaaccaatgtccttaaccctgagtcatctcttcagccccctatttactttatatccttcattgtggagctggccctttgggtccctggcatttcttctcaaacttagagtgcttgagtgaatccagtagtttctactgtggtccttctttccagcctaacctttgcctgcatagagaaagctctttagagaggtggtgaccccaccctgactcccttctgggattgcacttacggaattctgggccacaccaatggctaatgtcttggtggtttccccttgtccacaggtgaagaggatccacgtgtggaagaagacgaggaagtgctgactctgttgtatgacccatgtctcaactgctactttgaccctcagactggcaaatactacgagttggtctagctccttcatcgtaacagcagcgtgaagtccacaatgggcaccgtgactgggtgttgggcatgggggcccatggagtcaaaaggaatggagagaagggctttgtaaatagcatttaatgttaagaacatctgcattctctttgtagctgagtgcgtggctttgaaagttgtggaggaattaatacagacaccagattttaggctttgaatttgttcttagttgttcattccagtcctctaagtctcatttcgtatacattatataagcaaattaagaattactcattcaaatttttccagtgttaatcgataataaatgatggcttgatacactacagaaagtgtattcttgtttaaaagatgtctgaaacctttttatggcgtgtttgtattaaaaataaagtatagaggccaagagagtgcttccttttgttcaccctgttgtccttaccacattattcctaggcaagttgccattgctttaactccttggaaccgtgagctgctcagacttatggatcaggtttgtgggcgtgacctcactatgtgctttcagttctcgctcctccagagctggccaagttcacagccttgttaatcattaagctgctttgcactgtaattttcttttactcctcctaacttttaccactgatctttgaatcttaacagtctcactccatggatccagatttaacaaggagttgccatcttaacacccttccattcctcactgcttctgtgacccatggctagagagagccaggtggcttcctttgatctttaaggtacatcagagcagttctgctcttatcac

SEQ ID NO: 22406 - DNA, 1152 bp, Mus musculus
gagaaaagccagttgaggtggtatgcacttgtaataccaacacagatgaagcagacagtgaggatcagtgatgtctgaaagtcagccagcacatggtaatcagtgcatcctgtatcccacaagagactctatctcataaaccaaggtagacagctgagaaaaacacccaggcttgacctctggcctctacatgcatgtacacacacacacacacacacacacacacacaaatgttcaatatcattagtcacagggaattcaaataaaatcatagcaagtgtttcccattgaagctggctgaaatgttaagttctagtgacctcaaaaagatgaaaatgtagaaaccctgcactaactttaaagagatgtttctgtcagcttagtgaatcagtgatcccattgctagttatgtaccaaggagacatgagttcttgctcaccagaaggtaccgcaggcatgtccaaaaggcttgagttatcaaaactcaaaactgttgatgacaagtagccttggtttctgttgcttctgttcttgcccttgcctttcgccatctggttgtctctggtgttagctggtcttgctgtctctgaatgtggcttgtccctcctgcaagcctctctgtcaatactcgtgggagaccagctttctccgggaggaatttaggtatgaagaactgtggtacagggtcagctctgggatgaagatagaaaccagaaggatcctgtctccagctgatctttggttcctgtgtcctgatggctctggaagggtccctcttgggtcaagaatttgaaaagatgtggtgatcttacctgcactcacaggcttgtctgcactccttggaggccagctctcttcaggcgctatttgggtatggagctctgtggcagaggatcggctccaggcacagacagaaaccgaaggctcctgtcccaggccactcctctgttcctgtgtcctgaggattctgggcaggttcctgaagctggaagcaacccagatgtccctcaatagaggaatggatacagaaaatgtggtacatttacacaatagaatactactcagctattaaaaacaatgacttcatgaaattcacaggcaaatagatggaatttgagaatatcatcctgagtgaggtgactcttttacaaa

SEQ ID NO: 22407 - DNA, 1429 bp, Mus musculus
tgccccataaggctgtgcagtgaagacagtaaccctctgtcgaggcagagaaaagaggtgtaggtactgtggccagaggggtctcagagcacagaggaaaaatgtttcaaaaacccagaaaagggatcatttggaaatgcaaaagaaaatggagatgcttagagtggattggatttcctcctcagagggagaggcatcctgtcacctcacacggtaccagagctccacctgctgtacgagaaaggcaaagaggcagagctggggctgtgaagggctttccccaccccacaattagcagttgatatttttgatcttatgtttctttactcaaaccaagttgttgactttccttattctttcactccactcatcccttgtcttcctgctaatttcagtttgaaagatttatgttatcatttcaaaagttggcaattcaaagaaaacatgattggaaagtatatttgctggtttgttgatgtgtctagaaatacatatacataaagtgcagtttagatgcttggtatacctgcataaacatagcatgcctgtattaaacatagcatgcctgtatgaaacatgggatgcctgtattaaaggtgtgtagcaaagagtggagaagagagaggctgtattgccgctgaggagaacagctctggctttaaatacttgtgttctctgacattaatttgattgcctccgtgggaaagttatttaactttctttgtgagctacagtttctccaataaaaaaaaaaatcttaggataatgacactggcttttttctgcctcatagaattcttatcagatagaagctcaggtaatgcccaagttatccagccaccacactccagcctcagccatctgtaatgaagctcagaaccagaaaagggctgcatgcatgagaaaggctaagcccaatgtcttacacttggctataaattaaacctatgagctacagtactgccacaacataaagctgggatgtaaagtaagcacagtgagctgtttttgtgtgcacttgggtgtgtccatgtgtcttctctctatagttacatagagtttttaaaaggaaggcagaagagtacaatatgagtatacttgaaaattcatcacacacataactggagaaggtgcccagaacttggggtaatcaagttgagattttagtctgccacagtactgtataaagcctttagcaaatgtactctgaatcatagttagaatgttctttaaaaaaatcttttatgtttgtgtacatgtatatctgtctgtgtatgtatgccatgtgtggccaatccctagatctggagttaaagtgggatgtattttattcaatgtaggtgccaggaaccaaatgtagtttctctgagtgagcagccaaagcacttcactgctgagcaatctctctgtcccagaaagctctttttat

SEQ ID NO: 22408 - DNA, 1706 bp, Mus musculus
atgtctggcttctaaaagtttaggtcagacttgcatcagtacagaggttgcacctctcgactttagaccttgtgtcttagttagggttttactgctgtgaagagacaccatgaccatgccaactctttcaaaggaaaacatttaattgatgctggcttacagttcagaggttctgtccattatcatcatgaccagaagcatggcagcctgcatgctggagaaggagcctagagttctccatctgaatgaccggcaacaggaagtaaatgccattttgtgcatggcttgcacttctgaaatctcaaagcccaccctgcagtgacatacttcctacaacaaagctgcaccttctccaacaaggccacaccttctaatagtgccactccctatggccaagcattcaagccatacctattcaaaccactacacccaagaacagagcccccagtgaccagcattttaaagacattttcttacctcttatctgaagttcaagtgtagaggaggccacttgtaatttatttagtataatgccatatttctacctttgtgggaagctttttaggaacaagactaactcctgaagcaaggcagatgggaatcaattgctgtaagattgtgaagcaaggcagatgcaggcaatcaattgccgtaagattcgatgagctgttgctaggagctgactcttgcttcctaatccctctccctgtccctgctctccctcgtgcgttcttgcccagtttctgcctcttccttaccttctgtgtctttccatcccttttactcttcattgccgtgtgctttctcctttctgtgtggtcatttactggatcctcttgcctgtcctcctccctcctgtctactcttgggaggaaacttactcaaggggacaacattaccatttgagggcccaacaagatgctaaaggacatgtctaccaccctggatgctaacctcagacattttaagcctccaaagaagagaatccaggctctgagacctctctctcctttactccctcagcacgaaatcaactttatgttcaccagctctcaagcctattgtgctcaaccccaacacacacacatacatttcagtccaaacaatgagtgtattgctatgtactgggcgatgggtagcactgtcacttggggaggagggactctcatgtgtagctcttgctaattcctgtggtgtaaattctcccaccacagctgactgcaaactgttagccggatatcagccatgaggacctggatgaagatacttacatggagtctcataagtcagtcaggcctgtctctagaccacagttaaggaagggtcctcatttgcaccgtgattccatcagtacacatttgaggttagccatcagtgtgtgcattgctgtaatttaaaacagcagatgactgttcacactccaacagactcaactaccgtggaaatcattaacagcagcagtatatgataattgtcacagcactaccttttagtctgattaagtacaagccaatcgcaaacactgccaaaaatatttaaacctttcactaatttgcaaactgttactctctttcatgtgtctgagctcagtcaaaataccacttaaattgacataactttttgaaatataaatgtcataagatttttattaatattcagttaaaagtataatatcactgttaccttatttcttgtatttacatttc

SEQ ID NO: 22409 - DNA, 1099 bp, Mus musculus
agccttccagtcaaggatacaagaagagggtttggaatctccctccacggctaagaaacgctgccaaggtcaggcatgtgtcaagagagtgcttgtatgagggcacagagaggcccttgagtgaagcttgaaggtgaagtctgggctgccaagatgttagagatgccagaatcatgggatacttgcttaggaaagctgcagacctggtgtggaaacagcccacgattgagaaatgtgttgcactcaacaaagctgaaagaagttggagctatgaagagcactttgatgtcagacatggagatgcagagcttcgagtttatccagctagttttcagtctttggtctagtatttccttgtctgctccctttactcccttttggaatggtaatatttatttgccattataagttagaagtatgtgacttgctttttaattttgattttacaagaaaagattttgatcttttgacttttaaacagttttgtgactgtgatagactaaatgcattttgcattatgatatgactccaaccctttgatggtcagggagtgggatgtaatggtgtgaacaagaatggcctccataggctcagacatttcaatgcttgagagggattaggaggtgtgacctttctgggataggcagagccttgctggaggaagtatgccactgggatgggctctgaggcttccaaaaccccagctagtcctaagtacctttcttcctgcttccttcaggtctggatgtagtactctcaactacttctctagcaccgtgtctgactgagtactgccatgcttcctaccataatgataatggactaaacctctgaaaactaagagtttccatggccacagcatcccttcacagcaatagaaaacaggctaagacagctagtgtccatcagggtagggaagggcaagcatggcagcagaggccagaagccagatggtcacatcatctgcatgtgggaagcagagaaagcacagaaaatagtgcattctaaactttgactgtacagagcataggctaccctgattaatcctggaactttgtatatcactgaggtagccttaggattccaggcaacagaaata

SEQ ID NO: 22410 - DNA, 1198 bp, Mus musculus
tgcctaaacttattaagacagacaatgggccatcttattccagtaaaaactttatttcattctgtaaagaattcggtattaaacataaaactggaattccttacaaccccatgggacaaggaatagttgaacgtgctcatcgcaccttaaagaattggctttttaagacaaaagagggtcagctatatcccccaaggtcaccaaaggcccaccttgccttcactttatttgtcctaaatttcttgcacaccgatatcaagggccagtctgcagcggatcgccactggcatccagttacttctaattcttatgcattggtaaaatggaaggaccccctgactaatgaatggaagggtccagatccagttctaatttggggtaggggctcagtttgtgttttttcacgagatgaagatggagcgcggtggctgccagagagattaattcgtcagatgaacacagattctgactcttctggtaagtatcattctaaagactaaaattccttttgtgcttaaaattcagctgagagcaacagctctcaaagctgtttgtgtctccagctactctctgaaccagctcccgacaggaggccggagactagcctcagctttacaatttgcatttaaataaagtacctagacttccccgaaagaagttctgctttcctactttctcactgtctttcaagattttgtctttcaagcaggtaaatcaacattcccgaggcggaccagcggatgtgcatccccgcccccctagagcacacaggcggcagctgttacccccagtctcaggacatttccagcatgtggctttcagtctgagttaaaaatttaggtttacctagagggctagaagagtagatatttccatattaataaagattggtttttattttgatagacaggcttagccccttagctgacctctggcttttcacccttgctgttactgcaaggtgtccttagctcaataggctgtggaaaaaacagggatgaggaggaacgacttccagctcctattttagccacaaatcgtggtgttactaacgacataattcttgcttaggctttgctaattctgaggttgataattctcctttaggagctgcacagcactcagaactgtgcatactggtttgtgattgtacaaattcagtatgggcaccgcttggtgcagagatacttactgcaag

SEQ ID NO: 22411 - DNA, 1824 bp, Mus musculus
gaagtatgttggaatttttgtggaaattatattgaatatgtagattgacttgtcatagaggtctttcacttgctaggttagagttaccctcaagatattttacagtgcccactggctgctccgaaaagccatctttgcattgttcctgggtcgtgctccgcgctcgctgcagccaccttcgccgcccaccgcctcctccagcgcggactccggcagctctctcgccagagtcctcgaactcgactttaattccctcactcgcggcatcggaccaccggcgtgccccaccatgtcagacgcggcagtggataccagctccgagatcacctgaccaaggacttgaaggagaagaaggaagttgtggaggaggcagagaatggaagagatgcacctgccaatgagaacgctcaaaatgaggaaaatggggagcaggaggctgacaatgaggtagatgaagaagaggaagaaggtggggaggaagaggaggaggaggaagaaggtgacggtgaggaggaggatggagatgaagatgaggaagctgaggctcctacgggcaagcgggtagctgaggatgatgaggatgacgatgtggacaccaagaagcagaagaccgaggaggatgactagacagcaaaaggaaaaataaccttacgcaccgtgacctattcaccctccacttcccgtctcagaatttaaacgtggtcaccttcgagtagagaagcaggccccgcccgcccacagcgggcaatgccacccacagatatgacatgcgctctccaccacccctccaaaactacaacatgaattggcaacatgggaggaaaaaagaaccagaacttcccaggccctactttttttcttaaaaatactttaaaaggaaaatttgtttgtattttttatttacattttatatttttgtacatattgttaggggtcagccatttttaatgataacgggtgaccaaaccagccttcagagcgttttctgtcctacttcagactttacttgtggtgtgaccatgttcattataatctcaaaggagaaaaaaaaaaaccttgtaaaaaaaaaagcaaaaacaacaacaaaaaaacaatcttattccgagcattccagtaacttttgtgtatgtacctagctgtactataagtagttggtttgtatgagatggttaaaaaggccaaagataaaaagatttttttttccttttctttctgtctatgaagttgctgtttatttttttttttggcctgtttgatgtatgtgtgaaacaatgtccaacaataaaccggaattttattttgctgagttgttctaacaaaaaaaaaaaaagatattttacagtgtttgtgactattatgaatgttattgcttttctgatttctttctcagactgtttgtcatttgtatgttgttgttttttttttaattaatcttgaatcaagccactttgctgaaggtatttatctatccctggtacaattttgatggttgctatgtatatgatcatattatctttgattagcaataatttgaatttttttcctttccaatttgtatccccttgatctcctttagttgtcttattgctttagctagaacttcaagtactgtattgaatagatatggagaggatggacagtctgtcttgtcccagataggtgaatgcttttagtttctcttcatttaatttgatgtcaacttgttgtaaattgcctttattatgttcatgtatgtcccttatattcctgatcctccaatacttttagcatgcaggggtgttgtatcttttcaagggcctcttcatcatctaatgagataataat

SEQ ID NO: 22412 - DNA, 1197 bp, Mus musculus
tagagaaaaactcaaggaatttgtgctgaaattgatctttgatgttcagataaggtgattataccagattagccaggattctcaacatactgaggaactggcttctccttgatgcttcattgtgcactgaagtctaataatctagaaaaaaaaatctgtctggtaatagctggaaatggtctagtctccatcttaggctttcctactatacactgggcctccttgtaagcaaattgcaacacccccccccccgcaaaggctcatttgtgatttacaattccttaatcagaacatgaagaaagagtatacacccaaaataatttctgaagttctgatttactgcttgcgtcatacagtgatagagagagccacaattttagtttcctactttcctttcaaattcacaaggaaggaaaatgtaggaagcaatggaaaacaataggaaagatattcagaacaaataatggcttggggaaaactaaaaaggtatgagaaatacttcaagactgtcccaggggtgccacctgtttctgtcatatggaatgcatggcactatttcaaatccttcaggatctgtagagcttttgcctctaagctaataaacttacaagatacatcatccggccagtccgctatcagcacatcccgcctcagactcttggcgataaggctttatctcccccctccccttccttctttataattcccagctaagctaatgaagcccttttggtgttgtgtgcattcaaatggctcatctgcatgaaaacctctgccccttaattatggaaaacagatattaaaaaataattccatgtcgctagttgggatcaaggtgctagggccaaatcctgacatttaagctcttttcgagcctcccttttgagctcagactcatctgctaaactaatgccactttgatgctttctggcgcttttgagctgctgtcctctcttcccccttacctacaagtggtggtgcatgctaggtggcactgagccaccacaccattcagtaggatatataagccttcaagttgggaatggaattgtaaggaaattggatatggcttggccatccactctcctttcctaagtgtctcatttcgccttgacaggtgtctgacatgagatactgtcagaaccagaattgaaccttggcacgccaccatccattaggatgtctctggataggaaa

SEQ ID NO: 22413 - DNA, 1109 bp, Mus musculus
ctgtaattagtgtgggacagaagttgctatatttcccatgtcactcactcactcagtcgggatactttcttttgctattatttttaggtggcagattgcagtgcgtattttaggacctgccacccactttgatttgaaagcttatgttgtcgggatgtttagctactgcaggtaaagacctaattttgctaaataacggacttcaggatcttgttaattatattacttttgcaactgaaggtgtttctctctaatttgttaagcaaataactaaattctataagagcaaagtgaaacttttcatgtttttggaatccattttctggtttagcatagtctttaatagctttacattaatagaaaagaagtatgggttgctgagcaaacatgaaggatgaaatattttggctctttgcagttagtagttgcctctgcctctgttactcttttcccccttacgttgcttctaggaatggatatgtgctcctttgaaggaagtgtagtgctctttttgcctgttctggaactatggcgtcagctcctaaagctcaagggcaggccgacttttctactgtgtgtgttcacagcaggggaatctctcacaggcatgttcaggagcagggtttttgtggatgcaagcaacagaatggaaggtagctttggaaggactcgataggtttgctacagaataaaggaaaggttggtgagggcaggagccagcatagcgggggaatgatgacttagtgcactagtcagggatctccagaggaacagctgctagaaggaatttgtatatattaaagggggatttattagagtggcttagagctgggtccagctagtccaactttgccgtctcccaacagagaggccgggaacctggtagttgttagtctatgaggctggatgtctcagtttatgttggaatcctaaaaaagtatgttctaatactagtgaaggaacaacctagctgccagatagatgaacctgtcaacaagagtaagaacaagcaggcaaaaagcaatagcttccttctttcatgtccttttatgtgagctgccatacaaggtgtggccccaattcttggtggccattctgacttcaaatga

SEQ ID NO: 22414 - DNA, 1143 bp, Mus musculus
tctaaagacagcgctgagaccctcactcctcagcatgactgactaaaacctgtgcaaagtgatttagtcacagctctgaagacccgaggctagcaatcaaggagtagtgggtcccctgagactcctttgctgctgtagcttttggtagccccttctttgtttccatgggcccattgactcctccttgttctttgcttgtcctccttagtgacacactcatgaggtcacatgtcatggtcacatcctgtgagagtaatcaagaatgcactccgagagcatccttggtatgctcatagattatagctgttaggatgtggattcatcatttggatggggatgggtagtgctgtgccacacactgccatcaccagcagagccagcaatcccgaatgccaggtgccgaacagaagatgaccggctctactgaagccttctggcacagacagtgtgtgctgcctgttttttttttttttttttttttttttaaatcaatgtgacacaaactagaaccatctgggaaggaaggacaaaacctcagttgaggaagctctcccaccaaattggcctgtaggcaagtctgtggggacattttcttgattaatgattggtgtgtttgagcctggctcattgtgaatgatgctactttgggcctatggtcttgggttgtataagaaagcaggctgagccaggccgtggtggtgcatgcctttaatcccagcacttgggaggcggaggcaaacggatttctgagttcgaggatagccagggatatacagagaaaccctgtcttgaaaaaaccaaaaaaacaaaaccaaaaaaaacccaaaaaacaaaacaaaacaaaacaaaacaaagaaaaaaagcaagcaagcaagcaagcaggctgagcaagccaataagcagctccctccacagtttctactttcaagtttccttttgagctcctgccctggcttttcttagtgctgggttacaaaaggctgacatcagtccttcacttccccttgcctcggcttcccttgatgatggactgactggactttataagcggacacaaactgtttcttgcccacagtgcttttaatcacggtgtttatgacaataatggaaacaaagtagcagagcaggcctcacctaggagag

SEQ ID NO: 22415 - DNA, 1099 bp, Mus musculus
ccagattggttgacatagaaacagcattcttcttcaggaacagtcaaagaccaccttctttagctgtcaggacatctatcccccattggttccgaagcaccacggctgccaaagaatcgatctgtttctggatagcaagcacagtttcagtcatttcttgaagatcacttttcaactgggaagtgaatgtattatattgggtcatggaagtcgttatccctgcaattccagtgccagcacctatggctatttccgtaatgaccaagagtggcaagacctgaactgccctcttatgctgggcagctatcatatctacaactgggattggcaggggctcatttccctggattactcccagttcagggaaaaggagtaccaacgtgcaaactcctgaccagctggtgggtaggggatgatatgcctgagtactacagagaatcgatgtgttctggactgcagggcattgtggcagagatgatatcgagggttatgcttctattgcagtctaggaagcacaacaatcctacaggatgtgtcctggatgtctgaaaacagtttgccacgtcaaagagtgggatagaggtaaggtatggagtcatggcaacatcggagtcagggtagttgacaaaaggtgaggttgggttacttggcagtatcactggagatgctgtaagtgacaattgcgagttaattccagggggtacacataaccagcaatctttaaagtgtccaggcctggtgacattaaggagttggtatgcggaggtcaaggtctgaagcaaaaggcgaagttagtgccatttatgaggggtgatatcaaagaggtaaagaccttggaggagtgtttgattatcttccccactttcccaatatccaggggttgggcaattgagacatattttctctggatatggatagtatttactggggaactgggctgatttttatggtagagcttaccaacaactcctgtctcccacctggaatcccatgggtcttgtatgtagaaaaagagtgtcctatgattggttcgtgatcctagcatatgtatctgacaagaccaatatgagccattgtctggccatttgctacaataatc

SEQ ID NO: 22416 - DNA, 1099 bp, Mus musculus
tcctcttagctggctggtcaagtccaagggcgtcgctgaaggctcctgactggtgcgaaggtgatgagatttcgcttctcctgctagctgtctgaattacttctgagcttgacagagatgcagtcttccactcgatagcaagtcagaggcttgggatatctcatttcccttaagttacaccgaccagtcttcatttaaccagtaatttccccctctgagctctgtgtgtggtaaacatgacaggctggtgcccagttccctgcttctttcttatctcaggctctggcttggagcagtggcccagtttcggggaaaattgtgttttgtagggttgctgtgaaggtcagttgtgatggtaaatacaaggtaactttcaggggttccctgctacggcgtttctgcctaagacctagtttctcagccccaatccaagtgccaggtttgatattttgggttggataattcttggtactgggctcatcctgcatattaaagtgggaaagattttatttatttttatattttaatgtatgggtgtttggcctgtatatctctgtaccacctgtgtgcagtgtccacagaggtcagaagacagctttgtatcctcctggacgtggagttagagatggttgggagtcccaatattgatgctgggaattgaacccaggttttctggaagaatggcccttaaccactgagccacctctttaggtccatcctaagcattttagactgttgagcaataccactgtcctgtgtcttagattctactactactactactactactactactactactactactactacacttttttgttttatgatatggaacattttcccagacaaaatgtatccttgccttttgataaaaaatgtacttaggaaaaatatgttgggtttttcttcctttaaaaagttactttattttatgaatatacatgtatgtttttgtatgtgggtgtccccagatgccaaaacagagaatccgatgcatcagttgttagctgttgatgaggctgcttgggcttgaaccctgtttctctagaggaacagtgagccccttcttcagcctaggcatttcttttatttagaa

SEQ ID NO: 22417 - DNA, 1164 bp, Mus musculus
actgttgctatggctgttgtacactgttgctatggctgttgtatactgttgctatggctgttgtacactgttgctatgactattgtacactgttgctatggctgttgtacactgttgctatggctgttgtatactgttgctatggctgttgtacactgttgctatggctgttgtacactgttgctatggctgttgcacactgttgctatgactgttgcacactgttgctatgactgttgcacactgttgctatggctgttgtacactgttgctatggctgttgcacactgttgctatggctgttgcacactgttgctatgactgttgcacacttttgctatgactgttgcacactgttgctatgactgttgcacactgttgctatggctgttgtatactgttgctatggctgttgtatttgtgtacagatgctttaccagagtgtgtgtcacttggatattttataaaagacacaagatcttattttgtatgcagcctttctcctccaacagaacatcctgattgatacagtgtttgacataagggtatggcgtgagtggagggtaccctccactcctagcaccagattagttcctgatatgaagactcaaggcatttcacacagagtcagaatttaataacaacatcttgtgtcacaagatcatgagatcgtcccacatctgtgctcacatttatcattatttcccagacacttgtcatctctctgggagtttggggatacaaaattctcaaataaagccctttatgtcatcacgttagtccttgtcgttcttaaagttgtatagaatactctctgtcccctgttttctggcctcagtgaagacagttactgttgagctgggcttatctgaaggaggacaccagtgtgatgagatagcagcggctaatggcagcaggatgagactgtgccccagtgagactagatagttcagaaagctgcctttccagtgatggatgtacagcaaactcccaaatgataactgattttgatttggtgatgacaaagttgtaacctattgacctggagagatcactcattgattaaaactgttcttccagaggtcctgagttcaatttccagcaaccatatggtggctcacagccatatttaatgggatctaatgccctcttcttgtgtatctg

SEQ ID NO: 22418 - DNA, 1170 bp, Mus musculus
cgtcctctctctagtccacagccatccactgtcagtagccgttcactcaggggtggggtcttaggttattatagtgactcctttgatcttgtgcagtctgtctgagctgctgtgagtacccgagtgtgtcagtcctgtcaggaaaacactggtcttgttctggtcttcccttacctctggctcttaaaaacagtgctcctccaccacccccattgtccatggcctggaatggtgtatgtatgcatttcccaatttgtggctaaacactccattgacactctgcatactatcactagttgtaggggaaagggctctttttagtctgtgtagtggctatggtctatcatagaggacggatagctaggattcttcctactgtatgtagtttttttcggacaatactttgtgtcagaaacactcaactttaccctgagagtcataccaataagtatgtaatgactgggcatggctgtgtgccaatgaaactttatttacacagatacacacaatggatttggtttgtggtagctctgaacaatgagtgtgcctgttcatcctgacccatgagctgacttgtgcctttcataccctttaatctcacatttcctttgtacttgtaaatattaataggaaggagtctcccagctgctgtttatatggattatgtcttagtgattttgttttgttttgtttgggttttttgttgtttttgttttgtttttttttgtttgtttgttttgttttgttttttgtttttgaaactgggtttctttgtgtagccctggctgtcctggaactctcgcactcagaaatccacctacctctgcctcctaagtgctgggattaaaggcatgcgccaccaccgccctgcttagttagggttttactgagtgaacagacaccatgacaaaggcaactcttatatgtacatcatttaattggggctggctaacaggttcagaggttctgtccattatcatcaaggcatgagcatgccagcattccaagccggcatggtacaggaggagctgagagtactacatctttatctgaaggctgctaggagaagactgacttccaggcagctaggaggagagtattaaagcccaagcccacagtgacacacctactacaacaaggccacacctccaaatagtgccactccctgag

SEQ ID NO: 22419 - DNA, 1105 bp, Mus musculus
caaatttcactggttaaccttattgccattcttaccctagctcggttttactttacacctttgagatggtgaaatgagaatactttattataattttagtgcatattacattagaaataacttccttgcctttagaggcctttctggattacgcactaactaactaactagaaaaatacactaggtgctttgttatttttaaaagagatgttaaaactcagaatttatggaaaaacggatcatagcgaattaaggaggaatacttgaagaagacaggccactttgaaattactatggcactgaataattcaggttccttgtttgagagagctcagaggcacgggtattactcttcataataaatctatggagtatgcagtgttgttgcatatagaattactgcaattctcctcagagttagggcttccttttcaatcccaaatctccacctgcaaatcttgttaaatttatgtcagtgtaaaatttatagacctgatctttaattaccccttatctgttggcggtttgcattcttttgtcttctgataaatctcctgcccctgcagggagagtggctaaatctgttttgtttagccgctcacagacagccatggtgaagaattccaccccacctcctcctttgtgattcgaattatccaattagagttttctctcaccattttctgataaatgaaggaaattgggagatggaggtcaaaattatagacatatagcgtcttgccaagtcatgcaaagaaaatttatcattgtgtactctctggctgagggatcagtcatgaaggggcgtaaagtggcctgttatttacagttcatcaatttagagtaataatgcagttaggcaggaaattggaagttataagacattgttgcaaatggcagtgaagaagccaaacttctcccattactaagtacagccagggggaggtgagtggtggcgtttatggaatggggtcattgttgatgcccttatcacaggtgggtcttactcctctcttctggggtagcagagtatatgtgtctgggtttgggttctgcctccagctgaaggctgatagttcacgtttagggactggcacacttatac

SEQ ID NO: 22420 - DNA, 1150 bp, Mus musculus
tttttaaagtttgctttctggaagatgccaatatatttattttaaccgactattgtttttgtttttgtttcagacaggctctcttaatgtagcccagagtggctttggatttgttattctctaactttggtctgccagtccttcacattcatgtgtgcatttttgtgccttgtggaaaacagtgttcagatgtgagcttctcaggtggtgggcaggcggctgacctgactctcactgaggcatgtagcaccactccatatatctcttgtagatcatgtacactactccttaagagattttaaagtagacatatgtcttgggtcttttgggtctgttagtatagtaaggagacatttggagagccaaagatgtaactccagggtcttctgtctctcctgggatgctgctttcaggtatgaagaatccaccttgccatgatccatttgttgaattaatcacttgctttcccttggatttgatttatggtttggtggaaaagtctagaaggtgcttagagcgagcaagactaggttccttcttggagagaatgcagggctggttccgaatgaagaaaaaaagaacagttgcccagggtgaggcaaaagatgaaattcccttgggctacccgctcttctctttgtgactcttctggagtcttgtacacagaggccaggcaactgggccagctcacagtattattaaacgttcttttggatagatctcagctcttgttgttttcttctgtcagttgctagataaaggctcccgtcctgccactggaaaaaggctgaggctgacatacagttaagtgggaactcactgatatcctcttgggtacaacctcagaccctgagcaacccaactgcttcataaagaggggggatggtggactcagctttacatttgcctaactcagtttgcatctctgtcccctaaatggagctgggaccttcttgttcaggtgacagtgtttctggcaaccttttcagccagggggttaaaatgagtcggcctcgtctgtgccattctgtttaaggagctgggaaagtgctgacagggcttgccttggacacatgctcagttttcatttttactgaaggattcacggactttcccacccttctttcccaaaaagaagaaaaagacttta

SEQ ID NO: 22421 - DNA, 1149 bp, Mus musculus
ttatggatggttgtgagccaccatgtggttgctgggatttgaactcaggacttctggaagagcagtcagtgctcttaaccgctgagtcatctctccagctctcacaatccttcaaatactaaaatagagttttgttaattagaagcctcgtgaaaccagcgtccaccatgtatctgattttgctgttgatgtaattttaggaaatcaaatgaacaaagggaaattaagtttctctgcggtggctcgtgtactcttctacattctattagatttagcaaaagttctgcaggtgggaagacagcaggcccacagccatcagcattttgaagggcagtgctttgtaaatatgaggcctagaatcctatcttttactttgccattcaaaaacttgcattaggcttctaagttattgaccacatgcacagagaagacaagtcgggatgttgtaaattttgtgtttgaaaactgtatccatttattttccctgtacaagtgtggaactggccatagtggacatgtgaaggtcagaaaacggcttctgaggttgaggctctctccccaccatctgggctccaggggtcgaacttgggtcatcagagcgcttttacctgctgagtcatttcactggcccaagatgctgttattttgaaagaggaaaacagaagctcttcaaactcttctttaaacattactttctaatttctgacaccaatgtaaatcagaggatgggaggtcagaggaggagaggaaatttgtttgcctgagactggtaagaaggggcttccactgagaaatcctgggttaggcagccagaagatttgagtgtagctcaagctcagaagcagcccgagtttagctgacacttcttggcacacttccagtgtgctataatgggccttggggacacagtgtatggtttccatagacagtatcaaaacttggatttgaccctaagaaacaaagtgtgttgaattctgtttgataaatcttgcttagttttgactccactgaactggattttataattttacatctttttatttattcatttattttctgcctcacattgttgacctgctctaagtctgcctggagatagttaataatctatacgtatttacctgtgtgcaattctataagcacgtacac

SEQ ID NO: 22422 - DNA, 1189 bp, Mus musculus
gtgggtaatcctttgatcgcatcaaatttagctttgtggtatgaaacttgttggtcaatagctatttcggttacttttacctcctatacttttctgcacagtaagagtgatatatgtatatgtgtgtatatatgtatatgtaactccaatgtaaagctcaatcactctttttatttaaattaattagatgaaaacaaaaacttaacagtttaactgaaaacattgatatgtgagaatgtgagacttttggtttggagaaagttgtttgtttgtttgtttgtttgtttgtttgttttttactttgaggtagggttttgctacatagcccaagttcatctcaaaattgctattgctctctggcagcctccaagtggcaggcagggttctgagtgcgggctaccatgtccagtgggagctcaggtgcttttggtgaccaatccagtgatgggtagccttttcttaagaatcattgtaatgctgccagttaattctaaagagctccagttactgaagatggcagctttaggcttcagttctcttcaaggaactgaagcaactcggagaactaaagtataaaatcttaagcagaacctgcagtgagttaggctgttaggcatccatccacctcagagtgtaagcccggctcagaccacacaaacgttctgcttctctatgccagtacaacagacataaagctgattttgggaaaccttccaaaataaagcaggtaaaatttatttcaagtaaaagtgggttaaggagataaagagggaatctagaggttatcagagatttaaaagcatattgttttatcttaatgagtagagctcatgtgggcagttattcagacaaaacacatagtaaaacagaagaaaattatgtaattgacagaacgtctcaataatggaatttttggactggaagatttatatcttttaaaatattttttgttttgttttgttttgtttttcgagacagggtttctctgtatagccctggctgtcctggaactcactttgtaaaccaggctggcctcgaactcagaaatctgcctgcctctgcctccccagtgctgggattaaaggtgtgtgccaccacgcccggcttaaaatagttatcgtattttggctttcgttaataataatgaaaaagaatatattaaagggtcttggaggcaattatagagtat

SEQ ID NO: 22423 - DNA, 1200 bp, Mus musculus
aaaaggttgcttcgtgaacagagctcatgccttatttattgtaaagccctataaaattcttatggtatggggtaataaaatagtacatcgcttcatatataccacttaacagatttttatgctttgtcaaattcaagttctttttttaaacatcaaaatagattttaccttaatatgtttcttcagttagttgatgattcttaacacaattcagtcattattgctgacttacttctgcatgtagcagcatgtagcagcttttatttttctgttagtattaagtgactgctacatgtgttttgtttatacctctctgtatgtttttattgtgaaatttcatctcacactgcatggtgtctgtattccacattttcccattgacaaaataattgttgtattttgtattttaaagggttattatttaggacatgcttttccatagaaactgagaccttctcactgtctggatactgtttggtgtgtgtgtgtgtgtgtatgcacctgaccaccctttcacatagcgatacatgtgtttataatcactatgtgtctagtgtagatgccggacacttgccatacattattgggcacttcctgagtgctcttgaggagcttctgtgggaagcagaggatgaaggaaggactgtgtcctggaaggggtgggattcactggaacagagtcagttagggtgggcttagaattgagccagttggaatgggctgggaaaggaactcctaaggatagggtgacacagctggtgtgtaaacacaaacaccatggtgaggattgtgagtaaagaggtgcactgtggttcccaagtccctgtgggtctgtaggtctgtggatccaggtagtatttttcacagttctgtttttttctttgatccacagtatgagacagcaatatgtgtgattggcattttgcttaggtcgaacttgactgcatcatgtcttttctatgtttagtgtgggctttatttgcctctgctaaccttgtgcctagacatatgccttaccagttggcttgtgataggaaaggaggtattcaatatttgttgagactcttgcatcccaaaaaagaagtaaatgtctcatagtgtcccatataaaacatgaagcactaaataatatttagaaagcctcacggagccttccacaaatagtacattaatgtcaaggaagtgttggggaattcccag

SEQ ID NO: 22424 - DNA, 1172 bp, Mus musculus
tggctgaaataatcatcgaaattcacagccataaagtactcgctagtgggaagggagaactcattttcatttccacctggccagaatactcatcagagattctgggtatctattccagaccaactatacagagtaacagcaattgcatgtacagacttcaccccattcaagctctaaggagccacacaatgaagaggagtgtaaatttgaaattaaatccacagggatctttcaaatcaaatcaatcaataaatgaatgagtggatagatagatagatagatagatagatagatagatagatagatagatagataaaagcacccatgtagttttagtggtccatgtgggtgtagggggtgtgtgtatgtgtgtaggggtgtgtgtgtgtgtgtgtgtgtgtgtgtgtgtgtgtgtatatgtgtgtgtgtgtgtgtgtgtgtgtaggggtgtgtgtatgtgtggcggtgtgtggaggtgtggcaaatatggaggtcagcagacaacttgcaggaagattcatgcaggttcttggcatgaaatttgagtcattatgattgacagcaaggacctttacccacggaaccatcttactggcccaggactatacagttaattcctggtttgatcttagaaaattcaacagcatcactcctcccaagttagctgtttcttaggtgatactcagttcaagacaacgaccctggtgagtttaccatcctccctgaagtcacatgacgccttggcccagatgtacaccccatctatctacacagctgctgcacgactccgggatttcaaagtcagttaggctgtactaagatgcatagcttcttctccatataagatatcccaaacccttaaaacctagcacaagatgagaagaccaaagacttgctactttgctttgtacttagcaggaacaatgcacttggtaccttgaccctacccattctgtactttagttccaaggcagcgtgtaaaaatcccagtggcttccctctgctcatggggtcacaagcatgctagcatgccacacaaatcatcagcctcaagaaaaagaatcaaaactgaaaactcctaatctgaatgtttaccactttgcagtaaaaacagacttgaaaatcctaaacaccgtcactgtgtgtgaggggagctggggctgaagacagag

SEQ ID NO: 22425 - DNA, 1200 bp, Mus musculus
gagtatcacctaagaaacagctaacttgggaggagtgatgctgttgaattttctaagatcaaaccaggaattaactgtatagtcctgggccagtaagatggttccgtgggtaaaggtccttgctgtcaatcataatgactcaaatttcatgccaagaacctgcatgaatcttcctgcaagttgtctgctgacctccatatttgccacacctccacacaccgccacacatacacacacccctacacacacacacacacacacacacatatacacacacacacacacacacacacacacacacacacacccctacacacatacacacaccccctacacccacatggaccactaaaactacatgggtgcttttatctatctatctatctatctatctatctatctatctatctatctatctatccactcattcatttattgattgatttgatttgaaagatccctgtggatttaatttcaaatttacactcctcttcattgtgtggctccttagagcttgaatggggtgaagtctgtacatgcaattgctgttactctgtatagttggtctggaatagatacccagaatctctgatgagtattctggccaggtggaaatgaaaatgagttctcccttcccactagcgagtactttatggctgtgaatttcgatgattatttcagccaggggtgctttgtgtctgctcttgaactagaagtagtttccaagaatagccgtccaagttttatttcagttacatcctaatgtcccacaagaactggctgggcagagccctgctcggctcactcgccctgctctcgtgtatgctgctcctcacgcactttctcctgctaacactgtcatttgaattatgtcttgtcttgtgtttctgtaaataagattgatagtgtgtcattagtgcctttgcttgcagcattctggcagtttgagtttttaaaagagctatatgaaatctgagcatttcctgcagaatgtactggtctttacagacagtgttttgaagttagcacatgcaaattacaatgtctgcaaaactaatgctttatgaattcagtgtgtattgtgggaagtctgagtatttctgacttatttgttgttattgaatgttctgggtatatagctgtctcttgtgagactatgccagggcctagcaaacacagaagtggatgctcacagtcaac

SEQ ID NO: 22426 - DNA, 1112 bp, Mus musculus
atgtacccaggttcttatagagagctctaatcattcgctcatagctctgtaaaggatctgcagtgttgagagcctataaattactcaatcgtggctgctcttggttgcccattgaccatttagcaattaatctagagaaattcccatggtggtaactgaacaggtagaattaatcccctttgtatgtgagggcaatgagccacacagagtaaatcatttattgtaagtcacagaaacagccttcttttgtcgcactgtcactcaaactgacatcttccaagttagttccatgtgaatccaattccagcatgtttttctctgtgtgttgttcctatgttttcgcagataaacacccctcctggatttttggctattttttcccctgataagttcccatctgactcccccgattcttgcgtgtgcctaatcgtttttctttactctgttgacttactctcaggtatttagtatttgatacttccacacttgaggcatataaactgtgttatgggctggagatatgtgtggccccggggaggtagagagtttgccatccttgcagaggatccaagtttcgtcccagcacccaggttgggtggctcacaagagcctatccagttttagtttagagcaatggctctcaatcttcttaacgctgcgaccctttaatccagttcctcaggttgtgctgatctccaaccatacaattatttttgttgctacttcacaactgtaattttgctattgttgtgaatcataatgtaaatatttgatatgcagaatgctcttagtccgcccctgtggaagggtcattctactcccaaacagatttcgacccacaggttgagaagccctgctttagaggatctgatactttgacctctgtgggcacttctaattttgttcataaaacaccccagataaacacacacaaatacatagttaaaaattaaaaaacaacactattacttcagaaatgtcagattatacgttcttctttagaacatagaatctttaagattcgaaggtccttttaagatctgtcagtgggtatttgaatcaagcataggcagagagtgtgagtggtgaacttgagttcatacagccctcca

SEQ ID NO: 22427 - DNA, 1241 bp, Mus musculus
ctccctcccttcctccctccctccctctctccctctcctttcttagatgcacatgtaccagagagcagacatgtgccaaaaaagggaggatgatgatcaagggatgcagtcaacctctggcctccgtgcacatgtgcacacagccacaggtccatgtccatataccacacaagcacacagacataaagttgagaaaagtgttctttcagatgctgacctcacagaactaagtagcctgctagttgaaacttgggtgcttttgaaagagaggaggaaagccagatgtcttatgtggattccagagtttggaatagtttcatctaaaccttttaaaggcctgctaccctagaacttaattttgttatatatggatttccttttgcctcatttccccttaagccatattttgttgccatacttatgcacacattcggctggcacttttcaacagtgggacaaaaccttttaacaaaggtttggcagttgggttgcaggcaaagacttgtttcagggttttgagttttggtatataaaagttatctgaagactttctgtatctaattactatccttgttgatagcttctgctgagaaaatgctcattctgtgtagtaatacattggggtcaggttacaattggaagtatgattccagaagccctgggtgtgacattctaggccctttggaaattatcacgtgaatatgactttcccttacataagtaaagtgtgtactgattcagtaggaaagtgcacatatgcagataatgcatagtgtgagctccctagcaccaccaagctcctgtgcacagctacaggaacaggtacagaaagaaacagggtgaggaacgttagaacagtgtgtttggttgccttctttccatggagaggggcctgagtatggctcgtaccccaggccttgacagcaccaagccccaggccttttcacacggattctgagattaaccaattggccacgtgctcacctagcctgggctcttcttcctaggctctgagaagttctgttgaaaagaaattcaagaccacagcttatagattgactgtttcttgtcctctgttttgagccattgatattgttgccagagactatatatatatatatatatatatatatatatatatatatatatatatatattccttcccccatgtcctctccccttctcctctgaaagggtggggatccccctgcatatcccctgacgctggcacatcaagtctc

SEQ ID NO: 22428 - DNA, 1158 bp, Mus musculus
ccggaggctgagtggcagaaagtgggagataacactggcctcttcacagtgagacctgggaaagctgtgtatggtttgaaattcttaattttcattctctccatctcttttataacatatatgagtatagtaccagatacttattgagactaaataaaaagcactgaattctcagtaatgaaatactaaattttaattaaagttctaaggattgtcctctcttgacctgtattcttgaatattgacatagttaagaatacaataacaaagagcacattatctttttttaaaaactcctacaaattgcttttaagttctccacgatctggttgacaatcgcaagtgtaagtatttatagagggtggtagagacggagctacctacacgacatctataaatacactctacatacagagctgacagtgacagccatcttgcctgtatcaaatgtgcatgattttcagatttgaaaacggagcctttgtatttgcacagatcaatttgtgtattttttgtgacccaagaaaagctattcctggcaagttctgtcagaagagtatctgtaggttctctggagacggagtgggagttgggggtccctttcttcttaggactgctgtgaggagtgatctgacgagtttgttctaggtgtctgaaggttcatacacatccggtcttatttttgaactgctatgagtgaccactgtcctcaccagccagtcagccagaggcacattagaagcaagaacggacaggaaatggttgcgtgtgtaaatctcaggacttcaaagctgaaagtgtctagcagcccgtggttctttgtgagggagccacaggctagtgggcccgtcttccagggggatttgttgagacatgataccagcgatagtgtcatcaaactttccagagacagcatccagaagcagccagccatctggcctgaactactctgttccctccagagcttcagtctttctcaccctgtggaccatattgtgacttggcccttgctggcctccccagattagtcatcctccaccctatttctggatgttcctgtcttccttttacctcagcttcttgagtctggtaggctctggaaagtgcttgatctactgggctcctttgcaagcagagcatttctcccaaagggttcaa

SEQ ID NO: 22429 - DNA, 1149 bp, Mus musculus
gctagaactagctctgtagacaaggttaacctccaactcagagatctgcctgctgctgcttctccagtgctggaattaaagatgtttgtcaccacacctgtcttgccattgttaataaagcattttatcctcttctgtgtgataactggctcatgtatgcttctatatttcctcctggtcccacaaattcaaggccacactgtgactgatattgtgcttcccattcaaattctgatatcaacaatattgggtatctttaggtcacaaatcaattcacaattaccctagaaaaagtgaaacatcatagaaaaggttaccctgttctcaggttctcaggccattttgtgttagaggtggattacaagggacagaaatgatttccagagacatgaggtagatatctacagtatattattgtactggacttggggtcacaccccactagccagatttgatagggattggttgttcatctttgtgtcctttcacagattgggcacacctaacctccctcttctgtttctcactattaatttgactcctaatcagctttgaaagacacgtggctggtcctggattgcaggggcacaggatgtaacactgagtccaatagcattcattgcaaccatggatggacaaaagacacattttggggactctgccacatgaacacattgaccccagatggagaggaaacactgaaggtctcaacagctgctgcaattattttcttccaggaacattttttcaatctccccacttcaggagacaacagctgcttaaaacaaacaaacaaacaaacaaacaaaccaacaaaccaacaaaccaacaaacccagcatttggtagagcacaagcattagtgcttaacctccattttggattcctgagaacaatctgaccctttgtaaggctcaccctcatcctgcagcttgtctgtcattttcctatttgcttttggacttttttgagcgcattgggcttcctttgcatcagtgttgtcagctgccattcgatgatgggctttgctttgtcttttgttgtgttcaactgatttggattattgtttgctttcaagtctcattaaatctttgagaagttcatacaatatattttgatcatgtttgttttactgccccctgccctgttt

SEQ ID NO: 22430 - DNA, 1162 bp, Mus musculus
gattcttggttactgatacactctacattttttcttcatctccttttctccacaccctgggtggccctttcagccgacagcctctcctgcctcttcagcagacatggcccccatcagctctggctcttccacttggacatcctccggcatccccttctcatttgtttccatggcaactgggatgggcccttcctccagtggcagccaagctacagtggcctctgtggtcaccagcacactgttggcaggcctgggcttcggtggtggtggcatctcctccttccccagtaccgtgtggcccacgcgccttcccaccgcatctgcagccagcaagcaggcagggaggacagttcttgccaccaccgaggccttagcttcccctgggccggatgtcgactcggcaccgacgaaggacagcgagggtacagaggagggagagaaggaggagaaaagcgagagcgaggatggtgagcgagagcatgaggaggaagagaaggactctgagaagaaggagaagagtgaggctactcacacagccgcagagagtgaccggactgcacctgcccccaccccctcttcccctcataggactgcagcggagggaggacatcagactatacctgggcgcaggcaggaccactctgcccctgccacagaccagccgggccacgttgccccagacttggatccccttgtggacacagccacccaagtgcccccaacagccacagaggaacattattcagggagtgatcccaggaggcccgaaatgccatctaaaaagcctatgtcccgaggggaccgattttctgaggatagcaaattcatcacagttaacccaggtaagtggggttggtccacatgtgaggtttggggctgctgtgaacaggctggacctatttctaaacgttggggacctggagaatgaggactggggaagtagttagctccttggggttatccgtgtccctggtgttctatgcatgaaaccacctctttttgtgtcaccctaatgagatgcattctctcactggaacaagtctttctctatctttctgtctatttcagaagaagccaaggcctcagacagatctaaatgaagaaagtaggcactggatctaagtttgctcactctgactttattcctgcgggtggggagggt

SEQ ID NO: 22431 - DNA, 1141 bp, Mus musculus
aacagtctctggctaagcatgcatacaagtaggtcttctggcttaaagataaagatattatctcataatgaataatgggataatattcaatgtaccagagaaagactgcttgctttgacatcagaaacaagccttgtaatgtgttataaagacgacactttaatagacactgtttacacatatactaatggacttcttgtgagaaagattagagatatcagcagtttaaatggtacctcatcccctccctcattcccttttctagtataagtcaaagttagagtagtgggccataatatcccttacaggtgttttggtttggtttggttgtttgcctgattaaaaagatctactgttcacaagtatggtgtgttttaatgacaagtaggtcttctgtaatctgggcaacccaacactgttcagtttcctgtgatgcgtgctttctagggaacaggcatttgattatagacatgaattacaggaagacctatgattgtgtcttgtccattgcaggatgactacgtactagaggttcggcactttcagtgtcccaaatggcctaacccagatgcccctataagtagtaccttcgaactgatcaatgtcatcaaggaagaggccttaacccgggatggccccaccattgttcatgatgagtaagtacctggtcctgtgttagacttgggtgctgttcttacgagactcatataaaagtccaaagggaacactgtcttctctctgatccatgttacttgtagtgtggacatacatgtgcaaaagggttgtggttgtgttttaattggtcaaactttgctgggctccaagtattcctagagagtatgttctagaaggggaaaatattgcacttcctttcctcaccaaaaagtatgcagctcttctctgaggacaggcacaccttaaccttaatatgcgtcatcctcagcatgccgtgctcacctgcacaagtctattctagtccaaggctagtctgtttctaccacagtcttttcagatggttgtatgcttttcccaaataatgaccgctagtttcctgtgtaactaagctaaagtcatttaataattctcaaagtgtggtctgagaaccctgtgggttgtatctccaaggcccttccagagatca

SEQ ID NO: 22432 - DNA, 1157 bp, Mus musculus
accggggacaaaaacggtgctgtgctaactgcagaggaatcagaccctgcagagagcatggagtctctggtgtgactagtcccctggaagggcacttcatttgtaaacttctgagacttgtaaagacagaaattttttgaggccttttttgccagactctaggttatacaataacccagttacttttttacactgataaaagttttgatatttattttttgccattttctgtcttaatggtatcctactgagcatttgcgcctgttcttcatttcacacagtgaaacgcaactttacctagtttgcactatatgatcagtgttaactgcctataatctaatactacagaaaccctgatgtgacattccatgaccacatacatgctattttttagttccgtgcagtgaaggtctttgttatgacagtgaatctcagttttactattattctaaagcaactacaatttcttagcaggcaacagtgtacttttctcagtcccctctattttttaggcactgttcaatactacatgccttctgttttaatggagtggatgggcgttgtctccttttgcaggacagcaggtgactgggagccctatagatctgttggcatcagttccatttgtaatggttgagggaccactaagaagttaagagggcttcagagttacttcatgtgaacatctcttattagttaccaagttatattcacagttgaaatgtgtcaaaataaagaatcattctgtattacagatttcacagtagctatgtggacagtgtgtgttatttctatgttgactctctgaagtagcaaaccctaaaatcagggctgtcttttacaatgggaagatggccttattttacacaatttacttatgacactctttagttaactcaactatagctttttggtaaatagtaccatagtagctacaaccacaaaataggtattgacatttaaacgtagtctttgaaaagtccctactaactactcctatagcaatctaataaacactacctatagacagcattttttttgccaaatgtttcataataaatctcttaattacatccaactctacttaagattgaattggaaatatatttgggagtcaatttttataggtcttactttgagaaagaaataggaatctt

SEQ ID NO: 22433 - DNA, 1175 bp, Mus musculus
agactacagtaagtcattggtgtgctaggcgctgcctgcatgcttagcaaatgggggcacattgagaaaaagacttgaactttcttgtgactgtaactaagtagaattttctgtgttctctgatgtctgattgtttggtttttttttttttgtttttttttttaatcaggctaagacctagattttagttctttggttttaatgaaatctatcacacaaattatatgctcttaataatatgtaaaaataatcaactataacaattacgttgtgggggttgcgcaggggctgcatacataaccatatttgctaatgcaaaataaaacttctcatgcattactaggcacaaaatgtaggtgacatggagtaaggttctgtgtcttcttaactacagatgatgacaagctgtcagaggtggatgaagctcaagaaagcaccatggaagcagaccctaagccatagatggactgaccgtcgccatttacagggacagcgaatagctgcatgggcttcctgggttcagtgtgttgtacttttgggatatttcaacttcagcattgaagtactttgctttcaagtattcatgtgtcgttcatatttcttcacagaacggaaatgtatcccatatatatgtattttttaaatacatttttatccttaaacatagaaatcagcatctgaaaatatttaataaaatgtctcaaggtggatctttgtgctcattcaaaactctaggtaactgctaacacttgccttagcgaaccaggtaaggattatctaagatggcgtttgggatacacatgagaaaatgaatagatttctagaagatgttagtaaaacttgagaaaatggagtccatgagtaggccttagagggccatgatgagtacttatggcgtgggtctattgtaggggaagctttcacactgttaagaatggctgtcgtatgaaatcagtccatctgtgttgcttttctacagctctctcttagtccttgaggaatgtggttggtaaatgcttcttctatcattttgttttaaagaatctttttaaaaaatacttctttgggagcatgcatacatggtacatatgtttgcatgcttatgtgtgagggcgtgcacctgctgtagcatgtggctagattcagatggtagcgttggctgctgcttgtctacc

SEQ ID NO: 22434 - DNA, 1117 bp, Mus musculus
gccctcatatcttttttcaattgggacacttaattgtaatgcttacaacaacaatctcctggctcaagtttgtgtcaacagttcttaccattgattctctgccttgtcaatgaatgcagatcacctaatgggtgggcagaatacagaatagggtggaacatctgccaatcagaggaaggagataggggagagacggagatttatatcatggaggaggatggaggatttggagccataaggaagaggtccagagagagatcatggaaacacacctgaaacccacagaggcagatcagtgataataataatatgcacatatcatgggatggggctgggaggtagccagattggtttagggagtaaaggtagatcatttaaataatctcaaatgactgttagtttatctgtgtaattattgaggactaacaggaagaaaatatagcaccagattaaatcactgtttacatttctagtaagagtacttttttatatagttcatctgcttttagttttgtcatttggggtttgtggactctctttgtgactgaagttgggcccctagcctcatggtgcgttcctcagtggggccttttaggaagagtgaatgttctactccaattgtcagtctgtccaggaggaactgccgtgggtagttttgcacacgcacctgcagggtatagtttctcttgggaatatttttgcacttggtctccaatttcctaggaatttaagattcattcagagtaaatttagccctcattcaactttaatactttgtttagctgttttatttaaaaaaataggaaatttgagaagtcatcacaagttcttacaaactctttcaaaatatgagaaaattaaaaggtggcacaacacatgtaacacactcacagtcagttttcacacacagtcttaccaccaccagatggccccaggcagccaacacagcttatgtatcctcctgcctgctgcagtttcttaagtgctggattatagacaggcatgattattaccctgttggctttatgcattctactgcaatccagttatttgactaatctgtttaattaaaatctataatcttaaccttatttagaaggatccagagtagagactc

SEQ ID NO: 22435 - DNA, 4096 bp, Mus musculus
gtttgttttaaacagccctgaaaagcctgtgagtgtgacaataaatttcgaagatgaaccgtcaaaaaaatacatggatgctgaaacttcattgtaaagtcaaaccaaaaggaatatatagagatatatgcctatctgtatatatacacatatatatgtataaaaagcacatgtgccatgccattatgtataacagtactttggggctttttcaagtagcgtcagatatttgttgtggacaccatagagactacattaattaagtgctctcttagaagcaaggttcatgaatttttactccagatttttttggggggtggggtaaagcctttctgttatgcaatagaaagatgtggagcactgcgttccatctgcttttctttgatctgtcagtggcaatcaatcataacaatcttaagtctacatacttaaaattcgacctgaatttcaaaagatgtttgttttcccttttggtagtgtttataggtagaataaggagtctgcccatgtggtgggaaaatgacatgtcctggcttctctgtgggctttcttcatgtaactgtcaatcatacttcacaggatagtggagattttctaagaaggaactttatgtcttaggagttatttttaaattttaaaactttctgagtttccattttgatggacaggttaaaaatttttatgtcacttctaatttaacacccacacaagtcataacgttttcagttttagaacctatgaagtgcccatttacagtaattaactattgttagttttgtggcagggctttgccggtactcagtacttgcctagaaaccagagtcccactcttctttgtctttgtttttctttactgaggtggtctggtgtgccaggctcagttatctttctgttgtaagtagcaaaaagagtcagcccactttcaataggcttgtgaccagtgtgcctgtagaagaattacctttcattttctgtgtgtattctttctatttatatacagtgtatttaattggttaccacccataatttccttttaaaatattttatttattatagttgatgtgatacttcaatatataaatatttgagacagtaaaaatatagagtaaattgttcctgttgtagatatttggtgcttgtatttcttttcacatcctgaaagcaggtgacaaattttacatctttactataaagcactgccatatttatatttttaaaaggaagttggatatttcctgtacagctcagatcaatggcatttttttctgttttgtgatagcattgtgtttccaatatttctgagctgtttcttaaacatgtagcaaatattcatagctcctcacaaaataagtaaaggctattttagcctttgggacagagagtttggggctatgaaacttgatttggcaagaggacagataatacatagaaatggtgagcaacactagagacaccgaaggtgatgaaatgcgaaggttcaggcagatgttttaaggaaattctaatgttctctagccactgcaaactaacatttaaaagtatgaagaaactgatctttaaatcaaattatttttagcaagtttattctaaactttagcaaatcattttcgtttattctaaacaatgtaccaattaatgtaattccctcatctgagatcatgtagttggattcttattagaatagtagctggcagcatttggtactatctgacgagttctattgggcttcttagcatgtgatagggaaggttgccatggtgcttatggtcacaggtgacctccattgaagtggttcctttgcactcagcagcacattcatttccaaagttcccatttgctgctaaatataaccctaccccaacccctgaagtacccaaacaagagaatttcctcacaccattttcttgtgtaaggacatcaaagggttaaatctattttacaggaagtgattttaaaatttaaactgaagactacctgttatcataatcttcctgtgatttatttaattatatatgttttgtccagtgccaggggcggaaaaaccatgacttacggaatattttgtatctaagatgtttcactgtggttttggttattaatggcttctgctttcttttgactacttgacttacaaagtgatctaataggactactcccctgaagagcagaggtaatttactgcttctttcaggtggttacatttcttgtgctatttttgaaaataacaatcatgaataacattcattgcaagacagcaagagagataattttaaatatatatatacatatatatgtgtgtgtgtatatatatatatatttttaatgctgccttaaataggtgtatatgagcagtagtaattgctatgtactgatttacctcaaggtgcaaaataattaaatttgtacatacccatttacagaataagttcagagacacagccctgcactttcttagatgccttgattttcaaacggagcttagtgctactgaacaccacggccatggggccacctcaggacgttcttccctccaccatattttatttatttatagatgtccgtttacaaagactataatgaaacctggtgtaaactatctgatacttatttcctttctattgctatttcaatctaaagtaggagcttttgagaaaacagtaaactagcttcccaatgctaaagggttgattctatatatatttttaataatattagatatgcaaaagttaaagtacaaggtctttaaaatattgtgtgagtgtttgtgtatgtgtatgaaatcactcttaactctcttaacttttttaaaactcgtggcataccaatgttcagatttgccaagctttctctaagacatgtaggatgaaatgtttttgtgtgttaatgcatgtatttataaagatttgtttactgctgagaatcactaactcttgttttcatccccaaagtgtttgtttcttccacatgctggaaggcttggcttgagtatacgctttctggctttcctttcacaaaggcacgttcaaaattgttcagaaagaagaatggtctctgacagtgaggtgtgatgccagagctttctgaagtttgagcagtgtgtgcagctctgcatgtgtgtcctgacagagtcagatatgtgagccattaaaagaacattgtaattcagagtgtttatttaagtaacttacatgtctgaaatttatttatgtagattccatcattgttatcatttgtagtgcaaatacatgaactgtcttcatttagtcccaacaattatttatttttagaaagtaaatttaaagccaagctgcattcaacttttaaaatagtgttctaatcataagatgtgatcattgtaaggtctcttttaactttctggaaagtaaatggtcaaaaggaatcacataaagattgttttacatttttaacctgtatgtacttagagggtaagccccagttctctggtttctaatcattttttgcacattgattgtttctgttctgtagcttttcttttgctcctttggttttggctttgtaggggtaaggtgtcttccaatgtttactatgttaggcttaaattaaattttaaatttattgtccatttatataatatttgataccttggtgtaacttctcaatacaattacaatttttatgacatttataattgcgatggtattttcttttataataaaatccaaagtcaattaaacaaattgtagacctgatatttttcatctatatgaagtacaagtctctacctgagtctataatgtgaaccatcctgcctttcacatttgtttcctaattgttagagaaaactattttctgtagatgttattgtaagttgaaagagcaataaaagtctacatatcacggccttggctgttgttttttaccttgttgttaggagtgctgcaaatgttttttgtttaagctgaggctggagaacggaaagtgagtggcttctgcctcctgcacccagctcttgtgtaagagggggaagagagagaggccgggaagggagggaggaaggggggggaagagaagaaaaaaatgttttttatagttgggaaatgttgaaggtaatgtt

SEQ ID NO: 22436 - DNA, 1218 bp, Mus musculus
tcttcttccaccatcatggctgttggggcagcagagttggccctgaaagactccggctggcatccgaaacgagaagcagatcaggtggctactggcgttgccattggcatgggcatggttcctcttgaagttatttctgaaactgctttgctgtttcagaccaaaggttataataaagtcagcccattctttgtccctaagattctgatcaatatggctgcaggccaggttagcattcgctacaaactcaagggccccaatcactcagtgtccacagcctgcaccacaggtgcacatgctgtgggagactcctttagattcatagcccatggtgacgcagatgtgatggtggctgggggcacagactcttgcattagtccattatctctcgctgggttttccagagcccgggctctgagctcaaacccagatcctaagctagcctgccggccgtttcatccagagagagatggttttgtcatgggtgagggagctgctgtgctggtgctggaagaacatgagcatgctgttcagagaggagctcggatctacgcagaaattttgggttatggactctcgggtgatgccggtcacataactgcccccgatcccgaaggagaaggtgctttaaggtaaagaacggttgttctgttcaaaatatattttcctcttaagatactatattaaggcactattggaacttcaaattaaaaaaacattacctggtcttggtgtatagtatatattctcttagatcaaaggctttttaaaaattctttgcttgaaatgattgaaaacatttgaaaatatttaaacaaaaattgaatggactttagttagagccaatagagttgtgtctttgctagcttcttataccccaccttctgtttggaaatcatgagtgtgctcccttcctcagcctccctctgaacacttatcagacctggagaatagagatagatgtgtctaggtatattctgttcttttcaaatcttttcaaagcagcatttcttagccctgaatcacccaggagtcttgttaacatgccagttctgactgcggatctagattgatgcttaagactctacatttctaactagctccagtctaaagaccacactttgaaaaaaagtccttgattatatgatgccatctaagcttaaactgtattatgttttatccaattaaatcagccagaagtttagcaggctttcctat

SEQ ID NO: 22437 - DNA, 1156 bp, Mus musculus
taaacactgcactgcgtgtatatttaacttgcacagttccccatgcatgggcactgagatcactctctgttcttatttgtgctgaatgccatccactgaagtgctcgtgaaacctgcttcctgttgcttggacagattccctcttgccaatggcatgtggcattgtttcacagaaagagtatttgtccttctgatgttgatgttactttaagagggattattatcactgatttgtaggacagttttatgtgttctagattgatagtttcctttgctagacacattagaattttactactccctatctcaatgttctttgttaatttattaggtgtaccttctaaaattcagaagttttaaataacataattttccatttctggattctgtattattggtcgaatcatgcttttaagaaaaccttcgcaggctggggaaatggccgcacaaggatgaattcccgagcttgagtacccagaattcacaaagactgatgtagtggaatatatgtgtaatctgcactcctacaggaagatgggggatggagtcagtggacttccagaagctcagttattccgaccatacaagttacaaaaggagatgctgactcaaacagtgtgagacgcaaggatcaacacctgagctcgccttctgtgtactgtgacacatccatacacatgtgcattgcacacacacatgcacatactagggaggccttctggggtccagttataagcatgctctcttgtaactcttaactactgtagtactatagagaaagacagacttcttacataaatgtattaacagtatcagatatctaggtaaccacttgtctcaacttaatgggtgacccattctcttaacatttctttgacatgacaattttgtcttggtgtttaatgattttttttctatttaatgagtttgtttttggttttgagctactgttttcctgtatatctaggctagcctggactgcttttttacctcagtctcctgcgtgcttaagattacaggcctgcaccattgcatgcagtgccacctttatcaaatgccttttattcacttttaaactatcttttgactgatacagaagacctgtctcaaaaagaataaagaggtttgtctctcagtactctttcttttttcattg

SEQ ID NO: 22438 - DNA, 1137 bp, Mus musculus
ctgctctaggcggcgcacggtcccgtctgcagttcgctagctccctccggggcccagtccctgggggcggctagggcttcctgcctccctgcccccaaccctccccccccccccccccgctcccgctccccccgcggcctcgcggcaagtctgcaggacacagtccggaggtttccacagcccttgtcccaggactcccggctcctttggatgccccggaatgactcttgacagccgcctgctctcccttctgacggaaaccccattcactcgcctcgctctcccttacactctctctcagacacaaacaaaaaacccaagtctgcctctcagttgctacccgcaatgacgttttcccctcgggtcccgcccccctaggggcctgaaattttgggattggtcgaagtactgtagtgacaaggctgtgattggacgatccatggttgactgacagccggtgaccaccgcaccctccccctcccggagcgcgcctgtgtgtgccgtgttatgccggactaaagggaggccaccacggcggctctgtttattgtccctcttggactgtgctccggaggaccggttcagacgccgcttgggcggttttgaggcagtggcggcctttgaggctgcggcgaccgcggcgaggactctgcggcttcggtggcttgaggagaagcagcggctcattcctgtcagggctctggctcgcgagtcctagccggcccgcttcaacctcgtccctcatccgcgatcccaatcgcccgcgtgggtcccggaaggccgcgccgcatcgccagcccttcctagtcctcgaccactctgtaggcccgggcgccgcgctcgagtttgagggcggcgggcagcgcggcctcctcagcggctcgggcccgcgatggggcgcggctaggagtgctgcgcgcagcggtcagtgcgagcggcgggcccggcgtccccggagcgcgagcagcccctggcctgcacgggaggcgctgccatggccaagtccagcctcgcgggctctgacggggcgctgacctgggtggtgagtgcggcgcgggcgggcgcattgttcgtgggccgcgggcgacgcgggcggggtgagagcgtggtgcggcgggcgccctgtcaggctgcagt

SEQ ID NO: 22439 - DNA, 1224 bp, Mus musculus
attagaggatatgcatatcttctttttaaatattttaataaaggcatggttatgtagtttgtaagtctgcgactttatgtctgtttatgatcatgattaagaaggacagaggagctaagacaatgcgcgagactctgggcctgaaactcacaaacaagaaaaccaaacaaacctaaccaagatgaaccctgagagagacctaggagaactggaaatctgttcattgcttatggagataaggacatcagaatataaaagtgtagaataaaatggtgccataagaattggttaaaagtttaacatagtgtgtgctgtggtttacttcaatagtgataccttctagagctgatttatttatgtttactgtggctttggcttacatatattattctgcttgatttaacatttttgggaagtccaaagttagacttttattgttttactctgctatatttttctatagaatatagataaattttgaagtgaaagtagaaagtaaataaatgttcttcattattttaaacattatgtaggtattatttctagggatccatagttgttgacagagaacagaaatttctaggccttaagaatttgatttggggttcccatctgctgtagaatggttagaattaggactcttaactctttatgaaacgagcagagaaactgaagttagaggtgttttgttggacactggggattgagcccagcgccttatacttggctcagcacaaactgttactgagttacagacttatattacagctgacctacatgtgaataaaatacaagcaatgcaacttgaacaacttttcaattttagttatttaagtttattgtgagactacaggacttgacttcaggtttactttgaatgcctgttttaaatagagtaactgacaatatggatttttagttttctttgtttgtatttgattttgttttgttttactggttttttttttgttgttgttgttttgttttgtttttgagactgggttttactttgtagttctgactagcattgatttgcatgtagcccagattagcatcaaattgtggtagttgtctttcctcagctttctctgagtgttgagattatagatgtgtatcaacgtaacttgttgagtgtgtgggtttatggtatataaacttggagttaagaatttgtggtgtaataaaactgttttgaatcattctcctgacacagctaatgtgggt

SEQ ID NO: 22440 - DNA, 1186 bp, Mus musculus
ggtaaataattttctaacttattgacataaagttcaatttaagtttgttatatcaagtaaaagtttagtagaatgataatggtgggaaaaaaggatcatttagtttttctgctcagggagagtacttcaaattatttgatcataaatttttatgcattcctggtaaaaattcagtgctaataaaaataaacctttattctgcacctaatgctatttttttagactgaaaggaagggttaggtattttattcagaataattggaaattcttacaaagttatgtaataatattaaagcacttaagaaattaagtaaatatcaaagtacataaagactcatactggcttgtgcttgggagaaatatgccttttgtactaatattaggtggattttattatgtgtagtcaaaattattaaaatctaggtccttataaagtttcatttctcagagtaatattcttctatttctttttgatagctctctggcaagacttctttttccagctgtggatgataacttgcttaagttcctttatgatgataatcaacgtgtagagccagagtggtatatccctataatccccatggttttgattaatggtgctgagggtattgggactggatgggcttgtaaactgcccaactatgatgctagagaaattgtgaacaatgtcaggcggatgctagaaggtttggatcctcatcccatggtaagtttttatagcttagattgtttacttaaataacggacaaaattaatttctcctagaaaaatatggaatcttcattttagtgctgttgtagataggatcctattaagatttaaatttatatttgattacctgaaatatataaatgaatgagtctgaagataagttttatggggtgaaactgtttattgaaattttaaaataaccttgtaccttatcagggtttaaaatctccgaattgtataaagaatggtgttcttggtacactcacatgttaaagtatcaagctgtgaaaagtttccatacatacacacacacatatacatacacatacatacatatatataatacatacacacacacacacacacacacacacacacacatatacatacacatacatacatgtatataatacatacacacacacatatatatacacacacatacatagacacacacacgtacatgtacatt

SEQ ID NO: 22441 - DNA, 1101 bp, Mus musculus
taagagccacaacaatgaacttgaatgctaaagaatctagcaattaatttctttcctctgatgctaggtaccaaactcaggtcttctgcaagaatagtatgtacttttaactgcaagccaccactccagcctcctaagaaatcctctaaaaaatagtcttttacaatttttactattttaaactttcccatagtttatggtaattgcatttatcaaatttctgtcactaaagaaatatttatagaaatgtttttaataattttggtttatttttaagtggtttcaggggtagtacatattcatattagagttattttaagtactatacatattatataaattaaaataccagtacagatttattggatttaaagcaaaatctttgtattttatgtaggtactctttgatcatatgggttgtctgaagaagtatgaaactgtgcaagacattttgaaagaattctttgatttacggttaagttattatggtttacggaaggaatggcttgtaggaatgctgggagcagaatctacaaagcttaataatcaagcccgtttcattttagagaagatacaggggaaaattactataggtaaggcataaccattaaagatttgaacattagttaaaatggaaaaaaatctttattaatagaagacatttttttatcagtagaatataagcaaatacaaattgatctcttttcttgatcctaattttatttttccctcacatagagaataggtcaaagaaagatttgattcaaatgttagtccagagaggttatgaatctgacccagtgaaagcgtggaaagaagcacaagaaaaggtaatcacctgcagaaagcagacactcagagaagctctgaaaccaaacaatccccaccccaaagtctgaatttagaacggataaaggcgctaagctgtttggtgactgaaggcttctgctaacccacagagcagacacagtttaggagttcacagtgcatacctaccacaaagcacccatctccaccagggcttttagaaatggctccatgctgagaatgtggctcagtgtccttgcaagagtctgccatgaagaggtggtttatgtaaag

SEQ ID NO: 22442 - DNA, 1195 bp, Mus musculus
ctttttaatacaagccacacactttcagactgtataatccctgcctactcagatgacccttctgacctcttggccggaaccctgtttctttatttcttttagttcttttctaagatatcagctggattttatatccttaaatacttgaatattttagtacaattttccttctttgacagacaggtttattttctatcacctttagcaaaaataggatgtaggtggttgttattaaattttgtgttcatttcttgtttgctaaagactgcttaggtcagtcagtattgtagcatccaaagccattagaatgacagtcatgaaataaagattcaatcatttgtctctaaactctctgagacaaccacgtacatgttgctctagtgttagtccatgtcccaccaagttgttgacttttcttctatctattaactttattataactgacaaattatattaactctttcacgaagaacatcatgctaaaaagtcagatgatttagatctaagagcaactgatttagatcatgtgaattataagatatgattatctctgggatcctcccattttatagtcctgatgaacacacagcaaagtactggctccatcctgtttttgaaaaagagtctcatgtacgccagactgacctcaaactctctatgtagccaaggataacattgatccttggaatcctgatcctcctgcctccatctcttgatgagatatgtgctaccatgtctagtactatgtgtgctattgtggttctggggattgagcccagggcctcatgtgtgctaggcatgccctctaccaatgagctacatccctagacctttaaaagctttgtttctaacactatgtgcagtgtgttccagagaatacctaaagcatctctttgaaaaagaatttacttaaatccatgcttgaaattttcaatatccaatcagcacctaatagctttgctcagtagatccaacaacagttcagggatttgtaaatgttagctcagttttgttttcctctacctaggtttctgtctgttgctctaataaacaagaccaaaagcaattcaagggaggaaagggtttattatacctcacactgccaggtcacagtccattattgaggaaagtcaggacagaaactcaagcagaagcaggggagaaacactgccttactggctcattctcagccagt

SEQ ID NO: 22443 - DNA, 1195 bp, Mus musculus
aaagaggaaagtgatggtgtgtctgtcattcagtagggaccataactgctgcttacgttcagtgggtatggcttttatgggatatacagctaggttttgtgaattctttacatgatagcattcttttattttttttcgtaggataaaaaaatgcatagttttcttctatgagggatagagaacttttttgaaataatactatgttgattctttatttttgccttttacataagtgtctttataacatgtatctttagagcagttaagtctttggaaatatgtaaccagaactgttagtattgcttgtgatgctttagttagggttagtatatacatgtatacaccaaaatacaagcatgtagatttgcattttgtctcgtaaaattttattttaataaattcttcctgaagtaatgggaaacaaaatccatagttcatatgccacatgtagtatttctgtatttgaaagtagcccaaagatgagcattctaattctaaaatgaaaccagcagcctcatacaagcacattctttggttgagtcatggtctaacagttaataaatgacatcagccagatagagaacctctgagtcagtggggtactgttgataattaacaatgtactgtatgaattaagtgacatgttaaccctgactttatgtttcaaggttaaaatatgggcattatctcatcagacttatgggcattatgttaacaagatgaaccattttttcctgtgcttttagtatgtgatatgagaggattccagcttctagagagtgaacactgagggaaaggagagacatcgtaggataaagtttgttctcctggtaatggttaattgcagataaaaaaatttgaagggtgtttcagtagattaatatatagatttcatatctacattgtaagaaattaccattgtgattgggtcagaattgatgtgtgttatataaacattgcaaagcaaagctgtgagagaagctcagatagatgtatctttttgcaatataaagtttgctgaatgtatgagtttattgttttgttctctgtttccctagtagaccaaatccctactgaatccctcagggccgcccctaacactgcaacagaacatcaacttcagccttccttccccactgcccacactctctgtggatcccacagaacattcctttctagcctctcttccctgaat

SEQ ID NO: 22444 - DNA, 1171 bp, Mus musculus
tattatgtactatattatcatcaccttgggtcaggctttcttagctgtcttagtctttttaaaaaaatttttttgaggtagggtctcactgtgtagtcctggttggcttggagctcacagagattgtccagagtgctgtgtggttgcccggctttagtaaggggctggtatgctttatattgcggttcttatatttttatgtttcttagatttttgcttaggaaaaaactcaacgtctttttcttacccttgttttggaaagttttctcttctttctcatttcctttactgaatcagtacccaagtttagaaaaacttaagctgagacatgtagatattcttgacttgtatgacaagagccaagggtttcagagctagttttgtgtcattgttttatgtaagcagagcttattagaatatagacgctaacttgctttctcttcatagctgttcgatttggccgaattcctaagcgtgaaaaacagagaatgctaattgaaatgcaaagtgcaatgaagaccatgatgaacacccagttcagtggccacctgcagaatgacaccttagcagaacagcatgatcagtcagcactaccagctcaggaacagctgcggcccaagtcccagctggagcaagaaaacatcaaaaacactccttctgattttgcaaaggaggaagtgattggtatggtgaccagagcccacaaggatacctttctgtataatcaggaacatcgagaaaactcatctgagagcatgccacctcagagaggagaacggattcccaggaacatggagcaatataatttaaatcaagaccatcgtggcagtgggattcacaaccacttcccctgtagtgagaggcagcaacatctcagtggacagtacaaagggaggaacataatgcattacccaaacggccatgccgtttgtattgcaaatggacactgtatgaacttctccagtgcttatactcaaagagtctgtgatagaattccagtaggtggatgttctcagactgagaacagaaatagttacctgtgcaacactggagggaggatgcatctggtacagtgaaatcgattctttgctcgccttgtatcaaggaaagcttggaaggttttcttttggggggcatgttgagttgggaggtgggtgagaaagcccaagag

SEQ ID NO: 22445 - DNA, 1150 bp, Mus musculus
gagccttttatgcccttaatagaactgatccaagtgctactgaggactgctggctatgcctgtcctcgggtccacctattatgaaggaattgccttcaatggagatttcaacagaaccagcagccatacttcctgctcttggggaacaggacaaaaactgaccctgactgaagtacccgcgaggagtccaggtctctgtataggcaccccaccttccacccacaaacacctatgtggacaaattcagtccgtgtctagaacggaagctaattactatattataccttctccagttggctggtgggcttgcaatacaggacttactccctgtgtatctactaaggtttttaattcacctcatgatttttgtgtcatgatccagctgttaccccgcatatattatcaccctgcatccagtttagaagaaagctatgctggccggcggtcaaaaagagaaccaattactttaaccctggctgcattcatgggaataggtatggcattaagagtcgggacgggagtgtcagctttgatagaaggaagacagggaattcagtctttgagggatgctgtcaatgaagacctagcggcaatagagaagtccattgatgctttagaaaaatctttgacctccctgtctgaggtagttttgcagaacaggaaaggtcttgatttgttgttcctaaaggaaggaggactgtgtgctgcccttaaagaagagtgctgcttctacgcagatcatacaggaatagttagagactctatgcagaaactgaaagattagagcgaaggaaacagaaacgggatgctcaacgggggtggtttgagtcgtgatttgagtcacgaccatcttggataacttctttgatttccactgtagccggaccaatccttatgatatgcttagctttagttttcggcccttgtataataaataaaggaatggctttcatccagagtagaactgatacagtaaaactcatggttcttcaaaggcaatatcaacctatagttcaggtagatgaagagttaggggacaccaatctctaaaattctatgattagaattagtctaaacagaagaagaggggaataaaaggaaataaaacttgagacctgtgattcatgtaatgtatgtcaaatagcccaaa

SEQ ID NO: 22446 - DNA, 1965 bp, Mus musculus
ggtgtgtggggacctggcctgcttcagtctcatgacccagagttagaaggatttttgtctagtttacaggaaactgactggtctttctctgcatattttaggagagagctgggcgccattgtggggctttgagagtcctgaattcctactgggttggtgaagattccacatataaattttttgaggttatcctcattgatccgttccataaagctatcagaagaaatcctgacacccagtggatcaccaaaccagtccacaaacacagagaaatgcgtgggctgacatctgctggccgaaagagccgtggccttggaaagggccacaagttccaccacactattggtggttcccgccgtgcagcctggagaaggcgcaatactctccagctccaccgttaccgctaatacacgtgatatttgtaaaattcatatccaataaacaatttaggacagtcatttctgcttaaaggtgttatttgttaaaactagtctacagattgtcatgagtgttctgtgaaaatgtagaagttaagtgcaataattgaaaactgcaggtgatggcatatcttgtttctgatgtactttgcattatctgcttatgagattaagtgtatatagtgtttgtgccaagtggtgttctgtgtgtaagaccctgtaagaggtaaaaagtcctgaaactgaccctggatgtgttggtgcatgagatagaatctacagctttacgatggcatcttttggttcactgaagtggctgcttgggagtttgatgagtacaaactttatagagttggattttgcttagaaatgtgtaggaagagagggtttcaaaacctgttttgtgcatagaaaagtgagatcaactataacccacattttgagaattgaatccagtgttattttcagaagaccaggtaaatttgttggaagaggtttcactttctgttggatctagagtatggatttggagatgaaggttgaacattggatgtagtagggcttatttagggcagattatttccattagatttgtaaacttggttgtggttgcaagttaatatcaaccaagcaaatataagtttgattaagcttgcagacattaagcttttctagcagctggtgtgtgcagaggcagatggctctctggttccaggactacctacaatatagagaaattttctctattccagtcaattcatcatgggtaagaatagtccattttggtagtgttatttcatcgtttacaatctacctatgggtagtggctggtaactgcctggatgttgacatttcacaaaggccatacttaaccacacttttatttctatttgtgcgatgccttggagtagtttcccaaagtgattttgagtgtggaagaaatggtattgtccccgaacagctggcttggtctcaaaatctaattgatgcttttattaaattggttttcctttggagattttaaaaggatgatttgatttccagaaaatactagactcaaaatcttgatagctaaaattcttttctattcagcaaaacaagtcactgtatagaggttgttcaaatcaactaaagtaataaatgtcttaaacaagtggacctatgttatcttttatgttaaagcaaatgaggaacttggaaaggatagctaattgtagaaatgacaggcataattcgagagaacatgtaatagtatcctaagaattaggaaactgcttgggcctggtactgtggctcagttcagtccttagcactggtaagatttcctgctaacgccagtcagtggtcacagaaacttgcctttgtctttgccaccttaaagatcagtctacagggcagctagaggagtcctgttaaattgatcctggcctttttgtgctggaagctaaaagctacagcaaataagcattttcacgaagctaagcctgtcattttaactcctgccttcccttgtataggttcagggagc

SEQ ID NO: 22447 - DNA, 1113 bp, Mus musculus
gtgtgtgccaccactgccgggcgagaaagggtcttaataaattacccaggctttgaacttggaatctttgtgcccagacaccctgaatactgggactacagccacccggtttgcccttcatcccactaaacactggctggttggaactatgtagaccaggctagccttgatctcaagtcctcctcagctgggattaaagttctgtaccattatacacagtcttggccaattctttttttaaaaaaacatacttttttggttatctctcaggttaagtcagcccgcccttccaggtacttttctctcagctttgtcttctgatatattttatatagatcctgcctggtgtttctgttttttcttttggctgcatttagatcttgtgctttaatatacgtggaattgtttatgtaattaaaatgctttttgagactgggtgtcatgtagcctaggctagtctcaaacccagtgtgtagctgaggatgactctgaactttaatcctctggcatccaatcaccctgggatgaaggtgtgtgaatgctactatgctcagcgttcacttgactgaggctggagccatagccagcagcagtgctactgagtcactgagcctgctctgcaagatgagcaccagctcaccagagtggctcatttctcctgtgtctgctgccacttcatctgcagatcagaaaatgctttgagcaacaggcattgagtatatctttgacgctttagctggcttacactgttttgttttttgagacagggtttctttgtgtagccctggctgtcctggaactcactttgtagaccaggctggccttgaactcagaaatccacttgcctctgcctcccaagcctgggattaaaggcgtgcaccaccactgcctggctgtttattgtttttaagatatctccagggggctaaagagatggctcaggggttaagagcactgactacttcttccagaggtcctgagttcaatggccagcaaccacaaccatctttaaaggatctgatgccctcttctggtgtgtctgaagacagctacagtatctttatttatacacataaataaagtcataaaaagacatctccaaaatgtgctgtg

SEQ ID NO: 22448 - DNA, 1321 bp, Mus musculus
gaagggctaaaacagtggcccagctgaagagcaagtgttcttgcagaggggttcagcttccagcacccactaggggcccacatccataacctgcaaacagagtacccaaaaacataaaataaacctttttaaaaactgtttttaaagattagaagaaaacaccttctgacagtgagtgtttcagacatgggcaaagtatctgattttctttctccaaagtaacatacatgtttttcttccagctgaccctttggtgggaagtattgccactcagtacatgaccaacagagcagaacacgacagaatggccagacagtggaccaagagatacgctacataaactgggttttcagttcttacatgacttgtctgtcacagaagagagctgcttatgattttgaaagggtgggggtgggagttggtaaagagtaggctatttctatatcagatattattcagtcttacttcccaggattttgttgtaacttaaggtatcttgctacagtagacaaactggtaatagcgacttttagagctgaaactttgcaagattagctgacttttagtacaaaagaaagcatgtgtagatacttgtgttccattgatcagcttaaatttgtataggtacatgtcatttatgtaaagtcctattttcttgttcaaaaaaaatggaatttgtttttccttcttaaaaggaaacaatggtatttaacaagtttgcaaagatgagtttgttacctcgtatatgtaaaatggacacctggctacaagacaccatgtagttaatgtattttatcttatatgcaaattacttcaagggttgaatcacaatttgtggaaacctgtagtgaaataccttaagctgttaactgtaagtgtggaataggaattgttcagtcaattggtttagacttcttacgtctgcatttgtgctaataaacaatattaagaacaactactgaccctgctgtgttcatttcctctctgcagtctttgcttctgaaagcaggttaaggaatacttatcacttaatatatgccagagctgatacttacacagcacattttggagatgtctttttatgactttatttatgtgtataaataaagatactgtagctgtcttcagacacaccagaagagggcatcagatcctttaaagatggttgtggttgctggccattgaactcaggacctctggaagaagtagtcagtgctcttaacccctgagccatctctttagccccctggagatatcttaaaaacaataaacagccaggcagtggtggtgcacgcctttaatcccaggcttgggaggcaga

SEQ ID NO: 22449 - DNA, 1150 bp, Mus musculus
ctgccacaggatggggtgtgggatggcagaatttgtagacaaggatgtgacctccaaacaggactgggacaagtactgccactactttgctgggctggtgggaattgacctttcttgtctattctctgcctcagagtttgaagaccccatagttggtgaagacatagagtgtgccaactcaatgggtctgttcctgcagaaaacaaatatcattcgtgattatctggaagatcaacaggaaggaagtaagttttggcctcgggaggtgtggggcagatacattaagttggaagactttgctaagccagagaacgtagatgtggccctgcagtgcttgaatgaactcataaccaacgccctacagcacatccctgacatcctcacctatctgtcaaggctccggaaccagagtgtgtttaacttctgtgctattccacaggtaatggccattgccacactggctgcctgttacaataaccagcaggtattcagaggaatagtgaagattcggaaggggcaagcagtcaccctcatgatggatgccaccaacatgcctgccatcaaagctatcatataccagtacatagaagagatttatcactggatccccaactcagacccatcatcaagcaaaaccaagcaggtcatctccaacatcaggacacagaaccttcccaactgccagctcatctcctgaagccactactcccccatttacctgtcatttatcatgctcttggctgccctgagctggcagtacctgagcaccctgtcccaggtcacagaagactatgtccagagagaacactgattttgtttagccggaagtggaagttcccgtggagtgggtttttccttttcctccagctggatttttgacttcccttgtttttcctcctactctaaaatctttgggagaactgagtgtgggacctttaggaactgggcagaggaaaggatgccttgccctcagcagcctggtgctggctgggacttggttcctctgcctcttgtagccactggcagcacgccgactgctgcactttagatggtgaggccacatgtgatggtcacaagagcctagtgaacctggctagaatgctgattggatttatttaatttgaaacagcctttgaatacctatgacaat

SEQ ID NO: 22450 - DNA, 1239 bp, Mus musculus
atggtccttctttctgtctcagctccaaactttgtctctgtaactactttcatgggtattttgttccccattctaaggagggacgaagtatccagattgtatgtcccaattccggggaatgccagggccaggttgtgggagtgggtgggttggggagcagggtgtgtgtgtgtggggggggggtataggagactttcaggatagcatttgaattggaaatgaagaaaatatcaaataaaaaattgtaataaaaaaagaagtgtgattcatgccactgaaagtataacaacgtaaaaacagaattctaggcctttaggcccaggcttgggaatgtggcctttgtaaaggtatgctaatcataaaagagatagcgacattcctctacccacctgcttcctgggttcaaagagtgctcattcaaagaaaatcacccagaacctgcaatgcaaatgtgctattgttaggggctcttagaagctgtcttgagagttaacaattaccaggtattccttgtgactcttgtaactttacacttccttgtgactcttaactggtatcttccaacaacgccctccccacttccttgagtttcggtttcttcctttaaatacccccttacccagctactcggggcgccacggtcctctacccctgcgtggtgtatgaccatgggcccgagagcgctcttgaacaaaaatcctcttgcaatttgcagcaagacccgtttcttgtgggtgattttggggtgtcgcctctcctgagtcagaacgtgggggagtcctcacgttgtgggtctttcaccaccacttggattagccttgaatacacgctaagtgaaaatagccagacataaaagaattgtacagttcttttatgtctggctattttcttttttaataacatgtccagaatcaatcaataaatccacagaggttgagaatagattagaagttgtctggagctaagaattgactgcttattaatgaataaactctttattttgggggtaatagtttttttgggtaagacaatgctggtggctctgtgacttgataacattaacactaaatcatacactttaaaattactggtgaatttcatgttatgtgaattgtatctcagtccctgaaactaccctctttaagaattcatttgcacctaattcatccccctgccccccgccccccgcccccaagcacatgcagtttcctgcagcagtaactttgtgaaggactttta

SEQ ID NO: 22451 - DNA, 1200 bp, Mus musculus
agaaaattcaccacggtctcagctctacataagaagttcttcatgcgccgggcgtggtggtacacgcctttaatcccagcactcgggaggaagaggcaggtggatttctgagtttgaggccagcctggtctacaaagtgagttccaggacagccagggctacacagagaaaccctgtcttgaaaacccaaaaaaaaaaaaaaaaaaaaaaaaaaaaagttcattacagcttcctttgtctttaatcatttccatgataattcaggcttttggaaggccaccctctcatccttgctcagtgctgtagagactttatttctccttgttgagctgtctcttcatattttccttcccaaggcctgagttagctcttgatatctccactactttgtttcccagcagaaatgcttcctttagccatgcataatctttgttaggtagaaatataatcattatatttctcttttcaaaactcccagtagtttttgtatcctgtctgctaaatttgttgttcatgaaactttcaaagaccctaccttgcttttactcccatccagaaatgctttctcctaggccagtgggtctcacctgtgggttacaacctgtacaaatgaccctttcatctgggtcacatgtcccatattctatatttcagatatttacatggcagttcataacagtagcaaaattagagtcatgaagtagtaactaaaataattttatggctggtctgaccacaacatgaagaattaagtgtctcagaggatcacagtgttaggaaggttgagagtcactgtcctgggcaatactcatccctaagcttgggaacacattatttctcccagcttcacagttactagtgttttcctaccactgtcatatgtcctcttctggttctcctccaagtcctagcacagtgtggtagcttagtgacctccatgccctgagggatcttctctggactttgttcacactgacatggccttttgttaccactgtgccactgctcatagtaagtgccacactggacacataaacccaggaggcctttggagcttgaaggtaatcagccagttgtcatctttgcattttataaatgatgcatgatttgtgatttaccttgattatgttagttggcactggattccaaattctaccagtcctgtaactgcagaagtatttgaaagcacccagtggcagg

SEQ ID NO: 22452 - DNA, 1212 bp, Mus musculus
gttcctggagattatcagttacatatgaagcacagtggcccaggaatgttctgattgcagatccctgaccctgctgttaggcacagaatcactgcctactaagtaagtggagattgtagattttaaattatccttaatactgtctcaaaaagctagtttcccgagaacaagaagagaatttattgctgaaacattacaaaagactagttttatattattgatctgattctttgttgtcttgttttctgttattgatatttacataaaaaacattatggctttatactatgtctctgagtacaccattaaaaaaaaagaattattttagaccaaagaagacttctctcacagtatggtaaacatgtttttgtttgtttatttgctttttgtttttttgctttttttccaacattgagtgaatttggagtctttccaatgcaccttcccaagatattagtttataaaagaattcagacattttcttcctttttctttttattaaagagagcatcttgtgtaaagtcatttgcagattcatatgtgactagtttatatccaaatagcagctctaaagtccatgttgctaatgtcccagagcttgaccccatggtgagctgccatgtgaacactgtggctgacatagtgcagttgagagctgttgcagatgccacacacgtacattttatctccaccacaggtctttaaatgtgttcttcctgttccactgttgcagaatcacaggccacattgctatatttctgtagctgactacagttttgtgttttgctttgttttgttttgttttgttttgttttgttttgtttttttctcccagaaaagcagttactggccgagcagatcctaacctcagttttctacagatgggtcaattagaagacatgaatacagacccctctggggtgggatgctaggatgctcattaggcagcttggagaggagaggattactcataatctcaaggctccctctcttcctgagtagatgggcgagtgcttcctttggctctttatgaagactactctttccctctatcatcctgaactaaagaaagggttaagggatcagatgaaatttgagttctgctgacatggtaagataacaaacttttagaacacacacaacacaagcacctcctaggacttactgtgaagacctcttaaaagaatctggcacattatcagctgaggagat

SEQ ID NO: 22453 - DNA, 1184 bp, Mus musculus
tccatatatgagttcaaagggtgagatgaggagagatcacttggggagagctcatagcctgaaaagagccagaggtaggagttttacccaatcgaagtgaagttcctataacagcatagcaacagtgattattaaagagcagttagtttttctctaccttacctgaagattgagggtggtatggaatatgaaaatgccagggaatgtctagggccttagatagaacttgagaaatttgggaagtaaattcaggaccattgtttgactagagggaggctgggacaccaaacctggggatgatctctcggaggagatcagagactttctgaacccttttgttagctgtgggaaatgtttccacccaccccctgatggtgttcaccaagaccaggaggtacttggcacgtctgacagtgggcttttgggtaaatcaagttgccagtcagtttcaggaagggaacctctagcctgatgggtaggaaaagggatgctatgatacctcgagttggagtctgatgtctgacagattttgcagtgatagattttttaagaaacttaagaagtcttcaggagtaggctgtagatgggtcatgacaaaataagacaatgcttggctgttaggatgaaagagttggtgaagataggacagaatttgacaagtgtcagggggtgaaggggaggatgtggtttgcagtgtaaggatatcctgaggaaggtgagatgagtccaggcccctaagggccacagctgtagctgcctcatcggctcagttgttccccttggagacaatagagtcatctgtctggtaggatctgcagtggacaattccaataactggggagacgggaggcctttagcatggacataatgtggtttgcattagttactgatcctccttttgtggtaagtaaactgagctccttccagatagtgtcatgggacaggaggatatggaaagcatatttggaatctgtgtagatgttgagggattgtccctgtgccagttgaaaggcacaggttagggctattggttcagcctgttgattgatggtgtgggtaggaagtgcctgtgcctccactacctcgatgtctgacactgtggcatagccagcttttctggcccctttctatagaaaggagcttccatttgtataccaggaataaaagacttgagacaatgtgcc

SEQ ID NO: 22454 - DNA, 1120 bp, Mus musculus
accctgaggcccaaccagaaagagaacatgccaggaacccagtgacaccaccaagagcttggtcctggcttgagatgcctcctcagtggatctcagttccaccatccctctagagagaccagaagatgtaggcagccaggtctttcctctgcctccctatgtattctgcctccctatgatgaccacagagatgtcttctcttggcttattaacacctgaacaatgtgccatttggcttcagagccctcaagcctgtggttttagaagtcagatcatgaattcaatgtccacaatacttgggtgctctggagatactcagatctttaaccctgtcactcaaggcccatgtctttggattaaaaagtaatgcagggggagcacatggtcaacacactgatcaattctccttacttaaagaccaaacacccagatttggtaataggatccagtttctgtctgggtgtatgtagtctcccctcccctagcctgaaacctgctttctcgggatggagcttcctgctcattcgttttgccacgcccactgctggaacctgaggagccacacacgttcacctttctactggaccagatattattcggcgggaatcgggtcccctcccccttcctttataactagtgtcgcaacaataaaatttgagccttgatcagagtaactgtcttggctacattcttttctctcgccacctagctcctcttctcttccaggtttccaaaatgcctttccaggctagaacccaggttgtggtctgctggccggacacaacaggtgtatcaactctgacaggtgtatggtgatagtaaagaagtgcctgtcacccacaacagctgataatgaaagttaaggttcacattgtcagggagaggaggtcagaggagttctgagaacatgaggtcatggcctagaggacaattctctccctagtactactgtcagatagccactgaagctaaaagaagccatgagagtgaagttcagtaatgccctgatctaaactggcataggatagacactaggtgactcctgattatctcattatgtccctatgtaacatccacgatccccaataaaagtaaaaacttgaagttcacagcataacag

SEQ ID NO: 22455 - DNA, 1066 bp, Mus musculus
ctgggttccagggtgacggacggagctgtgtgggtgagagacatgttctccatttctgtcgcatagtcctggttttcaccttctctttcctgcatcaggcaatgattttagcctctcttaatctgggcaccatcatatgaaagcggaggcagagtctggctaggtttgggaaggtagtttagaggtgggtatttgtgttagagctatagaaagaaatcatcttacaaaaaaatataattgtttcacttttctaaagtattcaaaaattatcttcctatggcttaactggaaagatttgaaaatggttgtctttgtttctgatgaactgcaacttgggtctttctgcccagtgtccaaaactctcaaatttctatgctttccatttgccaacaattatttccactgaagcatcagagtgctggggagattaagttcttggacctttgtttctggaacactcaggctcagtgctttctgtcctcatttttttgcctagatgtcaatgagtgtgccactggcttccaccgctgtggccctaattctgtgtgtgtcaacttggtgggaagctacaggtgtgaatgccgcagtggctatgaatttgcagatgaccagcacacttgtatctgtgagtaccagaatccctcttcccttcagctaggaggctgctggaccccaccttgtgcttcactgacgtctctaccgtgcctgttacaatgaggctctggtgtgtagcgtttctgaagtatgtagccctctgctgcagtatgtagccctctgctgcagtatatagccctctactgcagtatatagccctctgctgcagtatatagccctctgctgcagtatgtagccctctgctgcagtatgtagccctctgctgcagtatgtagccctctgctgcagtatatagccctctgctgcagtatatagccctctgctgcagtatgtagccctctgctgcagtatatagccctctgctgcagtatgtagccctctgctgcagtatgtagccctctgctgcagtatatagccctctgctgcagtatatagccctctgctgcagtat

SEQ ID NO: 22456 - DNA, 1149 bp, Mus musculus
cctgaggatgttctcagttgggattctggagtcacaggaccagacagcaattagtaacaccccagctctagaaagaattcatgttgaaaggtacctgtcttatgtgaggagccaaagatccccatccacaataaatatactctctatggatggatctgaaagacctagaattccaaatttatccaattgatggagctgataataatacacatttcagtctccagtaagctgacagagtaccaatgggactgggaactgtatggggtgtggctatctgtcggaggtgtgcagtgctctggggagatgcaagctgtaacctgcatctgttttgaccacttattgtcatgtctaatattttaaacacaaacatacactagcacatctcaactctaataggtacatgaaccttgagctagaaatcttgctaaaattgagattctgactgagaccccgtattccttaagctccgcaggtgtgccgatgctgttagtctgtgggcgggacgatgaagagaaaggttcgcactcagctctaaactctcactttctttccagtgatcgccccacctcccaacccttgcctcgatggcagtcacacctgtgcccctgaggggcaagccaggtgcattcaccatggaggcagctcattcagttgtgcctgcctgccaggcttcattggcactgggcatcagtgttctggtaagtacctgtgggtgactcttgaggactctgcatggtccctttaggtatacatcctcatagagacacagcttctcccctcctgtgactcatgcagccttgggattgctgaaagagaacaggcatctttagagtcaggagggagcccaggggtgttcttcaggcgccagactggtgaacacccatggttgtcttggagtgttgccatcagtttggaaactttctgttccttggagctagtgtaggctggagggactcatacctacagttctaactaaattctcccaccttcatcatacacctagtgagatgggctgttatgttggttaacttggttggttggttgattggctggctggctggcaggttgcttggttggctggttggttggttggttgattggttggttggtttgtttgtgacaggctttggtctccctttgtagccatgg

SEQ ID NO: 22457 - DNA, 1145 bp, Mus musculus
atggcccaggcactcctgagtgtcactgagggttttctgttggggtttctgaggtgggaataaagtcatctcatcaatatgctgggttgacttatcatcaaggtatctcaggatcccaatctggatttaacactggctttgccactgttataagaatagcttgtctcaggccagagtgagactattttgccccccagccctgggtgaaaggggacagtaccaccctagggccccagggtacatttggctgctgtaccacatcctaaaaccctgcacttggttagaaggctagttatctttatcttttgagtaaatggcagaaatatgagtaattaatcttcaggaaaaaacaaaacaaaacaaaaaacctcagaaaccaggatttctttgaaatatgttccaggaagaactgggtaattgtggaggttcttacatacagaagtaactttcctccctctgtccaccttcccacaaacaggcatacccaccgtcgctccacccgtggtccggcccacaccccggcccgatgtgactcctccatctgtgggcaccttcctgctctatgcccagggccaacagattggccacttgcccctcaatggcagcaggcttcagaaggacgcagcccggaccctgctgtcactgcatgtaaactgagtttctccaggagggctgggctccacgaggagggtggggtctgagatgaggagggtggggtctgggatgaggagggtggggtctgggatgaggagggtggggtctgggatgaggttgcgccttcaggcttgtgggcctggaggaactgagctttgtggttttcagagggaaatgcagtgctgtgcagtgcagggactcctggcatgcatgcctctgggcttcatctgctttagtggggctcagttgctggaaatcatgtctaacccactctagccactatatcctgagggcatcatgaaagtccaaatagcggaagaatttcggagctgttggctgttcatgggaagatcattgttacctcaggttcctgggggttctgttctggtcacagacatttggaagtgaaaacaaaacaaaacaaacaaacaaaaaaccacagaggaggtggtcatttgagacatcagggtagaaatcaggaccacttgtca

SEQ ID NO: 22458 - DNA, 1740 bp, Mus musculus
tattaagaggcaggggtggctacaccttgggctggggaggatttcattctgttcacccagtagggaaatcttgttggcatgtgttagcagattttagaaagggtctttaagaaagtgccaggaacacttagaagcgttcatcttttgcaccattaaatattaagggcttacctagcgggatgctcctctcatcagggaaagggctggtttttctcatgaagtgaccgtgttcacagccagtgctaacagtactggaggagcttgctgtctggaggtagtcagtggggccctttataaatgccttactgactgccgttttggagaaaatgaaagcatgcaggttaaacggctgagcctggctctgatccgagggaggaggctcccccagcaccgcaccaccacagcgcaggttgttcacagtagtgctgtgtagccgtgaacttaaggttggggattcaggaatcctaatccttctgatgtcaccattggtcctcaaagggctccatagttgtggggattgactatgactgccgggagaggatggtctactggacagacgttgctggtcggaccatcagccgtgccagcttggaggcaggagccgaacccgagaccatcattacctcaggtcagcagctcctcccatggatacttggcggtaccttgtgtgttgcttccgttggcctgtttggtcccagtttctcccacgctcatctaaagggaaggttaagttctctgctggtgactttagaaaggtggtttaggataggatgaatgaactgccactccaagagtggttcgcagtgagactgcagggtctggcagtttagattgcctgtccctagcaccacggatgccaggtgccatcagggcagcaaggtccagcacagaagagactggatatggtttaaaaagttagccttcgtcctggggcttaaggcttttctgttctatgctctggattctgtaagctgctcagcagacggggaacttgatttcgccttctacaccagccaatgctcctgtcttacttttatttccaggtttgataagcccggaaggacttgccatcgaccacttccgtagaacaatgtactggacagatagtggcctggataagatagagcgggccgaactggatggttccgagcggaaagtcctcttccacacagatctggtgaatccacgagccatcactgtggatccaatccgagggttagctggctttctttggtctctcatgcagatctgttttggagaccctggctcttatatatgtcatgggaaggtctagatagaccagaataaaaactcaaatacagtaattcaccagatatgtagacccgctgctgggtgtcaagcattcttgtaggcaaaaatcaggggttttttttgttttttgttttgagcttgcatgcattgtacaaggcattcggaagtaagatgacattcagtaaagatgttagttagtctgggatgggatgtgtcacacggagaagccagaccccatcatggagaatccagaggatgcctgggtcagacgatcattaggcagggccttggaaaaggatgggtctgcagagggagttgtttccttcagccgttccctgagcagaaacaccacagcagggtttttgggtttttttttgtttctgtttttttctggatggagagtgtacaacgtcaagataaaaatgttctctctgtggcagtgccaaggccgtcaactggggtatccag

SEQ ID NO: 22459 - DNA, 1733 bp, Mus musculus
aaacaaattatagataataataaatgttttccttaaagactaaaaaatgctatttgactccccgctaagaacgcttcaaaacagaacataggtgcacgcctgaatcctttcccccattcctacagtttcacaagacctaatggtagtacttgaatagaccccatgggcctagccagaattaggaactgatttaatcactagttcctatggccacagaacataaatacattctgtgtgctgttctagggttttgacttagagaatggccagggagaaggaacagtcgtttgcatttcctgtaagtacctaactgatactggtggaggggctacatccagaatcattggtatagacaaattgagtcaaaacacatttagtggaattgctttttaatgtattatggaaaagtgcccaactgttatctactgaaacttgaccttgtgactgaccatccatgaatccttccttccttcttttcctagggatggtgttatatcagtgaataaggacagtggccagtttactgatgagtttctccctgagcagcggtctcatctctatgggatcactgcagtctacccgtactgtccaacaggtgagtctatcaaagtgcatcatgaggcttccttggaccagcgggtagagaggggctgtgctaactgtcagcactgcgttccttaactaatgatacactgctgtccactcccctcacaggaagaaaatgaacactaaatgtataggaggatttcaagtttacaagaatcttgtcctaagaatatttgctacgaaggcaaagacagtggaaaaggaattggccattatgagctcttggcacacaagtgagcattttcagtgcagtgagactcaagtatattttgtgaaatgtatacctcaatctttactactgtatttttaaaaacaaaggttatcacaagtttaaaatagaattttaatcattgcttattaaatcaacttttgtaaacagttatttaaaaggccaaattcattcaacatagaaccaatgagagcaaagacactaaatctgatttttgtttgccatggattctacctggccaagaaaagtaaagcaaacagatggctatgagaactgattcctgaagcccactgaggcccgccacagacggaccatggggttggcccagcgaagtcctcagactttatttatactaaggtgctacaaagagtccccaagtgcctctacagaagtatccctcaaaagtactccgggtaaaacaccaaagatgcagcagttcttcaattttctatataattccaataaaatattttaaagctttcttgtggtctaaatatctatattgtctccaggacaaagttaagggttggagtgaatgtaaccataaagggtgcacaataattgtagaaacagaatacatggactcaaaacagagcaaaacaaacaagccttttacttctccaactttattaaagaaaaagcagcggtggtaaatctctagaacatagtcaatctcctggggttctcccttcaaagtgtgacatctgatttccaagcacatgctggtgtaatggttcccatcactaggcaggtgagaagctgacatcctcatgtgctcatctcccaacttttcccagtctgtggtctgtctttggatcagcaatgatggcctggacggctactatggcttcattaatttttgtctgtagctctctgagctcttctatgtgcagcaacc

SEQ ID NO: 22460 - DNA, 1156 bp, Mus musculus
atttatttatttatttatttatatttttagaatttgagacaggcttttgacaagctgcccattgtccctggacttaatttgtagctcaggcaggtgtgtgacttgtggttgtcctgcttggcttctgtaactgggaccgtgccctgcttctgtttaatttctaggtacctcatagttgtgccctgtcgtccctccatctgcccctcccccctttacctgttcttcacttcttcagtcccaaacttaagaggtctaaaagactatatttcctaatcttttgggaagtagaggaggaggagggtcaaaggtcagggccagcctttggtgcattaaagcttatctcagaaacattactgagaagacccttgtgtccagtgtaccagtaaggacttaaacttaatcaaaaagttacattattttttttgaaattttaattgtagtgaagtataataatttttgagtggatatcataatctggctaaatgacattcagtaaataagcaatatttatcttaatcttaagttgtagttattttaccttgttgcttgttttttatagctgaaaagtacaaggacttagtacctgataacaggaaaaatactgacaacgcagctaaaaatgcagagccactgatcaacttggatggtgagtgtggtgcgtacaggtggcagccctggttttgtagctgctttccacttgtatgcccaagtgcaagcccaacaggagtgcatagcagcctctctcctgtttgagactcagttgcagtgagctttccctctctcccccatcccctcaacacagaaatttgaatgttaaaagcaatggtgtttatttttttgcttcaagtaatttggattttgatttcttgctcattgtgacactcattggttaccttcctggcaatataatttatttttttaatctagtgacaaatggtaaaatgtttcattattacaagtcccacatgcccttttagcaatttccatttaaagcctgaagattatggaaatcacctagagtatagtgtgttaaataagctttccccgactgttgcattgggacctgcagtaagctattttcaagagggaatgagcttgcatactccaaagcctctgtgacaggaaggcacatctggggaatgcacccatcgagtgc

SEQ ID NO: 22461 - DNA, 1141 bp, Mus musculus
cttcttttaaaagttgcactttttatctaattgccctgtgcattgggacctggagtcaaagctaaggttctggtcccagatctaagtggtatggccagtgttaagtatcagatttttgtaggttgtagtttcgttgtctaaatgagattattcttgtatcttgtcctacctgggatctccagttacaaatattttaaaaaggattattttattgttttcttctaagcatttttttttctgacctgtataatgacatcaaaggtttaataatgatcgatgtggtggcgcacactgagatcctggcaccaggaaggtggaggggagagaatcaggagttccaggccagtcctggatatctgggattcaaggcaggcctggaagaaattcttaaagctccaaactgaggcctctgtcggtctgctgttctgtgttctgtggctctatgataatgaaatagattttttttccccctctttcccttcacagtatctcaaagatgttaactgtcctttcaagattcaggatcggcaagaagcgattgactggcttcttggtttagctgttagacttgaatatggagataacggtatgttttgtgcaggatatagggtgggtgttggcttatggggcttcttaaaagatttttatttttaattgtatatgtattatatgcattcctactgtattcagaagccaggaaaggatatcagatctgcgggagctagagttacaaatgtgaactaccatgtgggtactgggaatctaatctaggtcctttgccagggctttaaccgctgagacagcactcactccagctcatctttagttcactgttgtggatagtttttagatgagaaagaaggcggtgggaagaggtttcttatcttgtattttgctcttggtttattttattacaaaaagtggacctgctttgtttctgatgctttcattattttttagaatttggaagttgttttctgaaaaaggttaatagaattccttaacaaaggaacgttacttggttaatttgccagcttccactgcaactaagccattgacactgctgccaacatcagagcccttggggtttggagtattggttgcagcagctatttcacaggagatagaaacatactggtgt

SEQ ID NO: 22462 - DNA, 2102 bp, Mus musculus
cacgggctgggacctcaaggggatagactacccaccatccctgcatccctggcacctttggtggtctattccaagaatcgggtgcccagcttggaagaggtatctcagactctaaaaaacaagggacatgtgtcaaggccacttggtgaggaggctggggcacaggcccccaaggatagttaccaaacctctgaagtgtttattaaccaactggaccgtatcagtgaggagggagagccgtgggaagccctggactaccacccgctcatcttccaaaatgccaacattacctttgaaaatgaagaaaccggcctctcagacgaggagacctctaagtcttctgtggaggacaacctgacctcaaaggagcagcctgaacagggacccatggctgaggcacccttgagcagcacgggtgaattcccttcatccgatgagtccaccttcaccagcaccgagtcagagctctccgtgccttacgagcagctgatgaacgaatacaacaaggcagataaccccaggggcacgtgaggtgggcctggctccccacttgctttccagtggcttcctctcacgaggattgtcctgtgatggccagaccccagggagaaggctctggaaatgagatggggagccagggacctgcctttccttctgtcctctccacttggttgcttccatgggatgtggtgttggcccaggacaggcctccgttctgtggcccagtagggaggctgctgtcctgggcctgcccggcaggtgtattgctgattcaggcacgtaggccgcaacactcaccctggaggtcctgggtttgctgcttgtgtcttcccccatcactcggttgactgttgtacggttctctgaggccaggagcttcagctgagttcaccagtgttaatgggcaacgcccttgtgccttgcactaagctagacatttggaaggaggagctcataagacccaggtttggcatgtggttctcgggtgttctgggaaagcacagatatgatggggtttggggcctctcagtaccccagcagtagcaggacctgcttgcccaagtaggcatcactgcccagcaagccccttactgcaaacctcagggcaggggatgtaggggagagctatgtgtgtcctctgtgtggagtcatgcccacctcagattccctctgaacaacaacagcaggccaaagggtccctgtgccccgaaagtgcagaagaaagatggagcctccggatgtggtcagggagctcagagatgaggtgcaggcccctcagccccagcctaggcacccatactcccagcccaccgtctcatttcagagagattctctcactgcctctccctcctctcttagtgggggccaaattgttcttggctcatagaactgtgaattgagcccccccctccagccactatatggtattagcatgtgtaactgccaatcaatgggcatgcgtgtgcacatttgggctggggagaaaagaaaatgtgaatcttactggtccagttcctagcgaggtctgggaactagctgctgtatatgtccttgatgctcagcccactctggcctaaatgctttttgttattaatattttttaatgaactgttatttttatacccagagccagtaaagaacagggtccctgccattagaatggaggtctgtcaggcactctgttgtccttccaactcagcttgtcctttgtcaagccaaggtctagctacggaggggcaggcgcaggtctcgggtgaggggcagctgataacctgcctcagccccttcccctgctgtgtgcatttgcggaggggcatatagggccagagcccccacacgttaggacagtgagaggtgtgtatccatacctccaccattatcaaagcggttgtagaggccacagcagcctcggtggggggaagagccaggctcctgtgagaggacctcagctgaatgtcctggcggcacaccaaccacgctgtgtgcatgtgccgatggtgaaggcagatgtaatttattttaacatttttttacaataaaacacatgaacaagcccacttggtgtgtggtatgtttgcggtgggagcacggtggggccgtgg

SEQ ID NO: 22463 - DNA, 1147 bp, Mus musculus
ctgtaaaatgtttcagctatataataaagaactgctacccaccttggtatcctggtggttaaatgaggacacttgagatgtgtggctgctgctggtggtattagtttggggcaggggctcaggtagcccggcctggccttgaagcataatcctgattcccttccccctgctttctttcttccttgttgggttttggtttggtttggtttttgagacagggtttctctgtgtagccctggctgtcttggaacttgcactgtagaccaatggggcctggaactcatagatttacctgtccctcctccttagtgctgggattaaaggcatgtgccaccattggcgggctcctctgtttcctcgagtgttggcattacaagtgtgtgccaccatgccaggtttatgtcatgtttggaatggagcttagagtatgtatgtttgctaggcaaggtggactccaccttggagctacatctcttgtcactgataaatcctcttgtctctgaccttctctttggttttcttttttaggtggtgtctgatgctgcggatcagggtgtggccatcaccgggaaccagactttcaacaactggaactggcccaatgcaatgatttttgctgccacagtcatcaccaccatcggtaagtccccgaacaccttcagtacaccaagatccacatcctcactcctcagaaccgtacaggaatccagctttggtgactgtaagtttcaccctggccttttggttaggaaggacttagtaagtcccgagtgattggccatacctatgcaaccacttccataggtcctgatttagactgtatttttttttcattatttctgcatgcctatgtgtgtggtgtgcacacatgtgagtgtgtgtttgcatttgtgtaggcacacatatattcgaggatatatgtgtttggtggtccaaggttaacatctagtatcttctttgattgttctctaccttatatattgagatgtggtctctagctaacccaaaaattcacctagtctagctagtttgttctagagatcctatgtctgtgccaccgtttgttgggatgataggccacccacctcacccacccagcctttacatggctcccaaggttctttattccatttggactcttcaagca

SEQ ID NO: 22464 - DNA, 1209 bp, Mus musculus
accgggaagcaagcgtgcacgcatgcacgcggcagggcagctgagctgcaggtgagccagctctttcctaggttgtctgccgtggatggggagttgaccagtcagcagttcccacggtgacctcctttgtagcctgctcaaggtgctgtttttagaaaccttgagcaatggcttcctgtggtcactccttccatctctcctcaaggtcggactgaattgaatagagtggggagcctaagtgtacacgaaccctaaagttgtagtcaagattagataagggtgtgtgtctcctggagtcttttttaagctttacaaaaaactttcctttgacaattccgtacagtgttttcagtcatatccaccgtagctcccccccttctccatagttccccccaacatgtggcctgcctgctatcacgtccccctaattagcgttatctgtgtgcacatgggcaacctacagggagccacaatccctaagaaaagtaatccctcattccctagcaggcgtgagctgcccagctcctcagctagggcggatgggtcctcatgagccatgctggagttactgacagaccttgtacaggtaaccatcgtggccgcgagtccctgagtgtaacagcgtgcgccaacctcgagacagcacttcttggcattcatctgcctctgaccctcttttatagtattctctgcatagtccttgctctgctgtaggtgacaggtgacattccccaacacagtaccagggttgacactggagaatcaggtttttctgtgcaaagggactctactctccctttggcttcttatggctctgccaccagcttgcttgtgtggtttcaaccatgtcacggaccccctcagcagattcctcacgtataaatagtaagagaggtgtccagggctctctgggtattctggctccccttgaagggtcttgtgctgtagagagagaggactggtgtctgctgtatggaggagcgggagatgctgactgacatatgagctcctacagtttgatacgggagagtgagggcacaggactgaaaggcctgcctgtttgtctggaagagatacattcaacacaggggctcttcccagagccctaaaccacccttggaaggaaacctctctcgcttgtaaagcacatcccaagcctggtaggcctgtggggcctaactgaagccattaccctcttggcattggtca

SEQ ID NO: 22465 - DNA, 1193 bp, Mus musculus
tgatgagaatggaacctcaggtctggcatatgctaagcaaatgcactctcgccaagccacatcccaactgtcaactgaatattcggttttactgtctttttttttttgtatgtatacgggcattttaactgcatgtatgtctgtgcatcatgtgtgtgtagtgaataaggaaggcagcagagggccttgcatcccttggctggagttgcagatggttgtggggtgctacgtggctgctgggacttaaaccctagtccttctggaagagcagccagtgcactcgaccgttgagccagctctccagcccctcgatggaatattttcaacatgaaagtgggtggggaaggatggcgtgggtcttccccttccaaagcccccagagaggtataatttagcaccatggtgcttgaggtgcagccacaggccagagaggtgagggtcagatgacagagccttgtgagtgtagccaaggaatttgaactccatcaaatgtttgccattttcaagaggggaagtggataacattacagaaagttccctccttcttcacagccatttacaacttgcaaacagtggaatattctgactgaaattaaatttccgtaggccgagccactcactctgtgagtgttctgataaggacgcctccttcctttcagcttctggtgaaatgggagtgtggcttttcccagaagctcatagtctttagccccttcttcacctcagacctcattaaggtgcctcttttcctgtgtaggtcagggtctgggatggtctacccagacactccattccaggctacctttcccagccgtccttcatgtcctcttgtggaaaaggacaggataccaaagttcttcttgaagccttttgtgagacttaactccaatccttaagtaaccaaaaaccccaatgggcgggtggtgtggggggcttctcttgctggccagcttttctgtgcaggaagcctcaaaaaaaaaaaaaaaaaccaaaaaacaactggagggtcttgagcccttgagctcagtcttgctggggagaggaaattgctctgggggtggcagagtgaggggaaatgcagactgacgtgccgagtgatgggtgacagatggtggaggccagaggggaggacacggttgcagggccttggaagtttcacttgccatttccagaagtctgcgcaagaacccttt

SEQ ID NO: 22466 - DNA, 1182 bp, Mus musculus
aagttaaagtggccacaagggcaacagctccagtcttgggggttcccctacagcaatatccacctttgccagcccaccgcaggagacttgctgtctctaagtgacctgagttaattggttcagcttgactttggactgctgggaaattctattttttgtttcccttggaacaggcacacagtcttctccagtgtggctgcctgattgactcggcactgtctccgtcactgaagctgtgtgtacacccttcagttctgcacagctgtttttagaagtccctctttcttctccctcccggaaagctgaggactgagttaaattgacaggctgacaattcatctaagtcttttaggtagaaggttaaacaaacagtgttatgccttcatacagaggcgtctcaggaggtcaggtcagagtggagaatagagaatagtggggggagagagtcttaactttgtggggtgtcctctcttagcctaggaagggtcaacaagcttcttgatgggatcatatgtcccactgtcttctgagactgggatagggcaacaggccttcttttctgccctggtatcccaaagtgagccctggcgttccctgaaccccctcccagcttctcaccacattctaggggattttgggtatacctcctttcttttttttaaatttatttattgttatatgtaagacactgtagcagtattcagacacaccagaagagggcatcagatctcattatggatggttatgagccaccatgtggttgctgggatttgaactcaggaccttaggaagaacagtcagtgctcttaaccactgagccatctctccagctccctggtataactcctttcatggttaaacccttaaatacatcccagttttgaaattctgacatctgttctaacaccaaccctccgccaaatttatgaaaaaacaaaactgtggactgtttaatgacttcagaacaaaatgttcaaagcgaagaatattgaaaggtttagagaaaaacttctctgagcccagttcaggggaacagagggttaatacgagcactcactttgtttcaagccaaggtggacactgtgaggctcactggtctcacccacctttggtaaaagagtcattaggtcttttgagccttgatctaaccctgcttgaattctcacagtctagaactgcaga

SEQ ID NO: 22467 - DNA, 1182 bp, Mus musculus
taacaggtccctactaggtagcacatagtggtggtttctgccttcattgtgtcagtgtgtcagtcttgaaggagctccaaggcagcatcctcatctttgatgggaataaacctggggagaatgaaagttcagggcggtggctggaggaagggagctggacacacaccaggggatgcctttgatgcatacaggaagccgtcctcaggagtctcacagctgaggaacaagaaggctgccagtcagaattccccagctctccttgcccacaagtggagaggaatcctagaacaacactgggggcccctttcaggggtcccaccactttcttgaacatgacctcctctgaccctcagagcacacttagacctctttactcccccgcccccagagaagctgggggtggggggagcagcagatcccaagggcttcatagcctgtcatctctccggtggcatggactcccaccgagcctggttcttctgccagatcgtgacattgtgggccagaaggcaggaaaggttcgtcccagactcacaagactaggaactaatttttgtttggacttcctttacctctccagtggcaggggtgtccccaagttctgtgtcctctttatagcattaagggtgggggtgggactgtgagccccagaggttgaggggagtccctgagaaggacccgcattggcagagggttcccagcacccaagtcttactgccacccaggaaaggattgaaatatgacgtctctaacaccccgacacctgctggaccccacttcttttctgggtggatggagatgcagggacttccctccaaagcagcaaggaaaatttgggtccggtcttcttgcctgctagcctcccagcccgggacagcacagacaaaccatacccccctccccattttatttcttatagtacactggctgtagcgagatctagggtgatacaaggaagcactcggaggaagtccccagcccctcagcttaggcaggagtcctgtgacaataaacttggctgctgtttcttctctgcagtggattgcaggagtctctcctactgcacggaggcgccggggtgcagtggggtgagggtgggagagaaggaggtttctgagcccttctctcctgtggctgtggctgctgcccaacagtcctctccttttctctgatgtggggagg

SEQ ID NO: 22468 - DNA, 1101 bp, Mus musculus
tgctgggaatcaagcctgggtcttccagatgagcagcaccgagccatctctccaacacctacagacacgcactcccgtgtgtggcagtcaaaggttgactttttagtagccgttgttgctgcagatcaaacctagggcttcctgcttgatagagacatgctctaccatggaggcgcatcctcagcgcaaaagttagggttctgtttttgtttttaagctctgaagggatgagggaagtgggagcataggtcttccttggagtattctgcaggcgaccagaggtggcgttcttttgaagtagctaaatcccagaagggtgcaagataatttatgatttatactgtctttccttctcttgctcactcagtttgtgacctagggaaaaagactaaacatgaaacacacacacacactgagggcgctgcttcaatgaggaattagtgaggataggcaagcactaagcctgaagcctgaagcctgagtcgggattccttcccacaaatatgaccctgcacccccttcccttcccattgtactagatgcagacctcatgcatctaggccagcctgtcactgacctgtatcctagacccgtgtcatctgtaccttgccactgtaagggagaagtttctctggaggaattaaatttcaatgcctttattcagactcttttcttctcctcctccctccttctcctttttttttttttttttttgattcgatgacccaaagtttggaaaacgagagtggggggggggggatgggaaaagacctttgtgtgtaacggtaaaatatttaagtttaaatttccaggaaaatgtgcagacgaaaccatcagagagtcagttgggaagagtggctggggcaagtcctaacttcaggtaatggcaccaactgatggctaaaaggcaaaagacccaaccaccctcagcttacacagtagagccccacaacaccaggcagaagtttctggaagtgaaaaagtcaaagctttgaatttcctttgagcatcctgcagtcagaaaacagctcagggtctgtgtgcactgccagtccatgccacaaagggggtgtgttcagggtctgtgtgcactgccagtcc

SEQ ID NO: 22469 - DNA, 1254 bp, Mus musculus
ctatctcatgttgttctctctctctccttcccttcttctttctagaataaggaccctccatcccacactgcaaatgacaattcagatgaagaagattctggtgcaggagattgcgctgttgaagcagtggatgtagacctgaacctgatttcaaatatactggaatcctacagctcccaagcgggcctggcaggacctgcttccaatctgttacacagcatgggtgtgcgactgcccgacaacgctgatcacaacccccaagtcagccagtgaaggactagcctgcacatcagccacccttctcaggaataaacgactcttcataagcacgcctttaatcccagcactcgggagacagaggcaggcggatttctgagttcgaggccagcctggtctagaaaatgagttccaggagagccagggctacacagagaaaccctgtctcaaaaaaaaaaaaaaaaaaaaaaaaaagagcatctgtcttctgtgcaggtttcagagtccccgggccaccgtctcccaagtcctgtgacctggacaccgattctcatgagcttgtttgatttgttttacatttgcccaggacggaatctccattgtagtaaaccactgtgctgttggctgttggtgtaattctgaatattcagtttctcccttaggtatgttcctcctctggtcagaattctaagttggcaaaaatcccatttcattcactttttaatgaaatagaaagtgctaaaacttagtgttcagtctgtgacattctgcacgcgctcctaattgagggtaagaacttattattccttaattaacaattaaagacattagcagacagactgggtctgactgaggcatctcacacctgggtacttgcttggcttctgtcccctcctctacccaggctgccctgcttcgtgtctttgtatatacatttaagtctcagttccacatgtaaggagatgttctttttttgtcctctcttggtcccctccccattaattcccttctggttccgtgtcacattgtcacatttaccttttttttttttttttttggtttattgagagtctgtggccagggtggcctcatatcttctgttgttggaacacattgaaggaaattgattttttttcatttgaaatttagacttttgcttcctgttcctgtttgtcgtagtgacaagcccttgaccctccatttctacctcctaagtgcaggaatttcaggtgtgggccagcacactctgtctacact

SEQ ID NO: 22470 - DNA, 1074 bp, Mus musculus
tcctttacctcacaaggcagcttcaggtgctgcgctagctgaggggaggagggcggagcaggcgcaccaagcacatttccgagtgtcacggacagtggtggtgcttaggggagaataatcatgaagtctttccctcttgcttctattccagggaagagggatttcatggaaacaaatcagaagcagctacagagaaacagaagttagggtaccctcccattgcgccatttcactgcatgaaagaggatgttcttgctcatgtgtttgacaacgtgtggagcaaggctgtgggctgtatggagcagttgacgcgtagtcactgggagggatgtgcttctggtaaggatcctcatgacaccagtgtgaaaataactattgatgacttacagaccccagtcagtcatttgtatgtgtgtgctgctgctcaaacccagcaccctgtgtgtactaggcaaacactaccaccaagttacaacacaacccctcttctgctttttaattttgagacaaggtttctctgagttaggcaggcaggccttgaacttatgaccccctgcttcagcctcttgagtagctggcattgaccagcctgtactatcaggtctggctctaagacgtcagggcttaaatgctttactagagcagtgcttagagaggagagagagcgaaaccattctttctttcctgtctgcacacacataaacacacacacacacacacacacacaccacaacacttctaacactaagtgtataggggtatccccacacttacttaatagactctgatacaccatctgagtgccctcttgctcagttctcatactgtctagaagaagctttagatccaagggttcagtcccacagcttagccatcccacctcgtacctcgtgtgacactttgaagcctcaagctctgatctgggcttctcgtcaagcattagaagtcacgggaaccctttcttaggtttgatcaatttgctggagtggtgtacagaactcagaaacgtaggcttgctggcttgtaaagaataccacaaagaatatggatgaacagccaaacaagaggtgcaaa

SEQ ID NO: 22471 - DNA, 1314 bp, Mus musculus
acaagtcagagaattgccacccccgctccaagctgtacagctgtcaccaccacagaggaagcccgtagccattgttagtcactggggtgctttactccaacccctcctaatgatgaaatgctttgtctcagtgttgcatattgaaagctatattttaacttctcaaacagagcagacaaaaggatcggcaaaaggaaatggacagttttctggctcaaatggaagcaaaatactgcaaaccttccaaaggagggaaaagaacagcactcaagaaggaaaagaaatgatggagtttttctcttcctgagtccttatgtgtcagtggtacagtgtagacaaaatgatgacagccattaatgtaacctttgagaggagttgtctgtcccgcctaagccgagcagggttcatcgacctgatcttagtagtttctagaattcgcctaacactgtgtgagggtttcatgtgaaggatgtgtagtggtgatagttgggagggtgggtctgacatttgcttttgtgggcccctatttagaatattagtttctcttgctgctgtgcatgcactgacgagaaacactccacctatggagaacatcctcagaacacttgctgaaccgctgacttctaaataaatgctaccgtgcttttgggtcttaatcctacacggatcttcttttcttggtctactgttaggttttgtcttctgtccttgcagtaggagacgtcagtgttcatattattgcaaacttttcataagactgtatatgctaaataaagaagaaatgacaaaggtctggtggattatttaaatgactccattggtctatgaagataaagtgttttatttaaaggacttaagtaacctagtcagcattgtaacagacaggctggctttggcacacatcctgtctttgcaggtcacaggcttaggcatttcactggcctcttttgaactttttatctacaagagtgagagccaaattcattaaattgcatttattaagtacagcaggatttttatgtgttttgaactgttttgtgtggcttcagatgagtctctctatgtagctctagctagcctgcgatttgctatgtaaactataatcaggttttttgaagatgaatactaactagctttaaggggacacatacacaaaagggtaaggaactaggctaatgacctgagggtactctgagtcatagctgctcagaaaggccacgaatgtagatctgataacagtgtattcattgtacagacttctgagaaagatgctcattacatcttgagttgataactgttcactatagtatgtgg

SEQ ID NO: 22472 - DNA, 1195 bp, Mus musculus
ctgtgtgtctgtgtatacttgccttgcttctgcctttgtgtttgacaaatgatgctgctatgcttgtggtacacactaatcccttcaaggccctgctacttcgtttggaaatttagcaagaaatggagttgctggatgatactatagttctgtagaaccgccattttaaacaccatacagctttgcacagtaactaccccatcttacattcccattaggaatgtacacgtgtttccatttcttggcatctgtaccaacactcactatattattaatattatataaagctgtcctgttatcagataactagtgtttggagaatagcaaatggttcttacatcgcatctctccagtgctctccatggcaaatgagatcttcaggggagacggcagcgctactgtgaatgaaatggaatgtcagccatttgtccttccccattctgattgttatatagtattaagacaacaaaagcattttctcttaacagattttttttctatcctgatatttcttacagattgaccttgttcagataaaacagatgttcacccagatgtatcagaagaccctaagcacaatgatcgcaagtgacacgagtggagattacaggaagctgctcctggccatcgttggccagtgagaagggtccttttcccctttaaggaatgaagctcttcaggacctatccttccatgcaatgagacctgcatgcagccatgtcagataccacctgaccagagtagttttctactgaagactgtcagggggtgtgctgggtttgcacatgttgttactgccttaattctaatgttaggtttttttttttcctgtatccaatcagtgtaaaagccatatcaatgacgtagtaatgtaatatttgtaaagctttgctctcactgcttttattttaatccggatttcaaattgaataaaagtcacaacaatctctaattctgtttaatgttaaaagaatgagaggatgggaacggagtttgttaaaacacgctgttctggttgattgcagagtgtgattttcagctcaggaataagccacagtaactcgggtcgatggctgaagtttcctggtacaagtggaataaaactctcagctagtagtgtaggactgacaggccatgtagtgttcacctaaataacgtagtctatgcaagcaagattgaaacccctctgcctccc

SEQ ID NO: 22473 - DNA, 2369 bp, Mus musculus
accccggaaagatgctgtgcagcaagatggtttcaattccctgaacaccgcacataccactgagaaccacgggactggcaaccatagtgcccagtgaccagcggcttcccagggactctcacatcttgggccccaaatggacagatcacttcaaggagctggaggggttgaccaaggtgatgataaatgtcataatctctctgaagaaaccattgtgctttctgagatccgtgcccccttcctggatggaggcttgagggccctgggacttgtgccgtctataagattgggtaatcgctgccacagaggagagcagtgagcaaggggcttggggcaatttccagtggaggatatctacacctccatttatgcttgtggttcacacatttacgtttacaaatgagatttcctttgtttttcccctcagtagaattagacatttttcaaccatgactttaaatacaatctttagagataacgtggaactccccccatcaccctcaccccatgaaatgtctttaaaaggatggattagcatggtcttaaaatatatttctgaggttactagatgtattttgacttgtagacaaaatctgagaaacccagttggtgtttatataaaatgctgacctcaggttatagttcttaaatgtggctaattctgtaacatagtcttggtatttttcaattatgaatgcataaactatttctaagaagactcttacttgaacaaaatccaaaaaccaatttagattcttttttgcccatatcttttgtgatttacaccccagagatttaaggaaaaaacaaaaacaaaacaaaatgaaattttaaaattatgaagaattacagaattactcatttaaggtactttaaaagaagtttgtacattgtcaaagtaaattttaattcaaatcatgtctgtaaaacttgacgtattttgtgtatgcatgttttcattttgcaaatatttaatatatagacctatgatgtacaggtacaacatgtataggttacgtagatattatgagaaattttagtttattgtgagtactccagttgctttaaaaaccaccagggtgatttgctgctggctttgtatcatctttatgtttaaatgcaaaggaaattaaaaatgtctggaaatgtttttgactaagtaatgcagcctagaagcaatggttctcttcaacccttcagatgtctagtggaagcataaaagtcaagactgcatgtcgaaattttacttttgatagttacagaactgcttggttaaactaaatggaaccatgtgctaattttacagtgactgacctgtactgattaccactgtagtttggtatttccctttactttggtggcctgcttccctcatgccctggagtacagctcatagcaccaggcagcggaaccatctgttgttttgtttgccagaaagtgcagcctgtatggtcttctgtctaagttggaaatattatgcatgtgcaggactattcaagtattttataaacagtagcacacaataaattccatgcatgggccgctgctcctatctctgtgttgggttttatttggaagatgtagtctgatataacctttttatgcaaattgtaaaatctctgttaacaaagctaggatatttttagaaattatcctatagataattaatgatgatttcatgagttaaattcttgtctccataaattttgttttccccttcaacttttgttatacttttttatttaatatgagtagttgagtattaaagaactttggattcctataataattttccaaaatataatataatattggagtggtagggtgcttgtcagtcatgtgcaaagctccaggttctacacctagtactatatgtaaaataaaagtcactattttcaccaactctgggttagaagagatgttctagtcttgaactttgttagagtgatactgataaattgggtattttagcaataagccaaaatactaatagtagcttgctttgcctcctctgccattgttgaattgagtataacattgtgcaaattgagaaattactcacaatatataatatggcaagtaactttaaacagtggctatgagacacataaggcatcgttttatatcaaaatgtatattctaggcaaattccagttaaaaacaatctaaattgtttattatagtgtctaatgcaatattaaattgtaaaccaatccattagctgtctctaaaattactgtgtaatataaactttgaaaatttttcctaattttgttttatgaaaattacattgttaaagtagggacttaactagcatattatacgaagttaataggtaagcataaagcatcattctcaacttgtgggat

SEQ ID NO: 22474 - DNA, 1113 bp, Mus musculus
ttacgtaattgtattagattttgcttatgttttcaagtatttattttttgagttaaaattctgcttaggccccaaaacttcctttatgcactcatttgccaaaagatttatgctaaattttgtaccctggtaaatgattagagtttgttttctgtggtgtttgtcaaacgttctatgtataattgactgtctgtaacatgctgtttccttcctctgcagatatagctgctttcctaaatctgtctgtctttctttaggatagctgtatgtctgtaaatatatgttcaattaaattactctatcagacgcttgtctgtcttttgatgtagaagcaactttgtagcaccttgattttaggtttgctgcatttgttgctgcacttggttcagtctgaatatgaatgtaacattagatattgagctattgttataaagggttgaatttaaatcatgtaagtcaaaattgaaagggtgttataaagtgtgcctttattttgcatgaaaataaaaaaattatacgtaaagcattcctgtaatctggctcgttgaatattttatgtttcttttaaaaagctaactttattgttttaagcatctgtgtaagtactgggtaaactttgaaagcccattacagattgaatagaagaaagaggtgtgaatattgcagccagtacacattagcacacagtctcaatttctttcccttatggatagaatacaaaatttgtgatgtggaaaaaactatacatgaagtaagtttgacaggccattgttttattaaaacagcaatgatctgttgtttttactacattttctggttggtgtaattagtaaatttttaaagtgggggcaaaaaaggaatttaagtatttgaataaatttcaaactccctcataatgttatttcactcagttccaaaacaaatcctttttaattaaagtaatttttggtagacataatttttagtttatgctattttaaaatgtattgttaccactagtgcaaacaagaagtacagctagtacagtagtggctttcattttgaattgaaactaaatataacttcagatttctatggtgaatgaggttttttgtttagttggtttttttgttt

SEQ ID NO: 22475 - DNA, 1197 bp, Mus musculus
gatcaaacagcatactagataattttcatatagaatatgtgataagcatatataagtaatgaaatatggcttccttttttaaaagaaccatttctaagcttatcaagattaaaattgattggtacatctgtctgccagtacccaaactcttcagatgtgttgtctcttaatgtaaaaggagcaagtattcactgttagcttgattgcttcctttctgcttgtcctttgtcagtttgacttaggaggctaaggaaatcagtttttatttttaatttttaaaagtgggactcaaaccactaaatgctctgtcagaatgaaatgtctcagtagatctgatttgtgcataaatgatgttgatgatttgagtatttatatagagtgggcatatttttgatgtttcattcttactcagaaggcagttccctgattttgtattttttttccttttctcctttaaataaaaagtctgaaaggttggtatcagcctataatttctgagactatcattaagatgtttttgtttaacatatgagttgtataagggacaaaaaacatacttgtgagttagtaaatggtaacagaaagcagggttgctttttgttctatgctaactagaatttcaaatgttggatttagtgtctccatttcagtgcttttccttaaaagggggcagaggatagtccatcttattataagatgaacaggcctttgtggccatacttccctaccatgctgtattaatccatctgagacccaaagcactaggcaaattaatcatgaactgaagtcttagaactatgagccagagtatttttatgttgaaaaacattcacatatttataaagtattttaaacctttttaatggtttcatatggaacactttctgatctttaacttttaaaagacagggtagacatttttattacatcttatagatgaaaggtaatgaattgcatagccagctcatgctgtacttcagttttggatatatcacttctaattctatgatccataaagtagtataaccagtatctgaaacttaggtaggtaatgctcatcttattgtattgggacattagaaagatatctaaaattgaggtgaatatatattctgggagtatttagttataccattattctcttctggttattttaataaattagtttttttcctaaatgaagtaaaatactccttc

SEQ ID NO: 22476 - DNA, 1134 bp, Mus musculus
gttgttgttgttgttttgttttaaagaacagaaccacaacaacaaagaagacattgatttttttttcccctaagggtgtttgctgctttgagagggaatatttgaaattccagctttagagttggggatgtagctcaattggtagcgtgtttttgtaacatgcacatcagccatggttctatccttagaagtgtgtgaaactgaccatggtggtgcacaactgtcatcctagcacttgggagacagagggaggaggatcagaagttcagggttatccttggctacataacaagttctagactagtctggactactttagttctggttcttttggccccatctccatcagagccctcatcttctggtcctactatactcccaacttacactctttgtttatccacctgtccatattacttaacattctttcttccctatttcgtatcaatggaaaaggggtatttatccccatagtcaggattctgaccacgtccttaagggaagcccaactgcccaggtattatggcctgtcagccttccttgtgactcagactttaggcctagaatgtggagctgccaatacactgtttgcccttctgaacagatggagttgggcacactaacacccctcctgtccttagcagcagagccattactaccactgctcactcacccttgtaaactctcaagagtcagctaaagtattttagggcaaagcatactggttttgtaaagtatttttcattaataaatctataagatagttgtatttaatctcttgtcttttacttttgtatgtccttgctcttttcttctggggtcgggaggcttcaacatttatatgaaatgcctttgaccaagtgaaaatgaatagccaaagaggaatttaaaaatacaaactgaccaggtgtggtggcacacacctttaatcccagcacttgggaggcagaggcaggtggatttctgagttcgaggccagcctggtctacaaagtgagtttcaggacagccagggctacacagagaaaccctgtctcgaaaaaccgaaaaaccaaaaaaccaaacaaaaaaaacaaactcacttatggagtcaacatatctttaagagtctttccctcttgttatggctgttagc

SEQ ID NO: 22477 - DNA, 1084 bp, Mus musculus
ggtgtgctggttggagatgcatgtgatgggaagcagacccatgactgctgactcgtcttcccatgcagcataccgggctgttctgaatagtcctgtgaagactgtccgtgacactctcatcacccagtgtgcccagatcctggcctgttatagaaagaactgtgccagcccttcttctgcaggacaggtggggcaaggatgttactaactaggatttatctacagaatgaaataattatatataaggcactctgtgtgctacctgctatgtcattgtcactgtcgtccttgtttttactgtggcttttagagggaaggggtgcagggagactgactacagggtgaactgtgtcgattgattcaacaaaactttgcattttagaaggacttctcatgaccattgactttatttccataaatccctcagttgattcttcctgagtgcatgaagctcctcccagtttacctgaactgtgtgttgaagagtgatgttctgcagcctggagctgaggtcactactgatgatcgtgcctatgttcggcagctggtttcctccatggatgtggctgagaccaatgtcttcttctaccctcggctcctaccactggtgcgagtgaggatcagagtgtgagacactgtactgagcacagggcctccaagaaggagggggtggattactttacactaagaaatttgtttttacgtacattgcatatgactatctagagacttagctttcttagtttgtgtgtataaaggagtatgttgttcttggtgatgtttttttcttcttttgtctagacaaagtctccccttgatagtaccgctgaaccaccagcagttcgagcctctgaagagcgcctaagcagtggcgatatatatttgctggaaaatgggctcaacctctttgtctgggtgggagcaagcgtccaacaaggtgttgtccagagccttttcaacgtgtcctccttcagtcagatcaccagcggcttggtgagaacagggtgtcaaggatgagatgggtatgggaaatactctggtgatttgacagtgggtcagtgtcatgctggtccctttattatgt

SEQ ID NO: 22478 - DNA, 1822 bp, Mus musculus
tttgaactcaggaccttcggaagagcagtcagtgctcttacccactgagccatcatctctccagctccagacaagtactcttatgctcagcgcagtagccctgctctgagtcctggatttcttgtcaggtcatcaggaaggaagctggggagggagcatacgcgtgtatgcgttcttccttaccatttgcccttccttaccatctgccttctgcctgtagcttatcgtggtcaagcaggaagacaagctggagatgctgttcaagcacttcctggtggaagacaagagcctaagtggaggtgcatcctatgtggactttctctgtcatatgcacaaggagatccggcagctactgagctaaagcaagtgggtaaatggcatagggtcccaggccagcttccaggaagaaccccaggatgacagagaaattgggacagttccatatcgtataagtcatgtaagctgacctcagttgacttcttttggggggagggcgagatataaggagacaccgtctttctgggctcaaatacactaccactctgtcatgtcctgctgatcgaaggtgcctcaggccccttactctaccctttctcctgctaatcctcttgtaatgaatgtagtttctcagttcactgtatatgattcggtgttgggggtttggaggcagctgggccctggcaacagtgtgtccctttggatgagcctccaagaggaagggcaggcaggaagaagtgggaatcccagggttattacaggaggtggcaaattcagctccgtgtcatcaacaacttcctatattagggacaaaatatacaggtgcacaagagctggggtacaggccgtaggtggtggagagtaaaatagttggtcctttgggtgcctgatggtcagtagcaaagtcatagttaccgaggatggatgactaatctctctacttccactgcgcgtgctctctctcccctgcaatgattggtgagcacttcgtggatgaatgagcctggggtaagaattgcaaaacatattaacaccttggggaagtagcagcctcctttccagatggagaagccccaatcctggatggttctgtagagcgcctgatggtcaacttgcaatacctcacagagccagcccacatcccactcagcttccaccagaaacgttgttggggagaggcagatatggctggagccctgtcttccggtgccaggacgttactgggctttggtattgactgagtggctgacaagttatcttccaactccagttggctgggcaggacaagggctaggaatgaccgtggtcaggcctgcctgctcccagcccaggatgcccctgctatggacctttcatttcttttcattggtttatttttcaatgcatctttaatttgtaaagaaataaaataagatgtaaccagtatccctctcattactcgcgacttttccccaccctgcctgcagctgagaggagttacgcatgcgccgcgtgcccctatggcgtaggacctagtccactccccacccgccgcagggcggggtttcgtgctgtccgagggggtccggtgtggacatggctgctcgctgtaccgaggcggtgctggccgccctgggggtgctcagtgtctgttcggccagcagctccgggtccgaggcttccggggaggcagagagggaggagccgtgggatggcgcggttttccggcctcccgccgccctaggcgccgtggggatagcgcgcgggcccgggtccccgcctccagggaacagagaggcggtggacctaccagtgttgctgtggtggagcccaggtctgtttccgc

SEQ ID NO: 22479 - DNA, 1822 bp, Mus musculus; identical to SEQ ID NO: 22478

SEQ ID NO: 22480 - DNA, 1141 bp, Mus musculus
taagaagtccctttctgtactcctacctacagctgagtgaagtgaggggctcttcatttgtttactgtgggtcaggtaccaggatgggggagaaggtgaagggtatatatccgattgtgtgcccatctgtgtttcctagggatgctggcactggagatgctaggtcgccgggcacacaacgatcaccccaacaacttttcccgctcccccccttacactgatgatgtcaaatggttgctggggctggcagcaaagctgggtaacacctcccctcctcaggaccattgtccccctgtttcccttcccttcctatcccagacctccttcctagctcttactcagagttgaggccttggtcgggtatgtgtgcgagcgcaggggggtggaggattacctcagctcctggggtggagggtggatctctgtagggctagagctgagatatatgagtgggtccctagggcagaggtggccacccccgtctcatgcccctcccctgcccctcaggagtgaactacgtgcaccagttctgtgtgggggcagccaagggggtgctgagcccgtttgtgctgcaggagatcgtcatggagacgctgcagcggctgaaccccattcatgcccacaaccaccttcgagccccggccttccaccaactggtgcagcgctgtcagcaggcatacatgcaggtgataactcaggaagtatggagaaaggtggaacacctcctgggcagttggatcagatccctcagcatgtaagggaagtggggccccggttgtatgtgctttgtgctgattcccctccaacccaccctccagtacatccatcaccgcttaattcacctgactcctgccgactacgacgactttgtgaatgcaatccgcagcgctcgcagcgccttctgcctgacacccatgggcatgatgcagttcaacgacatcctacagaacctcaaacgcagcaaacagaccaaggagttgtggcagcgggtctctctggagataaccaccttctccccctgagtctggtccctggagggccctatttagggacacaggcctgtggctatggggagccctcacacagagggtcaggcgactcttggctggacagatcatccccactcaattcccttgtagcc

SEQ ID NO: 22481 - DNA, 1132 bp, Mus musculus
ggcctgatcaccccagttctaggagtggacttcgtcagaccatgcattgacacctagtatgagaaagacgcaaacaccgtggccgctggacctacattggagagaatgcagcactgccagcctgctgtgtgtggaggcagctgtgaggcgtggcctcaggactgaaagcctggactttgctgtaccggtccagttagcgtagacaggaagagaattggtgctgcagaagtgtgtccgccaatgagaaacctcgagttcgtctgacatgcacttaactcatccatttctagaggatgcacaatgcacgtgggcctgagactgaggcccgatttctgctggtggaaagggggagggattgctactttgtttcctgttggttttcctgacataacaaggagagatccagaagtcgttggccagggctccttttgccacttttggcagttgtttgtgtgctgatctggaccatctttgtcttgtattttcatggtggtggtccccatgctgaccctcatctaggcctgggccctctgccaagtgcccctgtgggatgggaggagtgaggcagtgggtaagagttggtggttgtttctatgcattctggctgccctctgggctgcctcccttcttcccatgctgcacgcccaactctttccctgggtttgagatcgaactgactgcttgggtgagaagtgtcctctttaaagaggctctttattgaccaaccgaagtatagacttttctgctggacaatctgcatgggcatcaccccctcgcctgcatgtacccacaaaggggtccagagccaaggctcctgcattcattgtccctctctgtgctcaaggaggtccattccaggaagaaaaggtctgtaccttaggcagataacagagaagataatggaagaggcaattggtcatagtcttggttccctcccaccaaacaactgcacattatctgcattgggggggggggtagatttcagctccttgggtgaccttcaggaggcacaggagctgggaaaagagaactacagagtatggagccagctgagaagagaacaaacgcatgggtgctggtgcttgaatttagccaggctcctcaagcacttgtgcatgcctcagaccctgga

SEQ ID NO: 22482 - DNA, 1101 bp, Mus musculus
aagtcataattgcccttcgcctcttagtctactctggtgtacctttaatgtgctgtttggtcttgattttgatgctccagtctcacatgaacctgagtcagagcatctggtggcagttaaagagttacttacaacccagcactcccctggcttcccatccctgcgtctttctgatcactgtagtcttaattaccagcactgctatgtttctatttctagtaatgacagaaagcaagagaacatgcacgtcttttaaaccagcatggctgtgctgacagggaacagagtggcaaattttaaccataagatccacagagttttatctgaacagcactcacagtttcattgaggtctgagttcagaagtcaagagttactaaagctgagagcatcctgtagtagcttttgttgtatctctggtagctacccactcacatttcagacagacctagctgtagaatacccttgttggtgtgccagtcctatcaacccaaacctgtaattttgcagcagtcaaatattgtacacacacacacacacacacacacacacacacacacacacgtgactgaacaagacatacttctcagagtacactaaattttctttgtgaatccgacagaagagttctccagcggctggaaaagtgtatgtgcctgtggtctgtgtactgttttaacccctttaatgctggactccgggttgctcctcttcttcctccacctcctcttcttcctcctcctcctctccctcctctccctcctcctcctctccctcctctccctcgatgcagagcccgagctggtgcactaacctgcggtgtgtctgggcttctcttctcacctcctctctccccttctctttccctcttgctgtggtgtgtccagaaaaggaagtcgagttccagcgtgcacctaatggtgagccttgcctgcccacccaccctccacttcatgctgcttgtgcccgcctgccagccatgcagacccattctgccatgtgcgtgtgcgtcactcatcctcactgcatgtctgtgctgtgtgggcaggtgtggcctgtcctgccaggcggggggccattgcccaaggtcaccagtggcctt

SEQ ID NO: 22483 - DNA, 1195 bp, Mus musculus
tttttttcccgagaaacaggttttaccattgagatgggataagaggccaataaacaaatgttgtagaaaggaatggtcaaagttaacagactagctacaattcttagagctgtatggtggcatggcaatgcttttaccaaagtattgaagtgattaacaaatacactacccaccccttttttagaagtagaaaaaaattatctaaaaagatctattggccacatgaagatggaaaaataggtcaggaagcaacttattattagccttattactaccaatgaaatgcaatcgaaacaatgagtgtggtctacagagcgagttccaggacagccagggctgcatagagaaaccctgtcgggcaatgtgccatttttattattattaatttaagttagtaattgtagtaaaattggtgtcaaagccatacaaatgttcccaactttgcttctgggcatttacttctaagaattctaaaaaaaagtaggaaaagctgaaagtgggtgttttacatggtgttctgtgaaaggattaaactgtttcaaaagccagccagaaataaataatgatttattattaattaataaattagtaataaaaaattgctgctcttgcagaatgctgtagtttagtcccccgcatcagcctctggtgtcttacagccgctctcctgagcccctcttctggcctcttcaggcagacctggaaccgagtagccagttatgagttgccacattggtactgggatcgaaatccatatcctctgcaagactgtcatctaccgagccatctctccggctcctaaattgtattctttaaaatacagcatatatgttgattcttattcaacatataatatggggacaggagaaaaaaagaaaactcagaagtatttcataatagcttccttaacatttttctgttattgtggtttttctctactttccatacttttcacctggaccatgtgtcaatactaaacagcaaatcaaattattctctactaaaaataagaagaaactagtggacaggttggtacatgcctgtactcacagcacgtggagacaggagggtccagagttgtactggttactaaggttatgaagttaccaagattatccttagcaacggagtgggttcaaggccaaccccccctaaaaaaatacatttctaatgcaaaatactaattttagagtgt

SEQ ID NO: 22484 - DNA, 1150 bp, Mus musculus
tttttttttaaatgctcctgttagctataaaattaaggaactcaatgaagctctttggtctgtttccacaaagaatggggaaactacgtggcatgttatattacagagggagaattttagaggcttctccactgttttggaaccttgggcacattgcaaaacctgttttctccttagtaaaaagagaaaggtgaagcagaaaatgtcagttcccttccttcaccgacatgatacatggacacccttacacttatcattctgtcttctttgagttggcacagcatacccactcttgggtaccacaaagtatctcagttgtaagagctggaatgaagtcgggttacatttcagggtagaaggctcacaaatttcctgtctcccttttccctgttcccgctcctcagttcccatcaccagaatgggacacagtcactcctgaagctaagaacttgatcaaccagatgctgaccataaaccctgcaaagcgcatcacggccgaccaggctctcaagcacccatgggtctgtgtaagtgtcttttcccaggccttggagattgggtgtggcagccctggggcactccttgaacttctctaaggaggattcaggaggagggctggggaggtgtgagtggaggccagggtcaggaaatgtcatcagggggacttgggagttaaaaagtgctcataggtcttcacttgtctctcgcgcttgttgtgaggctgtggtttgggtctgttgctggattggaagaggtagttaatggtggaaaacagctgataccccagtgtggagtcccaagcttggggtatatgtgggcctcaactctgacaaggacccagtgaatgaacaaaggcgggaggctcttgaagctcagcatgaggccggctctcagctgagtgctgaggagcccctcctaggccctcagtgcaggctgatacactgtttccatccgtggttctatcaagctgaaacagctaacccagacaaaggaaagggctggtatagtatagcatcttgaacaatgataagtttttcatttcccatgcttattgaatgtccttttgtgctggtcaccagacagttcctgaagatgaacaggaccatggtctttgccccaaagatttgggaaaacaggcattcaaaccagc

SEQ ID NO: 22485 - DNA, 1148 bp, Mus musculus
gtgaaaacatgatatgggaatgatcctttttttttttttttttccttttgagacaagttctcctgcctctgctggctttgacctcactatgtaaatgtatgtaaatgacctcactatgtaaatgtatgtaaatgacctcactatgtaaatgtatgtaaatgacctcactatgtaaatgtatgtaaatgaagatggtgctgagctgctcatcctcctgcttccttctccgaagtattgcttacagctgggtgccactatgcctggtttgagtgatcttaataattgaaaaatccctcacttttgaaactagattgtggaggtattttgtttgttgttcttttgataggtactaaatgctggcctcaaactggtaacaatgttgactcagcctctagagtgatcagattgtgggtatgtgctaccatgcctgtgtttcagacatgcgtaagtgaaggtaacagtctgagaattgatgtttgactcatgccttcctcttgtaggttggaaaagagactgttcagaccactgaggatcagattctgaagagagatatgccaccagcctttattaagtgagtaactaacaatttgttactaaatagaatagtattcttgatagaaagaaaaagtaattaatcccaagagttacttcccctctctctctctctctctctctctctctctctctctctctctctctctccctccctccctccctccctccctccctccctctgtgtgtgtgtgtgtgttcatgtgtatgtggaggtcaaaaataaaataaatcctataacaaacaacaccccgcaccgccctgccccgccccctgtagattacccttggtggtaactagggtagcaatcctttagcaactggaaataaaaaaaataaacttttctcctgctattcttgtataaagtttatttcagagttactttgtagccctatttgatgaggagaatgtgaactgtaaatatggaagaaatgatagaaggtcatcattgtatatatttcagtgaacatgggaaaaccagtgtgttaggatgaactgaaaattactgagccgtttatttaaaaagtgtatcacttaattagctccaccaaaatcttactgtagcttaaagcccaaacaagatgtatgtggttgtc

SEQ ID NO: 22486 - DNA, 1138 bp, Mus musculus
atcactacataatactttagggcttatgtgaagtctgacagtactacaggtgtttttcagtcttttatgtaaatatcgggtgtgggatagggagaagtaaagaagcaaaaattccagcaaaagagttacaaagatacagccatgtaaagtaaaggtgtcaaatgtgctcttactttttagagccaagaaataacaaagaacaagttattcacaagcctagtgcacagagtgaatgaactgccactagcagcaaattttgagatttcaaaggccaagtcctgttataaattggccttggctatctaccatatagaaaaataaatagattcacatgtattcattttttgtgttttcgtatcatggtcttctatttgctttcactaaggagttaacccatattcttccccctagggttgaaaatgcttgcaccaagcttgttcaggcagcccagatgcttcagtcagacccatactcggttcctgcgcgggattacctcattgacggctctaggggaatcctttctggcacatctgacctactgcttaccttcgatgaggctgaggtaggcaatatgaggctcataaagacctcccttagacagaagcctagttttagatttatttgtatgtgtgtgtatgtgcacacgtgtgtatgtgctcatatatgcttgtttatgggtgcccatggaaatcagaagaaggtatcatattcctaaggccagagttataggcagttgtgagccacctgttgtgggtgccaagaaccaaacgggggtcctttggaagaacatcatgagttcttgacctggagtcatctctccagcctctaaagtgcaattttaacggtaataatggaagccagacatagtggcacacacctttaatcccagtactcaggaggtggaggcaggagggtctctgtgagtttgaggccagcctggtctacagagtgagttcccaggacagccaaggctacacagtgaaaccctgtctccaaaaaccaaaattaaaaagaaagggtaaacaaacaaacaaacaaacaaacatcctcaaacaaacaaacaaaacaaaacaaaacaaaacaagatcatgcaaaccaatactggatggttgttttagaatgctaacatattaaaaag

SEQ ID NO: 22487 - DNA, 1193 bp, Mus musculus
gtatgtaaactatgaatattcagtaatatgtagtaagcagtcagatagttatggttaatataataacatgtaacctcgtgcctggagagatggctcagtggttaagagcactggctgctcttccaggagccaggttcaatgtgcagcacctccatggcagctcacagctatctgtgtacatcaggcaaaatactaatgtacataaactaaaaataaagaaatgatttaaaaatatataacatttttaggttatatttttgtttttgttacttttataatgctaggaaagtagtctgccattatgtcacactccccatccatagaccatgctttcaaaaaaagatatttagtaaatggaagctgctcattgggaagaatgggagtcaaggaataaaggttaggcttggttataggtcagtgttagatatgtgtgaggtaccccccccccaaaagttagtgcatagtgtattccaaagagttatgtttactagggaaccccatacccctattaaatgctatctaaaaaatctggagtggcagcatagttgtctccctggctctgtgtaaagctcagtgttttccttttggtttaggtcaggctgccatccgtggacttgtggctgaggggcatcggctggccaatgtcatgatgggaccttatcgccaagatcttcttgccaaatgtgaccgtgtagaccagctaacagctcagctggctgacctggctgcccgaggggagggggagagtcctcaggcgagagcacttgcatcccagcttcaggactccttaaaggtatactttctgatgccttagtgttgagaaacaacagacagaagagatttctgtgcagtgggtgtgcatgcatgtggaggtcagaggataactcagatgtcaggcaccatctacccttaggttttgagacagggcatctcattgttctgggacttgcagagtagggtaggccagtgagcccctggggacctgcctgtcagcacttctccagtgccagcattgttaatgggagctttggagctcacatacaggttctcatgtggtaaggcaagcactttactgactgagctgccccatcttggcctgaggcttgagatttttgggtttagggaaaattaaaacgagacaagaataatagaaaatcagagtttattaggagaaagccaagtggcaacaatta

SEQ ID NO: 22488 - DNA, 1178 bp, Mus musculus
gtgcaagcagtacagcccagaaggtcatttggcctcaggagttatactgaccgtggtcactggccctcttaaatccaccacagacaagcagacacgcaaagacatcaggaggaaccggactgagtctaaaaccttcaccgcatccccagcacagtatctgctaataacactctctcccttccgggctcactctccaccacctgttgattgttggcagcttgaagtgcccaagacgagccacacggaggactccagtaacctaacagcctgtttcttacttctgttacctagctttcgacactttgggagctccgctttcatcactgactgctgtagacccctgacagcaggttctacagggacagcgaagagcctacactcctcatttctgcctttctgtcctgtccctctacagagaactcagaggcacttctgcagtcgtacaggcacagatgtctcctctttttttttttttttagaactatgtagttgataagttggaggaaactctgagacaagctgggttaaatggtagctattgtggttccttgaaatgtgaaccctctgaaaatgacagggacacttactgtatccacaaacaccgcctcccagcctctgaaaccaaactctagctgggactgagcaaagacactattcaaagagaagataggggctataacaatgaacatcacaccggagggcggttctcaaataaagacgctcacacagcctctcatccaacaaagtagcagagcttgaatgagaagccgccactgctcaacagcctaatcagagcccagcacactgtcaagctctgactgtccctttatccaattacagctgatataaccggtcctgcttgaggtcctcagaactcatgcatcagcccaaaggcattctgcagaactctacctgtcattttttcaacattatcaatccactggttcttcatggtctcaaaatgttcataagcagcctggttaccagggttcctcagtaagatccgagcagcggagatgacctgtcaataacaaagcaattttcaaattccagggtgccagcacagtccaaatacaaacccagagtaaagcttttctccatttcacctatagatggcaccagaaaaccaaaattggcaagcctcgtcaggctaaatgcattaagtctgatgccatgag

SEQ ID NO: 22489 - DNA, 2179 bp, Mus musculus
ctcatgcagtctgtgaaggagactgtgcgagaggctgaagctgcttcaatcaaaatccgaacagatgctggctttactctgcgctgggtcagaaagactccctggtaccagtaggcacctcgtcaaatctggctggtacatacacctctgctaaagagaagagaaccatcttgagttccagaagccattcagagttgtcaggaatggaaacatcaatccctggcttcacacaccagaaaggaacatttatactcttgtcatgggcactttgaaatgtgtctctctataaaccctgtactttcagttactatgcgcactctctcccatggattttacagcagctcagaataagcgtgaacactagccggaagccctgctctgccccgggggtcatttctgtgtttacggttcaccaactccctttccccactataggctctcaagacctagagctgaggcaagtctaaataactgtgcttccaaagttattttgggtttccccccctgctgctgaccctgcctaccttctctgggctgtgcatcattgctgcaggaaaaagtggtctctggagagttctagcttgtgcggcctggattcatttcctgctttctcccagtgtaaccctagttcctcacaatgggaaaccaactttcactgttgtgaggaaatcattatttctgtttttaccatgccactaactagtatgtgttatggaaacttcctgtctcacatcctgccttgtttggttgccaaggtaaccatcctgtaaacacactggtgctctgtcactagaggaacagagtcactggggtgttatcctgcccatcctcccagtggggccactcccagattttctatgctttgtcactgccagtagatgtctgtgctgaggccttggcattcattcttcgcccttattttctttaatttctgagctgaagtgctgcatttacttttaaccaaatcatcctaggctttggcagtcttcttctgtatgcttctttaaacaagactttaaagatacataggtatgtgtttgtctgtaatccctccatcccccacttttttcttttttttaaattttgagactgggtctctttatgttgtccaggctagtcttgaacttatggattcaagtgatctacctgtgtcagcctgttagctcctaccaccacacttgactttgcttgtaactttgaaaggttcattcaaaattgagacttaagaattagggcttgctccttaagagacttgaatggaaaggcaatcttgtctgggagactagcatttgcagattatacttctggtgcttctagggaaaaatcagtaggaactattatagttcccagttgcttttaatcaactacaaccaagcatttttcatccttccataaatacgaagtattcaagaataatgagtatggtatctatttatcagaaaggcatgtttcctattgggcaaagttagtgtaaaagtgactttcctttttttttgcatttatcctggctgtataagcatttcccagtatacaaatgcttctttcagaaatcaggaaccagacgaatacaggagtgaggccttcttcctggatgttcttcccacatctagtatgtccaatcccaacactgaacttgtaaatcttaagttgaccctgaatactcaggctccccctatttctttttgctgataaaagattcttttcaaagctctcagcagatctgtatagttgcttacctgatataaatgcatatcaatgcctttaaagtatgaatctatgccaaagatcattttttgtcttactaaagatttcttagaggaactaagaagaatcatgtttattctccaagttccttcagttctggagacacatgtccaccagatgtgctttctagtgtcagtgcttacagtacaaggaggcaaaaggaaacagtccctgaatgacgtgttagagatgccaccactaaaaactatgtttataagctaggacttatatgtaaatgtttctgcctcttcttttgttctgtttaaaacaataaagtacatttatatgaataatgctctaattgaggttattttactaacaactttaggtcagacttattttgtattgaagctaattctcaaggtctggaaaccaacagctttattcaatccataaaggagttatataatagtgt

SEQ ID NO: 22490 - DNA, 1478 bp, Mus musculus
tttgtgttcaaagaaagtggaactagctagttttgtgagcagaggcatcttaaccaaggccatgctccttagagtacagcatgtgggggatagaaaagggatgttgtttccacatgatgaatggagcactgtgcagtgtcacatctaaggcacagtgttcattgttacacaagtactgcattattactctggtagtaatgattcgtttcattctttttgacacaggcttaaaagtgaaccgcttggacatgtatggtgagaagtataagccatttaaaggagtcaaatatgtcacaaaggctgggaagttccaagtgaggacatgagaagaggccaaacttgctcaagatcagtttgttttttcaagtgtcattgcaatttattactattaggtaccaagtgggtgggaataatatacagcatttgtgtcaagctaccctgctaacaaagttgcttagtaattgatgtagggttcttacggagctttaagctaaggaaagttttctaaagacttagcttattttgtatcttttcacttaggaaaaggtttagatgatttcttccatgggggctaccagctgaatgctgcacattctaacagtcaaagcagaaggctacagtgatatcctctctcctaaagcaagccaactggtctcatctaccagcaggaactgtctcagtctgtgatgtgtcaggtgcagccaagtgtcacaccttctgatcttagccatctcagtgtctgtcccaagagaggagattgccccaccccaagaagtttacagaaaactgcctcttcaagtgtttgccttactcagcttttcacttgtgccattaagcaagcactgtagcaaaagccacttccacatggccctggcagggagcactacagctccgtgctccattctcactgtacttggtattatattttttataaataagatttttatgtaaagctcagattttgatttacaaggaccttgctgcagtaaatattccatcaatcttgtgccactagttcagctgttaagatagcacagtcaaatcatttgcatcaaaagggcaaatactttattaagacaacgaaagggaacactacttctgttgttagcgagttactgcaggcacagctgtttgtgcttttaaacaaattaaagtagtaaaagagaaaatcaagcaaaacctttgccattctcatgttttattaaagctttatttaatgccactaacctaattagcttgaaaccctagtttagctaaagaaggaaatcatgagtttcactatgttgctcttttcaatctttgtgtgtttaaatagttgaatttgcttgtgtgcccttcatttgggggagcgcctttccatactacatatatctccaggccattgtgatgacaccttctccaaactcctatcaaattcgagtgaagcacttaagtgtctttgccgtactgcgtacgtggaagaaccattcacggaagga

SEQ ID NO: 22491 - DNA, 1150 bp, Mus musculus
tgatgaagctgacacgtgttacttgagacatcagaacattttgaaaaaagtaaacttggctttaggtgtttgatccatatcttctgaacctaaatggtagctttaagacagggtatcacagtagcccaggctagccttgggctcacagcagtcattctgccccagcctccagtcatcctttatgagaccaagtgggaatttgtgagcctttcctccggttttttattgtgtgatgctgggaatggtcagagagttcattaatttttgtttgtttacactgctaatctttaaaatttttaagcagtttcttcaatcctcactaatctgtttaagtagaaagggaaaagaactcagtcggtgaagccttgttagcacaaggactgagttttatccccagaaccttgctagctggtcagttctccgtctaacgagacatcctgtctcaaaaagaaaaggtttcctaaagagcagcaggcagcttgttgcctgcttctaggcagacatatatgcaatcacccgcacacgtttgtcgatgctttgcctacacacattttcattcacagactgtcttttggtcaggattttctgcttctttgtaaagatataattattaagttttagaaactccatcaaaccagtatatattttatactcagaataaactgtgaaataaatggtttctccttctaccaaaccactttcaacctgaatatgaggaatggagctgtgcatagttaatgatggatggaagtcacctttccaagcctgttcatagaaagctctccactcctgatgggagcctgtgatgcagccaaacctaaggttactctaagtgcagccaagaaaatgggaccccttagtgctagaaacttacagtgaatgaaaatgaaatgtcagcacagaacgtagtatctttctaacatgttctccccattcactccctcttactgttcctcctgggccccttgctcagagtagtatgtggggagacacataggacaaaggattaatgtcttcagtctgtagatgaggactagagactcgtggcagccttgtgagaacccttgagtcagagacaccgcacttcccaacctaagtccagatcagagtttctgtgtagtttttctttggctttgttcctttggttttg

SEQ ID NO: 22492 - DNA, 1198 bp, Mus musculus
tgatatttatttgctgatggtaaggatcttttctggtggtgggggctagtgcttgggcttggtactggctaggcagtcattctaccaacagacaaggtcttcacccaaaaactctgctaagcttcaggagatttaaagtagtttgggtttgtttttgtactgggaactgagcctaggtcctttcataagacaggaaaaatgtttaaaagtatatcccaattatatgccgttttagtcattacctttcagagataacatgttaacacatttatagactaaattataaagtacctgaggtttgctttgaaatacaatgaatggcaggtattgaaggaggagatgagataagaccctgtcacaaatgtgaagttttgggcagactgatccaagaagctcttggggataaataaataaagctgtcctctttatctttgtatggttaaaaatcttttcaaatgtgccatattaaatactgaggtcccagcagcagcagaattgttaacatactaagaaaattttcccttgccctactgatcatgaattttttcccttcttgttaatagactaaagacattaaagaaatagccaaaaaggcgcaggctcttccaaaggtgaactcgaagaggcagaggaccgtgatcttcacacaagggcgagatgacaccatagtggctgcaggtactgtgaggactctgtgataaatccagggttaaagagattaatggcaacaaagttgtatttttcttctacagcgagccatccccagtcatgtgccttcgacagtgtgactcccatactcctcccttgcaccctggggacgtgattttcctttcaaggttataatttatgaaaagccaattgataaagcttgtttactttttaaattgggggggtctcagtccagaaatctctttcttttcaaaacaataccttttacatataaaacccttgcatcagaataaaatacatttattcgattatgaacaagtcaaatccagaagtgtttcttctgaattttttctgtcacttttgatttgtttttgcaatactaggaattttatttttgacagtctgtgtattcctggctgtctctggaactcacctgcctctgactcatgcccaacccaatactagaactcctatttagggccttttgcatgctaaacaagtgctgtgtgttggtgagctctatccttgg

SEQ ID NO: 22493 - DNA, 1198 bp, Mus musculus
ccttgtcagaagcaagtctattagtttgtagaaactttggccttgtctgcctcttcctgcaggcctttgctctggggtctgcctggccaggaggcaggcttgtcgagggatcctgggaagggaggctgattactgcctgggagggtgagcaagaggctggagcaaaagcctgcttcacttgggttttgtgtgcctgacagccaccctttagcaaggtgaattctttcagtaaggctctcattcacattctgccaagacatccgccacctattcttgagttcacacaaaaaaattaaaagcaaaacaagagtcctgctaatttagcaacttgggagatgcagctgctgctccctgggcaccagaaaggctggcctcagccttcaggcctcagcctgagggaggtctcccaggagttatattgtatcctgcagctcaaggcctcattgtgacagctgagtgacttagctggcactgtgggctggagaatgataaaggtacaaagaacaggcagcttggtagttggggatggcactggatggtgggggcgggtacatggctggttttgcctaggcctcctatgagcccctacttaggcagctgctgctgcccaaggcacagcagttctggccgttcactccaccctctttgtaaaacaatcctcgcatcaattaagtgtaaggcttttgtcgtccaaagaaagtggtaattcccatatcctttcagttggttgtgtgcctgtctgcctgtctgtccatgtctccagacctatccatacctgacctatgactgttgtcttggtgactaccagtaacaccttcttttttatgcattgtgtttcaggactccttccttctatccctagtatcagttcaccctccctgggctctgatatctgatttcctggtgccagtttcctctcccactgatggcctatagtgtagtaagatcatgggctcctcagatctgcatctgtcaataatctgctgctctcaaaagtgcagtcctaagctgggcgtggttgtacatgcctttaatcccagcactcgggaggcagaggcaggcagatttctgagttcaaggccagcctggtctacgaagtgagttccaggacagccagggctacacatagaaaccctgtctcaaaaaaccaaaaaaagaaaaaaaaaagtgcagtcctgaactcctgaatacctagaga

SEQ ID NO: 22494 - DNA, 1863 bp, Mus musculus
tttattttatatctctggtagacatgtaccttagactgctttcacatgattataattttgataacaggactcagattttccatgttttaacttgttttgtactttgagaggtttggggcagcatatcccacagtgtgtgcatagagggcagacgagtttggggggagaggtctttcctttcactgtgtgggttctaggggttgaactcaggtggagcaggtgcctttaccactgagtcatctcaagcctgtttgacagatgtggtctcttaagttattatgtgtaaataaaatcctaaaaacaaagtcgtgcacagagtgcacctagtgcctggttgcacagagttgtcctgtggctggattgcacagtacctgcctttcagtgtgttagttttgtacctgataaagaataatgctgagaaatctttatttttacaagtttcattattaagagtcttttctctctctctctctttttatcctttaaggtcttggtttcctaaagatgtctttcacttgaagagtgcagtccttcccattggtgaactaagacaactctccacgttgcctggcagtcagtcctctctttaaggatggttgtccctatgctgttgcttcacatgggctgggatcctctgcccttgtgttgaattgtgactttggaatgtgcaggttgtgttaagtacaaggcgaatctctatgggtaacgtctgtgttggagaagccatttgtcaaccatggtaaaacttgcaaacccactttacacagagtggattcttgaagcagtgcagaaaatcaagaagcagaagcagcggccctcagaagagaggatctgccatgcggtcagcacgtcccatgggttggacaagaaaacagtctcggaacagctggaacttagtgttcaggatggctccgttctcaaagtcaccaacaaaggccttgcttcatataaggacccagacaatcctgggcgtttttcatcggttaaaccgggcactttccccaagccaaccaaggggtccaaaggaccgccgtgtaatgatctacgcaatgtggattggaataaacttttaaagagagcaatcgaaggccttgaggagccaaacggctcctccttgaagaacattgagaagtatctgagaagccagagtgatcttacaggcaccaccaaccatccagcctttcagcagaggttgcggctaggggccaagcgtgctgtgaacaatgggaggttactgaaggaaggaccacagtacagggtcaatagtgggagctcagatggcaaaggggcgccccagtaccccagtgcttttccgtcctcactcccgcccgtcagccttctaccccatgagaaagaccaggtgagtgagcccggcggtatcgacgccctggagatattactgttttacctttcgcttccacttaggcgtgctcagcctgtgggtcccaaccctttcggcaaacatctatctccccaaatagttacattacaattcataacagtagcaaaattatagtatataaagaataattttatagttggctgtattaaacggtcccagcattaggaggctgagaactaccgatgtggacggaagatctgaatggagtttgaaaagatcagttgtttgtgccttgaagctggtttttataatttatattaggatgtttcatagcatgattgtttaaacatcattttatgacacattgagggtttcttcagtggctaatagttaacataatactcacctgacttgctttatgttgtaactaccaggtaaacttgaatctaccttcttcaagcccaagaaaggaaagtgtgggagtttttcttcccttaattgtagagagaaaaacctccata

SEQ ID NO: 22495 - DNA, 1187 bp, Mus musculus
tttttaaatgtgtgtgtgtatgggtgtattgtctgtgcaccctgtgcatggttggtgcctgtagaggccagaagatggtgctggattccctgaaactggaactatagatcaccatgtgggtgctgggaaccaaccctgggacctctggaagagtgtatgtgtgtacacatgcgagtatgtatgtgcgtgtgtgtgtgtatgtcccctcacccccacaccaagtcctttcttatactcttcccattcccattgattccctctctctccactcctaaacattcttctactttgatgtatgtatatatgatgtatgtatgtattttttgtgaaccagtggttttgattagagttagtagttacaggaacgtactagttgttatacttctgaaaaaatatttctcttctcctagcaaccattagttaggttgggatctgaacaataacagtatatggtcttaatcactgatctctctctcttttttttttttttttttggtttttcgagacagggtttctctgtatagacctggctgtcttcgaactcactttgtagaccaggctgtcctcgaactcagaaatccacctgcctctgcttcccgagtgctgggattaaaggtgtgtgccaccatgcccggctcactgatctgtttcttaagctctagaacatgtttgtttttaggggttagctgctatagtagttatcataaagaataatttttttgttctgacagatcttttgttccaaggcaaaattaagtcaagcacttaattttgattaagtgatgaaatttttgtgtctgtgaggacaatgtgacaaaagatgactttaaagacaaaatgtgtgagcttgggagctatgaagtggctcagtgggtaagaacacttggaatgtgtgtgagcatttgtctttggattctagcccctttgtaacaagctgccctgggcctgtaagtgtgcctataacctcagaggtggggatcttgctgactgccagcctggcaggaaaaatgtgatctgggagagaccctgcctcaaagaaatgaggcagagtgaaagaagaggtcatctcacatccttctctggcttctgtgtgtgtgaagaggtgcacacacccacgtgaacacacaccctcgtggacagagtgtgtatgaaaatgtatgtacacctacaggtatacagtgtgtgtg

SEQ ID NO: 22496 - DNA, 1098 bp, Mus musculus
gtcaacagacagaacaaataaagaataatgacatcctgaggctctcaggttttgttttttgttttgtttttgagggggcgtgttgaaagtttgggctggttaagagtaaacaatgaacagtattgtgagatacaaaaactttttaaaaagatgatgcaggttgagctggggagatagttctgttggtaaagtgcttgcctggcaagcatgaggacttgagtttgatctccaaaacccatttaaaaagctcagtctggtgtacacacgtgtaaccccaacactggagaggctgatccccgggccgtctgatgccagcacagccaatgttccacagttaggagttccataatgttaagttgaaatacagttaagagactatttcaacaaaacatggcatctgagactgatagctagcccctccctcccgcacatgatcatgagcacgcgcaccccccctcccccagtccggtatgcagttctgaagggcacacatcacatctgaatgtgagggaatagaggcagagttagcaggcttccaacagagaatggggtgatgctggttcgggaatttagccatggttggtaaagtcccatcttttagtctttggtctgaactagtgtcaggctgactaggttggcacatttaagtaagttgcttctgcccaagatatttagaagggaactgaacctggctacaccctcctgaaatgacacacaagcctggctggcacagtgctgtccagtacttgttcttttgagagatgggatcaggatagttggcacaaagcattgcctggccagaaatcacaagtttgtaaagaataggctttatattagaagaataatcctacctctgtggaagcaatctcggcatagataagaattgagtacatctgcttgaaggtttgaagtgtctgtcaccaaggacatccccagataaagaccaacaataacctagaagagcagttggttatgtataggagacagggtaaatatgaaagatgtaaagaaccttttgcaaataggagtaactatttaaattggtaaaaccgataaaaatgcattttgtagaaaaaaataagagcagccagtaattac

SEQ ID NO: 22497 - DNA, 1180 bp, Mus musculus
gaagaagtgtacaagcaaggaagcagggctggcagctgacagggaggttagaccggccgggccagatggccaagagctgaggatggaggtgctggctcatttgttccctctaatctctaggctaatatagattttggtaccaccagttaaaaatgtcactctagctcaccttataagagctttagaatatgtggctaagcccagtgttaaaagtacgaggcgtgcttgttttgtacttccatgtataaatggttggatttcaaaattatgtgtgtgacacaaactttgttttcagtctctctgtctaacagtccctgcaaacagccacctcactttcagaggccatctttgttattccattcactaaaaaagcacagaactgaacattgtttgtttgtttgtttgtgtgtggtttgttttttttttttgttttgttttttgttttttcgagacagggtttctctgtgtactttggctgtcctggaactcactctgtagaccaggctggtctcgaactcagaaatccgcctccctctgcctcccgagtgctgggattaaaggcgtgcgccaccacccggcagaactgaacgttttatgaggaggtgaaattgaatgttgacacgaacataggcgagctctgagccatgagccacacacacacacacatacaccccatgtagtgcagtttggaacaggatcgatgctgttcttgtgcagtggggctggattgtatggtgacttgaacatttaatagcattccctggtcctcttgtccctggttcttgctggtcttactgtttagtgctaccgtggtaagaagcctctagctccttcctgcatttgggtttgggctctgcaggtgccgtgctaagctgagctgaccttaggcatctgaaccttggggagtcagacagaaatgtggcaatcttgtgcttgttttgccattactgtaagttcttagatcttggtttgttgtttttccaccctaagtagtacaaggggttactcatttatgtctgcgatgttttaaaaataacactttcataagtgtcacagcatgtatttgtcattttagtaaatggatattttaataggcagcaatttgcaaattcaaacatagacaacatgatttgacattaaaaaattagagaatttcctgccatctttgccatcagccttg

SEQ ID NO: 22498 - DNA, 1101 bp, Mus musculus
tgggttttgcctgatggttttgagtttgagcagttgttgattaattcatgaaccccaactgcaaggtagatgttcagtattgattagacacatgccctggctgtatgcagttaaaaggactctgttgtgaaaggctcctaaagctaaatcaataaacggctaaagtcggacttatctataaatcttggtattttattcctttttctacatgagaaaagctgttaggaatattatgatctgcactgttaagaaaactagctatgtctttaggacaattcatgtgttaaccattctagataactatcaattatttacatgtacatcctaatagaagaaaactggcttagtggagataataacaggatttctttggaaaattatcatctttattctgatgacatgggtagagaactttgcttagagcctatctaaatactaataaaaatttcaagacatagatccccacagtgttaaaatgtctacagtctctgtggtgatcatgagcagcaattactgagcaattctctgcactgagtgagaagcaagcaagcttcctaccagggtactttttctgaacactgtagagtacctctccaagtgagcaggctgacttcctctggataatatcactctctaggattcctagaagttcccaagctctgtagcttcagggagcaggcctccctgctttgcctgctgcttgccttctttaagctcctagaatgcctgcatgaactctaagccttacgccctttcttgctctcccaggagcttcaccttgtgtgaggttgtcagcagccacccctggctcctctcatctccaacacctgtgcaggctccaccttttctctgtagctagattctgagcctccccaacaacacaacatcattttcttaagccctgtctactgcattgacgacgtcctccacacctttagtttcttcccctgataagcatctttccacttcaggatgattgttgttggtcacctagatgctacacatcccctagaccttacctcttctggctcctccatgcccgagggccctcctgtgctcaggctctcttcagaaagactaaggctataggaacatctatca

SEQ ID NO: 22499 - DNA, 1130 bp, Mus musculus
tcccctcactcatggaatcctggtcttgttcctctggggctttctgcaaactggacgtgcagaatgttgctgggtaaaaaaaaaaaaaagtgcccagggttgtgtggagcaacacattgttcaagcaagccgagggaacctgcccagggtggcttcctaacgtcctgcctgagtctctccttcagctcccaaactccatgcttgttcccctgcttttagaattgaaactcagtgacccaggaactggatggcagtggatgttcttcatctgtcctagtagtaaatgttctttgtgtgctatgtaatgagtgaattcatcaagccacttggagttgtagcattccaaacagtctcagctctttgttaaggcaggatcttgctttgtacagaccgacccctgaatcatgttattacaggtgtgcatccaccatactaagctcaaccagttttttgtttagccatcttttttaattttatatgatttcaccacacagagatcagttgtttggacatggttaccactatacagcacagcatcctcaatggctgtgggcacgtggaggttagtgacgatgacaggccaggctactgctgctgctgctgctgctgctgctgctgctactactacttcttcttcttcttcttcttctttttctcgttctcctcctcctcctatccttcttcttcttcccccatccctctctctttctttctctctttctctctttctctctttctctctttctctctttctctctttctctctttctctcttcctttcttcctttcttcctttcttcctttcttcctctcttcctctctctctttctttctctctttctctttctttctctctttttctttctatctatctatctatctatctatctatctatctatctatctatctatctatctatctatctatctctcactccctctcactcccttcaagtcctatgagactgatagctgaaactgagataaggttcagggttacctcagggaaagtctcatacagtcacttcatatacgcagggaaagaagtcagagacaaagaagagaaagtaagcccgtgcagctacagctggttttgttctcgagttcctaaggctcactggtcggcctca

SEQ ID NO: 22500 - DNA, 1656 bp, Mus musculus
agacatacggcctacttcctctaagggttcttaaaggacatttcaggaaatcataattacttgtaacaacactggggattacttattttttgtctaattataccgaaagcattgggtgtttttagtatctgcaaaattcttcttccttgtactgtcctcgagtccatgtggattctcttagtacctgttgacaggccctggtaggagcctgacacacaaatagaatctgttttccagccaagaaacacataggtggtggcacccacagaaacccagtcttaaagttgcagtgaatcgtctcaagttcaagtacattgactatgcatctagtttctatagatttgttattagatgcctttatagttctgttatttaatgctgatactattctctaaattcttgcctaggtctgtaaccagtgatgaaggatccatgagtgcattcacaggaagggggtcacctggtaggggtcaaaagactaaagtcagtaccacaccttcatctggtcatgctgcgtctgggaagcactcaagcagcagattggctgttacagaccccacccggcctggtgccaccaccaaaaccaccacctcctccacctacatttctgcctctacacttaaagttaacaagaaaaccaaagggctcattgatggccttactaagttttttacaccatcacctgatggtcgcagatcccgaggtgaaataatagacttttcaaagcactatcgtccaaggaaaaaggtctctcagaaacagtcatgcacttctcatgtgttggctacaggtaccacacaaaagctaaaacctgcaccttctgcacttctgccccctgcccccatctctggtcagagccccagttcacaaaagtccagctcttccacctcctctacctctacccagagctcttccagccagtccggtgagccctcctttagcagtcttactaacaacagccagctgaaggctctctttgatggactttctcatatctataccactcagggacagtctcgaaaaaagggacacccaagctatgcaccacccaaacgcatgcgtcgtaaaactgaattctcttccacggcaaaggctaaagcccgtttctttggaaaacgagattttaggagcaggcttctctctcactcctcctgtagctgggggatgactagaggacatatttttaaagccattgctcacttcaagcgaacaacttttcttaaaaagcacaggatgctaggcagattaaaatataaagtgacccctcagatggggaccccgtcatcagggaaggggagcttggcagacggaaggattaaccctgatcaggataatggtaagcaaaaggtgaaagctccagcccaacctctgcccgcccctctcccaccccaaagagccaggaaatcagctctgcccgggacataggctctggctcgctcgctctctctctctgctcctcactttgacacacatgcagtgagactttgacctttttctaattctgtctaaacctccaaaaaagtgttttttcaactaatatctccagcctcctattatttatttccattcgtagtggcactaggcacttccccctccagataccttcatagcgttgctcccagctttgtagtccgcatgagtagccaccaccatgct

SEQ ID NO: 22501 - DNA, 1184 bp, Mus musculus
ggcaaagttcatcctgcgtccgtctcagcagagcctgatctgtgcttctgtggagtgtgcattggatttgagtgtgtttgcatgtttacccattcaccttaggaaggagaccgatttcaaaagttcagtgaacaagttggcccattacatttgttaccctttatccaacaaaaagccaaaatatgtcatgtggaggaataggtagattttgtgagctcaaaactaatgatggtaatgttgtaactagacatcacttcttatcttggttgaagaatatgttttgctttgtattgttcttacgttccctcgtatttgttatagaaagatgacagtgatgtatgtagtagggaaagagttactgctggatctgtgagcagggttagctatataagcttataccgctcaatgcagaaagagatcccattgcccactgtgcggattcggtactgttgttggtaatgtgcactggtcacccatgcttcaaatcactgaacaccctttcttctggtttcaaatgacagatactgatattaaaataagcatcaaacaagaaagtgcagatgtgagtctggtgggaaacaaggagctcgtgactgaagaggatctggacgtttttaagcaggcccaggaactgtcttgggaggtaaggcccagacccaacacagcagtaatgagatctgtgggacttctaacctttgcagtgaggctgtagagtcctttgtggctctttaatgcttatgcgggtttttgtttctttctttattttttagctatggcaataaatgtagattatctattcttctcaaaatagaagaagacttgactgatctcacaaagcagaccaaagcagtactagttatacagatagaacaagaattatagaataataattaactggctgtggtggcacacgtcttcaatcccaacattccagagacgggtgcaggcctagctctgaattcaaggccagcctggtctacagatcgaatttcaggacagcaggggctacatagagaaaaaccaaaaaattaatagtaatggcagaaagatggctttgtgggtaaaggcatttgctttgcaaacctgacagccgagttcaaaacacaggtatggtggaaagagccagctcccaaaagttgttctctgaagctcagcacagcgcagaggtccacacaagcatgcat

SEQ ID NO: 22502 - DNA, 1219 bp, Mus musculus
ggataaaactaaaatggatgcctctgctgtttaatccacacttttgaagaatcagaataactcaggcggttcatttatattatttttatttgaagtccttttgaaaataacaaaagtttggcatgcatgatgaaatttttatttgtttttttaattttcagatttacttggctccaatttaaaagtaagagggcatgcctgataaattttaactcataataaattgcaagtgaaagtgactttgctaacgttgctgtttcttgaacgagcttaaggaggagacgttagctgtcttgaatttaccttaacaagaggaaagatgggattctggctctgcaagtaacagctgttccctggttaacactgtctttgtttaatggagtattttaatcttagagtgtaggatttagaaataaaattatatactttttaaaatgatatacagaagaagcaagtttatattctgatgatacttttatgttaaataatgttgtctgtttctctttttctaggttgatgggaatatgagtaaaatttattgccaaaacctttgcttgttagccaagctcttcctggaccacaaaacattgtattatgatgttgagccattccttttttatgtccttacaaaaaatgatgaaaaaggctgtcatctggttggatacttctccaaggtaaaccacgagccagcatggccttctctcgcttgcttgcaaatgtttttagtggagctcaggtctttgaacagggtttttttgttttgttttctcttgtttttgtatttttatgacaataatttgagtaagtggctcatgtttctgaaaacctcagctttttgtttaaagctcatttgaaaggacacaaacaagaaacaaaacaaataacaacaaaaggtgcctaggaagtgtgtaaaggaccccagaaccctgtgctgtgctgacagtgaccatgcgacatttcattaccaccttgtagactgcctcgcagctttgatttccaaatgttgagcttctttcttcttttaagtggtgtgcacatgaagctttctgtgatggagcacttaagacctcagcctctctggctcatttcctacctcgtggtcagcagtatccagtgttagagcattggtgtgggctgctgagatggctcctgagaaacgtccaggacctgcttggtaggagagaactgactcccagaagttgtccgcatgcaccctacc

SEQ ID NO: 22503 - DNA, 1195 bp, Mus musculus
ttccaaatagttctcggcaaaagtgccattttcttcctggctgcaacttctttgagggtctctggattcccagaggaggaggagacacactacaagcagggccaggcacctcagggcattggctttgggtggtgtttggtgctcatcatccctgggatgtgtgcaggaggttctgactaaacattgggtttccagtcatattctcggcaccctgaaaagtatccctcccaacaagtgcttgcagagtccctgcctcttcacagcctctgagtgcacacacaacaggagggtgctttgctgggagagaccagtgggctcaatgtccatgacacatagagcgtgttaccttccacctatggggcagcagtcctgcgctgcagtcaaaaggccaaggaattgtcaggagtcagccttttgacactgcaggagtggagggtactgaaaggtttgtactccagtgctccccaggggctcagcttgctggctcgcctaaattaccgcatgctttttagactcggggtacaagaacagctaggtaaaattgaaagggagggtgggaatgcttccctcttaggtcaaagtgtgggaacatagagacataataaaaaccgtgcctccagggtaaggtagttctgtgtagtggtgagcgtaggtgggagggggaactgcttgtaggccaaatttctgccttcaacagtgggattcacatgaatcagtgagggcctggggacttccatagttagtcactgcagggaacttttaattgtgggatcttgtggacaaagggaacagttatcatccatggttctatacctgcgcctcacccccccacccccggcagaagtacagagctggggctcccagctgactaagtaaatttctcaggctatgccaagcacttagggagcaggtgacgggatacgccagttttctgtgctgaggtttgggcttcctccactgctctggcaacgcagcactctccatgttgacaggacacgatatgggctggctgcagcacagcagctgtccacgttagcattcctgacaccgctgttgaaaacctcagtgtggcagagcggcacgcgccgacagtggcttggctgttaaagtctggtgtttgtttgcattcaatacttaaacaggacgagaggagttaaaccaaaaatcttaggcaaaacacgatgcttattttatt

SEQ ID NO: 22504 - DNA, 1920 bp, Mus musculus
aagaaggcagcaaagacaatcctgagcctctaaagtgcagacaagtgtggccaaaaggagcgaagcgagggctctccaagtggaagcaaagcaaggagaggaagacgggcttcaagctgaacctgtacaccccaccagagacacccatggagccagaggaccaggtgacgatcgaagagcagaaggagctttcagaggacaagggcagccccgtggggatggaacgggaggtgacagagaccgtggatgccttgctgcctcaggaggggagcagaagggaagagacaggcatacccgtgagtccacataaatcaccaggtggaaaggtagatgaggaggacctcatcagaggtgaggaggagggagaggaagagggagaggaggagggagaacgagaagaacaggaagaggaagaagaagtaactacagaaaaagacctagatggtgctaaaagtaaagagaacccggagcctgagatctccatggaaaaggaagaccctgtgcatctgggtgaccatgaagaggacgaggatgaggaggaagagccatctcacaatgaggaccatgatgcagatgatgaagatgatggccacatggaggctgccaacatggagaggggagacctcccaagagaaaccttcaaagacgcactagagggccaggaggcttttttagacctgagcattcagccgagtcactcgaaccctgaagtcttgatgaactgcggtgttgatctcacaatgtcctgtaacagtgagccaaaggagcttgctggggacactggaactgcacctgagtctgacgcggagcccccggaagaacagacacagaagcaggaccaaaagaacagcgatggtgtggatgctgagctcgaagagggaggcccagccgctgtggaaattgactccgagaccgcccaggctgttcagtctttgacccaagaaaacagggagcacgatgacacctttccagattgtgctgagactcaagaggcctgtagaagcctgcagaactatacacacacagaccaaagtcctcaaattgccaccacgctggacgagtgccaacagtcagaccacagtagcccagtttcatctgtccattcccatcctggccagtcagttcgttctgtcaatagccccagtgtccctgccctagagaatagctatgcccaaatcagccccgatcagactgccatcacagtgccacctctgcagaacatggagaccagtccaatgatggacgtcccgtcagtgtcagatcactcacagcaggtcgttgacagcggattcagtgacctgggcagtattgagagcacaacagagaactatgagaacccaagcagctatgactcaaccatgggaggcagtatctgtggaaacggctcttcccagaacagctgctcctacagcagtctcacctctagcaatctgacacagaacagctgtgctgtcacccagcagatgtccaacatcagtgggagctgcagcatgctgcagcagaccagcatcagctcccctccaacctgcagcgtcaagtctccccaaggctgtgtggtggagaggcctcccagtagcagccagcagctggctcagtgcagcatggccgccaatttcaccccacccatgcagctggctgacatccccgagaccagcaatgccaacattggcttatatgagcgaatgggtcaaagtgattttggggctgggcactacccacagccatctgccaccttcagccttgccaaactgcagcagttaactaatacacttattgatcattcattgccttacagccattccgctgctgtgacctcctatgcaaacagtgcctctttgtccacaccattaagtaacacagggcttgttcagctttcgcagtctccacactctgtccctggagggccccaagcacaagcta

SEQ ID NO: 22505 - DNA, 1978 bp, Mus musculus
actctgaatgccatgaatgggtatagcatgtcccagccgatgatgaacagtggttaccacagcaaccacggctatatgaatcaaaccccccagtaccctatgcagatgcagatgggcatgatgggaagccagccatacgcccagcagccaatgcagaccccaccccacgctaacatgatgtacacggcccccggacaccacggctacatgaacacaggcatgtccaaacagtctctcaatgggtcctacatgagaaggtagacagcctggcagcccacccagcccactgggccccactattggattgatctgcacaaatacctttgaagagtacgatttcaaaaccagcattggtgtgaatgcaaaaacatttgttggcaccatttatttaaaaaaaaaaaagctgtatgcagcagaaagaaagccttatacaagttgtttttcttttttcctttttttcttttttggtacctttatttctgttacttttatataaaattctctgcaaaggaaggcctctcttaggactctagttggcagcggccacacgtcgtgcctgcttccattaaacagtgtggatacaagcccctccccaaatcacctgttttaatactgaacctccagcttttctccttcctgtctactccatggaaatgcctttagcatttcaattactgtatattttgtttaaggtgacccttcagcatgccgctaatgtctttgttagtgacagtgcattttgtagtactgtacaagtgttgtgctaacggtaagccatttcttaagttttttgccttgattagggtaccctaatttgagggttaaaaaaaacaaaacaaaacaaagctctatttttgttaattataaaactgtaaagagctacagagctatccccgtctggttagtgaagggggtttatcgctaaatgtttggtgtaaagttgagaagacctttttccattttggtggcaggctcctttggggggaggcagctttctgttttataaatgcacacttctgtttattgaatgaagcatatctcagtgtttatctgtcaggttttgaagcatttcatatatgtccaaatacttggcaggatttaaaaaaaaatagtgaatttggtgtaaagttgctattttatggaaatgcctctaactttacattttcattccatctgtagatttttctatctttataaaatattggagttattttttaaggaaaaatagaaaagtagcttgtgaatagctcaaactaagcttacaaatcgcatgtaaaaaagcagaaaagttatttgtgtctgtttctattgcgtccttttttagcctttgtacctggacaggtgacagtaagggccaagcaggagaggcgggcgcggccttgtataaaataggagccagcgggactcttgtatctacctgttctctttttagtcagttacttcaaaaaaaagaaaaagcaaaaacaaaaaaacaaaagctgtacattttaacataaaataaattatgatgagccatttctagcctctcgtgtcctgtcatgttatgattgatggagaatgaccagctgagctgtgtcatgtgtcacatttcagaacacatacacgatgggggaaataaattatttagtgtaaattgaagttatgagattttttttttctgatttgttttgactttgggggaggggttggcaataagtatgaatgagtactatctaataaaaccatcacctataccaaatacctatttaataaattaatttataatggattttaatgcttttccatgaaagttgactttatgctggtgcataccttctgtatgccaatcattgtctttaaataaagtgagtttggttttttctttttgactttgatcttcattttgcccagagctcccacatagataatccatttgcttcctttgtgccaagcacgtgtaaagccccagaggcctggtaccacactagcaagctgcttg

SEQ ID NO: 22506 - DNA, 1146 bp, Mus musculus
ttaaacactttcaaggcattaaactgaagtaacatgagctcacctcagttgtttactgtcaggggtgggggtggctgatggtccagcattttgaattgttttttcatatattttattgattgtttgattattttaaatcagagtaaaatttgttctgctcttatatcttggccagaagcagcggtcctgctgataattgatatgaatcagttattagttaaaatggaaagcatccttgaacatttattgactaaaattcatttggtttgtacagaactagtaatctgacatgttctttattcgaagtcttctgttccctgcaattcttgtggttcaacatgactgttattaaatggaccttaaagcttactatcattttttatattcttctttaatgcttgctctcagagttggagctaactattggttagtgtggccctgtaactattctgtagtagcgcacaattaaaggacatgcactaacctgatgaggcagagcagtggaatgtgtcatgcttttagggcattctcacagcaggctcaaaggctggcttctgtgttacaactccaattatctagtggctaaagcgtggccatcaaagccagcttgattgaagttgaaagaactggtgagttagtgtgggggagaaacatgaaagaagagaaaattattttgctccgagatgagatgaaattgtcctaagagccgtgctccaaggatgggagtgacttggaacccgctggcggtgagcccttggctaagggaaaaggagcagaatagagatagagcggggaatgttggttgttgtagatgaggtttgctacttggtagctgctgctgagtttatagcacatctcgttgggtatccaagtatgatgctttaatcagcatccgggggaaggaggacacagatgaagcaggggggatgaaaccatccagcaatgagtgtaaactcaaacgttgtagaaccatagttaatggaatcctacgtatgctttatgtaacttttcagcagtgctccctgtagatgggtggtggatgttcattttctaagattgggaaagaaaaatgtgagttgatgatgtaatgctggacatttttgtctttgggtaaattttctcatgtctgtttcttatttcctgaat

SEQ ID NO: 22507 - DNA, 1222 bp, Mus musculus
aatcttcttcatcttggctgcccatgaacattattccattgatgtgtttattgccttttatatcacaacaagactctttttgtactaccatactctggctaacaccagagcgtatcatcagagtaggagagcgaggatttggttccctatgttttctttctttgaatgcaatgttaatggcacagtacctaatgaatattgttggccattttctaaaccagcaataatgaaaagactaattggatgaagactctctctctgtaatgagtttgttgttaaatatacagtagttatggaatgaaaatgaatactttgtcccaggctcctggatacgttgcatttggcttctgtgttgacaggtttcccgttctgagaaaggccgtgactgtaaaactcaagaaagaacacacaagactccttattagctgtttgaatggagaggtcatggaaagagtttccgcccctcactgtaggaagacccagcgtggggtgatgtcaggccgatacctgtgcatgctgagtgtttgcttacggaactcaagcacatcagcttgggctggttgaagaattgttactgattcccagtaggactcaagtcaagaatatttctgaagctggctttccttacctagtgagccgttctcatgtgttcattgaactaatctgtgtctgtctgcaaagtgagtgtcttactggtaaatatgttttaccttttgagccatttgaaagaaaaacacattgaacacagcagaaacaaaagaatgcggggggcaccgtgtgaggtgacacgctcgctgatcaggtgtcgccggcctcccactaatgcaggggtcagcatttcagagcaggtgcagcgtcagttgctgtccctttctgttcggaagcttcagtgtgaacaacagaaagggctcctgaggggaggtggctgtgttcctgtagtgctgtaagtccccggactaaatacttgttgtaactgttagttaggcagatgacagcccaatatactgctttttaataatgtgacttaagtgaacacatgagtgttttaccagatgttagagttcttacatcagtgagtgagtaaatgtgcatgcagagaattcttttcttctggaaaaaaacaaaacagaacagaacaagctgtaggcgcagtgctaattctcggggtgggggtgggggtggggtcctctttttgttgttgtttttccctgaaagttctcat

SEQ ID NO: 22508 - DNA, 1176 bp, Mus musculus
ttttctccttgacagcttagtacagaagcaaggaaaggttttgagttcttgggggtgcaaaggaagaattgcctacattctaatcccagtgtcgctgccctccctgtggtgttaagcccagggctgtgtgtgcgaggcaagtgctctcggcttttacagtgcaaacaggatctactgaaaggtagacatgctgggtggaaaggaacgagctcctatggaacataagcttgctctcaccaccacatagttttggcagaaacctttgtgttacacttcccaacgaggccagagttgctgtggcaaaaataacctttctaaagcaatgggcttcatcttagaaccagtcaatttaaataacgtgagctgtaaccaagaaaacccacacttccaatagcgtaacattgacactgtaagtggtgaccagccccattctacctgcctgttaggactgagaattccaaaactctgtaagttataagtggggaacaggggtgctggatccttctatagcagagagcaagtagtctttcaggaacatttgtgcaaaagtgtttggttgtttgttggggggggggggttctttgtttttgtttttgttttattttgttttgttttttcagagacagggtttctctaattcagggatcacctgtctttgcctcccatgctgggattaaaggtgtacaccaccacacacatctttttgtaaaacttaattcgtataaattcagatttgtggcaaaaatgtatcttctttatattcagcaaaaagaaattttatcattgaaagattctagatccaaaatgcttaacaatgtttacaatattcttgacttaaactctctgatttagtacactcaattatttgatggtcttgtggatagaaatcccatagcaaaagcagacagtatagtcgccctctcagctgacagacttaggagacaagaacggtctttagaatagtccacttgctttccttcagacagcgtgaaagcagaaagcatgtcaggggtttttgttgttgtttttttgttttcttttttttttttttttttttggtttggtttggtttgggttttttgttattgttggttgtgggttttgtttttgttttcattttaaacaagcttatgtaaataagatgcttgacttgaagggaaaactatctaagatcat

SEQ ID NO: 22509 - DNA, 2388 bp, Mus musculus
gagtaatttattccctaaagacatgtaacagcttcaaaaaaaatataaaaattgtccttgaagctgggcatggtggagcacgcctttaatcccagcacttggtaggcagaggcaggcggatttctgagttcaaggccagcctggtctacagagtgagttccaggacagccaaggctacacagagaaaccctgtctcaaaaaaccaaaaaaaaaaaaaaattgtccttggttttgcaatgataaatgaaaatcattaaaattctccaattgaacaaggcatgcaaggatttggtggtgttgtgttcttttgttaaaacaatgagagcaaaataacttactgaaatataaagatgagagctgaatgagcatgccaccaatggagaaggggtattttcacagacccagtactttcccccagaccatctccatctgatgccaaccagaacagaacattggccatttcgtttaaaaaaaggaaaagaaagagagagcactatgcgtgtgcacatacaccagttactttttgtacaataaagaaatggggacagggaaatgaaagaagagaaaactatactgtgtagtcaggatgtggcgggaccaaactgtggctttttaattgagaatgtattcttggtctataacaaattctggagtaaagtagcaggctccctttttaagtagacacctccagtctgctgctggaacacatacatcgatctttattctccactgattggttgcccatcgaaccggaatctgatctgcctcattgacaaaccctgccgttcacaataggctttcattagtttactaagtggtatatgcctcttaaccttacactgcaccacagaaccatcctgtcccgccaccttcaaattaatatgatcattgttctcagtcttgactccttccttgggtttctcgtcagccatggcaagtgcaggagtctccttgtggccttcgctgtcctggaactcagacatttttctgcctctgtctttgcctctgcctctgcctcccaagttgctgggattaaaggcaagcatcaccacttactgcctagcaagcatgtcagggtttttttttgttttgtttttgtttgtttttttgagacagggtttctctgtatagccctgactgtcctgaaactcacaagcatatcaggtttaatggcaactttacataacagtttgtgtttattaaaaagtgagattagtcccagtcacccctattacctctgcagctgaggattaaagtaccatcagagatgcttcaggctactggatggaaagagaaagggttttgtttgtttgttctccttatgaatagctttaaatgactaaaattactgtaaaagtaggtgttggtttgcctgtagattcagtggcactgattttacataactaatatgatgaattactgtatcaagttcagtacaaaggtctgtgaactctaagctatttctccagctacactaagttgtttttgaggatacattctacactgtgttaatcaaaggactctttattctgtgaatttcccatcttggcataaggaagctttgtgctttgatgggagaaggaatattctattgtttgttttcttttttccattgttacttcacatctcttttaatctgaactagtggattgtctgaagaaccaaaccgagcctattgttattaacatctttaaaatgtttaattttaataatttttcattgaattcatggattgttgggataatgaagtatttgtgatgtggaacaaaggaaatgaaattggtactcagtggggaagcaggttgcttggactaagccaggcatgttcagttttgagaattctacctaaaggtctccctgcccacagagaaactagtgttacttgaagacatgaaaatccctgtggtagccagaccttgaagcacagtgttgtaataagtaaatacctgattctaaattaaattcagatttaactaatatatattattttataactttgttgtattaaaatgttttaaacactaaaaaataaagcatttgaaagttggtatgtggcttgttataacccttgcactattaacatagtgcgcctttatgtctcagacagagtcttgctgtgtgtggtctgctctcaagcctgtgtgcctcctgcctttgacttgctgtcctcctgcaccagcctccgtgttagaatggcagggttttttccccaaatggttaaacactgcagctttaggaaggaaaatgggagggaaggaagaaaagaatttaaattgcatttcacagtacacacatggaggtcagtagacaactctggtcactgttgtgtctcaggggttgaactggagttgtcaggattggtggtagccctgtgcatttacctattgt

SEQ ID NO: 22510 - DNA, 1146 bp, Mus musculus
catggtgattctcttctcccctcggtcccttgccttcacagtctaaaagtcctgtcccatctccttgcccagccattggctgtatggtagttctttattatcagtcgaaggcagctgggagcaggaactcttagtgctgggagcacggcttttgggagccaaaataagacaaggcattagaaccagttcccagcatgccgcttaacatacttgctctccagcgctcctctgggctctggaaggcctgggaccgccatcctaaattgtcagggagataaggagttgataaaccatgctcctcgtcaagcctcaactagttaaagccaagtccagcagcttagcggtcagagtgtgaggaaggaaggaagccagccagccagccagccagccagccagccgtgaggatggaggaagtagtgatgctgagctcataaacttcctactatgtattcaaagatggctctcacctctagtgagtctgacaggtgccatcagtgacatagttacttgtttttgtgagtttttttagtgtattttttaggctgtggattatgtcaggagctgtatacacatcctaaggtgtgtaaagaatatcaggttctgctgacgattggattttgaattcatatctaatgttcaagtggcacttggtgtttacttagtacataataatattttagtatctcattgacctaaaggcacaggcttcacagttccatgatggggaaatttccaagaactttgtctcccttcagaaatgtttttttctctctttctaggcaaaggtcaacaactctagtttaattggagtgggctatactcagactctgaggcctggtaagtatctttgataaataagttttgttttacagctccctctcaaatccctttaaaaagattcatttatttaagtttatgtatgttttgtctgttggtatatctgcacactagaagagggcatctgatcccatgggattacagatacagaagggtgggtgatgggaattgaactcaggacctctggtagagcagccagtgctcttaactgctgagccgtttctccatttgtacgttattttcaaaattacatttttttttttttcctgagacagggtttgtctgtgtatctggctgtcctggaactca

SEQ ID NO: 22511 - DNA, 1319 bp, Mus musculus
ttcagttgtgatctggtctccagtgttaatttagtctgagtagtccagtgaagacggtttttagaacatggcttttagggcattttgaacttgttatttattactaacctccctgtgccctcagatggtgttgaccatcagtttttagcaccactgttgatctaggtgctctctgctggctggagtcagtgtggaggctgcgtgctgaggaagggccggcagggtggagtgctctcaggcccatcatggtggtttgctttgttcacaggtgtgaagcttacactgtctgctctggtagacgggaagagctttaatgctggaggccacaaacttgggcttgccttggaattggaggcttaatccagttaaaagaaacctctgggaacgaatatcagaagatttggccttaatatatttccatgcgaccagcaggctccccttccttcccccagaaggtgatcacatcaaaggatgatgaagcaagagctgtattttaaatatttagacagtcactgttggctggttcctagttggatggttatcagtgctgccgtggtgcggccccctatacattatttaaatgtatttaactgttaaatgtgctacccaccaatgatgaaatagacgtttatgaaaaccgtgccatggtgtgcatgtttgttttatgttccttttaacattgactattgtactgaatgagatggatcagtggctgttttaagatgaggtaaaagatttttttttgttatattcacccatcattagaattactttggtaaccccaaacatgacaaattatgaataaaacaagtgtacataactaatggctcacgtatgtgcagttacagattgccagcctagggtctaatcttcttggcaaatacttttttctggtgagcattttgctctttacctaaacctgtgcaaccaaattccttgtgtccctagcataatccacgaggtctttgagattacaataaaatacaaggatacatactttaatactctgcagtttctaagtttgtgcaaagttagagtgaatcactgttaacccatggatgatgaagggagatgcaggggtggtgctgagtggctaaataggcatgcatccccttccttctgagccacgctacagaaagtggagcctgggtagatggaagcaacaggccaagagaggagaaagtgggcaccattctcttctattgacagcgttgaaaagctgagctggggtctggaccaggcagcccccttcgccatcacctgggtgatatgtattacctagtgatcctggttggaaaagtaggaccgtgccagcttcc

SEQ ID NO: 22512 - DNA, 1141 bp, Mus musculus
ttgctccctagccaaacaatttgtacaaaaaaaaattgaattaacaatctgacttttttttttgcattgattattataacattaagagagtcccaggagtttcgaggctgtaaaaacctaaattgtataacattactcacaataacgcatatgttataatcgcaaagaacttacttaaaattcaatccactttggcatcattatcatgtatcaacataataaatgagtccttcagagcatggtaattataatttgataaatcatcagcagaaaattaactggatgtcaaaacattcattggagagggtgatgaatcggggatgattgcggtgatgaattgtgttaatctgcacagtatgaagccagcgaaatggctaagcagcccaagatggatggggcacagaaccagcaaggtcaggacacagagctgggagaggagggaggcagcaggcaggggtgggggaggagcctaggagggggagaagaaagggctagctgctgcttcccttgaaggcccactgttaaccccttccccacagctgcctgggttgggggtggggtctagcaagggccctgttcaagatccaggccaaggaggaagtagaactgtatcccacttaattagaaggcttcttcttctcccacactgccccctgtaactctgtggttattccttaaggacacaagtgcttagtgaaagataaggaacctggcaactaacagttttgtattaacatcaattgtgtgtgtgcatgcactagctctgttatgggcactcctagcctctttccacctgctctgtggctttgtgggctcatagactcctctgcacatagctgacttgaattcccccagatatatcaaaggagagagactatatcataagagttcttgctagtagtgggggtgtgggggtgtggcagcatgtgcaaccaaagcatttctcttctcctcggccatctacatgagcaaccatgttgctttggctgagtggctagtctgtgtttcttccaaagagtttttcaagcctgaatcttgtcagcttctcaagattccatcatggaggaaattatactgggtgccaatatctagcaccatggtggtactatctgtgctttctagtctcttctctttggcctcc

SEQ ID NO: 22513 - DNA, 1126 bp, Mus musculus
tgtacagaacagctccttaggttcctattgggtttttgcacaggctttcctgcctgaccctttactaggcaccccctcttaacacctgcctgctatcaccccatccaaagcagttcttctaaactttactcacccttagtgattcatcataaacagaaactaaatgtgttactttccctactaatatttgtgttttaatgatagtctgcacattgggattatatttttaattatgagtgtgtgttgtgtgtgggtatgcacacatgaaggcaggttactgcaggctactgcagaggctagagtaataggctgttgtaaggcaagcaattcagttactaagaaccaaactctggtcttctctgtaagagcagaatttgctcttaactgctgaaccatctccctagcccctgaagatttcaatctagatgcaaccatcaggtctcactccccgttctatagaaatctgtgtacagattctaactcaagagcctaacaaggaattccctttaagtagattctagactatctactcatccagtccaccacttgcttgctgggccatcagaaatatatctgaaatacaaactaagttgcaaagaacaaaggtggcatcttggtcccatcttcactgtggagttatgaagtggcttagtcttcagcagcatctggtggatatgaccaccatattcaaggtgctgaatagctgtataattggttgctcacctggtaagttcagcctgtgttccatcacctgacttgaacagtatgtcttgggcatgctcaatgcagacaggaggctgggtgttccatgctgtctgagcaggaaaaaaaatggtgccaatctctggagagtccaggtgtttcctgtcctatccccctttttaaggaatgttctacctaggaggccacctcctgaaggtcctgaaggcattgtgtcttttatataacattttgtccctttagaaattatcatgacacgtgtcaagagctttcacaccaaaaagaaatatgtcacattagcttccaagtttctgattgtctaaataacgcagcaactcaacatacagctgtctggcattttgacagtacaataacccataattctttctgccactcaacacttcaa

SEQ ID NO: 22514 - DNA, 1687 bp, Mus musculus
ggatgtcatggagaatttatagcagtttaacacaaatactctattccagaaaacagtaaaacctgggttgccttggtattacaaggaggaggagaaagaggagaaggaacaagagcaatcgagagcaggagcaagaaagcaagagagacagagacagagagagagagagacagagagagacagagagagaggcagagagaatcggatagactaggatgcttaattcacagtgctactgcaaggtctgcatcgatggcaccatgtcacataggctgggcacgtagatttcaaagcagcccggacagccacctttggtcatgtcgttgcataagatagaaaagaaaaagccataacaaaacattaaaaaaatgtattaagtaatgttaaaacaagtacacagtatcatcacgtaggagtgattctaccaaagcaaaacctgatctctatgtgatggtgagtccagctgctgttctgagactggctacagaagttggtgttaccctttccttagaaatgtggaactcactaaacctatgcaaatcctctacaagggtactctgagagtgctgctggttcttttgcatgatttcccagagttcctttgtgattaccattatgggttctgtgatgtgatccctcctaattgtatccagttaagaaatttgatcctgagtgccttcccaagaaacatgaggctcccagacccattcactcctaatctgaaggtggacatgttaagcgaaattaacatcgcacctcggatcctcaccaatttcactggagtgatgccgcctcagttcaaaaaggatttggattcttatcttaaaactcggtcgccggtcactttcctgtctgatctgcgtagtaacctacaggtatctaatgagcccgggaatcgttacaacctccagcttatcaatgcattggtgctctacgtagggactcaggctatcgcacacatccacaacaagggcagcacgccgtcaatgagcaccatcacccactcagcacacatggacatcttccagaacctggctgtggacctagacactgagggccgatatctcttcttaaatgcaattgcgaaccagctacggtacccaaacagccacactcactacttcagctgcacaatgttgtacctttttgctgaggcgaacactgaggcaatccaggaacagatcacaagggttctcttggaacggttgattgtaaataggccacatccttggggtcttcttatcaccttcattgagctgattaaaaacccagcatttaagttctggaaccatgaatttgtacactgtgccccagagattgaaaagttatttcagtctgttgcacagtgctgcatgggacagaagcaggctcagcaagtgatggaggggaccggtgccagttagatgaactgtgtatatcccttgcagatgcatcagccttggtccgctgaaccaagttcataaactgaagagtcctcctgactttcctagccctttggttctcaggggtctgccccgccaactgctggggttgatctcctgtctatgtgggcaagttccaaagtttaaatgcatttttttgactcttggccaaaatttagaagatgctgtgaatatcattttgaacttgtgtaaatatatgaaagagaaaatttttgtctgaaaaaaaaaaaagaagtcggtgttac

SEQ ID NO: 22515 - DNA, 1431 bp, Mus musculus
ccctatttttattttttaacatggatactgggatctgaactctggttcttatgcttgcacagcaagcactttacctgctgagccatctccccagctctcctctgccccttctgtttgtggaggctcagagagaatgttctgctaaagccccatgccagtgtggtggtcagaccaatgagggcagtcttggtgtgaatgactcccacactcactcctgttcccacaagttcccccatggccttatccacagcctgcagagctgtggcacttgaaggatgggctaggcttgccctgtcttggccagatgctcacatccacaagggcctgcttttacctcctaggatcccagatctcgcatttaattattatcaatcacaaactagcagtccccacttctaacaccgtgacatctacttctctatgctcttgtttgtcctagatttacagatagctcgggttacttttcccttctacagcagaaggccatttgtgtccttgagaccacagactggtttctaaaggcatggaggactagcagggcagccccagggtgctatactgcaagcagccatgagagggggcatatgagctttcaaggtttgtaccactgggtttggccacagccacgtggttttgtgctcaccgtggcattgcatgaagtccctcagatcatcctgaaaaggtcaaactgacatgatggtatccccagacttagtgtttgtacccaatgagattgaaacatggatggcctctctattgattactttgcttctggtgaacaaatacctggcagaaagcagtgtcaagagggtttattctggcttacagttggggatcattcggtcatggtggggaaggtatggcagctggagcaggaggttagctactgatatcacctctgcattcgggaagggaagggacgaaaagggacgggaaggggagggaaaaggaagaggaggggagggaagaggaaacgtttaggaagtggagctatgctataaagctcacttcccagtaagctacctcccctggcagggctccatctcttaaaggttcctagcaaggctgcatcgcttaaaggttccatcgccttcccaagcaatgctaccatctggagaccaagtgctaaacgcatgaacttctggggcaacattgcatacccaaactacaacctttagggccacttcccaggacatcctccaggattctgtgatgcaggtaaggggatagttctggaaggattggcgcttagggttagtgaaggcttgcaggaagtgccactatgaggatagaggacagccaaggcctgggagctggaacctagcaggtctggagcctgggcctttcttctaggctaagagcaagttttaaaacagacagcaaagcttgtgggaggggggttgttctggtagcttaagtggctacctcatt

SEQ ID NO: 22516 - DNA, 1503 bp, Mus musculus
ctccctggaaaggcagctttggcgttcttgcagattcacctctcggcctttctcctgcctccttggcctcttgtttcttccccagctgcagtttatatttaagcatcacagtttagtcagtccttgacttcctcagcagggggcatgggtgtgccattgcttccccataggctctgagatgctaggcaggcagcctttgtcagtgcaaggttgcaaggtaacccttactctggcattgatgtagcagctctttctggcataaaactattcatgtcacagactttgaaatgagagcttctagtgggtacaatggtcagactcataagaagaaaacctgggagctttttcatcttgattacaacattctcagcttgattccacaaggatatccccattctttgttaggttttctgtttttgtttttcaatctattttttatcccccaccccctcccctcaccgcacttctgatgcccgacctatctgctaaagagcggattcagtcccttcttcaattgtgtgtcctgttaataggtactgtactgggttccgtgtgtcactggggtggtacctatattttaatactgttcctaacatttcattttactagcaagaaatctttgatttcattttattctttgtaactctagacattagattgtagtttggctattatcgacattttttttaaaaaagggatatattttcttgcacagctgtttaaggggcgagagagagacagttgcagccctcaaggctgttctgtgccttacaggcacgaattttctagctcagacaactgaggaaaaaaaaccgcagaccacgctcaaggtcttactctgcacagttacaggacaggggctatttccctggtcataggccctgttcggtgttcagcgaggaggcaggtatggatctgacaggtgggacatgctggactaaaatgttactttgtatcgcaaacaaaacagacttcagttcaacaaataaaggtcagtttgtgtaatccctgtgtgtagaccctggtggaggcagctcctcctcctgctcaccctgtttgtagcgtcttctctctcctggcctttatcccagaaccaggcctctgcagctctgggactagaagccttgcggagctgctctccactgggacccatgagtgccggagccaccgtcctcgggctgatgaacgaggttcactgacaatgcgcagtctcttacctgatgctcccacccacttctgctgactcctcttgtgccctgccatctgtctgcctagtggtgcactgggggaccattgaagtgtgaccagcccctcaggtcctcatgttcaagcccccatgtgtcaagctgtgctatgagaagcaaggaggaaggaatatttgggggttggggggggtggggaactcggagtgtccacatttggtgtgctatatgaagcttcaggttggaaatgtcctacctggcttgggaccctgttgtaaaaaaaaaaaaaaaaaaaaaaaaa

SEQ ID NO: 22517 - DNA, 1174 bp, Mus musculus
acaggtgtacaccactttaggtgttggcaggtcatgtggtgagtggcacgtgataggagtttcacgtcataggcattggtagtaggacaagatgattgtaaataagagttgagccattgctcatgggatcagcagttggcctcctcgggaggggcctggtctctcggagcagatgggatcagaggctgcttgtgggtcagtcagtatgtgatgttgttgtgatgttgtactccagctgcctgcggcaactcaaggcacaaaacaagtctcgtagtggagacttcctctttagattgatttttattttatgtgatgagtgttttgcctgcatgtatgtataccacatgcagtgcccgtggaggctacaagaatgtcaaatttccttgagctgtagttacatgtggttgtgagccagagtgtagtgctaagaacagaatctgagccctctgtaagaacagcaagtgctttatccattgagccatctttccagcctgttgtggtttgaattgcttggtccagggaatgccactattaggaggtgtggccttgttgaaataggcaaagccttgttggatgtgggcgatgagactttcctcctaaccacatgggagccagtctgctcttagcagccttcaggtgaagatgtagaactctcagctcctgcaccatgcctgcctggacactgccatgttcccaccttgatgataatggactgaacctatgaacctgtaagccatccccaattaaatgttgtcctttgtaaaagatgtcttggtcatggtaccagcaataaaccctatctaagacacaggcccaacaatggaggcttctgtggcttccgctctgtgctgcccgagcttctccatgacagatgcctctcttgctgtcctctggtcggtgtggtgaggagcaacactgaacttaagccttgagctctggccctttcctgtcactgaaactggcagggaatggatggaaattgtcggtgaccgtggcaatagggctatagaaattcctgcctcagctactggggcagccccagaattacttcagaattactgcctcagaatgccttcaccaaagctttgcccaaaggtttctgtcctgaaattcagtgcccccaccgggctctcctgcagtctggaggggaagatacggggtacattgccatgtg

SEQ ID NO: 22518 - DNA, 1239 bp, Mus musculus
ggttggcctcagtacatgacactggctgctgacaaagattcacttagggaaggcagaatttgtcgtaggcacactactaagtagccgcagtgaatattactcagtagttttagatggtgataacaactttcatttggtctcagtgtggacctaaggaaagacaagaatagaaagatcactgccgcttcctctccatcttcccaaactaaaggagtagtagggagaatggtatcttttgactttttccaaatttatttaatcacattatatcacaatcacagacctctgccctgctttgtcattgagtagagggaaatccttgctgtgtaccagcttacctggcacctcaagtaactgcaggactaggcacatcctctctcactgaggccacacaaagcaggccaagcaggacaaaaggatccacacataggcagcagagtcagaataatcccccactctagctgctggggcttcccacatgaagaccaagctgcacagctgctacctttgtgttggggtgcaggaagggacctagatccagtccatatttgctgcttggttgaagattcagtccctggggcccccaaggttttaggttatttgactctgttggtctttttgtggattccttatcccctctgagttcccaattctttcccccaagttcttctcaacgcaaaaggtttggcaggtgaggctttggggtagtgtacttcggttttgtattactgagacaggttctcatggatcccaaggtgtcctcagccgggctttgcaggttcaccttgagcttagatcatcctgcttcctcttcacccgagctagtattacaagagggactgccaagggcagcaaggacagctctagtcagctctgggcttcatatatgccaggcagtcactctgtcaactcaagtatatctacatctattgtcttcttaccacccgcaatcgtgttgcattgctctctgtgtaagtcacaaaggcctgtcaccagtcctgctttggtatctttggtgcagagaggagaccaccacattcagtctagggccttttctcccgatgggaccactctttcagtttcctctgccaacagttcatcaaagtgtagccagcactctgatggcttccttctctatcttggaagatgtcttggagcaatttcaaaggctgagcacatggctcctatacttgttcccgctaatccacatcccagtttgcagccagccctgcaggctgt

SEQ ID NO: 22519 - DNA, 1175 bp, Mus musculus
aaactggttagtaatatggctgggtcctgagtttggaggtgctttgactaagtttgatgttaagaagaaagctgggaatttttagtaatatatttagtgatgtagcaatcgttttccattgattgattgattgattgattgtgatgttgagtatcaaatccagggcctcatgcatctactctactactgagctatagccctatcttagatgtggcaaaatgtaactacatatttactcagacccttaaaagcattagatttaataatccatgctcaaacttagagcctggggcttctattactgtactttttgcttattgtgaaattctagctctctaccttggctacctttcacctgttgttctacttcctgcccctggtgttcacctagggcctcccctcctctgtctttgcttcctactcttacacacacattcagatttcttctccctttcgtcctctgtatataaacccatgaccagaaggccagtctgtgaaaggttgcaaaggctcttccctccaccccacacatgcacaagcccttcccttggcttcacctacattgctgtagctgttgctgtagctggcctccgtggacgcctaggctgtgagcatagggttgtgctgtgtccctttctgttttctcctctgtctggctgccttctgttactactgtgctgcattacatttttccagtataatttacatttctgacctgtaccccaggttccttcataaacatatcacagatgattgcctgtgtgggacagcaagccatcagtggctcccgggttccagatggctttgagaacagatctttgcctcactttgagaagcattcaaaggtaaatggcagtggaagactgaaggcttgtccagattgtcctctgagggacacagaactatcagggtgtaacgccacattggttgtttccatgtggttccactatgatgtcacttgtgtccccttcatgtcagtcttcaaacatttgaagtgcttgtttggtgactgttggtatgtgagagtttcaccaccatcacaatggtctgtttttacatttttagttggctgtagctacatatggctcttgtgtggaggtgggtggggctgaaccacaataagaatgccttgaaggcagcagctcccagggaatgggtcagacaccctctgagtt

SEQ ID NO: 22520 - DNA, 1073 bp, Mus musculus
tgacgtgagagaaaatgagttgttttatggtagtttatgaggcgctgtcgcctgctttggggcttttttgccttttctttcctttatagcttgtccccaattcctgcctctttctagactgcattgctagtaattgctgaaaggccagagcaaaggcaagacgagatttttaacatcttactgacttgtgtgttacctgcagaatgacacagtaaccatccggaccaggaagttcatgaccaaccgtctgcttcagaggaaacagatggtaaggatcagagtcaaaatgtggtctttgtgtctgcttttgaagatgtagttaacttgtaaggagtactgactcttacacctctttataggtcattgatgtccttcatcctgggaaggcaacagtaccaaagacagaaattcgggaaaagctggccaaaatgtacaaaaccacaccagatgtcatctttgtatttggattcagaacccacttcggtggtggcaagaccactggctttggcatgatctatgattctttagattatgcaaagaagaatgagcctaaacacagactggcaagagtaggtatcttattctttaatggatacatgcctgtaatcccagcctggactgagttaggatggcaagttagattttgttttccagtgtatattgggatacaataagcagtttgggccaaacttgtggtgttctacctacccactagcccatctccatgcagtttctctggccttctgaactggaacttagcagtctttactgggctttctatttctaagtagtggaattgcaggtgtgcactgccatacctcactgttttgtatgagccgtgctgccgtccatgcctaggaaaagttggtatcatttaatgggaaagttaccatatacaatatacaatgcacacatggtacctttaaaaatgtacaaacttcatgtagtccaaaatgggtaacaagcttggttgatggtcaggatgcacctggctggcttatttcattcttttaggtgacttctcactgtcgcccaggctgacctcctctgtctccagcgtggtgagattacag

SEQ ID NO: 22521 - DNA, 1097 bp, Mus musculus
gctaggtatcttaaaaaaaagtggtgctttgggaatcttgctgagagccttgtgaagattctgtctagaatgccaagaacagatgagtgggttaggatccgaggtgggggtggggtggtagggttcttagtaaaagtgttccttccttcactggagaaatagaaattgaaagacaagatgctgagcagtgttgtggcagggtttttgggttttttgtttgtttgtttgttttttgtttgtttgtttgttttttggttttttttgtgtagccctggctgtcctggaactcactctgtagaccaggctggcctcgaagtcagaaatccgtctgcctctgcctcccaagtgctgggattaaaggcgtacgccaccacgcctggctgttgtggcagctttaaaaggttgagctggtatcagagtggtgaggaaggattccattaaatgcactcttctctcatagcatggcctttatgagaagaaaaagacctcccgaaaacagcgaaaggaacgcaagaacagaatgaagaaggtcaggggcacggcgaaggccaatgttggtgctggcaaaaaggtatggttcatggctgctgcagaaatgtcattagttgttaagcttaatattttctgtgagaaggggctttcttttctaaataatctgttttggtgtttttctttcccctcttctggattgcagaaggtaacgttttgagaagctctgtagtgtggtagtatcatagagtagattggcccacctcttctgctcgtagactagcacactccaacataaggccacattgatccagcgatcctagtggctgcttttaaggcctgattgttgtagaaattttcttgttagttgacacagtcccctcgagggagagcaggtcatgctccctgggactgcctttttttttttttttacatgggctggtttttgaagcagttggatcaatgtggcttgtgctttcctctccagttagctaagatcacagtgattttgagtagtagctgcataccagctttgctagctaatcttgtagaatggaatttaaggtgttgggttgctgaataatcaagtgttctgtgaattttttccc

SEQ ID NO: 22522 - DNA, 1847 bp, Mus musculus
atagacaacgctgcttaggtgttgcagatcatacctgttgatcagaagtgttgatgtaggtttgtcctttgagccagaactgaaggccatgaaacaaattctttgccaggctctgtccccctggatggggtgttctgtggagctggtgatctcactagtacactacactttgaaaggctagcttaaaactgggcttaaaatagtaatgtcctgaatttgttttgcttgatgttagaacatcctttgtatacagtggagcatacaaggcattggtcatatatttgtaaagtaattggatttttactttagctaaatttttgttactaatctgtataccttgtggtatcaagattggtataaagtactttgagcagatttcaaagacttgcctgcctaatcatacatacagagctcctcccattggagtctaaagattcccaagtctgggtcctctgcctggcacaaggctgacctgagccaaagggcccagccccattgtcatccatgtgcaacatgggttggtggcaccactctggcattaatgcagttgcctgttactttgttaacattggaactggtaatcagggaaggtgctgtcagaagtgggtgctgtgcaaggaatgttctgtacacaacagaggacagtcacctgaggtatctgcatgtacttcagataattttggtgtttgaaaaaggactactaatgaactgtctgttttcctccttcccattccccctttcctgccactgattcagtgagtggagattggatacaggtatagttcaagctattccgtagatcactagactccttgttactgatgtagtagaccaagcacgtgaacatttataagtagattggcaagtgtagtttataacagtactaacattgactgtctaaacttcagagatggtgacttgtttttgtttcatttctaacgtgaatgttagtttagtttctgtgtgtttgcatcatccttacagtttctgttctaggttaatacttgttctgcatgagttatttttagaatttgtttgtctttgaactttaaagatcttttttaaaactgttgctgactgaatttctttctccatttacagccaaaggagtagatctgcggtgacttgatgttttgctgtgatgtgcagatttctgagaggacaaataaactaaaaagctcctacacgtctgctctgctgcttattgggcattagaagaatcaggtggctgcttgggtgttgatgcagtcaagtgcactgggcttggtgaaaagcccagtgtaagaggccggtacagatccttcctggcagagggtggtgatggagagaacataaataactacatgggcaaagtgtaggaccaattaccctgttagcatcgtctttgctcaacacctttctgtgtccctagactctgagtttttttctaattgatttttattgaacactgagtgttttgaggttttatttttttaagatttatgtatgtgagtacactgtagctgtacagatggttgtgagtcttcatgtgaatgttgacaattgaatttaggacctctgctggctccggtcaaccctgctccagcccaaagatttattacaaataagtacactagctgtcttcagacacatcagaagggggcgtcagatctcatgggcaggtgtagccaccatgtggttgggggatttgaactcaggaccttcagaagaacagtcagggctcttacctgctgagccatctccctagccccttcaactttgttcttagaagccaggccttcctctcctccctctgcttgatgatctctagctctagctggtctggaactcatgtagactaggctggc

SEQ ID NO: 22523 - DNA, 1117 bp, Mus musculus
gttttgcaggtagagaaggagagtaaagggtcgctcggcaaccaacttgcaaactctagtcatcagggaattttaagcaaggtgatccatgacaccagaaggtctcttttgaaaagttttgagttgggctagctaatgtactgctgaaaaccctttctaagctaagaaaacaaaaggccatagcactgaggtgcctggtgccagttggcagggactgtaaatgccaggaagttctgagttgtagattagaggacggtccctgggtattgtgagaagtcagaaagcatatgcaaaccatatgcaaatgagatgcaagccagcacctgctgtgggctttgtgtactcaggcactcggtgcctcagggaggtaagctggccggtctttagagctctgactagatgtaccagacattaggttctgtgtgagaaagaaaagtgcatcaagacttctctgggagagaaaaaagtcccaggttgtaaactccagaagggagggatgaagcccaaggagttgcagaagcttggaggcctcgctggctgagtgtgtcccggtgacagtcaggatgcttatgcctctgcccagatctgagcagtctctggctgaaaggattccccagaactaaggctgagtatacagggggttgtgctttccttgatctgccgtcttctggatcagcctccctctgtgagtcagagctggtttgacccagtgttggtggtgtattatcctggacccctctcaggggactcagtggttacctttggccctgcctaccttgaagatgtacccagcagttgtggactgaggctcactggactcctgcgagtagaaagcaaacacggggcacaggagaaaggcagttttacactcagatctctctctacttaggacttgcatcaagaagcaagaggccatggtggggagatagctcagtgactaaagtgcttgctgcataagcatgaggacccaagttcaaatccccagcacatatggaacaagatgggcgcgtagcatgtgcctgtaatctcaggactaggagctgagacagaaggtcctggggactctgctcagtcagtttagctgaagcagcaagcttctgaattgtgaaaggaagtt

SEQ ID NO: 22524 - DNA, 1189 bp, Mus musculus
agaggccagaggacgatgccagccagagccccacagaagcagccagggccttgcagctttgccccaagccaatccctgcttttaaatgacccgcagcggggagctctgaagaaggagctctgaaggaaaggaacattgtatctggacagcaagcaagccatttccccccatgttctctttccttcctcctacccatacttccttctctgagactattccatgggacccacttccctctgggttctcctttccccagacagctgtaggggcacatggtagggaagcagcataggcccccagggaaacgactccacagcagggccttcatggatctccaagtctctcagtctggtccagcaggttctctgctcaaagctgcctgtctccagcccagacctttgctgggtgcaccagagcatctcagcaggcaggcattttgtggcatttatggcctgtcactccctgtatttctccctccatccagagctcgctccacactcctgctcacccagcaagtgcagcctctggccctcctctgctttttcactccatccagcttagagtcccctgctggcttgtcactcgcctgctttgtgccaggctggtctgtgtccccctgagcctcatggcctacggtgatgcctgtggtgatgccaggttgtccgctcacatgagtcccatctgtaaattctttgctcccttctccgatgctgccacccaaggccttctcctgcctcctgtccactgccagcgtcctcatttgtcatcggtcattagcctccctctgtgctccctggcactcttaatatagattgaaccagaaaggtgacccctagctgttgacttattgtcaccctaaaaaaaaaaaaggcacaaggaaagctgccacctccccacccctcctcttcctttgtcctgttgttaaggttttttcaagcagtgtgttcagtatgcaaatcaattattttaagaatcgcttttgtaaatatctttgtgaatattttagtattgtctttgataatattcaacattttcatgacctggttatagcctttgctggtgtttttaaaatatcttgactcagtgacaaaacccgagtccttttttaaaaaaacaaaaacaaacaacaaaaacaaacaaaaaccaaccagggctatttgtacagatgagagaggagcagaagaggcgg

SEQ ID NO: 22525 - DNA, 1376 bp, Mus musculus
tgggagcctggaatccagtggaatgcagctgaagagctcacaagcggtaactaggctttcagggtagtggtgttcctttggcaaacaactctgccgagtggccaggatgctgggtgttttcttacttggctcaaccctccccacaggctagatggcaagcatgtcgtgttcggccatgtcaaagagggcatggatgttgtgaagaaaatagaatctttcggctcaaaaagtgggaagacgtctaagaagattgtcatcacagactgtggccagttgagctaactcacagccaaggtgctaggacagcagcaggcatccatgtcttgattcacccaggttctccaaagaacagtttgcacccacttctattgagtctgaggaaggccactcaggcatggtcctcccagaccaggctgctctccactgtccatcctgcctcagatcccgtttctgggcatcagtatggccatcgggccatgtaccctcagccgatgtccccgtgattgccatgtgcgtgtgccttggacattggcaatgctgaccagttagtcagggaaggctcctgactcttttccttgatcagtggggatagcagttgctatttaatgttgtcttcctccttgcaataatttaacatagaattcaagatctcatcgaaacaaagctgtgacactcatggcactgtccgtgtgtgacctgtgttgctgtgacactcacggcactgtccatgtgtgacctgagttggcacaagccacagacacccccaacccccccacctcccagcctggcttctgagacatcactcagggctcttgtgaaagtcccagcgtcaatgccttccctcctggtcactgtgaatcctgctggctgctgctgtgatttttgaaagcctgtgaaatagaagcagcaggacctgggaacagacctgtgagcccggtctttctgctcaatgtgaattcccgtggtgaaaacttacagacactgcctgacctcatgctgttctcaagagggaagtgtcttctggcaggctttgctttttctgtatgttgaataaatccaatctatcaataatatatatgtaaaagatttctgggacagtcctgtgtgttcatctcaaatgtgataaataaatcctattttctataaaatggctgtctctggttttggaatgaaatttacatctttggggctcatttgtttttgtgacagggtcttgctgtgtggtccagggtcttgctgtatagcctttggctagcttcaaacactcttgaccttcctcaatgctgttgggattacaggcatggaacattgactccagctggggccagtcttggagttactatgtgttaggttctatgctttgaactgttttttgt

SEQ ID NO: 22526 - DNA, 1099 bp, Mus musculus
taatatgctcttgtcctgtatttatacatttgtgtattttggaagtattgcctttttaagggaagttatcagtgggcaacacggtaaaaagggaacagcgatcctttgtgcctcttccaatgaagatgacaggtggcatggaatctttccccctgcatctttgtgtcattgccttgtttctacagttttattactttttaggagaagggtggggaactgacaaacgaagaggactcatcgaacaaacagaccctttggtctgtgagcccagtggccttgtcagcaggacccaaggaggtacaaggaccccggaggaggttccaggcctgcctggaagccccatgctctttgatcttggatctgtccactaagccctcacacctgccccctagctctaatggacttgaatttactttaaagtctaatccaacctcactacagtgtagccagtgcaaaaactaatactgaaatgaggggtgtttgcagccctctgggaagtggaaatgaggcttatcccctgcttcatggccaacttccctgtaccaactcctgcagccctgtgtggtgaccctgtctgtgtctgtatctgtctatgtgtgtgcactcagctaaaaagacaaacagagcccgtgagccccgccttgagggtacatggagaaagttcctcccctccccgaaagggacggcctcggggtggcattccgttgtgtgccttattcctggagactatataaagcttgcctatgaaaatatagcctttctgtgctgtattaaaaggactttggaaagatggaggctcgtgagtttgtatatgggaacacgggggtgggggtggggcgagaagctggaccttttcacagatgtgggacaaagcaggggtgggaagaacttgggtggcatttactttcaaagttggacatattgtctctgccctgtttccaccaatgacctgcctcctcccagcccctttgccctcctcatgtggacactccttccagagtgagggttctcgccaagtggggccccaactgggtgagattgtcagcagattaagtcacacattagctcagatgggactcactcctgggtaaccatatat

SEQ ID NO: 22527 - DNA, 1211 bp, Mus musculus
gggacatgaggcatcaccacttcccatgacctcccccagactgtcctgtaggcttgggttctgtcacctgctctctctcttgacccttagcctcccacccatgaccgggatgccaccccacaaaagccgtaagactgttctggcatgaaggaggggggccttggcagtctggagccgctttctgccacttggggcaaggacatctcatccccagccttagtctccccattagttaaatgacaaagtggcaccagaaaacaagaggtcccagtgacctctgaacttctagaagagagctggctgcctctggaacagagtgtcactaggggtcgggggtggggggagatttgtctctaaacatctaggtgccccgccctccagcctctgtcctgatagccacttaagatgtcctctcctatagccctccttacctgattgatgtccccatcccctgagaagacgaaagaggacccctcctcctctttctcctcagccccccaacactgggcaagcctaaaatgagccacagaacctctcctttggaaactgaggatagagatttcctacttcctaaggaggcagagagattacctggcatgtcacatggtcgcagggtggctgttgtcctggccagggtcagcagtgtgccccctaccctgtgacaagccacacctctctggtctttctcctcttcaccagctgccaggactgactttcttgactcatactatgcttctatggagagagagagggaaaaaaaatcagaccatgaaatcggcctgaaattcagtgtttacatatggtgcccagttgccttttgttttcaaatgaaaatgttttgtatgactgacgtgaagtgttaagcaagggtccagggggtaagtggaagagatggttgtatgtctgcagcagctagctgcagggtagattttgggagaacatactctctgagcacttaacaaaggtattatctgtggcagcccagactattagctgccaccgtgctgccctcgagtggtagcatgctgggctgcagacggtgagcatccagcaccaaggactctccagtcttgctgctgcactaaggctgccccatgccaagcttcctgttgctaggaaagggatttttttctttttggcatcccactgggactctaaagagggtgtcatggcaataaacagtgcacctgtgtcccaaatgaggacaaatt

SEQ ID NO: 22528 - DNA, 2399 bp, Mus musculus
gaaacacatttagaagtaactactaagtttcaactctgacaaagttgaaagctgtctcggactttcctgggacaggacagccctgctagtgtgtccctccttagtttctttcctttttacacttacctttacaatgcaaacacaagagctttcctacagtcttctaagtatgtgggcctcagttcaccaaagggtaaatatgtatgaaaagagaggggagagtgtgatactgactcttggtttctttccacacagaaaccctggccctggatgcccatgttggcggccctggttgcggtgacagctatggtgctgtatgtaccaggtctggccagagcttctccatgacagtgtgtcttgagtctgtacaccgtcctccctctagaagccggcagcacactcatgctggggacaagcagaaccattctcttcctttttacctcttaaaacagcaaagtgcaagaatacagctggagggtcattgctttaatttatataaaatatatctgtctatagagaggatagaaagttgtgaatttattcggttttacatgtaatttttaaattagtatgttgagattctgaatattatggtggcctaaagtacgcttcttagtgcaccaaattatttataccataaatttatagatattttactctgaattctaatggccacacaattcatttttctgattcgataactactcaaaccgaacaaccaatacatacatgggaatagaggccctgtgtgctcagtgcctatcagtttgaatatatacacacacacatatatatattttttttacatatttacgccatttttacttgttataaaaccactgagctattgggaacaagacttagacaattatttgtgtggattttttttttaaaggaaaactacatttgaaaaatattctcttataataattatttggggaatacatacgtgtttgttcagccttaatgtgacttgaagatgtgaaggacatcagctttgaaaactttccatgagagtttgtattttcttgagcaaactgaaatattactgggagcaaaaacataagtgcataatttcaatgcaatcaaccaaactgttgagtgaattggaatgtaacttactaaacctcatgtatttaagaaatgttttctttaaaagccaagttaccttctcatatacagcagtttagaaagcatgatttttttttctgtcatctgttcctccaagcatgtttaattgaaagaagaattatatctgtttagataagcttttattgacttaatttggttatgatgtggagctaattcacattcaaggtgaactgatgttctctgctagcagatttcttggttgggtatacaaatggttattctctttttgttgttaattggaacagcctgtcaattagtagcactattcccaagattggcattgttccacacacagtgacacacctcagcactgcttggcattatacatttaaacacagaggttaaagtttagctgtggttttgtgcagcaccatagtgatgtcaatgtcctaaagtatcacgtgcttaggttttcttcagtcagggaagactggaagggaaggccagtgagttggtttgaatgttgtatgagaacacccagatctagccagatattgaaaaaggactttaggatataatttgtctgtgatgtttggcagtcattatttttactttaaaagttgtatttaaagctatttgggattgttgccgggagaatcactatattcatggaggaattagccacaaatgacttgtagaaaatactgtcgtatagttcattttaccattctctgttgcaggaagccaccccaccacagaatgctgatatgccagtggtacccagtacctcttgtatatagttattgcaaatactgttatgaaatgcataacttcaaaattaccttttttaaagtaaataattgtttgaaatctattttgtaaagataaaacgtacaatagaatttctggagtacagattaaactatttgcactaacacacgtgatgtgcatgatttaataaaataactttaatctccctttgcatgtttgagttgtacatcattgaagttcttagtgctggctctgccttcagtcatccttggccttgcttgaagtgacttggcattaaatgtgtgttagatgttctctggggtttaaaagcaatcccctacagtctgcttaactcacccttactgctttcctcccttagtattatcattgtgaaaatggattccttgtcagactcacggcagcaagtggaaggcctggtgtcaatatttactttatccaaatcaaataagtggggtttggtagatatttccggttttaaataagcccgttcataagcagtgcctccagcctgcctc

SEQ ID NO: 22529 - DNA, 1205 bp, Mus musculus
taccattttcacaacttaggtgtgtctccgaggaaggaggcacatgcagttctggctatggaagagctgatttctcctctctcttttactcactggcctgcatacactaggtagcttgaatgtcttttgaagacattctcacaatgaacatcatagttgttttttaaaagaatatttttatgtcaaagataagccattcatgtaataattatttgagagttttacatttaccttttaacgttatttgttgggtgacactatttcccctagtggatgatttttagaagacttttcctgttgttgtttgacatgggaccttttgtgtaaatcagcattacacttttgtttgtttgttttcattttgtttgtactaccttgccaaaagtagaatgagatagtttggtttcagatgggagtgttgcagaagccactgttcagataggcacacacaaagcagcacatgtgtaaatagctgtgacttaagtacctgcccttctgagcagccacacggtggcttcagaagccatctcttattcttttgctgttattttcaagggcattcctgatccaagaaggtttctctgtgtgtgtgactgtggtctcatatctagggtgccccttccttactcatggatacagtctcttgaagcataccactgtcctaggaagaatatggcatttgaatgaaatcatttgtctggattgattgattgaaaatttattttgtgaaacaatactgacctttcagaaaaggggcaactacttttatatgctaaagtacttcataactttctgggaaactttatttaggtagaaatggtcatcttattatttttcaaaaaaatgtattttaataatttcacaatttatatacagtttgtgacatgaatatgaaagtcattagtattatatcaaggatttttgaaatatacttctacaggatatatcatttgaagtttattttgcacacctaaagaaaaacatgaaatatcaattagcatgataatgctgtctttatgtttaccacatataacagaaactcaacacatggtgaaaaccaaatcatattcacctactttatctcttaatttcaaattatgcattggaaacccaaggaagactgaatggttaacttaaatttttatgtcagttttagaatttcagaattgtctctttcattgtttttgttttttgttttttttttt

SEQ ID NO: 22530 - DNA, 1202 bp, Mus musculus
cagccagggctatacagagaaaccctgtctcgaaaaaaccaaaaaaaaaaaaaaaagaaggattggttagagataggtgtgtaatccagcaactgagaagctgaagcaagaggaacttgagttcaagctctgggctataaagttagatgctattagaaagagccaggtgctggagagagaattcagtgggtgagaggacttgctgtacaatcactggggcccacgttggttcctagcatccttgtaagaatttaaagttacatgcacctgtaaccctagaactgtcggaacgggcaagagaacgactggggcgttctggggtaccaacgtagcttcagttttagtgagagaccctttctcaggggagtaatgggaagaatgacaggatacctgatgtctttttctggcctttaaatgtgtatgatgcacatggcatataaaccacaaacatacagcacatacataagcttacatatatgcaggtaaacatacaagacatacataagcttacatatatgcaggtaaaaagtagggggaggggagatgggcgtgaggaatgaactggtgtgttgagaatttggacaatgttaccatgtctacctcaagttgttaggatgaatgagatataggaaatgaagtatagaattggcctggataaacagtagcaatcccccccccccagggttcagtttccttacttctcaagtaacaagtcattgtgcatagtggctacataatatttatcatcagaagaaataggttactatcctaattccatttcccttacaacttgagctacgtgtgtggttcaatctctctgatcctgaataaccttatctgtataatacattccagcaggctagatgtaacctgtggccgctggcagctacagttactattgttttgtgatcagttgcctacttgatatatagcatattcttaattaaaagtctaaaaatatgttttgatattacttttccttttgtttgttttaggttttgaagagatgaacagaataatagatcatttttacttatttattttaaagatttatttattttatatatgtgagtatataccagaagaggacatcagatcccattacagatggttaggagctaccatgtggttgctggaaattgaactcaggacctctggaagaggaggtcattgctcttaactactgagccatttattcttct

SEQ ID NO: 22531 - DNA, 1757 bp, Mus musculus
gtagtttgagattttcccattattcctcagattatgtcggggagtggtaaactgataagttcattgaggaatagatggagctttaaatgggtagagtgagaagcaagaggtgtgagaacatacctgaaggatgaaggttgaatgacctgtatagttagctagaacattaagttcatgtttgtgggatgtaagtacttatttccttatatttaatacagtgacctttttttgtatacttgtaaccactggctcagtagtacccttaggcatttatggggaggagcttaatatttcatttaaaaatggcactgtgtattgtcttgttaatcaagggctttcttgttctttttttcacagtggtatgtccaagccacttgtgctacacaaggaactggtctgtatgagggactggattggctgtcaaatgaactttcaaaacgttaaatgaagctggatatctaaccaaggacatgtttgatagaattggtctaggcttgttacaacaaaattagtttgcatcttggttattaaaggatatctgagacaggtttgggcagaaattacagcgtttaaaacttgttttgttgccaattattgtttaccaagaacaatgttgctatttagcaatatgcttgggtttaagagaaattctccttgggaaagaaaagtatccattattatgcttcccttgaacctaaatgcctggatacagagctatcctgacacctttagacagatctgagtggtttttgagcccaaaacaataatgttttaaagttattcccttgatactttactgagacctttatcattcctcagacagtctgctgatttaaaaatgtagcattccatttgtatttatttctaccctttgccaaaaagatttttctaataatgcttgtacaggccaaggccgtggtccaaaacactattcagttttcttgtactgaggatccccccaccccaccaccctcacattattgactcctggcttctatcagccaaactttgatgtggtttggatttgatagccaattctgtgctggttgcaaagagttcatattgagataacttttaatactcagcagattgtcttcctttatattgttatcttttttatgttgcatgttgcttttggaatcagcctgactctttgcccagtatatgatagttctactggtattttactgtttattgatgaacatatcttcattaagaattttttgaaaactcatcaaattcaatgaataagttttcttcataacccatttggaattattcctaataaaatgattttaaaaaacatgattgtgtgttcttttgagactttgcaatatttgaaactgatttccttacataacaaagtatggccaaatcccagtgaatttacttatggtttaagttgtcagtaaacttagccatgggttatcatgtgcattaaagtaaggtgcactatgaagaattttaatttttctagtagaataccatttgaagctatgaagttcaaaggtcagatcaagaagaacaagaacaagttatcataatatgaactccagaagcagagtatgaaggggttgctgatgaagctcagccagtgatgattcattggtgatgaagcttgccttgtatacagtgagtttgagcccactatcacgtgccacagagatggcagaaatcattgtccacttactgagtttgaggccagcattagacctttctcaaaaaaaaaaaaaaaaaagtaatttgacaagtgggta

SEQ ID NO: 22532 - DNA, 1099 bp, Mus musculus
gagttattacctgggtgaatttttagcattacaatataacaatattgcattctggttacaataccaaagcactgaggtaaaactaatcatttaaatacataaaacctacttgtatttaatacattcactgttgtgtagccgactctaaggcattttcatcacttcacaagggaagcctaaagtatatcctcattctctaccagtagacacatcatctgccagttctgatatctgtccgatttgactggtgtttttcaagcttatctgtgtaacagtatgtaccaatacttcatctcttttacacatttcctactgcatggataatacatcttgcttatgtgagcatttggattggttagtttcctgttgtgactagtatgtggagatctatgctcaagtttttgatggaacatcctctttttaatttgttagtactagggaatcaaaccctgggctggtgtatggactgctctgagctgcacacccagtccaaacatctgttttcagttcttctagagaatataacttagtgaagtgctgtagctttctgcagcaatgccatcctttcccacagtggctacactaccctaaacctccctcactgccatatacaggttcaggttccctccatcctcacaaattatatccattttttaaacagccatcctgttcacacttcagtgacacgctttgaactttggaattgcagttgttgcagtcacaagcaagcttatcttaaacagcttagcaaacctcttcccagagccactttcagcagctgctgcttagttttatgatttctgcgtcaagtaggaaaggttttattgcttcctttaaagaaaactgaatatcaaagttaaaaatacaaccgtgactataaagaattttggtaaaggcctaagacctgcacagcaaaaggccatatttcacccttcagcaactgcagagaacttacttttaaattggtccactttaaaatctaaaaggtacagattagcagatggcaagaatgtctaagttttgagaaaactagatggatataattgagtataatttataatataaattatgtataatcattgaaagttcaagctattct

SEQ ID NO: 22533 - DNA, 1532 bp, Mus musculus
tcatttctctgtggtttccacctcttatcaggagctgccctggaaaggatccggtcatgctgcctgcctcttttcatctgtcatgatggatttcatccctttcacgggcctctccatcctctctttccacatgggttgtgagcccagcattcctgtctctggcttcctgggccactgctctaagtttctcttcatgcttcttttctttttgagtcatcttactttctacttgggcttgcatttccactgctgctcaagccttctgatcagcaatgtatagtgtttcagccagtttggcaaatttttcacttatatggaccatctgaagtcctcttccatcagcagctagccatttatctaatggaatggtataccccttagagttcttccacttggaaatacaaggagggattttccacttctgctgtttctttacagtcatcttctgaagaggagagtgcattacaagtgcaggaggagatgatggtccctgagggattttcgtattaactttgaatcttggatgctccatttggtctttttgcatttctgctatccagttaaccctgtttcgctccagaattgaatggtactccttctgatgtggtgtgtcactggtgagctgagacatgaaagatgactcattctttctgagatagggtttttctgtgtagtcctgggagctctggaactctagaccaggttggcctagatcacatacccgcttgcctctgtctcccaagtcaaaggcagcaaggagagactactgtccatactgaacttttaatgagtctctggctatacttgtgagtaaccagcttcagttacgtgaatactggggactaagtgataatttatgtgtaagactgctttgtatgttttgtggttttgtaatgtaagtaaattgattaacttttatttcactgatattaaccaattgtgcagtgtacaattaaacattcagtatccctctttagaattgggtttgtgatcatggtgtggcttgtggagcagaggacttactttctcatttgtcaaaataggtatttgcagacaaggcttcgagaaatatgtcgttggattttttaaatgtataataaagtccatgatttttatacagtatttttgtatgaaatatttagttactttgatttttttttcctccaagtaatttcagatgttttcaatctggggccggagagatactccacatactcctcttccagagcccgagttcagcttccagcacccacatcagatggctcacacttgcctgcagcttcagcttcagtgtacccaacacttcctcctaacactgatgcagacacacatgcatacatataattaaaaataagacaaatactaaagtttcttttactctattgtaacacatttgaccctttggcaatcccacaacaggcaaaaggggagtcacttatcaagaaaagctttgttgacttttttttatagcaaaggaaagactttcataattactccactgagttatttatgatatgcgcttgatgcagtta

SEQ ID NO: 22534 - DNA, 1026 bp, Mus musculus
gtgattagtggtgacaagtcttgcttttaaaactttttttgatattggtaaggcttcttgttttgttgttgttgttgctattgattttattttgtttttgtttgttgattttcgcagtgatcagttactaaactaccacagagccacacccccaccccaggttttcagtttcatgaatcttttcttgatggaagacgtcatgcttgcttcagatgaactgtgttttatagtaagagtagtcatcaggaggcacttttatttggttggtgctttgcatggtaacaaaatagtgatatttggataaaaatttaggccagaggtaagaattttctaattctttttaagtcatgtttcataggaactcccccagttgtgttcatgtccatgggtcagaccaaaatgtgttccagtgcctaggacgcattctgagtggatcagtccgtttcagtgatttaacttgtatcactattaaactgtatgcaattctgcacatcagctgtagtcagctctctgcttgaagaaggctcctgtcagcttcttcctaaatgttagtacagatgtcattctgttatactatccgccaagatctcccacaacttttttattttgggggaggcacagaattgattttcttgttctgagtttgggttcattcctgtcacggtcactgagccaaggcaagtagaccttgcctcttcagtcttagtcctgcgggcgtctgctcagattctcttccatattcaaaatgccctggaaaagcttcactgttttaatacgtcctagatgttcaactgaagcagagcgaagaaatggccctcccagccccatccacctaaaacaaaaccagcagctgctgctacagccattatgaaaaaataacacaaactcttcttaaaaaatagatcacacagaaagaactgagggcagatgcacctggggggaggggggggagggctgccccagccacggggagaggcctgggtgctgagatgaccctgcagggctggggtgctagtaggtggctgc

SEQ ID NO: 22535 - DNA, 1234 bp, Mus musculus
aaaagagagtcggaagcataaacttgttgctgctttttgagttctcatttccctgggatgtggcacagcgtatccatgctgaagatcatggaagagataagctttacagtagtgtgcttcagcttcatttaaaaagactgaacttgataaccggttatagcgaacatttccccgtaaaaataaaatactatgcattgtcatccaactctgctttcctaaacaagacctgcttacttttctgtagtagattgctgaggaattacaggtcttcaagatatttttcctttaaattgtgaacattttatcttgcactgtaattggctgtctccataaggaatgatttattcttggattctgacattcctgtgtatactctccctttcattaggaatgttttattggtagtgagggagggctcaattgagtgagcttaacatcctttatgtggagaattctataagtgtgcaagtgttgtaacaatattgagtgtgcaatagaatttgcacaaaatcacaaggacggggcaggtggtgctgttgacttcaggatgttttgtggcttgctccatttctctgatgtactagatcatggcagtgggagacctcaagtgtctgttggtgtttgtgtggcacttggtattttgttaccatcttctcagttctcaggttgggactttacttattgctgcagaacaggaaaggttagagagtaagacttcagaatttattgagattgttgttgttcaaacattttatattagaattgacatgtaaagggagtgttgtagactgatacattgtattttctgtattgtgaaataatttttaaatgacaatgagtgacatttcaaaagatgttctataacaattatgtttattgcttaaataaaaatgtgcagtttagtttagaaaacaatcttttgaatttcagactgataaccccagtattttcataatcccacattttgataatgtattgaattgccactttttatccataaaggcaaataactaatttgagtgtagaataatttgcactaataattgtaaatacttttacttttcaaatgagtaaaaggtctaattccatgaaagactgaaaaggaactgaacacctcatatagtgcaggacagagttagcgtgtactgagggtgattctgtcaaaactttctttactaggactttaaactgtgtttacagattttattttcattcattctacatgaaaaggtgt

SEQ ID NO: 22536 - DNA, 1183 bp, Mus musculus
cattcacagtgttgtacaaccatcatagttatttaggtcaagaacatttttatcatcttagaagaagtctttttcccttttatctatcactttccctggaatttttccaaattgttgccaatgattgcattttgctttctgtctctatagatttgcctctttggatatttcatataaattaatctatgtaatttgtggactttgaggtgtgtcttctttcattttgaatataagtttatagtgacagttttgttgttgaataaagtttcattgtattcattttgcttattcacttgtgggagttttaccttttagttatcattcatatacatatacatcaacataaaagtttaatcttttaaacactggcttttagttctttcctggtatatattcaggagtgggattgcttggttttataataattttatgtttaactttttgtggaatcaccagatttttttgtgtgtggtctgtgagcagtataggagagttttgtctttttctttatctttgctagcaagtatttcatttttaaaatgataactacttaatgggagtgaagtgttatctcattatcattttgacttgcagcttttggatacctaatatgatactgagctttttttttcatgtgatcatcagccattttgtaatctttgaggaagtatctgttcagattctttgcccatttttaagttgagctatttgttttttattattaaattgtacgagtttgttacctagatgcaggtttcttctgagatgttggcaatgctttctcattctgtttgtcatctttatagtatctttttatgcacaattttattttaatagaggtcatttgacatattattttgttgtttgtgcttttggtgttatgtctgagaaattgttgtcaaataaaggatcattctaaattttcttttaaaagttttagtctgggcatggtggtacacacctttaatcccagcactctggaggcagaggccagcctggtctacatagtgagtcctgggactattaggactatgtagaaagactgtattacaaaacaaaacaaaacaaaaacaaaacaaaattttaaccatataatattttgtattatactacagttttgagtttccatatataagatagatcaggctatataaatttagccttttaaaagattagattctga

SEQ ID NO: 22537 - DNA, 1189 bp, Mus musculus
ctgactgctcttccaaaggtcctgagttcaaatcccagcaaccacattgtggctaacaactatctgtaatgggatctgatgctctcttctggtgtgtctgaagacagctacagtgtatttacatataataaataaataaatattttaaaaaaagaaagaaagattctttacaactataattcaaaagtttagaccagctaataattgatatagatcatgttttaaatagtgtatttagtgttttatagtaaaaaagacaagaatttattaattgatcaactgattactagttctgtttaaaatagattaaagaccaagctaggcatggtggtgttcacctttaatcccagtactcttgaagcaggtgaaactctgggttcaaggccagtgtggtctacagatagattgagtttcgagcatccagagctatatagtgagaccctgaagggagggggaaaaatcagcaaaaagtcattgtgagtactaacattggctaggtacttttttttttttttctgctaggtacttctaataggcatgtgaatctgtacaaattgatgttgctggtgttagtgtatgtacacacacacacacacacaaaatcatcttatgtcctaagacatttatccattaagcataatatataatattatgtaaaacagtagttgtggtcttattatcatctctaatataggaatttgttggggctggattacgaaaagaaaaaagttagaaaccagttaccaagttcccaccacaactaccaaaacataaagatcttgttttctattctttgtcatctgatgtagtaaagaaagaaaatgctttgcctttaagtcatagctgaatttcacacgtctccctgtcttttctgaccctgtgagccacatttcttttttaggctctgcgtggtgttatgcctaagtaagttttgatacattttcttaattcttagactttctgcctacattcttgtatttatggaaaccctgttgtcagtttggcatcaggaatgggaaaggataaaaccttgtagccattttctgttcgttgtctcttcagagcttagtaagcaggctgcttttatattacggacctcagtaaatgaggatactggaactttacaggtgtgataagatcttgtcttttttctatactagtataaaataagctggttgtagttaggatt

SEQ ID NO: 22538 - DNA, 1182 bp, Mus musculus
tttttttttttttttttttggtaaaacattatagcctgtgacctgttgttacaacctgacaacttggcctgtaagccttgtaagtatagctgtctgtcaagtctcaaaagtgttaaccccataatggtgttggggcagcctttgggtgcttactctgggcccttctcctcacagtctggaagcctcgaaacctgaatatcagccagcatggttctgacatgcacgtgtccttcgaccatgccccgcagaacttcggcttccgtggcttccatgttctctataagctcaagcacgaaggccccttcaggcggaggacttgcaggcaggtgagtgactgtgtgtaaagaacacatgtgtttcaaagtgctactggatggtgggagtaagtgcggtcgcggttgtttaagaatgccactgggtctgtctccagctgactcactcaccactgtcccttgtccccgtcatctccaccttagccgctctagggggtggtacagcgctagaggatcaaaagcaatctgtctcatattttaagcatctgcaggtgctgtgtgtcaggaaatccctgaactttctgctcttcagatcctgactgctcatcaaagagcttgcttccattcctcctttagaggtggagaacctagggctcggggaggtcacgtaactaggaaggagaaaaaaaacctctagccaagtcactagcaaatcaatggccctggatttttaattttgtttgtatgtatgtgatggatggatggatgcatgcatgcattttttaataaacaaaagaccagggttaaatagaaacctgaaaatgagcatcatgaacagagtatggccagaacaatgggaaaggctttgtggatgcttgacgctgtgcactctctacctgtcctgtgtgtgctgggtccagtcgtagcctagttcttctgtggtcctgcagctttaccgctgcacttctgggagcatctgctcaagttagatatgacagatgagtgcagacgagccccagctcttctctccttgcttgaaacggatttgcattgatttttattgtgtaactatggtctgccaaagttctacatgaaagttccacatgtatttcttgtaagatgggtgtctcactactaggtagccttgattggcttgagactcacaaggcagtacaggacccatgatgaa

SEQ ID NO: 22539 - DNA, 1177 bp, Mus musculus
tacgaaccattgatttttcttactactccaccagattggaccagcattaagggggttgctgagaaagatcccaaggtcaggtgtggaggtgagatgagccggggatttcccttctaggcacctttgcagtggggtggggggtgggggaagggagcccttagttcctgctgagaagaagcggtttgtgtgcattttggatggaaacacccttctccctgctctgcacaggcagctggcagcttctcaggagagcgtgctccacatgttctctagcagagaacagagcagctgctctgggcaagctgtgagctggtctcgcagtaaaaccaggcatctctgcagaggagttcacgccatattatcactgtggaatccagactgagcagacagagctcccacctccatgaggctctcctggccgtgctcagtcttggcattcattctgtgagggagattggtgggcctaaattgctaatgtatgaccgttccctgggaacatcatcagagaatgtttttctctttttaaattgaggccaagaaatattttatccccccccccaaagagccattagaaaccacatttcggatagatactgagctttgcatgtggagtgtggggtccctgagagtgcccaggagcagcatggggccctgggtggaggagggcttagcttcactggatcccaggcccaggctcgatgcatgaactcagatgaggaaactggagggcagccctgtgagccatctagcttgctagtccaaaaagtcagagtcaggtgaagttttgtttgtgtttagccattgggtgactttattttgacatacaagtgtttttgatcagaagagagagccagattctaacgtgccaggtgatggtttcttagccctgaaggagcagatagtgggcggagccatagtattagccagcctctttcccatacacctcatcgttgagccaggaatgagaatggccttgcagattaaggcaaggtgccagttctgacaaggcacaagctttttgatgctaacgggagatggggttggggctgagagtgaatggtttgtggggaaatagaccaggtcctttgcgggggaggggggcaaaggtgagacgggtgtgaggggggctagggtaccaggaaaccaagaaagaaagttgttgacctgtgtttatgcg

SEQ ID NO: 22540 - DNA, 3460 bp, Mus musculus
tggctgctggtaattggcaaagtttgtgttttctggggcacctgtataccccggcataaggaaaacagtaacatagcaccttgaagagagacatcagggcgtggcaccgactggggcaaaccaaggcacccttgtccagccttcagcagtgtttcctgggcttcttggttttcaagaaaagctgaggatgtctcattttgaagctgtcaatgcctagcgctggcaagacagctcagaaagtacaagcatttctgaaacaaacccagacaacgtacccacagtggaaggcgtgaagcaaccctgtcccaaagttgtcttctttggcttcctcatgctggctgtgatgctcacagataccggggtgtgtgtgtgtgtgtgtgtacgtgggtgtgcacgagtgcaacaccaaaaccacatgcaacaacaacaacaaacaacaacaaaagctaaatattagcaattaagctttggaaactacttaaatgaacccaggaccaatagaacatgtagatagatctaattttgcccagtggctgccaggttgtgaattctgctttgtaagatgggaaatgaaaaccagccacagtaattgcgcatatgtggggccctggggaaagctgtattagccctatctatctttcagacaaacttgatgctcttctgatgattttgcttcttaaaacagggtctcggccaggctatggtggcccacgcctttaatcccagcacttgggaggcagaggcaggtggatttctgagttcgaggctagcctggtctacacagccagggctacacagaaaaaccaaccaaccaaaaaaccaaaaaccagggtctcatgtcgcccgggctagccttgaacttctgatacttctttctctctctggtgtgcacatgacccatagccttaatatgattttgaatacgttctaagcattttgatagtgtcttttatatttcataattctcaagagaaaggcaggtcagctgttttttattggtggtggtgatttttcaagataaggttctctgtgtagccctggctgtcttggaactcgatctgtagtccaggctggcctcgaactcttaagatacacctgccttcgcctcccgagtgctgggattaaagatgtgcgctgcctccactgccaccgccatcattctgctgctgttaatttcaaagtcagatctctatcgtcccatattaaaaagcaggcagcagttgcatttaagccccagtctttagggccttatttatagtttagttctaattgccatcatgtttttatgtgtggtgcaattctgaggttaggccagggtgttattaggggaatttatttgggggacccagagtgccctcatactgtgttttgccgtcttcctttctctgaagtctgggacagggtcttctggaggaatgctataggaggtggcaaaatgctcttctattgttgagacaccaggtatccccacagtgtttggcccttgtcatatcaccacatttccagacccaagggggaaagttggccaaaggagagccagctggaagcggttggttcggttccggttttagaacttgggggcaaagaaaggctgaactcacccagtgtgatccctcagcgactcaaggcaggctgtgcttgagttgttccagactcacggctgtggctgagattctggctctttagccgaggggattctgcaacctccctgctgatcagatggtcctttgtatgtcttccttgcagaaattcaaaccagctttcttttgtctgcagcatagaggagaaagaacagctggtcaccttcccagcagtggaaaccgcagtgaggtcatcccctggtgtgttttttccccccagtagtaaataatcccacccacttaaggactttcacagctcttgtgctctgggggcttctcagcctcacgctgttttgttatccgaatgacacccatgccttgttcacatgggtgttgcctgacaaccatgctccagttaggattacagggagatttgtgtgggctggctgctctcaccacataaaaatatcatggtgcatatgctcaatcagaacaccacccgttgcttccttggtggcagtccttgtcttgtgctttattctctcctgcaggtgagcagctggggcttgtgtctggtgtcttcttcaaggccagcacctgcctacctgctgagcggcagctatcccacgcgccaacctggggttctatttttacctctctctagacttgccctgtattttgtgaatcatattgtttaaatggcacacacttcaccagaacctctggcaaggtgaggccagaggttgccaagggccacctcccgttgactgttggggactatttccaaacaccttggaatgcctcagggagggcctctggagaatttcagccagtagtcttctttcctgcctcttggttcacccttgatactcactggggaccccagatacctctccctcctcctctagggctggatctctcagttaagcaggcataatgtttgatgcaatcaagagccagacagaagcgatcacccccgactggatagctaatatttatatcacatggactctggccggaagagaaggaagaatattggccctgtgtggctaccactggattatattcaatgtgttcatatgtgtgtgtgtgtgtgtgtgtgtgtgtgtgttaaatccatctttctctcaaagaagcatatcaagtttgaacagaagcaaaaacttctgttcaaactcaagtggtcattttaagagtagcttcggtttttctgatctgtttaaaaacaaaagtgtttttactgtggaagcttccatgttatggaggagggcctcaggcgtggggaggactggtgcccttgttctgttttatgtccaagtttgtcctttctggggcttttggcagaatggtaagcactgacagcctatagcactgtgccatatttttacattggcgatattgctggtatattgtggtatatttgactgtataaacattgtaaatagatgatagtaagtcatggctgacatttgtaagatgcttttgtaccttagaattttctacatcaaataaaatgttttcttgtaagcctgcagtggctccttatttccgaatatctgtcccgtttcctccctagctcctgactgtcggcagaggagtctgcctcagcctgagacggtaggtaaggagggcttgcatctgtgtcttgctcttggaactcatcacatcccagctctgctgcaggtattgtgaccctgtgattaggggaccctggtgcccactttctatagaatggacccaaagtcctgctttaggggttggtggcttcagctgagctcctgttgtgggtagagtgtacctgaaagtgacaggtatccagaagggggcaatggctgatgatagtaaggaggctataagcctccagccattacctaaaaagg

SEQ ID NO: 22541 - DNA, 1147 bp, Mus musculus
gtgtgtgtgtgctatatgtatgtgttcagttttgcatgtgtgtgtccacatgcccaggccagaggtgaatgttgaatgttatcttcagttgttctcctttgcctaattgtttgagacaggttctctcattaaacctggaggtcaccaattgtatgggctggctggccaccaagctccagagaccctcttgtctctattcctactccatccccacagtgggagcattataagtacccactgcctatccagattttacatgggtgaggggaatctgaacccaggttctcgtggcttgcttagcggatgctttgccaactgaaccatttctctgacacccatattgagcttttactgtggagaagcactcactgtccccattttacagatgaaaagggcaagaccatcagacgtgtggacagttgatccaattgttgactctacaatccacagatgatcactgagtcagattaggtacaaatttgctatagaaaacttcatggaacatgcaataattttagtttaaataagccaatattgtcaccagttcatatagactaatgaagaattatgtaagttcctgccttcttccttctccccaatctgattctgtaggttcagggcactgaggtgttatttttatctacaggaacatgaagaataaagttgcttcataaaaggttggctttcatatcagccggaggcgaaggacgcttgattcagtgtaattaagataaaaataaaaccctccgagtggttttactaaagaaagaactggaggcctgctgataataattagtattgagttcagctttcagaaaagccataggtacctcaagggtgctgggagggctggatggtaattgctcagttctgggctcctaggtcgcccattccagggctgccctgaatggcttgccttagaggaaaaaaatcatacgctacctatggtcaagctctgccgtgttttcatggcagagagaggtgttattactgttattatagttccgggccctttgtgtatatcttatcttaccatttagtctttaaaaagctatcttcagaagacattcaagtcaccgcacagctggggaaactgagggcccaaggaatgaaatgaattgcccaagaccagagctcgcgttagcac

SEQ ID NO: 22542 - DNA, 1120 bp, Mus musculus
attcagccactttcccaggtttttacattcgacaggctcttaattctgatctctttgcttccccatcatggcgtggtctgtcctaccccatctcatggtagaatccctcttctctcctgcctgggaatcctaaaagtcccacttcttcctccctgccccgccattggctgttggctctttattgatcaatcaaaaaccaaatggggacagggaccctcagcatctggacacacagattcctatgtgattttgggagccgaactaaaacaaagcattggagccaatccccaacacatatacaaaatggaattctattaaggtctaaagaaaaatgaaaccatacaatttgcaggtaaatggatagaactagaaaatattgcactaagaaaatccagacccagaaatataaacatcaaatgttctctcatattagtatatcctagctccaaattcttagataaaagtatttaacctagaaatagcagcaggagacaagaaagtaaaaagggaccatggaaaacaaagaaggagcttaagagagggcgacttttctggggcgtggtggcgcacgcctttaatcccagcactcaggagtcagaggcaggcagatttctgagttcgaggccagcctggtctacaaagtgagttccaggacagccagggctacacagagaaaccctgtctcaaaaaatcaaaaaaaaaagagagagagagagagagggcgactttagctagggagggaagggggacgagggaaaggggaaaggataaatgcactaaggcttgtcaaagccacaggaaaacattgttttatgtttcctttatatatatatatatatttatatgatatattgtgttatgtgcatgtgtgtgtgtgcatgtgtgtatgtgtacttttaaaagttgcactacctgaagcattgatgtactccctaagacccatacagaatatctaacaaaatctccagtgccatgcatgggaaacctccctttgagttgttggtctgaggtatccaagactcccccaaaataatataggctgctgctgttgcctttggttatgtcccaggacatgaatcaaacttaaaagcattgttaagtaacaggagtgagataaaat

SEQ ID NO: 22543 - DNA, 1127 bp, Mus musculus
ccttatttcaccaggacatcctaattgtgtccagaaatcttgaatattgattagcccagaaatactataattacactatatcatgatgttaaatcaacaggtttctttcttgatgtaatatgcttccttaggtaggagaagtagaagaatactttgaaaaatattttagaaataaaaacaacagggctaggattagtatctctgtcatataaataatctatacagatataaaatggtctactgacagataggcaaaagacaagaatacgcagctcacaatcaaagaactgagggctaagattgttttagatgttcaccttaacagaaattataattcatacccaaataatattatggctatttcatagaaatgacaaaacacagtgttgtggatattgtctaatgcaatttgtttgtgtgtgcacactgaaagacagaagacagggttttgcacttgtgatcccagcactggggaggcagaagcaggccagtccctaggatctgctggccagccagcctagtccgcttgttgagtttgaagccaatgagagaccctgtgcagatggtacctgaagaatgacacccagggttgttctcttgttttcacatgtacgggaacataagtgtatacacagagatagatgcacacatggacaaagacaaaagagatttgattcagatctttgggcctactgttcaagcttgcttgggaggaaatatatgtgcagagttgttcataatgatgcttgtggtagtgttcattctttcagtgtgtgcattttagaaatcgtagagcattcttatatcctttggctcacctgaatataattatttgtttttaaaacaagtgtacaaaagggaaggaagcttcagtggtttccccagggtcatacagatggaaatggcatagtcagaggtggaagtccatcatccttgccccaccgattctggacctatggtgagacagaacatcatggctgcaggatcatgtgacagaggctgttcacctcttggtagactggaagcagagagaaacaaagggactggggaccaagtctaaccttcaaaggcatgctcccagtgatctgattcttctacctggcctcttgcctcctaaaatctcttag

SEQ ID NO: 22544 - DNA, 1215 bp, Mus musculus
tggagcgcctcacgcccgcgcgatggcgactgccgcggagacggaggccccttcgacggacgcgagctggaaaagccgcggcggcggcggcggagacgacgggatgaagccagcgcttccggagcttgagtcctccctacaaaatggcggcggcgacggcggcggcggcgcggggcctgaggagaccgcggcagctgaagccgcccggagctacggccacgagcagcctcagcaaacctccgaagcggccgcggccgctctgcccaaaggcgccgaagagccggaaaggccttttaggcggagttttcagatccccaggaagagcagagaaaagaaaggtggtgcctccccttcctcccaccccctctctcgcttccctccccctccatctttttcattaagacctctctgtctcctctccccacacccatccgagacacgtaaacacgcacgcaagcgccagcagcctctccgctcacggccacggccgcccagccgcccttggtgcgagaggatagggtggaaccacgctccgccgctccccctctccccgtggaagttggaagtagctcaggtttgaagcgtttccataaggctgcggctccccgagcggaaagatggtgctcggtgcccctcttttcccccaagccccgaaggcagagaagctgatggtggcctcctaaagatgcttctgagaagtctgcttgtggaagtagcctgtggccatggattctgaggctttctccaaggccactgcgttctaaggacaagtgtttctcactgtggaaattcttcagctctgtgtgtctacttgaaatgtgctcgatgtcagcgtcttctatttagaaaactctccattagtatatgcgctccatgcagttttccatcacacttcatttccatgtagtttttttttttttttttttggaaaagcattagcttacgtaggttcttctgtataacttccaagcctagaatgacttttcttaaacgattataggaacagttgggttgcttactttttgagatcttagtgccatattgtaaaacgtacacttttttttttcttagagtaggttttgactgtccgataatttggaattttctggatttgacttaaacacttaccttcttactgcgtgtttttttttttaattgtttatttcccaaatcttttttttttgtcatttgaatatctgaagatttagaatcttg

SEQ ID NO: 22545 - DNA, 1149 bp, Mus musculus
taaatatattttcccatcagctgtatttattttattgtcgttgagagaaggtttcaggtaacagttggcaacaagttcactttatagcataggatgacctagaacttatgatcctcctgccttctccaccacccaactgttggcagtacagggaagtgccaccacacctgctttatatgattgatttcaggcccttctgtatgcaggactgtaagcactgagcagcggcactctttaccctgcccccccctcatcaagcatattttaatgatgtatctgataacattgctagagttaaaaatacaggaatgccaaacatgctcttatattttctttcagtcctgagaaattggatgttgaaacagttatgagtattgattgtttgaaacagaaaattcctccttcattcttttataaagacacatatgtgggtcccaatgaaggtaaagaaattaaatttcatttattgaaatatgtaagaagcagacctgattttatattttactgtgtattttttctttgtctcagttttaaagaatggaatgtattgtagcctttatgaagttgtagaaaagacaagaattggaagtaatatggaatgtttactgcaaaaactggagaaagaaaaacttgtgagtgaaaagttttaaatattcccattattccttgaaaatatattattattattattattattattattattatttttggtttttcgagtcagggtttctctgtatagccctggctgtcctggaactcactctgtagaccaggctggcctcaagctcagaaatccgcctgcctctgcctcctgagtgctgggattaaaggtgtgcgccaccacgcctggctccgaaaatatgttattattaatgttttaatttattcttttggaattcctacacagtctctattggatgctctcatttagttagtagtattttattattagtagtagaagtagtacttttttactttggagatgggttcttgttatgtagtcttatctgacctggagtttgctatgtaaagcaggtatagtaagatatagtattctttttacccaggaccgtagactttatttagacccatttttattatacattgtgattataaatgttgtatgattatcaaaaatatttatgg

SEQ ID NO: 22546 - DNA, 1179 bp, Mus musculus
gatgttgaatcctaggctttgagttctagcaaatactttgcttcttagctatatctgtagccacatttaagttcaatttctcctatgtgtgaaaatgatctgcctgtctctgccccctgagtcctggtattaatggtgtgagctactacccagcacataactaaaactaatcttgaaactatgttccctgaactattttttttcctttaaagatttatttatttattatatataagtacactgtagttgtcttcagatacaccagaagagggcatcagatctcattacagatagtggttgctgggatttgaactcaggacctctggaagagcagtcagtgctcttaaccacagcgtcatctctccagcctcctccctgaactattcttgaaactctgccttgatctcctaagtgcataaccactcctgcctgtggatttagtgttcactgttttttctttttttttttttaactttgatatagaaatgtgtattttaatttgtaaatgtatgataacacttttgctttcttattctaatttaattgcattgtaatctgaattgatgttagtttgatgtttgtttggacttatgtcctatgtgtttagttttttaatgcatcctctcttcataagtatatattccataattgttaaattttagcttgacaaattttatttattttagaaaagaaaagagtttactaagcacattttttttttatttgttctgagatatggtttttctatgcaactctggctggactggaactcattatgcaaacccaggctagccttgaactcagtggtgatctcttcctgcttctggttaccaaagactgtgattagtagggtaccggttttaatatggatacaagtatgagattcttgtctttcagattcagctcttagtcttcagtattttttgttggtaggttgacccctaaccccttgtgccgaacatggaatttaggaattcatatgtgttaaaccacttctcctacaaagctataattcccagctctttctttttatattttgaagaaggaactatcagagattcccagtctaacctgcagcttgtgatcttatctcagcctcccaagtagctgaggttataggcctgtgccaccagacctggctgtctgtgtatatttgtgtgcacatgtctgatgctcatg

SEQ ID NO: 22547 - DNA, 1100 bp, Mus musculus
tttgttgtttttaaactttttttttttttttggttattcgagacagggtttctctgtgtagccctggctgtcctggaactcactttgtagaccaggctggcctcaaacccagaaatcaacctgcctctgcctcccaagtgctgggattaaataaacctttttaaaaagaggcactttagaacacttggaagaacctttcagtgctgttactgaaatccaaagcgtagcctataagtagagcagataggacatagggtttacacagtttattgaggtattaaatttactttgcagtggatatttttaaatatatacctgagctgacgtgtttttaactgagtttttttgttttttttttttaatgctactcatttggattgctcttttaataaactcttcttgtataggaatgaaatcaccaggagaacagctggtgtgcctgccaccagtggaggcctttcctaatgatccccgggtcatcaatagagaaagaagctgtgattaccagttcccatcctctccgtctacagacactctaaaaggcactaccgaggaggacactgtaacagcaggtcaggcgatggcagtggaagagcagtgtgtgccagcagcagagcttcctagagtgagcgagattacagaaaatacagtgttaggagagttccatcttttctctaggaaggtagaagagattttgaaggagaagaatgtttcatatgttagtgcaatttccacacctatcttttcagcacaagagaagatgaatcgcctttctgagttcatacattctaatacttctaaagctggtgttgaggaatttgtagatggtttgcatgaaaaactaaatactgttgttattacagcatcagctaagggtgtgagtttgccgccagcagttagcgctaatcattcccatgctgcagcagcattggcttctctgggaaggcgtgttgtgtcaatttcctcaagtgacttcagtgctaaagaactttttgagccgctctgttctgaacatttaaaagataacaactctaatgaacagtattcctcttcagtggaagtagaaatgaatcggccacaccattgcaaagagttaatgt

SEQ ID NO: 22548 - DNA, 1889 bp, Mus musculus
atggttttgtttatccaataatgaaatgtttatttgaaaccatttacctacagtgacatcactgtagaacttagcatgtacaagatctgctcattgattataccatagttagtacggagtggtttgttactgtataggctatatattcattagtctatactgtggacaacatatgtgtatattaagctttattgcctgctgtttgctgtcagttttttaaagccagatagagggattgttgggctacaaaggtccttagatgtatgtgctagtttaatatcttactaagtagtgagactatcttaccttcagtcttccgtgagatggcctctgcttgttccagactttaaaataaaagctgttcttaaattattcttggtgaaaagcagagattactaagcattcagttgagctaaccagtttagtaattcagtgcagctacatgtcagaagttttattttatatttgtcttacgaaatactgaattaccgtgtaactttagatgctgttttgacattaacccctttggagctgggagttgggatttcccaacattaaacgtgaacacatttcgcagaagcttttagcatcggattatctggacactcacacctagtgtgagtgttgtgactaagtgaccttgtggcagaagaccaagctttaagggattgtggactttgcagatcctgacgcactatattgtgtgagtagtgtgtaattaataactaaacaaattgtattacaatagagaagggctttttgttttttaaatgtagctcttttagaaaacgatgaaaaggatgaagaggatatgtccctggattcaggggatgaaatctcacatatagaagtattcagcaatgttcattcagaaatattggcgggagaaaccaaaggatcaagtggaacagatcaaaaaaagaatatccaaattgaattgcagtcatctcttgatgtgcaaaacagtttattagaagataagacttatttaattgattgtgaagcgagcgctcctattgatagagtatgctctgaaggagagagcagcaattcagcagaacaggatgcgtatagcgactttcaggctgaccaaaatcagttacaaatgtcccatcagtgtagtcattttaatgttctcacgcaccagacgtttctggggacaccatatgccctttcatcaactcggtctcaagaaaatgaaaattactttttatctgcttacaaaaactcgggtacagagaaatctccattaagttaaggatgtgttcaaggagaaattacagtgattaaaaaaaataggttgtggtggactttgtattgatgatttataaacaagtttcttggcctttctgaattttttttcctttcctgtttatttaaatcatgatggcctatataacattgaagcatctgaaaatttgaaataattttttgacatattgtaatcagattatctcatgttagcacctttcagttttacatttgttacctgtacttgggcttcaaattgaagtctgttttatatgtaaaatttcatgtttataaaagaatggtaaatagtaatgacgttctttaatgtcagatgataactaattttgctgaaatgtcaactatttattttgattaaagcttttgtatagtgtttttacacaggtataagccagcagtgtaaatatttataggattttggcttagtacctcaagctatatttaacagtacagttgaattctaggtagtgaatctattgtatagaataccaagtagaattttctcagtctttaggtttagctgtgaaaacatttgcttcatttaaattttggttaactttttgagatctctttgataaataatattttgtgtgatcctttagttaaatgaacttttaaaa

SEQ ID NO: 22549 - DNA, 1506 bp, Mus musculus
ctgtgtgcaaaggaccttcttcatctttgagccatcttctatattatagaaaagttagtgagattagcttctcagggtcttctgaatatggtgcttcccttcttacagccccccacccccttcccttaatgctcattctctccagaaggcagcacacatatatccttaactgagcctacagcaccttctactggaagacctgggccagtctcgtcttgtaccacatccttccacatctgagctacctgctccatccttagtgtggcaagatttgccttgccacggtcgttcctcctcttcctccccattgttagctcctccaacactcatttccttctcagccccactttccatgtccccagcgatctgaggccccgtcttacacagagagcactttactagcacctatgaatctgattacctatgcttaaatctcagttgcttcctggaggtgagggagagctaagggggtatggaggctgccgtaccatttggctcatgaacctccctggaagtatttcactttctgatagaaatctgagctaataccagcttggctgaacgaatgactctttgacaggttttgctatcagcccatgttatactctaccttttggtgggggtcagcccgctgacccttccatcggattttctgactacaagtgctttggagctaagtacctgtggtcacatttatgacaaagatctgttctcattggctctcctcgagttacgagcagttgccttatctctgtctggcagagcccgtgctgcttctcagatgtggaaaatgggattgtttggaacagaaatctctttatccttaaatcaaattaacgttctccaccactgtttcagctgtgttctgatttgcctgctcatgaactcctcgtgaacttgctgctctaacgttcctcctgctctgtcttgtttgtctcctctctgcagcttgcttttttaagcagtcagagcagtttagccgcgatgaaagcagtgataggaagcttgaggggtggcctctgctgtcagctctcagacgactttcatcctccgcttctgtcactgaatttatgtttgagcgccaatccgcatttatgcatgcaaatttatttatttgtaaattatggtatgccacagtgtcactgtgttatgtgtcttctttgataatcacaaaaaaatatggatgagacaaagtaaaataaatacaatgaggtaaattttaatgacattcttgtttgtttgtttgtttttagtaaaaagcatattaaaactcctgatctgtgttattccaaggtaaagaataaaacattaactttttttttaaagtggaaacccttttactacctcttagaagtatatttacagatatatgtatccctcttgctcaggatagggtaggctcttctggagtgacagcagacttcaaatctcagtggcttactgcctagatcccccctcccctgccctcttttcttcctttctttccagcatctcattttgtaaccc

SEQ ID NO: 22550 - DNA, 1155 bp, Mus musculus
cgttcccattttcctgtgccatagctagtagccatctctcaggggcacacaatgagccacgtgtaatgagtagaacattggtctggctcttaactttgtggttgctaccgaccaatgggagcactgagctgaatgttataacacagtggctcccaaccttcctaatgctctgaccctgtaatacatggtgtggtgactcccaaccctaaaattattctcgttgctacttcatcactgattttgcttctgttatgaatcatcatgtaaatagttttgaagacagaggtttgccaaaggggtcgcaacccacagattaaaaactgctggtcatgcttgacaacagaatgacaagttccaattggacaattaagaatttggtttagttttcttaattaggaatttattttccctagaagtggttttgatgcggtttctaatttccccttaacttaggagaagagaaagtttattttgattcatattctgagaagttccagtcacagatagtggagctgttgatttgggcctctgatgggcatggtggatagcagtggtgtagtgtgtggcagaggaaactgctcagttagagtttcacaatccccttcaaggacctggcttcagtgacctgaggacctcttacacagccccatcatctcccggtagcattacccttgggacaaagcctttaatatttaggggaacatttacttgaacaatatcaatgctacttattcgaacgtaatgttgccttttataggaaaagggaaaatatgacacctttttctatatagaagaaagggacctaaaactcttagtttttttaaaaaaaaaaactgtgatttttaaagcacaacaactagaaactgcagctgcaaatgtcattcttccagggatggtagaatctaaaacaatttgaactgtgctatgtgtagagaaatgagaggcagacccattatggaagggagatgaagaaactcatgtgctcttctctatggcattcctggttttataacattgcctccaaccagcacagacatgtgccctcaggtgcagtttatagaggggattgattttgatgtcatcttggttctgtccatgggagatgactccatctctggatttaaggagatccatactccctctgcacattagaga

SEQ ID NO: 22551 - DNA, 1145 bp, Mus musculus
gcaggaatctaaatgattcctgattctttttttctctgcatcatgttccttgggcaatgggatttcgttgtgcaagtgcaaacaaagaaaacgtattgaacttcttcagtgtgtagattctttcagtcccactatgccaaaggttcttattgaaaccacacacagagaagggacggtaggatagatgatagtgagcatcttcaaaacattgtctaataatcctttccgtggacaacattaattcattgacaggggaaaagcaacagggtgattttattggccaacacagatggggtgggttctcttctggccagagttcaatttcaatttctataattagttgcaggtggagctcttgtgatgttttttgggtccattggcatctgtgtgcaaattcccaccactaccaggtggactcaataaatagtttggctttgcaggaatatagaaaattataaatctctctctcacacacatatacacccccagataaatctgctttaaaggtcaggctttgaaagctgtggagaacattttctaaagtttgggaagtggggtttttggcagagtgtaggcttgcagccaagagctggggcagcctgacaaacagaattctggcatgggccatttcttctctttgtctctgtgaagctagcatttggctgcatcttggaagagacctgtggccattttgtcttttactaggaaaggaagaaacaaagaccaaagcagcagctaacttctcatttcatcctcttggcaggctgggaactacctactggtttagcaacatttattgatcaagctaacgtggtgtaactaggggtaagttttgtctcccagaagacatttgaaagtgtctgaaaacattggtgtctggtacaaattggaggggggggtgatattatcaatgaggaaagaaggacagagagacatgattgaggaagggacagtggtggggtatgtggcagaggaggcagggcaagcaagagacaccatatgcattctggccaaataaagatcagaaaatggctggtgctttggaaacttatcacaaaggatgggggaagcaactccaggactattaatttataggcagcgaggggtgggagatcaggactattaatctataggcagtgaggggt

SEQ ID NO: 22552 - DNA, 1199 bp, Mus musculus
catgtgtacctcacccactgctacatataggttggattcatttacctgttaggtggctttcctcattcacatgctgtggccatggacccaacaatactagtctttaagccctggagatgtctgtctcttattgctggttgatgagaacaaagtttccttcagctaacagattccgtctgtaatgagtgtcttccatgtaatagctgctgcttaattggcttatattttcttgcattccctcatctttttacagtgtggtcatgagacagaggagggtatttgtctatccctacaagaatgaattctcatgagaataataaaaaacagaattttaaaaggtctcttgggaaagatggcctttgcctttgctttgggaagtctatactctaagctttaagacgtcagggactgtggattccctcagatgcctgtctcagtactaagtacagtcctttgtccacactgtgctccatagacattcagtgtgaatgttatgattcagtgtgagatgataggttgtgatttgtatctgaaggaatgctatcggaaaggtcttaaagggagagtctgaccacggcagggcctattacttttctgatgctgtgataaaacactttgacaaaggcagtgtgaggaagagagcattctcttatggttccagagtgctgagagtccatcttgaaggaaagggtaagccgagacagagagagagagagagcaagagagagagcgagagagcgcaacatggaagctaatgaggctttctagtctcaaagcttatcccagtgaggtacttctcccaatatgactgcaccacctaagcctcccctaacacaaccaccaagtgggggcaggtgttcaaatacccaagactatggggggcatttctcagccactcaaagcaccgcagaggggaacatagtgggagagaaataagaataaagtgtgggaatgggatttcaccatagagttcccagtctccccagcacatcagattgtcttagtcacaggcattagaatcattgtttaaaataagagaagttgtctcctgtgacttactctgtcttcttacatggtcctgtcactagcactgatgtatgaaggcccatactcttcttgctaggattctcttggaaaagacggtgacagggggacgactgtattcctcattgaaatggaatttgatgatccttttgtta

SEQ ID NO: 22553 - DNA, 1171 bp, Mus musculus
tatatatgtatatatatatgtatatgtatatatatgtgtgtgtgtatatatatgtatatatatgtgtgtgtgtttgtatatatatatatatatatatatatatatatatatatatatcatattaccttttataatgcaacatgcgtgtaaggaacgtaaactccttgggttctgtccctggtatttgccagtagggctctacctgcctgttgtgccttgtatcctagcacactcttcacccacacgctactttccttactgcagagagacgacaacatgaattgggcttcaaaggtagttttcagccttgaagagagtttatcttgtgctcagattctctaagaaaagtgaagtcactcagtaaacatttggtgaattcgtaataatagctccttataaaggatttgtggatgcgttaggctctggaccacttcctcattgtgtccccttctttttcttctttagcccaaagcattttgtcttttaaagtcatcccatttaaaagtctccctgaaaaaaaaattgctccataaacctccccttctttcttctttagctccacttctgtcaatatttttcccttcttcttcactcatgcaaaggtctgtgtcctgctgtttgcttttcattatctggttttaacagtgcctttgtctctgaaatgtgtacagccccaggtaagagtcattactatagactgcatcaggaactttcacacagtaagtacccaaatcaggatggcataatctggtgggttttttctcttttgactaactggaagctctgtttgctaccatgatactcactgtgagtcactaaaatagtccaaggagtctctcgaattggggctgtgtcgtgctatttggtagagtcgcacagagagcatgccccgtagatatatgggaaatgatgatgctttgaagttgctgtgagttggttaatatttaagtgttacgtgttgtttgtagtgtgaaaggaagtttgtggtgttcaaaccatctgcccaatgcaattaatggagaatttgatggacttatgctaagccatacagctcgtgtgtgcttgatttagagatgaaacttgtcaaaagaagggtaaaatggaggagaaatagcttctggaaatgaacatgagcttgaatggggacacttatggaaatgtaccagaagat

SEQ ID NO: 22554 - DNA, 1099 bp, Mus musculus
tggcaagccttttattttctttcatgtaactatttacacatgctgagtatttctctgttccacagtttggggtcttgtaaagaacagtggcagagcagagcataagccattggcactgatggctgaccaactggtcacctgtattctgtcacagtagggtcagtatccaaagagccttcctaggcaaagcttctggaaagctgctcaaatctaagtttgtaagacagtgcagaatactagaaagatcttggagacaagaattgagttaccttgtgctttaataagccttgttcttatctgcctggtagaactttctgtggtgaaggattttctgactaggttcactggggtagtggtcaattgatctgtgtaattcttgagagcttaagatgtggttatcaggactccgacactaaattacaaattgtatgtaattcagctactttaaacaatcctgcatggttgcggaaagtgtactagaaagtgtaggtagcctctgtagtctgagaacgttgtggaattgtgggcagcaggttagtgtgctggagtgaagttgctttggttcagttcctgactctcacttgctgcagaataaggtatgtgttttctctatgccttagtctttttagtacatcaaatagggaagaagattacatccacctcattgaaccatcattgtgaggactgaaataaatgttacacctactattcattcattcttttaatggaccttacattatagaattgttttagccagattgctggattcacgatacatcattagcataggcccatgagtcccataaacataaagataattacacatgcacaagtcccccccctttgcctttttcttacaccaagaaccagaacattaattatagcttaatgtctgcatggattttacccctttccgaacacaacttggattttgtatttttatctccctataaactggtgatatttcatatgtaaggtgtgatgtgtttatgccctttaatgagttcttctctacaggcctctaggtcttcttgacactcattgaccatgttcttcacacttcccaccatttgaaattgacaactgccttattaattgt

SEQ ID NO: 22555 - DNA, 1123 bp, Mus musculus
aagagacaaagaccaaggttttagaaattctggcctaagaagaaaaagaaatactgaagagtcaaaaagatgtaggttcaaaggagggaatttgacccaaacactccgttgttccacaactcagtttcctcccagggaggggctgctactcaaacaagtcagtgtgtggtaccctcagactcccttgagataattcatccagagatactggaacaggcagcctgctccgaacatgagccattaatactcctgaccacaataataattacaaaaataaatcctaaggaaacacagccctgtatgcggccatgtccaggtataggtcgcagagcagtctgagtcccttcatttaaaatatgggtgaagtcacacccagcgggaggagggcagagatgaaatgcaggatccctctgctgttgcctcctgcagctctgtcatcctaacagcttcaaaacggggctggcaggctggccctgcccccaccctcacagccctctgggctctgaagtgttacattttattgccctgtggagctgtaggaggccactctcaaggtaaaatgttgctttccactcagatttctgagttatggcttcaaggtggtttgctcctatcaagaaaattaaatgatttaacataatttgttgccactttgatcacaacaataataaataaatcttcatgaagaaaacgagaaatccattctgtcccattttaaaagatgttaaatcataacacagatgtagttatacatatatatatatatatgtatatatatatatatatgtatatatactgaaacgactgagttgggctttcctgtgcacattcactcagaggagctattctgtaggatgcccaaggccctgaaggaaccctctcctttgccatggttaattagtctatcaggggctggccttttatgtgggcaccatgtgtaacacgttaggttatccgtggctgttgtgaatgggtgtctgtttttgtacctggggcgcactgcacacatttgggacgcacatggaatggagtggacattaacccagatgtcaaaaatagcctgcattttactactgttattaaacagtttcccctttaacccctctgtgtttaccaaagaccc

SEQ ID NO: 22556 - DNA, 1161 bp, Mus musculus
gtggtcagctgtctgcattcgtgccaattttgacacagctcctgtttggggaacatttctttgccccacttttgccggttgaaagtattatcgatcttacaagcatatcattcagtccctgcaaaatccaattctatctaagacagcatcttttcccattttgtgtaccattctccaatatttgggagttccatcaaaaatatccctttccacacactgaaaattgtgtctgggtttacaacaaacactgtgttgttcagaggatatttcctttgtgaaaactttagcaggttcccttctaatcatagtgtagttgaaattaaacaaacaaacaaaaagaagtttgggctaacatttaggagaagttggtctaagtcttaccttgtgtaaaagcaggcttgtatttataacctatttgatttctatatacagtctcaattttgtatttaatgatttttgtgtattaagtatgcacgttcacagcgtgtcaactttcatttggaagtgggttttattttttaaacagtgtttatgatgagccctcaagcgtattgatataagctctagctgcaccgtctttgtgtagagcgccgtttgaatgctgccaagggtccctgtatctaattccccgagacccttgtttgatagtgcttcttgtaatatttcttcaagtgagtggcatgtgggttgtgatattgatccatgtgattatggacattgatatgaaaaaaaatttaaaaataaataaataaaattaaggaaccctcgaaactatcactgggcatgtatcagccagtcattgtaacctcttgtctagtagaatacccatgtgcaaggtatgtacagctcataactttgtactgtgtgtatgaggagtgctttgtgccgattgtcttctttatattcatcaaataaaccttgtttctttctgaagtgaattcatcttaccttttacaaatatgctgtataactgtttctagctcttggtgtgtgggggggtgtaggggttactatttgaagaccatacaggccaaaagaagaaaaagaggaagggagggaagaagaaaagccattgtcttgcttaactggaaaggccaagatggtcagctggtcatataggtgcagttcaggaagttagatcaagggccatctcctccttcc

SEQ ID NO: 22557 - DNA, 1103 bp, Mus musculus
gagctttccgctagtctgcttctaagtgaggatggctgggaccttaacaggcatctgatccccactgttgggggcaaatcctcaaaactcaaatgctaaggatagatatttcctttcccaaagtaaacggggcataaatctgcgagaggaaaatcaactgtaccagatgaaggaaatctaaaggaactgcagaagttttgtgaagacatgctgaccaaatgcgtcaaggaaacaaagcccaaggaggttcaccctgaaaaaaaaaatcaaggaatggagcaacaaagagatggatggtttaaataagacggactttttttatcttcctccttctaattatttatgtttacaaattcacagaggtagaaagatcttggaagggagaaataatgtccatttgaataacacaagagaatgtcaaacgtgaggaggtaaagggaagaagtatgtggaagtagcctaacctttttaagcacataaaaagaaaaaggaaaaagaaaaagggggtggaaaaaaaaaaaaaaaaaaaaaaaaaaagtctcgactgcattggtgtgaatcatcagcgccatctagtggatctcgggagtatggtgccaggccgcagcttaaattcaaattagatctcagacctcagtgtctcaccctatcttaacattttattgcttgcagaagaaaactaggtgacctccatttagtttaatttaataagtctgctcgagtttagtctgaagatacggatatgaaagaatccgttaagttgcttagtcaacctggcaaagatcaccctcaccagggacctgggaatgcagaagtgttgtctgcgctgagacctgggttgtataaagctgcattgttgcttggattgatttaattccagtgtaagaagaaagggctgcacggtaaacaaacactgaggtagtaattacgtgaccatggccaatgccactccagtcctgtcaggctcattatacctccgacatttttcaaaacgacttgacattttttctgcatgacatgttttgggctggatacagtaaaaacagctggttgcctcctgctgcctggaccatccagcactggggaagtgaagaactcttagc

SEQ ID NO: 22558 - DNA, 1327 bp, Mus musculus
ttaattcctttgaaaaggaacacaaagcagcgagtttagaactagaatctgtctgtattgggaacccatggtgttctgataagttttcttttgagggaggtgtcttgggggtccccttcatctcatggcacttccaagggcctgtgcctgcctatggggcttgctgtggagtagtgaagaatggcatcttcagtattaaaacttgagacattctcctcagctgtgtcagagattggcatgttgggaggttctgccttttgttctgcttgtggtagttcagggaattgaacccagagcctcacacatgttaggcaggggctatgtgactaaggtacagcccagccagttttctactgtgtttcacacagatgtaaatcctggcttggttgctgttgactgagcaagggtctcagccccacttgcagaaaatggtgttgcatgtctgtcttccctgccttggctgaactctctgtcgctgtgtaggacatggacccccggctgatcgcatggaaaggaggtgcagtactggcgtgtttggacaccactcaggaactgtggatttatcagcgagagtggcaacgctttggtgtccgaatgttacgggaacgagctgcctttgtgtggtgaaaaccacaaccgagtctcaggacataaaagacttaaagagtgtatgtattgtaagttattgaccacgaagcttaattttcctagaattaaattaatgcaattttatgttaaagtatgacactgatttgagataatctactttcagtcgggcttaccctgtccctgatgggaaaccttgctgtccagccttccatcctgatgaacgtgtcatgtagccctgaggggtgaccactggaaccagctgtggcatcttctctttttttctagcaatagttaggagctaaagcggtcaggctgggttctgtgtacatcacacaaggtcctcttggagttaagcactgtctttgtaacacatacacacgtcagggagcaggaggtcagggagcactcctgggggccacagcacaaggcaggcagggtaggtagagcagaattgtttagctggctgttaggcatctgctcctaccgtgtctgtcaccaggcttgtcctggggaggactgggaggcaggtaacagtgggtcagatgagccgcgggatcaccatggactgtagcagtctcgggtgcacagccctgctggcgctgtaagagtaaccagctaaagcagcttcgagcaagcggggcatactatttggagatgtacttcctcatttgaaaattacctgctttttatgttttggatcaaatgtataggatatgct

SEQ ID NO: 22559 - DNA, 1192 bp, Mus musculus
gcggggcaggggggacacagttcacactgacatgctcagagtggtttaccatgagacagtcagagcttctattctgcctcatgcatcaccttcaaagttgtcagcagagtcctgattccccggtgatacgtgttggaggttgtttctgaacagagcagaaagaaagcctgctcagtgctgaagttagttggagctgtcactgcaatgcagaaatccagccgttctgaattccaaaccacaaaatggtctcagagcttattggtggaagaacggggggagcgtgtgagagctggatctgcagtctctgttcctctccttctaagctcatcagtcacctttctaggtcgccatcttgtgacatagggatttggatgcataattgcacttgatgcttacagtaattacacatgcaaatttctatgcacggggtggaaaaacatgtggcctgcaaggcctttctgttttgtaatgtttattttaagtaaataaccaaggtggcgcttcctatcgttactaatatgctactctatttaactcgtgataaatatacattactttctgcaactctgaggatcagtttacttaactgactctagcttcgagccttaactgctttgcaaagctttgcttcttgctagactgagcaacccgtgttataggctgacagcccagtgccctttgtgcaccgtcccaccccacccctgcccccagccagaagtgagggtttaggctcttggtccaaatgtgctgattcgggagagctgtgtctggtctctccgtttagatgatgaggtaaccgtggggaagttctatgccactttcctgatacaggactactttaggaaattcaagaaacggaaagagcaaggactggtggggaagtaccctgcgaagaacaccacgattgccctacaggtgaattgccctcttgctctgttctcttctcactaacaatgttgccagctttgatttgaaacactagagagctgactattcatggttgagcagtgccacaaggattttgtttaaactgagatactgcccactgcccctcccactgtggactagccatttccgggtcgcaaggtaagtacttcctcctcttcgtgtcttctccgttgagcctcgcacctgccatcatctggtacgcgtgcaaaaccctcaggacagcctgcaatgggaaaggagtgaa

SEQ ID NO: 22560 - DNA, 1202 bp, Mus musculus
gttgagtgtgtgtgtacgtgtgcccgcgtgtgtgcgtgtgtgtgtgtgtgtgtgtgtgtgtgtgtgtgtgttggtaattactttttgagaaagggagttgtgtatatctgttaagccatgagagatacatgtgttttcaaagtcaggaaaagacacgggatcactgtgagaatggcctcagtttgtcagaagagatgcactaaaagattccttttgaagacacaggtatggaagagtaccagtgtggttaggtgtggcacaacaatggccctgcatgactgatgctcagagtagagctctggtgacttttgcattgcctggccaaaccccactacttgtgacagaaggttcaaaatgggaaatgcaagatgggagacacttttgctttttaaaaagatagtatggattgaagtcttcttcttcttcttcttcttttttttttttccaaaaggaataatctcttttctcctctcctcagaggcaaactatgcaagaggcaccagactccctatttctggtgaaggaccaacttctcagcccaacagctccaagcaaactgtcctatcttggcaagctgcaatcgatgctgctagacaggccaaggccgcccagaccatgagcacctctgcacccccacctgtaggatctctctcccaaagaaaacgtcagcaatacgccaagagcaaaaaacagggtaactcgtctaacagccgacctgcccgtgcccttttctgtttatccctcaataaccccatccgaagagcctgcattagtatagtggaatggaagtatccttttttttctgtgggaagtctttctcatttgccatctgtgcttcaaaaggatttgctttctgcagtgacacttctcagagccttagcagtctggaatgtgagcaatggtggcaactgcaggcaaggggcttcatgggctacggcttcctgtctccccagcttgcagagggtgtgtccatgagtatatttagcctgtgtgtgtgcgtgtgtgtgcgtgtgtgcgtgtgtgtgtgtgtgtatgtatgtagtgctgtgtgtgtgtgtggggggggggaagtgaagattgcaacttcatagtggtagggagttagaatatgaacgagacctttggtcatagaacactggataggtctgaagctgttattgttttgggggcagttatatgcattttaatttgttgaaaatttg

SEQ ID NO: 22561 - DNA, 1208 bp, Mus musculus
catatgtatgctgacaaaacattcctgcaccttttttaattgaaaaaaaaaacttaatacataaaaataataagtaaagctaagtgtgtgtgtgtgtgtgtgtgtgtgtgtgtatgtatgtatgtgtgtgttttcctttagctgttccttactggtggaaatagacataggctacagatgaagacatattgttggattagacattgcatacacttatataaacacagggttgaatgggtacacaatttgtttagagttttaaaaagtggcatgggttggggatttagctcagtggtagagcgcttgcctagcaagcccaaggccctgggttcggtcctcagctccggaaaaaggaaaataaataaataaataaataaaaagtggcttgctttacctgctcaaaagtgattaatttggagactaaagagacagctcagcggatgaagtgcttgcctcccaagcatgagagcctgaggcattcacatagaaagctgggcatagtgcttgcacttacaatcccacactgggatatggagccacttaggatccaacactggagcccgctgaccagcaagtgtagcttaattgtccatcttctggccagtgagacccccgactggaaggaatgacacctgagagtgaccactaacctctacacagttatacacgagcgccggcatgcattcccgagagcacatacacagctgattccaccgtaaataagacaagttggcctgaaagtgtgtctgcttcagctgagaccatttggcattggattatttgtggaaaactaacagagttattgtctgttacaggagaagactgatatagaagggacgttatttgtataccgaaggtaagtttcttaagggtgtttctatttcacttcaatggtgatgatcattgtcgtgtagcatggtcagtttctattgtgtacctgtgtttggaaccttcctgtctttctccagttttccttcatccaagcagtgcaatcctacaatagctgcttctcctctccaagcctgggaaaagtggctcagaatttttaaattaatgcatcccaaagagatgcctgcctaacgactatcccatgttaaaaagaacacatgcatataaatgtctatgaaaacagtataatacagtggctataaagtagttgagacagcactctcgctggtctgtagtgtctgataagaatttgcattctg

SEQ ID NO: 22562 - DNA, 1244 bp, Mus musculus
cttgcaggttctgaccaagaacaaagacaaccacaacctatgactgcagtgaaggcaatgtgaagggagagggtccgcctcaagacacgcaggcttcctcatggaacagctaagcagagcatggagcttgaggagcctgagagccttgtccgtaaggatgtttcctagagacgttctcagtgatgatggaggtttcactgtgcagcatcaccagcaaacctttgtttgacaaaacaacaagagaccattgtgttgagtgacgtgggtgttttcatcagctacaagccagtgggtggaatgaggagcctgactgccggcttgctttccaggcctcgggaggagccaccagccttgcagcagagctcagtggagcccacgccctccctcctctactcctagaagaacttaatgtcagctcacagagtagcttcaggttttaaggatcagaatttaagttgactctttggaaggtatttgttcaagtgaagtatattttctatgagcaccccgcttgggccttaagacttctgggatgtctttgtgttccggtaagtgtccctggtcctgccctgtgcaaactccggtgaagcacagctcttgggataggccggctgggctctgatggaggaggcttcacacccttgaagcagaggccggggccacacagatccagatcctaccagaaggctccattttagtgaactctcagcagtttaagtgtcaagtttgtgtgtgaagcgcagccttactttccttttctgtctaaacacagttcaagttattgttgattgttttccttaacactttggcaaaaggaccagtggaccattctgacaaagccattctggttccattcctcaaatgtgctgagcagtttaaagctatgcagaaagggagctgtgctcacactgcctgccttccttccttccttagttgtagactctggagtcagaaagcaagtgtgagacctagcacctcacagtatatcctaggctgcgagctctctggccgcagtcagaactgtaaagatgctttgtgatgctgctattgatctgccatggtttctatttatgcttttatggcatgtaatggtgtttggtaatattttaatgtagaatttgattatttcagcaatagtaattttgagatattctttgaatgaaaagtgtcttcgtttctatgatacaggtcattttctagtatttaaccaattaatgcactgcttacttttctgagcactattt

SEQ ID NO: 22563 - DNA, 1177 bp, Mus musculus
ctaggaagctaggccagaatgagtccccagatagctgggccaagcctgaccataggtgcggttggatgagtctggcctgagagtcagcgctgttgccttattcctcattcaggcatattgtccagacccgctgctagctagcctagcttgcatgtttacagtgtcttctggaaccttagtgtgactgaaagagacgttggagatacttcttgctaagttggcagaatccagaagaccttatcaggccatttggtccatctgtatacacaccccaccccctcaccccagtggtcaaagggtctgggaagagcagcccagagtttgtcatgcagcgttgtctgggtgtcaccgatgagtgacactgctctttttgttgtagttaacattatgtctttgaatgggtgaacaccccagctgatcccccagtccctctcaggctgccttgttccctgttgttacctctctggggccccgcttgatctacttgactttgagtgctaaatctcaagtggccatcagtatcaggaaaggcataccctgcaggctccgtccggactgtccacagctagccctggacagtgatgttcattccaaacccgtcaaggccttagcccaggcttggcttagatacctaggaccagagtttgcatatgcaaacattggttatatctgtggcctggatcttcttgtgggaattaattataaatgccattgaatccactagtaaataatctttgtaaaccatgcagctttattgctctcttcccccaaagaatgtcgtttgaaattttctcatttcagtagtagaggccgtaactgccattgtaacactgataatgcaacatgaaactcaaggtgcctacctgctcatacagcggagtcggccatcatactgcaactcagagggaagagaaggaagggcacgggcacaggaggaccctgcgagtcaggcactgaggggtcacagcctgcgtcgtcctgtgtcctcgtggcacacctactgaggaccatgtgtctcttcctgcctgactttgttgttcttcagtaccagcattgcccgccctgttcaagaatccagaatgctccggtctgagcagagcaccttacagtgggctttgaaggccactcacgaggagagtttccatgaggaccagggcctccaggagcctgtggggtt

SEQ ID NO: 22564 - DNA, 2356 bp, Mus musculus
tcctatgtagcccaggacaccctagatttcagtatgtagctaaggctagtttgaattcccgatcctcctatgccccaagttgctgggattatagattgcaaccatcctggtgtcaaaggaaacttgttgatttttggtctttttttttttttttttttttttttttgtttggtttttccgagacagggtttctctgtatagccctggctgtcctggaactcactttgtagaccaggctggcctcgaactcagaaatccgcgcctgcctctgcctccagagtgctgggattaaaggcgtgcgccaccatgcccaggaaactgagtttaagagttttgaaataatcatttcaagtcaaaggagtttggggctgggaaacagatgacagagccacgggtacccaggcaactctcgagggttagcatactaggatcgcagcctcttctgcctcccacatgtggcctcgggagggttctgggctccctgttcttcagggctaatctggccctcctgccctcaggtgagcattgccgtgggctgtgccacacgtgaccggacagtgcccttctgcagtactttcgcggccttcttcacacgggccttcgaccagattcgcatggccgccatctctgagagcaacatcaacctctgtggctcccactgtggtgtgtccattggtgagttcagacctgttgctaagcaccagtgcgtgtgggagggcacgctggaagctggagccaatcatcagcctcttttcaatactccaggggaagacgggccctctcagatggccctcgaagacctggccatgttccggtcagtccccatgtccaccgtcttttacccaagcgatggagttgcaacagagaaggcagtggagttagcagccaacacaaaggttagtcgtgtggctgttcttttggaagctagctcttccacagaggcagaagaggaggccagcgcaaggtagagctggtcacttgctgcctagggaggcatttcctggccatgtccctcgtgtgtgtataccttaaagaaacaagactgagaaaatcaaagcataccattcgtcatgcatcatggcagacactgccagctgatgggcactctgccagcttgaccactggtgtttgccttccttgggttgaaggacagtaacccgagtctctggtccaggacaataactgacttgcctcagactggcatacagagtttcccgtgtcccacccgagagccggggccagccttaccgaggcattctggggagtagccccactgagaagccaagccagtttaccttttagaagttgcttccagtctgagattagccaggctgtgggtgcttcttctcctgtgttcagaggtaccagctacagggaaccagccccatctctttgccatagcgccaggacacaatgactgtgcccaggttataattgactgactaaatgaggcttgtatctaggaagggtggccctctagaagaccaagctgtcgtgtttctcagtttatctgttccaatcccagggcatttgcttcatccggaccagccgcccagagaatgccattatttatagcaacaatgaggatttccaggtcggccaagccaaggtcagtgcccttcgtgtatgagaacccgagggagccacccaccctgctgctgcttctactctcagaccctgctctggcccctcactgtccccatgtcacccgcaggtggtcctgaagagcaaggatgaccaagtgacagtgatcggggctggtgtaactctgcatgaggccttggctgctgcagagagtctaaagaaaggtaagaagaaagggaccagggaggtcacaggctggtcacacagaatctctagttaagtcatgatgacaataactgaagccaccctttgagccattacgccatgtccatgctatgttctaggactggtgactatcctcacctatgatccctttgtatcagatcggaggccatggagcctgccaggaaaactgaagtcacagctcagccggtcactagttaaatgacttattcaccgtctttgtgtctccgattccccacgtgtaaactggcacttagcctttatgactgtcccaaggccttaggtgtgccttggcattcatactgttattattactataagtataatgttgttagctagtgataccgtagggacagagcgtcagcctcgtcctctcagtgagatcgccagacacgtcacatctcaagcttgtgagcaccaggaagcaaaaggtggtcccttggttgggtgacctgagtggcctgtgcaatgtgggggtgaacaggactgaggctgtagcaagctgggcctgagaggtcaagaaagctcc

SEQ ID NO: 22565 - DNA, 1099 bp, Mus musculus
tgtggctcacagacatgcaggaaaaacactcggtacacgtttaaaaacaatttttttttaattacataaagctaaatgttgaggctaaatcccaggactcagaaggtgaagacaggtgaatctctgaattcaagaccaccttgagctacatagggagttctaggccagtcaaagctacaaacaaatagatgtagggctctgatggtagagtccttgccttgtgtgcatgaagccctaggttcaatccccagcactgtgtaaaatcaggcaagtggcaaagaaaaagtgacaaaaagaaagtgcacatctggacttagaataaatcatgggaaccctggtggattagtgatgtctgctccggcaagggctgtgtctttgtcatctctggctcaggactaagacctctctgactttcctctgcacaggtggcataggagaggcagtgtctgctgccgtagtgggtgaacctggagtgacggtcactcgcctggctgtcagccaagtaccacgaagtggcaagccagctgagctactgaagatgttcggtattgacaaggacgccattgtgcaagctgtgaaaggccttgtcaccaagggctagggagggcatgggatgctgggtgggtgaactacacattccagggaggttctggcagaggtggcgaaggtgtactgagtggggaggtaaatatatgttttgagaaaaaaattaatcctcagactcttttttttttcctgtgatataaacatatccagtgccagtatgagaaggagactggggagagagggagagagctggctctctaggcttggggtcaggatctaggtgtcccctggatctaggtgtcccctggaatccccttctccagttcagcctctgcaaagccacaactgctcccaccaagtcataactggggacactcattgcagcctgccttttagccaaactaggatccagccccttcctttgccagtgtaccctaaatgacaccatggagttccctcctgccttataaaaccttcctgggccctccatagctgcaccatggcccccaaggtcccacaactcctccttttatgggtggtcactgctgtttcc

SEQ ID NO: 22566 - DNA, 1100 bp, Mus musculus
aatttgcaaggattgtttgggatcttttgaataagctcacttagcgcagtaccagcatcctagtgtgcacttaataaactgcatctgctgtgtgtccttggacagactcttttttggctttgtatttttttttctttcttttgcagatgacacttgctagttcgtccacatggtccagagtccaccttcacctttatcctagagaggcacaaagaggttaggagagagaagcaggctgaattagattcaggttaggtggccccttttaagataagagttacttgggttaggtgtagtagctcaagtctttcatcccaacactcaagaggttgagttctctgtgagttccaatctgagctccagtctagatagggttacatacttagaccttgtctcaaaaaaaagttcaaatcaattggctttttttctgagcatcggtttattcttttcttccttccttctttccttcttcgtctttgtcttcttcttcttttttttttttttttaaagacaagatctctctatgcctccctggctgtcctgtaactcactgtgtagaccaggctggctttgacctcagatatgccctgcctctgcttataggcatgagacaccagtcctggctttatttatttatttatgaaaagatactgctatgtagtccaagctggccttgaattcttgatgtacttgctgcagtttacaaagtgctggggtaacaagcacatacctccatcccggcagcttcctcattttgaatgagaacagcactgcagcttcacagggtgattagggagattaggggaaataatttctgttatgtcctggcacactacaaggtacttagtaaatgttagctacttttattagcataagaagtttgtaaatggcagtgtagggataaaataagctatatataaaggatatagaaaagtgccttgcacacagtacatgcataatcaatgttggccactcttcttttaactccacttgtttagttctttgtttttctgtttcacagtataggtgagttcaatgtgttatacatagtaggtttttttaaagtttatttattttatgtatatgagtacaccatcact

SEQ ID NO: 22567 - DNA, 1195 bp, Mus musculus
ggtactcatttctagccttcaaacaaaagctagctggctacttctgaccaaaggcgattcttttgtcccagttgggtggagggtgaggtagaccttctcatgaccccaccttttcctcttggagctggaagtagctgtcaccctgccaatgccctgggtggggaggagagagagccagtagctcaattctgctttgtaatcataaatggcacaagttccatggtttatggaaaacccagtcctaaatgttggcaaatcccggctgtcagcaggcaggacacctggagtcagtttgctgggtgggtatctgacatctgagccgtttgagctcctggctgtctaccttggaagttgtgttctccaggcaagtccagtgttagagcctatgcacaggagccacggtggcactggctctgagtggtgggctgtgctttggagggtgcagttaattaggacacttttatgccttgattgaccttggagtaatattgatagttctgttgtgattatgcccctctcagaacagttcaattccaaccctcggctttcttgtttcagcttctctacacgactgttctggtgctctgctatgccatctatttaatacaattactgcgttccccagaatcagccaagcaactaactcttcctgtctccagagtaacacaactgttgcccagtatttcaagaagcagagtgagtaatgcattttgttcacagatgatggttttcctcgagatagagaaactgcagctggcttattttataataggaaagataaatttacagattgtatttattgagtgcttgccacatactaggtcaggatttccaaatcttagcactggtgatttttgcatagggcatgcttggttatagggactgttatgcaccttggggtgtttagcattcctggctcatgatgccagtaggtcttcccgcaccagcccagcacttacagcacctccagacactgccacatctcctcagaggctcacctctcccagtagagaaaaactgccgggctctgtaatccttcacgtgcgtcatccagtgcttccatctctgaaggctaacattttcactcttcctgcattagggttaaagagctaaggctgagttaaggctgtacctgtccagggtgaggatagagcgcaattagcagtccgcaggggatccagtgcccatgttccac

SEQ ID NO: 22568 - DNA, 1243 bp, Mus musculus
ggcccgggtccataacccgccgctttgctcgcgtccccctgtccgcacctcgccgaaagacacccgcgaggccgtggcgctgggcgtcgcggcgtgagcctctgatccccgacggcgccatggacggagaacggcttggagacggcgtcctcgggctccggaggcgcgtcctggccttgcttgggattctggaaagaaagacctcacctcgggcttctggacagagcggctcgggaccccgcgaagtccctgatccatccgtccctggcgaagcgcgccactgtagcccgcacgtgaccacctcgagcaagatggtattagcagagaggcagcagttctgcaggtccccaaggggcgcataccgtggccgagggagctgcgcccgcccgccggaccacgtcgggaatcctacacgttctttgagatctagcagggcactctagtgctcgtctaccgagtccgactcgaacgcctctacgtacctcatgtccaggctcagtaaatgagttgtcctgccgcaaaggggcacaggttgacctaagagcttcaggagaagctcaaaaatgctgtgaatcagcctcgaatcggaaggtgcccacaggcagttacgttcggctactcaacccttcttcagcgagcacaggtgtcaataggaagcacacccacctgctccagaaagttccctcagaagaaaatcccagcgcctgtgggatcccggagtgccaatgagaccagactctccagcctaagatggcctcagtcaggggctcctactcaaggaagactcctttcttttagagaagaggaggcgagacacacacacacacacacacacacacacacacacacacacacacacacacgaaggtcttgggatgctcccattagcatctttctcatgtttttgggcaaccttgggaaatatgcacattacaaacgccagatgatttttttctttttgtaagtgtaagcaccattgaaaagacaaagtaacaagaaaaaaaaataaagaagaatataaaaggatattcaattattgctacacaatttgagctcccacccaccccctcccaacaccccccccgccccggccaaaaacaaaaaacaaacaaacaaacaaacaaaaaaacccttcttcatagatacatgcttgcaagcacacattttcatttatttgctactatgactaacattttttgtttgcatggtcgtttttaaggtatatagttcctgcttgtgtatt

SEQ ID NO: 22569 - DNA, 1140 bp, Mus musculus
catttttttgtatgatgccatttttaagctgaatgctaaaactatgacagaaattagagaaggcactgcctgctttcttaaagatatcatgccggcacttacaccatcagtcccttaaccaatttgtcctaagaattctactgttgtgtcctccatcatgacccggttttggtcaccattgttaagtggctttacaaagaccaatgggtaattactctctccctgttagttctgaaaagtatttaagtggctttattttatgtttattcttctgttagagttgtttaactacctctgttttatttctggagtttctgctctcagtgaaaaatcagtacgtgttctttggacccactgtcaagcccatttttctggttttctaggtatgtccaggtagacacatagcacagaaatgtatctttggggatggcacaaagtatgaagttccttaatagtgtcctcggttatgagtactgagaggtagttgagtctatgacaagctaccccaaatgtcccagatcttatccttctggaaagctaagcagggcctggttggtacttggatgggagaggtggttaaggagtctggatatctctgtctagccgcatttatgcctgtcttcagttaaaccaacttaaattgaatgtaattacagtctgaagattcccactcagtagctcattcttttgaagttttttctttttctttctttttttttttttaaattaaactcaagttgacatgaagttccaggtgaattttcactttcaatggcattgttagctactatagaagaacagcacttgctctgccacagctgtgagtaaggaaagatgtgtgtacacagttgcctcttttgctgttttccttgttgattatttatttatttatttatttttgattaccctaattcctacagatttataccctaagcatttttcctcaagaattgaaaatgttttaaaactgcaaactgagtaacttctgaacaagtatacaaatataaggtaatattattacaaatttaaattgtgaatttttttttcttttctcaactcaacccccacctgtttttatggacactgggaaagtctgtagtctgaattctcttcttcattggataaccatctaacgaagtc

SEQ ID NO: 22570 - DNA, 1203 bp, Mus musculus
tacacagattctctgcttctttgacactcttgttagatcacttctaggaatttctcagtttcaactaggttataaaatcggttgctgtacaatcatttatagttgttatgttttaatttgtgtagaattgaaggtaatctctccattttaattatcatattctgagtattccctcttgcttcatctgtgactgtcagtggcactggcttgtcgttgcaagtctcagagtgctggggcaggaggtgtttcagactcattgggcaacataaagatgtctgaaaaagagacgggagcctgggtgggtggtgatggtcaggggcatgggctggaggaggagaagcctggagtagtagtctctggctttcttgggatgctgtgcccagtgtggcatcttcactttggagtctgggcacaggtaatcgaaacccattgtttttagtgctgctgtctcggatcttcatcttgtaggctatgctggagagagagaagatgatctcctgcttcttacctgaagtctcctgagctcttctgtttccttttatttctgttttagacgcggttgcatgtattctactctgaccttagacttgctctgtagctgaaggtgacttgtacttttgatcctcctgcctccatatcccagatactgggattataggcatatgtgtcaaacccagtcaatgcattgctggggaccaaacccggtgctccctgtatgcaggcaagcatttactaagtcacatcccagccactgcaccttactattctctgctgaatagtgtcacattgtgtctccacctccaggttgcatacttttaccatcaaagtgatgttgtttattcagtgaattatatcaaaatctgtgtcatatccaatcaacatactaggtgtcattctaatgttaagcatcattcatttgcacatcataagatacattgtatgctgtgcccttttggggttactagtcaggtttgggaagccccacccttctttatgttgagattgggtctaagttactttgcttgccttcagagtcactcaggcaggccttgagcttaagattctcctgcttcagcccctgagtagctgggattcattccagctttgaagtcagcaagatgtctcagcaggaaaaagctcttgccatgtaaaggtggcggagagagtcaactccatggagttgtcctctgatctccatatgtg

SEQ ID NO: 22571 - DNA, 1414 bp, Mus musculus
tgaaattctcagttctccagggtgtcagaggtgataataacgtcagaatgtcagagatactcgtttgctgagcccattcacagctctctcatcatgaaagtatttgctctcacatcaaaatagagtgaccagcttttgtgtcaactttacatctttaatcctagcccttaggggctggggcaggagggttcaaagcccacctatgttatatgagactcagtctcaaaatgtttatatacatatataaattttatttatatataaattatattgctgaagggtaaaggttttcttccaggtctatttttgtctatgagatctatcttactaaagagatgctgaatactgtggttttacaaatcatttaggataacccctttcttatggttgtgctaccaactatgtaaaaagttatgcttatgccattttttccacttcgcatgacaatacctctctctctctccaggtaggaagagtggtgtttctcctaagaaatcaaagtacatgactccaatgcagcagaaactgaatgaagtgtatgaagctgtaaagaactatactgataagaggggtcgccgccttagtgctatatttctaagactcccctctagatcagagctgcctgactactacctgaccattaaaaagcccatggacatggaaaaaattcgaagtcacatgatggcaaacaagtaccaagacatagattctatggtagaggactttgtcatgatgtttaataatgcctgtacctacaatgaaccagagtctttgatctacaaagatgcccttgtactgcataaagtcctccttgagactcggagagacctggagggagatgaggattctcatgtccctaatgtgacgttgctgattcaagagctcatccataacctttttgtgtcagtcatgagtcatcaggatgacgaagggaggtgttacagcgactccttagcagaaattcctgctgtggatcccaactctcccaataaacctccccttacatttgacattatcaggaaaaatgttgaaagtaatcggtatcggcgacttgatttatttcaggagcatatgtttgaagtattggaacgggcaagaaggatgaaccggtatgttttcaaacccatctctttatgataaatacatgtgatttttaatgcaaaacagatgagagagttatgctttgataaactttctgcttaggtacatggttatagtaggtagccttcctcttttttttcttcaaaatatttatttattattatacataagtacactgttgctgtcttcagacacaccagaagagggcgtcagatctcattacagatggttgtgaaccaccatgttgttgctgggatttgatctcaggacctttaaaagagcagtcagtgctcttaccttctgagctatctca

SEQ ID NO: 22572 - DNA, 1221 bp, Mus musculus
ttttgttctgtagaatggttgcttaaattaatgtcagtttgttttcattcagaaaggccatattgaggctagctatattggtgaacacatataatcccagctacatgggaagctgaggcaggactagaacacttgagcctgtgaattcaagaacaggacagtttagtgagatcctcccccacctcaaaattccagctacagcttgaggtacagactgttgagaatatgctgatggtgctatttttcctgattcctctctttgaatgccactgtggtgctttatccccacagtcccagcagctagtgcaagaggaccccaaatttgaggctagcttgggctatgtagagagaccctgtctcaaaaaggggagagggggaaggagggaagagactggattaaatgtattaatttgatgtgttgtttgaatgtttttctgacaaccacaatcttttactgagtgtcttttatttacttatttttaacccaagaagctgaaaaaagtgaagattcctcaggtactacaggcctctcaggcttacatcgtacatacagccaggactgcagctttaagaacagcatgtatcatgtcggagattatgtctatgttgaacctgcggaggccaatctacaaccacatatagtgtgtattgagagactgtgggaggattcagctggtaagtttgatttaaattgaaggtcaggtgctagaaagatggctcagtggctaagagcagttgctgctcttgccagggtcctggcttcagttctcaatccctacatcatggctcacaaccatccttaactctagttccaggtgatctgaagccttcatatggcacacacatgatacacagtcatacatgcaggcaaaactctcatacatgcgtgttggatttttgtttgtttttaaagagttacttattttgtattagtacactgttgcatagaatcccattttaaatggttgtgagccaccatgtgggttttgagaattaaactgaggacctctgaaagagcagccagtgcttttaactgttgagccatctctctagccccacatgtacatttgtttttaatcctaaaaaatggggggtgggggggggatttctttttccatgatcatcaggaagaaaaaaattttaactcatatttaagccttttaacaatagctacatcaataaatttactgttcagtgtatcagtaaatataattaaccacc

SEQ ID NO: 22573 - DNA, 2994 bp, Mus musculus
taatttttattgcattttattgtacatcacacagccatttttatataaggacacttttaataagctatttcaaatttggttttgttacattaagttgactatcaaatacacaaaagattttttttgcatatgtttcctttgtttaaaaccagtttcataattggttatatatagtaatagttttatctttacttgttaaaggacttaaatcatcaaaggttttggcttggcttagggttttcgttttcttttttataaatatatattatatatatatacacatataaaagaaaaaatgaaaaaaaagtttacaaatttaagttgacaatgaaatgtgaagttggtcctagtttacatcttagaggaatgtatatgtatgttttacatgcctaaatatctgcaggttttcttacaggtaaagcgaagtgctttgaaaagtttagattatacatgtgtgacagatgcggcatatttgctctattaacacagaggcttactatagaaatctaaagtcaatgctgtacatccatccagttagtgtaactgaagggaaatgtaactttgtgctgagttagacatctgtattgtcagtgattcttgtagaatatgtgctcagatctgagttatatttagttttggaaggtaagttgaagagtacttttgatcagtttatgattcagtttatgattttagtttttgccttcatgttatacatttatgatttgaaactgtacatctgttaccttgaaaaacattgaagaaagtactgaagtgtgcatggaggtggtttaagcataatacttaacccaagaaagagtgtaagtggacacaagctgtgcctgcacatagctgtgcagggtagactgcctacatacacatggccgggattctttatttccttgttatcaattatagtgctttgtttgtttcagggttggaattctcaaccagaaataatactttctaaaatattttaaaattcagcttgtgctttggattatagaaggaaattatactttaagaaaatgttcacaaaaaaaaaaaaaaaaaaaggactattacagatcccaatacttggatttggtgaccttgtctttctttcttttcttgagacatggtcctactaccaaccctggctggactggagctcagtgtatagaccaggctagtctcaaactctgcctcttcctcccaagtgctgggattaagggcaggtaccatagtgctcagcaaccacaaccctgtctttccaacacggccctagcgtaagcactgaggcagtgtgcagtgctcaggcagcagcaaacatttcccgggggtggttttgaacctgcttgggtggttgtgtggtgctgacgctgccactgccctgttgttcattgagaatgattgttaaatgacactcttcctttagaatataacggatcagtactcatgtttaattgccatgcttaataaatcatgagaacaaaagagtatagaatggaaagcattccctggtagctactttaaatacaggagccctgtaacttaataccagtagtcaaccactggatctcagttttcatcaagtattttaaataaataatcttaaattttaaaatacgtactgcagagtatgccagtatcttattgttaaaactgaatcaaataaatcttcgattcctggttatttggaccattgactcatcatggactatataatgtaataagattcttttctcttaaggtatccttgaattacaccaaagaaccagaaacttaattttggttaaattatttatttatttcatgcattaattttctttttctttttaaaggtttagatgaggctccttagggagtctctaaaaccgcttcactatcagcaaccaggagtactagaagccagagcactcttcctcctggctcctccccagtgctctagtgctgtaggaaccaagagccagccccaggttccccgaggcagtaaaaatccagcacagggggctgtgtccctaaggcaagccctgattacctttaaaaaaaaccaaaaaaacaaacaaaaaaaaaaaacctaattaactaaagcatttaaggcactatttattttagaatcatgcttttgaagagcatcagtgattacttagggtgtaatatgtaaagatcagacatctccaaaaacagaaaaagtacaagtaaacaacacactttctcatgacttttaagaactgtagtaatgtggcttaggaaatataatggcctaattgttttcaaaatgtaagttcctgtgaagaattttgtttatattgggttggggacctataggtttaaaatagaatgtcagtcagctgacttaaaaaacattggttttactaagtctgccttccccttctaaggaagaactgagtgggtaagggacaggtgtgtaaaatctccaaatggatgttacagctttcagcttgaacgtttgtttccagacctgattaaaatttggtttattctaatttctgtactatatcatctgaggttttaagtggtaactggttctataccatgtatgtatcatatgtttgttcatcaaagctttttaatccaaataaaaacaacagtttgcaaagtgatttggatcagccaggtttggtggttctgtttaaagtgtgtcaaatgtttggagcagactgaagacaattcctacaagccctgatttcatcacgctgaggctgctagtttatgtaagaatacacttctggtcaaggtgagctccaacatggagaccccatgcagcctgacatccccaggactctcaggatgagcagcatgagcaggaacaaaacaagggtttcaaaaaggaaggacacattactgcgggtaggaagggagtgtctagaagcagaaactgtgaccataagacaagtggtccaggtaaacctttagttttacaagttcttaaaatgtgtcataatttcagtagaaaatgatggtaaaatcagcaagctgttttcttctaacacc

SEQ ID NO: 22574 - DNA, 1115 bp, Mus musculus
ggcacggctggcgcacgggagccatcatccctgagctggagcgcgagatccgcatcatcaacacggagcagtacatgcactcgctgacctggcagcaggctctcactgggctgctggagcgcatgcaggtggacagagggggaagctgctggatcggagccgcagctgtggctgcagggggccggggggggggggggtcggcggggactgcacctcctcggtctgtgctcaccaccaccccctgcccccaccgtgtctccccagacctatcaggatgcagagtcacggcaggtgctggctacctggatgaaggagcggcaagaactgaggtgagcagaaagcagccatagcagagagcctgtcccagccttttctctgtctgcacgctggctgcctgactgtgcctgactggcgtgcatcgcgtttctctccccagatgcatcacaaaggccctattcaacgcccagttcgggagcatcttccgcaccttccacaaccctacctacttctcccggcgcctcgtgcgcttctccgacctctacatggcctcactcagctgcctgctcaactaccgcgtagacttcaccttctacccgcgccgcacacccctgcagcacgaggcacccctctggatggaccagctgtgcactggctgcatgaagacaccctttcttggtgacatggcccacatccgctgagggcacttttattgtcctggacagaccattggccccctcagccaccctgacaagcaataaaaatggtctgtgtcttctcagagcctctgcttcattccagctcatcatttgaccttgaggaccctctgggtgtcggggaagtcctcctccaggactgaatcctgcagagagggaggcaggatgcagctaagcaaggctaggcccagggccagtcctcacagacccagccagcacacttcccaccccacactcacatcaaagggttcacaaaagatgtcactgctgccaaaaacagggttggggacagaaaccagggttgggctggtcccttcttgccatggggagaagtcatcgtctgcattatcttctgcctataagaggagtattgactggtaagccccccccacccccaaacaa

SEQ ID NO: 22575 - DNA, 1320 bp, Mus musculus
accgcagagggacagataccggctagacgatggccgccgggtccgggatttggaccgggtgctcatgggctactatccctacccacaggccctcactcttgtttttgatgacacacagggtcacgacctcatggggagtgtcaccctggaccactttggggagatgccaggtggtcctggcagggttggccagggccgagaggtacagtggcaggtgtttgtccccagtgccgagagccgagaaaagctcatctcactgctcgcacgacagtgggaagctctttgtggcagggagctgcctgtggagctcactggctagtgcacgccatagcagccctggcctcctgccatgcccagcctagcctggtgcccgtgaaggcagggaagcggccttctgcgttctttttaaggtctttctcctctcccttggttcctacattgattgcccgtggcccccacacatgtgaccagctcccacagagactgtgaacatgtgtgatcagttaatcctaacgctgggaagacatatgccagccccaccagagcgtccttgtgctgttagcgtcccttgtgtcgcctgcctctgaagtggcatggtcagacgcgccagcattgttttgtctgtgattgatgctgttgttagcgtggcgctgtggacctgataacccccacgtccttttctgaagtgttaagtccagtccttcgttgctgtttgctgtcattgtgggcgtgccgctgctaattacaaagctggtagcagagtacacaggcaagctcccacgttgtgggcttttccaaaatggaggcctcctcaagtccagagcagaggaggccctatggggagttcccaggtcatgggtccaagaggagccagtacaggggacctagagctgccagcaccaagtataattcctgttgcctacgttctctattctaataaaatggagtttgacacaacatgagtcttcaaggttatagagaactggggtcccaaaagggcttcaaccaaaggaatggtcagcagggggagattggagacaagaagagagagaaggaggggaaggtgggagggtccccagagcagagcaatgctgagctgtggtcaaacctggggtctaggtaaacaatagaaaccatcttcagctggaagtggtggcgtacaccttagttccagcactcaggaggcagactcaggtggatctctgggttcaaggccagcctgagttccttccaggacagccaaggctatatctgtctcaaaacaaaaccaaagaacaacttcattttatcccttccttgtctgttccacaccggtgtcag

SEQ ID NO: 22576 - DNA, 1096 bp, Mus musculus
aacgtcggccttttcgaccagtacttccggctgacgggtgagtgacgtgatgtgttttgtcccagtttgggtgaaggccagtgtcaccagtggccttccacctcgcacatgtaggtacactatcacgtgacacatatatctccacttacaagccagccactcgggtaggaggaagcggcttcgggaagtgctgagatgacaggactcccgccccacggtttgtagcaggagctgggtatacagggaccagcagagtgggccctgaacttaggggcaggatgtttctgactcatacttcctgaaaggagaaagctaagccctttccctaatgcctctatccccttccagaaaaatgtttcagcccttcctgcctgagatagggtcatctccccaggccccatgatgccctcccacatagaccctgtgggtcctggttttctgtgggggccttgcagggacgggaatggtggcctgtgcctgtgaccagccccttcttgtgcaggctcctccccgacgcaggtggtcacgtgcttgactcgcgacagctacctgacgcactgcttcctccagcatctgatgcttgtgctgtcctccctggagcgcacaccctcgcctgagcctgttgacaaggacttctactcagaatttggggacaagaatacaggtaccctgtccacccccagaaccctcactgcctctgtccccacctttcccttgtctctgcctaactgaccaggctttatggatcattttccatggcagaggttccatcccagcaatccccaggcagccagcagacctctctcagtcctgggctctagcttgaagcaccctcgactactctcattatgtggggctgctgtttcttttgactgcaccacaggccagctcaggccacaccctggtgtttctcttcctgcagggaaaatggagaactatgagctgatccattccagccgcgtcaagttcacctaccccagtgaggaagaggttggggacctgacctatattgtcgcacagaagatggctgatcctgcaaagaatccagccctcagcatcttactgtacatccaggccttccaggtggtcacaccac

SEQ ID NO: 22577 - DNA, 1132 bp, Mus musculus
tcactgttcccactaacctctccgtgctccaggccgaggaagggaagctaggaccgtggggcttgatctagttaaggaatgaggtcactcacctaggactagctgcagtcagtagaggctctttgtccttccccttagtgtcaggagcaaggtgatgatccaaactgaccatcctcatttgtcactgggtgtgatgcacggaatgtgactaacatatctatcttctgttccgtgttaggcctttacacttaattgctttacttggcccaccaggttttaaaatggaggaattgaggcccagagagagcttaggttcccagtcacttacataagtggcacataagccacacccaggaaatgggatagccagattttgaacccaggttttggtggacgattaaccaccagagctatatcgccttctgttgaggctgattgagccaccgctgcccctggaagcctggtgatgccttgcctcctggttcagctgccaaagtcaaaaccacagctagtggaagaggttgactgaaggccttgcttctaggatggagttagggctcctggaaagatgtatagcagagacactggtgctgcctcactgggctctgctctgcctcccttggaaggggcagccttgcctatagcacaagttgggttttgagttatacagagacaggaggtaaaaaaaaaaaatctaaggaggtgtgtggagctagtcacccataccattccttcctgataatgggagccagagctcttctccagaccttacagggctgtcaaggaggctgaggaaagctgggtgcacagtgggtgtgcaaggatgcctgactctggctttttggggagtggggactgagtaccttgcagctattgtgagttggggttctcttgtcacaaaaaatcatttttccctttaggtttatgtcatccaggttaccgatggcaaccatgagtggacgatcaaacaccgttacagtgattttcatgacctacatgaaaaggtaatctgaagaccttggcacctgtatctcaaggggtggggcttgtgggccaagtctccattgtgccacatgttaattttagggcaaaactgcctccacatctattgcttgtaagttttaaaaacatt

SEQ ID NO: 22578 - DNA, 1865 bp, Mus musculus
ttgatgaccagcgaaggacccacaactatgacgagtttatctgtaccttcatatccatgctggctcaggaaggtgaggaggtgcctactatgtcttaattgtcctaccctcttgagggtcatgtacctcaaactcctccccctccctcccccaagacttcacctttggccgatgagactcaagctcagggagggctgtgagagcctgggagacagccacctactaaggagtttcctgctttacacaggaatgctggccaacctagtggaacagaacatctcagtgcgccggcgccaaggggtcagcattgggcggcttcacaagcagcggaagcctgaccggcggaaacgctctcgcccctacaaggccaaacgccagtgagaacctctggccctgactctgcagcctctcttgccgcaaggccctcatcagggcccttcactgtccctcttttccaagtattactgagtagttcaacgagagcccaggtcctgggagtgggagtgacatgtattctgcactgtgctctggggtctggcagggacaaggcagctcctcaatgctcaggaagcagcagctggaactggagggcatccaccatggcctccacagccatctgaggagcagcaggacctggcctttctgcctgggcagcaggatgtacattctacctattggagatgtttaggttttgggcttttgtccatcttgccactgtattaacatggcagcttcctgactctgctgtctctcccagcagctgtcattctgctgggccaggtctcttagaatacatcacagtcccagctgagaaacacaccaccactagcctgtcctcgttgggaagaagcttggcctacacttcattcctctgggagagcaccaaactcagggacctggctgctgagctggaatgggcatggggtatcctaataggatgtacagcctatcagggtcccacggctatagtggagacaagtgtttgaactgtcccagtggcatgcagactgtcctgttagtgagtcagagcaaggctctggggctctttgccttcagtgttgtggccctggccatgggtctgccttaggctcctaatctctgtctctggggcccaggggagcctcgacctagcccctcagtattaccatgtcttctcttaggaatatcagaggcagggctgcttgaatggagctggtactattcaattctcccgactgtgccagcttccttgtcctcttgcaaggtactcagggtagggacagggttgagaggagttagaacttctgtatccccatagggcttggtagtaagtacagcactgcttcaaaatccagcccccaaaagccctgtaccctctgctagatacaggcgatccaagcaggccccttatctgtacatagtgactgtaggggacccctctagtttctgtaaatattgaatcagtgagtgaataaaaatgtgctaataaatgatcttctggttgctatctcgaggtcggtaggctgggctgtggtggaatgagagactgactagattctggcctaaagctttgttgatagtaaggtagtatgtattcctgaagtagaaataactggttgctatggtaggcctgggatgggatttaggacctaaaatgaggggaagatttcagatgggctgtggtcaggtatattgaattgaggtatggggctctggctcaaagctaggctgcccatgtatctacctggtacctttttggagagtttctaggatctgagagggtgtatgtctcatcccttatggcatttgggcaggtaccgcaggccagagctgtctctgcttctctctaccttactattctctgctgagaatgctctagccccttt

SEQ ID NO: 22579 - DNA, 1194 bp, Mus musculus
gaagatgtggctgagaatattctgctccaggttcccgggcctattgaattgcaagaggtgacaaaaaagttccctgtgctgtacgaggagtcaatgaacacagtgctggtacaagaggtcattaggtaatttcttgccacgcctaggcaaactgagtcaggggccactgctatagagaaacagcgggtgttactattagccagctgttgtgctaagtgctaaacatctgtcctctaattcatctgtttattatcattttatagatgaataaactgaggcccccaagaacattggctgtcttaagtcacagatttgttaagggccagggctggtactgtacccagttctgcacttaagcttctgcgttctatcactgtctgtggtctcaaatggagagccaaccccagcccactaacaccctgccactgaccccacaggtacaacaagctcctagaggtgatcacacagacccttagtgacatgctcaaggcaattaaggggctagtggtaatgtccttggagctcgagctgatgtccatcagcctgtacaacaacactgtgcctgagctctggaaaagcaaggcctacccatccctcaagccactggcttcatggatcatggacctgctgctgcgcctggacttcatgcattcctggatcaacgatggcatcccgcctgtcttctggatcagtggcttcttcttccctcaggctttcctgacaggcactctacagaactttgcccgaaagttcgtcatctctatcgacaccatcacctttgatttcaaggtctgaagtggggaggggctttaaggttggagtcatcctgagtaggaggtgaaaagatccaggccaatagtcagagggacagggcagactataggtcacagattatagcagataggtgatgggcaggcgacagctttagggagagagatccacctcctgatacaaatcccaatcttgtttccaatgtgggtctgtgtgcccaccacaggtgttgcccgaggcgtcatcagaaattaaggaaaggccccagacagggtgctatatccatggactgttcctggaaggtgctcgctgggactccatgaatttccagctggctgagtcacggcccaaagagctgtataccgagatggctgttatctggctcttgccagaagctaaccgaaaggtccagaaccaggactt

SEQ ID NO: 22580 - DNA, 1459 bp, Mus musculus
tggatttgaggttgtagcagtttccataatgggagatcctggtcctcatggctttcagaggaaatctagtggtgactataggtaacattgacattttgtgttcagtttacactttgtggggcatgatagtctacaaaccttattctcattttccctgaatataggtgtggattttgctacttagaactggaaaacatacctgctgggatctttaatatcatccctagtacttttttgcctaaacaagaaggaccttttttcttggactttaatagtactgtccccatcaagacaacacaactccaatgattgagaactctcagctattactggattccatatttcccagtctcagctcttcagacaaggagacaaatcacgatggtgaaccatcagaatggaattaaatcaaaagcatgttacggagtctggtgctcgttgtggtgtttggtaaggattttagatagtggaattaccttaatcacctgaaatactgtttacatggtttgtgcacacagagctggcgtgtactcggtggcggctctgtgtaaatcacaggctagattcagccatcactgggagatgctttcgttaataggacacgaggaggacaatgaggaccacaggtccactgagtgcaagagcagcctagtttaggatcttgaaatacctatgtttcctgtttttacagagcacgtacgtttagcccatttatgttgaccccaccatacatcttaaacaactaattaccaaatgaattaggtcactgcaactaatttgaatttttcattgtgtctttaatgtttattgtcgtgtagctgttaagctttaaaaaccgctgtttagcttagcatggagatgctcaggcttaagaatgaaggttgtcagtgttaggtgcattgtccattgtagagaggaccgaagtatatttactgttgctgttcttagttcttagcaggttggtgaatgtagcaatcagatggaaatgctgaggtttaaccgtagggttttaattgctctgtagtcagtgctttcatcatggggacttggggagtccttgagaatttagtatatggtgactgagttatacagcattcataaaaagtgagtggtcaggaattagtgtttacataaaatcatcactgcagaatgatgctcaagattttcaagttctggaaaataggatgggatctgtcattgtctctactttataattatcaaatctatttctactgcctttgattgaaataaaatatttatacttatggaaactatgtagtttaatgtccagaatttgattttacgtccctgtaaaagaagacagacatgcatagaaatacttgctgcaagaataaaaccaataagatttcacttggctaaaattagccacatgagcttactaaatatgagttaatttctgtcatcaaaaacataatagaaagctgtgaggccactcaat

SEQ ID NO: 22581 - DNA, 2343 bp, Mus musculus
cacagctaggaaaatggacgcacacagcagggaactgccagtcactgtccctgggcaagcttgctcacgaattcctctttttgaattacacttgctggcttcagattctctggcctggaactttctattggattctgaaaaaacaaaagcattgctggcattcagcttgggttcagactcgggcagttccagctgtgtgtgcgcgttcagctcatctgaggtgtttgcttttgtgcagatccatccctaggttcttcattcccaggatgttagcagagggtagaaatcagagggatgtggtgaagaacttctgagcacattagccagcagcaaggctccacaggtgagaatccagacaggagttgggcagtatggaacagtctttagaagctgtttgctttgtgctgctgttggtgcctgactcccagtctcgtgggttatttttatagaagagaatcacaagattgccttttgctgtgtgccatttccaaataaatgttcttgctggaaactggtcactagtcagggttgcacattgaggaagtatgtggtgacttatgtgtctgcccatctctgtggtctgaatgaatatatcctaggaaatccctgtctttctgctttaagacattaacaatgctgttctttcctcctgcatagtggaggaaggtggtctggacctggtggggccgtaggtcatatagattagctttatggtcgacacaccatacagatcagctgatccactcagagactgaagtgaactgagatgggtggggccattgcccagcagcacacctacacgtctcagcacaagctcagatgcagagtgtgcacccataccctctgctcagtctcagcccactgggagatgctctatggatccatggcaggtggaacctatttaaagcaaactgataattgctttataattctttggtaatgctgggtgtggtgccgcacgcctttaatcccagcactcgggaggcagaggcaggtggatttctgagttccaggacagccagggccatacagagaaaccctgcctcgaaaaaccaaaaaacaaacaaaccaaccaaccctctttggtaatgacagctcagggaaggtgagggttgtgactgggtgacttgagttgtcaccagatgtgggcattgaactgtttttactgctcttcgctgttcagactgtggcaggctccaggaacttgaactaaaaatgcctatttaagtctccccttgccccgcttttctccaaaagccttggtttgtgtagacagagctgtggtgttggcattccagttggggactgttgccataggaagtacttgcatgtggcactgggcttgataaattgagctttctgtgcctcagacgatctagtcacccggcttacccagcaccacaggtccttctgtagatggctccaggttttgctctctgcacaaatcctccggtgattctttctgcttcccccactagagtaagaaagctatttttggaaatccagaatgtagcctcccagatggcttctcaggggtatccttgtgccaaccaaaggactccttcctgtcgctgtgcctttgctgtcccctcctcttcacccactctaaacctctctccagagcgcctatttcacaagctcttcatttctttcaacctatgggtaagccctggtatatatacaaactaccattctacctggtcttggttagtattagtgcctcaaaagcaggggctgtcatcacggaactagacatgcaggtgctcctactctggttgggaaagagatggagacaactactagtgaagggtggagggtaaactgaaacattccaggcattgagacaaagctggaaatctgtacgcagtgcccatgcaggtctctaccgaatctgtcaatgacctttttttaatttgctctatgcaatgttcacttgggcaaggtggaaggactaattctacagagatgccatggcaatctttgaaaaccattgggaaaatgcaatacagataaactagagattcgtataatgccacgtgttagcttgtttctgtagcagaataactctctgcggtgacgtgctggagtgagagggaaacttgaaaattccaaagtccttccctcttttgagagactggttgtgtgtgtgatatttattaattattttaagagagaattgttttgtagatagatatgtattaagaacagccaaactggatctttccacttggcaaggaacagaaactttttgaaactcaggccttaaccagtagcttggaagaccaactcaagtgttaggaactgtgtgtttttgtttcctgttatttctgtcttagattcttt

SEQ ID NO: 22582 - DNA, 3246 bp, Mus musculus
taaaattacagctaaattttaatgcaataaaagtttggtataataggcattatgtacacatcaaattgccaaggaccaaataacatacagatttttttattagaactccattttgtggaaacggaaatagatgaaatgagaagtcgtctaaagcaaacttcagtgcttctgaaagtgaggccagattcggtttggtgttggtttttataagaaagcatctactgtattaagccatgagaggaagcagatgtatttttacattttttaatataaaagtttttaaattccactttttatagacttcagaaccagttaactgggtgcagcgtggttgaaagtactagagacagacgcagatgaagtcagggctgttgcccacgattgagtggtttgcttttaaattgaattgtttttgtttaaggaattccatagaggaaatttttaatgaatttaaaaaacagactatttcacctcttgtaatgcagcggtcctggagaagggacatctgagcctctctgtgcgcggcacacctgcatcacgttagttactttgggacctctaccttttttggctggaggaattctattgtcatttattttaatctttgaactttaaaaacaagaatcaaaattttaaaaagtttgaagactcttgttatgaaacattgtcgaaagctggttgtgaattctatacaaactgggattgtaaatgttttatgtaaaagaaaatacttaaaaatgtacctgcttcctctcctgcgtcctcacagcactggaaggttcttgaatgcatcctttcctttgttgttgttgttgttgttgtagtcgtttgttgttttaagacagggctctctatgtgtagccctggctgtactagagtttgctttgtagaccaggctggcctcgatctcacagagattcacctgtctcagcttcctaagtgctgggattaaaggtgtgcaccaccactgcctggcttcagatgttttctttataaaaatcaacatcaaaccatttggcttccttctcagaagcattggagtttgctttagatgatgactcataacataaacagaatcaggtcatttggaaggcatttctgtactgggcaagatttaaaatacttcaggctttaggtcctcctgagatctagagtagcgggtgtgcagcttcttactgtcagagcttgcctgccaaattgaagactgcctttcaggtaacagagaagaggctgacagtaggctaattttaaattacacttttctgtggttcttttattgtaactgtcactttcccagtaacaatgattttacattggggggaggggtcttactagagctgggtaaagttccatacattgcaacaaaatgatacccaattccatcttaccctttttgtattgtgaaactggaactttatgacattgtaaattatcagctggtttttctgaatataaagtgtgaaaacacagaacagtattttgatctatttgataattttgtgggttttttgaagaattaatgagcatgtacatagaaatagtgactgcttgaatcctgtatttacttgcactctttcagtacatcaagattcctgtatattttagagtataataaaacacagacgtgagctgtatttaatgaataatgtatttgtatctgtgcatattacttaaaaatctataaagtttctagggcattgactactagattttaagcatttttctaaaatatttgcaaaattataaatataatctccatcttttctttataatataaaggagtcgtaatgaacccttcgtaattaatagtgggagaagggtaaatatgcattttaaaagaccgtagactacatttctattgtaccttttaaaaaagaaaactcaagaggattctaaaagtataccatatgtgtgctttctctttccttttaggaattctcttctgaattccctgagggaattttctagaatctcagaattgaaagagacctgaggtccatccagtctaacctcttaaatgcaggagtcccttctccaaggttgtctttccaccttgaacacttccagtgactacctcacgagcagtccattcattgttgagcagctctgttaggaaggtctccttaatggagctgaagcctccctcctggtaacttctgtccttgggcccagctctgtcctccaagggaatgctggaaggatgactttccaccctctgccatgtcttctctttcacaggctgaagtgatttccagatggactcattagacacattgtctgcacatctattgaagtcaaatgtgtagctataaagtaacaaactcatcttttaatttatcctcatatgtatgtagagaccaagatcctgcatcactttaagtaaaacactcgggaggtggtttgtgctgttaccagccgactagaaaagctgttcctttgtggtagtttgtctctagcttgagcaacccacttcctttggtgtgcactggaagagggaaattttgaagtactatcccagaaagtgttgactaacaccagtatttggaataaatacaggagcacagcatagcgccatacgttactttatagttacatacacctatagtgtgcacaaagcattggtcctggtgggtcggttgtgtatttatcctcgcccacaaggggaaagtctgtcggcctttaatttctgtgagaaaggtgacatctaagatatgtgttacagaaataccagcttttgctcagaaacaactttgggggagataacgatgacaggtgacctcaaacagtgccatttagttcagagatctctaaatgtagctgtaaatttggggttaatttggcttcaaatattggatcttttaaatgaaataaaaatttttaatgtaaaaaatcaagtgtctttcttttttacatataaagaacttttttctttaaaatgtgttaagttacagcaggtttttagacaagttttttgcaggttgttagtgtgtttcctacagcctagaatgaattcctgagtgttcctactccacgtctaggtgctgcatcacctacaggtatgtgcctccatccccagctctgatttttgtcctttaagaactcagtggcttcttagtagttattttagacttttgtacttaccaaaatgaatctttcacatgtattaactcaacaagtatatgtttcttacctgctatgtacttgagtatcagtgggcagaatggtggtggtgtcctttaacggctg

SEQ ID NO: 22583 - DNA, 1174 bp, Mus musculus
agcctttgaaaacaaaccatgtataaacaaattggcaaagtggctggatgtattatcagaaaatatatacaagatttgcttgtgtgtgtttttaagatttaaggtaatttgttgcgaccatgaaatatgaaagccccatattttggatttcttccaagaatccagtaagaaccagtttttatataaagacggtctctaaaaatatttttcttaaaaatgtatgtatgtatgtttgtacgtgtgtgtgtgtgtgtgtgtaaatatggcatgtatattcatagttggaaattggaggcaggtggattgaggatttgaggccagtctgggctatatagaaaaatcttcgtctcaaaaaggaaaaaaaaaaggaataaaaatatatagcctatacaaattagttttcttgatagaaggagaaaaactaaatctgaatcagtaaaaaaaagaacaaaaaaattttgtatcatttaataactcagtggttttttaaaagtatatagctccttcctattcttgccttggatttctgttttctgtcacaggcctatagaactcaaataatacaactactgcttccataggagtatggaaaacaatatgggaattcctgtgagggtaggttacgttcagtagtcgtgtgtagtaatcttgtcaacatttgtaattggcaatttttttgctacctagatcttcttaatacttattcttacacataattacatgtgacttaataattaatgtcagccccatttagagacagttcatgtatagtagtgagcccagtattggttgaagacttcagtatatagcaacttaataattatggtagattttcagtgggaaggggtctataaatcctacttaatgttgtcagagaagcttagagaagaaaatattaagtagtggagataatgagcaataccgcagaatttgttttattttgtcctgtaaaaccaataaatacttgcatcccattgcccagctgtccattacttttctcattctcttacatattaaatatagcacatcattatcagccatagtaaacacaaggagacttcagttatgtgagtgtctcctgtggttttagtgaaagtatcttagaatatctctcagactctagaggagaagcagcagactggggacactaacaaggcagtttgataactgcgct

SEQ ID NO: 22584 - DNA, 1163 bp, Mus musculus
cctttccaacattttaggttgcagggaactttgtagtttcttttttgaggtctaacactgtattcacattattaaaacataatttaagttaatcacttgctaatgatatataaaactttcttttgcattaagttttaaatctccattaaaagcataatggacacatcagttgtgtttgtgttatctgtaaagctcagaatgtaacgattaaggggtacaataaataatcttatctctagccctaaactacacatatattaaaaatacacatatcccagtgtgatttggccatgtgtttagtacttttctgttagactatctttcccagaggttgcttagtatttaccatgttatgcaccctgcagtgcagttttgtgatgatcacttttccctttagtttttccaggcttagaaaacttccagctcttaattattccgagttaccatacggaatgaaggtcaactcttgtacagagtgttctgttctaggatacaactctaatgattaacttgaaggacgttgaggttgtttatgtgagcgtgctgcagctgccttggacacacactagaagagggcatcagatcccattatagacggttgtgggaattgaactcaagaacctctggcagagcagtcagtgctcttaactgctgagccatctctccatcccatgttgaggttgtttaatgtcatccatgttggaggaaaatcttaggttatgctaccagtagcccttcgttttacatggttttggcctaattctggcaggaaagaaaaagctatcactttatactccagtagcgtgtgtgtgcgtgcgcccttgtcagaggctgtcattctcaagcattctttaccttatctagtggaagcagtctcgcacttgaacctagccagcttgctccaagtatcctatctctgcctgctgaacactgggattataggtgggctgtcacacttgttggacatgtatgtaggtgtcagggatccaagcccagtcttcacacttgcacagcaagtgatttacctggaagtcatatccttacccacccacatgttattaaatggagatactatgttttatgttggaattatgactttggttctgttttcaccctttatttggaaaacagggcaacatttaagttttagattttttaaatga

SEQ ID NO: 22585 - DNA, 1135 bp, Mus musculus
ttacacctataaaacttgcaaatacaaagccaacagtaggagatgggcaggccagaagcaactgtaagtgcagtggatctcgccagtctgtgaaagactgtacaggctgtcaacaggaggaggtggatgtgctaccagagagtcctttgtcagatgttggtgccgaggacattggaactggaccaaaaaatgacaacaaattgactggacaagaaagcagcctaggtgattcgcctccatttgagaaagaaagtgagcctgagtcaccaatggatgtagacaactcgaaaaacagttgtcaagattcagaagcagatgaagaaacaagtccagtctttgatgagcaagatgatcgttcctcccaaacagcaaataaactttcaagttgccaagcaagagaagctgatggcgatcttaggaaacggtatttgactaagggaagtgaagttagattgcatttccaatttgaaggagaaaataatgctgggaccagtgacttaaatgccaagccatctggaaactcttctagccttaatgtagagtgtagaagttccaagcagcatggaaaaagggattctaaaattacagatcatttcatgagaatttccaagtcagaggacagaaggtaattccctcaccctccctgtgggagcatcccttatagcatgatgcagttttacattttgtagagggaattaagaaagtgatcatttatagtaaattatttgcatttttagtaacaatatatgctaaactaaatttaagtctagatttcaaagtataaattctaaaaagcaggagcagaaaacaagaaggaatgtttaattggtagtcagggttagttttcatcggctttgttatggagtttgtgggcattattaaaagatgaaactattttgttgactgtagtgatatttagcatccatctagggcttttatctctaatgctctgacagcaagcatgtaatactatattttacaaatgagaaaactgagatttggggtgagtgatttcactgagaccctataactggagatgatattactcggatttttttcatgtatatttgaatatgtatttttgctgttgttccataaggaattttctaaggtattttttgtaacttaggatact

SEQ ID NO: 22586 - DNA, 1142 bp, Mus musculus
ttatgtagaagttatcttgtttttaaaccttgtaactgtctggactgcccttctctctatgtggcttttattcctccttcaagattcagttcagagatcaaagatcaagtttttagttacctctgcctgtctggatagtattcttgagtaccctgtacctgcctctgcttgtgaggtggtgtgttttaatgaccctaatctaacaaacaacaagaatgagttcctaaccactgatgtgtctgttatagcctaccgttcttctctctgtgggagtttctaggcagggaagtttatgcaggaatgaggttttggggagcctatacctcatgtatagaaagaatgagacttgaacactgtcttctgcttaggtcgggtgcttttcatgtctgacttccttgcaaaaactgagtactccgagaatgctgaagaaatgaaaggcaaaatgaagttccctttcccctgtacttctagaagatcaagtacaaattatagactattttccttccccccttcttccctcctccctccctccctccctttctggtttttatttagagttacaacttctggcaattcgggtgtgggtagggggaggctagaattcagtctcagatgaggtaaggctagctacttgagtgaatatgaaaaatggtagaagtgtgtggtgggaggctgacgtcaataaattgaataagccttccttcttttatttattgttgtgttcttccaggcctgcttagttatgttaaatacctctgaccttttcccctgcttgcctttctcagcctgaacgtttatataaaggcttccaatgtgattagcattgatgcttctgaaatcacatggaaactagatggtcagtgataaattgtgggtctcagcagtgggcagcccaggaggcttttacatctgcctcttccctgaattgaaaatgctgctggggccatatggcagagtgcctctcaaaggaggactttctggccaggtttcatagcatcacttgcttctgttttaactggaggttatagtgctttggacttgatttactgtatgcaagtggagttcagtcttaatttaaagaggggtgtgtgtgtgtgtgtgtgtgtgtgtgtgtgtgtgtgtgatctaattccagtaatgtt

SEQ ID NO: 22587 - DNA, 1198 bp, Mus musculus
ataagttcaaacctgacagttctcattctatcagatttatgagactggactgtattcatcaagtgtgttgctcccgtgggagctgggtgtaaagctgagccagtgaactcagcagacaggacatggacagtggatcgtagacagaccatgttattttagcctaggttactttaaagtgtttttcaaatgctaaagtttatgtcaggaaagccttctaggcattagaaattcatactatattttcagaagtcaaatctgaacttaatactatttaagataatttaaaatagcaagtttttgttttaagtttttctatgaatataacttaatgtgcacatttttctggcctttcactctctaggaaaagtgtacaagttattgcttagatactacaatgaagaatgcagaaactgttccacccctggaccagacatcaagctttatccattcatataccatgctgttgagtcaagtgcagagaccactgactagccaggacagaaggcaggcacctgaggaacaagtgactaggacctcctctcaaagagacatcctatttgaaatgtggggtgtgatgtctgaattgactgaatctgatctaagtgtgtatataatccacatttgtaatcaaggatgcagtctcttctgcatatgcagttgtttcttgttcatcctggtggacatgcctttagacatggcttcttcaatttttcttctccttcagtctttattctttgattttttttttccaacttgatttcttgggaaaactcaagaaaggttgcactcagcttctagatctttctcttcctgtctgtgtgttgtccagactgctttggtggctagcagataccatcacacttggaggaagttacaaatccagaaatctgagtttgctgcagatttacctgtgagcttctcactcccaacccttgttaggcttgtgttgtctacattttcaattttggaagttgaagtttttcttatgttacttaatgctagtatcttttaggctaaaactattttctatttaaggcagactaatttccagtttctcttttgaaacatcatccctataagtaacggtttttttcgtccttttttccccagcgctattttagaagctggccaagaggaaagaaaatgtagaataaaaggattttcctcggatgctataaagaagccaggttcaagagcg

SEQ ID NO: 22588 - DNA, 1143 bp, Mus musculus
tgtgtggctctggatcaaatgcgaagaacaaagctgcttttgtatgcatttaaaacaattaactaagagaaacagaggtcagagtgacatcgaaaacatcccgagttccaggaagggaacattctggtacagatgaattagtgacgcatcggggtcaggaaacctaacgcataccaagcagaagagatgaaaagggaaccaaacgaattgtagagcagcaggacctgacgggcagaggggccgggcttctcataacaaggccaatgctaccagagccgggattttgacttctgaaggattttctcttgtaaacatgctatattgagaggctatgacatcgtgttctaattaaagcagtttttaaagttctttaaagcagagtcttatttcttattttcttttatttgtatgcagtagctagcccttccagtattgaaagggagcatactcgtcgtcttcctgaccataccagaaaggcttttagtccctcccactgaatatcacctaacactttttgtgtatgttaccaaggtaggaaccttcccgtctagtcctagtttcccgaaggtttaaatcgtgaacggaaactggattttcccggatgccttttctgtgtctattgatgtgatggtattttcctccttctggcagcgctagagaccaaactcagggccccgcaatatggaaggctatatgccccgcctctattttatttagactgttaatgtgatggcttgattatacgaattaaaaaaaaaaatactacccagccttatatatctgggatagattccatttggtaatgatgtacatctaaaatttatgctgttggacttaagtagctaactctctgttcaaaacttttacttttaagtcaagagatactggtctataatttgttttctttaaaggtgttgcttggttttgttgttgagggtagtgtttaccttatagcatgagctaggtgagttcccttctactctccaaaacacactctcgacagttgctttaagaccttcatttcataggattccttaggaatcatggtgtgggagctttctgtttggaaggtcattagctactgatttactgatttcttcctgtaatttgtggctgatgcttttcaaatataggtccatttct

SEQ ID NO: 22589 - DNA, 1189 bp, Mus musculus
gatcccaagctggaagcagcagatgaggtgggtgtcacactgttcctgggggacccccagagggcctggtgtttgggctgggagagtttgggacttgaactgccaggctgacaggcatggagagagtcccagggactgggctgcttgcatcaggtccctcaggcttggtaagtaggtgctgccatggaccctccaggccagccttactctttccagccagtgggactgaggcccagagaggttcagggacttcccagaagtttctcccttgagagtttgtagctgagcctttgcacccacagtccctttatcagcctctagtgacttgttggctccagagaggcatgggtggactgatggtttcctgtgcccttggcccaccctgtagcttgtatgccactgaggttcttagccatgccaggccctcagccctactgcctgccttcctctcctttgctgcattcagtctctagctaaacttctggacctggacattttgtctgtccttcctcttctgtgtccctctgctttgtctctggcctttttcattcccctccccccattgtgtggtgtgtgtgtgtgtgtgtgtgtgtgtgtatgtgtctgcatctgggtgtgttgtgtatgtgtgttgtctatgttggtgtgtgtgtgcgcatctgtgtgtgtgtctgcattgtatctgtgtgtaaccccatgtgttcatccatgtctacaagttcatctgtttttctttcaagagcgagggagggactttgtctctgaccacccagcacaggtgtttagtttggttaaagaaactggtccaggagtacccggctcatggtgccagagcaggcctggtgcccacatggctggcttccagcccaggatcttcctgcatcctgttcatgtcactcagccaccttcacaccgttaagactcttttcgctcctcaatagagaagttacaaagggccctgccccagaatggtgtgaggaattgaagagaagatttgggggaagaaaacgaaaatttttgtctgagtagcacctttttattttattttttttatttttattttttagatttgaaaacatgtaagtattgttgaaaggaaaaatataatttgaaaaagaaatgggacattatttaaagaacatttaaaacttcatccgtgtggtgtgcccgcgcatgcttgcctgcattt

SEQ ID NO: 22590 - DNA, 1174 bp, Mus musculus
tgaggaggcctacggcaggtccaaggataagaagatcctgcatataaagcactggctggactccccctggcctggtgagtgaggaacacgcagccaagtgagccctttgagcctcctttaagcattgcagtgactctggagagcagccactgcggagctagaaggtgaggcttgtgcctggcgtgcaggtgtgagctgttcctgcaggtggaggcaggccaaggtggccttagagcaagagtggcaatctgtacctcgccagggatgggggtgggtggtactggaggcgtctactaagagggtccctctggtggggccaagataggccagctgtgacctcaggggattattagggcaggtgtaggtgctatggccgaaccttttcatctgtggcagatccaagggtgtatactgatgtctcgggagggaaggaattgtagccttcctatcctaggacagaaaactaaccaggggtgtcaaagtcccctcacctcatcaccggagtatgaatggagtctgtcccctcaggcttcttcaatgtggatggggagcccaagagcatgacatgccctacgacaggcatccctgaggagatgctgacccacattggcagtgtggccagctctgtgcccctggaggactttaagatccacacaggtaaggctgctgtgtaagccccagcatggttaccctcagagctgacactgtagccctcagagagagttgttgggataccaagggagaacagagattgtggcatggccctgcttagcctcttggtctcctggtttggctcagagcctcatatgggcccgttcccatgttcctaactccactcccagtgggtatggggagttaggcatttgtggatatcacattccagctgggtgccagggtgagctcttagattggaacattgaaaagacagcctctagggtagccccgggtcatttaggagaacagagaagcttgttctaagatgtctgtgtctcttctagatagcttttgggactgcaactctcaaaagtatgcatgaggtacccactgatggcacccaagattagagctgtattctgtacacattgcaagggtcttgctgggtgtatggagtttattagctcagtctcctcttctagagtacagggacagtcctctatggaagtgtcatagagaa

SEQ ID NO: 22591 - DNA, 1237 bp, Mus musculus
ctgggtagctgaatttggtgtaggcccacagtgcaacggcctctaagtagaggaccacctgggcaggcagtcttcttcatgtgtgcgaccctacccggccttccctgagctgactctcctcctccaggtatgtcggccgggacccagcagccgcaccagccactgggaataagaacgctcacttggtgtcactgaggaggtttctggatactgccttcaatctgaaggccttcgagggcaagacattttagagtgatcttctgaaggaggttatatctggaaactctgggccccagatgaaccacatccatgtagcaatttggaccaaagagtagcgctgctggctttggtctgttatttcaggattaattggtcaggatcaaggattagctttcctcagatagaggggacatcgatgtggtgtcttgccagccctgctaacctttctggattttttttttttttttttttttttttttttttttttggtgtggtgatggtttctttagctttactagtcatgtctctagacagccactggagccgtatagggttgtgcccatcctggcagacttagttgccgatcaccttgttgtagccatttcgtctgtagattcagagatgctctctgttgtgctcttggaagtagagagtccagcaataagagcaggtaaagctcagccacaccaggagatgcagtgagatgcagcacacgtgtgcgaacctaagcaggagaccaaagcgcagaggaataaagacatgcctgagaaagccctgctggcctcctttcctaccgtggagctgggggaggggtggcagggagaagaaccaacctggagagatgatgtctgagccacaggcagggctttccagcttctcccttaccgagaacatgctgggggagctgggggtggggcgagggaccaggcctttgtacagattgtctgttgatgtgtccctttcctagagtgtctccttggaactagatgccaggacctccaggtgcagcttcatgccctgtttgggagagatatgtatggttccttctatttttccctctttccttccctgtctttcttacggaatccaaggtctggcacatgatagcatgtctaccaccgagtgacacctgtaggcatgattttatttttgttgtggtatttacagtctcacatgtgcaggctggccactctctcccctaccatccctgtgcctcttctctcttccccatcctcac

SEQ ID NO: 22592 - DNA, 1190 bp, Mus musculus
tctgccttctctcctactcttgtcattagatatttggactcttttctttctgatgctttggttgttttttttttttttttctcccaaatgttttcatattggagagtgtacaaaccattcgggcactgttcaatggtcttgctttattcaagtgtgtgtgactgggatagtgtgtcaggttcagatacagggatgctggaaccccgaggcacctctggtcacagacccactaagagctaagccctggcttgacacaccaatttgacttatttatagcttcacatgaaagaagatacacagtgtgtactcgggggttcgtttattttgctcacgattatggtttttgttcttaagaatttccagagcctctgccatctgctccaccctccttaaatcttgttcacatggtgctgtaaccattccggctttgaagctgtgccactgaatgcccacctccctcccagcccccagcagccaccaatccactccacttcctgtctgtgtatgacaatgtaggaatgtctcaccagcgaggtcacacaacttttgttcctttgtgaatgtcttatttcgcattgtgtcttctggattcttctgagtcgtagcctctctcagtgtttcctgactttgtgaggcagaaccgcgtctcgctgtgcaggtgtaatgcattgtgggtattgatggggtgcagatggtctcccatcttttgttgctgtttgcaaagctgctgtgcctgtgcacacacacctcatccatgtctccgttcagttctgtgtctacccagagctgggactgcttgcagtcagtctgttctcagttccttgaaagtcccaccacactgcatgtctgcctcagctgtaccatctcctgttcctgctagtggtgcccagtgattcattcctccaccctgagcagtgcatagacctgctcctcctcttcctcctcctccttcctcccttcttctctccctccctctctccctcttcttcccccacccctccccccgctctgtgtgtctctgtgtgtgtgtgtgtcataaggcacatatgaagatagaagactaccttgggtgtgtgaccttagggacagggtctctggctcactgctgcatattccaggctagctggccaataagttttcagggaccgtcccaccttcacttccccatcctgccctggggtcacaagcac

SEQ ID NO: 22593 - DNA, 2529 bp, Mus musculus
tgactacttgggccttgggtgggtgggagggatggggaattggttagtcattgatagaactgctttaaaaacaattcagtggtcatatttttgagtgatttttcagaaaatgtagaattcattttgtagtaaagtagtttattttttttaatttcaagtgttgtaatttaaaacttaagttgtgtttttaaacagcaacaaaactgtattgtatttttgctgtaattaactgtataatgtaaacctaattattttatcatggtttaaattttgcatatttgctttatcttatgctgctgatttttttactgaatttgtaaaatttttgtttatcaaagcaactattatgtggtgacttgcatatatcatgaattatttaagatgtttataagttttttattagaatttatttcagatgtttgttcatgatgctatccttcagggttatgtgcttatcaatgaaataaccccagaggaataagggaaaataacctgtagccagttatattcaggaataactactgtaaatgatgaacgcatcaagaaacctccaatatttgctacttgccaatcccaacttagttaaaacaattggtaggcaaccttacctaaattttagcaaacaccttatctaatggcagaataactcagagcatgtctttaaagatgctgggcacatccttctccattttgaatctcctacaccaacccaagaaaaacttaaactaaggaatgtggtatattctgatcatctgtggcatgcttaaagcttttgatcacacaaagttaagaggacacttcatgaatctacatttccgtggagatcaacagatgcttcccctgtcctggctacgagcctgcttctgtagacactgagttaatctcctcaggctgtaggtcctggcattggccacgagcctggactttccctgttggacagcttctggcctctggcctttcccagttcctgttccttagcgggtcagtctgttgagcaccagtttgtggtgtttctggccatttgattctacctgtagcattatcctgtttctactagctgtcaggaggttccaaagcctacttaaacttgtgtaggtgacatttaaatgagcaatatgccgttcatctgaaaatagtagcacacagccatatgtaggatgtcattttctaaggactgtttcttcacagtgagcagagcaggcatagtggtggttctttcatctgagtctttggttttttatatctgatttccagtatggacgttgagtagtgtaagaatggtgctgctcctgacaagtgtgtgttaactgtttacattttatatctgcagaatcctttctctgtaactgaattttcctaagtaaaatgtcatcaaggtctcattatttctgaaatgatgtctataatgcccaggcacctttggtattatctggaacaagagggatttcatgtaatgaactgggaaatgcatacttcatgagctgcaaggttgtaggaaggagcccggagccccttggagctcacaatcagcaggagtaagagcgggcacagcttggcagatttctgaaaggttgcttagcaggttcttttgttttggtttttggatttttcttcttttggttgctttttaaaaacatttagtgtacaattactttcaagtaagctattttaagtcttgttaatgtgcaatacttaagattaagatattacctttttaaacatagcaagtttatcaagatttctagcgtcccatcttttagtgattccttttctatatgtacaacatggtgcatttattttattagacaagtatgaatttgagactgttacgcctcttggttctagaaatacaaggttgaagtcaggattttagcagaaattggagcatgagtgtgttcttattttatattagttttgcatctaactggttttggttttgccgtgataaaatgtgtcactattgcacttaccagctgatatgctgtagttagttttctgtgtttgtgtttgattgctgagaagccatcttcttcattcagatttcgggtaagtaaggaatactagttgtttgattgtctcatctgttgtaattgccagctcccacttgccagcaatcatgtttcagttaaatttaaaaaaaaaaaaaacaacaagctctcaatgcttaatgtaagctgaaatacctaacagagtatacctaaaagcaaggtctgtttgttaaacatgtgcccaacacattaagatccactgtacacacacacacacacacacaaaacacaccactgtgtttaaatcttttaacataaatcctactggtacttttagagtcttaaagcatcttaagtatttttttaagaaattacaaataacatttctgtctatcagtacttattaagccaccctataatttgacttttcaattatatatacttatgatacccattgtcttactgtctaaaagttgtttagctgagaattagcattccacttcatggtttaggaaagagagccttattcttcctacatgtc

SEQ ID NO: 22594 - DNA, 1128 bp, Mus musculus
taggcacttagaaacccttgctgagagagacttccctctaactagttcccactgagtcagcagaagagatctgtatggtaataccctggctcacatgctggcctggaagtgacacacataacctctactcagtgcatccacagagctagccataaaaacctgcctccttatagaagagcaggaaaatgtgaggaaggcaaactcatgggtgttggtgagtaccgggctccatagcctgtggttgtctgacatacctccgttctctgtcccacacctccttaatgtggatacaccttagtgtctgtgccaggttcagatgttgatcttctgagcccagaagcataggaactggctctgtcttccctcctctcaagttccttctatagaatagtcaggtggttccagggtagtcaagacagtctcattggaaattgagaaatactgatgttgatttattagttgcatttgacattatgctggatggacattgtaagtgttccttcctctggaggtaggagtgttccctcttgaggagctggatctgatttctgcacagtgcaacttccccgctgttgtccacattacctgtctgctccctatggaagtcttcctttcctcttatctcccttaaatagatcttaagtgagtattgaaggctgtgtactgaaggggtgctcagctttcttggcctgcttcttatccctgaaagatagggacacaagtgtgttctattgttgacattttggacactctttgttgttatcctgtctttgtaagttacttagtaattttgacaacagacttgagttgtgttatttgtggttcagtttattatatcagtaaccttggtagcttttgattgtatgtctttttaaagcatatttgttagctgacagtctatgtattattggacttacttgaaactcctgagtctaccttcaagcttccaggcttccaagatgtccatgatttctaacaagctattcatggcttacaaaagcacagtgtgtactcagggtctacagtgttggcccatgcagcattactacagacctcaggtcaggttcagtgttacttccagggacatccttttcccatgctatgaagtagaagaatagaaactatgct

SEQ ID NO: 22595 - DNA, 1152 bp, Mus musculus
tctattgtgttttgagatcagcttccaccaagtacctggtcagttagaacatgtttatttcattcattcatttggcaacagttagtgctgtatccaggtggagaagatgtgaaggccaagagaaagacccttaaaaattagggtagtatggaacagaatagatgtgcctttaaatgagacgattatgtaagggatgtatgttaagtaaggtatttggctcatttgactggaacttccaaggatagtgttaggaagaatatccaggtttggcttaaatatactacctttattcttaaatcccaccccccccttgtcaattttcgtatcattggtaatggttacttcagttctcttattgaggctgttaaacttggaaggtttacttctgtgtctgacgaagtaatcaaaatggtacttagaggcctattttgcatcatttccccatcaccaagcatggaagtcatactcattgggttgattgaaagacttttatagacaaaaatttaaaataaagccttaaattctccacgaagtttcagatgtgtcacataccactctcagttggctagatcataaattaatagaggatgttacctgttaaagaccaccaaagggtttggaatcactttttcacttctaggttaactattcctgatttttttctatatagttaataaaatagaggattatggcttgtgtgtatagtcataaaaagttgagtagccatacttaaaagtcagagatgctccaaactctccaaatgaaacacttacagtgtcttgtagataaaggggatttacttggtactctgtcatcaaagttgagaactttgtccacttctagtattttaggtaagagctttctctagtcatgtatgaatacacccagacacaacagtgatgtttcattaagaatctagcatgattgcatttatctcccttaaaaaaacttatgacggtgggtgtgcctgcatgatgtttttgtggggtggggtcacacatgccactgtgtgcatgtgaaagcctaagagcaactgtgtgggcttcattctcttcttccacctttctgtggggtctggacatggaactgggttcccctgcttccaggaacctttacccagtgagccatatttatctttttgtgactattatt

SEQ ID NO: 22596 - DNA, 1132 bp, Mus musculus
gtctataactctctagcctgaggttcttggtctgttaatggtgtccagtttgggtttcatcttgtggaatggatctttcatcctgtcagaaagtagttgcttgcttccatgatgttggccttgaggtcttaacaattctcttcgttaatgttatcccaactcaagcaatgtctttgtgcaaacttgagtcttcctgaagagtcaacaaacatgtaattacttggagatttgtcgagcccagaaaggctgcatagactgggacaagcaggttaggagtttaaattgagtaattgtggtttgtatctgtaagttagatttttactaaattattcaacacattcaatctttatttttaaaagtaaaagtgtttctataaagtagcattttggatggtgagatgttgcatcagttagcaccaggtactgctcttgctctcattttgaaatttttggtgtttttctatatttgacagtagcctttttattcctctttataagagaattgtgtatcgtatgttggaagtcatagagcttgtttggtgacaagtaagcataatgtagctggagcattggtggaccagggcacagatgtctatgtgcagtaaagcaggagcctgaacggtgaagattactttgggacaaaatggcagttttctctcctgcttcctgacagtgtagacaagcctcatgctgtttggagccagtactttctgtagcatctttgttgccatataccttgttttgattgccacctcactccactcagtggaaggtgagaaaggattagaaacggtggctgcctggctagaatttggacattggtagacttccattaatactagtctccaaaccattttcctattttgtaaaaactctcttctctgttgccctaaacttacagatttccccagttttcaggagaataccataccatttgctgttgcccctgagggtgcttctgtgctgtattcattggcacagttgtagacaccgagagccctttcatcgcacactactgtgtctcacagaagtcctataggacagtgctgatggtactctttcatttcttaaaagatgctcttaaagtcctcctaactgtatgtccctaaagtcttgcaaataggttttatgga

SEQ ID NO: 22597 - DNA, 1132 bp, Mus musculus
aagatacatctacggagaagaaaatttggggtccacactccagaccaggaatttctggtgccttagtccttaaagctaagcttctttggttacatgaaaattcaagatgtgggtttccactcacagggtactctgagacccacagccattgttctgtggcaatctatgtgcagctgagtaaccaaattcttaaagaagatgcttcctggatgtgacagcttagcgatgtcttctagcagaccttacttggtgacttcagatgagtcccacagatgcccagtgcattcacatctcgcccttttccctggctgttctgggcctttggagctgtgcccactcccccaggctctgcccttgccctactctctgccttacacaaagcctttgttttggagctaggtggcacacaaagaaacatgccaacccttacacaatactaacccttaacgcccacagaaacacataaacaaatacaaatgtatgccacacagcctgcaccctcctaacattaacagagttttcctgtttgccagtgaaatgcacccggaacgtccacagctactttgcagagagactctactacgccatgaaggtaactgtcctgggtgctgccccctctgtagtcagccctatatgatgtcagatgtacaacaggggtactcagagtccctgccatctgaacactgggctctctcttggtctaatctctcatgtgtcagaaagacttgctttcttagagggccaactaagccttgggaagggaagccacagtccctgaaggaacatttgagcaggttcattgaagactcatggaaccttgacaacagctctgagtggtccatatcaccattgccatctgaagtgtggtgtgtctaaggcttgtgcaaggccacaccccttctaagttgtagagccatgcattgatctcagacccatcagcttgtgctttttattgtcctgtatctcctcattgaagacaataggcaggcatggctggaatcccaacccccttgacatggacagactctggggacattgtcccaattggcatgtcaattttcctactcatgatcaggtgctaacttcagatttcctctttcctataaggctgccctggcttcagaaatagatg

SEQ ID NO: 22598 - DNA, 2247 bp, Mus musculus
ggatctctcctgggctcgggtgctgccttatcccgctgatgtacaaaaccttattcaattcccaagagattgttccttcctcctttccgcagtgaagcacaattccttaaagcaaacagtgattcaggcaaaccattccttccatagaaagtattagtggagtataatggtcaagtattacagtctggttttaaaattgcatgctaaactcaattaagagatttgtcaattatgttgaaggagctgagcttatggaatctaatcagtgaattatttcattatatttttctaattaactcttcagactctcttatcaggttgctagcttctccctgctccttggattaaaaacttagaacaagtgccatgacttctttccctcccctcccctcccctccccttccctcccctccccttccctcccctccccttccctcccctccccttccctcccctcccctcctctcctctccccttccctttcctcttttctcagtattgtgactgctttgatcaccatgagcagtaagtaaattaagtagaattcctctagtagtgtctggttccacaggtagactgtccacacttccagcattcagctatagctaactcactgcctgggtcctattgctccgtcttgtgcttctgtccatccttcccctcccccacctccccccaccacacccctttctcaggtgcttggtcaccccagccggagcctgaatgtggcaaggaggaagatctcctgaggggcaggaacctcgagctgcagaacttccaggacctccctttagtgaggtctccccaccactccatgaccgaccttggtttgctacagtgtttgttgcagcaacaccattcaaatcccttacagcaggggattgcctttgtctggaaaaggaagtcagttttgaaaatttattcctccaactctttttaaaattaatttattattataattaagtacactgtagctgtcttcagacacaccagaagagggtgtcagatctcattatgggtggttgtgagccaccatatagttgccaggaattgaactcaggacgttcggaagagcagtcagggctcttacccgctgagccattttgccaacccagtttttccaactcttatgaacagaattctgggtaaattccaattgtgaagtgctcaagggagaccagaaagtagcaagaaagtgaaaaataatctcccttcctctgctaattatcctctgacagtgatgagcacaggctgctcatggctcttgaagtaatttgggcagacattccacacagaaaagtaagaaaagcataattgacaaatgactgcacaaattacaacacatcattatgggatgccaaattggcagccatgacaccaaggccagtaggcagcttcaggaagtgctctcccccagagatgctccttcaggagagcacaggcccctggggctgcctcacatcgcccctcaaattcttcacccctccctggagctgtgcccactgttgtgtagctttgccaaaaaggcacgtctacttctctgaccctggattttcagcttggccatatggcttgctttggcccagggatatctaggggcaccatacaagcagaagacaaaaaacatgctctcctatgcttctgcctccatctcgacaggcgctgtccctgggtagctggtggtcagtgtgaacagtcatggcactgctctggtaaggatcccccagcccatccagacccacggcgtgagaacaagttacctcacctggggtaactcctgctcggccaacccacagatgcagaggataaaaatgttgatgctgcatccactgagaacccgtggtcatttgctatgcacagagtcaagtgaagacagcagctcacccactgtctttgactggctgtccttgaatcctggttctcctggctctacctaccaagttgctgccattctgccacctccccaccctccaccaagctgggccttctttttctgggaaaggacttctttttccgctagaggcagatagatgttcacattaacaacaagggggaaagctggatgaagcacagacctttttaaaaagagcccctgagtcagaagcaaagcacagggatgaaagagtttctgagaaccactttgctctccgggaactttctgggtttgaccgagaggctaagcaggtgggcagagtctcggttcagggcagcaaaggctgcagctgcagctgcagctgcagcgtctct

SEQ ID NO: 22599 - DNA, 1187 bp, Mus musculus
agaggccaggagagggtgttagatcccgagactagagtaatagatggttgtgagccgccgtgtagattttgagaaaatgctcttaactgctgagccatccaaccctatgatctatcttttgaaatgaaatgacagggattttgcttagagtttttaaaataggtaatttattagcataatataattgtgctaaatacataattttttaaagaaaattctgtgaagcttttattatttgtttttctgttggtattctccccagcactgactttctgctataaactgaattgctttccttcattataactgtgtctactgggctagggatgcagtgctgttgctatggcctcaggcgtggtcgtatccatccttgcctgccactgacactttactgtggggctcttggcccctggtctgtcctgtaagttgtcagcactgtgtggagtttccttctgggagacaagcttcctcttagactagggtaccaccttttcatctttagcaggagacttcaggagagattccaattccttggcaccgattgtctcagtatagccaaagggaggggcacaaatgcttctatttagagtactgggactcctgccatgatatttaagttaattgactgaattagtatcatgaaaatggctgtagccctgaaagcaagctacaatattcaatgtagttcttagcacaatcccagtgagtttcttctcagaaatagaaaaaacaatcctcaaattcctgtggaacaaaagcacccttgagcagagcctcccctgaggacagagagcacagcgtctgatttcagacactttcacagagccacaatgacaataacagacagacgtgtggatgaagggaatgaaatagagggtgcagaactcacccctggcaggtatgatggagcagtgccaggccatacaccagtgtgtgtggcattcgtgtcaacaagtggtcctgggaaaaccacgtgagaattctctcatccactacagaaggcattcaaaatggatcaatacttctaagatctgaaactttgacactactaccagaaaacacaaggaaaatacttctaagatagagacacaagcaaggacttcctggcaccttcggactggtgtggctgtagaaggcagagcctcatggaaaggactccagtagctcaggaaataagatcaagaact

SEQ ID NO: 22600 - DNA, 1151 bp, Mus musculus
cctttttttagggaagaaaaatacgtttttcattttctctccactacagtacacaatcatacagcgttaaaggtgctttaaaaaaaaaaaagactattaaaagaaaaaccaccttttttctgttgcttaaacttaatgtattgagtaggagtcttgatggaggttgaattggcaagtgagcagaggttagactagaacagtgattcatttcattgcaacttcataactgtaattttgctactgttaggagtagttatgtaaatatctaataggcaggatatttgatatgcaaccccttcaggggttacgggggacccacaggttgagaattgcaggactagacctttgtctgcctcggttctgtccagtagtctttttactaccagctgactaaaaactatagaaatgtttctgcactggaaaaactggggctgtgatggtgttcccagtggtggaacaaaggttgtggcaaaaggtttaatgatttaccaaattcgcattgagtctacccaagtctaggatctccctttggagcctaattgtcccttagccctgtagttccctctgctagaagccattggaaccactttgacctctgatttcccatgcagctcaaaattatataaaaggggtagtcattctcctacacctcaccttcctctttcttccttccctccctccctccctccctccctccctccctccctccctccctccttcccccacaagccgggaactcaaattctacccccctccagaacaaacaaggatgtctgtcgagccagaggcattgtattgcaaatgctaaactgtccttgtctttacagagggtgtgcatcctgtgatttggtgggttttttctgtcttgttagtcattaaagcaatttgagtttgccgtagttttattattttaagtgctcttgtcacagaagttttaatagcaaaatattgagcctagcaacaaatatcatcagccttaccagatcacagtaaccaaagcacttgctcaaagtggagtgaacagagcagaaatagagaaacccgtttgtagttagttaacagtaacagcattgcatgatgatacagcaagataaagtaacgttctacaaagtaaaccattacatttatttaacatcacactgcctcttcgc

SEQ ID NO: 22601 - DNA, 1248 bp, Mus musculus
atattctcacattggtctaaatctgtctcttgttagcatgtatttcacttcgaggtttggctttgctgttaccttaaaatagcactatacctgtatacacacagtcataagaccactgggctgggtgaatatggttgtcctaaactactccagggctcagtttcagaggtaacagaaagtttggcttcatatttttgatcatagaaatttgttattgaaaaagctgcctaatatattgcttcatttaaaaaaaaaatgtgtaatgtgtctgtgtgtcacagcacacagaggccagaggacaagttatgatagttgcttctccccttccactgtctgggtccttaggataaaactgggatcatcagaagacacttggtggcaagtacctttaccatcaaggccatctactgtcccagaacattgcttcttttagcaaaaggattttgagacttgcttctaaaccagtagaatatggatttatgttggtcaaaacgactcatgctatctgcactaagtcggtatcatgcataattgttcttctcagggatttggtaatgtgggcctgcactctatgagatatttacatcgttttggtgctaaatgtgttggtgttggagagtctgatgggagtatatggaatccggatgggattgacccaaaagaactggaagacttcaagttggtatgttattctgatatagtcgtgtgctgtggcatacagttgggggttagacccaactgcaggtcaggcctgcaggagtctcttctctcctaccatatgggtcccagggtttaaattcaggccattgcttgatggcaaacactgagccatctcaccctttaaaacaaaattctttgcttgtatttatgtagtgccaccatgtacatatgaaggtcggagggcaacttgcaggagttgtttctcctactgtgcagccctgggtggcgaactcagatcatcgggcttggtggcagaaaccttaggtcttatttcttctcccttttggtttatctttgagtggtgggattgggtgtcttgttttgttttaattcaagcttgggttggttagttagcctctgccttccaagcattgatagggtgtttttgagagatgctcttgtgtgtacgctttgttggcctcgtatcccctggctgcccagcctggtttcagattcacggcactctccgtgcttcagcatccctaacacagggatatgagtcaccatacctggttttcaaagagctct

SEQ ID NO: 22602 - DNA, 2139 bp, Mus musculus
taaagtatacagtttatcagcctgcagcatagtcataaggctacggagatgtcatcattgtagagtgttcccacttccctatttctggttatttgaaacagtcataagtatgtgctctgagctcattacagataatagataacagaaaagttaaccgccagagaaaccattcacatctgtagttctgaggagtaaggtcttgctgttccctggacagtagcaacttacattaattccagagaattagtccttcctgctagaaacattgctgctgttgtggtcttttgtcattggccatctgtgtgttacctgctcatgggacagatgaccaggactcacatgcgccttgtgttaatagcctgctactcagtcaggtgatctcactgccttttcccctttgttccagcaaattatgcgcacagccatgaagtataacctgggattggacctgagaacagctgcctatgtcaatgctatcgagaaagtcttcaaggtgtacaatgaagctggtgtgaccttcacatagacagctcacagccgacttctttaccacctcttcacctataatttctgcagacctgtcacaagtttccatataaccatagaaatctgttcttgtgactcattagttaacggacactgttctgaacaagtcagttggaatcagccccttaagagaaagagattaagttagaggatcatgtacaagctgatggtataaaagtaggaatcacgtgtatccaagccagttaggtggtttgcttttaggtaaagtcttgctcctgtgctgtcttgctctgggcccttcccagcagagtcagtgctgttgccagggaaggagtcaggagcagtcagtcacttcttgacatgtctgggaactccgacacatataagaagtaggtgtgtggcgttttccaaaggtggcatggtcctcaaatgagttattgtggttttacatcaaaaaaaaataactcagttttctaagttgcaaacaaaaataaaagctatgtctcatgtattttattctctcagaataaaccagtacatgctgctgtaataaattgccttcaaccacttaagcctaacctttactcaagcagtgaacacctaaaatagaagaaatggaagaagctagttttttatactataaaacagtatcacttgtagcttattggccctgcatcattgtccagcagaaataaagtagcactatggggcgctctcctcagacctgcaagggacaagggactcttgggaactggtaatgcagtccagagagtacagtaaccactttaccatgaaaactacttgttcttcccatttgaaggtctattctgttgagtaattgaaccataattcaaatcgagtgtcccagaaaaaaagacttgggctccctgtttggagtctggcaggcttcgagcacgagccagtggccaggctcaacctgtgtgtccccttccaaggctttgcattctgctcaccgcttcaccagcagcaggctagagactgcctgcctgggcttgacttttgtttggggggttattggccagggcttttgaacaggaatgtcccacagaagtaccagacattatttatataaggatgaacgcttttttttaacagtaccctttcagaaatttctaactactttgtaactgcatgattaacttggtgataaaagcagttattaaaagtctaccttttccaaaatgtatgtttcttttctgtgttttcatatttaataatctgttagtaaatataaaacggtaattgaggttcagaaattttcataactgtctatgtcactgctttctgttaacaagctcttcaaattttattcctggaatttttttttttaccttcctgggaagaggctgtagtgtgtaaagctaatatactattgtgatttctggcactttttgtttgaaacaaggtcttacataacccaggctgccttcaaagttattagctgaggctacccttgaacgcctcctgatcctcctgcttcttgctccagtgtgcctttttctggtatcttagaaataaaagcatggaagttttttcagattagaagttctctatggggacgccccagcccagccgccctggatcaccaactggacccccagaagtgattac

SEQ ID NO: 22603 - DNA, 2139 bp, Mus musculus; identical to SEQ ID NO: 22602

SEQ ID NO: 22604 - DNA, 1735 bp, Mus musculus
tctaggcctttaggcccaggcttgggaatatgacctctgtgcctcattgctccaaggtatgctaatcataaaacagatagcgacattcctccacccacccccttcctaggttcaaagagtgttcattcaaagaaagtcaccctgaccattgccggaacccgctatgcaaatgtgctattgttaggggctcttagaaactgtcttgagagataacctgcacaattaccaggtattcctttcgactcttgtgactttgcacttccttgggactcttaactggtatcgccctcccacttcctgagttgtggtttcttcctttaaatacccccttactcagctactggggcgccacggtcctctacccctgcgtggtgtatgactgtgggcctgagagcgctcttgaataaaaatcctcttgcagtttgcagcaagaccgtttcttgtgggtgatttggggtgtcgcctctcctgagtcagaacgtgagggagtcctcacgttggttgtgggtctttcaaagtctcttgccttgagccactcagataatgaaggttggtgagtcctgctgccagagcacttagtaatctatagctctgggcccctccttcctggcttgtttccttaataagggagttagatgtgagaaactaaggctgggacctgcctaacaggtgacacttcaaagtaataaacagctgttgcttctccccaccctacccccaccacccaaaggaggttgaaaacaaaaaattccattgggatctgggaacctcttggtcccatctgacttgtactgggagacccagcaggtggaggtcttgctggcagaggtccacctcagtgaagctttaccatagcctggtgttggacctgttacctgcttggctcctcagatgggcttcagcaaccaccaaagcattgtcccagataggtgtcccgtggctccttcatctcagggagactatgtcagaggatttcacactacagagacctgccgctcctgtcagtgtgcctcaagaaggtgctgctgctgatggtcaggtaaggcactgctcactgacaccctgggcatcttctacttgctgcatcttgtcttttgtgtccttgctgccacggcttggaggagttctgggttgttgaggacatctgcagtgggtcaatcccgctgactgtgctttatctaaacatcaatttggatttttaaaagtaagccagagccagctcacccggccgagggacagggtaggagcaggtcagcagacagaattatgggggcttgaggaaaatagggagtaaaaggctgtgagggatggaggagtggagacacgtgcaggaccttgggggttcctcatggggaaggcggagaccctaactagaatgggcaaagcaactaaagaatacagaagggctgagttcggattcagaagaccactcacccagtgggtgtggcttctccctcctctgccttggggattccacctgacgatcatgggagctctcaaggctgaagatgattctaatagacacttagcaggggtatttctattgctcatttgcatgacgtatgtacgtgcgtgcgtgtgtgtgtgtgtgtgtgtgtgtgtgtgtgtgtgtgtgtgtgtacgtacatgtttaggcccttggagtaaaaccctgctaactcaagcttgtttgttctcagaaaaaaggaaaagatttgggactttggtaaggaaaggctgggtgtctggacacttg

SEQ ID NO: 22605 - DNA, 1098 bp, Mus musculus
agaaagctgagtcacaggattagccacccctgtcccctctttagaaagagcccagaatgctgggggtgggttgaacactaaatgggacccattttcacagactacccttcccctctaagccaggagtggcctggctcagatgcagcaactcccattggagaaagcggggtccacctgagcagatcattacctcagggtctccaggttaggagactccaggcatgtgtgtgcatgcttttgagtgcccacacgtaggtgtggcactccggtcctgtcccactcagagtcccttcccccagagtatcaaagacaattagatactaccatattctccagggtgtgcgaccctgcctcaacaatcagaatttcatctcaaaacgctttctagaagctgggggaatctgcagagggaggcatctgccctccattagggacccctccaccctgccccgccccgccccgccccacctaccacactcacccacatacataaccccctccttggtcttctcagctgcctccgttactccctgcttggtcttttctacagcacccacaacaccttccttggcaatggagaagcctttcttgaagacgtccatggtgtttgcaaggatggaacctggctgctgcaagctatggactggagtgctgccgcagccgctgtctctgctgctactgcctcttattgacgcagatgaaatattgatgctgtggctgctggctggagcccagccagcccgggccagggtgggggcagggagggcgggccagagagaaggcatgcctcacggggataccagcgagcagggcccgggcccctactggctctattctgccctgctgactcttgttggccctgggggagggagagcgtgttggaggctggacatatcctaatctatcattacacctcattcatccttggaaagccctggtggtctcgtgccctggctcttatatgcagaagaaaagtgccttgactgatgatgcctcagtgtcccaggctgggccggggtcagggccaatccaatgaatggccaacctgcaggctgccctgttatccagttccccactgtatcctggatgctcttgagc

SEQ ID NO: 22606 - DNA, 1113 bp, Mus musculus
cggtaaaacaaaacaacttggtgcctccacaccctgcgtgcccaggctgccaggtcccagggcagaagagggacctggttagctgtttcccaagcccctggagatcctgcagaggcagggccagcaaactagcaaggagtaccttggttcttcccagctcctttttgtttttcaagacagggtttctctgtgtagccctggctgtcctggaactcactctgtagaccaggctggcctcgaactcagaaatccacctgcttctgcctcccgagtgctgggattaaaggcatgcgccaccaccacccggctcttcccagctccttggtggggttgtgtatagagaatatggactctccagacccaagtcagctgctccagagaggctgggtctgtggtagaggccatgctgaacctgaagagatgggctgtcttctactttgattccattcagagcctcagatctcatagttggagcctggtgttctctgtcctgacccacccccatgtagagtgtgattttataacgttactcccagtagcaggctccacctaatggaaggaacactagggactatcgtagctgctagctcaaggcccagagctgttcagcacatagctagaggacacacagcagcagagtggagccaacacatatactcttgtgcctgttctcgctcttgagcacagggttctgggtataggcagaaccccacagaccagtgctgagccctctaggctcacggtcagggagtcccaaacccaagctgcctgttagatgggctttgggcttcctgcggagacacaacaccactccactactcctggttcaaggaggagtacttccttgggctgtcacattaacagctagatgcaggcctcagaaaacatggctgccagacggggcagcctccagctgaaaggaacctgaagagatgggctctttggccagcaaagacgctcttacaaaggcagcttcacagcccaagcacatccattatgtagaaagcaccagcccctccctgcaacaggccctgtcagcctccccacaacccccttctgtgtctccagggattcggcctctgcacatttccaggagtgggaggagggcctgac

SEQ ID NO: 22607 - DNA, 1117 bp, Mus musculus
tatttattttgttttggaaacaggatctcatagtgtgtgtgtgtgtgtgtgtgtgtgtgtgtgtgtgtgtgtgtgtttatttgtttgtttaattttggaaacaggatctcatatagccctggctagccaaaaactcattgtataggtgatgttgatgttggcccccttatcctcctgcctccacctcctaaattgctgggatgatagacatgagccaccaagctgtttttgctctgtgctgggactgtctccagtccttcctgtctgctaggcaagcactctgccagctacactatgtccccagcctgttttgttttgggttttttttcttttttcccccatttctaacataggcctttcgttttcaagtgttctctttgtcctctgaataccctgctaacccttatacttcctccgccccctacgtactcctgtctgtgtcctctgcatagcaacgtctcttacatccctggaaacactagtgtcgatttggagctggtattcattcttcatggatagctgtggtccactccggcttgtcagttccgaccttcgttgatctgttttgttcttttcaggcctgaggatttaactagggccccctacatgttaatctcatgctctaactccaagctgcatcttggtctggtttctttggtttgtaacatatttctctcaggggttagcctcagaggtctggatgtacccttctgagctgttttgatgtaggagactctgttgggtggttcacccagaggctcccatgatgtcagcatcttcaggtctcctttgctgggaccaggtagttttcctgctaagcatttctagcctgcttccggaaggtaaagactgtcttgtcaggcttctaaaagcctgatggggtagggtgggctggagtgagtgtgggcaggaaggggtgtgtctcaatggatgtggtcacacaatgaccattaagtctgtccttccacccctcccagaagtatctttaatggtgcctaatggccctagggcaaagagcagcttcagaagtgaaattccaattccaacaagccacccaatcagcaaagcccctgaaccttgctctctgatgcctacagacatggccacttcctccatg

SEQ ID NO: 22608 - DNA, 1149 bp, Mus musculus
cagaaaaagccttacagtatagctcagattgacttcaaaatcaagattttactgcctctgtctcctgagttagaattacaagcgtgagctactgtgctggcttcaagaagtttctcagtcctttttctttatggtcttgtgcccacttttggtcaaaaccaccattcctgttcccagtactaacattattttgaggataggcactattctctttcccacacgatgtctcaagatacctagcaggtaggtgctgggacgacttagtggcggagcacacgtctagcatgtgtgaagtcctgtgttccatccctagcactgatgtggaaggaactatccctggcaggtagcagacatctaggagttggatactcaggtttctagcaccgccctcccacggctcaggtagtcaaagacacttatctctctagagttgaaaggatcaaagaaaaaaagggctttgttgaggatcaaaggagaaaatgcatttgccagccagccagcagatctgtatttcccttcccctatctctgaaatgacactgactgtctaagacacacctctgggatgtgatggtatctagaaatggtctccggcttctcatgcaattaaggtgaagaagggagagtttggcagtgaatggataactgactgtctcctctacctcaggctcccctgtggccttctatgccggttcttcagaaggggccactgctctgcagatggtgaagttcaacaccacatccatcaatgtgggcagcagctactttcctgaacatggctacttccgagctcccaaacgtggcgtctacttgtttgctgtgagcattacatttggcccaggcccaggaatggggcagctggtatttgaaggtcatcaccgggttccagtctacagtacggaacagaggggcgggagcacagccaccacttttgctatggtagagctacaaaagggtgagagagcgtggtttgagttaatccaagggtcagcaaccaaagggagccaaccaggcactgcatttgggggcttcctgatgttcaagacctgaaccctgggctcggctcagcttgtatcagacatggtagatccgcctgctgctcttagactgaggctctggccagcaaaggctggagaacatctagtggcct

SEQ ID NO: 22609 - DNA, 1311 bp, Mus musculus
tctctagaaatactgtaacaaaaaggtattttagtcagcatgttatgttaacccttccactgtctagaaacttgaataagcacataaagacaccttttgctgtcatcatctgttgtcctggaatgtgccagttttaatttattcattctaatgatattcaatttgcttttcttttttagatgtttttcttgtttagagtaaaaggacgaatttttcaagaaccttgcatctctgatttggcctaaggtcaaattggatattgagtagtctattccagggcagatttcctaagcaatacttgtcttttcagctatgtattgttttgaaatgtttccatttcaacagaggtgtaagtcatgtgaaaagaaaggtggtgtagcccttgtggtaatgacacaagttgacttgcgtcagatgttaagcagggacagttctcccacctcctggctgtaaggagtggaaactaggcaagcagtgtatcagtccacagaggacaggaagggtcatcccataaagaaagcctgtgagtatggctttggcaaaaaattagacataatactgtccttttaggttgtgctctgttctttcctttcagtggaattatttaagctctttagtggcctttgtttttcccacttaaaaactaaaatgtagcatatattgtataaaatggaaatattaatagcttagggaaactgtacataaggcattgacaggtttaaaaaaagcatttttattatgcagttgtaaaacaccaaaaatatagattcatcttgatatgtaacactaagtgtattttgtacagcatctgatttgaaaggtgccttatgaagtttaccattaattgctttgttctatatacagattatgtccaatgtatcatttttcagtaaataaccttattttagtatacttcagtgatgtgttttgtgatgctgttcttggatttattgtgtatcagacgtcaactgttgagattttgtacgtaatgtaagtgtgcatccctacgctgctgcgcttgcatttcggcttctggaaagtcctggagcatggccaggtaagtgacgcatgcttttccttcatgtagatgcccaacccaccttaatgaggggattgttttttccttttatacaaagaaaaaaaaaagccacattgttttctggttataaaaatgtgtgtttatgacagaacattgggaaacaagaaaagaataagcaaataaactgctccattttattgccagataccactattgacattggaaagtttctccttttttttttttcccccgtaacattaagattgtggtat

SEQ ID NO: 22610 - DNA, 5257 bp, Mus musculus
ttttttttttttttttttttttagttgcttccaaatctagtcaaaatgacaatggaaaaataaccatcagagatgttttataacaaaatacaataccttgtatcggttccactggaaagtggtttccagaccctcccagtcagtaacaaaacattcatgtcttcaagtctaaaaatcagtgcaaacctcagaaaactaaaaagtcagccaagtgtggtggtgcacgcctttaatcccagctcttgggaggcaggggcaggcagatttctgagttcgaggccagcctggtctacaaagtgagttccaggacagccagggctacacagagaaaccctgtctcaaaaaaacaaacaaaaaaagaaaaagaaagaaagaaagcaagcaagcaagaaagagaaaacttaaaaagtcatttattactgattgactattttatagatattactttgtttataatataagtaaattaaattggatccatgagaaataaattttttttgagaaatcaattttaattctacatcttttttgttttttgggttttttggtttttttggttttttttttgagaaataaattttaattctgcatctttttttgtttttttgtttttttgggttttgttgttgttgttgttgttgttgttgttgttttggtttttcgagacagggtttctctgtattgccctggctgtcctggaactcattttgtagaccaggttggcctcgaactcagaaatccgcctgcctctgcctcccaagtgctgggattaaagacgtgttccactactgcccggcttaattctgcatctttaatgttaagatgattgtataagaatggtaaaaataaattatttttcttttatttttatactcctttctcagatataattgtctgcaattgtacttttcttatataaaatattgtcatcttttttaaagataggatcatatgtagcccaggctggactagaaccaactattcagccaagattgaccttgaaattctgatcatcctgtccctacatcatcagtgcttagtgttaggatgccaggcatggatcaccatgctggatttatgtggtgctgagaatggaactctgggcctcctgtatatgtacaaaaaaccactgtgccagctgagccacaccctaggccagtgttgttatcttttgatgaaaacagagcttctttggtgacagagcctcagctgaatttatgaaaggtatttgtgttaatccagtttagtgtgaaaaagttagtgatttgttgcagacatggtaccaaggctcagaacagttgtcccagatcctgcttgggatattagtgtacgcagcatataaaaactataaaggtgtttaacttcataagaatgtacagagatgaaatattgtttggtcctcaacctgactgttgtcttccccctgtcttagtgatacaaatgaagttgacatacccttgaataccagggtgggcaccaagcggtacatggctccagaagtgctggatgaaagcctgaataaaaaccatttccagccctacatcatggctgacatctatagctttggtttgatcatttgggaaatggctcgtcgttgtattacaggaggtaggaatttgaaaagtgtttctgattgtatttacttgtcatttaaaaaataattacctaatttgtgtcacctgggtcagggtttctcaggaccactctcagatcctctggtttcatcagaatggttgtctaaggggaaaagtgtcaagagcaaagctcagaaaatccaagacaggtgtccaacagccttctccagtgtattcagaggtcatgcttcgttcctccctcagtcggctgtgaccgagactcggtctgctgagcacgcacgtttgcgtttgtgctgtggcatgggctagagccccatcctctcaaggaagtaggttcagcagagcagcggggtttgcaccgaccgccagccagagacagtgctcggggactcccaggtccctgctttgtgagcttgcccagtctctctcccagcagagagccatagatattctctagtaggaacaaagaagtaaatttgcactaaaagttttttttaattaaaaataatcttatttctactcatttcctttgtttttaagtgtttcgtttcttgtagcccaggctggcttcagttcacagtcctcttgcctcagagtgttctaccctcaaaagaaacactgtcattgcgatagactttcattctgtcagaggtagggaaagtaatgggtcataaataatagagaaacatatttactattattcagattgtgtttcttctttatataggaaccattcttagttccacaattcagtgagaaatgctgtatgtcaactgagagtagtcctactaccatggatttgctcactgtgttttctcactccctgcaggaatcgtggaggaatatcaattaccatattacaacatggtgcccagtgacccatcctatgaggacatgcgtgaggttgtgtgtgtgaaacgcttgcggccaatcgtgtctaaccgctggaacagcgatgaagtaagttggagccaagtccctgtaaagtgatgagtgagtgccgagttactctgtgctcaccacactctgtttgcatttatttctctttagtgtcttcgagcagttttgaagctaatgtcagaatgttgggcccataatccagcctccagactcacagctttgagaatcaagaagacacttgcaaaaatggttgaatcccaggatgtaaagatttgacaattaaacaattttgagggagaatttagactgcaagaacttcttcacccaaggaatgggtgggattagcatggaataggatgttgacttggtttccagactccttcctctacatcttcacaggctgctaacagtaaaccttaccgtactctacagaatacaagattggaacttggaacttcaaacatgtcattctttatatatggacagctttgttttaaatgtggggtttttttgttttgctttttttgttttgttttggttttgatgcttttttggtttttatgaactgcatcaagactccaatcctgataagaagtctctggtcaacctctgggtactcactatcctgtccataaagtggtgctttctgtgaaagccttaagaaaattaatgagctcagcagagatggaaaaaggcatatttgccttctaccagagaaaacatctgtctgtgttctgtctttgtaaacagcctatagattatgatctctttgggatactgcctggtttatgatggtgcaccatacctttgatatgcataccagaattctctgctgccctagggcttagaagacaagaatgtaaaggttgcacaggaaggtatttgtggccagtggtttaaatatgcaatatctagttgacaatcgccaatttcataaaagccatccaccttgtaactgtagtaacttctccactgactttatttttagcataatagttgtgaaggccaaactccatgtaaagtgtccatagacttggactgttttcccccagtcaccattttgttctccttttggtaattatttttgttataaaaagccacctatccagaattggagctctctgtcttgaaccatactttgaaagaaacgcctcttccgtactgcatctgatcacaatgtgcatacctatgatcaaattctggagtctttgttctcggtacctcctaaaaaggaaagttgattcttgtgtaacatgcttttattttcagaacctgcacagctgtcattctagccatgttttacctacacactcagttctatacaagacagcccatacactctgtctcacatctgatccttggtgggaagtgttttaaagtagaactatgtatgaatttcagaattcatgcattttaaaacttcactaagatattgtctcatatctttatgagaatgtcagctgacttttcaactaacagtaaatgtattttagatatctaaatcttttgaaatttggttttacaatttctggtccctaattgtgaagacaagaggcagaagtacccagtcactacccatatttacactgaacgttattaaataaaatgatgtgtattttattataaaataaatataggccttgttatctcaaaaaacagatctggttcaaacttattataccaatatcatactatttaaatgttctaagtaaacaagccatgtgagcatcaagtggcattggctctttggatgaaacataaacttaaggtgattgtatcaacacatagagtgactgaaattaaatgggaggcaggtagagcatatgtccatctgtccacctacaggcatgactaaactacagctcatattccacaaatttgagatttgtcttgcctggtttgtttagtgagtctcatctgatgtacctaaagcctgagagtactgaggtctgattttatatctttcctgaataaactaaatcttttttgtcacttatcatcttaatgatatacctaaggaataattctttggcatgtttcagttgtgtgtggcagccactgtaatgactcttctctaagaaaggctgtcaggagttaattataaggcaggcagtgagcgctctagtcactgccttcccacgctgccatcactgcattcatgggaatcagtgacgttctcgaaatggcaaacgctgctgcttttccttatttggaatcctaaaatcaaaagttgcattaaacttactgtgttctcttctccctctcagccataaatgtaaaattcagtaagtaaaaatatttaaagagtgtatcagccctttggccagtgagatagctcagtagataaaggcatttgctgccaagtcctcaacctcaattcagactctgggggacacatggcgaagggaggagccaactaccccatcattgtcctctgacttccacacactccatggcttgcgcccctccccacagacacacaccatgtactccacaaaagtagtttaaaggaaaaaaagaatagaacccactgtgtaatggaataagtattatgtagttacttaacaacttgtaaaaatctggaaactatgatttggttcccctttgaatctagagtttaaaaaacagatggctaaaatcagccatcatttaaataattaaaaataaaagccccaaaccccaaactgcctaaataaataccaagtaatccaggaagccgtcatgtgtggtttgtatgaccagtagttctctggtacagagca

SEQ ID NO: 22611 - DNA, 1233 bp, Mus musculus
ggtggctcacaaccatctgtaacaagatctgacgccctcttctggagtgtctgaagacagctacagtgtacttacatagagtaaataattaaattaaaaaaaaaaaaaaaaaaaagattattttatactactgttcagatagccctgctatttgttaatttgcatagtgatgacatttatgtttttaaccggacatatttttcatttttgtagataaagtggagaattttagtgaagaacatgaaaaaaatagtcaccactttcacaaaaatgctgaagatagtactaagaaacccaatgcagaaaccgcagtggcttctgaatataaagctgatgaaactaaagaaacaaatgatacttggaactcccagtctggaaaaagaacagagtctccatctgaaagttgtccagtcaaaggatctgtaagaactggtttatatgaatgggataatgattttgaagatatcaggtcagaagactgtattttaagtttggataatgagtctcttttggagatgaaagacgaggatttaaaaaatcggattggaggattggaaaatctaaatgaaacctttgaagaagatatcatacaaagtgttcttaggccaagcaactgtaggacgtactgtagggccaataaagcgagatcctcacagggagcatcaaattttgataagctaatggatggcaccagtcagtccttagccaaagcaaacagtgaatcaagtaaagatggcctgaatcaggcaaagaaaggtagtgcaagttgtgggaccagttttcgaggaacagttggacggactagagattacactgttttacatccatcttgcttgtcagtgtgtaatgttaccatccaggatactatggaacggagtatggatgagttcaccgcatccactcctgcagatttaggagaggctggccggctcagaaaaaaggcagatattgcaacctccaagaccactactagatttcgacctagtaatactaaatccaaaaaggatgttaaacttgaattttttggttttgaagatcatgatgagacaggaggtgatgaagggggttctggaagttctaattacaaaattaaatattttggctttgacgatctcagcgaaagtgaagatgatgatgatgacgactgtcaagtggaaagaaagaaagacaaaaaaagaactaaaacagctccatcaccttcccagcagcctcctcctgaaagcagcgacaatt

SEQ ID NO: 22612 - DNA, 1165 bp, Mus musculus
tgagacttaactccatttgtcaggctggtactactagaacttgtattcaatgagatatttctttatccccaaggaagtactttataacaaacaaaaaaaaggttcacagtgctgaaatttgttaccattactttaggaagttagactcccattaagtgatgatttgttattagtctaaataatttatgaatttatgcaatgaccttattaggttttctgggtaatgtgtatagtgtagatgaaacataaactctctgtttttatgttcctcttagaaaactgttgtatatagtctgtgtgtgttggcaattttaagtcttttttttcttctggttaattggtttcacagaagagtagttactggttctgtgctaaaaaccaaagtgattatgtccagcataggcatggtaatagcactcactgtttttggtctaagaatgtgtgtttatgcatttcagttattttatataaatgagacctttttgtaagggatacaaagtgaaatggaagcagttgattttttttttctttgtcatttcactagtcacctacaaaagctgtatataatgccaggcattggaaccatccagactcggaagaattgcctggaccaccaatagcaaaacctcagcgtgtcacagtaagtaaatattttttctttctcttaaaataaattagaaattaatctagatagctattatcttaatttttgttcttacaagattataatggaaagctttacaaattaaaactttgtagtagctcaaggccaatgtaggttttatactgagacccaatctcagaaactaaacaacaaaaaaaccaaaccagagcttttaatcatgactcatgttttatagaatttatagtatttagggcttaagaaaaattattccttatatgaagtgttagtactgatatgtgtgtgtggtattatgtatgtttttgttttgttttggtttttgtttggttttttcgagacagggtttctctgtgtagccctggctgtcctggaactcactttgtagaccaggctggcttcgaactcagaaatccgcctgccactgcctcccaagtgctgggattaaaggcgtgtgccaccacacccggctttatgtgtgtatttttgtgagtgtgtgtacaggtgtgtatgtactcagtagag

SEQ ID NO: 22613 - DNA, 2839 bp, Mus musculus
tatctgctttctccttttattccagctgtgcttctaggctgtgggatgatgccacccacaaacagaaaactattgtggcagaatgttatattactaaggcaatgatttaatttcagtgtactctttactacgtagactttgatacttttttttgtttaccattttgttaagtattaactctaatttctctccttcccctcttagtgtgctgttggaacaacaggccagaagtctatctctagagtgattgaatatttggaacattgctagctgctttacctttgcttcaggtgcttggtaatgctgaagctatccttagacaaagaaaagacatgaaagaagtccttgaagatataccaagaacattcatcagtatcattcattcgtgtttggatttttatgatcacccgatttcttcatcatgcattctgcgtttgctaaatgacagttactacatcaatctgcagctatcaaaaatgagggaaaaggttcaggctgttaacaatcccatgcagtatttaaatacacttacttggcagagtctatacctgcccctgtttccttgctgtatttcaggcaaggtttaaagagggcaatttgtgctgctgttagtgcaactgctgtgtatgttgagccactgttgtcatgccagtcaggtgcaaaggcagcttagctactgaggtattgaatgttctgaggacattctagacaacagcttagatcctttttcaggctcatttgcttttgctttttgttgaatgattccaatcgtaaataaagcttttaataattttgtgaattttttggttgttgttccctgaactactgtctatatttaaaatgagatggaatccaaagacacaagggattaatagtatatttttttattcttgattaggtttgggtgttgaactatttttcacttctgagaccatgaccatattcaatgtcataccattatgtgtcatagctataggcacaagaaaacaaatagcagtttgagggaatattatgttatataagataatgtgccctgttaaaggattaagcaaaaatagacaaacccagggtagtttacacttaatgctggggaggctcttgaaacattgttacgttttgagggacgttctctagatatattttctaatgttcagttcagtaaatataataaggaagctaaaacaccaatgtggaatccgtttttccagatagcgtgtatattcttctatagagtgacaggatcaattgcataagcgcaaagccttaaaattgctggtgtagagaagacccttttttattcagattctatgttcatagagcaattgtttagaaaatggttgtggaacacacagaacatggtttatagggtaaatttcatagattgttttttctttttttttttttcttttttttttttgtattgttcagaccactggttatacattttctcctttttttattaattggcctgaggacaggctttccagagatgtttcattaatacttttaattacctttcagatagttacatcatgtttcttcattggatttgtaaaacttaaagccataaaaatattagtttggtgtgtattggggaaaatagctaaaagtctaactttgactcattttagactttgttatttccttgtataaagtaacaaaccggggctcttgtatccgtgccagctgtaatgtttttaaatgcagtggctgccttctattgtcttcctatttttgataatgcagattgttgggaaatctataaggaagtaactgactctaggcaaattgttttcttcctcctacccgcccaaccccctacccgtccgtcaccttttaggaacacagtatgccagtgtaatgtgggaaccattgagactgtatttgccctgagtaccaaactaatttagtgaatttttttttaaacatactggtaaatgatgtccacaaatttccttagatatattttaattaattgtcttaaaatacattgatatttattaatcattggatttggggacagatttttgactgtggcagatggtagggaacagaacagtaaacagttggatgagatcaatcagggcgaattacatttttctgttacactggtgatcatttgagaattgatttacctcagtgtttaacagtttttgttttgtttttaaaatactaactaattgtcaagcactgatgagatgcaggtttggtggggtgggctgtgaggaagacctcaccttaccaactgcagtgcgtctctgtgttttagcctcagagaactctcattctagggtacttgaggctgacttgcaaagtgactaaagttttaaggtaaccttttttccattgtaaatacttctgtaaatactaccagttggatattagaacagtaggatacttttctgaatccaatcctatttttattttatacagtatttctcagctgtgatctttggagcaaaagccaacggcaggaaaaaatagtttgtaccagtttcatgaagtatgtctttgggtttttgtaaataattttaactcaaataaaattgatactttaaatacacacgttgtctttaacataagtctattgacctgttttggaggaagaagtctcagaacttgttaaggccagcacaccgtgtcatttgagcataagtgtccaatttttcttaaatattttatatacttgtaagtactggtctgaatggatgtagccgcttagcactttgggctggttagggatggtggttttctgagtgtatagttaaatccttagaatgccctctatgttacttgaaaacttttggctttctgaatatgacggtaaatttctttgctt

SEQ ID NO: 22614 - DNA, 1105 bp, Mus musculus
ggagatggaaggtgatcaatatgcctgggtggtgatgcctttgtccttcccatccttgggatgtagtgtatgtctttttgtaaatgctcctagcgattgtaaacagtttataagatggctgagcagaatgtgagaagatgttaaacgaggagggaatcggtcctgtcctccaggaagatgtcacaggaaccagctgtgggatattacctctgggctcctctgaagtctcagttcttctctacctaggctctagccccctgttactgacaattgttcttgagatctgaggctctgaacattgagtcctgtagtagagcctccttcagtgatacatggagaatcaagccatggctactgaactgagggaaacataagagcccagaggctgtggttacctccaatcaggttgaagtggatgcactaaggacttgccttgctgcatcctctggcctctgacctcagggcagcctcaggaggcagagtagtggctctgtctggacctcctttcctggcactgtcttctatgtaggatacaaggtgcagaggactgtggtcttcttgttgacctttggctattgcttttgtcttcctcccttgaccttgtggactggttttgaattgcactatgggcctgaagctcactgaatcacctaggctaggctgggtggccagcgagccccagggatcagctggtctctgtctcccaaacctggggttacaattgtgcatactatacccagctttccccccattaattaattattatccactttatatcccaatcacagtgtcccctcttcccagtgtcccctataatcctttccccatccttctctccccttctcctttgagaagggggaggccttctactgaataccaatccatggtggcataccaagtcactgtaggactaggtacatcctctcccactgaggccagatgaggcagcacagttagaggaccaggatccacaggcaggtgagagacagggacagcactctcaccagttgttagggggcctgcatgaagaccaggctgcatttctgctacatgtgtgtgcagggggcctaggtccagtccacatatgctctttgtttagagttca

SEQ ID NO: 22615 - DNA, 1144 bp, Mus musculus
tatctcattagatgttgaaaaagcctttgacaaaatctaatatatgttcatgataaacatcttggagaaattagaattgtccacagtcagaaatggtgatcttattgctggtcttgccattcctgaacccaaaactttccatggcttccataatgttcatgacttctttcattttcccaaagaccatatgcttgccatccagccattcagtcttggcagtacagatgaaaagctaagaaccattcatatttgctccagtatttgccatgcacaagatgccaggacctatatgcttcaggatgaagttttcatcctcaaatttctctccatagctggacctgctaccagtgtcattatggcatgtgaagtcaccaccctggcacatgaatcctgaaataattatgtgaaaggaggaatccttatagccaaatcctttctctccagtgatcagagcatgaaagttttctgctgtctttctaattttgtctgcaaacagctcaaaagagactcagccgaagggcttgtcatcgagccttgtggacattttacccatcaaaccattctttctgtagcttaggggagcacctttaccccatctgctcgcaatgtcctgtaatctctgctctcactgaagttctttgggttccatattttcttcattccccctcaagtctagctggatttcgaagttaagattatgattacgaataaaaactaagacctattttaaaaaatcttggagagatcagggaaacaaggcacatatctaaacataataacatacagcaaattaaatcaagttacagccaacatcaaattaaatgaaaggaaacctaaagcaattccactaaaatcagggacaagacaagactgttcacttcctccgtgtttattcaatatcgtacttgaaattttagctagaacaagaagaaaactaaagaaaatcaaggggatacaaattggaaatgaaaaagtcaaaatagtgctatttgcagataatatgatagtatacatttgaccccctataaattctaccaggaactcctacacctgataaataccttcagcaaagtgagtggatacaaaattaactcaaaaacaaaacaaacaaacaacaataacagaagaagaaaatacaaaagta

SEQ ID NO: 22616 - DNA, 1202 bp, Mus musculus
tacataccatttgcacatacttgtctcaggtaaacacaagtttacttatccatctcagaggcccaagtccctcctcatgctatccagccttctctctacataccagaaaagtcaaaatattccatgtatcaggcaggatgtgtacttggctgatgtagtcctgttgtggttatcagaatctcaccccgatgcttattcttcttgtgagtatggctgctattttaactaaagattcaaagtgacggtggaaggtagctgtctgtaagcagggttctggccaggttttgtgtatttaggaagtctatgcaaaaggtccccagtgaggaaagaccaggcttttagtgggggagtccttagtagtttcatctctcctttctaggatcagtaatctagtcctactgcttctccatttatcagacaaattcccatgctgacagttgtcatattttatgtaaaccagttatatgttgctgtaacatcttgttttacgtacacatttactctttgcttatattgctactgggtagatttggagagctggagatgcctatggcatatcagttgtaaactctgttggtgctagagttttgtgctggtaattgagttttgaatcttattaacttatggatccatcatactttcaagtttccataacatacattggaaatttaaaattataataatatttgtatttattgactttttcctagtgtctgaagactagaataatggacttgaaatatttgcacaaaattttgatgagatataaaagagggttttaaagcttattttctataaaaaatgagttaaaacactttaagagaaatatataaatttaagactatcataagtcactttttgggtttcctaagtttctcttttctgttggtggaaggttgaatgacagtttcttgaaaagtagatttgggggaaattaagttgtaggtaggaaagaatactttcttaagagagattgctccagatgtcctatggaaggtagctgtgggttaagagagattgttctagatgtggctgtgggcctccaagtgaccatgtacaggaacccagctgggcttctggcaacttcacaagcagttgagtgaatttacctcatgtttgcccaaatcatgccatctttaggctggtcataatttgtttaattcatagtaagatttctcagaaagataaccttacaagatcag

SEQ ID NO: 22617 - DNA, 1205 bp, Mus musculus
catcttaaaaggtttctcatacctgatactgggttttcattagacatggctcttgcaggggctgttaatcactccaagtggtacaacttaatttaaactacataatgtatgtatacatgtgtacttatatatattatacataattttaggtaaatatgaaatgattattttctgtcattttcaaacgtgattaatgttattttccctcctcctccttacttctgtattatcctccctttcctctcctgagttaaaaattctttcttgtttttctcatttccccctttatatcacctgcatcctgctatttccccctctaggtggggacatccaaaattcaaaatatagtacatatgaattttttaaaaaagttttaaaaattaaaactactttattcttgcagtacagaagataaatctaagttattatgtgatgatactttcaaaataaatgcctatataagttataggtatccagatgaggtcatggtactcttactccttgtgttcacaggatattctgaataaccttgagtcgtgtgaccttgaggatgatgaccttatgttggatgtggatttgccggaggacgcacctcttgaaaatggtaagtgatggtcagtggtaagtctccagatgcatgcctgcaaatggctgcattgtagcagcttcttaatctcactggaaccgttagagggagaatcagcctttactggcgtgagataggtttacttgaatgttacatgtttaaaacctgattatgtttgtcttaaatataattctgtatgattcaacaactttctacacctttatcaaaacaaacggtagtgtatgtatgtgtgtttaacaacccagttttccctcactcttctttattttgaatttcaaaagaaatatatgtagagaagcatttgtacagtaaagcggtataatatatctggtaactattttaaggtcagctctgggaaagcactcaccttctgactgagccatacattaccttttgactcctctgtaccgataggtggttaatctgctctaatctccctggtggtggctgcttgagttccttgctgcccacccagatgctctggattcttgaatgaaagacacacacacacatacatacacacagccttatatctaatatgcctaaatcagctgaatggctgggccactcccacacttccacgttgctaacgcctccc

SEQ ID NO: 22618 - DNA, 2109 bp, Mus musculus
ccgttcagtcttctttggtgtctgagctcaagcaaaagtttgagaagaagagtttagacaacaaggcctatatctagagtgtgtcccatgatttttctcttctcttcccccaattctgaccctcaaggtcacccctattttgtataatgttgtaacactatatgcaggactctacaaagggctttgggcaagagatgcctcagactgtgagatgcagttggcaaatacatacccactgcccaaatccttgacacatctataatgctctctattcttcagagaatagaagtccacaaggagtcaagtctgtgtatttctacccaccaactctagaccccacaatcactggagtcctcctggggccttgtcatctttagttgagaagtagggcccctggccacaagtaacaagagtggcaagaatctggatccccaagcttcagccaaccaacaggttaatggaggtttgttctcagctgaagttgaaagtcagtgagctttgtaggatgtagcgatacaaacaggtaagaaaagggccaaaatgctctgaaagctcatgttgactgtgcccaaagccactgagctatagaattagcatctagataagactatgctcctgatggtaggtgtaaggtgacctcttcctagacagagagcagaaatctccagcctcccttgaagagacaaggcgaggtggatatcaagcttgagcttagggaaggctcccattctgatccagctcttctcatatcacgtgttcttggagatactgttaacatcgtattgtcttcttccttgtctgtaagatgaagaaagaaaaccccaggaaaatggtgagtctgggggttttaagcaagtgcaaagcattaggattacaaagtatttgttggaagccagtaatctggctccatctcattcagaaagtgttagcacccaggaaggactatgatgaggttgggaacagccagcctgataatggctttccctcaactcacataagttttcttctgttcgccactctccaccatgtatgtcattgtcacaaagaaccagagtcaggcagtaagctccagtccaagtctgtttggctgagacagggaaatgactctctagggttattgactccatgcatgcagtgaattggtggcagggatctggtctgagagccccccattccacactgttgactgtttttctcttcttgggatttatcttgttcatatgtaataatcttgaggagggatatcctgcaaagcagaggattttggtgttcttttgagaaaacattaaggatatcatatgtatactctatgaagccctctagaattccagagttactgatgtggtcagattgtatgaacatgtggttttcttgctcaccccccttaccgcccccagtctgtgtttggaggcgttacatagacatacgagcattcagagtcctcatctggaggtctgtagtctctggcccacgtagtattgagggacaggacctaacctgctaaagtccagcctggaaagtgctgagctggatcatgtttgccaccacagggagttcagcatcctataatatgcatgctgttaacctcttctgtaaatggtaaataaaatctattattcaaaggataaactgacctcccggtcctcttgtatttatgtatccttgacttacagctcattcagtgggtgatgttgctcctgacctccattctgacactgagggattttgcaacattttgtctaaattgtctgcctacatcttcattactgtaccattgcagaccttgtttgttcaggacttaaattctactttttccccccaatcaagaagagtccagttgcgattgcttggaggaagaaataggtctggagcatggactaatgactcgtaggaaaatccagcaggaataggatttgtaaggccttgagtgtgtgcgacagccagaaaagcagttcatctttgggaacggggagtgaagacctctggactggaaattccgctcagcactgtagtccttagcaggatggtggggctttatggacaaactcaagaacttgatccaaggaaaaccactgaccatggaaggggaaagggcctagtaggaaacat

SEQ ID NO: 22619 - DNA, 1417 bp, Mus musculus
agtattgttttatgtattggataagtaaaatttagcaaatttgcgtgtcttcatattgtggaagcctgcagaatatttcagtggcatcatgagtgacaagtttttgtatagaggtcagagagataaaaggcacctgcagtcagtttgaatgcccaggacaacactgattgtggtgagccagtgaaagacatcagagatgtggaacaagggaccaccaaatgtggggttaacaaagacacggatgtttcttctgtgctcttaatgtccttgaggttgactgctcattgtcaggacagtccagagtgttaaccatacagagaatctctgctggaattatgtctgtgttttactatgaagtctttagaacaagcaggttggtggtggcgcacacctttagtcccatcatctgggaggcagaggcaagcagatctctaaattcaaggccagccaggtctacaaagtgagttccaagccagacaaggacctgtctctaatacaagcaaacaaacaacaacaaacactacccgctatgctcggtatgatgtactactccaaagctcaagactcctttgctgtcagatgtgtggtgtatatgcagttggacaggatttaggttttggtttttggttttgttttattttgatatttttctcagtgtctaattgaaagcatgcttgctttctcatcacagctttgacagctgtcagaaaagcctctttgtggcttatgctaagattaggattggtttttcttctaaaactgttggcttcctccgttccctctcagcttaagcatgaacaaagcaaacttagttgaccttgggaagtatttgaatgaaaactggaatggggaggtgctcagcttccttgtgacataagattttaatacagatcacttgtttgtggtgaggggttcttcattgaagtctgtatgtatttacaaaataactatttttgagaagtatttattacagtaatccataagtaattcttttaatcactttaaagtacactgaatgctaatttctgaaataaaagtttcagctaagtggctattgctgtacttttttctccctgatacgtccagtccatctcagcagagtctcggatacgaaagcagcttgagcttttcctgtgcctgcattcctgcagtctgctaagacaggagaccagtgactagatggccggcctccatttgcatcttgactgattcttatatgatcctagacaaatgacctaaccttccctcacctgtaagatggagacaacatcctcctgtggagtgaatgcagacatgactgggcattgtgtgaattttagctgttgctgttcggtttttgtttttgttttcccctgcagtaaaaaaaactctaagtgtctaatttctgtctttagtctccataaagtttcactgtcaa

SEQ ID NO: 22620 - DNA, 1203 bp, Mus musculus
tgaaggtttttatttattttattttattttattttattttattgtgtgtgtgtgtgtgtgtgaaggctactgaaatgcctcagtggaaaataatttattacaataagagacatgtctcttttatttttggttaggagcctgacctttagtgcttgagccatcttttcagcccaagaggttatttcttggtatccatgaaagagcaccctcctacaacttttgatagaatcaaaccaagaatacttccagtgttgcacaaaggaatacacaagcaaagtgaaagtagatcggtatagcaaactatttttgttaataaataaaaaagtatgtgtgatggtttatatgtgtttgttccagggagtggtactattaggaggtgtagccttgttcgaatagatgtgtcaccgtgggcatgggctttgataccctagtcctagctgcctggaagtcagtattctgctgctgcctttagatgaagatgtagaactctcagctcctcctgcaccatgccggcctgtatggtgccatgctctcactttgatgctaatggactgaacctctgaacctgtaagccagccccaattaaatgttgtccttataaaagttgccttggtcatggtgtcagttcacagaagtaaaaccctaactaagtgtgcaacaacctaaagcaggatatcgagcatatctggcaggaagttcacttgctttttactcacaccaggatgactctctctgttccccattgactggggagccaccttacaacctttatgattaactagttttaaaagaatttgtgcaaagaaatggagaaaaatgagaaggtaacagccttttaattcacccaaattcttgattacttcagggcttttgcataaacaacagttttatccagtggtgtgatggtgaggcattaaaacatttgcctaaaggtattacaagaaatgtgagtgggagcctgataaaaacgtttgcatcaaagtcttacaaggtggactggagagatggctcacaggttaagagcactgtctgcttttccagaggttctgagttcaattcccagcaaccacatggtggctcacagtcatctgtaatgagatatggtgccctcttttggcctgcaggcatacatgcaggcagaacgctgtatacacagtaaatcttttttttttttaagtcttactgaaaggaaataaaactgta

SEQ ID NO: 22621 - DNA, 1134 bp, Mus musculus
tttagtcagccagctttcttatctgactctgcacctggcatgctagaatagtttggaaagtctcttcagaggggggaagggctgggtggtcttgaatttattttggatcctacattaggatcctagtgcctgagagcatggaaaacttccttttgttccttgcagagttttctgctgggtctctgggggtataaacctagctcaaccaaaaaataggctgtgtttcacagttccacacccacatacctatggtcatttgatctttgacaactgtagtggctattcctggttgtcaacttgacaatatttggaatgaactgcaatccggaattggaaggctcaccagtgacccttatctggaggcttggagatccttatctggatcttggtttgaagatcttgagccatagtggctatggattccagaagattgaatctctgagtttaaggaacacacctttaatctgggctacaccttctactggagacaatataaggacattggaagaagggagtctagctcttgctcttgctccttcgcctgcttgctgcgtgagaccgagtaactgctagatccttggacttccattcacagctgcgactgaaccattgttgggaattgggctgccgactgtaagtcatcaataaattcctttactatctagagactgtccataagttctgtgactctagagaaccctgactaatacaacaacgatgttaaaaatattgagtagaaaaaggacagcattttcaacaaatggttctggtacagctggcagttagattgtagaagtatgcaaatcaatccattcttatctccttgaactaagctcaaggccaagtggatcaaagacctcttcataaaaccagatacactgagactaatagaaaagaaagtggagaagagtcgcaaatacataggcacaggggaaatttctctgaacagaacactaatatcttatgctccaagatcaagaattgaccaatggaacctcataaaattacaaagcttctgtaagacaaaggatactgtcaataaaaaaaaaaaaggcaaccaacagtctgggaaatgatctttaccaatcctaaatccgatagggggctaattttatatatatatctcaagaagtt

SEQ ID NO: 22622 - DNA, 1099 bp, Mus musculus
gtgaaaagtatgttttctgttacccgaagacaactacagttaaggatccttccagaaagtgtctttggatctttatccaaatgggagtcttttttttctttcttttattttgggggggggggtcagttttctgtagttctttttatgtattgatcaggtacgttcacttggttaagccacacaagtaagtggccgttgctctccaggggattatgtttgcagttccaggtaatagaaaaccctattaacccaacctgaacaatgagtggagggttttagctcctgaaactggaaagtccagaggcagcgcgagtttcagggttgctgtgatccaagtgactcagtgaggtcagcaggatctggtttcctgttcgctgtctgccagtgtcttcatcgtcggagattgggggtgggggtgaggaggggggctccacttgagactgcctctagcctccgtgatgggtcatcacggtagtgaggtcaaggagggtcagcctgcctccatgtctgctccttctgcttcacgcacatgttaggaaatgaccttccctgtaggatgctgggaacgctgcggtgtgagtttcccggtatcctcctgtgggctttgctcttacagtgtttatttaataaataaacacacagatttcaaaacaaaacacagaaggtgcctcagtatgggctggggagatggtgctgtgtgtaaagggactttttgggtaaagggacccgcatttgcatgaatgtctgcaatcccgctgtccctaccgagacaggcaaggtgtagacagggatatcccaggaggcttgggagtcagctagtctggcctgttcagtagaagaacaaagagaccctctctcaaggtggaagtggaggaccaacaccagcggttgtcttctgacgttcatgtacgtggtatgccatgcccacatgctgagtcacacagaaggatgtgaccctgttgtacctgagtcacgcacaaagggaacaaacagaaactgcagagcttcttatccgggtcgcttagtcacttaagaggatttagatatttgtttttttccctaaattgaattctccaggaagaatggatggttatgggtg

SEQ ID NO: 22623 - DNA, 1476 bp, Mus musculus
ttccaggaatggaggaagtgctcagggtacataagttaataaactcatttggttcacagagcagttccgagaaagccatattcatgaccaaagcataaatttcagagaaagatagctccttgccacccttgcatcccctcagtgtagcttctgcccagtgactagcctaggtacagccccattccctgagggtgttccaagaagctcctggggctatggagggctgcagccatttggcaaaggtggagtgtagatcctcttctctagctggattggatacttgatgggaaagttacccacaatgagtaggggcactgccctggcttgcagctctggcaatgggcagtgggttcatttttctaagacccaaattcaggtagtactgtgttcagtcagcaaactgctctctgatctgtgtgaagcactagtttccccaaagcacagttgttgggaaaggccagagttgtcagtcacatggaagctcttggatgggttttctatgctgaacagtgcaggatcagacacttccttcttttaagagacatgttggaggcctctgaggcagcatgtcggctgctcctgttagaaggctcctctgcagagggaggaagcctcagtgtctgcatgagggacgaccacttgattgcttcccggctcatagcgtcagacatgccagaattggtttaacttccccagctctgacaagaaagaatgtacatgaccgtggctggacttttgttccagtattacgtttctctgtgtccctgagactcttgggtaccacgttgttagcctggaactttgggaatagcccaccgccccgttgtgatcttcgtggaggtgcttgtgttgaacgtgcccagggtgggtggcggtggcaaactttgtgagctgagcttattcatgtagcgtgtaaaagtgcccgtcctcctcaaagcaaggtaaagggatcgccctttggtcagttactcttggtgtctccagggacctcctggaaaatgtcagatgagtattataaaatgggctgggggtgggtggggagggcaagaaaaatggcttaggaattaagagcatttgttgctcttccagaggaggggtttagctcccagcacacacagggtagctcacaaccgcttgtaactccagcaccctcttgggaactgtgggcactatgcacacatgaatcgtgcaattacagaggctgtgggcactatgcacacatgaatcgtgcaattacagaggcaagcaaattgcccatatatacataataaataaatcttttttaaaaagaggcaaaatcctgggagagctttaggagattgttaagggatgtctgtgggggatgctcgcttcggagtgagaggacacagctactccctacagagctctgagaattatttcttcacttggctttcttctatattctgtgcctcatttcccagcaggggcttcaaaaacatagcttaatgactacca

SEQ ID NO: 22624 - DNA, 1382 bp, Mus musculus
tcgtttctccatagcattaagccctactgagggccagctctcctgttcttatagtgtgtaaatagtttatttataggggtaagagtgttccttcaccatatcttcatagcctcttccgtctggcattcttttctcagcagccttacccagtgtctgggaccaagctgtccttttcagttccccgagtgtcttaagaaccagctgtgacagcttctccctctggttcacatcccctccatgcgcccctgcttggcttccctgtcttctggtctcggtgctactgaaatggccaccagaacttgaatcctgactgaccctttctccttccccgctgccctccagggagccccagctcctgattgccagctggaaactgggttcctctcacgaccacatacagctagtggcccaaagtatgctgtccctggagggcaacgctcctgcagccaggccctggcaagcacagacagctggtgctgtgtggaatgctcagtgcatcttatctctaacttccgtggtgactcccccacccacatgccgtgttcactgtcagcactgttctgaggctgctcttgaaaatgatgtctgtcttacgtactggatactccgaggcatgctggcgtctgtccacctggggctgggctactctctagtgcttctttataacttgtatctgtccttaccgttcagggattgagtactaccttcagttacttgccgaagtgtacattctagtgtggtgtatactggtgatactggtgggggtgtgttcatgatgatgatgatgttataattttctaaataattctctatagactagaggaagaagaatgcttgtgtttttaggaagtgtgcagcttctctttgacctgccaaactcttttatggaatatatctttatattaatgctgttgtttgggtcttttttttttttttcctttctggtttgcaatcactattaaaacaaaaaagcattaagcattttggtgataaattgagccactgagtcaggtgtgactggtgtacaggaacccagtggttgaggcaagccatcgtttgcacattctgacaaattccatgtatcctccacattctccctgcagttgaaactaggtggcttacagctttgccattcttggctgtaagcatcagctgcgtaactttcctctccaggactcaaggaaggattattctcagttaattttggtctagccttggcagtattgcccatccaggcaaaagttcatggttccagacaggacactgttgcttgcacgagctgtagacttgctggtgatctatagtaggtggggtggatggtcattggccctgctggaggccatggagagtagacactccctgctggcgtgttgacaccaatg

SEQ ID NO: 22625 - DNA, 1118 bp, Mus musculus
aaccgtttcttaagcttgagtattatagtctaatctcctgctttagaacaagtgcagattggagtgcagaaacaggaagatgtgattagaaggtgccacgtaagccagaagtgagcggagtctgggtggcctgctgtgcatgtgtgcacgtgcatatacacatgtgcttgtgtgaacgtgcatatacatgtgtacttctagcatatgagaattcagcagtaagacacagtttaaccagaatgtagcaccggacactgaatttgccagcgccttggtgttaggcttaaccctccatggtggtgagaaagaagttcctgtcactttaggccactatggtactttgttgtagcatctcaaaagaccagagagatgcatctgtatgaaacctagtgtcctgttaagaatgtcatcgccacttggggcagccataacaaaatgtagagactggcaggcttacatgacacttattttgtcacaattctggaacttagtaggtcaagatcaagctgtcacctgagttgagtccttctgaggcttcttaggaaggctctgttccaggcctgtcttcctggcttggacatctccccgcctctcatgacttccttctgtgtgtactactgtcctaatctcctcttgtatggacagaggtcagttgatcagaccataccctggtagcctcattgaaacttagctctgtaaagacccgtcttcaaatacagtcacaacctgaggttcagaggtttggaatttcagtgtgggagcatgatggcacagtgtattccataatacctctaacatctctgttaacgtggagggagatgatgggaaagaaactgaggttgattgccacttatgaggtagaaagagtggggtgtgtactgggacagtgtccccatgcactgacaggttttttagggggattgacagaaaaggagctgcctgactctctcccagaaccaagcttaccagtaggagacagaatctaaagagccactgcccttctttcttccaccttctgtgactccgaaagcatggaatcccctttcctcttcaccttgagagacacatttttaattccaggctgcagattaccttgcatctccagatgtggagattca

SEQ ID NO: 22626 - DNA, 1191 bp, Mus musculus
gccgggttaagagctaataccagaggagcatttgcgcggcgtaacttggccgagcgctcaactctgcggccacaagcgatcgacttcgccagcgtccgggagccacagagagggcggaaccgggtaaatcccgtttggggcaccgcccagagccggacaaaggggcgggtcagcgatccgcctcattacctatggatgaccatttgtagggcggggtgcacggtagggggtggagcacggcgacccgggggcggaacacaggcggggcgtagagaaggcgtggtgatcaatgtgggaggggcaatcagcggtgggatgtgggctgatagcacagtggggcggagcgagcggtgagagccaggcctgggtgggggggaggagcgaaagatggggcggttcctgcatggggaggagcaaagagcgggggcggggcttgggtgcgccagacgcactgggcggctgagcggtgcgaggaagcggcgcctcttttttcgccgcggccccgcccctccgcgccccgcccccgccgctcggacggcccgagtcgcgccctcccgctcggagctgctgaacttgctctaacttcctcggccaaccgggccgtgctgccgccgctgctgccgcgcccgggtaagtagaacgcgtggcctcgctgaagcgtcgggcctgtctttattgtctcgggccggccctcgtgagcgtcctctcgggacagcggctgctccccgcgttcctgctcggcccctggactcccttggctggcgggggcggccccgcgggtggcgcgggctttgtctgctgagaccgcccgcgagctctggaggccgcggccgggaccccgctgagccgaactggggcgctgtatcgagtgggaggcgcggcgggctacccggaaggtgtgtctgctcccggctgctgcctgggctctgtcggtcctcacctgcgaacccagcggaaggctctttattcagctccggtcccggatgaggggacggtcgcccagcccccacccaccctgaatgtgcacgctgtcgcggggtcccacgctgtccggcaagagtttaaggaggtggcgatcctggcttctcggtgctagtcgctaaaggctgtgtttgggagcagagcccgacccctgacctagcccgaggtttggccaagttgtgattctggctcagcctaggttggagctcc

SEQ ID NO: 22627 - DNA, 1133 bp, Mus musculus
ctgctctgggtatagtgggatggaagctactgcacattaataacccaatagggaacagagaaccataagtggtggagatgactaggcatccctaatagccatatctcattttgcctttcctagcataatttccaattctatctggctacatacatggctttccaaaataaaggcaaatgtttctgctacatatgaccatgtgactcagttccagccaataggaatggaagggtccacgtgcagcttctaaactaactttaaagggaagcaatgtgctttccttggtcagcattccttccaggaatatacttataaaagctatggctccagtagccatgggtgtctgtagcagaagtcacgtggtaacgatgttgacaaaccaaattaggataactgggttcccaggtctagagaatcacctatcctgagctatctttctatttactgtgtagatgaaaggaagaaaattatcttattcacatttatctactttccattttaaaattttacttatttatttatttatttattttgagaaaaggtctctctggagccctggctagcctggaacttccatgtcgatcaggctggcctcaaactccacagagatccacctggctctgccctcatagtgctaggattaatgatacttacagcccacttttgtttttgttttttcgagacagggtgtctctgtatagccctggctgtcctgaaactcactctgtagaccaggctggcctcgaactcagaaatccacctgtctctgcctcccaagtgctaggattaaaggcgcgtgccaccaccgcccggccagcccactattaactttaatttgtgttagccagttggggaaggaggatttaggctacagagaaaactatgggagatttgtatagtaatgagaatgatctgggggaggaaggagtaatgatttgatgagcagatgaacgaagttgggttgcaggcacaaatcagagtggttgatcacatgaccttcactagctacaggtctaatgaggttatatctgtcgctgtgaagatgagagtcaaaggctacggagctgtttccagtgagggacaggattatattcacctgatgattatattcacctgatgagttgtggggaagg

SEQ ID NO: 22628 - DNA, 1223 bp, Mus musculus
tcccctttagggcatccttcttgagcaccgagaaaaagaatttggagacagagtgaacccactctctgttctggaggctgtaaagaaaatcaagctacagactccagcgtccgggagaagctgatcctgtacagctgctggctgggagagaacgcacggggcctgtgctgtgttcatcagatgagctgtgctttccccagggccccaagagccagaaggcccttgcaccatatttactaagaattggtgatgcattttaacattgtctgtttaggtcccagagcctttaacattccgtttaggcccagtagggcaaatagggtcccagacagaacagagttcaatctaacaaaccagtgagagttatttgaggaaagatctagaaaatttaatgtttaaagtttactgctgaagcttctttcaaaggaatatgtcctaagtgccggtatttgaagtgaagtttattttcatgcctagttaaaaaacaaacaaacaaacaaacaaacctgaaatctgagaaaagtgcggctaagaaacagctcagtggtggagcatttacctaacatgcacatggccctaagtgggatacccagacagacagacagacagacacacacacacacacacacacacacacacacacactctctctctctctcctaagaaaagctgatggctgacttgataattagagaattatccttttgtttgatgtgttttctgttaacaacttgttacttaaggtcagagtaccacataaagcaattgctgtgctgtgttcttggataaattacacaggtaaattacaaagtgaaggttctgtggtcttcccttatagacgcagagatttgcttccttgggaaaaactgtcacctgggaaactgtcacctctaataaaaatattcaccaggaatcacctctgtgcacaagtttctcttgtccttgttcctcttgcttcagcctcctacactcagggcttatagacatgagccactacacccagaaagacacaagggatttctggtgacgagtaacaaaagccagactactagctacaagtgaaaaaaatgtagagctggagagatggctcagcggttaagagcactgactgctcttccaaaggtccggagttcaaatcccagcaaccacgtggtagctcacaaccatccgtaatgagatctgatgccctcttctggggtgtctgaagacagctgtgcttagat

SEQ ID NO: 22629 - DNA, 2549 bp, Mus musculus
agaccaccagtatgccatgcttgagaatcagaagtacagccacacacagtacagctaaggaatggtctttgctaagcctaccaaggtaactagaccacagctaaccaccaagaacagccattcatcgttttgatttctggatctacagtgactgactgaagacctcaagtccagtgactgtccctgttgcactatggaagttcaagagtcacgactgatcttgatgtgtgttggatttaggggtgtttcattgtcttaaatatttgtgaattagattcaacagtgtttccatagttgctctgcgtataaaaccaaacctgcagccagtggtcattcaaacatctttatgttcagatgctgagccttcgcaaggttgactagctcagatttgctgcccttagttgtggatttcatgtggatcacatcttctacataaggctacagctactagtgtctgtgtgaaccttgaaaccaactctactggattcctgtcagaaagccttcagaagtcagccatctgggttctgatccgctgtaaaagatgaagagttaagtgaccttaattaacctgttctgtgccccatcctaaggcatactctgtaggctgtggctatgttagactccctggaacaagccgctgtcagaaatgatgtgtttggatcatctgtgtggggcttatgatttataattttttagttgtatgcgttaactgtggatttagttcaaccaaactcgggtccaccaaatggggagtgggtggggggggtagtcttatttctttgaataatttttcattcagatagtgcttgttcggttccacattaaggccttgctttgactcggagtaagttctttaagggcatattgtctgaaatatgtctgaaagaagcattggaattgtaaaatgccctatgaatttgccaatccttaggtggaaccagatagcctttgatgcatataaaggacagcggatccgctgcactccaggtgctgctcaagcctcctaatcaggtctaattgaactgctgtggacagagtgtggtgtctgctcactgctgtggacagagtgtggccactgctcactgctgtggacagagtgtggccactgctcactgctgtggacagagtgtggccactgctcactgctgtggacagagtgtggcgtctgctcaggaggagagggtttcactgagctggcttttaacagttcaaagcaacaggagcaaaacacccaagttgagcatgaatctagcatggtgtctgataaatccttgtgtgtgccccaaatgtgaaggttatgggctattcattgtttagccagctcttgacattcaccttgggagtatgtttggtaatcacttggagacgcaggagaatagtcagtaatgtagcatttctgttgtaatttcaatttaactatctagtagtacttggctcttagaagaggttactgctaaatttctttctacctaatgaaatagcctgtcagttacctaccttgtcactacagatggttcagtacacatactctgtgttggcatatgactatgtgatacaatactagtgcctgggtttctctctgtaaacgaatccctttgccaaacacaggtcagacttgctcactactgacaggagtgggacaggaaatggatgttttcccagcttgggagcatgtttagtggatttagggcagcagtgtaggaagcaggaggtggaggccagtgtcacctgaccagactgtatgccacttcagagcaataatgttggcatgatctgaaccagccaggaggaggttgagtgattagaggcttgagattcttagttgaactgaagacttcatttgggcaccagaaacgttaacaccttgagccacaaacttcccttaaagtatgctttactccagcgtgacacacaaacacaaattctgtttggggttatgttttaagacgtgaacagaaacatgatgaggtttgtttaatggcatactgtactggaacgctgaagaactgcagcagatgtaaattccaagtcttgttattttttaagattgcgaaattatcaaaatgcatatgaatcaagttttaatacactgtctgggtggatgaggctgtccattgcaccatttctttctttgggttctcaggcatggttctgacagtgtaagaactctgtaacatttaacattgaataaacagtaaacctatgaaaaaaaaaagaaatcagatggcaaatctaaccaccaaacatgtggcccaaagagcaatgatcctggaagtgaaggagcctaaagattattataatgtcagagagaccagctttagatacacgcctgaacactatcaagttatggacattacttgacccacctgggggccaagaaattaaaaggtgtggttaggtcctttaactattatgttacaggactctctgacttggcagaagaaatagtcaaaagctacaatgcgtgtgctatgacaaagtaaaattttcagaaattaagccagctagatatggcaacaagtacttattagtgtttatagacaccgttt

SEQ ID NO: 22630 - DNA, 1140 bp, Mus musculus
gacagggtaaggcaatattttttacatgaagcatccgttgcgatgttaaatgtcatgtaattcattttggaagatttaacaagtaagctgtgtttattgtagtcagcacagtaatcagtagtaaattaagtgtactggttcatgtttttataaatgattttaacagggtgaggagccgagcacatacatagatatttaactgaaaaatagaaagtggttgctcctgtttcttcatttatacactgtaatacataaacacagagttattttgacaacaagcacctcccccaaaataaaacattctacctgcacatcttcagcaactgtctaaacagcaaaactaaacaggaatatgacagcaggtccctactcttagatcaacctgatgccaaggcttcgaaggagattcagcatgagcctagtgaatcacagttggtgcatcttaaggacatcattttaaaagatttcaaagtaaaagtgaagtgcttaaaacatggaaataggccgaaccaccatgtcacagagcggggaggagaacctgcagggctcctgggtagaactgcacttcagcaatggcaatgggagcagcgttccagcctccatctttatttataatggtgacatggaaaaaatactgttggatgcccagcatgaatctggacgaagtagctccaagagttctcactgtgacagcccacctcgctcccagacaccacaagataccaacagagctgaaagagacagccacagctttggcgagaaaaacagcactctgtctgaggaagattatattgagagaagaagagaagttgaaagtatcctgaagaaaaactcagattggatatgggattggtcaagtcggccagaaaatattccccccaaggagttcctttttaaacacccgaagcgcacagctactttcagcatgagaaacacaagcgttatgaagaaagggggaattttctcagcagactttctgaaggttttccttccatctctgttactgtctcatctgctggccattggcttggggatctacattggaaggcgtctgacaacttccactagcaccttctgatgaagatttggatctgacttctgttcacacagtgaggattcatgtctgagctgtgacagcta

SEQ ID NO: 22631 - DNA, 1332 bp, Mus musculus
cctcgtgggatggcctctctgtggcacaggaaacccgagatcaaatctgtaaaggaacaggactaaattatgccatctctagacaagtgccattgaatgggcttgtgatacaaatgacatgtaaaatttcttagtagttactcttaaaaaccgtaaaccgagcagataaaccccagacagcttaattactacgaaaatgttgacatttactttttaatgtgaagtcttcaaaatacagtccatttcacacttaatgcctttcctcactaaggagatccgtttttgagggcttatttgccataggtggtacatgacagttgtatagggcagttcactatcagacaaacaccagtgtgcttgacctgggtctagccatcctgtgcatttgaatcaaattgggatgtaactccactgaatcaccgttgactctctggttgaatcataactggcgtttgtatttattttcttgtagccatattaaaaccagtactttccaggatatttggcaagatgaagagacagttttaatattttgatttagtgatactattggcatctacaggacagaggttgaggtgcccctacacccaaccactctacactgaatagatggatcctccatcaaagaattgtctttcttttaatgtcattagtcaccaaggttgcataattagcaaccttgtagtagcctgtagcacagtgggatctgcatatcttccgtctagttactgtgtttgtaaatctttggacattaaaaatgagtggctttcatatcctgactattaaaagtcattttaaaaaaaatattcttttgcattgtacatgtttgagtgtttgacctgtgtgcattaaatgtactgcatgcattcctggtgctcacagagaacagaagagggcattggatgcctgcggactggagttgtggatagagtaagctgccttgtggatgctaggaaccaaactggggtcctctgcaagagccagtgctcttatctgatgagccatctctccagccacaatttttatactttgaagaagcaataaaagtctcttcaaaaggacttacaatgtatgtaaatctgtgtgtgcacttctctgaatatacatatctgtacattttaagtctataagtgcaactttctatatacgtatttgtggattataagggagtcttaagtgagcccttatctctctaagttagaatgctaagtttcagattaaataggaattaaatattgtgttactgtctcctagcaaaaagaggctgccttatctgagtcatgtatgaaatctaccccttcagcttggggaaaagcaaatggtcttcttggg

SEQ ID NO: 22632 - DNA, 2569 bp, Mus musculus
acttgaatattaaaagttagcttgtgttgggcaatattatcttgggttttccttgccagattaaaaactaaaggatataagtagatttatgtactttttttttttaaatgtttacctgatggtttatttatttatttatttttatttcttaaatttatttattgttatatggaagtacactgtagctgtcttcagacacaccagaagagggcatcggatctcattatgggtggttgtgagccaccatgtggttgctgggatttgaactctggaccttcaggaagagtagtcagtgctcttaaccgctgagccatcttgccagcccttatgtacctttcaatttgttgaaataaactactttaaaatttttatatattctaaaaaatgcagaatgattaatagaatttatgaaagacagtttttacatgaaatgtttcttggttacaggatttccacaagtgtgagagaactagagaacttcaggcacttgttacagaatgttcactgaggaggacggttggaatgtgcctgtttctgcacaggggaatctgaagggcagaatctctctgagcaccatggttgcaatgactgtcctaagccaaacgtttatataaagctgcttttgtaaaagaagagatacattgtcttaagtaaatgacatttttaaaaattgtgttcatgtttaatattattgtgaatagaagtagtattttgataatatacaaattttaatactaagcaaaagtaaggtcattaaactcccttatgataaagctaggtaaatattgccttaggctctcaaactagagttgaatttaagaaggtaatgaaagctaagctaaggtacctgtgacaagtgtttggtaataaaatactaagaggctcagcagtaaaccatggttatcagcctcagataccaatgctttttcatttgcctcatatacaaagaaaatacagactgcccagttagatttaagttttagaaaagcaaccagttttcctttcaatgttaagtgtgttgaagtttattagggcctatttatactacaagttatttgctcgaagttcaagtttaactgggagccctgtgttttcctggcaaccttaaaatacactggtatgaaacattccttttagagttaaatagctattttgattgtgctgttttggtatgttgggaagtagaacaattcaaaggcacaggagatttctaaacatcgtagaaagataaatagattatatatttattctcataatagtttccctaatggaattttggggaaaattttatttttatataatttcatatttacagaaaagtttcaaaaacagttaaaaaaaaaaccaaactggttttactcagattcatggattgttcacatgtgttttaacccctcaccccagctcagagtggcgattgagcccaggacctcagtcatgctgggctagccctgcattcatgagctgtgtcctcaggccttgcttaagctcctacatagacatagacaccctgtttttatttaagggtttgagtcatgggcctcatgatttaacccaaaatacttcagtgtggtggtcaataatttcctaaaaactattttttgttttctttttaaaggaatatccaaaccttacaaatctgagctgaactacttactataagccttaaaataaggagacatcccacatcccagccacctgacgtttgaatttggttgcctttttcgacctgtgtagtcacaggctatacaactcatgtttttacgcatgaaactctgtttttctccacaggatggagctgtaacgtagataggatgggttgttagtagaagctctacactgagagcagtatttgatgtggcttaagaatttacatcacatggcaattataaatggcatatacctcaaaattatgcccccttgaggtcacatctaatgtcttgagcagttaggactggttgagatgtcacataagaaaaagcaggacttacgtatgtaatggctaggaatgtcactttacactgttgtgtattttctctgtccctaagacttggtctagtgccaggcatacagttggtgtctaatatttattgatggaaagtatatgtatttagtatacgttaagtgatggtgatgtagcttgtttagtaatgtatcctatttccccctccctctcactttttcttttggatctcataataaaagacatcaacccactaattaggtcagttttcttggggacttaaaagaactaaatgatcaccacacacaagccagcccttttgaaaccctcactgctttcacgtgcttttcccacttgattggctatgtcctctgtccctccaagtgaagtctaatacctaattctaagtttatagttaacaagcagtttaatttttaagaaatcttaacttttcctgtacatgacacaattgacaatccctattcctttgtgtccttgtgtttggattactcctgggtatctttcttctggtctcttcatttaacctaagtatcattcctcagactttttgctcttaagtcactggaccgtacttttgagtaattt

SEQ ID NO: 22633 - DNA, 1198 bp, Mus musculus
gcaatttgttttgttttccacaggtatgtttgcaattcgtgccgatcatgattttgtagttcaggaagacttcatgaaagcagtcaggaaagtggctgactccaagaagctggagtccaagctggactacaaacctgtgtgattcactagaagggtttggtggctgcatgacagacattggtttaatgtaaaaataaagttaaggaaaataatgtatgtattggcaatgatcttattaaaagtgaataaacatgtataagcaacataatagtatgtaattcagtaattttttaaaaattggtacagaagaaagtcatgtttggtgatgttgcatttacttcagcagaatttacaaaagacatcctgaagcttttcatatttgctttgtgagcattttgtacaacattcaaaatgattgagatagtagaggagagcatttcttatgacttattttatattttgttttcctcgtccttaaaaaaaaagcaataaaatctgttttaagttgtcctatatatactcttgtcttttctaaaagcacatttattcttgtccttttggattagtaagtatatgatttgaaaacctggatgaagttgaaaattaaaatagggctttgaattttaaacagtactcacagagtccacaagaatgtcttcttttatagatcatagagtgtggggttatggagtatatacatgtacttgtgtcttccaagaaattctctttacctattgcagttaggtatttgataattttaactttttaaagattatgactggaagtaatacttataatttggtttatgtgaaaaataattccctttttgtggtctggatccaggaaaagtctgttcatggacatgtaattttacatatatgtgatttctagcgatctattatttcttaggttcaccagtggattctataaatatcttccagtaaataccaggctgagagtgtctactctatggaatgttaaatgttcaaaacaaaagttctgttacctgtacacaattctaatttcatgtggcaatcaaaagttgtataaggaaattgtcaatgtctaaaaattgagattatttatagttaattcttgtttaaataaagacatcaaacttcagtttcataaataccaaaggactaaccataaatgatccagctaggtatgtaattcttcttttctctctctctctctc

SEQ ID NO: 22634 - DNA, 2054 bp, Mus musculus
gacctaaagagggccattctcattaattgcatcactagagaccactcgggaccttaacgacgtaaacgccttgagaacttgcaaacgaaagggatgtggggatgatacacttttcttactgtttagacctatgacatcactgacatgatggctgttcccacgtccctgcggggtggagtaccataacttaaagtccggaagcttccggggaactgacagttctttgtctttgctccaggtcactgtagagtttgcagatgaggtccggttgtccttcatctgtaccgaagtagactgcaaggtggtccacgaattcattggtggttacatatttctctcaactcgtgcgaaagaccaaaatgaaagtttagatgaggagatgttctacaaactcaccagtggttgggtgtgaataggaaaacttgtaataaaactccacagccataacaatatttaactttaaagctattgtttcttatatgctgcttaataaagtaagcttgaactttattattttatcatgatacctttttgccttaccagaccagtacatatgtgcactaacaagcacgattgttaatctgctgcctaccttgatatgccgtatgtggactgtggaattcccaacagtccttagggccacggaaagctgtcactgactgacagtaaccaaactaagaaacaagccatctaccaagccacccagggcatacatataacctatatgaagtctatttatcatgtgtaatgcatgtgtttgtgtttaattgatgccttcttttaaagtaccctgctcctggtacccagttaatcccctctcccagtataaagtcggtctacagtggatgcttggtatttgttgatgctgttgaccttgaaggaaacactgctaacctgttgttattgggtgggttttgtctttgagtaagcatgctgtacattgttttgtgtttagttttacaccaaactgtattacagtactcttagtattcaccagcatactcactatctgcctaagatatgcagcctttgtgttacaatatgaagtaaagatctatgaagtattcattttgtgtaactaatgtacaaacacaaattttataaaattgtacagttttttttaaaaaaaactattcacaactaggaaatggcttaaatgtagcatccttacattaattaagtgcttttaaaatatataattaatttgcagtttcagtatctgctaaattacgaatgacttcatgatgctcgtgacttgccgtgatgcccttaactacagcctggaccggctgtgttctagtctgttgcgctattacatctgcgttggtgctagttagacaattcctagctcacgagcccagaagggcgccagggaggggtggacttaccagtattgtccaataatccatgaattaaagactgtataaatgcattttattttaaataaaagtaaaaccttttatttaatgttttcttttgtacttctgatctctctcaactctcccaacactgtgtgttattagaacagcccgccagtgctaggccatgtcccagatgaagagctctctctctctaggagacatcctttctccggcattgagagacctttgtggttattcagttagactccagactttcatcatgggcctggctgccacctctgtcagtcccgtgcctgtgaggccaagacagcttctaaaaacccagctctgctcacctcttctgtctcccaccaccactgcttgccctgcctgctgagccctggtgtagcactgccctggttacctaaagctctgatgactgtgccctgtgctacagaagctcaggctccaggtcctctgagctggggcatctccctggggcccatttgtccttaagcagtctggacagccacattctctaggccagtggttctcaaccttcctaatgctgcaatacagttcctcatgttatccccaaccataaaattattttctttgctgcttcataactgtagtgttctactgctatgaataataatataaacatctgtattttcccgtagtcttaggcat

SEQ ID NO: 22635 - DNA, 1199 bp, Mus musculus
tggaggtagagctgagtccaggtctgcatttcccaatccttgctctgcgcccacttgagtgccaaagctggagtaagcccccttccaccgaataggggtgttcttaaaatgggcacagttcagcagagtcagacctcagagaatgaagctactgtgtgggctcaggatttcttttatgcatttctgtaattaaatttatttttctaggatgtgaagttactccggatgtaaacatttcaggccagaaatttaacataaaactcctaattccggtagcagagggcatgaatgagatctggcttcgctgtgataacgtaagttttccaattaacacataaaccttacctttctgactcctaagtgtgttggcccgctgaccctacattctgtacctgggtcctagacaccgtgtgccttcatctctcagtctgaaacagttttgctttccacaggagaagcagtacgcgcactggatggcagcttgcaggttagcctccaaaggcaagaccatggcagacagttcttacaacctggaagttcagaacattctttccttcctgaaaatgcagcatctgaacccagacccccagctgatccctgaccagatcacaaccgacgtcaaccccgagtgtctggtgtccccgcggtacctgaagaagtataagagcaaacaggtacttcatcctgcctaacctgctgggtgtcgctttgtgctcctgctttaaacgctgctcctcctgttaaatggaagctagcaccagcttgggtagaatataaaacaggaaataggggaggcggaggtcagcttaaactggttgttagatcgtctgtaaagttaatagataaagccaggttgttgctcagcacaaggaaatgattttccctgtggaaacaggcgaaaagcccagtcacacattcaggtcctgccagagggcctcgttcttgggtttgctgaggaagattttccacctttagaaataaactgtcatgtggtagagatcctttaccccacgtcactgtcttaaccggagtcaaacctaatagaaccttacccagggttacaacgtcttatcaattttaacttaaaattcactgcctttgtccactctttagaactcctgtcctggaaattaataccataaaaggtttgctatttgggcaaatggctctttgatgcatcacaaaaggtcctttgcggg

SEQ ID NO: 22636 - DNA, 1155 bp, Mus musculus
actctggtttggtcaggtcaaacaagggcttgccataaacattgcttcaccacctcaaacttgttcccgtatttcctccgatgggaagtaagtacctatgtccagcctctgtaatgccactttacaacttgctttcctggtaaggtactttctgtgacccccccccccctcctcgtgcctgggataaaagtcttccttccttcctttttttttttttaagatttatttatttattatatgtaagtacactgtagctgtcttcagacactccagaagagggagtcagatcttgttacagatggttgtgagccaccatgtggttgctgggatttgaacttcagaccttcggaagagcagtcgggtgctcttacccactgagccatctcaccagcccccttccttttttttaaaataccaattatagtggcttttaggcaattcgtgattactctattaactatgtctgtggggtagggaagaagttgattcaatagtgccaaaatggtggtaaggagatagagatatgagggcatagacagagccataaatgtctctgggaagtttgactgggaaggagaggatggctgcaaggaatgggaaagggcggggcattctgagccatcctcccctcttccccctcttccccccccaccccgcttccccctcttcccccccccccccgcttccccctcttccccctcccctccccctcccccctctcccctaccccagacctggcccaagagggagggaggagctgagcatagtacatgctgtgagggaaggatcaccatgtccagaagagactcgggagtccctgaaaaagagtccagagttcacaaatagagaccaggagggcacgggatgcagctccaggtggaccagcttctaatggagatctgggtgcctctgcactgcaatcctcttaggggcttgaaagagagttggtagagcaaggcaagcgggctacttcctgaaggcttcggcttcagtgaagcacagaagtcattcgaggagaagcatttaggctgtgtggacagggggccaaggttgactactgaagggcagtgaggggaggggttacagacccatacctatgaggacattaaggcagtacacagcttgtttacagcacaacatcagaagcagcacatt

SEQ ID NO: 22637 - DNA, 1211 bp, Mus musculus
ttcaaaagacagtccaaattatcaagaaatgaactcaacctagactatggaaggctttcttgtagttagataaaagccagcagttctcaggaatttgtggaacggattcccttctgccaaaaggagccatttcccatacccctggcagaagagacagttgactctctgattaacatacgcctgtggccctatcaacgtatcaggcgtctcagcatatcaaggtccttgtaactacatgtgtagtgcctatcagcatgtcgaggttcttgctagcttccaggtgcctctggctgttgtctatgaacatgttttttcttttatgaacagtaagacatggagtgttcatgtcatcagtttatatactaatgatatccacaaaattaatgtattcatcaaagcctacagcttcaaatgactaacaatgtgactattgctgaaagcttaaggcatgtttctatgtgtgtttgtgtgtgcgtgcatgtgtgtgtgcatgtgtgtatcttctcattcatttatttctatttgcttctacttttagggtaatgttaactttcatcctgaccagtctttggctttgtgggggttgtttgttttgtcttaactttgtgctgttattgagaattgaacctgggacctggtgttgctctgcaagcaccctgatactatggtaaatgccaccctagttttgctttttttttttataaaccgtttttggattcaagatgacatgttccaacatgacctataaaaagcccatcattgtgttcacagtctctagacactatgtctggaatgctaccctgataagcttgaactaccaacaaaacattgcattaaagcccttaacctccacacctggcttacacaggacctcacatacatagacagttgctcatctgtcttcctaatgataaagcaatatactagacattccttgtctagatagcttaatcttgataactggaaaaccctccagcaagtgtagtgggtcacacctgtcctcacactcaagaggcagaggccagggactaagggccagagtgagcctctgactgaaacaagcagagaaggtacatctggcttgaagcctgcttgctctaccttaaatgattatgctctgtcataaaagcctgcttggggaatagctagtgtgcctccctgtgagaggctgatcttgtgatctctctttcagaagctgataaaataccagt

SEQ ID NO: 22638 - DNA, 1197 bp, Mus musculus
tagagatgttctgttaccccaccatttgtcaacccggagccttttcttcttcttcccaaggagactcagctccacgttgatgtgattgaagtccctccgcagagtccccctggggcccttcacaatgactgtgcgccccttcagagtgatttcgacattctctggaatgtccacagtctgattgctgagaatggtcttcatcctcgcagtagatggggccccaccgtcaggaccatctgcagtcatgttcagaacatgatcaaaggtgtcatgctgggcttccgatacaagatgcggtctgtgtacgctcacttccccatcaacgtcgtcatccaggagaatggctctttggttgaaatccgaaatttcttgggtgaaaaatacatccgcagggttcggatgaggacaggtgtggcttgttctgtctctcaagcccagaaggatgagttaatccttgaaggaaatgacattgaacttgtttcaaattcagctgccctgattcagcaagccacaacagttaaaaacaaggatatcaggaagtttttggacggcatctatgtgtctgagaagggaactgtgcagcagcaggctgacgagtgaggaggcctcagttcctggccccagaaacgagatcctgaccacaagaacaatttgggctcttttgggagaataaaagacttatatattgaaaaaaaaaaaaaaagaattagagatgttgagctgggagtgaaggtaaaggcacattagccacacaaggcttaggagtgcctgaccattgagctaaaaaccatattaaaaataagctaatgtgaatgtgtgtgtgtgtgtgtgtgtgtggtgcatgtatgtaagtcagtctccttctgtggctttccccttagtaccttgagccaggatctttcagtgacccagaagtccactcttttaactacactggctgctcagtcctggggatctgactggggtcaggcattcgcagccacatttgatctttatgtgaactgcagggatttgaactcatatctttatgcttgcatgaagtgcttttatttctccccagcccaacctacttaaagtcttttgcacttaagcatttaataaaaccccggatcatattcaatgccttagtttcatcatccttttcttgacacttgaaagctgcttttgttgtccttctgagagtgactgcattttcct

SEQ ID NO: 22639 - DNA, 1134 bp, Mus musculus
cccccatggaggaagatggactaaggtggaccccaaagtctcctctggaccctgacttgggcctcctctcatgtactctacctaatgattttgggggtctgtctggtcctgaaggggagcgcagcctggcaccccctgatgccagcatactcatcagtaatgtgtgcagcattggagaccacgtggctcaggaactttttcagagctctgacttgggcactgcagaagaggcagatcggactggggagaaaactggccagcatagcccccttcgggaggaacatgtgacctgtgtgcagagtatcttagatgaattccttcaaacttacggcagcctcatccctctcagcactgatgaagttgtagagaagttggaggacgttttccagcaggagttctctacaccctcatggaagagtctggtactacagctgatccagtcttatcagcggatgccagacaacgctatggtaaggggcttccgggtatcctataagtgacacgtgctcaccatggatgacttgggtaccttatatggacagaactggctcaatgaccaggtgatgaacatgtatggagacctggtcatggacacagtccctgaaaaggtgcatttcttccacagtctcttctatgataaactccgtaccaagggttatgatggggtaaagaggtggaccaaaaatgtggacatcttcaataaggaattactgctaatccccatccatctggaagtggactggtcccttatctcagttgatgtaaggcaacataccatcacctattttgactcccagcgaactctaaatcgccgctgccctaagtatattgtcaagtatctacaggcagaggcagtcaaaaaaaggccaagtggacttccatcagggctggaaaggttatttcaaaatgaatgtggccaggcagaataatgacagtgactgtggtgcctttgtgttacagtactgcaagcacctggccctgtctcagccattcagcttcacccagcaggacatctcgtcagatctgcaaggaactctgtcactgcaaactcacagtgtgagcttcataccccagacccttagcccatcagtgggcagggggaaagggagacccttcccaagaaactccagttcc

SEQ ID NO: 22640 - DNA, 1397 bp, Mus musculus
cggtgctgttccagagtagcgtttgaattgctcctgtgagcgagctttgcttctcactggggttcagctgcatcattctgcttgctaaaactggaaaagaaatagggacaacaggccggtgtccatgctagttaaaatcactgacaacgtgtcggtgatcttcctgggacgctgatagctgtgagctgactgtgtaaaggctgtatgagggctgtctaccttgttgtaatgagtattggaattaataataattcttctctttcgtttcagcatgatctatgttctggtgagctcttagaacaacacagaagaatcggtccagttaagtgcatgcaaaacgccaccaatgaagggattctatccagcaaggtcctgtttccaagagtagcctatggaatctgatcagttactttaaaaaatgacttcttattttttaaatgtttccacattttttgcttgtggaaagactgttttcatatgttctacttggataaagaatttaaatggaattacgtataaattaatataaaatgattacctctggtgttgacaggttgaacttgcactcttaaggaacagccataaccctccgaatgattgcattaatttctgaccgccctcagcccgttggaagcttggtttagaggacttgttgggctcattttggttttattgaaatgccatctaaatatgttagctgtagataggaggtgcttctggtgaactgaaagtgtctgactcgtgaggaacatggtaggttcctcacttatcactgtagatgattctatatggacacaacagtaagaagaatggggcctcgtccctgtcgacttgaatattatccctatgtattgcatgagaggggtctccctcattccatcagagtaatacacttgctttaattcttaagcctaagtgatacaaacatgccgaattacctgtaaagaatgcatttaaagctattctaaatgggtttttatttgtaagacattatttactaggaagctggtgatattaatgcttactgttctaatccagtggccaaggtattaagaatttgcaagtattttagattttcgaaaatgaatgagagaactgtgtaaacaccccgctgttccttcagtgcaacacaataaaactctgaaatgaagatgctttgctgtgcattgtttgaaagattacaaacagctgtttctcaaaccctctcaatccatcataataaaatacataatattgtcatctttagaagtaaattattacattgtctattttcttaaaagtaatattgaagagctttgattgcccaggcccatcactgttaattggcaaaattcttgccctctgctggcacagctccggcattctctcccaggttctgaagttccggagatgtgtgc

SEQ ID NO: 22641 - DNA, 3814 bp, Mus musculus
gtttgttttttctttccttaaggtatttgaaataagaaacactgaagatctaactgaagaatggttacgtgagaaacttggatttttccactaatgtgaacttctgtgtttctaaagtatttatgtattaacctgaccatactggaaccagacataaatagttatttatgcctaaaaatgcactgttacttacagtttgtttcctgcagtaaagaaaaattcttcatttgtgcagtttgaacaaaggggaaatcatcttcatagtaatgagacgttgtgaagtgttcctgcatctgtcattgttagggggactacttttctccagggatgctttgcacccttttgactaatttctataatttatgattcagaatttgtaactgtttgcagacactataggaaggtgggtattagactgtgatagacaacagttcctcctctgaccactcctgggtactggcagtttataagtgcaagtagcattttatcacctgtcacatcattgcggttcatttgggactgaagcgtaagtgaccgattctgagccttgagtagagatgtagtgggacctctgttgaactctccgccagttttcctcctctcttgggttcctgtatctttgcaatcaagtgtagaatcttcatcaatcactcctccttaaggtccggaagttgatttttatggtagagttaggattgttaggttttcttcttatggagaatagcatctgaatcttagaaactgggagctctataatcaagggcttcgttcttggttatgtcactggcagggagcttagactgtagcttggtaacactgcaaagcacctcctaatatgttaatactgtgcctttgattggtcagctttaccattagcttaagactgctacactgccagtgttctagatttggtgaaattaatacttttttaaagggttcaaataaaacaattttctaatatatataattaaaatttgtaataaaccaacttgttacttttaaaattccaactatctgcccaaagttatgatagtaggtgagagttataatttggggtatatttgctattagttttgtgccatatgtaagcattatttaaacattggccacaattaataacaacacatcaatagatgtcataccttttatcctaaatgtcagaagaaattctaatatgaactaagccagtcacagtttgatgacaccatcatcaggaagcaagatttctaatctacttggaattcttaagtttcacttaagaaaacaatgtaagaaatgctgaatagtaatttgacttaaagagacaagttaagagactgtagagacgaccaaattcttatattaagaaggtagtgattttgattgggcattggtggcacataacatttaatcctggcatttgggaggcagagacaggcagatctctgagttcaagaccagcctggtctgcagaagcaagttccagggtaaccaaggctaaacagatgaacaccctgctcccctaaaaagaaaaaaatagcaaaacatctttatgttggcatgtgttcattgcatagtatttgtctcatttagggctttgtgccggttttactggagggaagatagctggaactgtcacagtagagtggagtgtgttgtattcccaactgtgtgctcactagcctgtatgtcaggaagcaattgcaagtgctagaggaggtgatcatattggttcatgaatggaaaagtccctttatttcagtgtccagagagcaagaaaacttcatctaagaagtttaggacttcattatacaggtattttggtatgagctagagaataacttgcttataatcccacaggaatgcagatgagacccaagtaaagggggactttgatgtctctgactgatgcacataagggttcgtttcacctggttatagaagcacgctttcagaagcagtgctacaagtctacgttttaaattcagttctttattttggcttgcatatttaaatcagtttttgaaatttccaagtctttcatagagtgaatggccctgacctgccacacacaggactcttagtctctagttcaagcagcaacaccagtggtgagcagctttccttttcaagcttgtctgactcttacctgtagatgggtcgtttgtaaggtagcacactgagttggggcattaatagaacatggttattctgtctgtccttagacaagtttgtaagtcctgtgccctgcagtgttcatgaaatatttatgtaagtttccctttagctaaaatttacagtatttttcttattctttttctgctgttccgtaaagagtatgtccagatttcataattccaggttttttacactccatgtctttcagcaacaaccattcccactcagccttaatcttaatctttcctttttggaagccactcttcccgggaaccttttaagcaagcattgctttggaaatttctgatcttactaagttgtgcatagcatctaatgtcagaaccgactaggaatcacaatgtatatgtcatgtggttttggtgacaacatgagtgacacatgaagaggggtattctcaggttaccgtgctgcaattccaaaaggtctgagttttaaacagtgatttgttctggtattgacacaattatgttaggaaaaaagctggttgactgttttgtttaattgacttctaaactatgtttgaattgtctgaggagtttactggatgcttagcgcagttaaacattctcgtcctgtgagagaaacattctcttgtaggagaggtgttgcagattgtgattataaaataatttgtagcaaaaatatgtgttagcattttccctccctttttgtctcctattttcaggagacaaacttagccataaactgaatcctggtctgacacttccacaaatggtttccagttagaggagtttattgccaaattaaacttggctcttttcccacttagatagaaactaagaaagctgcacataagaaatgtttggacacttgtaaaactcaagtgactacattaatctgtatgtaaactagtgagcagacacatccataagaattgaaatgccaatatttgggaagtagagagtaacttatatcctatcagatctattgagtgttaatatggtagcactctgtatttgttctgtagactgataatactggaatccataaagtttgagcctttacaacttatgtaaagaaatgttgcaaacatttctggatgagtcttactttgtatctccagaagaatgtagatgtctcctaggcctcctcgtgctgatggttctgagctgaatatttcttggtaggccatgtgacacttcagatcagtgatcctactcctgtaatgttaggacaattatattacgcttatgatagaaacagtttcttgcttttcggaatattattacttgaataccacttgagatcattagcatgccaggaaaagtccattgattttgatggtccaatgtaatctcattcaggaggcttgaaacattggtggtttagtcttgtgaattttaacagttctctgtcattgtttaagaaaaccaacaactggcactacttcttaagctgtggtttcagtctctgctagttcataccgcatgtttattttggagtcttttggtaagcatggtgcttgtactggtttaaataaaatgctaacatgaaagaacttctagtgttttattttttaacctgctttcacttcccctttgtggcttctgatgcctgcctgtcaatttctgtgagccacgtggctagttagcagtttactttctttgggaaaatc

SEQ ID NO: 22642 - DNA, 1160 bp, Mus musculus
ttgacaaggatgaacgcctggtggtgctggatgaggagctcgaggtttgttcaatgagctacatacaattttatagttaagccattattgttgtcaaacaatgctgtcagttacaagtactaaaacaagttctggaccttcttaaatgcatactaattatgcatgaaaacatgagctaattattggttctacattgtcttgctgatttaactgccttccttaagcattaatgagatgcagtgtggcaggtaggggttcgagctctcctaaaagcagaggcagctcccttcttacaagcagtgcatagagtggaagaagactgaagcccgcccgccacgtgagcgcgggactggagtggaattaatgctctttgaggttttgctatgtcattcagtcaccctgtgtctcttgacacttggaagataagcatagaagaaacactgcccttcatacccatgtgttgttgaaagtagaagtaatgtgataatgagccatagctcttagcagaatggggtgcagtggaccttgggtaaggacatgcttgcttcagagttgtcttttctctggtgccagggtgtctctccagatgaacttaaagacgaactacccgagcggcagcctcgatatccttttctaagtggtttggagattttcgttcgttatcaggattttatgtatgaacctgtttgttaaactttcaaaagatatattttataaggcatgaaaacagaattggggactgtttgggaggagagagggaacagtgaagggggtgtggaggggtgactatgagcaaagtattgagaatatacatgaaacccatgacttcattatgctgactaagaagctaatacaagaataagaacatatcttaaaagtagtcctttctcatcttgaccacatccaaattaaaacatgtatgcatgtattagacaaaagtatgaaagttgatgtcttgactggattttttaagaaaaaacaaacaattctctttgttctaataatgtgcatacagtaaaaactgagaaagaaaaaagtccatattatacttgtatttttaacaagtttcttcttgagagactgcaagatattataatttgcttttggagcctattttgtagaattctgtcaaaagcatggtcttatgagtaaggcattca

SEQ ID NO: 22643 - DNA, 1194 bp, Mus musculus
tttcattctttccttcttcatgcataaaaatctctttacctctcaccccactgtttttcaaaggcatggactaacaaagccaagggagaaactgccagcgatggagctgaagcaaagaagcgaaagcgtgtggtcagcgagatctgtgagacagagaaccaggaagaaacagtgaaggagaatctagatctttctaaaaagcaaaaggcgttaaatcttcctgctaaccagaaattgtcagcgtttgcatttaagcaggagtaaaggaaggattgtctgtcaggaagtagtgagacctggcttcagcttctcttggattctggacgtcttttaacctttagggagtatattcttataatcctgtgtgtttagacacagcgtggttctcataaggcagtgtaggggctgggtgtgcagctcagtggtggagggcttgcctaagcatgcgcaggccctggttcccttactgccgcaaaacaacacacaacaaagtggtgattttcctgtgtcaggaacaccacatgtaagagctgtctgtggggattcctctgctgtccatgagcagaaatgccatgatggcagtgactaccagggacaccattctgtctccgtggaagccattatcggtaaaagtcactaaaagcctcagtcttaagacttgttcacattacagtacctcctagggctttcccgcctttgtttaggttttgcagtagaagtgccatggtcatcggcttcccaagtgagatgtcatagactgctctcttgtcaacttgacctcaggcccatggcttttaatatgggccccaatgtgtaaataatgttgtaaatgagatgttattttatgtgtttggggtcgtttttcgtgttattactttttgtatatctgtatagactgggtcttctgaataaataaaactttctcatttgcatatttgtcttgctatggttttaacaccatatttccatgctcttcacatcacttgtgaggtggagaaaggctgcaggccttactttgagattgtggctgtgtggacatccatgctgataggtgctgcccttcttatcagcagcagcagtgttgctgagtgagcctttgaaggcttgataagacagtagttagaggacaggggagtgtctgttcttttacaaagccacagtttgttttgtgcattttgcctgtttggtgtgtgt

SEQ ID NO: 22644 - DNA, 1097 bp, Mus musculus
gtccaggcatatttacaatttcaaggcattgcatatacatttgaatattctgtattttttaaataatcttttgttctttcctatgtgtgaaatattttgctaatctatgctatcagtattcttgtatgaccgaatagttacctattctcttttcatcttgaagattttcagtaaagagtgttgtaatcaatccattataatgtaattgacttttgtaatttgccaataggagtgttaaacaacaaaatgatttaaaatgaaacttaatgtattttcattttaaatattaactaaaccaagtttgtttgttagttattctagccaataagaaaagagaatgtagcatcctagaggtgtatttgttctgcagtttggcaggaccgtcagttagtccaaataaacatcccctcagcgtggaggcgaatggaacctgtgctcctttcttacgggaagctttgcaaagcaaaatagcagggttacaagcttggagttgttaaggcaactagagttttctctattaatttatagactgttgttgcacctacttagctcttttttgggaactctagttcccaggggaaaatacatagtttctaaacagctcctggatccaccaataacaaaaaactgtctcattattttaaattgatcttaaataaagatgaaaacaaaaacatggctcaatatttaggaagcttaacattgcttttggtatttacaacctaaatagtcatttctgtcctcagaactaacatgaattttatgtggtgtggcagtagctccatgacatgacgtcacaggcctagagtaacaaacagtggaggggtgccctgtttcttcagtgactgaccttgacagagtgcccagttttccttgtgggagctatctgcctcttttaaatattgtactaattattttacttatctttttctgtgtgtaacagtgtttctccatgtagcctaggctgacctcaaatttgagctccttcagcctgaatttcagattactggtttaacccaccatgaacagctagtgatggatggatagattttttcctttccttccttccttcctttctctttttctttgtttttgtt

SEQ ID NO: 22645 - DNA, 1117 bp, Mus musculus
tagcacttgaaaaccagagggatggggattgctgcaagtttaagccagtcagagctgtgtgctgagaatttgtctccaaaaagaagccttattcttgttgcatatatgttaaagtagcctttcccagccttgaggatctgttaatgtaaaaacatgcttcagcaatagctttcactgaatatagcagttcatgcctgtattcccaaaacttgggagactgaggcagaaggatcaccatgagttctggaataacctaggctacagagtgagaccctatctcaatatccctgccccccaccctgcaaagaaactaacagttttaaattcttcaacaattacaaagttaaatgggaaaaatcttttaccattctcttctagaattttttctcagcggtctaaagatcgtgtgatccctgtgagaggtagccactcaaggtgtacctcttagagttgtactgaggctcaggctgtgaacaccagtgtcagggtaacttaagtgtttgaagctgatgctgacctccctgacagtagacaggccgactacctcatctcgctgtggcacttttgtagttactgagatgctcatcttattaaccagtgcgatatttcctaagtgtccatctttgctgaaagaaaaattatagtgtggtaagactctactcataattacagctctatatcagaatttgataaaaccttttgtttctgtgaaacaattatttttaacatttttcttttaaaagtaactttttatcagtacagaactatctaagggatgactagcttatgaatattctgttaaaaggtagttttataaagaaaagtgaaatatgtcttttatagtggtaaaactaagtatttatatgaaagtcaaaatcagtagcttttaatatacttcagactggttgcttatgatatattttctctggcttttttattcttttcaatttttaggtattaacaactgttaatattttcaaaatactgccatatgtgtagctttgaaatgtgtattaaatgaggacaagagagcgacttgtatactctgaaatgctttgtatctttcctttggtacttactacaataaaaagaaatttggaaagtagagatatataaa

SEQ ID NO: 22646 - DNA, 2114 bp, Mus musculus
atttatgtaaatgtacaattataagcctcacgtggtggagcaagctgaaggcagcaaaaaacattttccatagaggcatataaagaaataacaatagccagttgtaatgaataatctgaagtgaactatctgctacatctgggaggggcacaaaagcagaatgtaagaacaattccctgtgttttgaagaaacaggtcacaagactcctgtctcggtttcttggagttttcttacaggcactcagaaatctcacatgattctaattttgagccctgttctgaccgttactctgctgcttctggtattcacagagacccacaattatagaagttgatttttttttcccttttttttctgttgcagtcttaccattaagttgacagtggatgaagagatggcgcaatgctttttgaagtacatgtgtatgcacgagaaagcatatataatggctggtttcgctgttggttgagggcatttgtgaaagaactttgcacctcagttcctgcttcatgtgtttgaatatgtagaacatcacgtgggtacaatcagataaatgtagaagcgaatcattcaagtgtgcttaatgtgattatgtgtattgaataacatttgataatatttgtttaaagcatagctatgccctcaaaatctaaataacatggattattgttagaatctacatcttaattgacaacatcaagtactttttataatcacaccaccaccactaccaccgcaccccacagaaccaagaacaatcacttaattgaaacatgactcctcaacattttgagctcctcctacctacacaaacctggccctcttactatatttatctatttaactctgtgtgtgtgtgtgtgtgtgtgtgtgtgtgtgtgtgtgtgtgtgtgtgtgtgtgtgtgtgtgtgtacgcgcgcgctaagtttaattcaaccattatatccagttctctcctatcaagattgcttcatgatctaaggacagattcttgctctgacggagctctagaggaatgctggcactacatgcacctggagttttaagttttcctgtggtagtcagactgcccatgctgagtccaacgggaggaaacaaggaaaatgagcgaaatgcgtaaggcagcgctgttgaactgtcacccagccatctgagtagcaaggccagcacaccgatgtcacatgctatgccttcttaacaatctaagtttggaatttacaaatcattgtctccttaagaaaacaattacaaaaggtggttcatttctatcattacattatttctttgtaagttagacaggtactgggccttttatgagaagatgctcagaaccccagcagggcttttggctgtgccctggaggcgtgggctttggcattttggtgtagtctgcttcttgcatcttcccttctcaccccgccagtctgggcctgggggtttccagcttccggtcagatctagagtcttcaccctcacagcaaagcgttactcttgagcttgtttgggaatgcagagctatgggggcagtaactggtgacccaaaaatattgctggccttcccaccacgtgggttaaaacagacttataaagacaccttcctaattaagcagggaacttggctcgagtgcattcgatgccagctttttttttctggagctctcagcaagaaacctgtcctcggagctcagtgccattttgagagaaacattttgttattttggcagaactaggtataatggttaaattaaacttagtaatacaagtatgtcactaaaagataaaaagaggccccagccttaggtagaggaactccttttacgcccgaggatttgtcctctagagtatgtttgaggttcttccattggtttctctattggatgccatcctattaggctttgctgaagtaacaacttcttttggactccacaaagattgctggttctcccctgggagcttcttggatatggagcctgacctgccagcctgagtattggagccctggaacatattgtcactgccctgcctacctacataactctaagccaataattatcagttgccaagttcatcagccagtgtggggttttgttgttctttgtagggtcattggtgt

SEQ ID NO: 22647 - DNA, 1294 bp, Mus musculus
aaataaccagtagccaaatgaggaaaattatctggaaaggattttctgttttgttttaacccaagaataatcctgctttcagaacaaacagtgtaggccatgactggtctactgaaaagacagattgtcagtaagtgtttggtcttaaaggagtcaattatagaatttgttgacatgtcctcacaataattcttaaataagtacaataaagatagttgagatgtgtacaaggatagtttttgtgaagttgaagtctttggttttgtaatgttccgttctttacaaagcctccctcccgaccttgttggttttgctgtcagtggtggttaacagtctgtttctcatgacacacttcacgggtggcctcccctagacagcttttggaaactgtggattagagatagccccactctgtttctggtaagatactgcctcagtatcagtggttgcctacacttatcaactggtgccacgtattcctcaaaatgccaagattataaactgcaagtttcacgggcctttgaatccttccagcgtttagtgaagcgggcgcctaactgaaccagctgctggagaacagtggatgctctggggggaaactgatggaactttcagaattctgccaatggaaactacagtggacgatggcaattgggactgagatttcctgcttgcttctatctgcagagcccatctgaggactgacgctgtccgtgtgcacatccgggatggagctctggtccctgtgcttaaggagcttcccggtggggccacaggtgcagccaccagaggaaggggattagtgatagctctcagagaggagagcaggctgtcctgggcattttaaaaaatggcattttggtttggtttttttttttttttttttgaggtggggtctcgccacataactctggctaacctgaagctctttatatagttgaagaactcacaaaaaactttctgtttctgtctctgtctcccaaattctgagattaaaggcatgtggctggcttaataaactggttgtgtgtgtgtatatatgtaaatgaatatctttcatgagccacatgtggtgttgcatgccgttgatatcccagcacttgggaggcagaggcagtcagatctcttaagctcaaggacagcttggtctacagagaattacagggcaaccagggttatacatggaaatgaagtctcacaaaaccatcattccaagattgtagtgtttatcagtgcaactattcaagtgtacagtgtagcaggattgtttccgtttgtctgggtaaaggcccag

SEQ ID NO: 22648 - DNA, 1215 bp, Mus musculus
gaattctgagaaccaggttctcatgatgagggttaagctattagaagctcactataactatctcctacaaactagtttcagaatactttgttcttcaaccagctgtgaagggccatgcttataatcctagcaaaagagaagccaagacaggagggttactcctagttcagggccagcctgtactgcacgcagtgtcccaggccagcaagagcaatgcagcgagaccttgtttcaaaatgggaagaaaaagaaatgaagtgatgcttcagagagcaatgctgacccacactggagacgggagcccttgacagtagacctgatctgttagactcagaacttccctcggctctcttcagcctccatccagacgctaccttcagagtagcctgcttttcccttctaatgcctgttgctatgtactatgttgtgattgttctataaggaaacgggcctcatatttgtgttacaatgcaatggtggtctgttttcctcactattctgtaggtctgtcagagacctgaggtaaaatgaaatgttaacagctgcacagtcatttaatgtcttttgtctgcgtgatccatgatctcactgtgtagccctggctggcctgcaacttgctgtgtagaccaggctgtccaggacctcatggagagccacctgccctgcctcctgggtgctggcgttacaggtgtgtgcaccaccctggcctctgtctgctcctcttcagtaacatgggtacctttaaaatgacgaggatggtgctttcttatagaagatgctcatacttaaagagcatttaaacaaggtgacacagccaggtgtagtaggtctgtttcttcatttgattgattaaagctttgcccacttgtaacaacccttgatcaaaacaatgttcttttaaaatcatttcttttatttttcagtactgttacataaaagtctcacttctgaatgccaccttcttgaaccagtaagttttagactataatcttataatctagatttgtgcagttgtaaaactgttttgagtgtgtcttatttatgattattctgagggtgtgtgcatgccacagcatttgtggtgaccagaggacagctttggggagccaatcctcttctgttggggtttcagccctttaacctgctgagacctctcaagcaccctgtttggtttcaaaatagggtccagaatagggaccaagctggcctcgaact

SEQ ID NO: 22649 - DNA, 1193 bp, Mus musculus
cttttggtggggagaggattaaaacaaggtttcacatagctcccaccagcctcctttggagctgagaccgactgaccatgagcaggccctcttgttttggttttccgactgtggttgcacagtatttatcaggccagctttagccaggtgttaaagtcacaggagtgtgttcatcacagtagggtgatgctgcgatgaagggtctaggtgggtttcagaccttacttacttcctactcataacccccaaataggccgtggtatctcatctgtgatgacttttctactttcatatctactcatattttttccattgtgagttttaatattttcatttcaaggaagtgcagagtggtgtaggagatagattgaagtcttgatcatttttattagtttactaatttatctctttgagagaatgttttactctttagcccaggctatgcaaagctcacatgatttgctcgcttgagccttctgcctgccacagcctgacctgagattttattttactttttttaaataataaaatgaaaatccatttatgttggtgtctgtttctcctctttggcaggatgctggtgtcacgttttgccagtcggtttcggaaagactcgagcactgagatggttagaaccaacttggctcatagaaagtctctgtctcagaaggagaacagacacagggtgtatgagcgaaacagacacttcggtttgaaggacgtcaacattccactggaagggcgagagcttggtaatatacacgagacatcgcaagacctctctccagagaaggccagctccaaaacaagtaaggaagggtcttttgtaactgtaagtacttttgagacgcaaggggtctggagagatggctcagcagttgagagtgttcactgttcttgcagaggacctggggtcagttcctagcatggtggttcgtctgtaactcaggtttctgaggatccgactttgccggctcctgcatgggtaaggtgtgcatacatccccttggcacaccacatgcagataaataggaaaagagaaacctgggagggaatttaaagggctgaactgattaaaggaaattgttctaaataactcgctgagaacctttgaaatacaaagatttcaccagtcgccgagagaaaagagatcattcttaaactttgcccgaagtggtttggggccacaagga

SEQ ID NO: 22650 - DNA, 1101 bp, Mus musculus
attaatttacattaatagccctttctataatgtatcattcaaaatcagctgattttgtggctgttagttccacagaaagtgcttagtttgcttctgttctccgtgatttgtgtattagaaatgagccagaatgcgacttttggtagagatgttagaagttgagaaaatagacttctcttgctagaaacagtaggatacctaagtcagctctcttctctcctgttccagggcatctgttatgcaccttaagctgtactggaaactccagaagaaagagcgccctcttgaggtcagcagggacaccctgagaacgcctatgagccacggaaaggccaacggtgatgtgaaggccagagccagctacatgaaacccaccgtccttccttcagcctcccttgtcaaagcatcgtctagaaaaccttttgggatcctttctccaaatgttctgtgcagtatgagtgggaagagccctgtggagaacagcttgaatgttaaagccaaaaagaacgtgctgtctgcagccgtgcaccagagtgaggaggggctgcctgggacctgggctattgtcaaacctgggaacacgaaggagaaaattgcattctttgcagcccaccagtatagcaataggataggctctatgaaaattaaaagttcctgggatatcgatgggagagccactaaaagaaggaaaaaatcaggagatcttaagaaagccaagttacagctagaaatgatgagagagatcaacagccagtgctaccagtctgagccgtttgtgtgtggcgtggagcactgttctgtgcactacatgagtgacagcggggacggtgtctgtgctgcgaggcctctgtcggtgatacagatggttgccttccttgagcagaaggccactgctctgctagctagctgcacaaaaaactgcacaaattcgcctgccattgtgaagatttctggccagtcccgaggtataccgcctgcacctgagcccttctctgctccggaaacttgtgaagaacccaaggaacaagaaaatcccgagactggcagatcccagggtgagccagtccgtgtccttgacatggtagccaggttggagtctga

SEQ ID NO: 22651 - DNA, 1440 bp, Mus musculus
cttctggagcctcagcagtacatggcatgcctgccccaccacatcatagtgaaaatcttcaggttactccctaccctgagtttagccattcttaaatgtacctgtcgctacttcaagtccatcattgaatactacaacatcaggccagcagattctcggtgggttcgagacccacgctatagggaagacccttgcaagcagtgcaagaaaaagtatgtgaaaggggatgtgtccctgtgccggtggcaccccaaaccctattgccaggctttgccatatgggcctggctactggatgtgctgccaccagtctcagaagggctttcctggctgtaagttaggccttcatgacaatcactggttacctgcctgccatagctttaaccgggcaatccataagaagacgagagggagtgagacggaagaggagtactgaagtccatgggacagggaggcaagaggaccgtgaaacacttgggccaacctccagggctgcgagctcccccggcccttcctgatctctgctcagctctgactgccattgctcaggcattttaaactgtttctcagctgtacaagaatttagttccatggttttgtatggtggtgcctcacattaaacctatccagctgtgaagaactcttgcctgttttcctccatcaaggacattcagaggtcaccaggcagtctccacaaggggatcctgaggtggtccaacactggctctgcacttggagtgagtgaggagggaagcacacggttgagaattatgcctcagaaagaaaaccaggcaccttaccctaggcctgtatgctcgttcccgtgagagtggtgactgcagaccgacatgccctgtgctgtttacagtgtgtataatggttgtgcttgcacagggctgtgaacgtgcacattaaacccgagcgcctttacctgtagatgagtgctttggcccctctgtaaataacgtgattaaaattcagtattgtatattatgaacagctgactaaacataatcaccacagaataagacaatatcatataatagattaaaatgttgtgcatccttttgtctggttaaaaattttttaaaaaaacttcaataaaaaaataaacgttttaaatgaggtctggtcttaaaataagattttactaactttatgaatgttcatgtaaattcaggcagtgttggaggagaccagccaagggtgttggaccccctgaagctgtgctgggaagtgatctgtgtgttgtgcagagcaacaagttctctactgctgagccattacagcccaaagatggatttcgtgcacgtgcgtgtgcttgctcttgagtgtgcgcacactaaggtggcagagccaccactgtggtggtcaagtggcaggcagttgtgagccgtgctatgaactggaccagattcctgcctacgtcatctggtccaga

SEQ ID NO: 22652 - DNA, 1196 bp, Mus musculus
gtccttcagcagtctgccacgccctggcttctgttgactcacactgtggttggtactttgcctgcagattgaggtgctgtggcgctttggcagttattagaagtgtaggaaggacttcatcctgcccaggttccccacgttcccaagctctagatacccagctgtggagcaggcggctggagtctgttctgtgctcagctctgcgactgctgggctcgtgttttaccacctacttctaggacttacagactgagtgcgctgggaggaagctacagaaagtgcagaggccaccaactaccgcctacagcaatttaaccacagttgcagaaagcacagggctgggtggccttgttttatttcatatcaatcagaggcacttttgtcatcgtccctcacagtaagtgaccagcacggactgcctaggctgctcaagtccttggggttttgttattttgcactggatccacctgttgtaaatagtcttaaatacacatttcaaccactgtttggttcctacactctttgctgctcattaaaactttttgtgtaggtgtcagaaccgtacacaaacagctttctagaaaaaaaaaaatgaagctggtgttttgttttttttttttaaaccgaaagccatagaagttgatcatgttttccatttaaaaatgatttcttggaacaaggtaatactaatagacactcagaggcaccacatgggctgctttacatggtcttacgtagaaccaagaaatgtaacttaccatggtatgggggtcagcattgggtggggttcaggtgtgcattgggaaagctgcaacgtcagaacccccttgctgcgactgaaacttccaggtcaggttgatcacacagatgttttctaaacctttgttgtattactgcaataaatcctttaacagtacttggctgtgtgtgtctgtcccccagttcctatttagttctgctgctacattgatggtagcagcaaaagtgcaagctaacctggagtacttcatagaaattaaaggatacattttaaagaatgttttgctaggtaagaaattttttttagccgggcggtggtggctcatgcctttaatcccagcactcgggaggcagaggcagggggatttcttagttcgtggccagcctggtctacaaagtgagttccaggacagccaggactatacagagaaaccctg

SEQ ID NO: 22653 - DNA, 1145 bp, Mus musculus
tcttttttttttttaattcaaaaacatgtggataaatacctgtcaaccaactaaaacgcagggactaagtattccaggtgagtactgtgtcatagatgctagggtgactacagccttaatcccttacccctgtggattgcactgactaaaataaagacaatctgtcaatgattgttatgaactatagtcatggctacagagcaaaaaccactctgtgctatgggactctgaacagggagggtactttgtgttattgtggatgtggagaggtcaggggtgtagaggtcaggggtcagaggtgaggtggtgtgtgaagctggaagatgacttaaggttgaactgtccaagaaaccagtgggtttttgataattagtctctactgaagggtctctgttcctctccctttctctccttcactctcctttatttacagacacacagagtaagcaacacatctctaatcaggaattccttgtgcttgccactgtcggagaaggttttggaagtagacctgtgggaatgtgtgaccttagagaacaaaagatgaccgctgaaagtccttgctagagtagcacgctggggaccttctgctagaaggttgtaaggttgtgaggaacactcccttcccagaatgaccccggaaaacaagctttacaaggaagcctccactgcaaggcaggtgcagctaaggaccaagaatgtttcagttccctcttctgttgactaagacctcacctcacccagggccaacaatgctgcttagggaaggtcatgaaacacttgcctctccagaagggagaggctaattaccatttctaaatcggggaatgaaaaggtcagcttgggccaacaatgggtttaaaccaacccttgttgttatcaaggcctacccttaaactgaataaaaagtgtgtgcttgagagattcggggttgtagggctggagagatgactcagaggttaagagcaccgactgttcttccaaaggtcctgagttcaattcccagcaaccacatggtggcttacaaccatctgtaatgggatccaatacactcttctggtgtgtctgaagacagctacaatgtgtgcatatacattaaataaatctttaagagagagagattcggggtcaactctgccccattg

SEQ ID NO: 22654 - DNA, 1116 bp, Mus musculus
agctctgaatttctatgtctgtatggaacccttcagtctcttatgaacacctgaagcaacagtgtgggtttgcttcattcaaaaatcgagtcaatgattgcattattacctgctccttctgaaaaagtcgtacattgggcttctttcttccagattctgagtgagcagaataaagcattacagtcggaagttcagaaactgcagaccgctgtttctcagcaggtgagcttgtgtgggtagtgtggaaagagcccgagggtgagaaggtctgagcacaaaccagctgatggagagtgtgctcaaagttaggtgcgcctttcaactaccctgttcattttatgcttcaaacatttctttcaaaattaaagttttatgtctctgagaagaagaagttgttaatcttctcataagcattttgtagaaaagaaggaaaggaaaaaacgttctgttctgggagccttacccttacaggcagtttgttgtttttctaaaacaaagaatgggtttgaaacttaggggtggggtgcctcagagttggtttcccactctcctaatcagcctctcacaccaggattgtatgtaaggatttctagatttgaatggcaaaacttgaatatattgcttagtctagagctttgcacacctaaatgatttcttaagaatatatgtgtatattctaattgtatgtatttatgatattgatagtacatatgcgataatgaagacacacacacacacacacacacacacacacacacacacccctttgtaagtcagtaaagctattgcagtcttgaatggtcagcagctggagctcctgttgttgccttcacgttttctcacataagcccttccagtcccactgttagaaagtgttctgaagttgtttcccaccaatcctgagtgtgatttctggggactacataatggaaggggaggaccgcctcccacacctgctttctggcatccacatccacgtgcccaatcacaatcacaatcacacacgctctgtcaatgagcaagcagatcaatgtaagagggtttagagcagagtagtcgagaaactcttgttgttgcatgttccattagaatatcaactttgcatgtttccctcat

SEQ ID NO: 22655 - DNA, 1152 bp, Mus musculus
aatacatttcaaaagattttaggtttttaaaaagtccctttggttctcatattttaacaactgctaggttttgtttttttgtttttgtttttgtttttgtttttgtttttgtttttttgtgtgtggacaggagatagtgtgagaacgctcattcttttgatttatttcttagtataccttaattggagatgttgcttcttgcttatgtaaaacctgctctgcatttgacacctaagacatgtgcatttactgatgctgctgcctaggtgggctgacatggggtaagggtagaactgcgctaatcaatccactgtctgtccagtgatgggtaactttctttaattggtgtctcaaatctcatattccttatattgaaatggtttgtagaaatacttatttgtacaatagtcaaatggacttggactataagaacacttgagatattttacaatcttcagtacttttgctttttataatgatgtaaaatttttctttctctcttgtcagattaagaggcaaggaagagcaggtgaacagcatgaaggctgccttagaagacagggacagagacctgagagggagagggacgtgcgcacaggtgagacgctcagtcagaacacaagcgaaagcaaccctcgccccgatagctgaggatccgttcacatctgctctttttaaggatagtcaggaagaaaattaatctttaaaggcttgtgttcaggaggtagcacagcctagtatgccagaggtacagtatgcacggacagcagtgtgcttcttacgaagttgccgttctgtgtaatactctaggaggtaagaaggtatatgttctcggtttctctgttctgccatagtttagttattgctgttaaagtaagtagacttttattactgtcaaaccatctttaatggccagatttgtcaagctaatagtgtacacatttctttttccttcctttatcaaattcactccaggcttatgcttagctgtttatttgctatagtaacctgtggtcctttagaaagacgctttaatagttagctatgataaggaaaattcattcactacaggtgatggctcatatctgtgacttcctcttttggaatgctgaagtaaaagggtcactgtgggcttgaggcctgcctgggcta

SEQ ID NO: 22656 - DNA, 1383 bp, Mus musculus
gcagtcacagaaaggctggacggatatgcccagtctgctgcctcggagctacggaagggcttaattattagagagctttaagactgagactgagtctgactgcctcctgccttagactgtgtttgttcttacagatgggctttgtaagtttcagcctggtccactttgctccttgggtttgcattatactgagcaagacctaataagagtggcttctcagggttgtcatttcaaaatctttacctaaaggcttctgagtcctgaggtgtcctctcgtgtgatcaccatcagtatgaggggctccgggtgccactgaagcgccaggctgggtcttgtgaactgtgtgtggggtgcgtgctcgtgggttgcttctcttaccttgttctaaatagatcactttcttctcttttgcagagtgaagtaattgggaaattactcgttagaagttaacagaaggcgttgtattgtattttgccaaattaaagccttatttatgttttaccctttctactttgtcagacactggacagttttgtcttttctaatccttgttagactactgacttaaagagaaacactttaaaaagccaactctgtagacaccttcagagtttagttttataataaaactgtttgaataattagacctttacattcctaaagatgaagtaaatgtaaacttttaccttattttgctcaattaaattgttcagaagatcaaagtggtatagacaatgtgaaatttaacattttaatactgatgttgtacactgctttacttaacatttgggaagaagccgcctctgacatcaactcaaggaaacactttttgttgctattataatcagcaaataaagggacacttattattcaacatgactcactctgattgtcgttgagtttcaacaagtttcactagcgcttcagaccgctgtttctaattgcagccaccaaacaagacaagtcttgttgcttctgtaacttcctgactagacctttgtgtcttctctgggtcaggactgtgccaagtcccacagcgtgggtgatggcaaggtgcaggcgtttgagtcccattcaccgcggaggagagctctgctttatttttgctgctattactactgtttcaagtaacacctgttaagtctccctcttcagagagtgtgttagtacaggttacatgtgttctcttgtctgttggaagccgtgtgtctgtgtgtgtgtctgtggtattaagaacactgtcttctttagatgaaaagtatcctgtgccaaagaatattaaagtaccttttagtattattgctattttaaattttgattttgattttaagtgcatgagtggtttgcttgcatgtatgtatgtgcactacctgcttataatgc

SEQ ID NO: 22657 - DNA, 1189 bp, Mus musculus
gactctgtctggaagccttgctgcctcaggtctttgccggtcgtcttcactttgcaggtatctgtgcgaatgtctttctaaaacattgtatacgttatggttttgtttggtctaagaacccagttgtctctttgaaaaggtagatattttctgtcttagtcttgttattactgaaggatatttactgtcttaccctcagtatagaacgtccatttcccccttcctcttccttctttggtgatgatggagaaataacagatcctgcatccctataagcaatcacactgactctatgtgaatgacttagtggcctttgcagaactctgtggaatagacaaggagacctgaacaacacagccttctctggtttgcctgttcccttccttctcaaggcaggggaagagtcgctcagtcctctattctgagaaagctgatttacacgtactgataaaaggaggaggcctcaagacttgggatggttctgccttttacatctcaaaacaagagcttcagtcagcctcatcctatttgaagctggagttaaccaaaaggaatgtaaaatgatttgcaggttagataagcatggccctttagtcttgaagcataacgcctaccccaagccatcaagtgtccctgtcaactctgagcatagttgcagaggtcatagcatgtggcccctggccaaccaatccctatgactttgtcttgtcccttgtgacactccccatgcacccaatggactgggcctgtccccctggcttgctgctctgcttcttggtctcagacactccagccctgatattttattagtgctttgagatctgttcaggacagcattctccctgtatgacatgtgagtttctcacagtcatgctgcctaaacatgccccatattttggacattaccacccctgctagattctcctactacccatcctgctgtcccatctctgctacctaatagggtagcggcatgtctcagagtcacccagcatgtctcagtctctctcctcatcatgttctttatgaagagtcaaggagtaaaggcaggtgaagtgtgcttaggcagccaagtacttctctcttgatctaagtagagaaggtagttttttttttttattaagaaagtatcagaaggtattgcagaagctaatccaggcccaaatgagagccatctgtttttaagcag

SEQ ID NO: 22658 - DNA, 1190 bp, Mus musculus
ctaggatggaaattcaagctctaagcagacagcaacctcatgaatcagctctgtgattttaaccaagataaagaaatctctcttggacctcattttcttcatcagtaacaatgagactcttaactccctagtgtccccatcactctgctttttgggttgtttgtttgcttgtttaagaatgaaataaatgatgggcagggagaagggcacattgaaaactaagtgctatggaaaggctagcacattcaacatgcatttattaaataccgcttactcatcgaccgctattactaataaatatcaccattcactccattgaaactcatgctggaatttggcatgcaaatttcctgagtgttgctcatttgcattggaaaaagggaaagaggtgggaggccttttgaaaccttttgaaaattgagctcagggggatgaattcttatcactgggcccaaggtgtaattgattttctgcacaatggctcacaggtgttacatttaacaccccaagtaggtggagggcggaaatgtaccccaaggtgcagctattactttaaatatctatgaagtcagcccttccctgaggagggccttgtatcctgagagggtgtaggggcggagcttcacccagttgtgggagtgtgctgacagatagattctcctgctccttggcattaggattttctatggccaggagccaaaagcgcctcttttccaacctgcaacccaaggtgaggggagaagccagggcagacccaccaagaaatacatattaacattgtaacaaccctctcagaatccactgttgctatgtcaacaaagcagctggggaaattggaaaatgaggttggctttgacaatatggccggtgtttcctcctcacagaacaatcaactgtgagcctgggtggtcttttcttaccttcactttcctttgcttgtttatttgaacattgagcacacacctgatggctctccacatttgggggttagggagcttctgtgtcatgtgtaagaagaaacaaaccaaaggaccccgcctccccagcctctctttacctgcttaagtggatttcttggtcccgctctggatctgccggaaccagtacctgcctctcctgagactttaaaagcagcatgtacttcatctcagcaacagttcgctctttgtctaaggcaagagtatgtatgt

SEQ ID NO: 22659 - DNA, 1190 bp, Mus musculus
ctgtccttttctctcccagcatgccgtgcttttgattctagatttgtttactatctaggttccagaaaagtctctcaggagactgactgtaggagacaggctctctcctgaattaagcttcctgtccacttgtgaagataagtaagaatgaggaggagggctttaactagaatgtctgggtagccaaaggctaccacacacgtttgtaaatggagaaagaggtggggatgccagagaaccaatttaatagtgatatttaaagataaatttatttaactaaacatgtgcttctttttttgttttttgtttttgtttttgtttttgtttttctttttctttttctttttctttttcttttttgtttgtttgttttgtctaattttgagacagagtttctctgtgtagccctggttgtcctagaactcactctgcagaacaggttggcttcgaactcacagagacctgccttcctctgcctcctgagtgctgggatcacagggtatgcaccaccaccatgcctgacaattttcttattaaaaattttcaaatatatattctgggggctggagagatggctcggcagttgaaagagcgtgctgtccatgcggagaaactgcattctgtttccagtacccatatcaggcagttttcaactgcctggctttgggcagccaaacaccttcttcactccatgagcgtgcaccttcctaaatattacagagataaaatacgaagaacactttaacaatgttctgagaacttttatgctaggcttcccaacatggacaagtccctcgtttctgaccacttttctctgtgcacttgggattaactcagtcttgcagatgctagcaagggcatctgttttgttcagtcctcactcttttttttttttttttcttttttctttttttggtttttcgagacagggttttctctgtatagccctggctgtcctggaactcactctgtagaccaggctggccttgaactcagaaatcagcctgcctctgcctcctgagtgctaggattaaaggcattcgccaccatgcccggcttgtctaggcatcttgactgatgatcaatgaacttatttagaaatgggaacataatcgcttttcagccttttggctaagatcaagtgtagaaatggaaacgttaccagagctactttgaaaacaggaagaagc

SEQ ID NO: 22660 - DNA, 1165 bp, Mus musculus
cagttttgtctgtctatctgtctgtctgtctatctgttatctgtctttcagacagggtctcacaatgtagaccaggctgacctcaacttcccgagatgcatccaccttcctgtgcctcctaagtgctggtattaaaggtgtacaaaactctgaccacctagtgtatatcttttaaagacttttatatttttacagaagttgcacttatttgaataaagttatgacactttcttacattactgtcttaccagtttttgtggaagctatagtaataattagctattttattcccaatatcagaaatttgtttcacagattttttcctgaacaaatgaaaaaagatttatttattttataaatgtgtacactattgttatatgtgagtacactgtcactgtcttcagacacaccagaacagggcattggaccccattacagatggttgtgagccaccatgtggttgccggaaattgaactcaggacctccaggaagaacagtcagtgctcttaaccactgaatcttctctccagcccacaaggtgtattgattttactgattttaccgagaaccatttttttgtttcattagtctctccaccccttgggtttccctgatttttgttctttattgttaccttccttcaacttgcttaggtgttatttgtccctttcctggttgtttttgtcttggtttggtctttcggtaaaagcagagtgtgctgatcttttccagtgtgtgcatttaactacatttctctcttaagtactgtgttagttgaaaactgagttgtttaatatgttttaattcatttcaaaatattctttaatttctctttgattttttttttctggccctaatatgataaagaaattgtgttatttggttgccaaacatttggagacatactagatgcctttctgttaatgattttggattttattccattgtagtcagtgggaaaactttgcatcataatgccaatcccttttaaatttattgagatgatttatattataagatacagcctgattaaggttgtctatacacgagagaattgtatattcacattctgtaaatgtcaggccttattctttgatgtcttctatactttttttaaaatcagttttctgtttatctcttctatatgttatgcatggatttggg

SEQ ID NO: 22661 - DNA, 3834 bp, Mus musculus
gagtggcttcgctttagactagtctttagtctctgtaccacacgtcccttcctgtcccatggagagagaaacagtgctgcaatcagagtcccttccttgagtaagagctcagccttctcctagtgcaggttcagtcagccatcctatgggctgtaattgatttacaaggaaactgtgtgcttatccaagcctcagtacaaagagcgtgctgttgcagaatacccatggtctggttaaagtaatcacaaattgtttctttcaaaagagccagtgggaaataatgggataatgttcaaatagtagcctggtttttatcatatctctcctgctagccaataaacctccatattcctatttgatgttctagaactcctgtctttctgagacagggtctcataaagcccaggctggcctgggtctcactgtgtagctaaggatgatccctcttaagtgctgggattacagtggtataccaccatgtccagtacccttctaggactcgaactcagggtttcatgcctgccagacaagcaccctcccagctgagctgtgaccctaacccatcaaaggctgctgtaacaaattcagttatatgccagaacaactgtgtttaggatgccagtagacttaagactgtagtaacttcagaagatgagcataatgatctatgattctttagtgtccttagacaaggctttaaaataattgtaggtattatagtgtttgtttagtttttaaaaataaaataaactctgttaatgaatgaactcaggtaaacaaccaaaagcctttctgtgggtatcatttagacttatttaatatagcaatttttttctctttaagtctgtccctgtcgttttctttttaccattttcttgattcctttaaaactgtctagccaagttccttatcttctctcatttctacaattacatgacatattctttttttagagcagcatactgtcatcaaattgaacttaaagtgactatttaaaaaaaaaaaaagatctaaagatcctgggaacttaactgatgccaaatttagaagccagacaataaatatgaattgtagaataatattttttaattaaacttattctgggttctgcttctttttgtcttttttttccccttgagtcttctaaaaaaaaaaagcttggaagaagctgctgattcttagaagtagagttgccatcattgaagggaagtatatataaacttaggacttgaaatacagtttgtagagtcagtcctactcattctagacccttattgccttcaaaacattatcctagaattaagttctattttcatggtcctcctgaggaaatggaggagatgggctgcctgccggggacctgagctagctatcctgacctacccagagggagggagggacggaaacatctttcctgagaaaacactgttctgtagaggctttttatcactcttcaactcaaaacttaacatttcactttaatttattaatggacctgtttggaaattttgattgtacaaatgcttaaccaattgtactgtggtagataagacacatttatctagtgagcagggaaagattccatgtgtaatccttgaagcaaactcttcatagacaaattagaaaaaccagtgacctctaatttgacatttctagaaacctggggaaaatctaggggttactagaaaagcgttggggtgacagggaaccagtgccatctgttgccattccgttgtaacacagcactggggaactcaaagccagctcacatttccatcccatggagatcagctggacacaccgatgcttctgattttgtctagaaacctgtcacttcaggataatttctgaagacaaagcgtgttcccggtttggtaggtgacctgtttaatgttttccctgtgtctgggaactccttagtgtaattagcgacctttgaactccgcagctaatcctgagctgttttgtattccttactcatctttacggctggacctttcttttcttcagagtccactgccacaattaaagaagaaacagctgcatttcaaagggattccgattccagaagcttaatcgtgattgacatgttcttattctaagctataagacactctaagagtcctttctttggttaaaacttcaatcattttctaaaaaattatctcactatggattttattcattttctttgatagctattctttgcattttttttaacttgaaaggtgctttgcatgtgcagtgaatatgagtgtcgacttccagtgagagatttggacattgtcagacttgctctagattcgatcgtgctaaattcacatttagtgacaaaatatgattatgaaatctgatatcagtgttgtaatcattcttgctcaacccaaagggttaaaaaaatgttcatcctagaatgaactctagaaaagctaggtcatgatttgagtcaagcctgttctccacgtttttagtaagcagtgttttaaagcacacactagcagctagagagtgggatgttttatatgattaaataatggaacctgtcaacttggaagcaaataggttccttggacgatgtccttggagcatttaattttatttaaaccttagcccatctcagaatcacttcctttcatgccatctcagtatttctcctgttaaaatattgtggtcttagatttcttgtgctatgtttaacagcagaaattttgcacatagtaactattgccaatttttgttgttgttgttgttactatattttaaaaccttaacagtcattcatagattttcacattacccctgagaattagataggtggggctcccacccaaaacctctgcatggactgcccccctcgcagaagttgtctctaagacaaaggtcaaaaaagggatgttaataaacagtcctcaggtttaagggactttttaggattacatcttaaattccaacaaatcagatttaggagttgctgaaagtgaaattgatccatccctcatccaaactttgcaatacttccctgttctgacacccctgagatagttagctgtatcatcagattagagaccattgtgccaggctgctgaaaggaaaaggagccaaaaagctaaacatgggatgaatcctgaaccttttaacctggctgaagtatgttggttgctgttatgcaaataccttcaatcctctgctaagttccgtggaaataattttcttgaatgacaggttgattcagcaaggattcggtcgctgattaatccccctttgatctagggtatttcccttaaccaccagttagctcgttctgacaaagtgcagccgagattagggagatcactagagcactcccagcctgtgcgcctattctctataaccttttaaagcaagggccaagaatgcaatttagtctcagtttttgaagatgtaaagtcttgtctgctaagttagaaagtcaattgaataccaaatgaagtttatttcttacgtaaaagaacaaacatttcttctttgctctgcctaacaatgatattaagaatcatgggctttgaagagagaaaaaacaaaggccaccttccaaatacaacttcgtgttttgtttcatgtgcatgtttactgccccccagataacccaagaatcaaaggagtggctacagttatgctgagaaaacacttgggtttcgtgagactgcagtgcctcctcatctccccagccgtccccagcagaactggaaaatacactgcatagcatagcacagagttgcagttagggaagcatgcagcacacagtcttgttagatttactttccgtgaagaagtagcgcctcatagtctcattaa

SEQ ID NO: 22662 - DNA, 2884 bp, Mus musculus
ctgaccctacttgggaaactgagaaatggcttaaagggatggagctgggaattgtggggtttggatgcacttttttgtttttgtttttttgagaatgggggaatttttgaaaacaatagaaaattaatgtaaattggtatgatcttatttaatcaaaatgattgataagctgtgaagaacagcttctataaactagctgggttttttcttttttctttttaactttatttgaattcacattgcttccatttctgaaaatacttcacttttggtttagtgttagaaatgaatttcaaggagcattgtatccatttcaagctgcatttattttctttttactcatgagcagattgttgggggacctttgctttgttcctccagaaaaaaaggagagggatgaaacatttttttaatgagttctttgggttttctgagcagccaaggtgtttattagttacagtggattttggctaatcagtgtaatgttagcaaattgtagctccctgctttgggttgagttggtaaagctgtgatgagtaatttatttaactaggatacctaagcactcataaggaacaagagtcagtttctcaaaaatgcttataggaatctggcattcatgttgtttttttcttttgaatatacttttcttctactctaatacttggtttgaattttattttatggctgtaattactgtatttttaaaaaccctacctccattaacagttggtaaaggccccttttcaggaaagtttgttgcgctttttttgtttgtttgttttaaaggaaagctgctctttgctcagtatagtattttggaagtgaacatggtaacaagtacttttaaaataaagatgcacagtttatatttgaaaataaaaacttcctgctggtgggatcatttatagttccttatttttaagaaaatgtgtctttccattttatattgctccttaaagtttaatattaaaaatgtgataaccacatagtactcagcttttctgctgaccattttgaatctgttttggtcaaacttcatttgggtcccagcatttagaagaatgccagtcatcataatgcctctgttctcattttcagtgtgaaggaaagtagctaaacagtgtacttgacatcgtcaaaagttgttttgatttgctggtacatagggatgacttgttgaggaacatacattttcttgactcactctaatggatatagttgtaaaatagatatgtgctagacttaccaattcaaaagttttgttcttcctaggttgtcagggaagtatcactactacccttcagttcagaattgctgaagtaactgattgtctgatgatttgtgaacatgatcttaactatgtgactaaaatatcagatcattacaatactgctcaattgatggatacatgttgaatatcagtgtatactttgatgtttttaattacttgaccctttttttaaacctaaaattttaacctaatttgataacctagtaacaaaactttgcaagttgaattgcttcaactttaatttgacattaggctttcaattctcttttatcagcttaaagtggttccatttataattgacagtgggttcacttggctaaaactgagcaaaattggtgcaactttcttttagtggggtgctgcctctttaagactgactgtactatctatccactgacactggtttagcagttgatactgctgaacatttaatacatgctaccatgaagctgtatatgttagtattgaagaaagctaacgggtatgctaccagtcttgtaatttcccatacattgggatgaaactacttaactcgggaataatccaagtctacagatcataaaacatattactgcttgatgttgaagtcagcaaaataagataaaaattgattttaccattttctgcctcctctaatacacacgtaagacaaatctatgtaaaggagtttgtcatgttttaactcttaccatgccctgtgttaaggtcttggctggtatatatgactagatgtgtatgtttattatggtgtctaaaaattatgaggttcattactttctaggaccatacaggaaatcaggttggcagtacaccagttacttttcagtatacgtctacattactaggatgagtgctataatgtccaagggctttcaggtttgtaaaaacataaccataagttacattgtcatcacatatgagttgagtatctatgaactatcacgtgtatctcaaaaatattggactgctgtttaatgactggggatattgctgcataattttctcctattgacccctatccttttggagagagagatttgatgggatttgaaatgtgcaagctgtctgaataagatacagtcaaataaagtatggttaagttgtgtttgcatttttctttaagatacagctgtgtgcattctataatttggtttcagataatcaaaaagcaacctgttctatttctcactgccctctatcaggagttatttggaaggaacgatataggtgctatctctctactttatattctgacaaagtaaatttggaaataaaataaaaaacttgattgctaagtgtacttgttagtcaactgggctagcagtaccagggagaacatttttaagcattcatcaactgaaagtagtttgctttttatccttgctcctagcaacttattcctaagtcagttttgagttttactgtttgtacaaaccttcttgtgtaagttgtattttttccccttttgttaaacactgaagtggagcaggatctaatgggctttttgacctattcttgggagaaacttgagtgggtagttatgtattctttcatatttgaagtactgaggatcagtgggaggacgagatc

SEQ ID NO: 22663 - DNA, 1237 bp, Mus musculus
tttagagtccttccgacacatggcataaggcagcccaagaggctgggtctctaaagatatttctagtttaggtaataattaatgtggttcgtatcctaaatagtaaaatttaaaataagatttaaagcaatgtctctttattaaagcattaaagcttgctttaataggtattcataggtattaattgacatccaaacttcgtaatatgatagtaatgcttctaatattgattttaaagataataaattgttttaaacttgggttttgctttcccaaggttacaggtattatcctaaccttgcacaaaaaacttaaaaattatggttaaaactgctattgttccattgactgcagcttgcagtttgatttcaaatttaagatctttaattcacctgtatactgtaattaagataattacaagagtaatcatcttatgagagcgctcatacagctcacttcatacaaaactgtgacagagttatctagttatgtttgtctttgtaaatagattagacaaacagtttggttatagttgctgcctggcaggaaactgtagtacaggcaattttttcacaacattaaagttgtgaagaacgttttaactgtaagtcatcttaagaaagagtatcaaaatttagaggcgtagacagctatattgtttctctaaaatcggtccttattacaggagggccaggatgctcagattaaaaagtatttcacgtttgagtcaatgcagggctctgggcagccccacagcggcttgtggcctttcttttgttttgcaaacagtgcctgagaaagatttttccctgtgttcaagagaaattctttttaacagtgttgcagatctattcagatgtttaaaataatgcttaaattcaaagagttttgcttctagtgaactgtaatcactagaaaattttgcctctaggtatggctaatgtaactttacattatgtaagaaaaaattttattgtttctgcttctatacaagaagccaagagttttaatctttcagtgtatattgtttcctaagtgaaaagtattttattaactaatgcttcttaaagtttaccttaaatacttgctctcacccaaaagattcagagacaatatccctttattacttagggttttagtttactacaaaagtttctacaaaaaataaagcttttataattgttattaattggtaattaaaaattggttgtgcccaaaacaattcttttggccagaa

SEQ ID NO: 22664 - DNA, 1143 bp, Mus musculus
tcagcataaggagcaccttggacccaaactatagtctggccctttaccatggcattggaaggtccttctttaaaaccaaatctacttggtcaaaaaacatgtatcattaatttgtgtttgttaaatgaatgaatctttcccacaagtactttcctcccacacaaatttaagtatcatctctagggaactaatgggaaattttcatggaacccagttttgaatgctggctatctcacaaaaaaatatttttcctaagtttagttcttttggtcaagaaatcaaatgtataaagttgattaagagaaatgaaaagtctcatggagcaaataaaagctagccatccataaatcagactaaagtcggagttttaaaaaagtgaatatgagtcatgactctcatcagtgagtcacagatccactaggagagctgccctgcttctgcataggggatgctttctaagaacagtctcttcctgtgttcctgatgctgggaacaagtgaacatgtggggactttgtcacttgaaatattgaacaagttgtatatagtgaactaacaacaggttctcttaattcaagaactcctggatgatactgacaggcaatcgtgcctggagcaactcaatctgtagctttagattagatcagggctaatagtgcctcttcaaactgttgtataaaaagccactcttttgcctgcttttgggaccttttccctcatactggattgcctcgttcagccttaataaggagggcagtgcctagtcttactgtaatttgatacgccatatttggttagcatccatgggaagcctggccacttctgaagagaaacagaggagtgggtggaggcagcagaggagaggcggattggaggatggggtggagagaaggactgaggggaaactgcaggcagaatgttaaaatacagataatcataagtatctgtcacaaattcacatagggaagataacatgtgtgtgaatttgtgctttaacagccatcttggtatcccctttggcacacatgactatgtagagaaatcagtttatttagatcacagcagatttctgtataaacccatttagctgtctgtataaggaaatgtgatataactatacattagactgttacccagtcctaaa

SEQ ID NO: 22665 - DNA, 1475 bp, Mus musculus
ggaggaacaagctctaaccaaagacaactattacaaataactccagagattaccagatggctaaaggcaaacgtaagaaattactaacagaaaccaagaccactcaccatcatcagaccccagcactcccacctcactcagtcctgggcacaccaacacacccaaaaagctagacctggatttaaaagcttatctcatgattatggtagaggacatcaagaaggactttaagaactcacttaaagaaatacgggagaacactgctaaacaggtagaagaccttaaagaaaaacacgaaaacacaaccaaacaggtataagtccttaaaggaaaagaggaaaacacatccaaacaggtgatggaaatgaacaaaaccatccaagacctaaaaagggaagtagacacaataaagaaaacccaaagtgaggcaatgctggagatagaaaacctaggaaagaaatctggaaccatagagacgagcatcagcaacagaatacaagagatggaagagagaatctaaggtgcagaagagtgtaggacccgaaagatggtgaactatgcctgggcagggcgaagccagaggaaactggtggaggtccgtagcggtcctgacgtgcaaataggtcgtccgacctgggtatgggggaaagactaatcaaaccacctagtagctggttccctccgaagtttccctcaggatagctagcgctctcgctctttctcgacacacgcagttttatccagtaaagtgaatgattagaggtcttggggccaaaatgatctcaaccttatctcgaactttaaatgggtaagaagcccagctcgctggcgtggagccaggcgtggaatgcgagtgtctagtgggccacttttggtaagcagaactggctctgcaggatgaaccgaacgcagggttaaggcgcccgataccgacgctcatcagaccccagaaaagggtctttttagacttttatgactttagactttttagactttaatgaaaatcaagccacaacatacccaaatttatgggacacaatgaaagcatttctaagagggaaactcatagctctgagtgcctccaaaaagaaacatagagacagcatacactagcagcttgacatcacacctaaaagctctagaaaaaagaagcaaattcacccaagaggagtaaatggcaggaaataatcaaaacaggggcaaaatcaaccaggtggaaacaagaagaactattcaaagagtcaaccaaatgaggagcgggttctatgagaaaatcaagatagataaacctttagccagactcattagaaggcagagggacagcaacctaattaacaaaataagaaatgaaaagggagacataacaacagatcctgaagaaatccaaaacaccagagatccttcaacaaaaggctatactcaacaaaactggaaatcctggacaaaatgaacaaatttctagacagataccagga

SEQ ID NO: 22666 - DNA, 1133 bp, Mus musculus
acatgaaataaaaataaattcttttctttttaatatataaagaaacttctggaagcacaagacctgcatactactgggcccatttggttttgttttttgtttttccagtagtagggcttataagatccccacctctcctgagggtgtgtaggcagttaatggtggttgggggtgggagagtcattttgtccagtgttgtgaccactggtacggggtcaggtacataaccatacccatgcccttctaagcattaaaatgaacatagatgcgaaagtagaagaggcagatgggaaaggggatcagtgaacagggaagggggacaggaaggggatgatggaggatagaaatataatctacagtttgtgcgtgtatggaaatgtcatagtgaaactcatgattatatacaataatctatgttaataaaaactttaaacatacagacttccgagagctgctggtcgtatcttggactgggctctgagatggcccactgctgttgctcttgcagatatcctggggaatgcatatctttctctttatttcaatactggccagaaccctaagatctcccagcaagccctcagtgcctatgctcaagcagtaagtacttgcaatcacccagggtggaagtagaggcaacaacggaatcaggagcctttgtccttcctgcgttcctttagcgagtagtgccagcagacgttgctggcacctcgcatgtctgcagagctgacttagaagatattagggacggtgccttggtgacagataactccttgagtgtctcagtttcttacagccgtgtataatgagattgtggagccactcttgctcgtctttttttagtagggcaaaaaaaaaacaaaacaaaaccccaaaacccaaaaaaaaccccagtaaaataatacttgtatagctttgacaaatgaaagctctggaaattaaatagtgctagattaagtagttacagcaaattatgtatgtatttatttcataagcaaggtatcacaatgaagccaaaggtaaatcacaggacacggccctggctctcccacggctgggcatcgatgcacagtttcttccaggaactcgcatgttgtaagccatgtttctatagagacacttgcttggggctt

SEQ ID NO: 22667 - DNA, 1114 bp, Mus musculus
tctcattgcctcccaattgcaattttccctatctcctctcctctctctcctcccattccccagccccttctgaaaaaggcaggccatgcagggatatcaacatgacatataaaggtacaagtaagactgggtgctcttcactaaggctaaacaagcaaaccagtaggaggaacagggtcccaacagcagggaaggtcagagacagcccctgcccactattaggcatcccaaagggtcagccccgcgtaggctccctgctgtcactttagtctctgagcccctatgagcctaaattggtttctgtgggttttcttgtcacaagaaagctcttagaagtaaaaatatccttacactgccatcttgtggccaacaggggctccaagtgatttttccccctatgtttgggggaagttgtatttcttatagaagataaatttaattagtattggctcaagaaaatgacttggaaactattttggattactgttctacttactaaaaaaccttaagaattgtttttttttttcgtactgttttgctttgccagaacagggtgttggactcctggcctgctgtgagctgcctgataatgggcattgggagcagagctgaggtcctctggaagagcattgtatgcctatgtactaagtacatacagtgcccactgaggctagagcaggaggacatggattccctgtgacagaagttaacagtcagccctgagccaccatgttagtgctgagaattgaactggggtattttggaggggtattttggaagagcagctagtcctttctctagtccccacatttgagagttttaaacataacacttttcagtctttttggtttctctgtagccctagctgtcctgcaactcactctgtagaccaggctggcctgcctctgcctaacacgtgctgagattaaaggtgtgcgccactacaatgcctggctacttttcagtctttatatgactacttaatacagtttcatgagttttattaaatgggtttgcataccaagcaggttatagaccatacataattccttacttgacactttttatatgcatgtttgtataagaaatttggaagcacacacaacttatgaag

SEQ ID NO: 22668 - DNA, 1444 bp, Mus musculus
catggtcatcagtaaagtgttcaacggtctggactgaccaacttgctgccagcgttgctatttggagctttagaacctgtaaattcattgaactttagttgcccgaaatataaaaccgagaccacagacacagtatacggtctacagacaccaattctaagattcgaattttactttctgaaatcggatgtatcttaaaaggttgactacagctaatcactttactgtaagcgcttatccgtgacccgcctctttggactgaagtgtaatatgaaaaagcgagaggctccctgtgacactgggccgagcattcagcctgcggactgagttcccacctcgccttccagagcctgatctctgccgccgcggcgccatcgctcttgaaggacgacgtcatcatcccttgcccggatgcgcgggcttcttgtctagcacaggagcctggggtagagcgcatgcaaattacgcgctgtgctttgtgggaaatcaccctaaacgaaaaatttattcctctttcgagccttatagtggcggccggtctacatcctgaaagtgggcggaggaagctcatcagcggggccacgtgctgagtgcgtgtcactcttcggcccctgggaaggtctgagacttgggcctcccgcggccctaaccgggctctccccgagcggggaggtgagttcccagagagcagggctctacgcttgggcagactgggcaggagaagccccgagtcggggcggatgcctccctcgccggagcggatgcctccctcgccggagcttggaacagactcacggccagcagtgcgagttcaatggctgaggtgaggcacctcccgggcctcataacccaattcagactactctcccccgccctcttttttgatcgagatccttttggagtattgactcgaaagggttttatatatttactctgtgtctcagcattcagtcagtcattcattcattttgaacagttgtgactgtattgaccacaaccctctactataaaaagaccaagcttgagagttgttcaaatatggattaaaccataaaaatatagaagggagtttgacaacatttagtgaaacatgatatgaaccccctcccactgttggatttttggggctatactttagctatttgtctagcaaaaataaacgtagttcataccttcatgtaacttgttattgggagaatatatatgtagacttattacaaaaccaaaaaaatgaacctgtaactgtaataagtacttaggaaaagcacatagtatcataatagagaaacaggctgggaattcctcatgaagtaaatgagcagagttgagctacagcgaagaacactgagaaaggagaagcaattgagataggagtggaatagggctcataccaagcccagctttccttacaaaggcgcgaagctgtgacttgactagtgtgtgg

SEQ ID NO: 22669 - DNA, 1533 bp, Mus musculus
caatcctggttcactcagtagatgtgagaaatgctggcagatgcctgggatggcagagtactttactgcttaagggaaggaagcactaaaccacctgatcttggaaagacccctgaaggtgttacaagtgattggggtacagagacagaagtttgcattgcattactgtttctaggactttgaaatagtagataccaaaagtaacctcatctttttcttcttcctcatctgtcagtttggtacatggaagcatgcacagcaatatggagggatctacgcagcctgggcatttgtcattttgttggctgttctatgtttgggtcgggccctttattgggcttgtatgaaggtcagccatcctgtccagaacttctcctgagccccttgatgcagtctgtgcctgaccgctgcctggtaccaacagtaacactacaaaaggctctctggacttctacaaggaagccaaacagctgcctcccttttccctggggagaggtaggaaggaagcagtcccttccttccttatgtttggaagggtaggtaagaccattgctggctggctgctctcttccaggggttgctgtttagggtaaataggcaacattgcccctaagcctggatcctaaagatggttctagccatgcccttcctgtacgtgctcccgagaaccattcctgtcccttaatacattccagggcagggttggggtgggagatgggagggggtgttcccctccctctgtgcaccattaggaccttgctgctgctattgcacttcaccaggggctggctctggcctcaatacccagtctcttctccccacatttctcgtcctgtggggtggggtaagccactgctctgtacagaactataggaactgatgtgtatatatataactatttaatatgggatatgttcccctaatcctgtacttccctgaattcctccttccgattttacttccagttgcagtattgaactgggctgaggtagggtcactgtcttgggagaggttagggactcatctgtgcttgtaaataaataatgtcatgactctaacctttcccacttaacaacttttgtgtatgaaaaagggaatatgtagttttcacaaagggacaaagaaagccaagctgaaagtagggccttttatttctcttggattgtctaaaggaaaccagaagtttggtttaatgtttaaaatgagggagcacatacaaaaccaaacacctgaaggctaaaacaccagacttctgcagagagagccatctcccaggcaggaagctactgcaggagggtatcacagtgctaggtaaagggtgatgggacagtggtcactgccaagagccttggaccggatcttgctgtcacacaatgcaggtaaaagagagtgggaaagcaaaaagtaatcaaggcgccaaccaacattcttagagcgggcattcatcatgtaagtccagaaagtgtaagcgtaagcagtgttggggtagagatgccggaagctgtcagccaatggtacagcttgtagcagttc

SEQ ID NO: 22670 - DNA, 1185 bp, Mus musculus
tgtgggccgcctagaggaagaggcggaaagaacggctgaaggccctccgggagaaaaccgggcgcaaggacagggaagatggggagccacagaccaagcagctcagagaagagggagaggaagttgggaagcacaggggactcaggctcaggaactatgtcccagaggatgaagacctgaagaggaggcgggtcccccaggccaaaccagtggcagtggaggagaaggtgaaggagcagctggaggcagccaagccagagcctgtcattgaggaagtggacctggccaacttggcaccccggaaacctgattgggatctcaagagagatgtggccaagaagctagagaagctagaaaagcggacccagagaaccattgcagagctgatctgtgagcggctaaaaggccaagaggacagcctggcctctgcagtggacgccaccaccggacaagaggcttgtaactctgactgacaagttctccgtgtcccatctgatctgttcagcacacacatcctgtgggaagatggtctcaggcagggagggggttaggctggccagtacttctgggtcttgagaactgagccaacctactgagtctcagtttctgttggtgtgacctgttcatcgcccaagggtgcccaccaccccgagtggctcaaagctgggatctgtacatatgtatgcaaactgagcttttttcaacttctgcaaataaacctctatttagtaggaaaaaaaaaaacacattggtgggacagcagagagataggcacaaagagatgagagaagctttcctgtgaacacaagatctatctgatgacattcttagctttttttttttttaagatttatttattttctatatgagtacattttgtgtcttcagacacaccagaagagtgcatcagatcctattacaggtggctgtgagccaccatgtggttgctgggaattgaactcaggacttctggaagagcagtcagtgttcgctcttaactgctgagcaatctttccacccacattcttagcttttgggttggtggaagctagtggtctgctaagttaatagagttctaaagttgttttttttttttttgctagttgcaacatgtcattagttcagacagaggtgggtaaggaatgctgttctggaggttggggtggtagctagaacttagcccaa

SEQ ID NO: 22671 - DNA, 1211 bp, Mus musculus
tgtacggggaggctacaggtacaggagccagaggcctgggaatccagatacttcactgtctcgcgcaggaaataaagcaccgcagttgtcgtgagaccttggtcactaaaccatggaatggactcaaaacggctgtggctatgacttccagtaaaaagaatggcctttctccaaggagagcttctttattgataagtgctgaggttaaacctgggatctcacccaggctaaccacagttcaagccacgcctccagcccctgggtttcttagctgtggtggcatctcacgcctcccacctgcagagtgtcgcgcggttcgggtgcatagcgcttgttttcggatctctggtgcccgcttcaccgcatgcgtgctcccacccggaggcgggcatccttaaagctctggcgttgtctggaggacaggacggcgatcccggcagggtgtccgagtagagctccacatacccaaagccacaagtagggccgagtcggctaaatggtttcctacctactgaaaaccactttcgaaagagcactgcttgtgcttcccttcgatagctcagctggtagagcggaggactgtagttacattcgttgcagccatccttaggtcgctggttcgattccggctcgaaggagtagcctgtcttttgggctctcaacccctgagataagctggctctttgttcagtgtttggttgatcattgctcgtcctcactaacattagcaatctctctttcccgaaagtggtttgctcaatcactatacctatctctaattgaacagttaccaaaaggaaaatgagtcttggagtttggtttctggctccctccttgtttaattttagtttccgagtctaccgtgccgccccttatccgaagtccagacatcaaagactcgcaaggtacataaccttgggcttgtttgtgtacattttttttttttttttttttttttttttttttagcgctctgatggccagcagggaccttgatttgccgaacgttaaaacctctgaccccggtgatcgccccactaactggcaaagtgacgctttatttatttaggtattttatgtagcatttgacgtgagttgttgacgaggctggaggagtataaagttcagacggatgaagtactttaaacaagggaagtgagattgaaaacgcagttcttactcaggaaaactgcgaaggtctacagaatatcg

SEQ ID NO: 22672 - DNA, 1211 bp, Mus musculus; identical to SEQ ID NO: 22671

SEQ ID NO: 22673 - DNA, 1184 bp, Mus musculus
cccatttctttccaatgaaaactcccttgtacttggcaatagaagaagtcagggataggggaaacatcaaattgtaaagtctatgtcccttcttcaaaagctcaaatcccacattctctctctctccaaaacaaccagaccaaataagcatctgtgaacaaaggccaacagagacatcggattgcttctttgtagtcccattagctctcacttctccagtttctacctttttgagttcccagatataggcctgagtctgttgggggttggaatatgattctgtattcataagatacctaagactcaattggatggatagggatgaaaagacctcgggtccagtgaaacctcaatttgaatggatccataatttcagaaggggctctctttggcattgacatcagtgcctcctgccttcttgaactgggtgtgcttagtgcatggtaaaatgccacctaaccttccaggtgtaagagtggagaaatcatgcaaaggctttccacattgattgcgttgtctttggataccaccttcggttatggaatatcactacaacaaggcccaaagttgtctggggagatggtgtggtagtaggatgtccactctgtatctctggtaatcgtatgaagagcctttatggggaactggacaacatggctaatgaaaaagaaatagttatattttggtgagctgatgatatttgagcctggaaagcaatggggcaggcattccaataaaatagatagggatgaatccctccctgtattgggtacaataggcccaaagtaattaggaggcccatccacctttccctgaactcttctgagagatttgtagtgtttccttagggaactgttctttactttcatgagaccagaactctgaggtctgcatgcaccatgaaggttcccatctaatcataaatcattcactgtttattgacatcttttggctatgaatgctctgctatagtttgacacaattcaaagggtgtggtgtaattgttggtcaagtacctcaaagagcttttcagctactcttttagaagtttcagactagtggataaacccatagaaggtttcattaaaaacaagcatggactcttatcctcccccagcaggactcatatcagtgtaatcagtttcccacaattgaccatagtttggcccctcatatgttcccac

SEQ ID NO: 22674 - DNA, 1173 bp, Mus musculus
gaggtgtcctaatatctcttagagatctgggccccctaaattaccccctcttccattttggtgttgagaaggcttgtatgttctctccctgacctaggttctatagatgaggaacaatgagctgttctagctgacacggggcctccatcactccccctctttagcccatatttgcaagggtaggagagagagtgtgtgtgtgttgtgtgtgtgtgtgtgtgtgtgtagggttgatggtgagagatggggagctccttccccaaagctgacagtggctttgccttgatgtgtcaggcctctctgaaggcaatagtcccaaatgaatgtttatcaggagaaggtttgctggtgggtcagtgatccttaatgtgatagaaatatccagcatgtaaaaagaaaggatgggagatggtggcccgtgaagaacagtggtaaacacattgaagctggggtagaagggaggggcccgggtcctttggccacactaacttggatagctgtcagcgtgcacctaaagtgggactaagggaaagagcttaggtccgactgcttggggcttggcatcagggtgggaagagctacctcaggctctgaccatactgtgacgtgtagagcgtgacctcctgtctcacacaacttctgctgtgacaataaactatagaggaaactgaacagcattgttaatccgggtctgaatgcgcctgtaccctgccccttgcttgcctttccttgttcctctgaaagcacctgggatggcttgtggggtataaaagctgcacagagtgtgaccacgggagccaagaaagtggtgtcattctttttattaatagcatttttaagcttgggaaagaggagctgttgtagagatgtcatcaatatcatgtcctttaagaaaaccgactgaggggctggagagatggctcagcggttaagagcactggctgctcttccagccgtcctgagttcaggtcccagcaaccacatggtgatggaatctgatgccctcttctggagtctgaagacggctacaatatatttatttattatatgtaagtacattgtaactgtcttcatacctgccagaagagggcatcagatctctttaaggatggttgtgagcctccatgtcacctttgcgttacctagagtacattttagatggatcattcagca

SEQ ID NO: 22675 - DNA, 1246 bp, Mus musculus
tcaccttcagcgtcaccaccgagagcagaggagcagtgcgggtcctgggcctcccccagaacccccgccaccttcccagcggggctcactgcagccgcagtcaggagccaagccaactcaggcctcagccacctgggtagagggcactgcaagtacccggcctccttcgagcagcaccggaccagggtcccgtaggaagcctgctagccctgggaggaccctgcgaaacgggcgaggtggtgaagccgaacccctggacctgtccctacgggcgggcccgggaggtgaggccggggcagggggtgcccttcaccgctgcctcttctgcccctttgccactggagctcctgagctcatggccttgcatctgcaagtacaccatagccgtcgtgctcggggccgccggcagccccgagccgacacgtctccaacctatgtccgggcaccatcaggagagacccctcccagtcctccactagaagaggagggcagcccagggctgtctagatccggagaggcaggtcttggggggcaagaacggtagggagccctcttaggagtgattagcttagtaagcttaccccgcaggagcggggaagtgctagaggtagttgggtagagcagccagcagggagcagtgtgggacccgtatcccagcccaaggtggaccaagaggtaaagtgggcagtgggtggaggagagtgggctagcagcacccacccagcccagaggagtcacagtgccttagaagtggcagaggtgagggtcaaagaacggggtcctcgggctggtagaggatgtgttcctgttaaggagccgctctgccagttcctgctggtccataggcatgagagtttatttttgtataaggggtgggggtggggggcactgtacccttctagccctatcaggggcccttgtagacgttgctatttttggtacgattcctgtcatccctgttgaagagtcatgtccccaataaacaggtgtcttgaggcacaaggccctgtgtgtgtctgcctgtgtttcactcctcctgggcacttcgttatcaacgaggtcgataaggatgcaaatctttgattcagtaactctggatgaggccctaaagctagcgtttgtaataaatagccgtggcctctcttgcactgaggcccgaggacatcatagataagtgctgcattgtgctggacccatccgaccatctcaggcctcaagaagtgggtgcagaatggaggagggactt

SEQ ID NO: 22676 - DNA, 1345 bp, Mus musculus
tcctcctcttgtgtgaggaagcctctcccctgcagagaggaggaaagcccgcttcggagcagctctggacaaaggggctgagatgccccgtcaaaccacaggctccaaggtttgaaacggggtgaaacctaaatgggatttgcagtttttaaccccttccctagactggtagtgccccttaacttccaggcctccccccaactctcttcattccctctgtagctggctctcccttcacgcccctccccctctgtctccagactctgctgctgggaggtgtttctctcccatgcatgaatgagtctctgtaatgaatggaaatgaatggatcaggaatccaggaagggggagggggaggaggaagaccagaagactgggtgccggcagaagctaggaggaggaacctggagggcttctggctggctggccctggtctgagaggagctagtaccatttggataacaggagtatggctagccctccacatttgtttatccaggggcacagcccaacgcgagtggaagaggggtatactatgatggcctcccacattgtgtgtgtgtgtgtgtgtgtgtgtgtgtgtgtgtggtggcggcggcggttctggactaggtgtttaaaacatcatttgggggaggaagtctgtatttatcatacaagttggcagatgaagggatgcaagttttgaggacagcaaataagaaggctggaataccccaagatcacaataggaagaagggatgggtttcaaggatacaggctgctaagtggggtgactctactgccaaaagccagggctcatctttcctccaatcgctctgtcttgttttagcacctccgcacctgttgccttcattagcagcttttcttcttcctccttccaatcctcagaaccaaagaatgtgaagggggtccatggaggtgagtgaagttctgtccttgacctgcaaagtgccttcagcgggacaccctctcctgcctccttttttgtttctttgttttttaaacttcgtattatagtagcatacgttattaacttggccccggtgtccaacttccactcatcccacagtttctggaggtgagaggtatcaaggtacctaggttaggtcccaatctcccaacctccatacacactcttcttactgttcttcgtgcctttgcatttttctacattctacagggtggtcttttccaccctgtcctctacgtgcatctttccccacagggctcacgtccccgcatcctggtcggccacctagagccttccccaccagccttcgacggcgagctggatctgcagcgctactccaacggaccaggtgtcagtgggactccaggaccc

SEQ ID NO: 22677 - DNA, 1298 bp, Mus musculus
ctctgttggaactcccttattgagagcaatttatgagctctggtgcccgagacctggtttgatgtagaaatgacggaagccatcttgactgggcctaggaggtctcggtggatttttactgattttaggccgccttctggggaacttcccctgaggagaaatccatttgtaccttctaatgcgtctctgctttccaccctggaaactgctacatgcagaagtgtgggggtccttgttctggtgaggaagacctgccttttttctcctctttttgcctcagatattaggccatttttctaggacacattttgcttagtgttttacaggcaattttagagacccgagaatcttctcagaatcagaatatgtgcccataggttagtcagctatgaccatgcagtattcacacacacacccctcccagccatctgcttcctctgaatataccagattggctgtacaccaggatgttccgggaatccccaggaaagcaacagaatgtgatggactccaatacgatgcctcagtaactcattccaggatgtacaaactgtaactgttatgacattctgtatagctaattaaaatttttctaggtgtgcgtattttctattttcaatgacatcaaaaaggccacagtaatccttctggtagatacccctccatagtttctctgaaacccctgcataggttccagatgtgaatatgaatatatatatatataatctccactagtttctgtgtcctctttctggttctaaaatggccaatgtggcctctctagcacttcctagctctatctgtggtactgaggtagccagagggccatctctagtagcccactgcactctccatggtactgaaggagtggccatttgttttagcatctcttgggggccagaagagtcctgagacttaaaaccacacaactttcaagttggcagggactacaaatgtaaattcagtacaactcgtttcacagaaggtgaacccacaggataactgattactggaggctgtaaggcctaggcttgcagtagcctctactccttagttctattctaactcctttatgcaattgtcagtgagcctgctaaggctgttggtcccagtaacagcctcatttggaggactcataggccaggaaaggatgcctgaatttggacccatagaagcacacacattaagcggcattggttttctactgatgtttgagcaggacatcttgcttattttgactctcaaaagtcagattccgcatgtgacaagggtttgccccttcataaagccttgccccc

SEQ ID NO: 22678 - DNA, 1162 bp, Mus musculus
aacattatggcctctgcgatgatgtcattcatatcttaggacacctttggattaatcatgaaaataactatcctctgagcagctgttggtagtttcagcctccttggttactactagctgctgtgatagttactagctgattgtgttagttactagctgctgtgttcacaggtcacctgccaagatggttcactattctcttgacccagaaaaccccacaaaatcatgcaaatcaagaggttcaaaccttcgtgttcactttaagaacacccgggaaactgtgcaggccatcaagggtatgcatatccacaaagccaccaagtatctgaaggacgtcactttaaagaagcaatgtgtgccattccggcggtataatggtggagtcggtaagtgcgcccaggccaaacagtggggctggacacagggtcggtggccaaaagagtgctgaatttttgctgcacatgcttaaaaatgcagagagtaatgctgaacttaagggtttagatgtagattctctagtcattgaacacatccaggtgaacaaggcacctaagatgcgccgacgaacccacagagctcatggccggattaacccatccatgagctccccctgccacagtgagatgatcctcattgagaaggaacagatcgttccaaagccagaagaggaggctgcacagaagaaaaagatatcccagaagaaactgaagaaataaaactcatggcccgggaataaattcagcataaataaatgcagataaagttaaaaaaaacattatggcctatgttaccagacagatatgagactacattgcattgatcttagctattgttttttgcctacataattaagagaggctgtgtaaccataccgttcatgaattgtgttaaaagtattctgaaactactaaacacaaactattgatcaagaggagaactgagaattgccaaaagttctaagaaaaatgggagaaacaagggtatggaagcaccaatgaagaggtcatgctgaagagtctgatagaccagaaagaaaaatgattgactccctggctgcaaatcctatcttgcagataggatgtggtttctcaagacccatggagatacagggaaaaggactgtggtttgcatgaagactgcaggcccctcggacaagggaagg

SEQ ID NO: 22679 - DNA, 2775 bp, Mus musculus
ttcttcctgtggttctgagacctaaggcacagcacctagaaagaacactttcagtaactggtaaatggtgctttattctagtctaacattgtagttctgttacagtgaaaggtgatgaccttcaggccattaaaaaggagctgactcagataaaacaaaaagtggattctcttctggaaagcctggaaaaaattgaaaaagaacaaagcaagcaagcaggtaatagtcttttaattttctaattgaatttgggttatcttcctaaggtggtttaatgtatatgcaaattgggctgtttggaaggggcattaatttatttggaaaactttacttttgttctttgatgattaatgggaattgtctatatcctgtgggcaacacttgcccctggacagacttgtccttctcatccccagtagagatgaagaatgaaaagtctgaagaagagcagagcagcgcctctgtgaagaaagatgagactaatgtgaagatggagtctgaggcaggtgcagatgactctgctgaggagggtgacctgctggatgatgacgataatgaagatcggggggatgaccaggtgattacctttggaaaaaagaaagttgggaggactggggtccagggatgagaagagtacctctaactctcccttatttgtgtctttctcacagctggagttgaaggatgatgaaaaagagcctgaggaaggagaagacgacagagacagcgccaatggggaggatgactcttaagcacatagtggagcttagaaatcttatcccattattcatttacctaggcgtttgtgggagatgaaagtaacaccaggtcatctcccctggggtcttctgcacattctcactgttgtcccgccttaccctccctgtgttcattaattcatgattgccctgcgcctagttacagttccacttcctttgatgctccgtagtactttcgttaagtctcaccctgtaagttttgctttaattttgatacctctttgacttaacaataaaaagttgtatggtttttatcaactgtctccaaaataatctcttgttatgcagggagtacagttcttcccattcatgacttcagtagttgcttccctaactgcagaggcatctcatttacttgtaaccccaagagcagctttgcattagaggtgtgtgttttccctcacgtgagtgggactgttacaacacgaatgtaaccatgtatttttgtgaatgggagttggcatgtcaaatgcatcttacaggaaaatagtgtaatagtcttaatatttgttttctaaagttataccatgggttatttttgtgaacagcctgatgtttgggatctttttctcaaaaataaacagttccttattaaaccaggaatttgaaggaaagacaatttttttttttccgagacaggatttttctatataggcctggctgtcctggaacccactttgtagaccaggctggcctggaactcagagatctgcctgcctctgcctcctgagtgctgggattaaagccgtgcgccaccacaccctgctggaaagaaagtttttcaattacattttttttttaatagcagcctccacaaatcgttaggttgtattaaatataatcttcatgcataccaatatatatgaataaaagtcattttgagagcattgttaactttaaatatttttgacacggagtgcttgaatgttcagttactgattaaaacccaggtttctttattgcattctcaacctgtgcctcaaaagtttcaaaataggaaagcatttgtctttcccgttttatatagcatttgccttcctaagaactgagtctataacgagagttataattacccatgtgaagtactcttaccccttttcttgatttgtttgagtcagcttggaacattttgctgtgtaagacctaacataaggtaaaggtataaacagatttgggggcttgtttgtttatttttgtatagcaggctattcaaatcttttatgcacacagactttctacttctcaaaaagaccctgttgtgtatatctagcatacagctgcaagtctatgctttcatgctatgcattgtaggcaaaagtaacccatgataaaactgaggagaggctgatctaggggcttcccttggctccagtgtgcaaatataaaaatggcttttattgtgacccccctctgccccttcccctaatcttgatattgtcttgggtttttgaggaattggctagatatcagaggttaaagatgctaataaataaaacctgtttaaatatgctgttagaagctggtgtgtacaaaatgctggggtgggttcaattagttcagtattgggtactttctgatattgggtattgtatttattcaggtgactcccccgccccctccccccaaaaaaagcagttgggaaatttgagaataaagactgtggttctgtcccttttcatagttggtatatacatcagcaaaagactcaggagcctgtgtcttcataggaacactaagtgccagcatgtgactaaaaaagggtgtcatccctggccctccctcaaactgctgttgctagtttattttggaaactatttagaactatttagatattgttagagaactatttaggatattttactggtggtattaaactaagttaatactaaaacttgtcaagttaaaatgttcacaggtttattccactatgagaatatcttaagtctttcaaagttgtgagattttgttcatttctagttttttaaaaaagattggg

SEQ ID NO: 22680 - DNA, 1099 bp, Mus musculus
atctccatactaaaatacaaatgctgaccagttcccaagataaaaccattatccactgctggtagagtacaaaaaatcaaagagaaaatgttatgttaggacattttggaatctgacagtccaaaaaggaaagctagctctgtaaagcttaaccttttctaagtgaggaggagagctaatattactaagattagtcattagataacaaaaggcctaggtttgctttgctggggaatgaaaatacatacatacatacatacatacatacatacatacatacatacgcacgtgggttttggttttgggcttcagagacatttcagatggttgtgagccaccatgtggttgctgggatttgaactcaggacctctagaaaagcaatcagtgctcttaactgctgagccatctctccagcctggtttttgtttcttttaactcctgttgggctttgttttccttttttccagatattaacctggctgcagagccaaaagtgaaccgaggaaaagcaggtgtgaaacgatctgcagcggagatgtacgggtcagtaccagaacacccttctccgtcccctctactcaggtccggaactttattatttataactgcattgtgtccatcagtgggcatcttctctgtgttttctggatgtggggagggttaatgcaatgtgctttctatgtgcaaaagtgtaattcttattaacttgtgttagcatacttccctttgggtctgttttcagatttttgttgtttaggaataattctatgtgtgtgtgtagtacaaaatgaggaattggttagtttctaggaagctagaaaataagggcattgtggtgtaacaactattgtattgcttcttcgctgttgctaaattaatcactgcatgtccagtggtcttaagattacatggagggcaaatgatttcgttgaatgaatggggattatttgttgctaatcttactgatctatttgttgtggtttgtttggcctgttttcaccccacctgcctgttgaattaacaacagcagctccaaaataatcttttgaaatttatctttcagttcctcatttgacttggactatgactttcaacggg

SEQ ID NO: 22681 - DNA, 1237 bp, Mus musculus
agtgttctatgttgtgctgtctggtttatcatcatcaccatccagtattaatattctagatgtaaaaattggttttagagtaattgtactcgatggatagatggctttatactttgtagcatatgctaagtccaagtgaatatcttgactagttggaaatatttgcctttgtatattgagtatagttgaaagatgaagaatgtttcagggtagaatttggggtggtctattttgagaaaacttaagactttatttaatattttagaattaactatagtattctaactaccaggaagaccaaaaaggctgaaaaggtagttaaaggttttaaggaattagaatttggaattagaaaaaaaaaacaaaagaaaaagaatttggaattaatatataggaggtttatattgcacgtaagatggataaaaggggtattaatatatttgctgtgagatctgttgagataaatgaaactccgagtagtcacagtggttcgaatgaaataccattaataacttctgttaatctgaatgcttctctttcattccagttttcagctttgtgagaaacctcatcatcaaaggagatggctagcaatgttaccaacaagacagatcctcggtccatgaattcccgtgtattcattgggaatctcaacactctggtggtcaagaagtctgatgtggaggccatcttttcaaagtatggcaaaattgtgggctgctctgtgcataaaggctttgcctttgtccagtatgttaatgaaagaaatgcccgagctgctgtagctggcgaggatggcagaatgattgctggccaggttttaggtgagtttgtttgtttgtttttaagttaaagatcctaaatattgtgttttattatggcattttgtgcatatatatcaaactgcttcttttacatataaacaagcagtatttctcaccttaaatttgtatatttgtttcaagtctgtaaaggtagtagccttcatacttgatgtgacagtgtctttgtattgagcctcccctccccccttttggtcggcctacattaatttcagcatgtgtatttaagttttttttttctttctttcttttttaagtagattttattcatcttttttttttttaagatttatttatttattatatgtaagtacactttagctgtcttcagacattccagaagagggagtcagatctcattacagatggttgtgagccaccatgtggttgctggg

SEQ ID NO: 22682 - DNA, 1103 bp, Mus musculus
atatatatttttttttctttttctttttttccccgagacagggtttttttatatagtcctggctgtcctggaactcactttgtagaccaggctggcctcgaactcagaaatctacctgcctctgccacccgagtgctgggattaaaggtgtgtgccaccacgatggacttgaacctacctttgttttaggggtggaggtagtgcttttaagacctatgagcctgtctcctattatttaaatgtactctcagccattagttttcagtgaagattaatcacaaatcaatgtgtttttcccattttgtagaagcaagatgttgctagggtgtcatcttcagcagcttacccccatagttttgaggcagtcttgaagtagacctggaactccaggactcaggccatcacatttttcgccccctttaatgtgaacagtggggattgaactttagtcctgataggtcttggttcttctatggtgaactgaaccccattgtccctaggtgactagcttttgtgaacttaatgtatatcctgttaattttttatgtactggtggctttatttactgttagagtactaatccaagggtttttttggggtggggcacaggtaagtgcttcaccacttaacatctccaggtcacattttatatgtattgcttaaatgtcttccaggacagccagggttatacagagaaaccctgtctggaataaccaaaaagaaaagaaaaagtcttcacatgcttatttattggcaagatctcattacatattcctgcctgacctagaacacagtgtttagaccaagctgaccttaagctcacagaattatttaatctgtctctgcctccaatttgctcagctattttgtaaacattattagtatcacttaaagttaccatatcttttttgtttttgttttccaggcagggtttctctgtcctggatttggctctgtagactagattggtctctgcaatttttttaaaagactgccatggctggagatttttatgggtgataataaaagatagaaaactttatttgacataacaaatctaaatgctgagggaccaggcactttagcacattttataagacccc

SEQ ID NO: 22683 - DNA, 1158 bp, Mus musculus
ggcctagagataactctcctcccttctcagaagcttgtttgcgtttcccttttcctaggcctggggctagggcaggccgtttgcacccgctaccagactccacccaggctctcccacccccgcgccgcggaaatgcggtgatctggccggacctgggagctctcagaagcactgataggacgatgcggccgtcagtcagatccgccggatacccggatgagaagctgtgcgcgatacaaaggcgaaaattccacccagctttccgtctggtacattgaccaataaccatccgtcagtcactaagtggcatgaagctgaaccaattactaactagcctctgttacgcatgtggaaattctcgcaattagcccaacccacctcggattatgattggacggaattgtgaggagcggtagcgctcgctaattaggagcgggagcgagaaaagtcacagccaataggaacgcctccaggaacgaggcgggggctggactttcgcctcggcggcagaggagctcgggggccattttgtgaggagacggagagcgaacggtcgtgtggttcttcgctgttgtagctccggcgtctcggcgtagactcgcagtaggagaggcggtctcttctctctctccttccttttggtaagcgaagggggcgagtgcaggggaggccctgggctgctgggccccgccagcgtgtgtaagggggaaaccggcctcgcggcagaagccgaggccgcgtttgttcccgtgcggtggggacttgggtctcatgcgggaggcaacagggcctcggccttggcgcggagtcaacctagtgacctccaggccacggtgcgtacgaaaataccctgtctgcgcgctcgggtttaacggctactttgattttctttgcccatcagggattccaaggggggaccaagaaagcgaagaacgaaatgcttgttgatgtaattgtcggggatatcttacggattccgttatcacttccgaagatagacgctgggtgggggtaggggagcgataacatggtggtgtcggactggaagcttctaaattccaggctggctacatggcatctgaacggcgttttaacaataggttgagtaatcattacttttttcctctaggggtaaaatggttaaaagtcggagtgctt

SEQ ID NO: 22684 - DNA, 1935 bp, Mus musculus
tgtctaggtcaggtaactgacaagatgaagattaacgtgacacattagctcatactgtccgttaacagtaggtgtcttaagctaatgaatcactctgccttctgcttagcggaccgggaaagccgttatgaggaggaagaagaacagagccgaagtatgagccggaagaggaaggcatctgtacatagttcaggccgtggctctaaccgtggttccagacacagctctgcacccccgaagaaaaagagaaagtaatatgaaccttgggtcctatgctccattctttatgcagacaactcctaaaatgacatgacatagaaactgtttttccttttggtttcgttgaagttttgccatttgtgtttatgggtttaggggccatttgtgcggaccaagctactcggggaattccaggcccaccaggacatgtgccagtggccccgatcagatggctggcaagggaggcggtgttgaagggcaggaggctcctcccactgttgatcccattgcctcttttcttctgacaacttacctttggtgtctgaaagctgaattcccaagacagtgagagactctgaccactaaccatttctaggattcttttttctttacttttttatttttcctgttttgagacagtcttgctatgcagccatggcttaccttgaagtcactgtaagccaggctagcctcaaatgtatgatcctctcgctctgcctcccaagtgctaaggctacaggcttgagtcactgtacttagacgaagcatagttctggcccagagtcagtcctccgtccgtccctttatcagttccagatctgcagttctcaagaacgtccttgggctctgctgatgactgtgacttggctgagctgggctggtgtctggtcttcagtggttctggtttcttgcctcatgcacattctggggttgtttttgctgcatcagaagacaaacactggcactcgtggctgttttttttttttttttttttttttttttcctccttacaagtccatatgtggtgcagtgctcaaacacaaattaccattgtctcttctgatacatctaaggaagaatggtcatgcttcgtatactacaggtgaaatctagagggaggcttaaaggagtcaacatggatctcaaagagtaagtcgtgtcttggcctagaatatcttgacaagaagagaagcgggaagaaggccacacccacaaggctgggcactgctgctcttccctttactttctctgcagtgtcctgtgttggttgcttccgatgatcagctttgaaatactggggggctctatcttgccatcctcccctgcaggttctctgcatccacctgtcccacttcgccgcctctgttctgtgactttatgagaaggggcttctcagattttatgtttgtttgtttgttttctccccttagcagtaggacttgatattttgaattttggaagaactaaaagataaataaactgggatttttttttgttttgttttgttttttttgtaaacttgtctcttatgaccatttctttgcagtttctgaagtcaagtcaagttcactgatggttgtaagccacgtcattagtttgaaaaacagatagcaagatagcacaggagaccaggtttatggcatgtcatgttattttataagacactttgactgtgatgccctcaaatcgttgagtggagtagaacttgtactttcatgaaaacagatcttcagtcatctccttataaatgccatggagggcagcagctgcttggagggaaaccttcagccttccaatttggatggcctggtttctagggctcacaactgtggacaagggtaaaaagacaattaggcaccagcagtgttccatttacgcacatttgtttgtgagggcatcattctggccgtggctggcccctcaacctcagagatc

SEQ ID NO: 22685 - DNA, 1224 bp, Mus musculus
tgcaagtagttgtaggttgcccagtatgtgtgtgctaggagctgagcacagttcttgcctctgtaataggaatgtgcgctctaagccactgagccacctctccaaccccagagctgctttatagtaatgttaaattgttccatgttcatattagaaaggtaaacacctatgtgtattgtcagatctttagaacttgacagtatctgtataaagaaagcagtttagtattcctatatacaaataaagaggcttctaaaaagtagaggtgccagagctaggtaaggccagatctcaagtaaagcattgcttaggtcatagttcctaaagagaagctaagagagtgaaaattatttgttcttcttaaaagattttatcatctagaaagttcttgatattgcctagccatgtgctaagttaaaagcaagagttcactttaaattggagctctaaattctccttttcttctaggatggtccagccactattcttacttctgtgaaaaagaaagtaaagaatgtggggattttcctgaaggtgagaaaatgataagtgattgttgcaggaacatcagtgcagtgaaaaagttaagcaacatagctctttaaaaaagtaaacagtatttttattataccttactcccatagaatgaggatgatgaagaggaggaggaagagaaagatgaggcagaggaccttttgggaagaggctctagggcggcattacttactgaaagaacaagggtaagtttgctgttcacatttaccatgtagctggatatgctggtgtacatctgtaaaatcccagctcgaagcaggctgaggcatgaagatcaccactttaagttcgcctggcaccacatatgcaaggttcaggccaaccgtgggggcattaggaaactggcaaaacactagtgtcctatcatgtgctccccatgttctggtgacttgattctcactttgctagaatgagatgactgcagaagagaagcgaagagcacatcagaaggaactggcagcacagctcaacgaggaagcgaagaggaggctgacagagcagaaaggggaacagcagattcagaagtaggagtccacactgagcaaggtgatagtctagagatgatgtgaccgtagggatttctcaattgtctttttgctttatttttaaccccactccagagctcgaaaatctaatgtgtcctataaaaacccatctctgatgcctaag

SEQ ID NO: 22686 - DNA, 1249 bp, Mus musculus
ggcaacatagagaacctatgttaaagtggggagaaaagaaaagttgtagttctaattacagagctctgtcttcagttgggtaggaaaataagagctctggagctgttagcttggtggtaatggagtatgaactgtgggctctggtaagcactactaatttactgaccatgttctcaggttgtaatttgtttccattgcaataactacttagagcacatagcctagaaatccttacaataacttagatatgcttatttctcagaatttttatttgagtttttttgtctcttcttaaaggaagagaatacccttgtcttgtcaaaatatgcaaaggaaatgtctgtcagctttcagtatgtgataatctgccatgaagaaatagataggaggctcagagaactcatcctccatggtttagattattactctctacttattagatagaaaataaaagtctaattcttgaagtaacatctccttttctgtggcaatgatagaatgaaagtaacaagagcagctttgacaaaatgattgacgctatcaaagaaagcaagagcggcaagaagatcggagtgttcagcaaagacaagttccctggagagttcatgaagagctggagtgattgtctcaacaaggagggctttgacaaagtaaggcttcatccggaagcagcacactgaaagggagacgggaggtggagtgggcttcccttggagcagaggattttcatttggggaaatccatgttcgttcatatttcatgtcttttggctaaataatattccagttagttttcagtcagaaaataagtgcgtcaaccacgttagacagcttatattgggtggttgagaagaatctcttgaccaaaatatattttggggtcatcttttccctgccttcctgcctgtctcccttcagcaatataattatgtctaaagagatgaatttgttgtaagtagtgcattagcttagtgtctcatagagcacatgttctgagagaggtgctctaagtgtagactcggtttgggaagagcctgagcattctgaggagatagtgttactggtggttctcaaggtgtgtgcaacagctctgtgtgtagtagaaatgcatcaccttgctacaggtagacatcagcgctgttgtggcatacaccattgctgtgaaagaggacggtgagctcaacctgatgaagaaagcagccagcatcacctctgaggtcttcaacaagttctttaaggaaagagtcatg

SEQ ID NO: 22687 - DNA, 1219 bp, Mus musculus
taattttataaagggaacaaaaaaaaaaacctgtatggaggctattagttaaaggcatgaaatctttcttaggaaaaggtttcattctatatctgatttctgttcttcagtcagacagccaaagttctcccagtctaatctttactggctataagaatgtttcatgtgatgtcttggctggttgcttgtcttcataggaagaaggattgaagttaacattccagaagcatagattgatggctaatggtgtaatgggagatggacatccactgtttcataagaagaaggggaacaggaaaaagctagtagaggtaagtggtagggaaccaactactcatgattaaattacctggtgactagataaggtctttttattatcagtaattgaaggcagttgggaagtttcctcatgactaccattggccctgcttccctctcctcctccttccaaacaagtgtatgtgctcatgggggtggattctgggttgcagctggaggtggagtgcatggaagagcctaatcaccttgatctggacctggagacccggatccctgtcatcaataaggtggatggtactttgctggtgggtgatgaggcccctcgccgggcggagctggagatgtggttacagggtcatccagagtttgctgttgatccccgatttctagcggtgagtggcagttccatccagcaagatttaaagtctcgcggtgtttaaggtgtgtgagatcaagaaagcatgctatatttttatacataccactgtttctgcatctgcaaaatcagaatggtaatactcagtcttacttcctataaatattcaaagatttaaaatactaaaatatccaggcacttcttcaactaagtgtttaggaaatcttactctcaaactattccagagattacccagtttggagaattagaaccctttaataacagttttccactcttgactaatctagctttatagaagacaggtttattgtcaaacagaaggcagtaatatctcaataattagtacagacattgccatttctctagggtaaccaattcttttctattgcagtatatggaggaacgtagaaaacagaagtggcagagatgtaaaaaaaataataaggcagaattgaactgtttgggaatggaaccagtacagccagcgaactctagaaatgggaaaaaggtgagaaaatagcacttttattatgctgtcttcat

SEQ ID NO: 22688 - DNA, 1225 bp, Mus musculus
taagattgcttgctgctctgcagaagtccgacattcagtttccagcaccacatggcgtggctcacagatgcctgaaactagagctccagcgcatcgaatgccatcttctggcctccatgaataagtacaaacaagtggcattctctctctctctctctctcacacacacacacacacacgcacaaatatagagattttaaagaatatctgcacaggcatcttcatattgtcttggctgttgaacctaaggaaattggttttttcgctgtaatatccctagcccacagcaaaggtcttaagtactaggtagagatgaaggtagtcaacatgttcctgctccatctgtgagaatttcaagaaaatcacccctcctatgctctctcactacaggacccagagcttatgacaaactccttgctgtaccacttaccgttgttgtttttcccgccttgcgatttctttgagcttaaaggctgcttcacatcgtcggcgtctccggtccccacgttccgcagcctccatcttcatttgttctctcttgtagctgcgttgataggctgttactaggcggcgaagcctagctgtgagggcggagcctggaggccagaataaatgccctggctgttgagttacctgggctgtggaaagaaagtagaatgaagaaggaagtatagaaagaagagtagagataatatttgtattttggctcatgaataggcaaagcttttagatatcccaggataggacatactttatagtcaatgacccccccaacctaacctttaaaaggtacactgtgtgatctagaatttaccttcctctccgtcgatgactgagatctcctcatccatcatcatcaagggatcaccctagagaaggagatccaccccacaggatggagggggggtgaaaggggagaagttggcactctgaaatcactttctgctgtatgtccttctggggcaccaagggataagaaaagtttctaatgaaaggaactctcaaaaacttagaaagcaactgaagaacagaacaagcagaacctgagcagtgagttcttagggattcgacagataacatctgctgacaacccgttccagtgcccctctcctccatcagccagcttagccatgccctaaggacagcaccataatgctggtcactaatactttacattcttttgttgtcttaagatgaatttattaagtgtatgggtgtttgtctg

SEQ ID NO: 22689 - DNA, 1182 bp, Mus musculus
tgactgagtttcatgcctgaacccatagtggaagaagagaattgacacctccccccattcttcccccaaccccaaagctgttctctgacacatacactataacagtcgtaaataaataagatataggaaagaaagaaaaccaactctttagctacagacacagtgtgcctgatgaactgctcctgccctgtcacaggtgtgcactgtgggtagacccccatgtgaacttcttagagcacccagcaggcactcccagggagggctcctgcttgctgtctgtgtgaacacatgactatgtcatggaggtaggaaagaagctcattaccactgtttggtttgtttttatgaggatgttggatctattagcataagcaaatactttttaaagttttccctttgaaaggttgtgtagtgtaataataccagtactttggagacagagaaagataagaggcttgagagttcagggcttgcctggagcacagatagacaattcactgtctcaaaaaaagttctcacttcgagagttttgagcaattaactgcatgtcctctacagaagagacgttcaaaccgccaagttaagcgaaaaaaatatacagaggacctggatataaagataacagacgatgaagaggaggaggaggtcgatgtaactggtccaataaaacccgagcccatcctcccagaaccagtgcaagagcctgatggcgagactcttccttccatgcagttctttgtggtaagctaacattagccatttaagagcctttgcgcgtgtgtgtgtctgtgtgtctgtgcctgtatctgcaggccaggcagcagtcctcttgcctctgcttcagtctctggagtgcagggattactggtatgagctaccacacccagttttgttttttcaacaattaattgattgacaacatcttttgctacaggagaatcctagtgaagaagatgcagctattgtggacaaagtgctttccatgcgagttgtgaagaaagaggtaaggcctttctgtcttcagtgcattcatagtatatttaatgttgaattcatatgttaatgaactatttttaaagaactattttttccaatgatgtagtctctactagtgagttacatttctagttcctaagctttatttaatgagtacctttgagtcacaaaatatattgctagtgt

SEQ ID NO: 22690 - DNA, 1219 bp, Mus musculus
tgtacagctgtgccagtgcacctttttctcctattctcagcaatactcctgtcctgtgcatcatagaaagctctgaataaaggatcagaagagttgggagcagttgtaagcattaagattaatggaactgatgtggaggcatatttcattttgctttatggatttttgttctaatttccaaacgttaaatgactgtcttagatagctatcaagttgtgtgtgtgtgtgtgtgtgtgtgtgtgagagagagagagagagagagagagagagagagagagagagagagagcgccttaatacccactgggtagagatgttacagaaaagatgctatagagacactggagggtaaagaataattgattttctgacattcagctttatgcgtcgaatgaagaaacctggtataagaagttctgtatataatattttctaatgttgctcttgtgtgatttcctttttcactgtagggtgaatcgaaacgcatcactttggtccttcaacagccacagtccggaggtccccaaggacatcggcatgttgtgttagggagtctaccaggcaagatagtgttacagggcaaccagctagcagccttgactcaagccaagaatgcccaggggcagcctgccaaagtagtaactattcagctgcaggtgcagcagccacagcagaaaatccagattgtacctcagcctccatcatcacaaccacagccacagccgcagccgccaccctcagcccagccgttgaccctgtcctctgtgcagcaggctcagataatggggccaggccaaaacccagggcagagactttctgtaccgctcaagatggtgctgcagccacaggtgagtgactagaaaaggaaaagaaagggtcttgtcactgccttcagtaaccggtgctgcttactgcattaagttctaacttcatacctcggaacttcacccatggaaaccttgttttgctaaaccatgcaaagatgaagaattattgttgaatttgaggtgataatttctgtaatatttgtctttaaaatgtttgttgtcttttctttattatgatattgtgggggtcaggtagggagcctgagcctgagctgtattctatagcaagactgtttcctcaagaaagaaagaggcaagcatggcgagcccttgcccttaatcttagccctcagtggggaggcataggcaggtgcatctctgagtttaggccag

SEQ ID NO: 22691 - DNA, 1503 bp, Mus musculus
tgagggataggtaagggggaaagtagcagagtaaatgctaagtgtagagaaggtgagtagtaagtgaaaactttgcccttctaccaaaatatcccagggaattacctatatccgtgaaagggcatatgtgtcctctacgaggtggattggcacagtctaccacatctgacttttaggctacttgatgatgttatactttggagatgtagggaaatatttgggtatggttttgctataataagtttgtatgtatctttctctcttagggatgtattcttggcctgggtggcctctagaaatccaaactctgtggtgtttgtgaagtagccttcgtcttctccaagccttgaagattcatctgctgaacacgagtccaaaagcctgtttttttgttttgttttgttggttttccagacagggtttctctatgtagccctggctgtcctggaactcattttgtagaccaggctggcctcgaactcagaaatccacctgctctgcctcccaagtgctgggattaaaggcgtgcgccaccaccgcccggccaaaagcctgttttttaaacacaaactgggcttctgtagtgcctgacctttacccatagtccttcatgcctccatctcccttttctttcttcagcagaggccagactatgtagcagggccagcaaattcactgtaatttagaattgctttttactctcaactgtaagcaaaattaccagcttactagcaagcacagggaagagtgatgggagcaaatcataggggtcattagaagaaacataccagtaaaacggtcagacaacttgcctagaatgtcattgggcgagtgctttgctttgttctcggcagaaaaagctctgggagaagagagacttagggtttcagctcagtggtaaagtgcactgggtttaaatcccaagtgaaggaggaatgaaaatactgatttaaaataaaatgtgtgatagccctttaaaagggaactattattgatatacacagtgctattaggaggaaggtttgaaggcctggggttatggcttagcactataaagctctgagttcagaccccaggctggaagatcaggagttcaaggtcatccttggcccactagtgagtttgagaacagtctaagatgcatgaggtaaaggttttacagaacatggtggcccgtgcctttaatcctaatactttggaagtagacaggaagatttttgatctgaacttaaatcagactttgtctcaaaaaatagaccgggtgtggtggcactcccctttaatcctacaacttaggaggcaagaggcaggttggatctctgagcttgaagttagccaggattacctagtgagatcctatcttaaggtccccctccctgctcctgacaaaaacacacaaattctgtttgtctcagtcttagcacattgggctagaggggaaacgacatcatccaaaacgatctttttctgtacaagtatttctttacctgacttggttaccag

SEQ ID NO: 22692 - DNA, 1223 bp, Mus musculus
tatagcatattaattgctaagcactgtgaacctgtgtagtcttttctaacacgctaggtagctaacattcttcttttacttataatgaatcacgctaaataagagtagcacaaggacacacactaagtggaaagccataatttcacttcagaaattccaattataatacaaacttttatttatttatatacagggtaggggacactattgcgtaaacagtcctcttaaggtgtggcctgtagcccatggctctgaacgcttagctttgtaaggaagtgcgtctataaattcttaggtttagagatgatgccgtccggatacctttgcttaaacctggcaaccacatctgggtctagtaggtgtatcccatccagttggtttccaagagtaatcctaaaacaagggggaaagaagaggcaaaccaaaaatcctgtaagggcttaatacttaaaatgttctactttctggtgatacctatctcaggctgtcctggaactaactctccatgtagaccaggctaaccttgaactcagagatctacttgcctctgcctcccaagtgctgaggctaaaggtgtgctctactatgcccagtccacgtcaatttttttggtttggtttggtttggtttttgagacagggtttctttgtatagccccggctgacctggaactcactttgtagaccaggctggcttcagaaatccacctgcctatgcctcctgagtgctgggattaaaggcatgcgccaccacgcccggcctacatcaacttttaaaaagatcagagcaaataatatggcagtgtcaatacaaaaactgattggattttaatttctttggtggtcctaagagttgaacctaggcaccttacatatacactcttaaactcttaacactaccagcccccctccccttttgagacctctaaataagcattggcaggccttaagcttgcaatcctcctgcttcagtctcatgccccaagatccagccggatctgtctatctaaggattagtaattgatggtagccaggcctacttcattcagtcactgctagtgaatagtccttggataattaaaatgctcaccattggcatcaaacattaaaactgacagattgaataaatacttagtagccactagggggcagatttaatatagcccacagaatagctgacgatccttgggcagttagagctttaagaacagccctttgggttct

SEQ ID NO: 22693 - DNA, 1192 bp, Mus musculus
ggagggagggagggagggagggagggagggagggagggagggagggaggaaggaaggaaggaaggaagataatatttaacttagaaaatctggggccttaagggcagaaatctatgatacagtgcttgaccgtatgtgcaaggaccagaatatacaatcaaccagactaacagtctgttcactccttcccgtccatccatctctccacgcatacacccacccgtcaaacactcacacttgttctagccctgctattttaaatgcgttgtcactaacgacttaaagaaacaacatggcgggtctgccagctaccaacatggcaaacacagcctcagcgctcccggaaacacgagagagaactaccgtgaggattacgtccggctggttcgccaaccggaagtggcttttcatcttggctctatccggctggccttcgggcgtcctcgtgagaattagatgtttcttagttctaggctggggaggtgctagtccgccgcgcctgattcgagccgagtccgcgctgggagctaggatgtcggacacgtggagctctatccaggcccataagaaacagctggactcgcttcgcgagagattgcagcggcgacggaagcaggactctgggcacttgggtgaggtgcggggtggtcggggcgggcctgggcggggcgagagactcctggagaggaagacagccccgggctctgcgccctttccggagcagccctttattggactcctcgattgttggttaccccatctttcccgagtagctgaaacgcatgcccacctgcgggaaagcttgcagtgcctcctcccgggcgtcggtttttcaagcgtaacaccacaccaacatgggtccactcctctccttgggtcccattccagtcctgtctaggagaatgttgcgtccgtgaagcctctcagtaccttattccgagagccagcaaaacccgttttgttgcttctgtgcctgttttaccttagttgtaacgtttgctttgtcactgtcttttctttcccatgtgggcggggagcaaggattgcttctgtatatctatccccagagcccggtttagcagccacaacagggtcctcactaggaccttctcactaggaccttaatgaatgagtagtgcaagtgtttacaaacgtagcaagaatctgaaaacacttgattttggtctttaaa

SEQ ID NO: 22694 - DNA, 1140 bp, Mus musculus
acgaagaccaaagtgtggacactttgctcattcttagaatttgaaaccatcacccatggacggagttacagagacaaagtttggagctgagacaaaaggatggtctgtctagagactgccatatccagggatccatcccataatcagcatccaagcgatgacaccattgcatacactagcaagcctttgttgcaaggatggtgatatagctgtcccttgtgacactaggccggggcctagcaaacacagaagtggatgctcacagtcaactattggaatggtcacagggcccccaatggaggagctagagaaagtatccaaggagctaaagagatctgcaaccctatcggtggaacaacattatgaactaaccagtaccccggagctcttgactctagctgcatatgtatcaaaagatggcctagtcggccatcaatggaaagagaggcccattggtcaggcaaacgttatatgccccagtacaggggaatgccagggccaaaaaatgggaatgggtgggtagaggagtgggggggggacttttgggatagcattggaaatgtaattgaggaaaatacataataaaaaaaacattctgtagaacaaaagtcactatcagcatggatatatggctgcctctgagttcttctgttctggcatggtctgaacttcaagcttcctatgactccagcagatacatctcaccggaacatctggctgacctatataagttcttcatctgtgagtatccagtgatgttcatggaagacctatttgaccaggaaaactgagaagcttggcagaagttcacagctagtgcaagtatacaggttgttggggatatctaaccaatcctaaatggattgcaaaggctgtgggaaagaagctctgcaactactcaaggtaaaccagatcagcaatatgatcaaatctctgcaggagtgtaagctagcagtccaatggttggcatgtcatggtgtcccacatcgctctaggtagactaaggatattttcatcactgatctgatggtagggctctgtactgggcagatcaagactggtgccccttgcagatctaagcaactgaccaagtacaatcaggtacttagaatcaaggaaaagctgaatgacaaggccaac

SEQ ID NO: 22695 - DNA, 1304 bp, Mus musculus
cctttctggtggactggccttggtgtgtaagggtcacatgttttagtatcagaatccaccctgctcttagcagcaacctggccccactgcaggcattgctcaccttacccaaagtaacttatgagaagtgagaactaaattacctcttcacagacctgactctttctgaggtttctgagaagttttatccacgctctttagtctgtcctcaaactggacattagtgctttgaggaatgtgagggccaggaaggtgagtggctggtggagagttaggattggtaagtcaagagctggctgccagtctccagcacctcaacggcctttttttccttttctttttgtgagcttggaatttctgtgtgagcatagtccttctagaggctactctcatacaacgcttgtgaaacattggccatgttctggttattgtagcctgggatgtaacactgagatgcacttaggagtgcggcagctgtcatgtgggttgagagtttagatggaaggatttgggacatgacacacctttgtgcttctttcaggctcactctttgacgtcccctggatcagcattcttgagctggcagcttgttgcacatggcttcttcagattcgtgcttgactacgagtctcactggttgtgaggtggcacgtccagagaactcccttcgctctatcggaccaactccacagtgtacggctgttaacacagaatctgcctcccctcactgtagcccttactttccatattaaaaacatttcagcctccaagtgccattcgttccttcatgtttgtgtgtccgtttccctccgctcagtgcgctctcatgacttgctcccagctgtgactcttcacctgtgacccttcacctttgttttcattaagtagttgtcattgctgacaacctggaaaatggcagtcctttgtcctttgctcggtcaggcaatcctttattaatccttcattgtctggaacggcaccagtgaacacttgtcagaaactgacctgtgtgttcttcctgttatgtccgtttccataagcttctgggagagtgaaatacatgtgtgtctcttgggcagtatagaacaagtgcaaagtgtgtgtgtgtgtgcgtgtgtgtgcgtgtgtgtgtgtgtgtgtgtggtgagagagaggtgtgactgtgactgcaggcaggtgtgtctgtgtattgcattctgtgtgactctgtgtgtacgagaggttgtctgtgctgcctgtggcatgtgactggcgtgtgtgcgcgtgcacgggtgttgatttctctcacattgtttcccaaagct

SEQ ID NO: 22696 - DNA, 1341 bp, Mus musculus
aaagggctgcctagtaccgcccgttccctccacgccaggtggagactacaaggagactgggcgaaccacaccgtctccctgcatggccttcccttcctctagacagaggagggctcccagcagcctttctagtttggcagtgcgactgagagaagattccacacaggaacatctttcttctccatcactccacgcctccatccaagctcagtttccactcgcccaccagaagcagctctagtcacctgcacaaccgcttccatgaccttggaggtatatcccaagctctcattggcagatgaggcaagagataagggcaggatatagcacatgatggcttccagcagaactgagtctatagcccaggtctgctggcttccagcacatgttgtacactaagatttcatgcagacaccattgctgtggagccgattgaaatttaaccctgctccatattctaacctgttatgcaggtacactgttatcttgccctgtgtctcaatcctggttgtctaagttgggacacctgagtctcttcctcttgttccttccactatgaggctctgagcctctctgtgccttgggccctaaagccccatgtgtagtatagagcaaaggtgattcctggtggagaaggggaaaagcccttctaccctagagtcatgcctggatccacaactccacaggtatctgcagcattttctacctggccctatcgctgagagcccctccccatggctcactgaggagcactcagccagcagttctctatccttatcagccacagaatgcttctcactgcccgaacctctatgctctcatctgtcaccatggcctccaactccttctgcttcaaaattatccatcagctctctccagtgaatctcattccaggtcctgctctaaggctctggggactaggctgggcctggccccagaagccgggcagttcctgcctccttctccacttttataaagccaagcctttccccagaatagtattaactcctggtgctttgtactactggttcagcggcctcgggcttcttttctatattaataaagaagagtaaaaactgtcagtgatgacactgtttaatattgatctcacaagagcactgagtggtactgcctcacagcagtccaggtagcccccatacaggagaacagaaccaattgaggtactacctgtgggccactccctctcccaggtagtgtccaggaaagcacagactatcctttcacccatggtggaagaggagttagtcaggagcacaggtgggttaaacctcaatcaaaagaaaatcctgtggtctgctctgccctgccctgcccagtcag

SEQ ID NO: 22697 - DNA, 1150 bp, Mus musculus
taacagcgcatcctgtctcttagtttcttttcttttttttttttttttttttttttttttttgattttcgagacagggtttctctgtatagtcctggctgttgtcctggaactcactttgtagaccaagctggcctcgaactcagaaatccgcctgcctctgtctcttagtttcaatctctgcggaatcttgacttttttaaaccacttcaaataccatcgcctgtcttcattctccctcactacctgatctgtgacgtcaggtctgactgcctgcccatttccaaaatggcctcccccgcagcgtcaaagttctgagtgcgcgtgcgcgagagtaagttccctcttcccggcaagatggcgaggaatttagtgtgcggtcgctggcagcttctgcgactcctacgaccccagcgttcggtaaggttccgtccaaagcgcggggatgctgccttgtccttgtcacctgagctgaggtcacgagcagatgctgacctggtcactgcgacctgcgagtcatgacctccggtcgcgtgagggcaccaccgggttacgtcccggggttggtggcctggtttctctgtagctgtttggaaactgcctgcgaccctgagccgtgacctctgggccccgtccccgggcttcggtaacaggatgcgggagaccctaaccggagctgcaccctgcacgctccagtgcatggcttcggggcctgtagtctgtgcgagcagagttgcagcgccccactgctgcaaccgcaggctgtctgcgggagaggcgggtcggctgggactcaaggccttcccttcctttcacatggtcagtaccatagcgtcgcagtgtccctgagaccgctggccgccgagctcctcgcagcccgccggggtaacgggcggccaccctgtgctcttctcgccgtcttcactcctcgctgcatcagtacatctgccaccctctttgcagaagcccaggtaagaggttcccgctgaggaaaggagcacgacttcttggcccctttcttttggttctgtgttgttttgtttgttttgttttgcgggagacagtgaatgtgtagcagagttctcacactcctcctaagttcctcctaatattaacctgtttggagtagaagtagattctcatctcaggca

SEQ ID NO: 22698 - DNA, 1779 bp, Mus musculus
cttgaaataacaagcaagaaacaaacccatgctgagctaactgtttcctctgtacccttagctcagccttttcttccccatcatcttctgcctctgcaccatcttcctggtggctgttccactttacagcgacaccatcaactccctcatcggcattggcattgcactctcaggcctgcccttctacttcttcatcatcagagtgccagagcacaaacgaccactgttcctccgcaggattgtaggtaagcttggcacaaccaagtgggtcagctacccgaatagattggtttttgcccttttctgcaaaccttaccatagctggctcctgccattaaccatatggcttaattgaatcactccttcctggagcccctttggtgccctgaactcagccccctgaacctgttcccagttttaactcctgaattaaattcaattctctttgtagcctctatcacacggtacctccagatcctctgtatgtcagttgctgcagaaatggacttggaagatggagagttgtccaaacaagatcccaagtctaaatagagcaagggattctgaggtgtggacagaacgggtgtttcgtatctcccattggccagaaccctggaggcacggtccaggagcccaagcttggcagcttcaactctgaacttgcttttgagggatgaagagtaatttatttgttttgctacatgtttcagacttcataaatggatgatgcagactgtggcaggaagtaggccattttggggcagtcctggcagcacctgggtgtggccacccactcctctttcctttacaagggccaacaatgctccaaacttgtctccttcagaggaacacaaaactgtcacagatgcaaaacaataaaaaagttatgttcctaaggtctgagtggctttattctacttagtgactggggtatttatgcagttcaaacagacatggaaactaaaagattcagttctccctctgaagccagctgccaacggcaatagaaccgatttctacaaatacagcacaactgttgtactaaaatgtcatgaatgggaaaagctagtgcataaacacttcagcttcttcttaaagtatggctggtgcatgcgcagaggccagaggagggtgtcaggcgtcgtgctctgtcacgtccacctttatacccagagaccggatctcacactgaacctggagctaggctgatggccagcaaaccaagcggcccccctgtctccacaccccacagcactggggtcacaggcgtaagagcagggccatgctcagctttctgcctgagtgccggggatttgaactcttatctgctgatccatttttccccagactcccttcattcttctaaaccattactaaggatttcagtatatctgcttcgtaaggaaattgcaaaagtaatcgtgttggggggtggggggtcagggctgtaggatcaatctccagccccacaagggcggctgtcacagtcttgcccatgacacctctaggatgcaaactcagatggaggtgcacagtgtgtgaggtagaggtctgagctgtgaagaccaggagaaaacatgaagctccttcccaggagctagggctggcaagggaaatcatctcccaccctgtcgtgttcagaagcacaacccccttccatacttaacaaacatcaagaagcccagacaagacaggggtttactagttctgtggatggaaggctgcttggctctccagggctcttttaatacacacaaataagagtctgtagtggaaaca

SEQ ID NO: 22699 - DNA, 1132 bp, Mus musculus
atgtagctgtcttcagacacacaccagaagagggcatcagaccccattacagatggttgtgagccaccgtgtggttgctgggatttgaactcaggacctctggaagagcaatcagtgctcttaacctctgagccatctctccagtcccttttctttctttcgatgaggcatgtagaccaggccagcctcaaactcacaagagatgggcctgccttcacctcccaagtactaggatcaaaggatgtatccccctacctggccaagctgatgttttactacgactgagaagggaagactggagcggggcactctgcagaaaccaacagctgaccttcctcagcttcacaccgtcagcgtgatgcatcagtatccagctgaacacttggctttggggggggagggggagacctgctcagtggtacatatgcctgagccccagatgtcacctactctcttcctgtctgtttcagagacgagttgtactgctgacacaggaaatggatgctggaatacaggcatggaagctcaggcagcagaaattgcaggaagaaaggaagaaggaacatgatctcaaacctaaagggactttactgagaagcccacttccgaatcaataaaaagcagctcctgccccactttcccagactctctctggctttcttttctatagtctgaatgctttatcaagtcattttccccaccacttgtattgatagcaaaagaccttaaaatcactgcctgccaggcttggcccagtgcccttagtcctccccattccagttcagccagatcttgctctgggatcattttgcccctagtgctgaagaacgtgcccagagccttaacaaaagctaagcacaccaccacctatcacttggcctgcttgggatttttaatcaaccacaagcaactgctttgtgagagaagaaaggggcagcagcagtttccctggttcaccctcatactcttgtcactaagagaccatgcacagctcagatgcatacagttggcatttaatgttttcttgaaaaggtctttccacctgaggatctttttcctttttaagacatggtctcacggtagcactggctgtcctgaaactggccaggtagaccaagttgtctggcaatca

SEQ ID NO: 22700 - DNA, 2025 bp, Mus musculus
ggtggatgaggagggcagtggagctgtgagtgcggccgccgtggtcctgccggtactactgctgctcctggtactggcagtgggcctcgctgtcttcttcttcagacgccatgggacgcccaagcgactgctttactgccagcgttcgctgctggacaaggtctgacccccaccactggcccacccgcttctaccacaaggactttgcctctgaaggccagtggctacaggtggtagcaggtgggctgctctcacccgtcctgggctccctccctccagcctcccttctcagtccctaattggcctctcccaccctcaccccagcattgcttcatccataagtgggtcccttgagggctgagcagaagacggttggcctctggccctcaagggaatctcacagctcggtgtgtgttcagccctagttgaatgttgtcaaggctctgcacttgaaggcaagaccctctgaccttataggcaacggccaaatggggccatctgcttcttttccatccccctaactacataccttaaatctctgaactctgacctcaggaggctctgggcatatgagccctatatgtaccaagtgtacctagttggctgcctcccgccactctgactaaaaggaatcttaagagtgtacgtttggaggtggaaagattgttcagtttaccctaaagactttgataagaaagagaaagaaagaaagaaagaaagaaagaaagaaagaaagaaagaaagaaagaaagaaagaaagaaagaaagaaagaaagaaagaaagaaagaaagaaagaaagaaaagctcacagagagtctggtggcttggacagccaagttcctctccacaaagatctgcctctatccaacccagtctggagaacttccaaaggagcctgagccattaaggactaaatgggtttgaggaaacccttggcaaacccgacccctgacccctgaatgttagccttgaatgtcaagttcaaggctggaagagctgaaaccagggggaaaggtcccgggtggagtgaggtcaaggggagacagcaggacctgaaggatgagcctcacagctcaaagcagacaaagaccttgttcaaatgcaagtcactggggctgggacccaaagagagcagtcagagagggcaggacacgaagggtagtggtggcagtgtatgcctgggagtctgcacagactgcagtgcacacacgggacactagtccccaggagtgggcacatcttattggatgtctcagaaagggccttaagggaagccacactggccactttctgtccccttgctcacagtgtagaaggcaagggtaggaattgatacaggagtgagaagaacatgcatacagggactcaatggagaccagagaaggctgtcagcagcctgggcttgcttagacttcctcactgccctagtgaggcaggtgtctgggtgctgttggttagggtggcctccctttcctgatgcaggcacccctcagcccattttacctatgtcctgcccttcctcttccccgcccagttgacccatttgaagtctccttcagccactgaaggcggtcatggtactggggacttgggagagtgagaccctgtggagggagaggcgaggagaggagagaaatgtctgggtgggggttggggataggggtgaacggtgctggaagcccagctaaatttctgtcttgtttgggttttttttttgttttgtttaatgtatatttttattataattattatatatgaatgccattcaaatcgttcctttttgttaacaaggggcatggggaggggtggggggtggaggggggctgaggcgactgaccccagaaacctgcagggcggggctgggtcagtgctctctaaggacattttttgaccttgttcaacctttccaagaagaataaactgtgtttcacattctttgtgtgactcgagctgggtgtaggggtggatacgatgcgatgtggccaagcagggctagggagggcagacactaagaacagcatttc

SEQ ID NO: 22701 - DNA, 1141 bp, Mus musculus
cagggacctgtcatcaagaggggaggcaggggtgggggtgggggagcaaatctccagagcatctcatgtcttgctcttctgtacctcataggttccagaagctgcatctggcctgtggctcagagcatttaatcctgcactcccctctacagccaccaatctccctgtgtgaggccccttctggccctttgcagctaccagggggcaatgtcaccattacatacagctatgctggggccagagcacccatgggccagggcttcttgctgacttacagtcaaggtaggctgaacagggtgtgtggtgggaccattggaggagaagtgggagtcccccaggaagaggcaaggatcctgggagttctggcacttccctgtctcttgatgcctctgcagattggctactgtgcctgcaagaagaattccagtgcctgaaccaccgctgcattccagctgctcagcgctgtgatgggattgatgcctgcggggatggctcagacgaggcaggctgcagctcagatccattccctaacctgaacccagcccccgcaccaactctggcctgcaatctcaccttggaggacttttatggggtcttttcttcccctggatattcacacctggcctcagtctcccacccccagtcctgcctgtggctgctggacccccatgatggccggaggctggcagtgcgcttcacagccctggacttgagttacggagatgcagtgcatgtgtatgatggtgctggaccccccgagacccctcgactgctacgtagcctcacccacttcagcaatggcaaggctgtcactgtggagaccctgtctggtcaggctgttgtgtcctaccacacagttgcttggagcagtggccggggctttaatgctacctaccatgtccggggctactgtttaccttgggacagaccctgtggcttgggctctggcctgggggctagtgagaacctaggtgagcgttgctatagcgaggcacagcgctgtgatggctcatgggactgtgccgatggcacagatgaggagggttgccctggctgcccaccagggcacttcccctgtggagctgcaggcacccctggtgccacagcctgctacctgcctgctgaccgctgcaactaccag

SEQ ID NO: 22702 - DNA, 1166 bp, Mus musculus
ttcagggggccgccgtcgccagcgtggacgctccatccgccgtctggttcgccgtctccgtcgttggggcctgcttcctcgaactaataccccagctcgggcccctgagaccagatcccaggtcacaccctctgttccctctgaggccctggatgacagcacaggccaagcctgtgagggtggggcagtaggggggcaagatggggagcaggctcctccactgcccatcaagacccccatcccaaccccaagcacacttcctgcccttgctactgtctctgagcccccagggccactaccctcagtgcctgtagaatcatcactgttgtctggagttgtccaggtcctacgaggccgcctcctacccagcctgtggtccccaggccccacttggacccaaactggaactcacacaacagtcctgtccccagaggatgaggacgatgtattgttattgccactggctgagccagaagtctgggtggtggaggcagaggatgaaccattgcttgcctgagggactctaggcacaatggtatgatccttggaagtggttcagcttccccactgatctatgtagcacagaaagttagtgtctctccagcagggagagcattcactgtacacaccttctggtatgacaagagacttcaccaccaccctctgcccagcctgctatccaggtggctgtgttacaaaaggtcccacaagggtcacaggcttggacactccgttctttccagctccccacccaaaagtggccttaactactagactggttggctggagacctagccaccaaggggaggatttggccagggtgatggttttgccagcctccatccctgtggtgcctggcccacttagaggacacaagtgcttttgccctgtagctgcatcattgtccaggaaatcaagatgacaaaaataaaggaatcataaacttcagcccttggtaaatcagctgtgagcctgcatcctgcatcctctctgtccatctctgccatgcagggaaccctgaggaatagccttctccatcttcattcaccaggccccaaccctgcactgactggcatcgggctcagtctgaactcagtgcagacccagttcagagccagctgagccctgaagtcaagaaagggtctgattatggaatgctctcacag

SEQ ID NO: 22703 - DNA, 1428 bp, Mus musculus
tttgagaaagggtttggaattatagctcaagctggctttgaaatcctgattctcctgcctcagcgtcctgggtgttgggttataggtttgtccctacacttggctgtttattgtctaatctctgtctgtcccaccatcattgccaagtacaattcctcattcaagccgcctgtgtctttcgtattacagcagcccatcacggtgcacgaaggccagaacatctgtgtgcgtttctggcgatgcagcaattccaagaaagtgtggtacgagtgggcggtgacggcccccgtctgttcttctattcacaaccctaccggccgctcctataccattggcctctagccctgcacacagtgtcaaaaccttggaagcagctctgagttctcttcctacagcacagaaggtgtagaacatctgctggttcagttcctcagtgagaccctcagccgccagagaggagcggttccggctgctttcctacctaatgtcatggtggccaacgggtaggcattcccggactgccaggcatggtggtgcatactctttatcccagcactccagaggcagaggcagaggcagatggatctctttaagttcaaggctagcccggtctacctagcaagtttcaggccacctagggctacatagtgagaccctgtctccaaaaaacgaaaaaaaaaaaaaaaaagaactagaggacacaagccagcagcagtcttcagagcctctggcttgggcatgagaactcagcagctctggatgaagcaacctcagcagatgctcagccgccagagctccccaggggtcaggagagaaagcgaaggctgtggaagagcccgggctgcgtgcatgaacacttgacctgcgctcttcttgccctactctgttgttgtttgggtggtttgtgtctgaaggaaacaaataaagtgaagttacggcctctgctgctttaccctgcttctttctgcctgcctgtttcctgcacctcactcaaatcccgcatgttgaggtctgtgctcttgtcttacctaagacccaaggagacccaagaagctgggaatggtcagtagtcgagcaggaagtactcagtggtaacctgtgaggttctgagtcctgctcatgctgcgttcgaccccatgtgtcaagcccttcagccccgccccgcccctaggacctctggttatatgctttttctgtatggtccattaagtccatttgttgatttctctaggaaagagacactgtggggatatgactaaagctcgctagcttctcccttccttagatggatcgcaggcgtctccagtaaaaccacagagtgattagaccattcctccattttgcagaagggaaatttgaagtctgtacagtgaaatgttactacctttccaaacatctctaacagccagtaactttttggaatagtgc

SEQ ID NO: 22704 - DNA, 1198 bp, Mus musculus
cttcggccctaagaacgagaggatgaaactctgggggcggggggagggggcgcgtgtggtcactgagttaaaaaatcaggggagttctagggtaaaaattaaaagggacgcacagtcattccttctctagggccttgaagactgggattatccgagagtagagaagtataaagaggcaatcgagagaagagtttaatctggcttggggaggcatgggcagtgttgggtcaagtctaactttgacagtcctggaaagccagtgaagtcagggaagaaagaagctacttggcttggatttccatttctcgtttatcttttcatgattgtgttttgggaagaaattggtgcacagtgtagtgaaagtgatgtgccccaatatgggctgaactccgtagcccgtgggggtgactggtggctttatggaactgtgcaaaatcaaaatattaaacctagttggttggatctctgggccctcactttacatgatgcttctgggtctgtcgcggttgtaggtttgatttcctctgcatgcctgtcttccacccgcgtttcaagagggagttcattcaggaacctgctaagaatcggcctggcccccagacacgatcagacctactgctgtcaggaaggggtagggaccatcccctgtgccccttaattattagaggcaggaatatcttctgctttataggacttaattctcctcctcctctgacttggttatctattggttagcccctatgacatagagaactcttttttttctttcctttctaaaagttgtagtcccctattcttcatcaggctatccctatatcagagacaaaaagtcttgtctttcatctctactctttattctctgctgagaactagaaattgatcaagaacatgccaactcccattgagtctttgtcttctcttgggttggggatgcagactggaatacgctaattgtgggaaagctttctccatggattcatccagactcaaaagtggagaagatccgaaggaactctgaagcggtaaggcagtttaatttcttcgtgggatccctttaaaggttaggcctggcctgggtgttggggcacctatctgcaatctcaagcgttgtgaggttattcccacatcaggaagataatgagggaggattgagattccatgccaggagaagaaaaggaaaaaattagttctgtcacta

SEQ ID NO: 22705 - DNA, 1143 bp, Mus musculus
cgcttgaggaccatggaatgtgtgagaagaaatgattggggtggaagacatggggatgaagttctttttttgttcttttgagagggtgtagccctgactggcctggaactggctttatagaccaggctgtcttcaaccttacagagatctgcctgcctctgccttctggtcactgagattaaaggccaagtcaaaaattttttgttgtttgtttgtttttatttcaagacagggtttctctgcgtggctgccctggaattcactctgtagaccaggctagcctggaactcacagagatcctcctgcctctgaatcccaagtgccaagattaaaggcatgcgataccacttcccagttaagtcaaaagtcttatagtcttttttttttttctttttcagtttcatgagacccttgaacagcggctgctcgtaactgagctgacgcagctctcaggtcccgggcaggagacagagttgcccccgctgctaggtctggagaggaccgaccttctggagctcatgccgccctcccaggttggaaacagacactgggtcaagtgtctgtctgtctgtctgtctgtctgcctgcctatctctcttttctttttcaataggacctcatgtttttatttcaggttggccttgaattttggatcttcctgcctacacctcctgagtgctgggattacaagtgtgcaccactgtgcttgatttatgaggtgctaggccaagacctttttttttgttttgttttgaaatagatttatttatttattatatgtaagtccactgtagctatcttcagacaccagaagagggcatcagatctcattacagatggtctcgagccaccatgtggttgctgggatttgaactcaagacctctggaagagcagtcagtgctcttaaccgttgagccatctctctagcccccagacccaaggcctcttgtgagccaacattttctctgttttttcctttttaaaaaaattatccagcactcgggaggcagaggcaggcggatttctgagttcgaggccagcctggtctacaaagtgagttccaggacagccagggctacacagagaaaccctgtctcggaaaaaaccaccccccccccaaaaaaaaaaaccaaaaaccaaaa

SEQ ID NO: 22706 - DNA, 2126 bp, Mus musculus
taggactgccgcatgcagctgagtgacgaggaaggttgctgctgtttccctcttgatggacatttgctctgccacggctgtcacatgcagcgcctcagtgcccggcagccctctaccaactatatctgagctgacgttactgctgccaccaccactgtggagaaactctctggccagcggaggcaaggagtgtattctgcaatccttgtgaagaggtctctggggaggccccgaaggccagagacccaaagatcctaacattccaaatgggctgcggaggaggaaccttctggttgccgggagagttgactggtgttcattgcgtgcagcctgtgctacagtagatgggatgtagcacacgcaggcgggtttcagtacttcctgaacgccagattataatgtatttttccagtgtatgtttctatatacgtcacacaatgttctggtgctggatcacatgagggcatcacagaaaccacccccagtctgttgtaccctatgcatggagtcagtggaacctttcccacgggatcctatctttgtctgcgctaagggctggaagccctggactttgtgatgagccatttcttggctctctccctaaggactagagagctccccgtgtctgtctgctgggactgggaccagctctgggggaccttgctgcctgtgttgcctgtttctcagggacctggggaggctaactggggcctgtccctggttgctgttttgctcttctgggggaagaaatgagcaggtttctggatgtgaaacttgccggtgagtaggatgtccctgaagcatcaggctagccccactccccctgtttaagtgcactgagcctgtagcccagcatatgtggatacattgtagccacgtgtgcctgtgcacctccctccctactcctcttttctcaggtgacttacgcttagttccctagcagtagcctatcttttgagacccctttttaaaagggatcctgcattggatctgacctgttacaaccccaccactcaaggcattggggaagctggagagaagaaaaataggttgacttggttctagccgcttggctgaaacttgaattccccttaagcaggatgtcttaaagccaggtcacttgctggctggaactcaagttcatttgatgaccaggttgccaagagtcctgtcccctactgagtgttcttatagctgcctacatgttttgttcttttcattgcactgagcattcagtgattcctgcctgttcatcaagagtatgtcagaggtttgtttggtttttggtttttcgagacagggtttctctgtatagctctggctgtcctggaactcactctgtagaccaggctggccttgaactcagaaatccgcctgcctctgcctcccaagcgtgggattaaaggcgtgcgccaccacgcctggcttacttcagagttattagcaacctacatttatcaactttgtggcactttgtgatacaaatgttccctgcctccttgggtgtcttcctactatgccattatttctctgacacttaagaaagaaaaagttgaaattctagcagtaaatacagttgatgcagacactttgtgagtgtattgtggttcttctttgctgttcactatggcttcaatccttgaagccttatgccttgaagatgtaaaggggctctatggattcgccttggtctggcttctccattcacattgttaaaatgtgattgtgtcataaacaagtgagtctggaaatgactgacctgaggacagaagacccacccttgagggttattctaaaactgtgccagccattctgggaattacatgggcagggtctcttgagtgcagaagcacacctttgatcccagcactcaagaggcagagacaggagaacttctgtgggttcaaggccagcctggcctacagaatgagctccagaacaacccaggctacacagagaaaccctgtctcaaaaacccaaatcaacagcaacaacccccaaagcagaaaacaaacaaacagaaaacaaaggaaaagaaaagaagctgggcagtggtggcacacacctttaagcccagcacttgggagacagaggcaagtgggtctctggattagaagctagcctgt

SEQ ID NO: 22707 - DNA, 1179 bp, Mus musculus
atcctccaggccatggggaagtcctatcacccgggctgcttccgatgcatcgtatgtaacaagtgcctggacggcgtccccttcactgtggacttctccaaccaggtgtactgtgttaccgactaccacaagtgagtctgacccctgggaggaaatgtgggcctgggcccagggagtcctcagcctcacttatcactgtcttcttttttagaaattacgccccgaaatgtgcagcctgcggacaacccatcctcccctcagaggtcagtgtatccagagttcctcggggcggccagcgctgccgcctctggggaggagatggggacatgcagcctggcccttgggaagtggcacttcgaaggaatgtgcattctgtgaaagattcccgtgtgactctgctcttggggtcaccaccctgacctaaacatccggacctagactagctgggcccaggctccatatcttctgtcccccgtacagagaacaaggctttctttggaagtcaaggtcaccagatacagggactgaaaaggggtgaaactgtccttaaactggtaaaaaaaaaagggacagggattatttgagctgtgtgtggagagggtatgtctagaggaaaagctacagcctcttccttatattggcttgtgctcagcctttgccttcccctgcccctccccctcccccctgcttctcagcaggaggaagctagcaagtaaggctgagcccctgtgtgtggaggggagctagaggcctggaggcatggacagtgccagggtagtgggtagcattctggtaggagttgcttaaaagatctcaaagctacatgttagctacgtggaatctaactgcgggaagaggcctttataaaccctcttgatggagcaggagggtttctgtggtatgggatggggatttggggacaccatgctctgcttatcccccatgggactctacgtgtttcagggctgtgaggacattgtgagggtgatatccatggaccgtgattatcactttgagtgctaccactgtgaggtaagtgttggggttcggggatgatgtggggaaatcggaatttggaagggggattcttggaatgactgggcatctgtgggagggatttaggatacagaaaaccaggacactgcagtgacctatgtccagtctctcttgtcctctagc

SEQ ID NO: 22708 - DNA, 1166 bp, Mus musculus
aacaggcggtggagtttttgttgttgacaaccaactattgcggctgaattaataccatgggaaaatggtctgaaaacaattatttgaaccaggattaggataggtggccttaaagaaaatggccacttcagtctctccttaacggggttttgaaaaataaagaaacagcttgcaatctgaacctgggcctgggcagtgaccaaacaccctagtccagttaggagtcttaagcagttacgcccttctcaaagatggccgaattcgcttccctcactcgagaagaacattccaaccactctctagaaattagaagttaatcttatccgtactacttcgatgccaaaataaaaatggcaatcttaaccactcagccatccttcctaggtgaacacagaccggcgctggtatttagaggtgtggttgcccggagtaaaaatggcgccgcctccgtctagacttagctggacgtgaagttgtgacgtcgcggcgttgccagtcggaggcagttcctgttgcccttgctaaacatggcgctggctagcgtgttgcagcggccgatgccggtgaatcagcacgggttttttgggctcggaggtggtgcagatctgctggacttgggtccggggagtcctggtgatgggctgagcctagccgcgccgagctggggcgtcccggaggagccgcgaatcgaaatgcttcacggaaccaccaccctggccttcaaggtgctcagacagctcgcgcttctccggcatcccagccggaaccgggtcgggcggaggttcggtcccctcctcccgacccttggcgggttcactgtctcgtagccttaagaaaggagaggtgggcggagatagggggcggtgagggaaggagacggacagcgtgggttggctcctaggcgaccccagtttgccccttttcaggagccctacctgggaacagcggaccgtggcggagggtgcgggggggaagccattgtcgccgttcaccaaagtttgtataaactgagcttgatgaagtccaggggctactgaagtgggtaccgaacagttagggtccctgttccagccctacaataactagctctggatcttaggctagtctttaaagatttattcttattttttgtatatacaccacgtgtgtagtgctcgcaggcgcca

SEQ ID NO: 22709 - DNA, 1119 bp, Mus musculus
ttctcctttctgtgcgcaaatagttcccagccataataaagatacaacatcagttttgttcactctttaagccttagtttcccaatctccactcccccaatcttttcttacgttaaccttttacttaaactgcagccaaaagcaacatatgagtgttacggtgtgagctagttaggaacctagaccatctaactgttgggtcctattttttggggacagcagctaccaagggggtgcaagctggaaacagtgacacagaggggggccagcctggccgaaaacgccgttggggagccagcactgccgcgacacagaagaaaccgtccatcagtatcaccactgagtcactcaaggtgaggtgggcggagccagggaagggagggtaagaaatgttcaggtgggagtagacatgggcccagtgtaacggggtagcgggggtgtctgtgtcccagagcctcatccccgacatcaaacccctggcggggcaggaggctgttgtggatcttcatgccgatgactcccgaatctctgaggatgagacagagcgtaatggcgacgatgggacccatgacaagggactgaagatatgccggacagtcactcaggtaaccccgtgtgctgtgcccagcatcgggtgaggcagtgggcaacggcggacagcggaggagctgaggtaatgttctggaagggaactcttatgccaagggccggattacgtcaaacactgctagttgcaaaagaggttttattagaaccaagctatagcaatttgtgtgctcttgtttcagcagcttgtaccacagaaccagaattgaaaactaaagttgataaagcctcatataacatcttgcctcatgcagaaaaatagttcaggccagcaagatggctccatgtgtaaagggccctgctgcagagcatgctgcccatcctcacggcccgtgtgagggagagagccagctcccaaagctgcccacacagaggtcactgcatatgctcatggcgcataagagcacacaaataagtaaatgcttggtttgttctcaatttaaaaaaatgtttagccaggcgtggtagcacatgcctttaatcccaaggaagcacaggcaagaggatctctgt

SEQ ID NO: 22710 - DNA, 1193 bp, Mus musculus
aagagatggagccagtggaaggcccagcaccccctgtcctcattcagttgtctcctcctaacacagatgctggagccagggagccactagcgtctcctcaccctgcgcagctgctaagaagcctgtctcctttgtcaggtactacagacaccaaagcagagtctccagcagggagagtgtcagatgagagtgtcctgcctctggctcagaaaagctcactgcctgaatgctccacccagaagggtgttgaaagtgagcgtgaaaagtctgctcccctccctctaacagtggaggagttcgcacctgccaaaggcatcactgaggaacctatgaagaaacagtctttggaacagaaggagggcagaagagcctcccatgctctcttcccagagcacagtgggaagcagtcagccgactcatcctctagcaggtcctcctccccttcatcctccagctctccatccagatctccatctcctgacagtgtggcttcccgcccacagtcgtctccaggatctaagcagagagatggagcccaagcacgagttcatgccaaccctcacgagagacccaagatgggctccaggtcaacttcagagtccaggtcacgttcccgatctcgttcccgttccgcgtcaagcagcagcagaaaagtgagtatggagaatcctgtctctggtcattttgaaactcagaataacctgtaatgatttctaacaggaatagaagagtcctgcagactccactgttacttttccttcattacagagtcagggcagtggtcactggggtccctgcccgttctgaacccctttgattgcaaagcatactgaatacatctttcatcagtacaagcttcttgagagtgtaagcctctggatgaaacttagtaaagttgttgaatatgtagttggagattattcacttaaatggcagtacacacacgagacaaagagatctagaggaagaccagctattcctaatcagcttgtacttgcagcgtttgggaggtagaggctatagatcaagtccaatacctgtttgtgctacttaaatctctttatcaagaagataaaaaaagacccagactggactgggtcaccaaaactggaaaaaatctagtggtctcctgtatatacaggatctactcatactaatctttccgaaatatttggagtataaaataatttccc

SEQ ID NO: 22711 - DNA, 1150 bp, Mus musculus
cattcggtttgagcaagtgctttactactcagccatctcactagcacataaagtagcagcttataacctgaaaggtgtttgcttgttttcttactctgcattaaaggtaaaacatgggctttgtttgtagtaacaatgtttttaaagtcttgttttgtctgttactagtgcagccactagggttttcttgtttgctttcttcatggaaggccctgtgtataatgggctggggattgaatctggggactcaagcatactcccactgagataaattcacagtctttttcttctttccttcctcccttctctctttccttgcttgctttctgctttccttcatttttttcttcttttcaatcagtgctggagatcaaatgcatactcagcaaatgtctaccactgtgctctattcccagcttgttttgattttatgtaaatttttcttctaacttagtatgtgtacacatgactgcataccaaaccatggcatctatgtggacgtaagaagacaactttgtggagctggttctcttcctcccttaggtggtttctaggggttggatctgggtctccagcttacgtagcattagctctgattttctgctttttaattggaaactttaacacatttataattgctctaattgctaataagaaaaaactgccattttgctatttcttttataaatgtcatcattttgttgttaattcctttattactgccttcctttgtgttaagttgattgttttctagtgtagcactttagatctcattatgtcctttaccatattcaaaactgttttgagattacagctaacataatttataaaaacctggtttaagttagtaccacatttaacatcaatacttaccaaaatgtcatagttttgttaaattatatactcagcaacacaaattttaagttactgcattatacaattgtcttttaaatctgatggggagaagctaccaagaaaaatgcacttaaactgtcttttgttgtatttacctatataattaccttttctgcatttgagttactaattagtgtcctttcatttcagcctgaaagactccatttagtatttcttataaggcaagtttgagagtgataagttcactgtctaaatttttgtttatataggaata

SEQ ID NO: 22712 - DNA, 2647 bp, Mus musculus
gtctctccactatcctttcctgatctccctttctcctttctctacttcccttctctcccacaggcggagttcacagctctatacggggacggggccctggaggaggcacggcgtctgcgggaggggaactgggcatcagtgaggacagtgctgacgggggccgtggcactgggggccctggtaactgtaggggccttttttgctagcaagtgagaaagtctagggccaggtggggctaggtgtggctaggggccaggagagctggaacaatagcgaatgcccttggaagaaactggatggtcacggaacagagaaaggcaggggaaggtagtgtgtgtgggagcccagcatgccaggcaggtggcagggagaatgagttggaaacattaaggaatgtttcaaggccaagaacccagagagtggagtcatcccacggcttggggggtgggggtggggaggtgggaggaatcatgcccatatcgcgggcacacaactacccggaacatggcttgtagctccaaggacggtgagcttacttcaaagatctgtgtctcgactagatgaatgggatttagggagcctagaattcacttccctttgggatggaagcttggtgatcaggtgactgggtgaaatggctgtggctgtgggctgcatgggcacacctgtgcatgtatgtgcacatgcaagcatgctcatgtgcatgctgggctgtctgtcgaatctggtggtggggtacttagagaaaacattccttcttgctatggcaagaacaagggccagttcactgcccttctcctctctgccccttcccttgaccttacgcctccaggctgagggaggaacactgtatctagactagggctctggtgctgccgagagttgttggcagggctttggagagaagagttctgcagctggccttgttcttcatcatccccctgttgtgtgcatctgtgcacctgggctgaaaaagggtaaggctgtggagcctgggtgggtagaagctttggtagttggacttgcctgtcaccttcccctccaacggtggcacaatggtgcctaaagtgttgcctgtttctagggtctctctatccagctgagtctaaattggggatctagttttcctttagaagatacgggcataaatgctgatctacaattcagtttagttcctgaactgtctcagtgagactgcggataccttgagaggaccattccagctctgagtcccttgggagtgatggggacaggtactccttgactggcctgttctgggtggtgggtttttggtgctgctgctctatcaggggccagggatatgggttctagagtacctgccatgacctaacgcgttttcttttgaagccatgctctttgcataggttgtcaacactcgagtctctgaagatggtcacattagaactcacagtccagtcccctagaacaaatccagactctagccttttcttttgagggaggaaatgattcactccaaatgcatgccctgagccagacctcactgctgcacttcccaaggtgctaacattgctgctctttaatgctgacttcgttcccagtgctctagaaccctacctgcctctcctgagcactgaccagcttggctagaccacagctgacccacctcttcacttggtcctagaatgtggcatcatatcgtgcttgctagaatgtgggaccaaattggcctcaggtgttttagtccagactttggcttttgagagaaggttgcactttttcatagtgtctatgggggatgtgggaggctgcatgtgccagttggtctgttttgagggtgatgatctaagagactcggagctgtctgtgacaagcagtcagagtgggaggctctgacttgctcaggacaaactaggccagtggttttcaaactgcttggcagagccccgaagtgtcctaggggttgcctcaggagtccttagggagatgagggagtggagggctgggcagtttgccctcaaacagaacagctcccccttgtagctgtcttatgtatcggggttcagggtaagattttatttgtggtaagggctttgctgctgaaaaaagttagaaaaccactgactagaccatcagctccatctggagcctgtgctcctccacgtccagggaagtctctgctctacccttcccatgggacacctacctaaggtagcattcctggggccctttagcaaacaggagcagcaggaaccagggtcaggttaccaacatgctctgctagcagaccttcagccaggtgggaggagaggctgtgctaggacaggctaaagggttggtcttggtctggattctcagaagcttagatgggaccacagtggagagttgtgacctgttctgcccttcgttttaagggccagtggaaacccagagactcttctgtcagggaaaaccagggactgtcttttagagccatatagttccttgggattagctcttggccaagaaggctgagtatggctcccaacttttaaatccatttcattttttttaaatgagggaaatggatataatttttcagatactaagtagctggagaggatgttcttgctctccaaagcccaaagggacaaatagggactttgcttaggccaaggcaagagcgcaa

SEQ ID NO: 22713 - DNA, 1160 bp, Mus musculus
tgcgggcgtattgttacctaaggactcaacaggaggtggggtgtgttgattgacaggcatatttcacctaccgggtttagagaatttggcacagtggcccgccttagaggtggggcctcgtttgattgccaagtagaattccccaatagtattcgagctcggggtaacgggcaggctgactgactaatgaatcctcggcgtggccggctcagttctccaatcgccgatcggcgggccccagtctgagcggcgatggcggcggcggcggcggcggcagcagcagcgggggctgcgggcggtcggggctccgggccggggcggcggcgccatcttgtgcccggggccggtggggaggccggggagggggacccggggggcgcaggggactacgggaacggcctggagtctgaggagctggagcctggggagctgctgccggagcccgagcccgaagaggagccgccccggccccgcgcccctccgggagctccgggtcctgggcccggctcgggagcccccggcagtcaggaggaggaggaagagccgggactggttgaggccgaccccggcgacggcgccattgaggacccggtgaggggaggagggcgagcgagcgggccgggtcatgggaggcccagagcacggacaggaggcaggcaggcggggggtggggttgggcggggaataacgtggctggtggcgggccgaggccgttcgtgagcggcctggtggggcatcatgggtgtctagggtggctctagagaaggtaaattgactcttttcattttttctgcgtgttttttttaaataatattttttatttcaatcacgaccctcgcacgaggcgagggaaatggccgagcacggctgtggccgggcccagacaaaatgtacggcacagcccctgcgtctggttaactgcatgccctgctcattcattgtaggagctagaagcgatcaaagctcgagtcagggagatggaggaagaggctgagaagctaaaggagctacaaaacgaggtagagaagcagatgaatatgagtccacccccaggcaatggtgagtagatcgcctcatgcacgcacagtccggatctttggttgatagggtagtgggggaagactgcagcgtggcagaagccggggaccttgaatgaagct

SEQ ID NO: 22714 - DNA, 1478 bp, Mus musculus
cttggttatttttcccatgtgtggaaggatccagctcctggctggtcctcccacagctgcgtgggaggactgttcccaaggtcagctgtctgatggggcctagtggctccagagtgtggctgggcttcatttacttctgtccttgcatttcagtcccacattaagataaaccctgcctttttagcagatagggtttaagtgctgtggagcactggacaaacaatggatcctttttcttgtccctcagtatcttagatggatatttccttgccctgtttcccatgtcaaggccccccagtttgccatttgtgttattcctggattgaggcctcacttttgaggtgctcccttcagtcactggggcagttgcgggcccatggggagggtcttgcactgaactctttagtaaccctgttaacacctaactctccttctttcttccaggggccgggctagagcgacatcatggtattccccttactaaaaaaagtgtgtattaggaggagagagaggaaaaaaagaggaaagaaggaaaaaaaaaagaattaaaaaaaaaaaagaaaaacagaagatgaccttgatggaaaaaaaatatttaaaaaaaaaaaaaagatatactgtggaaggggggagaatcctataactaactgaggagggacctgctctgggagtaggggaggcccagggcgcggggcaggggctacagagtccctctggggattcgccatggacacatctcaactgtgcaagctgctccctgtttccctgcccccctccatcctctctgggcctgctcaggggtaggtgggctcgggtggtaggagggcttttttttacccagggctctctggaaggacaccaaactgttcagcttgttcccttccctcgtcttctccctgccttttgcagtccccgcctgcctgctcctgtcctaccaggtctccgcccaccctacacctctttcctccggctccctgcccctccagtttgcctggtgatctattttgtttccttttgtgtttctttttctgttttgagtgtctttctttgcaggtttctgtagccggaagatctcgctcccagcggctccagtgtaaattccccttacccttggggaaatgcactactttgttttggggagtttgggggtgtttttgtttttcaggtggttttgttttgttttgtttttttctttaccttttttttcccttttatttggagggaatgggaggaagtgggaacagggtggtgggggtggcttttgtttttttgtttttttttaactcatttccaggggatgggatttttttttttaaataatgtgtcatgaataaagttgttttatgaaaaaattggccctttggatgttttttagtatggggggaggattggtgtttgagagagggttacatttgtacattaaggtagaaggtagagctaactataatgtattcagttgaggatgattgattgatctt

SEQ ID NO: 22715 - DNA, 1180 bp, Mus musculus
gggatcaagggggtctgaagatggctgacactaagtcagtagctttggatagtgaatggttggagctcagcatgaatagttctctctctctctctctctctctctctctctctctctctctctctctctctctctctctctctctctctctgtctcctgtagaaagctctaacctggccccagaagtcagcccagatcctcctcttgagcctcccctggcgccagtcgagggctccagggagccctcagaaagccctgatcagccgccttctccagccccatctccagcccctcggcttgatgcccaggttgaagaattggctcctctacccaccatgtctgaagaggaagagggagctatgggggagccccgctctgcagaaccaaccccagctgactcccgccaccctctaacctatcggaagaccacaaactttgccctggacaagtttcttgaccctgctcggccctataagtgcactgtgtgtaaggagtccttcacccagaagaacatcctgttggttcattacaactccgtctctcaccttcataagatgaagaaggcagccattgacccatcgggccctgcccgaggcgaggcgggcatcccaccgcccgccgccactgcgtcagacaagccctttaagtgcacagtctgccgagtgtcctataaccagagctccacactggagattcacatgcgatcagttctgcaccagacacgctcgaggggggccaagatcgacgccagggctgaaggagcagagcggggccaagaagagttcaaggaaggcgagactgagggcgaggcaggtactgagaagaaaggccctgaccctggtggcttcatgtctggactgcctttcttgtccccaccacctcctcccttggatctacaccgattctcagcccctctcttcaccccaccagtcctgcccccgttccccctggttccagaatcactactcaagctccagcaacaacagctgcttcttcccttctacctccatgacctcaaggtggggcccaagctggcactggctagccctacgcccatgctgtccctgcccgctgccaacccacctcctctccctgcaccccccaaggctgagctggctgagcaggaatgggaacggcccctcatggctgaagaggggactgaagcggggccttcttcacc

SEQ ID NO: 22716 - DNA, 1697 bp, Mus musculus
cccaccaaaggagattggagagccccaagaagagcctggctgtggccacatcccaccaaaggaccttggggtggcaaaggaggaggaagagatccttcctttggacctcagcagccacttattcttcgcagctggaggccaggcctacctactggccaacctgcccctgcctaggggcagtgaactctcgttaccaaagggcttcccctgggatgaggcaagcgccaaggaagagcccagcctgcccctcctcacccacttcccctcctcacaccttaccacccttcacatccaacatggcttcgacccaatccaaggctttagctcttctgaccaaatgttgtcccacgatacctcagcgccgtctctggctgcctgtgagagaagggatggatccttctggagctaccagctggttccaaacccaaccgaagatcccaaagatggccccctggggagccgacgggaagaccacagggcgatgttttggatctgccttctctgccgcctgggtttcggcaggctccagaccttcataggtcacacactttctcatggagtgaagctgagccctgcccaccaccagggcctgctgggcagcccagccgtacttcaggagggtcatgatggcggcatggccctcctaagctttctggaaccaaaatttcttacccgtccttctcccgaagtaccggacaccagcacagtgactgtgaagacaaatggagcccaggctgaggacggccccccagaggcagatggtcaagcccttgttctccccgctgaagaggttatagccctcagcccaccatccccacccacagccctagccacctgggaccccagcccaacccaagccaaagattcgccagtaccaagaggcgaggcggggccagactggttccctgaggggcaggaagaggatggagggctctgcctcccgctcaaccaaagctcacccacctctaaggaggtggccgtgctcccagctccagcaggctctcccgaagataccagtgacccacctccgtcctgtcgcctggccgatgactacactccagcccctgccgccttccagggcctcagcctgtccagtcacatgtccctgctacactcacgcaattcctgcaagactctcaagtgtcccaagtgcaactggcactacaagtaccagcagaccctggacgtgcacatgcgggagaagcaccccgagagcaacagccactgcagctactgtagcgccgggggcgcccacccccgcctggcccgcggagagagctacaactgcggctacaagccctaccgctgcgatgtctgcaactactccaccaccaccaaaggcaacctcagcatccacatgcagtccgacaagcacctggccaacctgcagggcttccaggcagggcctggcgggcaggcgagtcccccggaggcatccctcccacccacctctgtcggggataaagagcccaagaccaagtcatcctggcagtgcaaagtgtgcagctacgaaaccaacatctcccgaaacctgcgcatccacatgacttctgagaaacacatgcagaacgtcctgatgttgcaccaggggctgccacttggcctgccaccagggctggtggggccaggacctcctcccccaccaggggctgcccccaccaaccctcctgaactcttccagtactttgggccccagg

SEQ ID NO: 22717 - DNA, 1169 bp, Mus musculus
ggtggggaaaaggttaggaactccttaagggatctagaaattcagggcctgctgctgtgccgggagggtagagtgctcagtgtggcagtttagagagaacatttgctctccaacccagagaggggtagaaagaaaatggtcattgttgagaccggttcctagggtttcaggaagtcatacttcctgtggagaaggcaccacccttgctcttaacacatttttttttctctcaactaggtcaaaacaggcctctcttcccttctcacgcttcatagactttatttgttggggaggaggcaggctctctatattgccttgacaaatatagggtctgagtgccacctgctggtggccctcagggttgtgtcccaagctgagggtgcagaaagatttgagaggagccgaggcagttatgaggcaggcaagcttagggaacaggttagcagcctggaactccacttggtttgagctatgcacacctctcatctcactgccacttggcatcttaggaccctcagctgcacgcaccatgcacacacattcttctaacagtgcagccaggaccccgcctgtatcgagtagcacttagagcccacttcagacagtaaatctctctttccccagcagccatcaaaactccccttctgtggacagttttattcaaacactttaggacataccccaaagtagggagctgattaggcctaaacgggtttggggtaacctgtgatctttgggtgaccttttgaggagaactccctatggaccgtcctatgcctgtgcagaatgagttagcttatgattaaagtcagctgcatcatgggaagggttacgcacagagaagaaaggctgacagaatccaagcctgtcaatgaaaacagagaatcactcaaattatgccacttcacagctaacaccttcgttccctgagactttattaaaggaacaccgggtgactgccctgggctcttaagactgtggtcatcacccgtttacagagcacttctaatttgtacgctcagtttgcctttaaataaagtttacttcgccatttacgtgggtctttatttccgttccttgaacaccaggagcctggagacacccaggccagacactgaccacagtcggttactgccacgtctccacaggcaagttatccacctcaaaga

SEQ ID NO: 22718 - DNA, 1326 bp, Mus musculus
acctaagttcttgcctactttgatcttccctgagggagaaaaggggagcgaacaacaggaaactccccgtgctccctctcctgccctcctcaaccagtccctctcccaaccaccaaggatggcacgccaagccaagagtattgagaaaagcaacgaaaaaccatctggtgcaaccaagcccgcccctcttcagattctgccactcacctctctacccttctctgcccccctgaaaatttatttggttggtctggactcacttgtggcctttgattaaattcctaaggggactgaagaagacatttctgcagagggttagaggcgctgcagcaagcgaggaccccagtcctcagctctgacagttgtggggcgaacacgttgagggctgaagggcagcagatgctgtcacaagtctagtttctaacccctcgcgtagactcctgcgagatgggagctaacggggaatcagaggaagccgctgccccacacagggcagggcagaggtgggtgtcaaccccggacgagagttggggggagagcctgtttgagattatggctgatccctgggactaactttccctctggggacagaaagctgtacaagaggggactgtggaaccccgggggactttcctaccctgcatgaggcagaggcaagctgcctgccaatcaatcccttcctcaaggaatggccttgcccaggaatgcccaccacacacacactcttcttatttttctagtcaacctctgtttactccctggcctgccttcctcctgcctcccttccttccttccttctcaatctttacttctgatttctatttcatggaatttgggattgaagttatacaacagtgccgccaacatcaagtcttgcaggaaaaaaaaaataacaaagaaatttaacaaaaaaaagtatattaataaaaaagttccaaaaagggggggactgtcatctcctttggggtgcgatggcttctgactcaagctctctgagtgccacctggtggggtggatgaaaagtgaggcccctgggggagccacaatcatggaacaattctaggctcctttaccaaagtgccagagacaggccagaggtcagaaatgtcaagacgactcagcagggaggccctagaggggcggggtcccgtgatagaggcggggaagagggaagggccccgaaccgagcaccaaccccagctctgtcccataccaggaagtgctgggtggggggtagaggagcaaagttgacaccgaagccaggtgagcttgggactgggaaactagtgccttctgaagtgggaatgggggcaagaaatctcgcga

SEQ ID NO: 22719 - DNA, 1326 bp, Mus musculus; identical to SEQ ID NO: 22718

SEQ ID NO: 22720 - DNA, 1230 bp, Mus musculus
tagagcagggtaacagccaatggctcactgatgctcgtggtccggcaccttctgcattcattgtcactacttccagattgtcctttgaaaggtcagtttttgcaaggtgtccttaggctgtggaaaaaacagggatgaggaggaacgactttcagctcctattttagccacaaatcgtggtgttactaatgacataattcttgcctaggtcttgctaaatctgaggttgataattctcctttaggagctgcacagcactcagaactgtgcatactggtttgtgattgtacaaattcagtatgggcatcgcttggtgcagaggcactgcaggggaaggtccagcttgaccatttctgagtttcctgtgagataaacccggtttgaaagaggttggtaccaaattttggctaaaaatgaaaaatatttttcggctctgcctcacctccccaaaaggtacccagagccacaggtgtgggtcttatcagtacccacgggaggaatcgggtccatgtccacccaagccaaggttaaaagcccactcatctacggatgagaaaaatcatttgatcacctcagttaagcgttgccttatttaacttaattaataggggggagagagattggaggcgtactattgaaagggcaagcccttcactgcctcccacccaaataaaaaagccaattggccttgtactacaagagccggtcaaactccttctccctgtttcccacctatcatccaaaaatgcggaggaatatcaacttagtgttattcttattatagtgtatttcacatttgttcagtcaaacttagccagagttccaacgccctacttaaaattcaactagaaagttacctaccaagtactaattagcattataaagtcagagcctacaactccaggcttttcagttagttgtttactaagataagaaaggacagtcttagccagatacagtttaccataagaaaagttaaggaatcccacgaaagcaggttttttctttagccctagattccaggcagaactattgagcatagataatttttcccccctcaggccagctttttctttttttaaattttgttaataaaagggaggaaatgtagtctcccctcccccagcctgaaacctgcttgctcaggggtggagcttcctgctcattcgttctgccacgcccactgctggaacctgcggagccacacacgtgcacctttctactggacca

SEQ ID NO: 22721 - DNA, 1122 bp, Mus musculus
agagggctttaccatctggagctatgccttctgttggaggcatttacaccgaaggagacagataatagtagctgccatttgaacatcaaaactgattgaaaaggccatggaagagcttctttaagattgctcatgaagctctcatctgggcaattttcttcactcttggaccagaggcttgactgcctctcctccccgatgggagacacaaacctcataaaagccacagatacaggtagtctgaactcactccacatacccaccacaacccagaacctggtcttatggtgcctgcaaccagacacactttggtactccccagaggtacggctttctgccccactcaccaatgcttgtctcccatgatagccactggatggttgactctctgttttgactctgataggcttagccggcacgggctaaggccctggtgctggtcaccgtgccgtagcatccaaaccctgcatgtgctcagtggagatatgagtcagctgccggctggagttcgagactttgtggcgcgcagtgcgcatctgtgccaaccagagggcatccacatctgtgatgggaccgaggctgagaacactgccatactggccctgctggaagaacagggtcttatccgcaaactccccaagtataagaactggtaagccttgaaactagcaacccccaagatgaaggttactgcttagactgaggtccctctgggttccccaagacagatatttctagaccacatcagtggaatgagccagaatgggagcttcaagggaaagtggaacgggaaagtgaacgttttttacattaaatgaaaaagttgatacgaatttacaaattggagctcttactttggagggggcctacttactgcctgtctcctccttcatgaaacatttgccaggggtagaggctccaaggctgtgccttggggaaaacccctcttaatgagacaaagcctaaagggactaaactggaactggataagaaaaaataatgctgacagacctagagtcaaagttaaacttaaaaagtggccgctgggcggtggtggcacacgtctttagtcccagcacttcggaggcagaggcaggtggatttctgagttcgaggccagcc

SEQ ID NO: 22722 - DNA, 1187 bp, Mus musculus
ctttgaagaaaagattgtcagcagttcggtgaggttgcaggggttggaggtgggaggacggcttgtgtctagagctgggactgggaggggcatccccctgacttcgtgccactttctgctctgcagtgggatgggaacctacgtctgtggcagtaccgccaagctgagtacttccaggatgacatgccagagtctgacatgaacagagtctgttccagtggccctactccagtgccctgcccatctgtggccttttcctcacctcagtagatctgacctccagttctgtgtagggtgaattctcagcatattctctgcctcctcctccctttccccttctggggagtacgtggaggaactgctcacactgggtgagaaacagaaacccagggtctgggcccaggctgagcctggactgaccacccccaaactgggccaagtggtttcctcgtgcattcatacccagtctgcttggatttcgatctctagccagagtgtggcagggcatccattatctggggtgccgcttctggctacaagagtcttgagtgtgtttaatcatgttctgatgttagatattggctcatagtgtagacacttgaggtctgaatggacccattagcagtaccctttgcccaggtcttcacactgagagttagattggtggccatcagggccaagtataccgagacctttctttctgaggtcttcgagggtggacaggatgggtagggaggtgtttgcctcagcaacctcctggggtgagaactatgtctgctctcatacttggactttgaagtgaaaagactggtctgagaggtatgggtctcagatacggcccaactcgccattggatcctatcattgctggtggccagcagcttcaacaaaagaggataaaacaggacttctttcaccttctcactggctgtggctctcccaataaactgtctgtgggaaactggctctgtgtctgtgtcactttccctttcttctatgtggggtctgttgtcttctcacttcagggaagcaggttcaaactggctgaggctgtgcatgctgtaatcttcttgcttggaactaaggacaaaagggtcagaagctgaaggtcaccctcagctccatcatcagtgtgaggctccaccaggttacctgagagcccatctcagaaagccaaataatacagct

SEQ ID NO: 22723 - DNA, 1183 bp, Mus musculus
gaacctgggagtcggggtatgtatatggaggggaaggaaggatgtggtgataaagccaagacgcgttctttgctccaaggtcactacctggttgcagctacagatacctcggatagaggatgggaataattttggcgtggctgtccaggtaagagcactgtcccctcaatctacagccctactgtgcaaccagcctgagcttccccagctctccactttcttcctcaggaaaaggtgtttgagctgatgaccaaccttcacaccaagctggaaggcttccacacgcagatctccaagtgagtggcctcatcacaacaccctcagcgcactctgctttggggacaggcccggggcgcccgccttctctttccactctctacatactacttccactttccacaggtacttctccgagaggggtgacgccgtggccaaagcagccaagcagccccacgtggtaggtgaggcccaggtcaggctgctcccggggaagacagatttcaagtcagggctaactgttgagtttctaactgcagggtgactatcggcagctggtgcacgagctggacgaggcggagtaccaggagatccgtctgatggtcatggagatccgaaatgcttatgtgaggaagggggaggagggcgggggtggacagaagcaccttccccagaccatcaaatttctgaccaagcagtcttggggtggaggatgacaacagctaaaaatgggatacagaactaccggggggcccgtggctgacctccaccactctgtgctccgataggctgtgttatatgacatcatcctgaagaactttgagaagctcaagaagccccgtggagaaaccaagggaatgatctattgagccccctctctcattctgtgatgggtatagcagaaaccttcctgcttttcaccaggaactctagactggacgcagtcttcttcctactggctggggtttctccctcactctgcctcccaaacacaataaatacatagttgcccaccagcccatgtctttattgtatgtggacccttctgacttaggcatttccatctgtggaaccactccattgagtgatttgagtgttaagccgctggttggtccagtcctgccgaatgtcatcaagatggcagtcaaagtccacaagatgctggtgagcccggccctccaacagc

SEQ ID NO: 22724 - DNA, 1173 bp, Mus musculus
actggagaagattccagaagaggagaaagctgccttgttcctgttacagcacacagagcagtcaccctctgctctgggacactgatcgtcgcgtctccatggaaatagacttgttctccacactcttggtcggcctgcttctgtgatggttcttatcaccgtgtgttatccagcatggccaagagaaagtgcaagggtgatgtttctccttacaaattgagtttgcgaggcagacttgttgaggatacttgtaatctcagcacttggaagacagaccaaatggttatgagctcaaagacaacctggaagagacttttatctccttttttttaaagctatattctctctcagctccaaggaactggaaagttccaaagggtgtgatctcagagggaattgtatgctcctcccagtcccaaactctaaatctaagcactttatatattttatctcccagtcctcactagactgaaataaaatttagctgggtgaggtattacatagttggcacatgtgagacaagaggcaagaagactgtgagttcaaattcaaggccagtcttggtgacactgtctccaaaaaaaataaataaaaagcttcctaagagcggctggagagatggctcggtgattaagagcactgactgcccttctgaagatcctgagttcaaatcccagcaaccacatggttgctcacacctgtcttcagacaccctcttctggtgtgtctgaagacagctacagtatacttacatataataataaataactctttgggccagagatcagcctccatccgctcacatgttgactacttggtcctcagtggaaccacttgggatgactagaggtgtggggttgttggttgagttgtgtcactggccatgggctttaaggtttccaaagacccttgccattcctagctagcacactctctctgtgtctcatgcttataagtcagatgtaaactctcaacctcagctccatgcttgcctgcctcctgctttgttctctgttgtgatggtcatggaccctaaacctttagaaatgtgagctccaaattaaattttgccttttctaagttaccttggtcatgtggtgtctactatagcattaaaaaggtagcaaagagagctgacgacttcatgcaggagaatcttggctccacagtttt

SEQ ID NO: 22725 - DNA, 1185 bp, Mus musculus
ccaccgtatgggttgtttccatttttcttttctttttcacaaagatttatttatgtatatgatactgtcattgtcttcagacacaccagaagagggtatcgtatcagatcccattacagatggctgtgagttaccatgtggttgctgggaattgacctcaggacctctggaagagcaggcagtgctcttaaccactgagccatctctccagtctgtttccatttttctaacatgtaaactgaagttgtgtcctgattagagtgcaccaggttgttgtttccttgtgttggaacccaccctgagacctcctccaacggtttcaaatagtggggtgccataacgctgtgcatttctttgtagggactaaaagttaatactgtttggaaataaggttggggccggccggccttttctggtagtagggagtagctcaggaatgagccaaccatagcacgaggctttgtccctccaaggttttaattgcgctatatcctgattgatgatgtcatggctatctatatcctggagggattggccaaggcccttctcagaatggtgatagtctagaggaaggcaggcaagccgagggatagaggcgggagagagagagcaatgaatggactctggactcggcagactctttaggaggtgtgaccctgggagacattgggcctcctgggaggtgctggccagaagggaatgggaacaacaagagccaggcaagaagaggcccaggagacaggctggcctgaaaaccttgacccagcctggcaccctgttgccagaggccaaccttatccaaccgccttgtcccagtcagccttgagctggactgagtcagggggtgtgaatggatggtggtgagacaattgttaactcctgtggcatgcatgggcttgaggggactgctttccaggtggctgtatccagtcgtttctaaaatgttgttgcttacttcatttgaataaaagagatccaaagtgaaaaggaaagacaattttctttaagctgtatctgctgatatgggtgtgtctagaaaaactcattggcagtataatgtgcaactcagcaatacagatgatcccaaaaaaccaaggcagcatagatgtaggctctggataccatgttcaaaaaggcttaccgttttcccggtgtgacactgaggtaaccctgggaggagccttc

SEQ ID NO: 22726 - DNA, 1162 bp, Mus musculus
ctctgcaagagaagcaatttgagcttttaacttctgagccatctttccagccctccttattaacatcttattagaaggtctaatgattagtctgataattgcttttttcttgtttttacattttcaagatacttgcaaatagtcataatgtgatatcatctaatttctattgtgtaagctatcatattgttaacactgtgggtctctgtattcaaaattaaatactaattacccttagaggttagtaaaagaatatttttctcatacagtttcataggcctctcagagatccaccaaactcaggttacaaatgcccattttagatggatttctaatgctttttcttctctgtaggaatgatgagaagacagcagctgattacaagattctaggtggttccgtcctccacctggtgttggctcttagaggaggaggtggtcttgggcagtgaagaaacttggttccgtttacctccttgccctgccaatcataatgtggcatcacatatcctctcactctctgggacaccagagccactgccccctctcttggatgcccaatcttgtgtgtctactggtgggagaatgtgaggaccccagggtgcagtgttcctggcccagatggcccctgctggctattgggttttagtttgcagtcatgtgtgcttccctgtcttatggctgtatccttggttatcaataaaatatttcctggccatctggactctttcttcttgacacaaataactgaaatccaagtggctataaccagtagaagtagaacggtggaaggaaaggtgctgctcttaggttagttttgagaaggtgtgggtgggatagggtggaaggtgtctgactttgtagtgccagctggcctagaactatgtagacagactatatagacagactggcctcaaattcacatggatttgtctgctgggattaaaggcatgtgccatcagcctggaatattctttcttttttttttttttttaatttggtttttcgagacagggtttctctgtgtagcctcggctgtcctggaactcactcggtagaccaggctggcctcgaactcagaaacccacctgcctctgcctcccgagtgctgggattaaaggcgtgcgccaccacgtccagcttggaatattctttattttaaa

SEQ ID NO: 22727 - DNA, 1185 bp, Mus musculus
acaggttttttctacataaccctggctgtcctggaaattgatatgtagaccaggctggccttgaactcagagatccccctgcctcagcctccagagtgctgggataaaaggtgtgggccaccaagctaggctaagaaagaggttttaattgtggtttctttcctgcagtgctgtccccaaccccgtgtagctctgttattaccataggggacttggttttggactctgatgaggaagaaaataaccagaaggaagggaaggtgagtgggaagaagcagaaagccaagccagagggcgggcagaacaaggcagggatacatgtgaagtgttcccagttataggaattatgctttcttctctataggagtttttgaaaaactaccagaagacgaagtttgacacctatatccccatgttttgtgactacatcccgtagtgtcctgcctattcctttctggctacctaaacggttctcactcaggtcctctggaatattctctgcactctgtccatcttctgctgcagctctgcatgcaatttagtggaaaagaagaggaagtccagacttgagttgcctggctacattgctgaaagctttgtagcacttgaaaattaaatattgatttgtttcactattgatgggaagaaggggaataaagacttgcataggtctgtgtaggtcattcctccgaaacataacaggcttctcttagctggttgaggcccttctcatatttactcctttggcaagagtttagatttacatagaagggttgagagagcctggaagggaaactgtccttatgccatcctaacagtcatccctaaggccagaatacactttgtaaacttgcttgctaccaagttagcttaggctggcgtcgctgcttcctgagaataacattcatttccctggatcctactgggtcagggtcaatcccaggaggagcatctagatgccagcctgtgctggaagcccagcatccatctgtatgagagtgtttcaagtatagaagaacgtctaagctgtttagacacgtgatgatgtcatttaatgaagctgcttaacatgattcccgcagccttccctttccagaccaagggctgccatttctgtgtggattagcatcttcctaatcttcgggggctgtccccagggtctcatttgttgatctcacgtctcct

SEQ ID NO: 22728 - DNA, 1124 bp, Mus musculus
ttaagtttagtgatctggacaggttgatacacttaagtcaccgcctgagaggagactgcggggttcccgtggctccgcgaaatgggcccagctggtccgccgaccttccggtgcagatgagagaagcggggctccgcctacgggagcgtccgggaagcctgggttgaacgaaaggaggaaagggcgcccgcgggccatggccccacctccaggggtaggtcccgcgtctctgcggtttgctgccgccgccagctggctggtagtccgccgtcgccgcgtagagcacttcccgaaagtggtggagtttctgcagtccttgcgcgctgctgcccccggcttggtttgctaccggcaccatgaacgcctgtgtatgagcctaaaggccaaggtactagagagaaggacgtctggttgggactaagatcggctggaaaagggtaggtgttctgagccctgtaccgtgcaggtggtggtggagctgatcctgcaggcgcgaccctgggaccaggtcctgaatgccctgaagcatcacttcccagcagagtccagaacagtaagtaccactggaccccgaagctgtgagtgctatcttgggcagaccaaactcaggcctgatgcaaccaagttgcccctgggtcctagcgacacctcctcacccaaattttcctgtcttcaatatcctcaacagacaaaagaagacaggaagcttttggaggcacgggaaaatttttgcttgcttgtgaagcacctgtcagaggacccgccttcgagcctgcaggtgagaatggttggtttggaggatgttatgggattcctgttttgttttgttttgttttctaaaattcatctgacctgcttcactttcccacatacaggaactagaacaagactatggggaatcctttctagttgccatggaaaagctgttgtttgaatacttgtgtcagctagagaaagcactgcctccagtcagagcacaagaggttgttgagaaagaaacactttaagggcggaaggctgggtggcttccccgagaactatgatcttcctatctgtcgccttgcccacagcttcaggatgctctaagttggagtcagccgggctcgttcatcacttcttcggtt

SEQ ID NO: 22729 - DNA, 1197 bp, Mus musculus
tcttagtcccaaccagacgtccttctctctagtaccttggcctttaggctcatacacaggcgttcatggtgccggtagcaaaccaagccgggggcagcagcgcgcaaggactgcagaaactccaccactttcgggaagtgctctacgcggcgacggcggactaccagccagctggcggcggcagcaaaccgcagagacgcgggacctacccctggaggtggggccatggcccgcgggcgccctttcctcctttcgttcaacccaggcttcccggacgctcccgtaggcggagccccgcttctctcatctgcaccggaaggtcggcggaccagctgggcccatttcgcggagccacgggaaccccgcagtctcctctcaggcggtgacttaagtgtatcaacctgtccagatcactaaacttaaaatgccgccactgagggaaacgcaggagtacgtcacttccgcctgggcgcgcggcttccctccccggaagaggccgcggagggagctgtgacgtcacgaggtcccctgcactgtgaaagtgacgtacgacctagcgtcactctccatcacccctgcaagctgtaaacctaggtgtctgaatcagcgtctgccaagcccttcccgggccgccagccgctcccaggaaaaattctgccattcctctcgcgaaacagaagagggcgctcgctcgtttcaaaaaaccaaacacaggcctgagtggtaactccgccctcctgtcctgactcgccggtgcctaaacgaatatagtttgaaatatcctagggctagtcagggttctcctggacagtaggatgacagccgttttatgcttttctgtgccacatctttgctgtttcgtgtagtttataatatttaagggcttccttttccaagtttcttttgagcactaacttgatggagtcctttagtgggttgactcttcttgctctccccaaggacagaaccgggcacactgtgtacagctttactttgttgcttaaattaattatctgccttgcccaccttgcaggaattttatgaaacctgcccattatttgaatggtttcctccattcccagactcatggctcacactttgccttggttctccagatcagtattcagagcctttccagacccagtaccaaagtactacactggatgttaatgttgaagtgggttttcttcatatttt

SEQ ID NO: 22730 - DNA, 1184 bp, Mus musculus
tcccacacttgaggtttcctctccccatctcctctcactaaccacccttccataaccatctgtctcctgtccctgacatagcacatactcctatacaccgggctgtttgtttcttgcacacggttagcctccaacaggggtcttgtaagatccgtgtggaacacagaacaggtggttgaagatgtcctagcacctgctgagtgttttgcccctctcctcccaacaccccccaggatctcacagtgctctgccatttggaacaactgctcttggtcactcatcttgacctgtcccataatcgtctccgagccttgcccccagccctggctgctctgcgctgtctcgaggtaaagtatcgattccctcccattctgtctggagtgtcccttttccactcagaagtttgcctgtgttatagcaggaccttctgacctctgactactgcaggtaaccgctttgccacccccctgactacccaggctggccctgtgagctttttcacacacctaagctggtcattccgggctgtccatggcttgtactagttccaggctgtgtgtttgaccttatgctccctcaacttcctgctcctcaggtgttgcaggccagtgataatgtcctggagaacttggacggcgtggctaaccttccccggctgcgggagctgttactatgtaataaccgtatccttccttcagtctactgtgcagacagtttctagggcaaggagcaggctgcaggggggcaaaccgcagaggcagagagcagacagctcatagggcaaggagcagcctgcagggggacaaaccacacacagagacagggtcatctcaaggcaggacaggaaacagggcttgggcagggtgagctgaagggagatgattgcctgaggctgtctgtgactatgattaacttcgactctggagttctgtagcgtgtgacttcacaagccagagttcacaggcaggcagcctgtggagatccttaggaaccacagagtagtctaaagatcaggaaggtccatattttaaagaattctttgatccctcttgaaatcggagggttagagcatctttgacccacatttccacatatccacttataaatactaagagccactttgagagccctctccacctctatgcccgcacaaggtcctgcttcccacagtcccctcttcagct

SEQ ID NO: 22731 - DNA, 1141 bp, Mus musculus
tccgtttccagaacacacctgtgtacttccctggagggactttaccttccttgtctctattcagggacagtatgtggctcttgcctgtagccgccatggcagccgtgtattagatgccatctggagtggagcagctttgggggctcggaaggaaattgctgctgaattgggtgagtaccactgccaattgggtgagtggtttctaggctccttctgtacccggtagctgattggttcagcagatttcaaaagtgcagtctggttctgcattctgcagagatgttgtgtagtctcttactcctcccctttatccggctttaatgggtgaggtgttctgtaattcctgtttcaggccagtgttgattgaaaatggatggccctttacctcaagtagagtttgtctttaaacatgggtgatgctaagtaggagtggttttctttgcaggagaaaagaaccaggagttgattcaagatccttttggccaccatgtggctcgaaatgtggcccttactaccttcttgaagaggcgagaggcttgggaacaacagcaaagtactgtggccaagcggaggcgggcattgagctctatacttgaagactgagacttgcaacgggactcggtcttgatggggaggggaacatgcttacccttcctgtttacattggatccaaaagtcttactgcagccagatgtagtaacatgcacaaaactgtaaacctactattccagagggtaaaacaagaatatcaagaattcaaggctagcctgctctgtggcagctagatcttgttaatctctatgtccatctgctattctctcccctctcccaagacatactggtaaagacttttgtatttttcttggaaatatttttattttattttttaggggaaagttatcttgtagtaaagctagggacagtggccgttggtatgcaggatcttaggggtaggcgtcagtaagaacctagatgaagcagcgattacggtgggatcaggatgcaggggacaaggctgtggttctgcagggtatgtggaaggcaggagtggagggaagacaggtagcattcttcaggaagatgtacaggccagaggaacaaggcagtgtgcagatctgttaggatggagtcagcttggtta

SEQ ID NO: 22732 - DNA, 1386 bp, Mus musculus
accctgggaaccaccactaatcctgtcagtgccggatctgtcttcccaatgtcatctaatggttgatgtccttcacagctccccagagcctgtgcccccacaggtcagtggtaggccagggaagaagccagggaggaccagaaaggagtggagacctaagcagccccactgtggggctctcaccttggggctccagctctggccctgctcaagcaccatcaagcacgtgtcgtcctccagcagctggaagaagtcctcactgtccacagcagtcccatcctcctccaggaccagtgttagcactccacgtagcagcaaggtctccaggacctgtcagtgacaagaggcaggaagggaggccccgtcagcctcacgctggttggcatatcagctctacctccaggtgttttgccatcttccctgtaggggttttgtttgtttatttctttttttgagacagggtgttggtgtagtgcagcctgctcccaaacttagcaattctgtgttagtttgctgggtcctgggattgtagacatgaacacttcatctcatccttcctaaaagttgcagttctttctttgtgtagctttggctgtcctggaacttggtctgtagaccaggctggcctcaaactcaagagagtcactggcctctgcctcccatgttctgggattaaaagtatgtgagaccatgaccacccaacagaaatggtagctgttgatagaccttcacagagcagacctacctatctaccctccttccctccttccctccctccgtacctactcttgctcctctctgagccactcctactggaactgaatgacaaatcagtcatagccgggtgtggtagtacgcctacagtcctggctgctcaggaggcagaggcagggggatcactggagtccagaagtttaaaaccagacttcaacagttttggaccctgactccaagtctgtccagatgaaacctgtctgatctatcttatctgcagtgtcgtcctatgctttcctgttctctacaattgttttctaagttagcaccatttaaccttcctgaggccaagtgaaactgtttgccaagtgcaaacgtgtgagccatagaaggaacgtcagggttaaggtagtgaggctaggaacaattgggtgagaaagaaaaggctttggctgggtagaaacagtcaaggtgaccaggaggagcggggctctcactgactcctgtaaggccctctcaaggagcaagcacgaggtgctggtctaaaacatgtgattggttggccagctctacttcagttttaaggatagctcctaaaacctgcacctctcccaggaatcagattccgcaggaccaccctgtagggaaggagctgggcggaggtaaccatac

SEQ ID NO: 22733 - DNA, 1148 bp, Mus musculus
ggggagggagggagggtgaaaggtgtgaaccggtggccagaacctcaccagcctccttcctgcctcctcatcttcctagtggtcttcaaggaggagcccctaccagactcatctctccggggcttcccttccacatcgggtcccccctttggccctgacgtggacttctcaccgcccaggcccccttacccctcctatccccatgaagaccctgcttatgagactccttatctgtcagaaggctttggttatagcacacccgctctgtacccccagacggggcccccaccgtcctatagatctggcctgcggatgttccctgagactgggggtaccacaggttgtgcccgcctaccttcagtctctttccttccgcgcccctttcctggtgatcaatatggaggacagggctcctcttttgccctggggcttccattctcccctccagccccctttaggccgccactgccttcctccccaccactcgaagaccccttccatccccagagtgccatccaccccttacctcctgagggctacaatgaggtggggccaggctatacccctggggagggggcttcggagcaggagaaagccaggggtggctacagcagcggcttcagagacagtgtacctatccagggtatcaccctggaggaaggtgggtgtgggactgggggctgcgagtgtaagtgagtgcgagagatcagtttgcatgtttgctgaaggctggagcttggctgtcagggacttggcattcttagtctcccagggctagtcagtggtctcggaagcaagttcttggtgtgtgagtgtgtgtgtgtgtgtgtgtgtgtgtgtgtgtgtgtgtgtgtgtgtgtgtccacctgaatttagtaatttaattctgaagggcacacaaaatacctgttccatccttttttctgtctctgccctaatcacagaatttcagccctagaagtatttcaagaccattcatttcttctggtcccctgacttgtagatccaggcagtgagtttcagggagggacataacttgtggaaagccaggctgagtctcgccccctcactttatctttccctggtgactatagtccacattggtgaagaagatcttcccggttttgtctctttctcccaactgacca

SEQ ID NO: 22734 - DNA, 1195 bp, Mus musculus
ggagattcaagacctcctcaggcttctttactatccctggaggttcaggttccttatattggggctgaggccctcagaatctttgagttctcaggttcctgtgtcttgccaccccacggatgattctgatttatagtcaaggtgagaaaacgacagtctagtttctctctcacatttagagaaagaggaatctgaggttccaagagaggacagggcttgcctaaaaatcacacagctccacaagcggcacgatgcacactgcacactggatgcctaaaatcacacagcttcacaagcggcacgatgcacattggattcctgtcccactgcatacttggccatgctgatccaaattctctgaagtggaggtggggggcgggggacaaggaagcgttggcatggcctacccacaggaccccctacccctgacatttatgtggtcagtctggaaacactgtacattagtagtaggctgcaggaagctgagcagttttcctaacagctctgaattccttggggcttaaggcaggcatgaagcgctaggcttatcttgcagatgtgtccatgctggcctcctacatagatgctacatccattgtcatcaatagatccaggcaggaagcctgctctgtgtcctctctgggctctgtgtcctatctgggccgtctatgagactggggtgcaatgagccagggaaaggcaaaccatcttacctgcttacctagagcctggcagacatgggtagacatagtatccaaccagcttgatggactccattcaccttgagagtgtacacccaagccattcagagagccggtccttggcaacgtagcctcacctccaggcctccggggagcttcatgcccattgaatgctgatggccctgggacttttcctgaactcctggaaaacagggagactccggatagccctgggaagtccctggaaagccacagaaactggctcaggattggaagactgaggagtccaagtgacctctaacctcggcccactgctgctttgtaatcattttcctttaccccctagagcaagctgctgcaaaccaaatcaacatcaactgctcagctcactaggcctgtgtgtgtgtgtgtgtgtgtgtgtgtgtgtgtgtgtgtgtgtgtgtgtgtgtgtgtctaagaatcccttctaaccatccccaatccagagtcattat

SEQ ID NO: 22735 - DNA, 1196 bp, Mus musculus
gctcctccagcatgtgtttgcaaggtggggcgttcccatcagactggaggccgcccaaggcccccagtttgcccgccatgttctggtgagctgtgggctggccctgggagcccaagtgactacactgagtagggccctccagttcccctgcctgatgagttcagaggcctactgggaattcaagagggccctgaaggagttcatctttctgtatggcaagaagtgggcggcctctctgcccttgctgcacctggcttttagggcctccaccacagaggccacaccgttccaggtgctgaccgggggcgagatgaagctgatggagcccgtgtggtgggagatgagccgggcgaacattgaagggctcaagatggacgctttcttgctgcagctgatgcgggagctgttggacctccactggagagtggccgagaaggccagcgagaaggccgagaacaggcgtttcaagagggagagccaggagaacgagtggagtgtgggcgaccaggtcctcttgttgtctctccccaggaatggcagcagtgccaaatggatgggtcctttctatattggggaccggttgagcctatcactctatagggtgtggggcttcccagtcccagacaagctgggctgtgtctatcctagcagtctgatgaaggcctttcccaagcatgacacgcccctgtccctcgacgtggagcagtgagtcagagcagccagggatctgcccgctcgggtccccgcatttctgctgctagtcctcccttctgatctgagcagtgctctcagctcttcgggggcccccctcagttgtgccttgtgcggagaagttccctttgtaaagctttgctgaattgccttgagctaggggtggatgtccctataacacatccccaggtaggggtacttggagaatgtgccaaaggttgtcctgtgggggctctgggctctggcagttctacccttgggagcaaaggagtctccttaacaaagttggccgggctcacgatcttccccaagtgccacctttcccctcttacacgctcaggtgtagattggtgtgtgcacccctctccagtgtctttcacccaacacactacacttcacagtgtggatttggacctccgggtgggtatcacagctctccccctatgctagtgcctccccgtacattctgcatctggcaagcctct

SEQ ID NO: 22736 - DNA, 1197 bp, Mus musculus
tctgtactggaagagctgcttctattaggttcagtggtgttcacgctctgctttaaggggagggcatctgatgtgtgtagtttgacacgcggccgggcactgggtggcttttcctcttgttcctctgactcctctcacccactgccaaagctcacaaccctctactgcgtgcagtttacccatctccttcgatgggactgctttgttctggtcagctgcagtaccctgaatctgcctctgtgtggcgctccctcacagccggtgtgcccagctcattgtcgcagcaggagtgggcttttcattatcatgagggctgattctcaccgctctgcatttccacacagctgagctcgcgatctggagagaaaggtcagcaccaggccgttctggctccgattcctagtagctcatttctcgaggagccgatccggttatctggctgagctcaggttgccagacaggacgctgcagaatgctgggtcctgaggctaggttggcgttgagcccagctttcacaacagagcaaagagggaaatgacttgcccgcagtcacacagctagttggtggctgagctgggacccggatgaaccttcgtgacttcaggttcaccacgataggggttctagcaacatgtttaagcatgagaatcctttcagattttgtacctctgttccctttgatgccgtttcgtttcctaacccttctagataaactacctgaatgctgttcttcagccaatccagctggcaaaccctgcccagaaatagatgctgggagctccccggggtgctgaaaggttagctgtagaatttttagcaggtactgtttcttcccaccaccttagctttgcctcccctcccccgcccccctttcctacgttagtcagcctcactctccagccccagggctatattcaaacacctctttctgttaagtacaattcccatcatatgctttcaagtgatttttatttttcaataaatcagttaaaatggagccaatgtttaatttttttttccgaattgggggggggggataaagggggggtggtgccaggcggtggtggtgcacgcctttaatcccagcacttgggagtcagaggcaggcgaatttctgagttcgaggccagcctggtctacagagtgagttccaggaccgccagggctacacagagaaaccctgtctggggggggggg

SEQ ID NO: 22737 - DNA, 1145 bp, Mus musculus
gcctcggggaaacaggaggttcctcagcaaagaggagggttcagtgtgcagggtgaaccttcaggtgcgcatgtgccctgtcagagggcagctccaatccggggagcctctctcctccagcggctccacaatgggagcgcctcacctccgagagtgcctagccctccgcccgcgccggaacccccatggccctgtggagaccgagaccgagatcgagatcggggagacaggggagacaagcagcaggctggagctcgaggccgagggtctccgtggaagcgaggcactcgtgggggcaacttggtgactggcacgcagcgtttccaggaagccttacaggatcctttcaccctgtgccttgccaatgtgcctggccagccagatctccgtcacattgtcattgatggcagcaacgtggccatggtgtaagtagctggtgggactgagttctggagacagcctctgaggggcttgtgccgcagccttctctgggtcctgacgtcgacgctctccgtaacaggcacggactccagcattacttttccagtcggggtattgctctcgctgtacagtacttctgggaccgtggccaccgtgacataaccgtctttgtgcctcagtggcgcttcagtaaagattccaaggtcagaggtaagttgggtctggtcatctgtgtcctggtgaggctgggtccaccttgagaaccctgttgcactttgttctacagagagtcacttcctgcagaagttgtattccctgagtctgctttccctgacaccctcacgagtcatggatggcaagaggatttcttcttatgatgacaggtaattgttcctctcctggccccgagtttgctatctaaggaatctagtgggatttggagtaggacagagatgctcccgacctctgtcttctagcctcagtagtagagctagtttcagtgggacaaatgatgggtagctcagctctgcaggtgagaggagacgggctgtagacagtgatggtttgcctgctcgctattcacctcgtatttatatagagtgctttattgtctaggaaatactgtgcaattgagatctgcaaaagctggtggcatatagagctgacagaattcccaaatgtagagaaattgtttgaacattctg

SEQ ID NO: 22738 - DNA, 2531 bp, Mus musculus
accgtactgccgggatattaaccagctttctgaggccctgctgagtctcaacttctgagcctttctgccctgcatagctgctgccctattagagtcagcctcccccagccccgccccttctcttacagtccctctgccgctcagaccatgacctagacccactctaagatggtgctttggccagaggaagcaccagagaagagaatttgagtgtgggaatactctttgcctggggtagtttgaggtcaggtccttaaaatgactcaacctgaggaaggaccacgaagccagctcttaggaggttttgatcagactcagcgcctcaactctgtctttagagagggcttctgtaagatgtagaagctgttccaggagactgcgcctgtggctttactaccaagttccttagttggaggatagggtaggctggaggcgacaaaaaggctaagctgagaaagaaagcaccctctggctgctcctctgagtggtaggataggctgagctctaccctggcgtgtccggaggaatactgactcccagaggggtcatagcgctacgtgggctgttgcagtgggctagttgagaaccagaaggcagaggtgggcaggcttccagtctcagctgtgcctgcctgtgaccttgacagagttgcttggcctttacttatgtctacacatcaggcataaagataaccgttgagggaaatgagaacagagaaggctcccatgaggacctgtacttgggtcatggctcaggcgtgtctgcctgtggctggctgttcaggctccctagccagaacttcacattcagagatgtccactgtccactccctcgatgttaacgctgggctttcagtagaacatgccctgtaaatggctgcatcccttttcagcaaccttcgaaactcacgttatcaaaataggcaagttagggtggatggctgcattacttaaatactctcagggctcctataaatggcagctgctcagttgcatttcaagtgtttgtttacagattgacaaggccctggttaaattttctttctggtgttgagcctattcaccaaactcacgatgtcatgtttggcagtgacagtgttagtgggatctatctaatatttcctttatggaagacaggtttctttcggcaagacacactgctaccttctgtgtatgggaagcggaagctgaagcatcaggatcgagatacctgattggttacagacggactccattgacctgtcatgacaagctgtttacattctaactcccacaagtcattgctctgtatctgtttgaactctgtctgtgccggggaatgtactgtctgcaaggtggcacactccttacttgattgtgttaagcagtttttcctctagtgtagtctaacctgcttctctgtgactttcactttccccaggagtaatttagggctagtcaacttcttagaggccagagtcgggtagaggtataaaaaggtaaggcaggtgccactgggttcatgtagcaagtccctgaattagatgcctttctagctctgacttagtccaagtgacatggagttaactatgtggctctctgggtcccagtgtctttgtctgtttccttgggtgattttcatttcacaccagattgattaggtgttggggacaagttgattaggggaatgacaagggagaagaagagaatggtctggactgggggctggtagagctgccttttaagcttaggattggtgtcttctcttttctcttgccatgatggtgggtatgcagaaggctggggttatcttcccttccctgagtgccctggaaggctgagtgttcctgagaagatgagagaccaagcttatagagggacactgacatcttactgcagtatgacgagccgggacctgtacacgtttactatattaactcatggctgtttggtaaatgctgaaggctagcccacagggcccttttcccacttttgctggcatcctctgaacaggtgtcagggtgacaccagagctcactggagacagatctttatatgtatcgcctttaatctgtcataacctcatgtctcaccagctcatttggaaagagagactgagaaaggaaaagatgaggagagattgcatgttaaaacgttaagaacccagcttaggagaagagccatgtagggtaatagttcttcagataattctaggggaatataagccaaagagacagcggaagccagtgatctagcgatgtaatctatctttattgccataactgtagaacattgtctacacagcatatatgagaaccagggcaacaatgtaacacagaagccacagaagaagttgaagaggtgaaggttagaatgagattatattcttgaggctggagtttctcagataggggtggatcaacgaacatgggaagagagtggggtgagggggggcagagtctaagaccctgatggattctgatctcaatcaagtgcagggatcatcacctgacccacttctcagagtgcgggagcaggccccagcttctgcct

SEQ ID NO: 22739 - DNA, 1238 bp, Mus musculus
cagatggaacccttgaattaaccccaccaacaactgaatgttttgaccaagctgctacaatggaagaaattggagcaattggtggaattcctcctgctttcaaccatctagctccgggagctgaatttgctccaaataaacaggccactattagataaagttgtattgtctagtttcctgcagcccttaaaagaagggccctttttgcactagccagatctctaccctgaaaaactgttgggggttcttcccaatatatatttcttccctgcttgtactactctagggagtatgtttgaaggaagaggacaaggggggggtggtatttaacaaatcaaagtctgtggtatagtgctttatcaagtctgcctggtacattcctgaactatattgatattgattgttgagagcctggagaaccataaaaaatggactcagcttcattgcttcattaatcttgataattctctctctctctctctctaactctctctctctctaactctctctctctctgcctcccctgcccgagtcgtgttttaattactttctcaactttattcccctcaaccccagagacactgccatatataccacaaaacataaacatcctccaatgacctagccccattcctccattcatttccaggtaagaattcagacaaatgtccacagaggttacagcataaatacagttctgttatatctcatatatgaccactttgtgtcctaaagaagacactttctcttagagttttttaattttagtatatcttaaaagatcttgtgataacttgcctccattttttgtgtctctgatgttgctgttcacagcttttcttgacaggactagtacaatctctgcaacagtagccttagtcttgcctgtcttgggtagctgcactgtgaatttttattagtgtactatgatttgttcctgatactttcaatttgaaatttttttctgagaaatggagcagtaatgtagcatcatcttattaaaatacatttgatgcctttaaaaagaaaagccatgctgaatttacaaccagagtcatgcttttatgataaaagaaaaccagagcaaattttattactttcatgtgtacaatttactcattagatatcacaagcatgaattctccatcataattttaaatttctttttatgtggtcacccatatgattaagattattctgttctgtaaggctttggttgcttatctgtatgtgcagat

SEQ ID NO: 22740 - DNA, 1113 bp, Mus musculus
cctgggtttattttccagtacctacatggtagctcacaaccatctgaaacaccaattgcaggagaatctaatgcactcttctggcctcatgggtatcatgcatgcacatggtgcacatacatacatacatacaagcaacatacccatacacataaaataaaaactataaattttatgtacagtatgactaagttttgttaaaaacaaaagtttgagtatatgtgtatggacacagacataatctagatgaacatacagtaagttactttgttgaatgggatcttagttttgtttatatctacacatagtaattttatactggttctgaataaaataggttcaaaataaattatataacaccacattgatctatatctaatgtcagttaatgtttatgaatttctgagcagtacttgtaataaattcaacatttgagcttccattttctattaagctgcagtgtcatatccctttctcctcagatggagaacctggactttttatctcttttaaaaacaattgaggaattctataaaggtgaagatggagaaaatctggaaatcctttgtcctcttcagaatcaagcctgtgtagctaaatttgaagatggaatctggtatcgtgcaaaagtgatcggtaggaaagtgcttgttatttccacagggaaatgtacaccagagcaagcatcacctgaagtgttagaaagcaaatcacggaggtgttatctgctcccaacatgtgccctgtcatacgtctttagaaggcatgataacttcagaaggtcgatctctggctactagagtttgatttgcttgattagaaattaaccgttgggaatctggcgagaaaaccagtagatggtgcagagcatcaaaacccattctttgaaccttggctgccttcatctgtttcttgctggtttttgtttgcttgcttgttaagatgcaaatctcttagcttcctttctgaattactgtattcctctctcttagggaattactttgttatttaaatttccctatcttactgaactctttctctctctctctctctctctctctctctctctctctctctctctctctctctttcttcctttcgtttttcgagaca

SEQ ID NO: 22741 - DNA, 1192 bp, Mus musculus
gccattccgcacaggcgggtctcgctaacactgggggtccctttcccagaatcctcatggtctccttccgacaatccaaacaacaggtctcctcaggcagcgggcgtcaccggagtttgggaggtgaggtgctaggaccgcccctcgcagtctccccaggggagcccttccgctcttccctgaggcagcgttcttcctcagagtccgtcgacccgcccatccacttcccgtgaactccccagggagccggggagcgcgcctttgcgtgattggccgttctgtgtgtcaatccagagctcggcgcccacaattggctggcttgcctcacggtcgagtcacgccgctggagcggattagggcggagcggcaggcgcgcggtgctgtcccgctgtgggtcgccggcggtttttcgcgttggttttgcactgcgtctgtgatggcggcggcggctgaggagggcatgagtgcggccgctctagttatgtcagttcccgacagcattggccgttctcccgagtccgaaggagttggagcaggggacgaagagaaggacgcagccaccaaaggaacggtggccgttggggacagcgaggaggatggggaggacgttttcgaggtggagaggatcctggacatgaagtgcgagggagtatgtgggggctgagcggccggacagggagtctccggggcggggacggcgggttgggagaatccgagtgggacgccgaacagcctggaacagcttgggaggacggtggcggtccgtaggcgcagactgacatcctggagaggaccctggccgcagtcggtggaggatggatgcttagggaagttctaagtgttgttttggcagaagagacgaagcggtgacatggaatgttgagaatcgtaggatgcaaggcagctggtgggagacttctgtggccttcagcattcgggtatacggttagggccatggctttccgttaggaaagactggaggattctctacaccgttgtcccaatgttttctaaaagtagaaaatgctccttggcttaaattcaggaaatcccattcacaccgagtgcccgggacagtaaaggtttcccaacccaaagtgtcccttttctgcgcgttttatgagtgtaactcaagagatttagagtaagcttgaaaggacaatcttcgcacatcgtgcttgaacacttaaca

SEQ ID NO: 22742 - DNA, 1163 bp, Mus musculus
tgttccagtgtttttgagtcttgcattaagagtaaaattttcttcttaataccttcatactggcttaagtttaattttggggcatttcagagttctctcgtgtttcagtgcatatgtgtggtatatgcagatgtgtatgtgcatttgcccagtgcactcagaaggccggaggaggacatgggattccctgctcagttactcttcacttagccactgcatctgaaggtatgctgacagttagcaagcccaagcaatccacttgtccacaccccacatagttctagagtttcagatacttaacatttctagctttttatatttggggtatctgaactcaggtctcatgattgcacaaggcttcttacacgttatgccatttcttcagctttcctgactttaggtattttgttgttttgttttttcaaggctggccttaaacttccagagccccacctgcctgcctttgcatctgagattaatgaggtgcactatcatacctggccagccatgcacatttttttaatacttttttcctcaccatgttagaggtggaactcagggtcttttttatgctaagtgaatgcttagctgcatctaaagttgtaaaagtagattttgttttaggtctagacttggacatggcagtagtaatgcctatctcagtggctcatacataaagtgctataagaactgcatctatttgaacagtacagaaagcacttattacatttcagagatttgttagagatctaaaatactgtcaaattaatatctgggcaagatgttcagggtgaacactgctgttactgaactactgtggttgtgacaaaggactactaaaagagggactcactctcagtgatccttgtcacaccttaccttagaaagacacactagagcttgtgcagaagttgtttctgatgctgaatggggaaaagagcatggtgtaagagcactgcccatgtccctgataaagctacaaaattcccccagcttttaactacgaatggaatgcaagaaaaactaggtatatagattaataataacatgtgtgcttaccatacaagggcctacctaggttctatcttgagcaccaaaaagctagagtgaggaagtaggaaaaatatgtaataagttttagagaatttggaagaacttttgtt

SEQ ID NO: 22743 - DNA, 1889 bp, Mus musculus
ttaaatccctgaattttgtgttgtttcttaatgctttgtttcttaaaagcattgatcattgagtttgtagaatgtttacttttaaaacagtacgatgcagctcctcagtgtacatctctgatttctttttaaaaagtttctttcttaccaggcctgatgagacatgtttatattatagtcccagcacctgggggcaaacgcagagacagaagaaccctgagttagaggtcagcctgggctgagtagatagagactccaactcagaaacaaaaacacattatttgttactttccatcctagtttcatgcagtgtaaactttttaaaaagggatcagagtggtattctatgctgatctggcataaggaggcatttgcttatgtcagaatcagttctttccatgaaatggagcgtagcatttgcaatttgtaaatcttcagatgctgcttattattattattactactactactactattttttaaaaacaggaactaattaacttgctcctttcttccttctatgtttgatcctgactctgctggactttctgctgaacttcctgacaccaccacttgggattttgccaatttttcttgtcacttttattttggcgtgttccaaatggactttattatatgtgattatagcacaatgataggtttccccaaggacctccatcccagatgggttcacccatgggaaatagaacaggttctgaaactccccaggcaccgatgagtggtgtagggcctgtaagtggtggtcctggcggctttggtagagggagtcaagggggcaattttgaaggccctaataagcgtcggagatattaaataatggttcattcctgactgtttagaaaaacattcaatggtatgtctttacaccatgtctgttactagggagaaatggttttactgttaatgtatgtagactaaagtttttcttttgtaaaacttgagttttttttgtattttctttattcataagctttgtagattagcttggtgaaaaagatgcccatcattgtgaatgttgaaaagtgtttgtgaccttagctaacgatagctatgtggcattattattaagtctgtgtagttacttaatctcaataaagaaatgattttgcctaatttaaaatgttcttagtggtattccctcatgaccttacaaaacttgctatggttgctttagctaatcctacctatttaaacgtgaagatgactttgtttttctgtttgttcctgtagcccttaagtcagactgttagtgaaagctgatgtcaataagggacacatactgtagtatactagtgggtgggaggcatgggggttaagattgtataaaccatagatcctgtgtaagttagagttgttgcttacatttcatatagagtctcactattcatatattctgagaaaagttattgaggctatctttgttctgtgctgatttttccaaataaaccttttgaatcttaaaaaaaatgtttgaaagtaaatctcttttgcttataaaataactcctggttttaatcttttgccatcattcatttacatttcccccagttatcactttaagagttagtgttaagctttaacccaaccagccataccgacagagtgttggcagcgaaaggaaggcgtgacctcttattcctaaatactaggtcagccacttagcatttcctgttgtttttaagaagtgttttaaaaggtagtgtaactgatgtattggaatatttccattttgttaagtctgtccagtaactcccatgtaatgttagtactgttcgtttttgaggaatatccgttcaaacgctcattctccctttttcctcagcctggtaaggtctgtgacacatccttcttggaaatacagttttgaa

SEQ ID NO: 22744 - DNA, 1368 bp, Mus musculus
gattctttcacaactaaaacttaatacatttctgaggctgaaagtattaagtctttggtgctagctacttatttatttatttcaaattccctttctcatttttttgtatttggaaatgttagttttgtttttaactagaacttataaacatagtgaaaccttaactgataataacagggaaaatgtttatcctattatcaactaaatatttttggttggaaaatatctggcatttaaatttagttgaagaaatgttcataattattctatcaacaaattaactgctgaagaaattttaagtcctattgaaatttctatttatttaatttctttctttctttctttccttctttctttcttctttcttctttttttttttctgagacagggtttctttgttttgccctggttattctggaactcactctgtagaccagactggcctcgaactcagaaatccgcctgcttctgcctcccgagtgcggggagtaaaggcgtgcgccaccactgccgggctagctttacttttctgttgtcttttcttccttgatattaagtatttaacaacttattttaaactacagtttcgattttgaacataaatctgttggaattatcaatgtaaagatactgtttaaaaggaagtggaagttaacattttcaggctaatactgctttttagtctttaataatcatatgtaagccatatgtgatatatttcttacagaatttccattgagaattaagaaataatacctattatttttatttatctgaatatttacaaaaagattttctcatagtaaaataggtaaatattaacttccttggtatttttcctgacatgagctgtacatgttttataatgaacatagttatttgtagtattattaatactgtcattgcagtggactagaaaggaaagatttagtaaagtattccatttctaaacttgtaaagaatctttttatttataaatattagtttatcataccataaatgcagttgtagaatgtttttgaaataatgccattttttgctttgtggaaattaacatagatattaatatgcctgtagatataatcatgaatggctggttttaattttacttttctaccatacaacgtaatgttatatgttctgtggctgggaaacattttagtttaaaattgagttatgaactccttaaatttgctaaggtaaaattggcgcgtgtgagtagggtggttgtgaatggatgaggtagccaggtgtggagttcagaggacagcttttgggagttggctttttcttttcattatgggttccaaggatggaacttcaggtctccttgttgagacatgtttctggccctgaaagattttgttt

SEQ ID NO: 22745 - DNA, 1097 bp, Mus musculus
ggtcacaataatatgaggaactgaattaaaggatcgtggcactaggaaggttgagagcctctgctttagagctacattttaatattttttattattattttatgtatatgagtacaccattgctctcttcagacacaccagaagaggatatcagatcccattacagatggttgtgagccaccatgtggttgctgggaattgaactcaggacctctggaagagcagtcagtgctcttaaccgccatttctccagcccacattttaatttttttatagtgattttcaaagaacagcagtagctggagttactggtacttctgaacacctgatgtgggtgctgggacttgaactagggtcctctggaagagcagcattgcacttactgctgagtcctctctaccctcagggacctagaggcatctcacttactggtcaactgctactgacaggtgaggtgcataaaagcactgcccaccctaacccccattccctacttgtcctgctcagtcccttgcctgtgttctcctctccttctccctctctccccacttccctcatctctctcctccctccttcactccctccctccccttcctttctgcccccttcctttttctctccttccctcctagcctccctccttgtcttctttttctgcccctctctcccatgctcatactccaagatggccttttgctatccccttcttccttaagtaaacctcctgcactagatctctctgtgtggcttcatttcttagcagcacaacttggcacaggcctgcaaagataccttacccttcgctgctttgtcctatcgcctgatgacttatagaatatctctcaagttgctaaacaatgtattaggtgggaaaatgggataggagacatctttcaaaattgaaacttcaggtttttttttttttgtctttgttttttgtttgtcttagtgtgtgtctatatgaatatcatcaagggccagagataaatgttggttgttgtcttctagaatgggtcaccttgtatttgagacaaggtcttactaagacctgagacccactgatatgattagctatgcttgctggctagtgagctcca

SEQ ID NO: 22746 - DNA, 1169 bp, Mus musculus
gagtacccgcgcccgccggcccggtttgccctcttcggcccggccctggtcgcgcgcgccccgccgcagcgcgcagaggatcatgagatgataatgggcccccggatgaccccgcgacaccactgtgaggcctacagctctgccggggaggaggaggaagaggaggagaagaagaaggtagctacatcaagctgggtggcaggcagatccaaagggataccatgaagtttccaggacctttggaaaaccagagattgtcttctctgttggaaagggcaatctccagggaagcccagatgtggaaggtgaatgtgccgaaaatacctacaaatcagaatgtttctccatcccagagagatgaagtaattcaatggttggccaaactcaaataccagttcaacctctatccagaaacatttgctctatcaagcagtcttttggataggtttttagctacagtaaaagcccatccaaaatatttgaattgtattgcaatcagctgttttttttttctggctgctaagactgttgaggaagatgagaaaattccagtgctaaaggtattggcaagagacagtttctgtggatgttcctcatctgagattttgagaatggagagaattattctggataaattgaattgggatcttcacacggccacaccattggattttcttcacatttttcatgccatttcggtgtcaactaggcctcagttacttttcagtttgcccaaattgagcccatctcaacatttggcagtcctgactaagcagcatgcttcactgtatggactgcaaccaacttctgcagttcaaagggtccatgctggctctggccatggttagtctggaaatggagaaactcattcctgattggcttcctcttaagattgaactgcgtcagggagcacagatgggcagctcccagttgatccactgtcgggagctggtggcatatcaccgttctgctctgcagtctgccctgcctctaaattccgtttttgtctaccgtcccctcaagcacaccctggtaacctgtgacaaaggagcactcaaattacatccctcctctgtctcaggcccagatttctccaaggacaacagcaagtcagaagtaccagtccgaggtccagcagccttccacctgcatctccccgcagccaaacg

SEQ ID NO: 22747 - DNA, 1194 bp, Mus musculus
tgcaaggaggaatttcattttggtttatggttaagaacttccaaagaggttctaccttctaatggttccacagcctttcaaaacagcaccagcagctggggaccaaatgttcaaatacacaagcctatgaggtgttgttgacatttatacccagtagaagccatttgtccttttcttccatggttagatttttgtcagcttcctgctatgttgatgctttttatatttgtttgggcattgcagagtgttaagttgacggggatgggtatatctgctgtggcaatactatctcttctcttctcttctcttctcttctcttctcttctcttctcttctcttctcttctcttcttctcttctcttttcttctcttcttttcctttgttttttttttttttttaaagtatctgtattctggaattttcttgtcatggtaaacttcttagttttgatgtttagtcttgctaaagactttctttgataatgtatttatatagtagtaggtcatgcatttaatttgagaaaatagcttgtattgtttagtacacctaacagtaaatgctttcgttaggtgcccgttcctgtgtttctgcctgctccattggacagcagtgagaagattcctgccacagttgaggacctcaaaagcaaagtttcttcagatcctcttgattcagaattgcttacgatgacagatatgatgactgaagaggaggggaaagcagaggcatccaacatcaatagtgagctatactattcagtttgtcgctaagaggtgtggggggatgggtcctatgtattgtcattattatggtacttaaaggcatatcctgtagcaatacttaataagatggtaggagaaaggattatagcagaaatattttatattaataaatacacactttggctcagggttaagagtacttgatcttgcagaagacctaggtttggcttccaacacccacaagtttatatcttcctttaattccagttccagaggctccagtgtcctcttctggcattcacaggcatgagacatgcaagtggtgcacaaatatacatatatgtacaactcttgtacacataaaacaacaaaaaatttttataaagagaaatataaactccactttgaactatgtatgctctaatgctaagcttgatctctagtggaataatttgttttattttgaggtgg

SEQ ID NO: 22748 - DNA, 1866 bp, Mus musculus
attgaccttttttctttttctttttcctccaaagtccacagaaccttaatcagagaatggatgttttttatttacaaccagaatgttctagttctacagatagccctgtctggtacacatctacttccctggaccggaacaccttggaaaatatgcttgtacgggttcttctagtaaaagatatttatgataaagacaattatgaactggatgaagacacagactaaaaaggaccatttcagaagcaatgggataacacagcattagatagtcatgctgctagatctttacaggaaaacattttaagtttactccttctgttctgagttttgtagcaatgtacccacactgggtattaccatgtaaataatctgtgtgtgaaagttgccattattctatgtagtggttttaggatacttaacaaatacatcaaattcttttttattattatttatttgattaggtatgtttgtaactttttacattacaaataagaagagaatgtgccatgtataagtttttcttgttgcactgctctgctgttgcaaagctccctgcagagggcgggctttatgcgttcctgaccagatggttgtgtatgggtagcactactcaagtttagaacttgcggtgtctttcagaatttttaaaataaactgtaaactaataggctgggttttttgtttgtttgttttatgttttagttactgaagccttagcaggttatgtagagagataccatcttctgtaccaaaaatagacaagagaatgctgttgatactggtgttctgtaatgtgaacttatgctggtgaaaacaactttatgttccccttattaaaacttagtgtccttttctcacttgtgactttctgcatcaccccatcaatttaaggaaaaaaagtatgtatatatgtgtaagtagagagagagagtgagagagagagagtgactataacttgaaaacaagattaagacatttttctttgtaaaatgtccggcgacagtgtaagactcttgtttttctttcccacggcagccatcagcatctgaggccctcacctgccaggtgtattacagcttgcatagcactctcgagtgtcaccactctcgctggaggtcttgtgctgcttccagaagtgacatgcatatgtggggcagaattatttttagaaatgccactcttgaaatattcattttagaaagtcaggctacttgaagggagacagtgtcacattgttctatggctattaccaatggagaatgctgactagtccaggagactgaagaaacagaagctggtggatggtgccagtgccagtgtcagaggaaatcttgcttgctactaggttgtttggctttgaaatttaattacttcttatagaagattacatttaaaatacttttgtgcttctgcatagcagtttatctgttcataacttttagattaaggaaatctacttcaaattatactttctaaagactgagtaaagtggtatctgaaaattatcagttatttagctgactttgtatatagcatgtgtgatgtttccttcttatttctgaatcctgaaatcaccatggtgatactagttttcaaaatagttctgagggaaattgttttccatagtgactagacagtatatagcccttatcaatttctctcttctttagcataaattttagcaagtaaagaaattttctcaatcatgattttgaaaatttcacaggtatagctactgctcgtttaagcaataactatctgaaatgtttttggcatgaaaatttatagtgttctaaatttttataagtttgaataacttcagtcccttggttttctatttgaatcatcagactgatagtggcag

SEQ ID NO: 22749 - DNA, 1190 bp, Mus musculus
atacctgtaagagcctctgtcgggtgctgggtttatgagttcccagagatcttagaagctgccatttactgcatgaccttaaccaagttatgtgacctctctatgccccagagagccattgtgaattgagtgatgtagcgcacataaagtgtttaacatggtctgacctgtgcacatgtggatacatgttagatattacttttgtctagccaccactgtgatgggcacatacacgcaacatctgtgcaccccacaacacacacatacccaccatggaagaaagtggggaaagtacacactttgcaaacatgttagaggaaataaagaggaatataaagtaccccgtgtacagtggggttgtcccccagttattccaggggtttcatctaaggcccacccactcacagctcagatcagccgtgcttagggtcccttctgactcttagctcacttggtctgttctttaggagccatcatggaagagcaggcagctcagctcctgggtgtgaagatgtgcaagtttattccggaacactcccgaaacttggccaatgagttccgctgttacacgaactatgactctgggctggactgtgaagcctaaattcacatggcagcagttccatagaggactccacattcatttcccagttctcgttctgtggaaacattgtgacctccccctttctctgccctggctgggactcccctggcttatttttcaaaataaaataaaacttctccatgctgattctgtcatgaggttgagattcttacaccaacccaggtctgtggacttagagtgaagagaaatgttgttcagcgtgtgagaacagaatggcagacttttgctgtccagtgggctgagagctctggtggctaggctctggctgcttcttggagacctgacctacctccatgaagcaggttggtccacggccagcgttccgtccgactcctcctgcatcccgcctcccctttggctccgagggctctggtgaacacagcactggtatcccagcacgcggtacctcactccagactgggaaaggatggcagtgtcaagccaaacatcctaaccaagcagcagagctgggtgtgctggagcccggctgtcacagctatttacgtccttccgtgctccaggagagtacacaggagccgaggaacaactgtgcaatcccagcact

SEQ ID NO: 22750 - DNA, 2589 bp, Mus musculus
accagaatgttgattagtggcaagatgagggaaaaagaccccactgtattttagataatgagaatgccacttaattgtcccactcagatcttacagggcatttgtgtgtttgttcactttactgagtgttaagtttgatctttggcccagttttgttttctgctttgtttcctagcgctccttggacttctgaactgtattagtgtcccacttcttttttcttgatgctcttgcccaagtgggtattgaggccactgacttcatgctcatgaactagtttttccaattcaaactgactgttaagttactggaaaatgtttttaaaacaaaaaattatgtgccctttttaaaaatacatgttaaatggacactgtcaagtatttgattttttcaagttttttgttcatacagtaccttttagcctttatttttccacacttttgttcaccttatcccagtttatgattttggtcatttgtttcccagggcacaatcaatcactgaatcatctgcacagtcacaggaggttgtctgttaacactggtgctaatgtagcagctcctgcgatcgcccctttaggtctctggaaagaaagggtaatttgacaatgtccttgtgttgagttggtggctctttggatatttgacagtgtccttttcgaactctgattctggtggaagactgcgttatgtcaacctgactgtattgcttttgttggatagaaatgacattttgtaattctttccctaaatttaacttaaaattttcaaatttattgtatggaaaatatctaatgataatcattttagtctgttcagatgagaggttgctactctttgtcacaatttcacttaaaaacagatctataatttttccccactcaacactctttttgaagtcaagtctatatactcagctgtcaattatttctgttaatacttgtatgaatccctcaaatactgaaggaaagctagctcttagttttgataatttcagcttggagcttcctaagggataggtagtgttgattgaaccctaaaaatatttttctttgttatatttttacatatattttgtttgccatctctgttgtcagaggtgattgtcattggcccttcctagctctgtcttgcaagtcattatcaatattgttttctgagtaaaacatttagcatttcaagtctgaaggaactgcagtgttgtacagagggactctttctttctaagaaagagtatggaactcattcggatatgagggaggtttggtttggttggttttcgagacagggtttctctgtgtaaccctggctgtcctagaactcagtctattgatcaaactggcctcaaactcagaggtccacctgcctcctgaatgctgggattaaaggtgtgtgccaccatactgctagatatgtttttaatattataattttctaccaaataccatagatgactgggtatgtaatagtattttaaattatttgaaaatataagtggatgttctctgactttttctaaaaacactgcatttctttaaaacttggcttcctagaattagaaaggaaaatgtccaattttaacatcttgttgaattcaagttgatttaaaggcccatggctcaagttgaacttcattttaccttaagcataaaaattgtgaagtgttcctggttgattataatgggaaaccatgacctatgtagccaaagaatatatttggttcaggtaaaactagacgattaataatggacattcatttttgctagttttgaagatggatgaagtttctgtcctatagatgtgtatgtggaagtctctgtaaagactgagatattcagctgtggtgatgattccctcctgagtgggagttgtgtgactggcgctagtcagctccctgtacccactgtggcctgctcttcacctgttcccagaacttcccggttgtgggaaggtttggatctctggtcctgtttgcatctttaggcctcttatctattaggagctgtcaggtgtgttctggcggctgatttccctagcctgaagaaatttacgatatctgcactatgtacctactggggggggtgggggtggggtatctgacctcaagtgtgctctgagcccaggttttctcgtgtggtgtcttttaccacgaaattatgacacattgcaaatcctggtattgtgatcttattctctgtacaaagaaagaagctctatgccgtgagctgtggtttaatggtcacagaatgtcagcactgctatcattcagcacgtgtaacatttttaaatttataaatattaaaattttaaacttacactaagacttttaagttttttttgttaaaagagacccagggagtgtatactgtttaaatatttacctctattaatataactaatgaaggcatttaatttttcaaaagataactgcagtatgattttagggaataaaccaaggctgtgtgtagagccagttataacctgaatatcaaaatgataaaactttatttgtattttttaatccatctatgggcgttaaaatatgttttcactaaatatttttattacatttttggtttgaccatgtgtg

SEQ ID NO: 22751 - DNA, 1905 bp, Mus musculus
catagataaggtgagaacaagacctaaacactgaactgttggaaagagtttttgtctgccctgcctcagcaccaaccccacattcctgctaggatccgccaaagaaaacattgttatggctgccttgtttcttctgcaggctgaatattctgaactggttgagacattactgtcaagtcaacaagacccagtcatttaccagagattagcagatgccttcaacaagctcacagcgagcagcactcctcctgccctggaccggaagcagaagatggccttcctaaagagtttagaagaatttatggcaaatgttggtggtctcctttgtgtaaaataaacaaacagagctataagcttaacttagatcctttctgcaaagtgcactgaattgctgaaagttgacttgagtcttgtcctgttcctcagttcgtttgaccattttggatttggaaagcctgagactttgatgtggagttccgtgaaacaggagaggtcaacttgaaatcagcttcgtcattaggtgttagccatcatctgccgtatacttgtcttctagattctgaatggtgatttatatttttcaaaatgcaattccatatatgtgcaaacagatatgggcaccatgaaattcatattcagtgccttttccccttttgtcaaagcataggtggctatccaaagttggtatgttctcggcattagttttcaaaatgtccatggatccctcgtcatctgaggagctgattgtaggagggattcttgggccctactgtgcatcattagcatatttggttgttggactctagagtaaccattttaataagctccttcctttcattaccctaaaagttttaattcaatacaagagatgctgaaaccatgtaacaggttttgtgctttccaacatttccccccttcggtgattataattacgcaggaagaagatccttacaagtgtttgttggtttcatagtcctccctctccccacttcctccctttccttccctttcagcctcactgttgcaggttttgtgtaattatttcaggtttctaatcagactgtgatgcctgaacttgaggaaaatacgtgtatattttcgttccgtaaagatgactttaggaactgtagccatttcattgccttaattttaagaggaaaagacaaaccagatttgttttagagagaaattaagtcttgacacttaagagttggctttgggtattagctgctatgatcctcttgcccctttgattatgtatttatgtttatcagtgagtggaagagcatcccagcgtggttgtctttctcagtgtgtttctgtccagccacacagcctgtatctactctgaatggcttgcttaagcaataactttttaatgggtgtgaatgactaattcacacagactattgcacattggggcatcaggggcaataattatgctgaagtgggcgctatcctcgtgtcacaggagccacactaactcaatctcaaagacttaaacatttaactttagctaggcatggtggtgcatgcctgtattcctggcatttaggaagctgagtatgaaggtcaggctagtctgggttacaatgtatgatctatctttaaaaaaagaaaaagaaaaattctctttagatcctctggcttttctaatcaggatttttatatgctcccgtgctcctcttaatttttgtgtcagctttaattatgaaaatgaaagctcatttataaacagcaggcctctgacacagtcacacagtgcagtggcagctcgaggcctctgacctaggtgcatctgagactgccatgcaagggcaggctcctctgctgttcttgacgactccctgctaaaccatctgtcaagtactgtcctcctacctgaactgcacagcacgtgcatct

SEQ ID NO: 22752 - DNA, 1099 bp, Mus musculus
ttttttttttttttttttctcttctttttttaaattttttttatttttgagtcaggctttctctgtgtagcttggttgtcctgaaattcactctgtaaattagactggtcctaagcctacctggtgctgtttcttttcatacatctagtacctggccctctggtcattccttcgttaggtcgtgtgatgcattgcagttggttctctattcttaacttgctgacattataatgtcatcatttgtataatctcatctgcagaaacaagctagttattactggacctgcaaactctcagaggccatcttgtgtggaaatacttcttttctaactcagtggagacactgcaatctggcctaccccctatcatctgtattcctagctacaaaaagtcctatgtataatatagctgtcattttttttttttttttttttggtattctttaaagtcaggtatatgtgatatagttcgatctttgaccattgtgttcagaatgagttcagaagtatgccagctttgtctcgaggccttgacaccattagctgaacaatgtgctaaagcacaagaaacggattcaccactttttctagcaacacgacacttccttaaggtaagatgcttggtggataagtgggagatttgtctacttaaccaggctgagttaagtacttgcctgcatgccaactaaccaggaagctgcggctcagtctaggctcagttatagaatacgagggagctttttaatttatcggtatatgggtgtttgtctggatgcgtgtctttgtatcacatgagtgtctgatgcctgtggaaatcagaaaaggtcattagacccaccctggatctggatttacagacagttgtgaactactgtgtggatgctggagatagaatcaggtcctttggaagggcagccagtgcttttagcccctgagctatcttgccaaacccatgaaactcttgagtcaaatgaaaatgtacttgcattctgttagagaagagaaaatactttattcactgttttttgtagttgtgtgtggctttttgaggcagggtttctcggtgcatctttgcctgttatgggacttgctttgtggac

SEQ ID NO: 22753 - DNA, 1187 bp, Mus musculus
ctaacatgggaataggcaatatgttattacctacttaggtaggtaatcattctaggaaggtttttgttttaagatgccattaagaatcaagattatgagacaatatgcaggaccatgagatttggagacaaggcttagtacttacaacattctaataagtcaattctccagtcttaaggcataacaggacttgtcttttgtgacacaaaaactgtaaactgtctactggaggagtgatggaaaatttggcttatactctgaacatttggttgtatgtgttcctccattctgaatgggagactcctctgtagacagtgatgctgaggtttacatctgcagctacagcctgagcagagggtgcttctcatcctcctgtgtcgttgtcttgactctacaagatcagaaatgatgtggggacaaccccactgatgaaattttcacacagcctggtataaagaaacaaaagggatttttataggggaaaagaatagggttagcaacttctgttttctccccacaggctgttgtctgctgtgctaagagtctcagaagttgaatctcgagcaataagagcagatctcactcatctactaagccctcagatgggcaaagatattgtttggtttctaaaacgctgggccaagacttacctcctggtagatgaaaaactgtatgatcaggtgaggacataaaaccagtagtctttttgggtttatgatgatggcaagtttagaggtaggatgattttgtctgtctgtctgtctgtctgtctgtctgtctcacatatgaaagcaaacctgttagctggatttgctgacatgcctttagtcccagcgcttgggaggcagagttaagtagatcattgagttctaggacagccatagctacacagagaaactgtcttaaaagaaaactagagaaagaagaggaggaacaggaacaagaggaggaagaagaggaagaaggagaagaagaaaagaagaagacgacagaacctgtttaagagagacagctctgatataaagaagtgaaaaggattaagggcctcacatgctggtgctttactttttcagagtatgatgtttgattctattgattttagccagtattaagatactttaccgttagaatagtatgtttttatattgtctttgagatgtgcacgtctatttatttcaactatgtca

SEQ ID NO: 22754 - DNA, 1117 bp, Mus musculus
tgaggtttgtcatcctgctggatgcttacttatttaaaagctccaatattttagcagcatggctcatcacaaatagtaatgttcaaagatcagtttaataagatttttccaataaaaaattcccgttttgcacagtgtgagaatctcttagtccactttctgattgcttcatatttttatttttactttttaaagctgtgttattttttagttcttcatgctttggaagtaacagttgaagagaggtgaggaaagtttgtgaaaattgtgatcggtgattagctgccacctgcctgaggtgtcttctgagaggaactaacctctttgtggtgctagagcaaggtcactggattaaaaccagatcaggtaaccatcttattccttgtctgaaaagttctgtcttaaaatttaataaatgcaaagtacacatggtaacatgaactactgcttaaagagagtttttaattttctccccagaaaccagtaaagtggactatgtcctttttcaagctgccacagctataatggaagcggttgtccgagagtgggttctcttggaaaagggcagcatcgagtcactgagaacattcctcctcacctatgtcttgcaaaggcctaagtgagtacctggggtggcaccgctaaaatacaggaggccctctgatctgtcctttgagacaccccttcttttcagtggtgatggttatgggcaagctctgtgctggagctagtagtttgaaaatctatgcacaattgtagcttgctttcatactcgataaaaatcataccttttacttacatttctaatcctaaagaaatacgtgatactgttcttgttgaactttcaagaatttgattataaattaaagttaacttttgactgtcaaaacttacattttcttgctcttagatgattggtaggatagttttttcttttaatatgtttagaggaagtttagcatgggctgagtattataagatgtagctgcgtagccccagaaaggaagaggaagaaactaaaccaccaataagccaaatgttacatagaaatgttgcatacatctatgcatagaaacgtcacatacatctgtgcatagaaatgttgcatctatgcata

SEQ ID NO: 22755 - DNA, 1211 bp, Mus musculus
tactctgggaatcaacctgcaagtagcagcccaccatgtgctctgaggctgacttctcactctttcctctctaggaaagggcctggcgcccaccccggtgactcggcggcccagtttcgagggcacaggggaagcactcccatcctaccaccagctgggtggtgcaaactacgagggccccgccgcactggaggagatgccgcggcaatatttagactttctcttccctggagccggagccggcacccacggtgcccaggctcaccagcatcctcccaaagggtacagcacagcagtagagccaagtgcgcactttccgggcacacactatggtcgtggtcatctactatcggagcagcctgggtatggggtgcagcgcagttcctccttccagaacaagacgccaccagatgcctattccagcatggccaaggcccagggtggccctcccgccagcctcacctttcctgcccatgctgggctgtacactgcctcgcaccacaagccggcggctaccccacctggggcccacccattacatgtgttgggcacccggggtcccacgtttactggcgaaagctctgcacaggctgtgctggcaccgtccaggaacagcctcaatgctgacttgtacgagctgggctccacggtgccctggtctgcagctccactggcacgccgcgactcgctgcagaagcagggtctagaagcctcgcggccgcatgtggcttttcgggctggccccagcaggaccaactccttcaacaacccacaacctgagccctcactgcccgcccccaacacggtcaccgccgtgacggccgcacacatccttcaccctgtgaagagcgtgcgtgtgctgcggcccgagccccagacagccgtggggccctcgcaccccgcctgggtggctgcgcccacagcacctgccactgagagcctggagacgaaggagggcagcgcaggcccacacccgctggatgtggactatggcggctccgagcgcaggtgcccaccgcctccgtacccaaagcacttgctgctgcccagtaagtctgagcagtacagcgtggacctggacagcctgtgcaccagtgtgcagcagagtctgcgagggggcactgagcaagacaggagtgacaagagccacaaaggtgcgaagggagacaaagctggcagagacaaaaagcagattcagacctccccggtgc

SEQ ID NO: 22756 - DNA, 1164 bp, Mus musculus
gcctgttgagtgctggagacctcactggagaactatgaaagctaaacatttgcagtagactttagagtagtagttacagagtaaatgggatggctgagcccgaagtcattgtttcctattagatgtgtaatgtgcatgctggcacatgcacctgaagggagggcgagtgagagggaaaagctactaagtagttactctttgatacgcatttctattcctagcttatgtgggacagctgagccacactgctaagcatgtctcacaaaacctgcacaactgagctgcagtgactgattcctgtggctgctaaaggtgtggctgcttggttagctcatgatgggcattaggaacaactggccctgctttattgaattctatacgattgcaaaccccaatcttaatacatgactatagtttccaccacgaaggtggttaagaacagcagagtgggggctggtgagatggctcagtgggtaagagcacccgattgctcttccgtaggtccagagttcaaatcccaagaaccacatggcagttcacaaccatccgcaacaagatctgactccctcttctggagtgtctgaagacagctacagtgtacttacatatattaataaaataaatcttaaaaaaaaaaaaacagcagagtgactgcctatctggtctgttggcttaaacacttgccaatggctatgatttcctagagttgacaagtaaatttctaaaagtattctagtaggcttaatcttgaccaggtaaccagtctcagaacaaaatcatgaattctttttttctcccaaagaaggaaattcctagggccagtaagcaaaaacccaagaataatcaaagtaaaattacatttattttgggggaaggggtgtgtggaagtcaggacaagttttagaagttggttctctggatccactattgagtcccgaggatgaaattcaggttgtcatgcttgatagagtagactccttcactgagccatctcagtggcccagagagcatctttacattctgggtttttccgattgtcactttataagtttgcctgtgtatatgtgcactatgtctgtacagacctttcagaggtcagaagctgtcagacccccgaactagcattacaactggttgtaagtctctctgtggcttcagggaact

SEQ ID NO: 22757 - DNA, 1490 bp, Mus musculus
caggtcccattcccttcacagtgccataaaccgaccctgggatcccacattcccagataattataagtctgcttgtgcaataatgaacccaccactcctaacaccctccatttgaaatttaactttcattatcagttcttgaagtagtcttagtgtataactttggctggcctggaacttgctacatagaccaggctggcctaaaatcacagagatctgcctgcctgctttggcaaatgtcgccacatagctttttttcttttatagtgtgtgggtgtgtaaagtataaaatacttagctacgatgttgccttctgttctgatgtctcttaattgtccttacttgattttgtttctgtttgtaggaattctacagtggatacatccaatacagaagctagacagaacaggaaagtgagctggactaaggttctcaggattataactggttagcacagaccagtagaagtggagagagggctcctgctggcagtcagtcttctttctcccagtctctcttatttcattcttacgggaatgtttccgtttcaccgcactgtggtggcctttccagcttgaccacccagcagatcccgattctacctggaagattctgaacacctactctgagccagaagccttgggaacgtcttgattctggaactatctaatggcctttgagcccaagatccttctgatccaagaacagttagaaagtaattctccaagttcatgacagtgctacttgggagagctttgtgctgcagccaggtagggaatgaggagctggtgttctgaagagtccagctacaattttgagaaataattggcaaataccagttgactgactagttttgggaatttctttctcccaatacagggtttctctgtgtagctgtggcagtcctgaaacttactctgtagaccaggctagatcctcctgtctctgcctcttgagtagaaattaaagatgtgtaccaccaccgtctggcagctttaggaaattttgtgtggcataaagattattctaattgtgcattgaaaatcaagtggagagctagagagatggctcagtggttaagagcactgactgttcttccagaggtcctgagttcaattcccagcaaccacatggtggtaacaaccatctgtaatgggatccgttgccctcttctggcgtgtctaaagaccgctacaatgtactcatctacataaataattctgtttaaaaaaaaatcaagtggaaaaattccaggataatactaataagtgcttgtattttttgttgttgttgttattgtacataatgtaaaataaatgattttctgagtagcccaccttttatgttgccaactctgaaatttctttcagcccttactacatggcatttgtagtgaagagtccccatagctgaatggttctgctgttgtagagagagggtctggggagatggctcaggggttaaaagcacttgctcttgcagagagccca

SEQ ID NO: 22758 - DNA, 1227 bp, Mus musculus
tttagagtttaataacttccagactccccaaaactttattacagaagccttgtgtctgtctttatgggtgttgtttttctctccctctctccccctccccctctctcttcctctctctttttgttttatgtttgttgttgtttttatttttgtttttcaagatagaatttttctgtatagccctggctctcctggaactcaccctgtggaccaggctggccttgaattcagagttcctcctacctttgcctcctgaatgctgtgattaaaagcatgccccactgccacctgtcatgtgtttctctgttatcgtcagtaaacccaaactctgattcattaagaaagaaaacaactctttgccagtagacagttgtcccccataatcctattacagtccatgctacaggctttaggcaaccttgtgtctacttctgtgcagtggacctgactcttctggacctttcctgtaataggagccctagaatattgtcctttagcctcgttctcaccgtcatccacattgtggagtaaagcccgagtcaagtcttattccattgcatcatttgctacatggtgtgtttatgtgcttatacttggtgctaggtgtgctttatcttggtgagttgactatgtagttcttgccttgttgatcagagtctagtctggccttgaagccatgcagatccatctacctttgcctccctcttctggatcaaaggcatgggttgctgtacctggagagttatgtaatttatgtgtgctgtagttccttgaaggcttttattctttgtttctatttttgtttttcaagacagcttctctgtatccctggctatcctggaactccgcatgcttctgcctctccaagtgctggtgttaaaggtgtgcatcaccactgcccagcaggatttttctggttaagaaactgcattgatatgttgttgttttgttttgttttcctcgtatttatttaacattttttccttgcttgaagactttgaagattctccagggagaattttgcatgaccttcattcagaagtccagactctaaaggtactattaacttaaactttttctatgtgggtacttttctctagccttagttgggatgggtctagggtcacccagaggtcaccaacctaacagagaataagattttaataagaagagcttatttggatactggtacctgaactgattggcgccagggctgcatctgagagt

SEQ ID NO: 22759 - DNA, 1470 bp, Mus musculus
tacttttaaaagccaagtggcacatgcctataatcccagcattcagaaggctgaggtaatattctgtgattttgagtctagcattggttgcatagagaccgtatctaaaacacagaataatacagccatgtggtgtagtgtgagcccaaggctcaaaggaaacatggtaggaaacaactacacgttggtattctctgctctttaattactagttgttgagtgttcaagggaagtttttatgggcagggaagcacagaggttcacgtgctatccaaagacctaacacatatatgaataggtgggagtgactagaaaaaaagagaatgaaagaaggagtattataaacaagtaaacaaattttcatccctaaaagtatatagactacaacatgctattaaataggatttcatttaggcaatgtctaaaaattactgtggtcgtttacaggaatcctgtagccgagtcaacagcaactcaaatgcagttcagataaggatgaaatatgtaaaacaaaaccacgacgtcccaggcttgggctggagaaatgtctcagtagataaaggcccttgccctcagacctacaacctgacatcagccacattctggaagaagatacctaactcccacacattgtcctctggcatttacatgtgcactatggtgcacatagactctttaaaagatagtacgtttttagcgtctagtggctttaatagaaatggctgtattgaggagattagtccactggtctgtcaaaaggcaatgtagagatgctatttttggtttataccgtttatcaaagaaacaaacgccaggcgtggtggcgcacgcctttaatcccagcacttgggaggcagaggcaggtggatttctgagttcgaggccggcctggtctacagagtgagttccaggacagccagggctacacagagaaacccagtcttgaaaaaccaaaaaaaaaagaaagaaaaaaagaaagaaagaaagaaagaaagaaagaaagaaagaaagaaagaaatgaaacaatcccaaatgattgcttgaggtggaccagcagagagacgtctctgatgtgctgctgtctaggatgtggctatgcagtgtctgtgtgcacaataggactgtggagaaggcatcctgcaggagttggactataggactcccaacattacccagtgctgaagtttgcagataaccttgctttttatttacccaccaagtagctgtcaagtcctctgaatatcaaatattatactaaagatagcgctgtgatttccaaatcctgcataaatcaagatcgctgctgttctaactttgcgatttgggaagtttactgaattcccattgactgcactaattatgaatcttaagtaactttccctttggaccaaaggagtgagtcagctttggcaccatggtttaaagttgtatgtagtatgaattcctcttcatttcagctcttttgacttt

SEQ ID NO: 22760 - DNA, 1193 bp, Mus musculus
atatgtatttgaaagagtcacttagtactttttataagtagatcagattagattttataatggtgcagtcaggactatactttccttcatataaattgcatgtgtacttgtaaatacgtgtttatttcatagactacaggtgtctctgtgatgcagattgccaaaagagctgttttaaagaggtcactactttcacttgacttgataaggctcagaatgatatccttgggccagactaatacttgcttcctgtttgcatactttttaaaaaagatttatttatttatttatttattataagtactaagtacactgtagctatcttcagactcaccagaagagggcatcagatctcattacagatggttgtgagccaccatgtggttgctgggatttgaactcaggaccttcagaagaatagtcagtgctcttagctgctgagccatctctccagccctttttctcagaatttaaaaaaagatttatttttattttgtgcatttggatgctttgccatatacatagatgcaccaggtatgtgcctgattccagcagaggccagagcagggtgtcagatcctctggaagtagagttacaggagattgtgagctgacatgtatgttctgggagttaaacctgggtcctcttcaggagcagccaggctcttaaacagctgaaatgtctctccaaccccaacttctcagattttttaaaaatagcaagtagttgaaaataatcaaatgttttaacaacaagggactaaagtttgatttatctgtgagaggaaagcatacagaaacaagcacccagtagggcggtaaccgggagtgacctctggactatgctgtgaacaaggaacaaggcatacgggagtgcaaatagtatgtgatggtgtctggggaaaagtaacctgtgagtgtgtcctggcctctctggaaatgttagagagctgctgacagtgctctctgctcagaagggccgacaggagaagagacctgctgattcttgttctcttaggagtgttaggtaccattgcaaatgcttatctattcagaatatgtgatcaagttaaaacctttttaatttgtaaatttatattcttgaggggaaaataactacaaaagtgtaaaaagaactctatcttagaagtagttattaataacattttcttggtatttgatttttatatgttt

SEQ ID NO: 22761 - DNA, 1217 bp, Mus musculus
caaatctgttaatacttgtgtttcttgtttagaccagcctaactcctactgctctttatatgataaacagtgatactgttagccaggccttcttcccgactggccagtgttagcgctgactctcatgtactcacgaatcccccacagcatcttcctcacatctcgaacatgaattacattcttttagagctggaacagatttttgagaaatcaaggctcggaaaagataaaagcttgccacactgactggctgaaagtagatgtggcctgaagcaccatactctctcagagactgtccctgctgctacgccaaggtactttttcttgtgtgatgggccatacctgtggagatgtctgagcaggctcttacattgactcttaaattaacagcctttgaataaatgccttgtaaaataaagtgtctcataatttagccacattcaaactcagctcataaaattaaccctcatttagaaggtgagcttgatcttgaaagaaattgccaggccctgagggcagagttaagtttatggttttgaatagtagtatcactttgtgtttggaatcaatctctaactccacttggcatacctgctgtgtgtgtgtgtgtgtgtgtgtgtctgtctgtctgtctgtctgtctgtctctaccctacctcccacccccacctgtctctctgtctgtctatctgtttgcctgtttctctcaggtatccatcccaggctggtctcaaaatcatcgcataagtaaggatgactttgaatgattctgcctccatttctatagtgcaggtattacagggactgagcctagggctttgtgcatggtaagagaacactgtatgaactgagctatagtcctcagcctattaatcttacacttaaatctttttaaatttttatttattttgtatgatgctctattgtatgttgatgtgaatatgctatggtgtggatgacataagacagtttctagaagttagttctgtccttctactatttgggtcttgtgaattaagttcaggtcctcaggcttggcaagagatgaccatttttgaccagtcattggccaattttgctggccttgaatcttatgttttcaaagaattctatactgtaaaaatttgaatgtttaagactaattctgtatgatttatgttataaaaggaaaagatgcttctgaaaacagcatcctgcttagcatttacatcacgcatg

SEQ ID NO: 22762 - DNA, 2124 bp, Mus musculus
tcatcaagcgaggaattactgtggagaacgccttttcattgttctctgctgcagtcagatatgacgcagaggtaacacagaagtgccccggctccctcgccgtcagcccacttcccgctcttctgtgacacagcatggctagtgtcacctcctttagtgactcagtgacaagcctcaaatgaaatctgcctttgcttctttacatctcgttcacagtcagaatcattgtttgtctgctttgcttctaaggaactggcagaaggctgcacagtgggcgtgtacagtgctggactcagccgggctgacgggcagcatgctttactttcagtctgctaatgagtgcatctgcctgtcccagacccactctaccgagtccaccgtcagaagccccgggtgctgtgggctttacatccgtgtgggtctggacttttgtccctgtgctgtagctcagttcctctctgaagaacttactgtatactacctcttttttttaacttaacagtttttagtgcacatgcattgtgtgtgtgtgtgtgtgtgtgtgtgtgtgtgtgtgtgtgtgtacatgtctggataactctggggagtcagttttcttcttccacctttacatggattccaaggatcaaagtcagttgccaggcttatgcagcagttgtccttacccactgagccatctcagcagttcccattttgttagttttaaacttagttggatttcagagctgcatttctcagatttctagagtctgatgagtgttctggagtatgtttgccattgaacttttctgactgagccgagccacagactctgagcagaagctggccctggttgacggtatgctacagcacccagtccacgtgctgatgcatggcagctgaggctgttgaaccgtggagacagtgccacaaaaggctgcaggagacattgttaatgaactcagagctgacctggttggtgttacagattcataaaaagtagaaggctggctttgctaaggatatcagaagtctgtattttagaggcgttttgtcatttgacaatgcagtctccaataactgggaatttatcaaaaactcacattctggcccttgaggtgtagcagaggacagacagacttagggattgagttagccattatgtcttttattttcaaaatggatcctatttttgtttgaggttcttttatggtaataaatatttcacaaggtcaaatgcagctgactgtggagtctgacaccaaatggaaatgtggttagcgtgaattgtagctaatgaaagatggagaggggttagcttccccgcttcctataccactaggagcctgtgctagactcattcttatacaacaggagaattttaaattgcattgactgtaacttgaattgttttcaattactacttttaatgatggttcttaaacactttaacctcccttttagcccaccacccaccaaaggtaggggggatgtggacctgtttagaaaggttctttggagcaactccagtcagtgttgtttggaaatcagcagtgcagttcacaggtcaacagtggcagctcgagccactggcaaagacttcaaagacatcagcaatccagttgggtagagtcgagatagcaaacaggaatcagcagcggtggcaccacctagtgggacagccaggcctcagcctcaggatgaatcagcaggagggaccagggccaacaggaactccagaaaaagttctcagctgtgcctctcagtgaaatgaagatactgagacaacaggcattgcacagctagctgtataagcaagcctagctcagccccacctactgtccttcaagtccttttttatcccttcaaacatcatgtgtcctccactaatcttgccttagcacgtgtgtctgtctcagctgccatcactctgccgcagaagcagctagatgccatggcacacctccagaaggtttttggtgcagtttctctctatggagtcctgacaactggagctcaactccacagtgtaaagagaccagtacatgcatgtagttagcaaagaatctcttatcacatgtcctttcatgtgcttactttagcagaacatctttttgctttatgtctacttcaggaaatattcct

SEQ ID NO: 22763 - DNA, 1830 bp, Mus musculus
atcttttaaagaatgggtagtgtttcactattaccactgtgaagttttgtgaagtaagaacaccactgactaaataagaatttagtgattgctattttagcattttaaaccagagttttggggtcactagtccactgttttaagaaaattggaagaaagaaaaaacaacttggttttcagattgatgactggaatgccttcatcatgaaagctttggagtgggagcccatgagggttcgtgggctcccttccatgcagcccagcagggacccattcctgagatggagaggaccagctccacaaggggttcctggaacctccgtgctcctgcctcacatacacacagaacatacacatagaacatacacacacacagaacatacagaacatacacacaatattcttgtttttattttggatttttttcaaattagcgattttaaaatttgttgtttccttctaattccagtaaatctgacactggatctaccctagatccactttgtaatttctcacagacttataagttgtagtttctcgtgtgaagactctgagctttatttacatgctctcctcccacaggaaggcacggcccctcatctaaaggttggagagttccttacagcttaccagtcagagttttggttgaaaagcttttatttagtgttgtttgcattcatacattggagtgccctagatgattttgtggctgtgtgtggctgtgtgtgtctgcgtgtgtgtctgccacacttgacttagggaaaccttgcttttactctgctctgagtagaaggcaggtggttttctgatgacacggtttgaggtatctggtctccagtatctcttctgggaagggtaagagagttgggatgagggactagctgagaaacagttcccagttaataaacaaaggcctctccctgttcttgtttttgttgtatgtgtccaggatttagaagaattctgctttaagttttgcatcaatcatttgacagaagttacccagacggctgcgttctggcaaatggatggtcccctgctaaaggagttcattgctaaagccagtaaatgtggagcctttaagaactgaagccaaggctgctgggctaggtgtgagagctctggggcactgtgggtgcggtgatctgcaggtaaagccccacaccatagacagtgctctgtaggaatatatgaaggatatttgcttcttgtgagtccatttcttacaactctgtgtctagatatgtatgttttacatgtatgttttacatgtgtttttcttacatttgactgagctttgggaaaggatgaaagtttacatgcttttgttcttttaattttgatgagaggatgttttgagcttgtattaagaaagccaggaaaatatccctagacctttggccacaagcctttccacatggtctgtggcagacaggccctgcccagtgctccctgagtgctgctcactgtcaccaacctcctgtgggggcatcagcactgtgggggtctcttaagaaatagtcttaatatgcattaaacccacttaagcagtcaagaaatactaggtttgctgagatgctcttaagggacaggcacctagggctggaaagatggctcagcaggtaaaggctcttattactaagcctgatgacttaacttgaatccccagaatccacatggtggagagagctgacttataagttgtcccttactgctacacatgtaccatgtctgcacaaagacacaataaaggagaaagaagaagaactaaaagatttaggtccctatagagaagtgacaagaagtacctatgagaagctgatggtaaaa

SEQ ID NO: 22764 - DNA, 1086 bp, Mus musculus
tgtgtttgagaccagcgtgcacactaccatccccctctccctataattactcacaaacacattctacatggctgctcttttctgacttgatgtgattgttaaagccacccttcttacaggactccatagaatgctcactgttttcggtggtgggaggagtccaggccaaaatccatcaaaacttaattgaaacttcaccttaacctctccagttttggttgattttttttttctttctataattgtgttaggaatacatttgtcatacgttcagctagggctccctattcatgcctttcccgaaaaggtcatttgtaaaatactaggccagggtggatggtgactgaggcaccaaagacaggcaggcatgtgtgttgacaaacaagataaataggaacaagagctcaaagcccctcttcctgatcatgttacagctgttgcctggtgcatgggtaagtgacaactgcctcctaggtggcagttttcctggccaagatgatgagtgcacattaatctgaactgctgtagtgaatggaccttctgtagaacctcagtcctgtagacttagggcctcaaagcagaaactttagaacatttactggtggtcttacttgaaaaacttacccacgaaaaagcacaaattacacctgcaaatccacacccgtagacagttcacctgacaaaaacgtgctgagttcctgatccagctgaagacacacttttagcttgctgaacagctagggtgtttttgtgtgtgtgtgtgtgtgtgtgtgtgtgtgtgtgtgtgtgtgtgtgtgtgtgtgtgtgttagtgaaagaaaagtcctttaaaaagggtttgcaaattttttttaaatgcaatctttttatttttctacttggttttggttataatcatagaaagcaagaaactattattgaaattaatgttttcttctgatataataatggaagccagagaagtcacatttcttaaaagatcccaaactgtatccttgaagttactggaaccagttttatacttcagtaattaggatgcatttatgtaatttcttgattgacatgctaataaacaacctctgaaggc

SEQ ID NO: 22765 - DNA, 1169 bp, Mus musculus
aagcctcttagacagtcacagctataattagacttcctagaattgtcttaattacatctcacctttaaatgcctccagagtatataaagtgtttcagagtctaggttatcttactactgtccaagaaaatacagtaattgtcaccttagtgtgcagtgtttttaaaaatgaagttaacctataaatttgagttataataattattttattctaatagatctccaggaaaaaaagtattcctccctgtgaagaataaagctgacaatttagtgaaaaaggaagccccactgcatatatctttccatcgccatatctgctccaggacttgtctaatggaaaccccactgtccttgaagggagaaaaccccctgcagctaccaatcagatgtcacttccaaagacgacatgcaaagacaaactctcattcttctgccctccatgtgaattataaaacgccctgtggacggaatctacgaaacatggaggaagttttccattacctgcttgaaacagagtgtaactttttattcacagacaacttctctttcaatacttatgtccagttgactcggaatcacccaaagcaaaatgaagttgtttctgacgtggatattagtaatggagtggaatcagtgtcgattcctttctgtaatgaaattgacaacagtaaacttccacggtttaagtatagaaatacagtatggccccgaatatatcatctgaacttttccaacatgttttctgattcatgtgactgttctgagggctgcatagacatgtgagtagaaaaacatggcgtctcaagcaatcttttgcatgtagacatatttgcttcgtcctactgtgttccatttgccattctgtctgtctaaataaaacagtggacaaattgtctaaaatagatgaaaaaagataccctgtttcataactccccaaagtggctatttgcaatttattttctctaaggatgagcaaatttattgccatagttataacagcaattacagtaccattgatgagtgtcatgtatgcccaaatactttaaatacattctcttcattgtcacagactcctgttttaggtagtatatttctgtcatacaagtaaagaagaaataaagaaataaagtctgtctgtctgtactttccccacatactctaaagcatgac

SEQ ID NO: 22766 - DNA, 1154 bp, Mus musculus
ctctgagacctcaggctctgtcagaaagctagtgtcctgtccctttgggcctatcttgccttttctgtgactaacagattgtcttcttcctacccatatctccattgtctcttctctagctggtgttgtccccaccttatcctttttccctcttcatattttaatatggttccaacagagctttactgtggtaagaattactggcttttttatttgtttatttttgtagtactggggatggaacccaaggggctcagtcactgtgctgggcatagtcctgcccagaactatgaactataggtatttgttcagtgaatcaaacgaagttcttcaaatgaatattgctagtcactaatcctccaatttgccttccccagagttcagtctctggaaaggatccacattctttaggtgagcctggatctagtgggctgataaaactggtgccaggaggacacatctgtgtccaagaggggaacctatccatccagccttgagctggatagcataagtgggcaagaagttctctgtcctcattgtcccagtgcccttctgctcagagactctccacttggggcctggagcagacctttgtacctagttcagaaacacctgccacttccctctcctgcttatttacaaatgcttctgttcccctgaggcttgtttgctgttctgcattgatctactgagacctgcttttcttgtttaaactcctttctagtctgagtatgtaaagaagagcattgcgagcagagaggaacagactaaagtatgtgtcaacatgcagaactatgaaaggtgcttcagggaaagttagcttttaagtgctgggttataaggcagagatgctgctgaaatggtgctgcatccatcacctgatgcagggatcctaaatggtgaatgattagactggttcacatatcaacatcaggcttattcaacatggctccttctctgaaagaaaagagttactctagggaactctgctgatgcaagcttggtttttacttaggtctgtgtcactgtagctactgtcctaataactgcttttgctaatttggatcctgtgaggttttgccagtgatatcccataattgtagaaatgagaagttagactgttgcagtggcaaacagcttcatcagtataaact

SEQ ID NO: 22767 - DNA, 1150 bp, Mus musculus
ggcccattggacacacaaactttatatgccccagaacaggggaacgccagggccaaaaagggggagtgggcgggtaggggagtgggggtgggtgggtatgggggacttttggtatagcattggaaatgtaaatgagctaaatacctaataaaaaatgaaaaaaaaaaaaaaaagaactgacattaacaaaaacatgtgaaagcttaaagaaatacggcaaacaccatgttcaggcctgctggctggttgctgtttgtttgagatggggtctcactgtgctctctggtctgcagctcatgggctcctatgatcctcctccctccacctgctgaggagctgggcctatggcagctccactgtgcctggtgtccacctattaagtacctcatagttcttcacttcttacccagccttaggtttccattcagcttaggtgagatatatttgaagactcaaataatggctttggatttgtgtcttcttgcagttgctaggtgagctgatcctggaccgccacaatttcaccattatgaccaagtatatcagcaagccagagaacctgaaactgatgatgaacctgcttcgagacaaaagtcccaacatccaattcgaagccttccatgtctttaaggtaaagagctgatacctgggtatggttttctctaactttgaaatggcaagacctctgccttccgctttcctttccttgagagaaaattaaacaatctttttgttttgcaaacttactctcccactaatcgattgcagaaaaccataacttgcgtgctagctacagctgggcaagtttgcctctgacctttacatatagacttatagatttcaagaaccctcacatctgggctaaactgacctccctgacttcatagagcctacagcaccttgcagtaagataaagagtcatttccaaatttaaaacccattgaaaaaataaatgatacttgaccctcctggtaaatgccacattagtattccctagaggccaagaggatagggatgcagtgaggcaaagcttcatccaggttctgccactacactttagcagctcaattctttttctcttcaaagaaggcttcatggggcacaatgggtaagagcacttgctgcatttccagggcacccagggacacat

SEQ ID NO: 22768 - DNA, 1252 bp, Mus musculus
tggttccaagtactctctttcatgctagaataactaaggtgttcatttgtgtccccttaacagggacaggaagaaaaattatttttttaaaggccatggtttgtttttagacttcatacctctaaaatggacttttaaagagacatttcccaggcactgaagctacaattgcttgtcagctcttcatgccctgaattcccatggcactggactgctgtcttccttgcctttgggcacatatgtccccatccagagacaggaatggaagtgtgtcctccagtacacaccttgcttcttgactggggttcaagtgttttacttccatgttacccccccccccgagtcctgtattcttcagttataaaagtcagatttttttttataatattccctggtagtatagagccccttagaccttgacctttctagatttgcttatttgattaagagatgaaaaaaacaaaacctttaaatgtgtttccatagcatcatgggacacaggcaaggccatgttttaatttaatttcagttaaaaacacttcttttctctgggtttgaattggctctttgccagcatccttttatcctagctgtgtactttctggacagaaagctacagagtctgagatgcagtgactgaggtagctggggtgctgctacgagtttctgagttagtcacttagaaggggcacatggggctcaccaccacggtgtgtttacacagagatcactgtaagtactgtgagacttgaatgtggaaaggtcatagttaataagaagcacagtttaaagaccaaataaaaagtaccacatacttttggtctcattcctcttcctttacttgtgcagttgggttcttgttctgaaataggaaaggccacactgagaccccagtgcactgcagcaggaggccctgtctatgtcccaggatcaagcaccagccagcaggcactaagtcccactgttgctgcctcttcagtcaggaggcattcccataaacatagacatggaggttataagaagaatgccccagatctagggtgggacacaccaggttgacacccagagtgacctgaggcccagtctgtcttctgtcctgtgcattctcagggctgtggcctgagaaaggccatggcgttgggagctctgtgatgttgtactgagacccgggaggctcccagtggcagggcctggagtgcggccagtaggggatcactgagatcacagtgttcttggatgacgatgaggctcc

SEQ ID NO: 22769 - DNA, 1175 bp, Mus musculus
actcagataatcctggttcttattaagttttgttgttgctaccacttgtatacttagtgagatctgtagcatattataaataattatatagacacttgcttggagagaactgcgtggatcaagtaaaaaggtttataacttaaagacaatgatgttaactgctaacatcaaaggcaaccttgaggtcctctctgaggaaggtggccataaagtgatcagatgctctgtttgtgttttaacttttaagtttcatttatttccttgtgctaggggatgtatgtgtgtcaggatgcacaccatgttcttcctctgctgtgctgattcccggggtcagacgcagcccgccaggcttggtggcgcgtgcctttaaaagcacagccatttctccagttcagaccttgtatttctctatgggtccatttgttacagaaatggagggagggagccttctttacatgaggtatgagggaatgctgagactcactgtgcttctgctggccccacagagaagctgcgatgggactggagccatgtacttcatagggtgcgggtacaatgcctttcccgtgggctctgagtatgccgacttcccgcacatggatgacaagcataaggacagagaaatacggaagttcagatacatcatacatgcggagcagaacgctttgacatttaggtaagagctgtttttagcctctgtcctttaaaagacaacagaggatggttgagcctagttctctgttgttatctgttttcctttaaaagccctaagagatactttcagaaatagcatcttgataaagcatggtcctgctcctggactggagcctatgtatgggcacagagtccccagctctttccatttcttcagaaattctttccttttactctctccagtatgaatctatttgatgcttgtccttagggacttgcccagctatttctatttttggatgttagtatcccctttgttttctaaatttagagaacatctgttctgtttaggaaacactcccttggctagggttactattgctgtgacgaagcatcatgaccagaatcaagttgaagaggaaagggttatttgacctatatttctacagtgcagtccatcactgaaagaagtcaggacaaaaactcaatcagggcaacaacttagaggcaggagttgatgc

SEQ ID NO: 22770 - DNA, 1551 bp, Mus musculus
ttcttctttcttttcttcttctttcttttcttcttcttcttcttcttcttcttcttcttctttcttttcttcttcttcttctttcttttcttcttcttcttcttcttcttcttcttcttcttcttcttcttcttcttcttcttcttcttctttttcctcctcctcctcctcctcctcctcctcctcctcctcctcctcctcctcctcctccttcttctttcttttcttcttcttgcaaacaccaaatggcggatgacgcaggtgcagcgggagggcccgaaggacccgggggcccaggattaggaggccagggcggcttccgcggaggattcggtagcggtcttaggggccgcggtcatggccgaggctgtgtctgtggttgaggtcacggggctcgtggaggtaaagctgaagacaaggagtggatccccatcaccaagctgggccgcctggttaaggacatgaagatcaagtccttggaggagatctacctgttctccctgcccattaaggagtctgagatcattgacttcttcctgggtgcgtctctaaaggatgaggttctgaaaatcatgccagtgcagaagcagactcgggctggccagcggaccaggttcaaggctttcgtcgctactggggactacaatggtcacattggtcttggtgttaagtgctccaaggaggttgccactgccatcagaggggccatcatcttggccaagctttccatcgtccctgtgcggagaggcaactgggggaacaagattggcaagccccacactgttccatgcaaggtgacaggccgctgtggctctgtgctgttgcgtctcatccctgcccccagaggcactggcattgtctctgctcctgtgcccaagaagctcctgatggtggccggtatagatgactgctacacttcagccagaggctgcactgccaccctgggcaactttgctaaggccacctttgatgccatctccaagacttacagctacctgacctccaacctctggaaagagactgtcttcaccaagtctccttatcaggaattcactgatcatcttgtgaaaacccacaccagagtctctgttcagaggacccaggctccagctgtggctactacataaggattttgtaaaagaaaaataaaagaattaaggaattaagtctgctaaaaaaaattaaaaatgcagtgtggtcatctctcagtttctataagaactagtcccaggttgataacaacagatgtcaaagtgtataaatgtttaagtcccttatataaaacagagaagcatttatatagaacaagtgtgtatcctcccacgaatgtaaaatctctggattacaggaaacccagtgcaatgtgaacaccatggaaacggtattatggtgtgtaacttaggggacaatggcagggaaatagtttgtgatgcccagcccagaggcagcttttgacatctgggttatggattcttctctttgcaaatagtttgcctttgcagttggttgaacccacagatgtggggcttgtgggtatggagggccagctgt

SEQ ID NO: 22771 - DNA, 1507 bp, Mus musculus
gggaaaaaaatccatcaacctaagcctatgatctatcctagtactaatagcaatgtttctgttgctgaggtttatgctgtgaatacatgcacattggtttcttatgcagatggtataaactctagggcctgtgctagaagtagtttgttccttgacaaggccttttgaactgtgctgcagggcatcttgtggatatgtatgtaattatatagagagtaatgcacacaatgtgtgcacataaaatatatatttacacacctacaactcctgcctcagactgttatcctttttagtgtatttagttattcactctttatgatttagatcctcagcgcttataaaaggagtaacttggggtgcctggtcacttcatttgtttattagacagaagtgattcttgatataagtatttaacccattcaacttcattgaccccactcttctgtttttatttataccttgacccttaggagctactttaactgaggaatgctctaaggctcatcaaacagattttagaaacctttactaccctatatatattctcatgctaccattatgagaatcttttttgtaaaggagatggacttttaggagtgtatgtgaactccagagtgatgttctggggcaaagagctactaagccaaattgaatctatgcaggtggaggatgcaatgttaattcagtaacaacttgcttagctgtttcaatacagaattcttcttatagggctattgagaaaccaaatgaagtggcttctgagcctcttaatgtgctgagtcttaatctggactagagaaactacattttagggaaactctttgtacccactataaacgtgctggtttgaagagtggtggagctccagggagtgctcagaggtgtgtcaggttgtctgtgtgacctctgtctgtactgccgatcctggtgttgagtgagtaaacaccactgtgaagagaattcattgccttaggaccgtgacagcgtgaaagtagttttcaggtggaatgaacacatggaattgcacggaaatagtttaatttttttacatagaaggttttgtatataatgtttatcagtgaatactttcaggatcattttcactaaggcaccttttttttattttattcaaaacaggtctggtgtacatacatacgaacatacatacatacatattttagtataatgttacttgggtttgattataaaaattgttggtctgttttatttatctgcatataacagtgattggcattcctgaatttaatatttgcatcttgacgcattaaaataaggagagttatttgtctctgagcactaaacatttgtatatttttgtaattctgcaaccctcagtccagactatgggggaggataggaaaaaggtgtgctttggcattttaaattaccatcagagttacatatacaattacaaaaatactgctttgttcgttttttaagtacattgtattatgctgcaaatatctgaatatttatatttctctgg

SEQ ID NO: 22772 - DNA, 1127 bp, Mus musculus
gaatttaaaaatattttttaatttatttttttaatagtagtataagaactctggctgctatttagttgttattctgttttctggatagaagctattttaaaaagtccagtttctgtcccagggtagcaaaatgtacttcctcattttgttgttttgtgctttataaatttacactaccttttgaatatacaaacctcattcttcattagacaacgtgaaggctttgggttttttgaagttaaatttgaaggtgcagtttgctttggcattccctcagctccagatgtattaactactgtgcttgcagaggccaggactaagattgtactatgaaacttactgagtagttttcataaattattatcaaatgagagatttttagatttttgtattctgcttagtttaaaaaaacaaaacaacaaagagtagttaccatgaggggctggtacgttgatgctgttgttgccaaacaaacttaggcgaatccctaacatagcaggtgtggagaggatgacgcgtggctttgatgaatgttggaaaggagcttctgcagccttgactgtactgggtctgtgaaggcgcacacgtgcctttgtaaatgttcattctcggcctcatgaaccaggtgatgagtgctaaaatggagccgagctgaagaatagaactcaatatcacttctgtgaacaagttgcaattgtcatgttactgtgtaattggtttgcttttaagatgaacaataaattaaataaaataaaacattgtcttgttttttatctatttattatatataccatttcagtactataagaagtcatacctaattttttgggtactttatgaagtaacatgatagttttgctatgttagtgtcagtctcttggacattggagcttgactctaatactgggagcttgttttttttttttaaagaaaagcaaaaccttatttattacaccaaatagttgtgtcagaaaataagtagaactaaaacgattctagaaatataaaaactataacttgtgaggcattaaatatttcaaattatcagtacattaaacttttgaacatttttcattgtgataaacctcttttaactgtttagttataagcaggttaattaaaaaatt

SEQ ID NO: 22773 - DNA, 1304 bp, Mus musculus
ttcaagttatagcttcttactgttcaaatgcagaaaacatgtgcatttttataagtcttccttttgtgtgagcactgacaaaatttctatgaatagctgttccaatctaaaaaatgtgatagacacaattataaacatacctgaaacaaaaggcagggtagtttagcaataactatacatccgatgttgaatattgtgaatttacttactgttatttgctgtattgctatagatgccctttagaatatagtgtttcactactgaattacacttaagaaaaaacattagattccaagttgtgatcgtgccctttattgttttaaagtcagaggtaatccacctgtaccatatgttgcattttttagataggataataattgatggtgcatcctcagtctcgtacacaatgatttcagagtacttgtgatctggatgcagttatatttctattgaagatgtgtgttgaaggttaataggttcatctggatgtactttgactggaaacaaaataacagttcctgtaagagtcaagtttgaagaagatgcatgctgggggttttaactccatagtggcctgagtactagtcagctcaggaaggtttgagatcggattgtacactctgtaggaccttagtccccggttggataccgcttgcagtgttgttgtgatgtggttcttcagtgattcgtttggaattttggaagttgattagttgtcttattcctggtagtttttatcgggtttgaagtttgacatagaaaaatgcagttttaatagtttgccttttcgaaaacccttgatgatttatacatttgtgagtgagccttattctgtagtgtatgtctttttcacagtttcatataatccagtagtaaactgcaatattaaaacgtgaaaaccaaacaaaatagatgtttgggttgcattcaggccacctgtactatggagcatgctctagtcactcttcacatttgaatgacagcattgatctgccatcaagtaaaaagttgttgatggaattaggccaaatcctctacattccatggctggatctgtgtgaatggtggttcccataagctctgtctagtagctctctagctggctagagtgtagacttctgtagacatactatgatttggaataatgggatatcaatcccagcagtatcattttcagttctcaatatttagtagctaatcagtcactgttcatcatccctaaggtaagatggagaaatgtggttggatacgtgtcaataaagtaaactttattttcaagagaataagtaaagcttgagaaaaga

SEQ ID NO: 22774 - DNA, 2470 bp, Mus musculus
gttagctgtagttactaatgttttttcaacgttttgttttgctttagaaaattaagcaatgcaaaaatggcatcctaacgaaggagttgctgcatgctgtccaccctgaatcacctgccctgaaaacctcgctgtgtctcaaagagccgagtctgcttcccgtgaaggacacactccgagctatagagggcagcagcccagcagataatcgctactgtgactatgccgaggaattttctaagtcggagcctaccgtggtcagcttggagtacggggtggccagaatgacttgttagcctccttccgtgatccctggatgactgtagtgtaagaaatgtatagttgtgaggatggtctgtacacatgggcaggaggggttgttgagtgactttggggcttagcagtaagtgagaaagtaggtagctgagaaaaggatcatagcaactcttgagaggagtgagtcagctaagtgccatttgtaacaagaacatactcatttctgtaggaagtgagtgctagtgtgtgtatgtactggaaaggggttacacaggactggtgagctgacagtctgttgattcagatgttaattccagccacgctcagtagctttcctctaactctgagaaaacagacctgacaacctgaaccctcagtgactgatgtggcatgtgctttcagttctggagctgtgtgactgtggattttgcagtcacaaaaatccaaatatatagtcaaaaatatagtgacgttttaacattaaagtgccatgaaaagtacttatgggacagccttaaagtagactctcagtttattctgtgggttttatagccgaggacaggatgtttgatctctcctttaatcagccttatttcatatgaagaactaactgcactctgattacttgggggccgcacactgcagtgctccaccatggaaagttgtagacatactctgctagtttgtaattagccagctccacccgtatttaaaatcagtgttaccgaaggctttgttctcgttgtcatttgttccaagctgcagctgacagttcattattcacagcttagaggactcatttcttaggctagtataagcacatttggcatttactttcggcttactgcagtctattaattcttactctgtggttggctttaatcctttgataactgtacatttaaagtggcaaagctctaaagcgttctgagtactaaatacatttttaacttgactgtagctgcctataaactttcaggtaaaggaaaaagggaagtgcgggtagtggagattttgcttggttacgaattctaaagcaatcatttttgtgtggagcatatttccttactcttaatataggaggggcagagaagggagcactgggggagccagctaatgtccaacagaagcagctttgacgcaggaaaaggtttattttgctttataggctcattgttattctgtgcactggggcatacatatcttttctaaaaaatcacttacaactgtcagtattaccagctggctctcaaagtttaatatcattgatggtgtgtgaggtacagttcaggggcactacaaaatctgtgtacattgtcttatatacctcctgaccacacctatatctgtagtatttcttgtgttagttttgaacatatgtatcttttttttttttttgggaaaaaaaaggaaagctttatcgtatatgattttatctagtccttatttttccaattcacttctgtaagaccttatgtaataaaaacactgcattttaaaaagtaacagaaatatactaaaaattacaatgtataatgaacagtgtttagacattgagaaaggaaacttaatctctgtgtccacaacaggagggttttgtgccttggttccagtcaagttgtggttttagacttctgtggcagacttcctagtcatcttctgggttccttatgctaattttcaacttcacatgtatatatgtgtttacatgctcacacagaaaacatcctgagtgacgtacaggacatacgttggcaaaagtctgtgtaaatgtctcataaaattagatttatgttcattgtgttttgggatgtatagcatgtaaattatttcatgtattatttaaaggcaattaaatgttcatgctttactttgagtgtttttcttttgggataaaaaacaaatgaggaaggatcctagaggagaacctgtcactgtcactttactgaactggcatgattcctaactgcatgctaaatccagttgtggatccatgagtggagctctcatccctcgttagaggaacttctttttgtagcagatggagaccataacagaaatccacaagtgcccaaaatgctgagagcagctgaccacagagtgcccgatgccagctgacacagctacagcacagtcctgcacaggaggctcaggggacacagcaggagggtgcacagaaagattaggcaagctg

SEQ ID NO: 22775 - DNA, 1171 bp, Mus musculus
ccatgggcaaggtgccacagccacttgttcagcctccaacccaaaggccccgaaaatggtgacatcctcagcatgtcagaatggaggctgcaaaagcagccccagcagtgatcccgaagccggggaaaccaggctcagcccatcgaagctggtacgtctcttctctggtagtcggaagaggatgaattcgaactctgagagacctcgctcagtcgtccttgtggggaattcctccacgtggaatgccctggcctccttccgtaaaatgggctcctttaaaagactaaaatcttctgtccttcaaggaattcagaaccgggagggggcagaagtttccaaggaggagcctacaggagacccaggaagggctgctcccaatggcaccgttgccatcctgggaaagggcctgggcaggtgtacatccttgggccctgtaggagatggcgccgggtctgactgctcagaccccgaggacacggaggacgccttccagaggagcacacaccgttctcgcagcatccgcagggcctatggcctgggccgcatcagcctgctggacctggggcggcagccagtgccggagcccgccgtgtgtgagatccaagttcgagaccctgaacccagcagggctgtgcctctgccacgcagaagcaagagcatcgacagcttgagcgtcctgaagagctccttcaagcgcaagtctgcatccaacctcacggaactgcagggtgacaggcaggttccctccagaaccttgagcagcttcttcacagacccggagaagccgggtggctcagagagaagaaccagacgctggaggagccccatccgggccaaggacttcgacagagtcctgagactggtgagcaatgtcaaggatgcggcttggaagagggaggcccccaggagtgcagcccctggccctggtcccggtctcggggatgagaacccactacttgcgccacgaagcaagctacacgatgactactcgcgtcgtactagcagcagcgtggagccagatgccaggcgtggcggctcaccctgtatccctgcaccatgcaccactgcgccctacgcagctccagagccccacttagatgtggatactgcagtattccccctggaaactaaaagtgctcagccactgggaaatgatggacctcgtgccagc

SEQ ID NO: 22776 - DNA, 1097 bp, Mus musculus
ttataaggccagtgtggtggcacacagctgtgaccccagctcttgtgagaaggaagtgggggggggggtgaggaattcaagtccgttcagccaagggagactattgtgggttatgagaccatgcctcagagacaagcaaaagacacaagcaaaagtgaagttaaagatatgacaaggtctttaagatccttttgttttcaggtgctccacttgttgggaaatatttctaactaaactaaagcaaactgtaatgtatctaaatgcaaggcacagttgaggcaaggatagtcagagatacttagaacacactttgtttcggatcgtcaaaatagtattgtgccccagacatggtgcttgtgcctataattctagaattcaggatgctgaggcagagaacttgggggattgaggccagcctggtctacaaagtgagaccctagtatacaccctaaaaagcccaggaggggagacagctcattagtaggggagacagttcttattcctcttatagaacacccatatgaagcagctcacttacacctttaactgcagtacaaagggatcagacaccctctttgggcctctgcaggtacccactcatatgtctgtctgtctctgtctctctgtctctctctccccctctctctcatacacccaaactatgtaagataaaaaacaattttagtgaattatttattttaactttatgagcattggtgttttgcttgcatgtatgccagtgtgagggtgtcagatcccctgggactggagttacaaatagttgtgagctgccatgtaggtgctaggaattaaatccaggtcctctggtagaacagctagcactcttaatcctgagcctcctctccagcctcctaaataagttctttttaaataaaagctgtcactggagatctgtgaccatgcctgtgtgctgtggtcctgcccttgcatcctcggatgctgctatggtcaccgtgctttcctaactgtcgctcacagctctgctgctgcctcagccttcctctccctcagaggcctctctttctctccctgttccccaccggcatgtctctcacaagtaggaagaagtgtgacag

SEQ ID NO: 22777 - DNA, 2042 bp, Mus musculus
ccacagagccccctaacaatcccggatatcaggacgtgtttatattgagtcacattcaagacctgggctggccccgggtgattttatacagcctgagaagtgcttgatcaaataaagtctgacccaggtgacttacttgggatttctgggtgattttgaaaactaatgtgtttttaaaagatgtaatagcctttgactttgtaaaactctgtatgtcagtatgcattttattaccaaatacagaatgtggaggacctttagtagtttttattttcagttcgccaaacttcctttttgatgtaaggcatgtgctctactttggaaggaaatagaaacaacaaagaacctcctgcccagacggctcacgaacatcccctccctctccctcaatgggccaaataatattggtgatttaaaatgttgatgaattcatttgttctatttttagcgtatttttagcattccagaatttgccagctctgttcacgtgatagagaaggcctccctggcttagattgtacctataacgtgtaggcgtcgtgtggtaggtaaaaagtgatcacaacacttgaaggtgtagagaaagaaagaacattccagcagctgattgggcttgtgtgagcgtttgatgccggcccctagctcctgtcacctgctctggtcttccttgcctctcgcgcgtggtagatccacccctgcaggtgagagccaccaccgccactgtttctaactactgtgccttttactgtccaatctattgaagactgattcctcatcctgcgtcgctgttattacatgcaaagcataaagtgtatttaatttgaaacctggttcaaagcgcaagtctttttttttttttttttaagcaccagcgctccagcattgtgtgcttgtggggatctgtaactggattgctgatgtttctcaggacaaattagtccttttttccagccagagtttcctggagccagggcatggtttctgcattacggcttcatcacagataggaaaagcagaagtgtcctcaggccagtgccaagaaatataagtcagtgcctttcagctgacaggcaggatgctgggcacattgtgcccacagattgttccttctcaggacccggggaaaggggcgcttgaaagatttaggacaaagtaagtggaaacctctagccagtcttagagaggggaaagaaacatcagcttatataatgtatgtaaatttgctaagccaccccatgtacctaccacattattgcctttactgttctcctgggcattgccaattgtatttagaaagtactttgagccaattctataatttaattggtcctcttttggggtacatattggtgcccactgtgcatgacttgccgatcttggctatgcttttgatgataacaaatccaggctgcggtgctgtggtctgtaagagtcaagctgctgagctggtgggctgcctttgaccctgaaataggacccgcgtgctagacgtgcatcttggctgaatgaagggtttattggtttttagtgtctttttgttcttaaaaaaatactgttatttgatttcttgtaaatgctgtgaatctctatttgtcattttgtatttgtatattaaaattaatttgccaagctggttctagtgatgcatctccatagtaaaagaagatagacacattatacagaaagcggccggctggggcaggcacaaagccctgggtttgattgtcagcactgcataaaactgggtgtgatagcacatacctctaattccagcgcttgggaggtggaaggaggaggttttctctggcttcgataaggggttcaaggtcaacctaagccatatgagactctgtctcaagaaaacacttttaaaaggcagcagatgctggaatttacagatcctttcttgccttgagcttggtgcttcttcctaaagactcattcctgatgggtgggagggaatcactgggagttgttggagaaaggctcttgaggggaggtggagaggggccattagagtagtctatgagtcagagaggaca

SEQ ID NO: 22778 - DNA, 1187 bp, Mus musculus
attccccagtgctgggcttatatgtgtgtatcaccatacctggtttattttagcacattttactttttgagacagggtctcatgtagcccaggatggcatggactctttacattgctgaggtcaagcctgcttccattgcctaagtgctggattgcacacatccagtttgtacagtgccgaaggccaagttcagggttttgtgcatggtagccaagtactcagctgagctacaccaccccagtccttctcagcttctcgttaagtacacatttacatcttatatatttgtctgaaaaaaaaagtgttgcttaataatttttttcttggatattttctttatttacatttcaaatgttttcccttttctaggtctccccttcagaactcccctatcccataccccctccccctgcctctgtgagggtgctcccccaccttcccacttccatcctcctgccctggcagtcccctacactggggcattgaacaccctcaggcctgagggcctcttctcccactgatgtccagcaaggccatcttctgccacatatgtggccagtgccatcggtcactctaagtaatacactttgtttggtggtccagtccagtctggcctgttgacactgctgcttcctccatggggttgcaacccccctcagctccttcagtcccttctctgtctcctccatcaggtaccccagagctcagtccagtggttggctgtgagcttcctcctctgtatttgtcaggctctggcagagcctctcaggaatcagctatatcaggtttttatcagcaagccctccccagcatccacaatagcttctgggtttggtgactgtatatgggatggatccccaagttgggcagtctctggatggcctttccttcagtctctgctccacactttgtctccatatttcttcctgtgagtactttgttcacccttctaaaaagcactgatcacattttggtcttccttcttcttaggcttcagtgcttaataattttttaaaggcgggtcacatgactcacctgaagcccatcataagccctgtatgaagcctggcttgtttcttcctgatagataaccgaaagatcgtacctgggcactttctgattggcctcagagattacatggatacagtttatattttgtcctaaaatatttgtggtgtatgctggg

SEQ ID NO: 22779 - DNA, 1104 bp, Mus musculus
actgaggctcaatgactgaggagaggcaatgttcactggccacctctgtttcaggcggccgtgaatgacttagctacgaatgctttaggacgccccacactgaagcagtgtcttcaaatggtcctataaggccaataaacaaaagaatcattttttaagtcattgtgataattatgggttacattctcatttctcaagtactcagtaaaatttgtattactttcccagaggacatagtatgggatgctggggtttgtgacactattctcagtagctatttatgaacaatcagtttgagaatgacccagtggcgggtttaacgtagaagacatcattttttaagcttttcctctgttgctgttttaggatgcctgaaggccatcttcctgacgtggaggtgtgggtctggacaagcctgtgatgaggcctacagactgagcagtcttggtgtctggaagcaaaaataaatctgaaccaaactgacaacatttccatcctttcagccactagcttctgagccagaccagctgtaagctgaaaccccagcaagaagcaaggagagactgactgtaggcggccttgggacatgtgcttcttccctaagcgagaaccttagctggggccaatttgaaggacccatgggtggaatgtgctgcctgtgagcttgtgggcacagcaggacccagcctggctccttcttatgtccacggtgaatgtggtttcacaagacccagagtataaactttcatagacattctcttttagaaataatccattaccctgtgaaaaagccttagcagattcctttcttagattttaggcagagctctggcggtttctgttgaagaaaggcactttctaatcagcagaatgctatacttcagtggtttaaaggggcttcgtagccctgcctgagtcgtagtttggtgaagtcgactggcctatctgttatgagcagttctggcctcttccccacgaaggtacaacagcactggcaggagaggaggcctgagttattgaaagtggcggtgaatgtggttaagaatttagcaggttggggggagggaagatagaaaaggagagggcaatgctttaaagttaaaa

SEQ ID NO: 22780 - DNA, 1140 bp, Mus musculus
ggcacctgcgacagagataggtatatgcaagcactgtcccaggagaagccaactcttgaattaccgtatccctaattgcatggtcacggcaggagaggtaatgggacagaaaacaggtgaaattttagcctgagcaaggcagaccagcacaggggtggaggtcctgagttgtatctggggcttacagtgacatattgggcactcattcgcttagttatatcccaaacctatcaccacctggatattattattattattcctgttggctggggaataaaacagagtcaaagagaagatggaagttatgtcagtgttttatatttgggaaccaccactcataatttacttccattgcacttaataactaattttgctatggagtcatgtctcagtccttaagaccactggaaatatgtgtttcctggtgcaacccatgggttgggaactgttgttctaggcacacttgtgagcgattatttcccttaggttagactctggacgtgcccgtggggaatgttcttgatgtagttaactgaagtgggaatacagagtgagcaccatcgttcacccgcccatgtgcctagcgtgacctctgctgtctcaggctcctgccaccctatgtctgccaccatctttaagatgctttttagcagggagggtgttttatcacagcaacagagaagtaactatggcaacaggggaccagaggttctttcttgtgtttaaatcactttgcggcggcagggccataagcttaccctgtaaagaaagaagttttctatttagacaatgtctatttatgaatttatgtcacagtgctggctccaagcctcgtgatgctaggcagtgctgcccaccaagctgttctttcaggccacctcttattctggctgcagtctcactatgatgtccaagctagtgattctctgtctcagcctcctgagtagctgggcacatgtaagctgtggagagatttgttctctgatgtcccgaatctcctccatctcccattgggcatttcctaacgtacaaagctattcccaggccacactaattttactagcgttcttggaacccctgcctgcactgaccaccacactggttggatcgtgcctgattccctataaggcagcagctctc

SEQ ID NO: 22781 - DNA, 1147 bp, Mus musculus
tttatgtcaagttttgttactttatgttgatcaggcttgggagaacttggcagcattcactgtatatccattgagttggttctaatttgcatagttacaccaaggcaggctacttaacagtatcactgtaataacatattgtaggcattcctatgaggaccagatcatatagacagaaatgatagtccagtctagtgcctaacacataacttcctgcatgtggaagctgttgtgatcactttcgttggagatccataggtattttaacattggaatgtcagccacagacctccccttttctcttgtttccctcttgtgtgacccctttataaatgctgtttctctccttgaagcttactccacagtgaaacattgggttatcatctttgttctgcaactgtaggttctgtccaacaattcgtagaaactttctgtttgtccttctgactatggatctgctactgttgtactttcttgtgatgttacttcacttgtggaattaactgttgctgtggcactctctcttcatatgactgtgacacttagctgctgtgggcttgtagtatgagttagatggctttccatgactgaacttgccatgatagtggtcagctgtgattccaaacatgtgtgattatgagctgctgtttcagtggcttccatccatttagggcccctctctgttctagtcttggaagagcacaaacttgtgaacctgaacgcttcctagtttcaggagagcaatgagactggtcagacttgtctccactgtatcccacactgtagaacacactatataacactttaaggttcatgctcagttattgttttaaacctacgagaacactttctcaatctgtacttatctacccagcatttatcttgctgggaagacttatttccatcctgtgctttgtccgttaatttctttgtctgttcttggtgattgaactcaaggcttcatgcagctaggcaagtgctttaccactgagcaacatctacagctcctaactcactttgaatccatcttttaagtgatacagaaaaaggaaaaattgcatgattatatggtatgtgatatacacattatataatattcaaatcaagttaaccacacctgtcttttaaaatattttccacttcttga

SEQ ID NO: 22782 - DNA, 1100 bp, Mus musculus
ctctgcagtcataattacttggatcaatatgtctacttcaaataaaactagaccattttttgataacttactacaggatgaattacagcaccttaaaaatgcagattataacatcacaactcgaaaaacagtcgcagagaatgtctacagactgaagcacctgctcttagaaattggtttcaacttggtttataactgtgatgaaactgctaacctttaccattgccttgtagatgcagatatccctgtcagctatgtgactcctgctgatgttaggtccttcttaatgactttctcttctcctgacactaattgccatattgggaagctgccttgtcgtcttcagcagactaacctaaaactttttcacagtttaaaacttttagttgattactgttttaaagatgctgaagaaagtgagtttgaagttgagggactgcccctactcattacactggacagtgtcttgcagatttttgatggtaaacgacccaagtttctaacaacataccatgaattaattccatcgcgtaaagacttgtttatgaacaccttatacttgaaatacagtagtgttttgttgaactgcaaagttgcaaaagtgtttgacatttccagctttgctgacttactctcttctgtgttgcctcgtgagtacaagaccaaaaactgtgcaaagtggaaagacaattttgccagtgaatcttggcttaagaacgcatggcattttatcagtgaatcagtaagtgtaacggatgatcaggaagaaccaaagccagcatttgatgtcattgttgacatccttaaagactgggcattgcttccaggaacaaagttcactgtgtcaaccagtcagcttgtggttcctgagggagacgtgttgattcccctgagcctcatgcacattgctgtgttcccaaatgctcagagtgataaggtttttcacgctctgatgaaagctggctgtattcagctggctttgaacaaaatctgctctaaagacagcgcattagttcctctgttgtcatgccacacagcaaacatagatagccctgcaagcatcttgaaggctgtgcattatatggttcagacgtcaacat

SEQ ID NO: 22783 - DNA, 1319 bp, Mus musculus
tgacaaacgatgtgcacacattggaagcttatggtgtagacagcttgaaaacaaggtaccctgatttgcttccttttccgcagattcccaatgacaggttcacatctgaggttgccatgagggtgatggaatgcactgcctgtatcatcataaaacttgaaaattttatacaacagaaggtgtgaacgtaaagaaaacagcagagccagctcttgaatgtgttatagcacaaacacgaatcgctacactccattcagcttcattcccagtatctaggaattgtgaagcacacagcagagtgttctggaagcatttggaagctgtatgactcttaacagaaaccgtaacacaaatgaaacctgattttgaagttaacagtgagctgcagagtttctaggtgtgtttaaacaattgggtggcacattattgaactgcactttatgtaaccaaagcttagcagtttgttagataagattctgcacatgtctctggttaggagggagttaattttatgtttttaaacatgtttttgaagtagttaaaggaacactggacagactgatttatttggacatgtgaggggaatttttaagtggacacttttagatacgttattttcttatcagctggatctgattatggatttgttcagtttcccatctttcgttggacatttaaagtggtacagtattcaaccctgactattacttgactacgagtgtgaagatgggccttggagcgcgctggacgcactttccatccttgttttgagtttttagaccttgtgtttgtgggcttcctgactcgtgaagataaccgatggaagtctcagagtgctgcctcacactaccagatattgcttctaaaaatgcttcccaacatgatatttagcaaaagagcattggagtttgtgtacatattttccacagatgacataatttgtatagtgtggctgaacaggatgcaatcttttgtctaaaggtgctgcagtgaaaaaaaaaaaaccaaactgtctttcaatatggcacttagtgggaatttaaacatttttaccttatgcacattaaaattgctcaaattgttgaggtgatagacagaagtttacaaagggaattatcagcttgtactgtcccccacgaatgattgagaactgacatttaattttcataatgttcaaaagatctaacatacataatttaacatattcttttgcataaagtcaaagaaaggaaataatagcttatgtaagtacactggctgtaaatgatgctaaatatattttatgcagttaagggcttacatacagaacatgatttttt

SEQ ID NO: 22784 - DNA, 1217 bp, Mus musculus
tgaggagggaactttagtggtcgtggtggctttggtggcagccatggtggtggtggatatggtggcagtggggatggctataatagatttggcaatgatggaagcagttttggaggtgatagaagctacaatgattttggcaattacaacaatcagtcttcaaattttgggccgatgaagggaggaaactttggaggcaggagctctggcccttatggtggtggaggtcagtactttgctaaaccatggaaccaaggtggctatggaggttccagcagcagcagtagctatggcagtggcaggaggttccaattacatacagccaggaaacaaagcttagcaggagaggagagccagagaagtgacagggaagctacaggttacaacagatttgtgacctcagccaagcacagtggtggcagggcctagctgctacaaagaagacatgttttagacaatactcatgtgtgtgggcaaaaactccagtcactatttgtgactaattgcataacaggttcttttactttctgttctgtggaaagtgtaaagcattccaacaaaaggttttactgtagacctttttcacccatgctgttgattgctaaatgtaatagtctgatcatgacgctgaataaatgaataaatgtgtctttaaaaaaaaaaagatggaggcaggctgaccgttcacatctgaaaacgatcactgttctgtcaccaaagtgggtttatagtttgattggatatgagattgttgtttggaaataattctccttaggctgtgtatatgtgttcttgggtgtgttcttattttgaagtgattttagactcacagaggaggagtcaagccatgtagagttctaccctatggctttacccttttccgctccatgttggcatctcatataggcacatattgtccaaaggaggaaattaactttcatgtgctgtgcttttctgcactgcaaactaggtttcaccagtgtctccaaaaaaatgtcatcctgtttttccaggattctacactgcatgttgggtgttctaatctgggctgggtcctgggtctttcttggtttctcatgacattgacattctgcagaatgttgtcgagtttggatttgtctgaggctttccttgtgatcacagtgagtcagatttagggaaaggacattgccaaggcctttgtctgtgcatcaaaccagggagatatgaagcctata

SEQ ID NO: 22785 - DNA, 1230 bp, Mus musculus
ctctttgaaggtccgaggtgacctcactaggtcctcttgagaacagtgcaggggacagagcagtgttgcttccccaaggaaagatagcgccttcactgtctaagctgacatggcccatcaaagaggcaccacgccggagcctacaaacttctgttgtaagactgttggtgctgctctagagaaaagctgctgtaactccgagttccaagctgtgcctgtttcatctcatgtctcctccccgcaggcactttgtacagattgtcctgtgcgtgtgtgagctctatggctgctggatgaccttcttccccgagtggctcgtcggaagccccagcctcaacaccagcagctggctctacctctgggtctatttggtgttttttaatggcctgtgggttctgatcccaggcctgctgctgtggcagtcatgggtagaactgaagaagagagattcccaagaggctaatttagcgaagaagcataaataagttctcagggcaacccattctgacgatctgctttccgagtcagaattgaccagacattccgatctgtgctccttttttacagtgttttgaagcggccattacagatgggctggaagggggcaaacttggctgtttgtttttggttctttgattaaatgatgatatgaagagaacttggggtgtgacttagtagtgttgtgcttgtctagcattcacaaggccctgaattgttcccttaacacgactagggggtgctgagtacgttctcacctgtcacagatcatatttaatgagacgctcagtcatggctggcaggctagttatgccgtgttaataagtgagtgtcaaagatactgtaaggagtagcatcaatgtttactccaaaaaaaaaaaacccaaaaaacaacaaaaatcaaaaccctttttgcttcagcttttattcttctctgtggtctcggggttagtgacggaaaccaaaagcaaaaggagttggttctgtgttatgcctacaaacttcaaattgcttcaaatttgtgtgcccaacagagaacgatagtggtaatctggagtagtggcgtccaggtgtacttgggaagctgaggccggtggggggcttgaggctccttggggcgatattgtaatattcatttgaaagaaagaggcagaggagggagactcgatgtaaggggcagagggtgggactgtggcaacacacaagaaccaaaaaaatgtggtaaatcttaac

SEQ ID NO: 22786 - DNA, 3038 bp, Mus musculus
taaaattcattcagagtttctcctttgttttcatagattgatgaagatcctagcctcattccagaagcaacacaaggaggtacttacaattttgacccaacagccaaccttcaaacaaaagaatttaatttctaaggtcaattaagtgcagcatctttcattcaatatgaaacaccaccagatggccaccaagcgataagacagcaagcaacagaaggctcccagcactcttgcctcttcattttgatgcttctaaagcaagccatgtctcagtcactttgcagttgccaaaagtcactctcacatggactgtaaatgcatatgcatgatttcctaaactgttttagaattctccttaaccatctcaactcccctatattttccatgttccctggtgccacatgctgacaactgcagtctccagttagaatattccatagtggtggtatatcagctgcccactgatacgcctttggaaaaaggtgcgctgtggatcaagacactttggtatgatgtatattcatgttggaagactacagaggtgcagtgtgatctgagcctccatcattgtcctccacaaacatattttcatattcttatgtggaagaattaaaagtacaagccaaatgattttcattggtgaaactgacacaaaagtaacttaaaaacaagaaacttggttgttgattaaaaagataagttttttaaaactgtacttcacctaccattaattgatgtgtttattatctgcctcagaagccagggttggaggaagagctttagatatcaatggtaatgctttcgccattatacctaattttttgagaacagcaaatcctatttgaccactcacttcagcctgtgtgttcctgctgttttgaataatcaaatgctgtgcatggtctctacctgagctgcaacctgttacagacttgaacttctgttaagttgaaagcaagagtccttgactacaaaaatacacaaataaataagtcaaaacaagaatggaaaaggtttaaatactgattggtaaggttttaagacaaagtcttgctttcagcttccaggggttaattttatttttgttttaatttgataattggatatggttgatttatattgggtttaaactgtggagctttcatgtttactgtaatttagtcttaaaatattttttacttagtaaccagtacttttgataatgtggtggcaacaaaccagcaactatctagaagtgttacaagacttcattcttgagtattggagttcattcagatctcactcaaagcatctgcacacattaaaagataaaccaaggatctgtgtagaggaatggtctgcagttatttaactcagcctgatttgcagtgatcttaagctctgcaaaatctggccttactatgtaaagtcattgcttatggcaaatggtctgacccagttattaatgaatgaatagggatttgaaattttttaaactaaataatttgtgctgtcacagaaatggttttgttgctcttgttcactgggtataatttcccaatgcattgatgtgaagggatagaaatctaaactaagatagttttcagatggggggtgtatttactgtgatgaagaagagacagatgccatcagagctttgtgaaacagctggggtgttttcactgataaacaacacatagcaggtgtgcttcattacaaatatatgtatctgccaaggtggagccactttaaagagtgagttttgtcttgtatctaaaatggatacaagcgtatgtttaaactgcaagatttttacttgctagagaatctgttttaatatagtggtttggcctctgattatttataggttttataaattttagaatcaatttctctttaaggtggctcagatttttcaactcttgtgcacataaaattgagttgaagttcattgtgccttttttctttacccaaattttgagttaaagcttcatatggtaactgcatcctgttcaaacacttgtctaaattttgaaactgtgtagtgttcactaaaagtaggagtaacaaagtcagaatgaattaaggtcacacactctggtgaaacccttaaagtcacaaccttcttgatagtgtgaattgtccccttccagttacttccttctggtctctccctacttaactgacagttaccttttaaattttgcacacattgagattaaaattgggcttctactgtgatgattcctatttcctctcgcgtcttaagtgcaaactaaccgttaagtaacgttggcatcaagtagtgcagactccgtgcctctgcttgagcggtttgccgtgacctgaccagttttgagttggaatcacaccatttcgtagataaggaaactgagtgtattgctgcacttttaagttttcaaaacagtgttttaaaattgcattgttttttttttttaaactcagtttaaaaaaagactaaaatgttctttcaaaagaggcatctaaacgtgttcctaattttgtatatgggcttaggttttgtaaccaataaaaaagctgctatcaaatatgataaaacattgaaagacttatttctggaaataattgtttagctttgttttctgtgtggttacatttaagttttgtttatcttcaaatgccagccacagtggtggtgaagcatgagtgactgtattttgatgtttcctttctaccataacactgaccaaccagtagctactgtagagagtatgttttgacaaatcagaagtaccaacatgtgtgtaatttcctaagctgccataacacagaaccagtgaactaggggcttcaaaccacaaaaactgtggtgcagttctggcagcaagagaagtcaggtcgagctgctggctctgcagggctcccgtcctggctcagcctggaaaggattccttcctggcttctggtggagactggcaatcctcagctcatagttcatcacaccgctctctgccaatttgtgtattgaaatgctgtaacttagaagaaaaccccagttattttgaaaagatggtgtg

SEQ ID NO: 22787 - DNA, 1114 bp, Mus musculus
taagctttcattgattgtctttcagaacaaaagagacgaacacttactgaaaaagagaaatgttccccaagaagaaagcttagaagattcagatgttgatgctgattttaaagcagtaagttgcctgtgtgtttataatgtacctctaaatatttttgttataaaaaggggagcattagtttaaatttaagaaaaaaaagataatagtgataacaaggcatgttaaatcattacctgatagactaatagttttgttaatattctctgctgaactatctttctttctttttaagcaaaatgtaacactagaagctatattacaggtatgttattaatttaatactgtcattctgaaatgttttgaaatagtttctttttttcttcttttaaatgtctgaaatatacacttgttgttgcagaatgccacaagtgataatcctgtagtccagttgagtgctgtgcaggcagcaaggtaagagaaagctgcacctccctgggatggcacagcttgctgcgcggaagtgggtagtgtgctttgtttacggtcatagtctgggagacatagcgattaatttcttttcttttcttttcttttcttttttttttaataggaaactattatccagtgacagaaatccaccaattgatgacctaataaaatctgggattttaccaattctagtcaaatgtctagaaagagatgataagtaagtttgaatttgcctactcactttcttcagttaacttaaaatttaaaattgatatttttaccaaagggtttgatgatgttttgcatttagtaagtttggatttgttttatttttgaggtgctgtaggccaaactcgtcccttgagcattcaaagcaggttcactgcactgagctatatatctttagccctctgttttttaaattgtcttatatttcaatgcagttttcttcccttgtgatggtatttaaacatcacaaatagtatttgagtcaccatttgcctatgagtctatatatagattagcctcatggctagtcagcatgaatggtttccagaaccatgtggcttgtccttaccctgggaatagtccagctgatctctgaccctttggctagtcttgaat

SEQ ID NO: 22788 - DNA, 1233 bp, Mus musculus
ccgagtgctgggaagtagtgcctttctataaagttgggtcaatggttttctacccagagatcgccgagcccgctgggtcctgaaaagtaggcaaagtggtgtgaagggttgggctgtgtttttgtttttgttgttcttgaaaaatgcaagtaacaacaacaacaaaaatacagcaatccaaactcggcgcgtgggcgtcaccagagcacttatccagaggctgggcgacctaggtggtgcgcaggcgcgggacagcgggaagcagagggcgtggtcgccgtgtccattttgcaccggcgcagcccggccccagttggctggtggaggtgagcagtgtgctccgagtagggaccgggggccgggagtcgctggccccgctgccgcggccgggggacacctgcgtgggcggtgacgggcggcacggcctggcggcagcggtgctactgtcgcggtcgggaaggtcagcgcgccgctggggaggccccctggctaggagggggccaagaatgcagatctgtgcctgtgacactctttctcctttctctacagtgttctccagttttaccgtcaaaacgtgagggaaaacgaactggctctctccacagaaaatatagtaagcttgccaaaagcatatacttgcctggaacaaaggtaaaccgtattatttttctttatgttctggtatttatgaaggggaaaaatacccgattttattagtcctaggaccattccagatggaaataaaaagaataagtatatcttcaccacctcctttaataatagggcctttgttcttttcatatttcaaaactcatggattcaaaaatccatgcttgccattcatttttttggtaattactatatataatttaaaaaaagtatgctctaaaggaaacaaatccagcaacatttcttctgtgtggtttgtcttagttgtccagctactggggctgtagagcagggctttagattcctgcagctttctagacatttgtatgaggagtgcttttaaaacagaatgtcaatatataggcattctttgtgctaggactcaatggggctattaatcaattatgccccccccccctttttttttgctttaaattacaccttggagtatgctatcacagtctacccgggaactacacctctgccctatttaatgctaagcatcagtttcacacagcctaatatcacctgaaaacaatctgaactgagtaattgtttttcaga

SEQ ID NO: 22789 - DNA, 1144 bp, Mus musculus
agttggcaattacttattttagctagtttttggtcttaatttgtctgttcagatgtttttagatggtggatatgatagaataagtctggctggcttcaatgtgtttgtagttctctctcaggttcttggtttgtatctttagatgtccatccatgtgacaatatactttagttcaagttatggcctcaggattctagagtctcttctgtagccattttctgatctctccttttttaaactagatgaaaaagcatagttgcccttaaattaaaaaaaaaaaaaaaaaggtgtgggggagaggcgggggggtggggggggggaggtgtggtgatggtgcttagtgggagagtccctgcctggggtgcactgcgaggccctgggctctatctgcagcactagaaatgcaagctcacattctccttttctttagttcatccactttttatatgtatgaaatccttttcaatttgatctcagagggaatcagatacaatagttttagctcaatgagttattgtaagaacattctactttttgtaagtacctactacttgctatttgtatcctagtacttttatgatattctgtgactttctgacaaataatttagatctgaacttggaagatgaagtgctttactactgttaaaattttgtaccaaacacaataaacctttcttgaaatgtgttttgtagcttgataatttttagctggttgttgttttctttgccagtaaaaagtttctgaacttggcatccagtagtcaccatttcagccatgccctcagttcatgactagggctgtgctcaaacattgttttacccccaagaaactatagagtgtctacctgacactaacctaagcctcatgtcacagttttagaacaatgggaagtcacaaaaatatccttgttgacagatattttctgtgctataatgccatcattaaagcaaacatgggtatatgtgctgacattgtagaatacttagtgggtgggtaaagggttttgcattttcaatcagattttgactactatattttctcttcaataacaggtagctattgatgaaaagatagcaataaattggagtcttagcattttgtaccttcaaattttaacctgaaaaggctggttgacaggaat

SEQ ID NO: 22790 - DNA, 1164 bp, Mus musculus
taaatagccttggctaagctgtaaagaaaactaaaagggtcatgttatacaaccacagaatggcctagaaccttgcctctaaaagtccagcttggaacacagcagggatggggagtggggctgtttctatgtgcctagaggattaaaagccactgggggagggaaagatgatggggggggggaactctacctaaaatatcatgtttacactgagactgaaaaaactgcgtcatcattatatttaaaacaatggggcatttacactaaatttagaacaaaacataatgctaaagaaacttagttcggggtcagtttttaaggcacttgttcactcttctagtaaccatatttttggcggggggtgggagatggagaagaggttcagtagtcttaatgacttccaaaatttgctagatgaagacagatagcaatggtggttatttacattatggatatatttagtaccacaaagttgaaaacttaagatttaccacaatttaaaacctaagaggaaaaaaaaaacccttactcaaattgaatgttaacacatgtgaaagttttgatttagtatgcagttttaaattggccagtattattttagctcatgaatcacctcttactctgcctgtgaagtgtgtgtgtgtgtgtgtgtgtgtgtttatgtgcatagaataggtggttatgacctgtccgacatagatgctaagaagctagtaagtactcataaccactgagttatctctctggacccgattccacatttttaaagcatacatcatcaaatgcccttgtgaagaacattgactttgccatcttcactcctggggctgtcagcatgcatgcatgtatgagtactcactattctgtccaagttcccaattccaatcagagatggaataaaaatgcacaattaaaacactataacagttgagataaagaaaaatagtttctctctgaaactattccctaccaaaacatttatttttaagatatccttactagaggctggtgagatggctcagtggttaagagcgccgactgctcttccaaaggtcctgagttcaaatcccagcaaccacatggtggctcacaactatctgtaactagatctgacgccctcttcttgagtgtctgaagacagctacagtgtacttatatataata

SEQ ID NO: 22791 - DNA, 1144 bp, Mus musculus
acggaaaatagactcgataaaggcagagtgcaccctggcgcagcctctctgctccttcaaggaggccccgagtcttttcatgaccattaattattcacattttctcttccttccctcaaatacttggtttcctgctcagtgctacagagatgcgtatgtaaccctagtgcccaacaactgttttagagctgtgttcagggtcactctcagagaacatcagcaagcacccatatgttccccagagctgggctgctggggctgaacttcagcctctcctgggtctgggttcatacaacctaaaggcaaggccttgtcttccacctgcttgatcttggctgcaatgcttttcagcccagctctctctcccaggccaggcagcctgccctttgcagagctgcaaacactccaccatccaggcaggcttcagcctttgttcctgctctctgggaaacctttatgcatgctgcagcaggagatggcataaggctgagggccctgacaactccaggactctttgggaaatttagcttccactccctgtcttcctcacacccagactctcctgtctacctgtgggcttcctagaaatttctgttctgtttttatctcctgggtatactacctgtggctctggcctgtggtgccctccagtcactttaaggtgacttaagtgtgagccaagagggcttctggcatgcttgtcctcagaaggaatctggagccagaggaaagaaatgcaaataagtatctgagacacaaagctggtggcttggaatgggtcatggagaggaggaggagaagatggtgtcagtgtgtccagacatgtgctgagcatacagttaggatataggtagagcagagagaggagtttcagatgctcacaggtctctgccagatctgcctctgcctctctgcctctctgcctctctgcctctctgcctctctgcctctctgcctctctgcctctctgcctctctgcctctctgcctctctgcctctctgcctctacctctgccactcttggcagggaactggctctcatgtcttgatttcctttttaaaattcaggccacgatctcagccacttcaagggttgaactgggactaaatgagcttgtgtactcaaatctttacaaactaactc

SEQ ID NO: 22792 - DNA, 1794 bp, Mus musculus
agtccccctcctcaaactacataagcagctaagggccagagcatcatagcccctttgctcctctgtggcctgaggtgtggacctgactacctaaatgtatagatcctttggtctagaaccatctgtgagtcccagagctccatcacatgagcagcatgtgacgagaactgatagtttcagatgatgctgggtgtcaggtagctcaccctggctcctgtggtcccagcacttaggatgctgaggctaagggtggagtgtgtggccaacctgggttacagagtggggcatcctatgaacatagtaagggttaggccaagctcagagcatactttgaaagcatctactttttctccatcccaggcttctttaaaatcctcagaggagagaaccactgtggcattgaatcagaaattgtggctggaatcccacgcactgaccagtactggggaagattctaatctgctttgacttcattgtccagtccttaggggctttttccaaaatttagcggccctggcagggaatgaggtagacaggggagtctttgattctttgagttcatctaacatgcatgaagcttttggcaagatttggacgactggaccagagctgcctgccatcagagctaccctccaaacactgtccttacctggcctcctcctagcccatcccacgacagtgatcacagtctgcatcctagcctctccctagactagtgcggtttgtagtgcctgctgttgtggctctgcctgccatacctcccacccccatccccatcccagcatccgaggacccaagggctttgactgcaggacttccaaaagaacgaacacttcacgagaggacaaatgccacctctcagctgcatcttgaagctggtcacttctgggtctgtggcaggcattcgtcaatggcccagtgcagttctctggagaaagctaccttttcccaaggcatctgcatccatcgacattggtaatgtggccagctctccttggtcctgtcctcagccgatgctttttcaataggatttttatgctttgtgtacctcaaccaagtatgaagagctgtactggttttatagatcacccccaattgtatggcttaaaacaagctacatggtcatggtttgctgtgtgaccgacagataaccacaatgaaactagtctggaaaaaaaaacttgctttttgttgtagttaccacttaaccctgtagtttaacaaggaatgtctgtgccaataaaccaattctccctctgcttgacattggcagggtgcacggttctgtgctgcagtttcaaggcttttgtctctccccctggtttcctgtcaccctcagaaatggttctcaaaaccgtacctgtaactgctcacacctcggagcacttcctcctgcttagagataagggagctacacttgtttaattaaccaaggcgggcactcacatacatatgacccggactgccatcttcttagaggtcatttccctggagtgggggccaaagcttgcgcaccatgtttaagttttctgggttactggatttcatggattttacaaaaatcatagtgaagtacagttcaaagggaacagggagcctcactcatcagcgttgtcctatggatctgttacttcctgctaagtgagagggaggggctggtttctctggaagcccgccttcccatgtcggcaatcagaactatatcaaagaagctctggatgcctggcgagtgctagaagtgtaactcggtttgaggcaacctggcttgggtactggggctttagtactgcaaga

SEQ ID NO: 22793 - DNA, 1119 bp, Mus musculus
tcaccataatgtgcctgcatgttcttggaatggccagcaagtgatacagggagtgtgcctttcttgtggcttgatcccccaagggtgggagaagcccttgtggtctgtgtcccactgcagagcctgaaggaaaaagtcgtttccctcagggttccagcaggacagagttcctgtttcactgggtacttcttgttctcatttgcttcagttctataattatatttaaaattttgaaattctaaaggccactaaggataatcaggtgccctgtttgaggtgtttgttttcctgtcctcactgacctgtccccttataaacagaactgcccttgccacagcagtgtggctagaaacatttttgaggaggcacagggacttgactcccgggagagtgttaaatggttccagtctttggctccaacttggatcagctgtcctagaaagaagagagttctgaaagaccaggctgatttttatgtaatttgaggagggaggagttagtagtcgatgtttatcagagatgacatggctgctctgtggccagctggtatgcccttgtcccttcctgagaagtgtgtctggcttctcttacacagctctctcacatgaggtcttaacatcacctgttcacagttcagcttcgtgataacagctcagctgttctttataaactttcatggaggggccagctgtggtggagcacacctgaagagagcctgaggcaggggcattgtgagttggatgtcaactggggcaacatagtgagactttgcctcaaaaataaataaagttttgctgtgtttatgttgtatgttgataacttttaaatgctcttctgagcttgagataattgtgtagtagtaatgtatttccaaaccagtcagtactgcgtttttctatggatctcgggcttacaaggaagacggcgctgggcagcagacatagagttaaactgaccttcttggagtgagaaagacactggcttcatgggtccttggggaacctgactatccagggaagcggctgtccatccctggcctgtgagttctatagggtcatgcatttctctctggaaccatgaagtgtgtcatccggtgtgtctggttgattgtttttgtgg

SEQ ID NO: 22794 - DNA, 1174 bp, Mus musculus
tctgtgtttcttgatcatctgtaagatagtacagagctacggggccttagtcaaaacctgccagctccaggctgggaatgaaaggggttttgtttctttttgttggtttcctttatgctagaaggccttggagtttagcctagatcgcttctctaacttcttcatctttcacctcagcttcccaagtattggtagctaactgaacattatttggcagcagagcctgatttgattgagagcgaggcttcatttgcctcatttggtttatatattcattcggctgtgttgcttaagaatagttgctaaggaatcctggggtcctaatccaggcttgtggtttttgttttctaaaacactaaaaagtatgatccctgctccctgtgtgacagcatggactgtagcctgtataccatccttaaacatttagaaaaggttaaaggtaatgtttgtgttgtgtttggcatgcagtgcctaatacgttaatagttattaacgttaaccttctcaatgtccaagtctgaggttcatgggttctgaggttctgagttacccatcttaaacaaacctggcttattaagaacaagggcaggactggcaggggtggacctggtagctgtcagctggagcctggagccccagtctgggtgggagtcgtctgtacccttgccctgaattcagccctttgagccctgttgccctcactggagagttaagggtgtgtacatagcttcaggcagcagtgaaaagctgggagactctagggacagtagctgtgacatactgggagtccccggccatgagaactttccactcagagagcagtcctgtcctcattaggattcttcttggtcattctagggacctgttgtttaaggtgacatgctgaaacagaaacgaaacagaagtgctgcggacaagacctgctgcttgtctgtttcgggtgttggggtggagagtgctcccctaagcctgttcttcaaacccagggccattgtccctttgcataccttgagagcagacgctagaccagtgggtcccgaccttcctaatgttgtgaccctttaatacagctcctcatgttgtgctgacccccaaccataacattatttcgctatttcataactgtaatttttctacggttaggaattgtaaatgtaaatctctgctttttcaa

SEQ ID NO: 22795 - DNA, 1326 bp, Mus musculus
atgtgagaccgtggggggttggggggggagacactggcgtcctctgtcgcctccccccccccagttggcagctgtgagagctgccttcccttccctgccccacgtgttttctcttctagggcagccccgccctaagctgctaaccagcgagggagacatctgcccacttaaaacttctgtcccaggtaaggagcacctacgagtataatcaccaggctctgacaaatgtgtatagaggtccagaaaaaggtgagcttagactgtaaggaagagcaaagcttcagcagactcaggagagatagatgacagtgaaagtagagatgaaagagattagagaggtccgagatgataccccgaatgagaaatatttagagtagaacgagtaagaggcagagaaggcgtattacaagagaagagagaggggggggggcaagaggcagaataaagagaaagccggagggatcgtagacaagaaagaaatttgactagaaacttggccacagtggtaggagagaaagaaaagacaggatctagacaggaaacctgggcaactgaagaccgagcctcagctaaagaggctcagctgtgtcagactgaagttacttatttgggatatacccttcgagatgggaagcagtggctaaagaaagccagaaaaaagactgtaactcagatccccaacccaactacaccaaggcaagtaaaagaattcttgggcacctctggcttctacagactctagatacctgggttggtgaccttagctgccctgttgtaccccctaaccaaggaagggaaggtgtttgtgtggaccccagatcaccagaaagcctttgaagaaattaaaaaggccctactgacggccagtcttggtctttgcctgacccaaccaagcccttcactctttatgtggaagagagagcaggggtcgccagaggagtccttgctcagactttgggaccttaaaaaaggccagtggctgggctggtgagatggctcagtgggtaagagcacccgactgcttttccaaaggtccagaattcaaatcccagcaaccacatggtggctcacaaccatctgtaacaagatctgacgccctcttctggagtgtctgaagacagctacagtgtacttacatataataataaataaaaatctttaaaaaaaaaaaaaggccagtggcttacctatccaagaagttacaccctgtggttttcttgcctgaaagctattgctgccataactctgcttgtcaaggatgctgataagctcactctgggacagcaaataactgtagtggcaccccacgctcttaaaagcattatc

SEQ ID NO: 22796 - DNA, 1470 bp, Mus musculus
aggagaggaaggtggctctctgaaagtttgtggtcagcctggtctacatattgagttaagggctagccatagatatgtaatgagaccctgttttcaaacaacagaccaaaaaaaaaaaaaaaaaaagtattgctctgacgctgtgccttttcttttgattttattttgtatttttttgagacagggtttctctgtgtagccctggctgtcctggaactcactctgtagaccagactggcctcgaactcagaaatctgcctgcctctgcctcccaagtgctgggattaaaggcgcctgcctttgccttccaagtgctgggattaaagatgtgtgccaccaccgcccggctgtacctttcctttggttattttcctgtggtactcttccaagccgtgtgcctgctcctcctttttctttaaaggttggtttctgtaattgcacaatacttggcaattttagcctggttacttcagaaatttacatttcttattgatgtctttatttctaattcccatactttaagatgggcattaacttaaaacgctctttgggcgttttggtttctggaactcgatttgtgattcagactggctttgaatgctgagcctcctggctgctgggattgcaggtgtgagcctccaagcccaattaaaatgcattttcattacaaaatactttatgcagacaagtatcgaaagttacatataacaggccactgcatcagtaatctgtcatatttacttcattctcttcatatatatttaagaagttaaatattcataaacacctaaaacagtagactccctgcatctgacattggcctgcctgccccattctcttgttcacctggctttttcaggctgtctcctcacactgtgggcttagaactgtggacacctgtctgggatctttttctccgtctttatgtcttgctgaaagcctctagaaactgggattgtgtgccttcccttagctaatgtttattagttcttggtgtgtgccaagcactattttacatacctcccatctgttatgtaaacacccagtaaccctttgaggatctgttttcctgttttgtagctagggcttagaggttagtgagttacttaacatcccatagctatggtgtggcgccctggaatttgactctcacaatctgactacagagcttgttcagtctatcttttttaaaaagattcaattttttaaaatttttttaaaaaattttctaagtgtgttatgtgttacagttgtctgtgagtttgtggcagtgagtgcagtaccttgttgaggccagaagaggccatcagatgcccctggagctggagttataggtgattgtgaactgcagacgctgggaactgaactccagtcctcagtaagagcagtacttgctcttaagcactgagccatctccccggcccctcctgagctctctatcccagtatgctgtccatccttaaggtagtg

SEQ ID NO: 22797 - DNA, 1200 bp, Mus musculus
taagctttttaatggccactatgccttaagatctccatgttgagatccaggtcagaaacctgtatcttccaggctcaagatcacaagtgtgccctccatttctggattgtagtaatcccagatgtggtcaagttgataactaggaatagccatcacagatctatatatacagcctggtggtggtggagcacgcctttaatctcagcacttgggaggcagaagcaggtggatttctgagttcaaggccagcctggtctaagggagtgagttccaggatagctagggctacacagagaaaccctgtctcgaaaaaaccaaaaccaaaaccaaaaataaaaaaaaaacccacaaatctattaatacataacagccagttgtgtgaacaacaaagtaaactctcccctatctgatatacctgggaagagcatgaaaacatattccaagaataataccacgttttgaagaaactgaggtcacaagactcttgtctggttttcttggagttttctcacaagcactcagaattgtcctcgaatgattccattcttggaccatgttctgacatgataggactgtcacaggccttctgatgtgatatcagtatgacctcctgacagagggatcacgttgtgtacctggcacactctaaagcctacagagcatctagaaggttctgggttaagtcatgctgggaatggttgtcctgcaggccattggaagagagggaggagaatgcccactaataggtactgctcttgggcactggggcttctgatatcgaagcagagtcaggtatcaggtcagctccaggctcttagaagccaagagaaagaagcaggtctctgctctggagaatagattagtgaaactgtgagcatttccagctgagacagggaatgctatagttcttagtacggggagggttattttctgcccacaggagagcaataaggggcaccacaactggctgttaaagcagttgctattggcaaagctgtgtgcatatacaaagtgtgacttgcctgccgtgagtatagttcatgctgaaaagatgtgaaagtgctgtgctctcatgggagaaccagtggagtctgtttctgtgccagaaggatgaacaaggtttccagcagtggcttttggatgtgcgcagagacctgactacacaatgatactggtgagagccagtgtgagtcaataact

SEQ ID NO: 22798 - DNA, 3167 bp, Mus musculus
tttttcttagtactattattaccggtacgggttagattttcggtgcctgcgttatcctggaatcatttctgcagattcccagcctggaggaggaacaactggtaggtgaaatctccagtctccttcatctttaatttctcttgtttcagggaggccctgcttagtccacaaactggcttagcttccttgtatttcaagagagacgggaaagttgggagtgtttttatctccctgccccccaaaatgcagcaactaaaaaattttctcatttacctgtacataacagtaaatcttaatgtagcctatctattcagatctttcttgggaacttaacatttttagtagtctaaagaggttctgtattaagaggacgggagaactggcatctcagtcctgacccacctccctcctgctgagaaaacccacgggccgggattctcttttagactacgccgtccagattttccacgctgcagcaaagaacggcacattcgagtgcaacctcgaggctggcaccaggctcccaatgatgtacatcagtgactgcctcagggccaccctggaggtcatggaagcccctgccgagcgcctgtccatgagaacctacaacatcagcgccatgagcttcacccccgaagagctggcccaggcgctccgcaagcacgcgcctgacttccagatcacctactgcgtggatcccctccgacaggccataggtgagcccgcacgccagtccactccagctccaaatcgccagcctagtggggaggctttaaggctgaggagctgcggtggtccatccgcggatgcttccgtgtgggaaacaggtcctcgggagaaaggttccagctcaggagagagtccgacccatttcaccattacctatggtctgcaacacccttctggataaagaatgtcccttttcaaagctctggggtgggggaggggggttaataaccccagtgcaggtgcccagtgaaagggaaagaatcagctcaggacccccaagaccaagttctccgcacaaaggagatttgccctagaaggacagagggcagggataagggacagagacaggagatagaaggagaaggtgaatggaacaagggagaagagagaaaatgagcaagggagagttataaaaggtgtttgctccagaggacaaaggtttgcctctggataaagaggagacacacatggcacattggaagatggcggtttataagggtaaaacgggaaactccgtattagggttgacgtgtttaactttaattgggtgagctaagggtggcttctgattgctggacttctgaactttgatagctggacctcggtaatcagccttaacaaggaggaattggccaaataagggaatagatcttggtgactagctttagtaacatagagagaagggcaaggcctgccagagccatgctcaccaggccagagttccttcaccccgtgtcttcagaagaggtggccttgtgtgtactagttctgctccagtccaagacgagagaagtccctctctcccttcacataaaatttgcctacccattcacaaatccagagtctggataagccagtgttctcccccatgtctttccccagcggagagctggcccatgattctagatgacagcaatgctcggaaggactggggctggaagcatgactttgatcttccagagttggtggctacgatgctcaacttccacggcgtcagcaccagagttgcccaagtgaactaaagaagaggagcggcccctgtgtcctcaaagtgcagggcgcacggcagtctctaagttggagagccagactgaattctagcctctcccaggggacagcttgcgtggggttggagttcctttacacactgcctttgtcctgtgcctaaattggtccaagcacaaaggccagagaaatgaagtcctgagtggtggtggctatctctcgggatctgcagcatttgtatttaattaaattcaatttaagtatcactcctgagacttattctcttgcccagagaccaaagattacatgttagggttttcaaagctgttcttcatgtttaagcctggaatactaattaaaaaaacgatcgcttgcaacttgctttttacttaggatttatctaggtgtttacgaatgtgaaaggtgatgcagttgttaaaggggaaggggctctaatggattctggttccatttggggactgctagaaatctcagtgatgtctatgggactttaattccctggcctggtgatatcggtaacctcaggttgtttgaagacgcaagtttctgggcttcacccccttcagactgacacggcaaagtggaataagctgactaaggttcagcccttttagggcccaagtgcagtttctaaagagtgctctcctgtggtaggagtgtactcaccaacagtagagaggttgctcaaaccctggtggctacgccttactaccttcagaaatcaccaataaggggaactaatgttctacagctataacaaaaaatagctgggcttctgctctaggttagtgatggtaaattgttatccatttttgttttaaactcctagtgagtggcatgaattttttttctttcagtcttaactggatttgaattttttttaaacaagagaacttttagataatagaatacaataatggctacaattgtataacttatttttcatacgcttagtataattaagcttacattgtggattttgtttcctaaaaccttttttaaatagatttattgagacagtatatataccttaaaattcttgatttggggtctggagaaaaggctcagcacttaggaaccttgctgctcttagagaagacctgagttcagttcgcagcatctgattggtggcttataaccttctgtagctccagtcccagggaacatgacacccttttctgatctctgtaagcactagtacatgcttacatgtacatgatacatacattttacacacaggcaaatactcatacatgtgaaaataaataaaaccaaaaattaatttatgttgttttccagtatattaaagttgcagtctttttttttttttttttttttttgagacagggtttctctgtttagtcctggaactcactctgtagaccagcctggcttcgaactcagaaatctgc

SEQ ID NO: 22799 - DNA, 1212 bp, Mus musculus
tgtaccacagctagactttgatgtcagagtgagccatttgcaaatctgtcctgtgttaggcaaacaggattgcgctggagtggggagctaggaaagtggcacagctgcttgagaccgtgctgtgtcagcagcagggctgcagtggctgcagtggtgcagtcagctctgggtgctgcacccttgcatgcctgtgggttggtgctttccagctgcttgctgttgcaaatgctgtcatttctagaaaagcatacttgcagagtaatttttaaaaccatgtcaacttcatctatatataataattttcctggcccctctttgaattgtgtatcaaggcaaaaatagaacctctgtgggtggcacccctctaatcccagcacttggaaggctgaggcaggaggatttaagtttgaggccattctgagctatgatatatagtaggttcctggcagcctacctacagagtgaggctaacacagagtgtgtgggccctgctgaagcactggaaggtgaccactgttttccatctccagttgccctgcctcctcttccttcctctttcctttgacctgtggcagaaggccaggcaccagtcagcagtcccgaatctgctcgtgggtttgcccactggtacttctaagctcagctctactcttgacctattatttggctcgttgaggagtgaagcacatgcaaggctgtctttctgaaggcctagtttatgtgaatttcaaagaagaaattgcctggattccttggggctgctcagtcaccagccccatctatcactctgccactgcccaggtttgtttctctctctctctctctctctctctctctctctctctctctctctctctctctctctctctttctctctctctctctccctccttccctccctccctccctcctttttttttttctgagccatgtgtgaagtcctcaacttctcagctgatccataagaaaaaccatctagagatttttttttcctttgtagttcttaaaaagtgattcccactgcaatggaccagtcttaaggcttctgtgcacagagatgtgggaaaattattatgtttggtcagggagagctctgttgcaccctcgttgtgcttgtcttcttgatgaacactcgctgtgcattcctgagtcataactcctgtattccagaacctttgccgttttctgtctcccatgaaaacagcagtcatc

SEQ ID NO: 22800 - DNA, 1168 bp, Mus musculus
cccaggaaattcaaaccctggctcccttcttattttagacacatccttcaggagcctatggttcccccttaccccatgcttttcataacatgcagtttgattcctgccaactttttgtctttaatacacatctctcaaacaagctctagactaaactacattttcaccattttcaatggtatttatcataccataaaacttccttcttccctctgctaccacgggcatcttcattcttcaaatgccatggatccctaacctctacttcttgatttccaagtgaccatttataaaagtaagaaaaagaagccaaacagtcaggaaggaaaacctggttcctgcaggtggcctcagagaccaggccaggcgttaacccagagcagtgcacaagccaggtgaggagttccccagcactatcttaggcacacagtgcccaaatctattatatattaagtcgttagtcaggagatacctattaattaatgcacagtcgccaaggtgagctttaagcaaatcagtgctttatttttatttattcttttaagatttatttgctgggcgtggtggcgcatgcctttaatcccagcacctgggaggcagaggcaggtggatttctgagtttgaggccagcctggtctacagagtgagttccaggacagccagagctacacagaaaaaccctgtctcgaaaaaccaaaaaaaaaaaaaaaaaaagatttatttatttcatgtatgtgagtacattgatcctatcttcagacacaccagaaaaaggcatcagatcccattacagatggttgtgagccaccatgtggttgctgggaattgaactcagacctctggaagaacagctagtgctcttaaccgctgagccatctccccagaccattatttttattttttaaaacaatatttataaatataatttaaaaaaaaaattaaaacacctagactatgttaatctactagaaggaaaagcattgccagctgcagacattatactaacacacggacaaaataaccagctcagaacaaaaggagctgaaccaacagccagtgcacactcttaacttgaggcacgaataacccaactccacctcactcatcttcaaagggaagagaggattttcacaagtaaaataaagggttgtgtcagttcttatcaccc

SEQ ID NO: 22801 - DNA, 1102 bp, Mus musculus
aaagtctaggtttccagcaagttccctgagctgtcctttgggtggaagggagtgagaagataattgtatcatctgattcatacagtatttacagagtagtttttaagagaaaggggtacattctaggtaacttaaggttgtttttataaacttaagccctgtgcaaatttttatttttaaaataaaatttttatttttaaaataaaatttttattttattttattgaggtagcatcattgataggggctctgtggatggttttagcaggttttacaaagatttattaatatgtattgtgttttaatgtttaccctgtgttctgtgtgtgtactgtgtgcttgtacagaggccagaagagctggaactggagttacagaaggttctaagtcactatgtggtgctgggaactgaaggtcttcagcaagagaagtcagtgctcttaagcctctgtaggagatttataatggaactttatttaaacagcagttggctagggttttttaaaaccttaaatggggttggtgaaaatgttagttatgtagtaatgaaatattgctggggccttatagtgtgcttaagattctgaacgttgttgtggggacatttgacactcacatgcagaaacattactctgctgacttagaattttctttggagttttgaaataagtcaggatctttatttaaacactatggcgattctcattctggaaaaccacaagctacaaatatcaggactgtggggggaaaagagcaagcagatgagctaaaactgtcaggtgtctaactagaccagtaataaaagtcatgaagctcagatacgtagcgtagtaaggctaactttccatagacctttctttgggctgcatgccttggtgattctaggtttcattaattctcgtatgtggaacccttttttaaaaaaatcaaaactgtgtgtgtgttcatgttctcacatgatgtgtgggaagaggtgcacattgctatagcatgcacacagaggtcaggcaataaatgttgggacttggttcccttccatcatcatttgaattctggggattgagcacaggttgaaagacttgtcagccgataaaggggtaat

SEQ ID NO: 22802 - DNA, 1165 bp, Mus musculus
ccttgcaagagtgctgtctggcagcagctgattattctggagccctgggtgcgtttccctctatgccccagcctcctgggagtatatctgctccgcagatacagtatctgcttagctacaactctgagtgggatgggtaatctagcaacacacctgggtattatttggaatcagagatggggagacctttcggtgtttcagggcagaccattgtctttaaattttctaaagctccttagctgatagcaccagtttatttcaatattatattggtagacatttttcttaagatcttatatggattctttacactttggcagaatcgcatagattccctttatgtacatagaagaagaaagatcttgctaaatgcggcagcccatgtttgtaatcccaccacctaggaagctgaataggaagatggtgagttcaaggtcagtatgggctacagagtgagatgccatcttaaacaaggactgagtgtagttcagtggtggatcctgagtttgacctgcctgatggaggttgtgtgtgtgtttcattttaatagtaatgtgttaatatatttgatgactactgctgtcatttgcccctataatcctgacctctgattgtcagttatacccccttctgtttagtgtttttgagtatggtctgtgctctcctttccagtcaggcttctgcacagccagacttgtagatttaagccagccttattagtcattatttctttggctgatgggagctatcaagaactttgaaaggctaacttgtgtttttttaaggtaaggacaaatgtgtatataaatggagtatgagcaagcttaaaaatagaaataaaataaacttcttgctgggagattatcaaacagctcttaggtcaacagctttgaaatgaggttgtctgattaggattcactttccagctgttccattgtgcttgccctctgtgcttcctggtgtagcatgggctttcagggaacattgtgtttacatgggtggaatgaaattagattgttctctggatgatcatgtactgagttaaactattgtcactcttaaatgactaaaaagtaagaaatcacagaaaattatgttcaaggttgcttcttttacacagctaatatgtagccttagaaaatacatttctaaagtaaatgtaaat

SEQ ID NO: 22803 - DNA, 1218 bp, Mus musculus
gggtttaggtttctcactccaaaagctgcatctgttgttcctggctaaatatcaaaagatatgaacctgacctagtcccagctttctcccctgcccacatgggtctttccgctttactcaactcccaggcatcatctacttctttctctctgtacctttctttgtggtaactggcaggacacagcaggagtgttctagagccaaaggtcatgagtgctattaatgatggctccagagagcagcagacagactgtctctgcaggagattccccttcttcaggccagcacctgtgtcaagggctaagaataggagcaggagcaggcaaggacctagagacacttgccctgggatgcccctgctgcatggagaaaatgtgtatgtccaggtaggagatgctgccctggctggtctccagcaagaatccctagccccctcctcaaactaaagtcagtcagcaatctctgttcctgccttcagggaggatggcttctagaacatcaccctcaaatcaaggagggaagatagatatgacttccctcttggtgactgggaaagcacctatctctctgtaacctttggccatttgtcactatggatacagatgagcagttggacatctgactctaatccatcctcaatgtagacctggggtcctcaggcttggaggcctgttttaccttcacacttcctaggtgctctgcctaaagccagaaagaccaggaagggccacaggctgatgcagggctccactgtgattatgaataactcacctcttggtgccttggtttctccatcagtaaagtgggcagatcacggctgctttccatcctgctcagaggtgctccagtgattcagtccgttgcctgtactgaaggagtctcataggaataagggtgaccctgtttctcgggaactagaagtatggaaaaggaggagattgcagatacacttgacacccaggagcccagggagtgagcagggaggacatgtcgacggagatagagccttggatgctcacatgtgccacagcaccgttaactcagtatagtagcatccgaccagggacatctggccacctggcacctgctgggcatctgtcacttcttaagtcccttgatgttagtttttcctgaatgaccagataaaatacaggggaatgtgcttctggaaatggctagtcacagcatgtctgacagacatcagatgggattggcaaa

SEQ ID NO: 22804 - DNA, 1403 bp, Mus musculus
tagcagctaaaggtgcggcggtggtccatttcccgtaggaagtcttggtagggaagagtgactgaaaggcccgtgagccttcagtccttaacttggattctggaggatgagcctgtggggtcacctgcatgacttgctgctggaatccacggcacatcgtgttttattgagctaccagccgtcatttattacttaagttttcttttcttgtttctcatagtggacaactgggctttgtccacttgtattctttatccaagaggtggatatgaagatcttgaagcggttgttcaagagagtgatggcaagggtagggtggatattcctcggatattggatattccttgtttatctgtaaactctgaattctatgtcctggtagcagattccgttttccaccgagggcctaggcaatgcatcccattccacatgctcttacaggttccttatgacctcttctcctccacctgcccgtccccaaccttgggtggctttgattttcttgcagccaatagactagctgtggggatgctgtggagctctggaagctgtatgagctagagcatttgcttggagccttgaggtgagcagtcatctgccttgaactgctcagtactgagaaatccaacacccacatggagagcccttgactttgctaatggcaggcaaggccacagggaactaggaatagagacaggctttgaaggagtctgtgcttctagtgcacaaaagatgtcaaattcctgtgccactgggatccctacttgccagtgcaactgagtgagtagtctttaagtcggggactaaaggaaactgtgatgaagatgctaagatgcatgctgagggaatggctgtaactactctctaaacaggcaaagcatctatctgtccgctgtagtagatgtgtgtctttggctttccttggtaggcagaaaggctggtagttttccatgtttgtgtgtggaattgcatagcctgatgcttcttccatttctcaatgtactgagtatgctgtctcctggatatgagcaactctatctgcacacttttgcatttggacttgcttccttgtgcttcagtgcctgccaacggcctgaggatggaggagacacctggaccttgtggctccggggagcttgtatggcaagagtagaatgtgggggtggaattggccatgggggtacttgcttgctctgggttcagtgcgcaggagaaaccattgcagtgagcaagaagcattgcagagccgcttttcctatcgagcccagcctttgataaaaggacgaagagcaagctattgacttttaggtgtccgttctatcagtggtctgttaatcatagaggataaattattgttcctcagaaacgggaaggactaccttggcttgaaggcagttgtgcct

SEQ ID NO: 22805 - DNA, 1200 bp, Mus musculus
gtttttaatatccacaaactgcaggcaacccaaatgcccatcactggggaaatgcctaaccgaatggtgacacagccatactcagccacaaatagcatgcaccatggaatcaaggaacaatatagataaaatccaaatcttaggttgagtttagaagtcaaaaaaaccaacaacaacaaaaagactacatactgcactcatttggctagagatcatagattgttttgctgagggttgaattaacatgggatggcctggggattcaagggatctctgtgagtagttgattatgatattttcattggtgcatatattcttaaactcataaaaatgaatatcttaactatgggtagttcattgtgtatcaactatacctcaaatacacacacacacacatgtatatacacatgtgtgtgtgttgaaagctcaaatcagacatgaattgtaaaaattattgcagcaagccaataaagtgtatgatgtatgagatcataagaaaacaagaaaaaacacaaataagccagttaaaaaataggcacagagaggtagcacatgatacaaatgacaaacaagcttgtctacggccatactaccctgaacgtgcctgatctaggaagctggttagtacttggatgagagacaaagaggcttgactacaggttattccgcctcaacaaaatgtaaacacacattctgttcattctattcactgaaaagctacatctatagatcatccactgggcatcattcttcagaccagggatgctctcccaaacatacgaaccacaccccagcatcctagtcacaccttagcaccctaaccacactcagcacttagcccctcattcttctgacttcagcatcccaggtggtacctggcatgtcacggcatcagagatatctgtacaactaaagccccattccacacatcagcatgtccttgaactgtatcctctctcctccatcatttactagaatatttgcatatctcatccattacatttaaattactctagtccaggcaaagaaagcgtttttctaacgttgttcctggcccagaacagagctccacattccttatgtaagcagcatacctggctttctccccccagtgcacatccctgcagacttgcaggctgctgtttgccttctcagtcaaaccacggactctccatcctgctcccagaaccatattccact

SEQ ID NO: 22806 - DNA, 1176 bp, Mus musculus
gagagatggacagggctggtgagatggctcagcagttaggagcactgactgctcttccaaaggtcctgagttcaaatcccagcaaccacatggtggctcacaaccatccgtaatgagatctgatgccctcttctggagtgtctgaagacagctacagtgtacttacatataataaataaataaataaataaatattagaaaacatacctttaaaaaaaaaagagatggacagttgtctccatattcaaacacaatgaagttgggtatgaaggctcatacctggagtcacagcattcaggaggattgtcacaagttagagcccagagtaggattgtgggggtgggaaaacctgataagctcagttggtaagacacttccctagcatgcctgaaaccctggatctggttcccagagtgtgcagtcatagccgatgataggctctctgttggagaggtggaggtcagaaggtcagaaattcaaggccatccttgggcacacagctagtttgaggccagcctgaactactgagaccctgctttaaatacatcaccaccgggctggagagatggctcagcagttaagagcactgaccgctcttccagaggtcctgagttcaattcccagtgaccacatggtggctcacaaccctctataatggggtccgatgcactcttctgatgtgtctgaagacagctacagtgtacgcatataaataaataaatcttttaaaaaaatacatcaccaccaaaacaaatccccaaaaccctggtggctcatgcctttaatctcagcactcaggagacagagacagaggatctcaataaatttgaggccagactccagagtgagttccaagacagccaaggctacacagagaaatcctatccagaaaaaccaaaaaggtaaaaaagaaaaagaaaatgaaagaaaaagagagagagagagagagagagagaaagagagaaaccctaaggttaatgaatgccgagagaaagtttcacctgtgctcatggacacaccttgtcttcctctctgctcttcacctggaatgctgcccttgtgccttcctgcctcacctgagggcagaagagaatggaaaatgttcacatggctgggttctcaactgacaccggcctcggaagtaattttccttcccaaactgggatttgtttccgt

SEQ ID NO: 22807 - DNA, 1103 bp, Mus musculus
gctgcatccgtttctatgagaaggtcttgagaagtggcagtgtaactctgctcatctgggttcacagagcatctccttcagtttctgtgctaaagaatccctgctctagagtgggcctccttggttggtattttagatcacaagtcagccattatctctgggttgttcaaatggctgactgtgttcctattactttatatgcgatgagggtgctgtgcttagggttcagaggccaaggcctttaggatatagaggacagcatgaccttggggtagaaggagagaagctcgagaatgaaccccatgtgagtaatacaaagtcagaagcctggttggctatgagcatttcccatgtattgacctttctaatctccattattatttatcttttgtagatgagaaacaggcacggaaagattaagtaacttgcccaaagtaaaaactagatctgtcctgctctgtgattccagactactcactcagcacaagagcaccctaatgacaccgtgaggacagttagtgtgtaactgtagatgggacagtgggtcagaggctgctaacacgatactggccaaagatggaaaggctctctgaatgccaagctttaagaataggtgaaggattttccagcccagaaatctatacatctcagttttcaacttagacaaaattcatgtaataaataaagtctgatgtttctgagtagattttttttttctagcagtttctgttctctttgtgcctgttatcatctgtttctgttatgacttcctccctggccaaagaatgctttttgggggtaggattttattattctttccaactagtgtttgtgcttacaccaccattgtcacctgattggatagggactggtgcatttcctaaatgtgcagtctggtgactctgtcacggccatctgatgcttgtacaacatgaagcaaaggagccttttgagatctggtttattttctggccttgtgtatgagaatgcatgccagtgtaagatgggagaggctgtgtgaggtcaggggtgcactaatatgcagacagcatcccagctacattgcattgactccactcctcactcctcactcccatgtaaat

SEQ ID NO: 22808 - DNA, 1116 bp, Mus musculus
ccaagcatattcagaccaccgcaggtgtatacaaggatgagcaaaaaagcagaggcagagccattaggggtcctaagttctcagaactcaagtccttcctttttcctgttggggagagtcacaggttagtcaggttaacctgttccctcccttccttcgtattaatttacctttcatttactatttgatttcaaaagtagtattttctctttttcttttttatcccctttttcttttaccttccctttctacctcttctcgctccccttcctctttgagacagaatcttatgtagccaagactgatactgaacatgctatgaggctcagactgaccttaaactcctaatcctccgtcctccactgctgagtatgggttataggtgtgctggcctgctggtatttgttttcttattgcaaagtttacattcattatcttttgctgttcaaaaagaattttctaaactacacttttttttgctaactctcattccttttttttttttcatgtgcatggcaacattgctgtctggaactcaggggccagccaaaggtaagagttctacacatgatgcttgtagaaagagattcctgtgcttattcctgaagtactggacattttcttatcaaaactgaaaattccttcttcctgccggtttataaaagcaataagctgtcatctgtctcacaactccagagctgcttattggcacagtgtgttctggccagctctgcccagtctcctagcagcctaacatgggttccttgtgtgctgtggattagcatgaaactgattgttccagactggtcactctgtgccagtccagctcatcttactcctaggcagttggggtactttgccagacccatgggctcccgatggagccctgatgacctgatgatgggctcctgctgcttctagagactgtgcttgcaacttacattggagccaaaatctgagactttaaaaaaatttttaattacatttttttttttttttaaaaagagtcaagtccttatttttctgttactatagtgaaatacctagagctgggttctgacttccttcttttctttaatttatatgagtactctgcagctgtcttcagccacacca

SEQ ID NO: 22809 - DNA, 1239 bp, Mus musculus
agtggtggcatacagccttatcccaggatttgggaggcagaggctggtggatctcagagtttgatgccagcctggtctacagagtgagttttagggcagccagagctatgtggagctaccctgtcgcaaaaaagaggaagaatggaaatttgtcactgaaaaaaatgtgtgtctgagataacatggctatttttaacaaatgttaagatttaatggaaaataggaagcatgaaagcaggaaggaaagtggtgcttccctgcccacctgctccacagtgtccagccgcttagcgtggctcggtcatgcatgctaccccaccctgacccctaccccaggagcaccttgatgccaccctcgtatcagacttcacctggaagcagcatgtggcttcaaaatatgggtacttaaagaaagaggatcatctgggtgtggtgacacacgctttgatcccagcacgggaggcagaagcaggcagatcttcgtgatttctagggcagccagggctacacagagaaaccctgtcttccccagagtgttgagttcagttcggggcaccttccctgttctgttaattaagctttgggacattgacactggctgaggaaaaaaaagattgaatagagagtattactctattcatatacttcctagcctacacccagagagagagaggggagagggaaggagggagggagggagggagagagagagagagagagagagagagagagagagaagccctgtcttgaaaaaccaaagaaataaaaaataggaaaaaaatttaaaaatcagtcaatcaaaatagtaattcctttaaggccataagccgtgtagtcagcgttcttaagtgtctttggtgggattacccaggtttcttttatgtccagattctctctctcaccttgagatctgcttgtcgtgcctgtgctgtcctgttgttctgttcattgtcattgcatgtcatgctcagcggtgctaggcccaggttgggagtagcaaggcataatgtaccatagagtaggaaagcaagagtgtgatatgggtggtggtgtgtttttatttcaaaattactggtttgtaaagttgtcttcatgtcataatgaactcttagatttaagactttgactcctgggtattcattacttttatcaaagctccaatgttcctaaatttgagtggtggcagtcccttccgttgccccacgaacagtagacattttgcctcatcttgtccacatt

SEQ ID NO: 22810 - DNA, 3559 bp, Mus musculus
ggaagctggaagctggatttccttcctctgcttggcagtggcagaggccccttagctatgctcccctggttaggggtggaaggttccaggagcccagagactcgtgggatggagccagcccagctcctccctgcctgcttgaggatgggggagggggttcccagccagatgtgttgggctcccctttccttattctgctgacttcactaatgtcttaatttaagcaatgatcctaactggtgacttgccctcacagactggacttcccctgcctgggcccagcacgcacactaccctctccgtgcaccggagattatcagcctcccctgggccacacctcatcctgctgcacggctggctcacagggtttctaagaggcatctttgtgggtgtcccggtgtctttacattcaaaatcttttctgctggccattcatttcctaacaggatgcttgaactatatttatttaatttatttttccaaaagttaaaatacttcacaatccacaatcgctgtctatcccaacatgcctgcctgtgctttctggcctctggctggccagagctgcagcctctatcttggatggtggttgctggaagtggcagccatcaaatgaaaccagctgcccttgtgttacttgattggagacaccatggctttactgaccctggtgggaaggctgacccagggttggcacggatcgagccttcagtaccttgtctggatctgccaggcttcagggagctggaaaatgttttgactctgcctgtgcctggggccagcagctggccaggcaggtagtgagggcagaaccatctccatttccttctgtggatctgggctggagtcatggtatatcccagggcattaccaaccacctgtttgctgagacgtgcatggcctttgagtcccagagtgttggtggagggctcagtgggtagatcagagtcacctagtccctgttgtcccaggccctgccctgccttccacctcaggctgtatcagtacacaggttatccttggcagtttgtttgaagtttgactctcagattctcgaagaaccacagctaacaggtgtctgtagaggaattggttctgtgaggacttaagccttttaaaggaagtagctcctgccaggtagcttctcagaacccctcagcctcctctggccattgtggcctgtgctagtattgctgacactcagtctggactgtctgcattgtctgattagcccagtataaacttcactaccatctgcttgcccaaaccctgaccagaggctgcttagagcgctaggaggatgggtggccttcctggcacaggtgcagactctgcctgcaccccagcctgggagtcaagtgtcactccacttgtcaccacaatctgccaggagagacctgcctctgttccattcttgaatagcacagatttctggagctgccagctagaggcaggcaccaattcagtaactcctctccctcagctggcatcttgggatacgcaccaggtgagttagcagtgccagtcctgcctggccactctatggaagcccacagtgcttctgactgtgttctagtgagagcttttctcctgtcagcatccacagtgtcccctagagagcagtgtcccggagtcccatcctctaggatggccatgcaatggctgctagggagagaagtccctgaggatgtaatgccagtcgtgttaatgctgtgggaagggacattgtgccacctgtcactcggatggtgtaaaacgggagaaagttactattgacttcatctcgctatccggagttctcaggaagtcctgaggatctcacttggccagctgtcatcccgtggttctgggaccactgtctctctcccagcacccccttcccttccctccctgctcattggatctgaggttccctagcctttctatttccaggctgcctaagaaatccccctgcctctgaaagtaataccatttccacagagccttgcaggatactcttcatgtgaagcgctccagcttcacaggcaactggccaaagcacatgggtcctccagtggctggagggtgttttgtgagggcagtctgtctgtctgcacagaaggctctgctctcatgcacttggtgctcaatgtggatgggatcttttgggatctcatggcacacatagcaagtgtgctagaagtttatcctcatgggtgttccttatgagttgttcctgtggccgagaggaccctgtgttcctgtctgctttgagggcagggaggtgaccttgggaaagctggcactttcgggtgggtccgaagagatggggctcaggtgcttgctggtcttctgggtttgctgagcacatattgcactctgaccttcatgttgcctgtgggccggatgaagacagtgagctgtgttcttcctgggctctcatgccagaagaggctagacaggccagctgtagcttcagctctccactgactgccttttggagcagactaacactaacttgcagctggaaacgtgatgtataggggctgtggttgttaaaatgtcaggtagtggagggtaggtggtgggtgtggggttaggtgcccatgtataagggcagagggccagtgtttctgggctgtgtttagtggcatgtcccctgaggagttgcacatggtgtttccatgttttcagttttctcaaccacttatcatgccttaggggttctgtgtgggaagcaggtgagtgacccatgtagcatttacctgtctgtccaagctgcctttgctacgtgttgcccatggatggtgacttgaagcttctagtgcctcaaggcccaggccacctcaggtcagagaccatagggccatctctagtgccttccttgggaccagtgtctagcctgtgcttctagtcccagacactgcccaaaacatcttagtctatatgctgccttccttttgtgctgtggacaaaaattgggaaaagcacggctgtgtggattgtgtaaatatgagctcatatctgtgatgttgattccaggaatccagtgatttggtacatgttaaatgggaattaaaaatccaaagaccctgtaatgaatagtaaagatgatgatttatgttgtatgaggaaccaaactattgtaattttgtaccatacatacctttccatcaagtgaccaacagcttctaaataaatccaggtgatttcttgcttatgtccgaggtcaagcataactgttcttgcctatcctcaccctgggcttcagctgactacactgtcccttggtggtggtcctggggtttccagagagcagcaagccccagggcacaaacttctgtgacccccctagatgtggatcaaagaccctggaagtccccattggcatcttggtccctgtctccagtccctcactcatttcagccccttatagaagccaggcagcatcagaaactcctgggggactgagactaaaaggaagtggagcttcagggctaagaataggtggctctgtgtgtgtgtgtgtgcgtgtgtgtaggttccctgatttcagacagggatttcaccatctgctttg

SEQ ID NO: 22811 - DNA, 2760 bp, Mus musculus
gaggtgagcacttgtggctgctttcagaaagcatccccttatcatttgccttgatgcctacattgactctactgaaagcagtggggatctcatcactcatctctgaaaatgggcaccagaaaaacaaaaccaaagttctcagggtgggtagagctctttctttccaagcactggccattctggcaagctttctcctttatgctctttggttctaccacagttccactctgaaagctctcttctttcttagtggttcctcacaatgaccctaaacagtgtgtcagggcagtctgtacctcactaggtgcagatcagggaccacggatgccaaactggctcctgagccaccacataagttcactggctgcaaggtgccaacactgtggcagttgtctgccctggaagagcctacagccttctccaatctccccatgggctcagcctctcctccatggccatggttaggttgggtctgcagtactttctagagcaaacttctcatttatgtttaagtgcctaagcaagttatagacctctgggacctgcctgagagtcggcctgtgccctgtccttcccaccatgcacctcgcctcaggacaggtgtgatgcacatccctgctccccaacccagtgtccctgccattctgcaggcagagtggtcaccagggcaggcaaggggagagggctggctttgtcactgtttcctttgttccttctgttgatgtgactatgaccttgggtcagaggaagttttaaggaatctacttagctagggctcggtggctactgagtgaagaacaggagtgagtcgcctctgagcagagttctaagagagccagcaggcagggatcatgactgaaaaacctgtgcgtactggagccctgaccgcatccacagcccagatgacgaggagccggaggccatcagcagtagagtcgtagtaagatccaatgtgcattctttaaaatgagtgagagactgtttcttttgaggaataattaaagtgtgagctagatctgggccttttatttgcatgaggtatagaacaggtcatggactgctgtgctcagttggtacaacagtgacaagtagaaaggaacaatctattacgcaggcaccttattttcattgatccaggatttttgttcagacagtggagtaatgcaaacactgggtgcttgcatgtaacaggtgcagatgaccctgcctcacctagagaggggaacacagtagggtgaatggccaagtagtggcaaaagggaggcagtggcacatgcaaaacccatgctgcccctgaggaatgtgtcaccctctagatgcagtgtccatggtctacctaccaagcacctctccggcccggtgtaattgaggaatgtcaaccggatgcaaattgagggacgacagctttgagtcagagcatcggggaggccaggatgctgggccctagctggacttggacatcctaacaagagccaaatgcacgcctgttgagggcagcatgtgtatagttcaccgtgggtctgggagcaagctggcatggccagctgggaagtggaaagcaggcttacgtgttctgaccagacaccagggaccagatgtcttgaagttgcctgcaggtattcagcctaatggctgtgtaggatcctgccagatgagtcggagagggggcagggcgccctcctggccttggccgttgtgtgtcttagtctctgtgttcccctttggtgtcttctctggtctctgtccccatcttgtgtgccatgtgtccctgagggtgaatcacacctgtgtctgagtctgctgtaaggtgttcagtctacctcaaggggtcgtcatggcaagctctgtccacatggaatcctccttacatgccacacacactggaatgtataccaccccacccccataaccgctaaccccatctttccccataatcaccagactcctagtgcaaattggatgctgctttaaatgtgaaaaatctgttcaaaagctataaaatctgaatgaaagctaaagctgaacttataagccttgttgcatatgagccaaaagtgcaaaaagctctatataatgaactaacctgccactcgtataaatataaatatatataaatatattaaaaatcagactgttctacaaaattgtgtatttgtatttttgtgtacgtacaattttctgctaagcagaaggagggtgtagtatagggcgctgtgagaagagatttggtttaaccccatttctttgtgacttatttttgttaacatcagatgcctgtcttcgtcttctctgtgtgacactgtttggaaagctgcagtatccttcttccttaggccagagtctgggctcagggagctgtgtggccacctaacagacagggccaggcttgcacccccaaggccaggcatgggatggcagtctgactcggctctgggaagcaaactccctctttagaaaccaatttcccagacaagatcgttggatactcacagacccagggagcaaggggagacttctttccattgcccaggtagctttgcctggtgtagctcccggtcccctggctgccactgggccatgtctcccaggtagctgctgccctttcagacagggtcaccagatgcctcccctatcggagctgtcaccagaggtccaattcattacctggagcatctcagaacccactttgccggtgctaaacaggagaggggttagagtagctgccaatcatggccagaccaacccaccagaggccaagac

SEQ ID NO: 22812 - DNA, 1100 bp, Mus musculus
ccatggtaattgaggggggtggcatagaatgaatatataaaagtataatggcaattgttccgaatgactgagtgtcctcctgacatgtaattagctgttttagcagggtgtagattggcatggtcataattaagaggatttctgtcctttatgtgattgagaatagcagagcccatcctcgttccctttgagcactaatgctcctgagaacatttggaacaacagctcagtaaaccaaaataatgatatgggattcatctcccacccgagtgagagagcactgggaagcatttcaggtccagaatggaaggctttgcttattgctggatctgacttccaaattctcttaaacctcttgtgtccagtttcatcttattctactttgaccagaaactagtcaatatctcaaactgaggcagcctctggcagagcctcctgacccccatcctttcctggggacacttgctgcttaactgggctacctgggattttcagacttctccttggtaacttgattatttccactgccgtgaccatcagacagtatttgccacacggaagtctgcagttgagtagggttttcctcgtgggacatgacgagatcaggcacacatcgacctcctacaggaatgcgtggacttgggctccagggtgtgcaccccagcttgctcacatctaccatgttcagccatcacaagtccctagagctattctgctgtcaggatgggttcctggttcttctgaagtcatgtactctgtcccccacttcatttttctttatgcatctgtgccttcaggcaggtgtcatataatcttcacagcctgtagagtcctcctaactaggagctgcagaactcactagccactctccagcggatgcttagtttggactttttcttttttttctagtcatcctttgcaggagccttgattcaattagagcgtcagaagggtccaccgggatgccagcagctaccagtgctaagtggccttttataagttcttctgcccatgaggctcaagactcaggtgaggttaacttgagttcaagagccctgtctttttcaggctggacactgtgggattagttagtagccaaa

SEQ ID NO: 22813 - DNA, 2637 bp, Mus musculus
aacttgactgtcacacatggaggtccttgcctagctaggggcagaaaaagcaggggacatttaccacctacagcaggatgtctttgctgtcttctctttatctgtccttgtggaggtgtgaaagctatattgctacaggcaatttatttaataattggaagccatattgataatggatgtggtgatatttgtagtttaatctactttaagtggcagtaactaatggaatttttttccttgatcatatatgtagcacttttgttactttttaaagatatttatatttgataaatctttttttcattttgagaactcaaaataccaaacagtgaacttgcgttatagagtcaccctgtggtcaccttgtcatctagtagcaaaatgatgaactattcatgcatcaaagaaaattacatctgctggccttgtgtgaaaatgatctcctggagccctgattaaatagcacactgtcactgtgggtaagaagaaccagccttcagtgaattggtgcagtgtgtgctgagaggctgagcgttccctgcctcctcccattttccctctgttgcgtctgaagaagccttgcgtagagggcggtgtggggtgagcctgcgagcgggcttccatctttttgtccatgcctgacccaatctctaagatagaaagtagatgccatctcctcacccctgcttcctcaccaagtgtgtccgaccctcctcgcttcccctgtgcgctgaccagatactcgatatccgcagggcttagctggtcttgctgaggcactgaccagatactcgatatccgcagggcttagctggtcttgctgaggcacacgctgtctggactaccccttaggtataagtcttggttacaggggtgtgaggaatcacctcatctttgaggagctgaggatgctaccccaccttcgtctgtgaccttgaaggacactaggtagggcttggccctgttcctatcagtagatttcagggggaaatgtatgcattttttcccagctctgagacgtgaagtaaaatggagccatcttctcttactgtattacttgaaccacaaatttaagagtagcatttcttattctcaggaacgagtcccccgcacctacttagaatctcgcatggtttctttgattcgtttgtctgtctgtttcacttaagagattgcattacctttctttctctccttccttttgtttacttagaaggaatattcctattatgtctatccattttggttgagttttgtctgcttattctcagttgaatcagaaagaacaggaggggggggggaacgtatttttctgacaagccacatccatgatttatcatgagattatgatgattgacagcttctttagggtgcggctgctcctgtctctcttgttctctcttgccgtcttaaaggaacaggctccagctgttaagacagctccagtctctaagggaactctgactacagccgaagagcagagtgttctgtcatcctagggccttttagagaaagcagtgcaacaggataccaagccctggctggtacaggcagtgccagccctgtgtggcagtgtggtggtactggaaaagtacaggtaccatggaggctggctctgtgctgagctagctagaaagtctgtcacatgcccacagactcacagccttacagggaacctgcgctgtctcacctacagcaggagtttgcttctttgggatcaaggttcaaaaactaccatcagtcggttttccctggggtcaccaggtttgattctacttttgagtcctgttccctcaactcttggaatggccacagaacatccgcagtcagactcatccatcctttgtgcttcttgctcaccctgtctgctctcatctccttctgtatttcttgtggtcccggagctcttttagattgtatcttctcgaccagtgactactggaagcaggagaggaggggagcaggcgctcatacatggactgtggtgatgtttatttaagaattactgttgctggataggaaggaaggggagcaggcatttgtagactgtgtgatggtgtttatttaagaattactgttgctggataagaagagaggggagcaggtgttcatagaatgtgctgtgacgtttatttaagaattactgttgctggataggaaggtaatttcccaccttctggttccttacatggcgggcggcctgttaacaaaggaccatcttaagatattcctgcctacctgagacagtcgccaggaagggcagtgcattgctctcctgtgtgactatccagggccctcagacccaggagacagtcattcacagcaggcatgtttatgtttgtgttgaacgccccatagggcaggttacaggaggagaaaacctgggctgggaaggcagacagcccgtgttcctttcgctccagctcactaggtgaccttagaaagacgagggcattggaagcctgctccagagctctggttcctaggatgtttgtcactctcagccacacccattatttttggatcagacatctgggaatgtttttactttatgggaacggcacatggaaagctgatatagtggtctgcgttctctctggctttaggaactcttgctttaaactccttggagatgag

SEQ ID NO: 22814 - DNA, 1216 bp, Mus musculus
tcttgagtaaacagatacacacttgttagtctctaccatgaccagccagactccttctgtgaataactggaaaactggccattttttttctttgacacttccctttctctaagcagcattccctctcaccaagcgcataaggcttttgttgcactagtcactatggtgcgatcctaggcaggtcctgaagttttggacatctatcctttgtcagatgttttctctgattctctccactctattgccacctagctgtctttttgttttctgttgtgcatccaattagatgaccatacagttttgtccttcacactatgggaggaaggttttaatttgttttgtttttcttatatctgtggtcaccagagtgtcggacaatgcaggtctgataaaatgagttagagaagcttcttcctcctgagcttttggggtaatttcagaagaactcgtgttaattctttaaacgttagctagagctcagcagtgaggctgagcggaacagttcttaatcataaaacagtaggggctggtctgcactggctgctcctctagggggcccaggttcatttcctagcgcccacctgaccactcacaaccatctgtaactctagttccaggggtccacggccctcttctgacttctgcaggcactgcacacatgtgagtcacaaacacacccgtaggcaaacattcatggatataattttatttaaaaaaaccaaaaaaaaaaaacagattttttttttaaacagaaaaaaaaatcactttcaccgggtgtggtggcacacacctttaatcccagcacttggaaggcagaggcaaaaaaaaaaaaaaaaaaaaaaaaaaaaaaaagactaaatactcttgatttgggagaagttcctggggtcttctttactccgaccttcattgtataaaagtaaagcctggaaatacagagtaagtgtaaacactaaaacttggactcaaaagaagacattatgctatgaataactgaaaattttcaatttagcatccaaagccagtatggctttttcctattagtcactgcagtcacaacagtaatgccttctacctggtcccaatccactttagaacataaattgtttgcagatttatattaatcgtcaaactagttcttaattatttcagtgtttccctaaggtctttttattataaaaatgatgtctgttcatttcaaaaactctgtggagac

SEQ ID NO: 22815 - DNA, 1136 bp, Mus musculus
agaggctcaaaagcattgcattaccattgcatcgtgagagaagtgacttgcctgtgtatgtgggagtgtttcattaaaggggagtggtgagtgagagacagtgacattgtaagtgttcagaatggcaaatgtgtctcctgcagacctcagagactttatcatcctaggataagccccagtgcatggcactgtgaggaggaagaccacagtgccctattaagggcaaggcaaggattggaaccgcccgtggtggctcattcttagcctcatcttgaaggagctggaagtcatctccctttaagcataattgctcatttgtttttagctagcgggttcatgtaattaagaattgttcatctctctctgtctctctctcctctctctctctcagctcatcctatcagtagttacacagtactcatgtgacatgatactcacaagagcagcattcaagaggaagaagccttaaagaccccagtaaattcctgaggatagtaatatagttgacaccctgttttcatagactaaataaagacagagtaattctgattgtggtaaatttagatgcatgtgtgtgaccatgtagaaatatttgttggatgaactaaagttgtatatctccctttctgaaaagagcagaggacactgccaagccccgctggtttgactatgaagctatagacctctggttgtgatgatctagaaactctaccatgtgtttgcaagtgccagtggctttctggggcctttgcagcctacctgttagtggccctcctgggtccctagcctttccacttcagtgtgctctgatataagtgctagcactcttatgtgcatggctttgtctaggagttttccctacatgggaactggcaaattgaggttctagacctctttcttctcagtggactcgggactcttcgctatgcttctgagttgccacatggaagtgcttgcagctgctctaatgcagcctggctccatagcatgtcaatctctagacaccttgccttctgtttactgcccactcccaattcagggaagaagaaccaataaaacagcaccctgtctgagcatctgatctcagccttctttctcatagccagccattgctggctttatataaatgtgggccc

SEQ ID NO: 22816 - DNA, 1149 bp, Mus musculus
gatccaatatacagggttgattgtactataaactgttagattgtactctagtgtcttacagatacccaacaagatgagctagtgattagaaataaaacagaacctttagtgtgaaaacgtgacctacagcttatacaaaaacaggaagggattccagggacccgaaattgccattataggaaaacaagacagcagcctggttgagagaaagcattacaagtcccgtagtctgcaaacaatggcaatcaaggagcatgaacctgggcctcaaatcttggggtgctggagccaggactgctgcctcgagaaggagacagtagttagggaaacagatggatgtgaagtgtacgtgtttgggtttgccagtaaacttacttgttgctgttgtctctaaattgatacagagaggatattaccctgtgttctgtattagcatgaactggattcagatattgaaaatgtatttctaggtgggtaggaaggtggatatattgtttttttggaggacagtctcattctgaaacccaggctagcctagaactcactatgtagcctaggctactctagaactcatggcaatcttcctgcctcagcctcccaagtggtaagattacagagatgagctgccaggtctggctctacttctagctgtttgattatcatctagttttcagggtgctgtcaatgtctgtgtagccgtgagccagctgagtacagtgctccttgggctcccttagctgtatttgggtattccatctcagaatggcagaggtctgtctcactgcagatcttttgggcagctttcaaattagttcttgatgtctccctctatgctagtggttctcaaccttcctaatgctgcaatcttttaatacagatcctcacgttgtggtgacacccccccagccctaaagttatttttgttgctacttaatataactgtaattttgctactgttatgagttgtaatgtaaatatatgacatgtaggctagctgatgtatgacctctgtgaaggggtcattctcatgccccctctcccgtccccaaacaggtcaagacccacaagttgagaaccacggctctaactggagcatttttgattcccaaactatgtgtcagcttcttacatcagttgaaacgcctatct

SEQ ID NO: 22817 - DNA, 2292 bp, Mus musculus
acacatacacacacattcatacatacattcatacatacatacatacatacacatatatatattttggtgggtcggggtgcacctgaaatttctgccaatctctccaagggagggtcctacccagctatgtatttagtggagagggccctggccctgcgttacctggacattcatttgcggtcccccccgtcccagggacactggctgcagaaataagcaggatgggcctgacctaggcagggtctcctgacctctcctggccccgttccaatgccacagtgctgctcccacagcttgccccgctgtaggctgcacagtggggacgacacaccccggacgctttgaagggttgggccaggccgcactcaggcatcacctggctttccattctttcttgtgtttgagagagaaggaggcggcagacagtgaggcagagatgagacctgtacgtagctccccccctccccccccccccggggtgacactggtgcagggtgctggtggccagttccgtggtacttgtttctcacagaggagacaacaggaacttggcaggctggctgggagctcggcgggtgtagagccagcctgggtccttccgggattctgtagtcttactgcaaggctttggaaggaacaccgaagtgaaattcaccttccctcttgtgtctagaagtccatcctgtagctgtgggctttagacccctgatgccacgttggctgtacgagccccccctccccccaaccttcaaagtctagggtgggctagaacccggaggctgtgatttgctaggtaagtcctagtcttgtcgtagacgttaacaggaattcaccccacgttaccactttccatgtcctgttgatggttttcttcccagggctgaaaatgaaataaactaacttggggtatggtggcagtgggaaacttaggtcagggatttggcctgtgacttgtctccccagccccagcagctgacgcagagctcagtctgtcttggtcatgcacctgccttaagccagttccgtcttcctaggccctgacacgtgtgctgctgcttgctgtcctctgcctgctgtcctgacttctctctagatccctcctgccgtagggctggcatggcccccgggagaccctcaggccagcaggaccaggctgctgcagaacttcactgggtcttctggaacctgacaccaagggctgcctgggacatctggttcttggcaactcagtgaaggggtcaagactgtttcccaaccttctgtcctctcatcagcccttgtagcagtagccctcttcccccgggggagccaaagagtgtggtgttttgcgctaaatatgtggctgctattttatcttttttttttcctctcccagtattggggatggacgccagagctgtgggtggacatcccgacaatcgctctgccctgagccctgtccctattgtctcgtttcttttcattgagaggttgtaaatggtgctgtggtacctgataagaaagtcagtctctgtggtaggaccccctctgtgggtcactcatgggtatcattgatctgtgtttgagggatagtgatgtcaagagtgtcctaggggatagccctctgggcctggtgggaacgctcactgaaggaccccagcagcaaacattggcagtgactgtacctgagggactcttgtcagaggcaagaggcagagacaaagcagttggaccctgcttgtgatttgggttttggggttagggacatgcttggaaatgattgtgccactacacgtccgtggagcctgcctggtgtttgacgttgtttaccatgggtcacctcctagagcagattgctaacacaggtcacactcagctacctagtctcagctccagggccaggacagctttgttttccagttgctcttcatcttaaggtcaaaggccacccacagagtgacagccccccgggatgcctcaggccaccacctaatgctcctgtcaggggtggccttgttagtgaacatggagctggagggtggggccgcctggggtggctttgatgacttgtccatctgtctgcccctttcaaaccatgagcacaaaggtcttacgttggatttttgtaaaaaacaaaaaacaaaaaacaaaataaatggagactttaactcatgcagtttggaggtgttttgttattgagctaggaagaaagacttagctatgtcaaggtgcctgcctgatgtggtagcttctatatggcccaatgggagcactccagctccggtcagaggataagggagctgggcaagcaca

SEQ ID NO: 22818 - DNA, 1099 bp, Mus musculus
agaggtccacttcctgttacgaagtctttcagacagtgatctgttggccatgaggcggcaaggccgctttctctgggagacctacttctccaccgcagacagtatttttaataccgtgctggccatgattaggactcgaattcagatcccagctgctcccatccgggaagaggtagcggctgagatcccccatcgttcaggcaaagcagctggaactgaccccaacatggctgacaatggggacctggacctggggccggtagagacagaaccaccctatgcctcacctaaatacctccgcaatttcactctgactgtcacagactgttaccgtggctggaactctgccccgggacccttccatctttttccccacacaccctttgatcctgtgttgccctctgaggccaaattcctgggctcagggactggatttcggcccatcggtggcggggctgggggctctggcaaggagttccaggcagcgctcggaggcaatgtccagcgggagcagttcacagttgtgatgctgacctacgagcgggaggaagtgctcatgaactccctggagagactcaacggcctcccctacctgaacaaggtagtggtggtgtggaactctcccaagctgccctcggaggaccttttgtggccagacattggtgtccccatcatggtaataaaatgggcagtgtgttttactatgcggaataagtaccccacacttaatgccgcctctagtttttatcatttttgttcccttgtagtagaggtgaatgtatgtgtacctctgtgtgtgtgtgcgcgcgcacgtgtacatgtgtgtgcatgtatgcactcctggtgctggggattgagcccagggccttttacatgctggtatagcacatttatctagttatttataaacccatataggctgtgccttcccatgtgtgccaattgtttggagaggattaggagtgaagccttagtggaggagatgtatcactggggttgggctttgaggtttcaaacacctataccaggtccatctatgctctctgcatagctctcagctacttatccaggaccgtgcctgcctgcctgcctgtgctcc

SEQ ID NO: 22819 - DNA, 2177 bp, Mus musculus
atgtctgctaatggaagataaatagaggcaagctggaaaataccttttatctactcctgggtgaagttcaaaagagttctcttaactcttttcaactctaaatttaacaaattgggcttcttggagttgtttttgcttagtagttcaaaaggagactttcatgttcgggaggatggagggttggtgcgtgttgcctctcttcacctcatgtggtgcccagctctcaggtagaaccagctgtgctgggttggggaggcggtggagctttgaacggaagtttcttgaaactgacaagactctccttctcttgcaggcctgatcgttggtagtggcatggaggacggggctggcatttcagactgccagctgtttttaccagccgctgcatcacttgaatagaagctatgcatattggctggccgacaaagccaagggacaaaagctatggccgttaaaatggtccctctgagtccagggctctttccctggcttttagcaccatggatctcttccttttcatcccatcagcaatgtggtaccttcttctacttgatgatgacagctgatacttcagatttgcctgactaaggttagaaacctgaattgccgtgaggaagatgaaatttccattttacttggtgccttgtgcagggagcacactgatccttccagaaacttgtgtgtgaaaagaggttgcgttttgtcagacagactcatggttatggcgagcgatccgacgtgatcagagtgggcaagaggcacagcgaactcatgacaggctataccatgttgcggaatgggggagtggggaacggtggtcagacctgtatgctgcgctggtccaatcgcatccggctgacatggctgagtttcacgctgttcatcatcctcgtcttcttccccctcattgctcactattacctcaccactctggacgaggcagacgaggctggcaagcgcatcttcggccctcgggctggcagtgagctctgtgaggtaaagcacgtcctcgatctctgtcggattcgtgagtctgtgagcgaagagcttctacagctcgaagccaagcggcaggagctgaacagcgagattgccaagctgaacctcaagattgaagcctgtaagaagagcatagagaatgccaagcaggacctgctgcagctcaagaatgtcattagccagacagagcactcctacaaggagctgatggcccagaaccagcccaaactgtccctgcccatccgactgctccccgagaaggacgatgccggccttccaccccccaaggtcactcggggttgccgccttcacaactgctttgattactctcgttgtcctctgacgtctggctttcccgtctacgtctatgacagtgaccagtttgcctttgggagctacctggaccctttggtcaagcaggcttttcaggctacagtgagagccaacgtttatgttacagaaaatgcggccatcgcctgcctgtatgtggtgttagtgggagaaatgcaagagcccactgtgctgcggcctgccgaccttgaaaagcagctgttttctctgccacactggaggacagatgggcacaaccacgtcattatcaacctgtcccggaagtcagacacacagaatctactgtacaacgtcagtacaggccgggccatggtggcccagtccaccttctatgctgcccagtacagagctggctttgacctggtcgtgtcaccccttgtccatgctatgtctgaacccaacttcatggaaatcccaccgcaggtgccagttaagcggaaatatctcttcactttccagggcgagaagatcgagtctctgagatctagccttcaggaggcccgttccttcgaggaagagatggagggcgaccctccggccgactatgacgatcgcatcattgccaccctaaaggccgtacaggacagcaagctggatcaggtgctggtagaattcacttgcaaaaaccagccgaagcccagcctgccgactgagtgggcactgtgtggggagcgggaagaccgcctggagttactgaagctctccaccttcgccctcatcatcactcccggggacccgcacctgctcatttcatctgggtgtgccacgcggctcttcgaggccctggaggtgggggccgtgccggtggtgctcggggagcaggtgca

SEQ ID NO: 22820 - DNA, 1395 bp, Mus musculus
ttttattcaataattaggcaaaaagatccaaggcagtattaagctcaaaacagtaatttgtttcagagagcagttgatgaataacaattagcacagggcttagtacagagtaagctttccagtaaatgtttagcgactagctaactacatggcactcagaccatgagaattgtttttatacacacacacccccattgtgaatttgttaaaaatctgtgtaaagtaagaatcttttcagtttcacacaaaaaagatgcaagagataggaggtttatagaacctaggttcataagtaaactcaggattcgtttaagcttcttttatgcctttttgtgacagctaggatgagaaaagcttgggattgcagaaacaggtcagtgggtaagtggacctgctgctcttccaaaggacccaagttcagttcctccctcccttgtgctcacagtgcctactgtagctccagctctggggatctaacattcccttctggcctcctgacaccaacacacttgtaacacacacacataaatacaaaatatgaaaaatgttcatttaattcaactatgtataatgtatatacatttacataaatttgattactgtatatggaaatgcattggcatttgtacatctcttctggctttccttccttttcattttttgttgttacagccacatgagtactgggacaggcataggaagagtaggcatgcctccccatgcgctagactacaattgctttctctaatctaattctaatcctatttatctttagtaattatactgatacagaataatgcttatctttcaagatccaaatctgagagagaaaaaacaatattaaaagtctgttcagaccgccattttagtagacataggagtttagttaacttatagtcagcacatagtagtaagtatgtttatccctgtgttctctaactaggaagtctggctttaaaggttttttaaagtttcctctaatattttgatcaaaggtcgagggagtacaaaatgcattaagttcaatatatttaactatgttgaatgataagttatatttacctttttacctaaatagtcaccagaaacctatcttgcccttttcggggatttttggggggatggtagaattgtttataattgactctagttttattagcaccacttcccatagttaaaaatgttttctactgtctaataattcaaaagtttaaaatttgccaggggtagtgacacacatcttagcactccggaggccgaggcaggagaatctcttgtgaggtcatcctgatcttcatagtgagttccagggcagttaggactatatagaagaccttgtctcaaaaaagaaataaagattaagaaatcttaaggtaaagataattaaaaattagt

SEQ ID NO: 22821 - DNA, 1294 bp, Mus musculus
ttcttgggcagagtgtgcccactgggaaagtagatctttgctctttgtatcacatcaaccctggggtgtgaacacatcccaaaccctaaggatcatgtcatcacaaaagtaattctttctaggctgtgaagagatgattgtctggtgagcatttttataaacatgcttattttatatctagaaaaatcctctatgtgtggtgactgctttgtagtgaattttcatataatatgaactagttgtgaaatgacattctggtagctctgttaataaaacaaagtttcagaattaaagaaaatttctatgcaaggtttatttctcagatgaatactaggtctttgtaggtttatttccacagagtgaaaaaaggaaccgtttttaaactgtagaagactttgataagccagcaagagtattttagctaagataacagtgccatggaagatctggttggcctgtgggaggttgtctcaaagtctgtcagtcttcccccaagatatgcaggctgtggatgagcactggagtagaggcagagatgagcattcccctgtaattggattgggttttgttttgtaaatattacttttatgggctatgcttttataatatccatatgcatgatagaaacattttaatttgtggccatttttcccaggaaatagtagacaacttcatgttcatatatgttctgtggaggcatgcagtaaaataagcatcacacattataaggggttttagtggtaaaaaaaaaagttacaaatggcaaaatattttctgtgtattcattgtcgtatttttctacagtgagatgtgatcttgccaaagccattagaccttggtacccaggccctcctataatgagctgattgtctgccccagattccccagtagccagttggctacagcttttgcccacatccctattttctgaattactctggtttacagctgaaatatatactcttaagtccaaaatggtgatcgacctgggttcttgaaaatcattttaactaagtggagcatggttactctttctgtgaatatcgtttaatcttaaaaatatcaagtaaaaacctcttgacattttattttgtaaagcttaaatgatttaggttatgaactgtgaactttatttgtatgaaattgatcagaaagaaaaattcttgaaaatgctaatatgtgattcagaaaatataagtgatcctcagccctgattgcgggtacagatcactctggaactctcagtagccaacatctttctgtcaggtctgagttgatgctttaaaaacaacca

SEQ ID NO: 22822 - DNA, 1181 bp, Mus musculus
aaacacttttctcccccttgttgggagtgctttattttttaaaagcaaacctaaatgaaactatttttccccttaaaataggagagagccaaaattgaccaagggtattctgcagcgaaccggagaccaaagagttacccctacccctaccccattccaccctctctgggactacatatgcatcaagagtaggacaggatgctgccttgcctggttttgttctgagctggtgaatcctttgctctttcagctattctagagtggcctgtgagcaaatgaacttctctctctctctctctctctctctctttctttctctctctctctcccttccttccttccttccttccttcccccctctttctctctctccctccctccctccctctccctctcccccccctctttctctctctctctttctttctttctttctttctttctttctttctttctttctttctttctttctttctttcttttctttcaaaaaaaaaaaagaagaactttctggcaggtagatggccacccagggaatgtggcaggaccctaagaagagcaggcagctgtgcttgttgagatatgaggacagaaaagggacacccttttatggtgtcaacttttggatctgggtttcccccagatgttgggttgcatgccaataaacatgtggcttcttctcaaagcctgtcttcaaaaaagctgaggcaaaatgctaatattaattcagcctggcctcgaaacactgtcctgagcacccgtcaactctgagaggaagtgtggagagtctccatccaactctgctcctactgagtaaagtccccttccctccagagtgtcacagagacactagaatgtcaggtgctcttgtctgatgtagaagtctttgatgaggaagccttctttcccttggggtctctggaagatcctagcagactttgcctgtgggcctgctcagcatgacttccaggaccccactgttctggactgacatcccaggtgtcacaggctcagggagtggcaccaggtcacctctccagggactgagcatcattggctcattgtcatggggagctccctcctgaccacggaggctccactggtggtgccacatgggaaacatctacttctcagtctaaggcacactaagtactagtagcaagcctgtgagcctaggagac

SEQ ID NO: 22823 - DNA, 1138 bp, Mus musculus
atggtgttggcctcctgcctgctgtcatgtgtccccccttttgctccccctccccatcctgatgctttcatgttggttcctgacacatggtctggctttgggtttgaagggcaagggtggctgtgaaccacccccacccagccgtcaggcccgcttcgtcgtcatctctatctccctgctccctggccctgagggtttggaatctgaccgggtgaaggcaccaccggcgagcttttgaaagcaacagggcctagcctgcaaacagttatcttgggaaactgtccagccacgtttccattactcggagctctcggttaccttcagacatggtgccgtgttgggagcaacctcagtgggtttgcactacactcactccgtgctgcaagtccagggatactgtctgtggccactgaagtctcaggtgcagatgggttctcccgggaacccagggttggatccataaggctttaatctggccctgaaagcagtgttgccgcttcagacagtactgcgagcaatggctgccttgtcggagtgagtgtgtagctggacaccttagaggaccctatgaaattggatatggagactgatttggtgggaaaaaacctgttactttccagtcaccccaggttctgactttacctggggcaaaaacaaaccacaaaaagggagaatctcatctgtgaatttgtcttatcggcgcttctccccagccccgcccctgccccgccccgccccagccccgctgtcttccaagtattatttttactgttaagattttttttaaatgtgaaatgaaatgtaatgtttttacagcaatgatatgaaatatattttataaggaataaaatggtacattgtctgacttagtgtgtgcctctctactgattactgtcctgttcctaccataagtagcaagtgatagcatgtggcactgtaggcaaggggactcacttgcttataatatcaggttgcttagggaatgtggcaatgaaggagcacatgtccagctctaggttcagtgtcctaaaacaaattcaagttggtagatacacttaccaggtaagtaggcagagtgtttatcgtgactttggaaggaagttaggtggtttttttttttgtttgtttttatttgttt

SEQ ID NO: 22824 - DNA, 1857 bp, Mus musculus
tcttgtgctgtgttccctactgcagtgctgaacaatattggtgcatctgttgtgcctacacatatgtgctgccatataccctggtcctgtgccagctgttaggaaagggcatttctcccacagcagcgtctatgttcatggaagccagcataatagaaatagggcaagtttctatatgagattcggtttgggcagtagtgcagtctgaataagagacagggcacaaggccgaggggttcacggctgacttctgagagctgctaaaattaggctgactagagctctggtactttgttttccctgcaggggtcggcacaagaaattattaccgaaagattggctacagattacaaggcccctacatggtaaagatgctaaaataatgaccacccagtctaccttcttgcagcatcctccctgacagaagattcaagtgcagtctcagcagaggctgaggaggtaaacggcctgcacactcctggacggtcctctgccctccccctgtggtggctgccgctcactactctgacccctgtgacagaggccaaacccacctctttatgtgcccatggggcctcttctggctttaaggcttaaacgatttttccagtttctaaattctgcatgaaggctgcaggtgacccattttggctcagacgctgtgaccagagcaaatcaactcctttggccatcgtcactcgtgattgtcatctgaggggcagcctcgggagaagattatttatatatccaaagacgaaagccagactgcagcacagacaagctgtcagacatgactccctgccctttaactacatgcacattcaccctggaatttagaaaatgagctttgcactggaaatctcagtggctgtgccgtgtcttgaaatgtgctgtgtttggagaaagaagagctgaggtagtgggttgtgttaatatgcttgatgccggccgtctctagcccaatcctgtcagaagcttgccctgaccagggccatcttggaagcctttcctttgtctcacgtctgtgaaagtctgtatgtccatacccctgacacctgcaggacagtgtgaactaccttcagcatgctgggctagcttgtgccagccagttcatctgtcctgagcagacatggtccagaatccacagctagagccggaggccctggtcaggaccaggccatgctcagaagcttctctgcatgttagttctgtaaagtagatagtgttgatggtgctgcatgaagaaggtaggagttaggctagtgtgtggaaggaggcctgtctgacctgcatggagggacatgggctttccagagccttcatcaccattcagtttgtcccctgaggaggccaggctctgagtgacagcccatctcgcctgggcatctgtcctttccagcagtgtttagtgaaaactgttccctaaaaggtctgaaaaataaagtctttaacataaaagagtcgtcgtgtggtgctttttccctcgtcctgtaaatgtgatggcatttatcaggaatttacaggttttgctcccggcctgtgacactggctgtctcccccgggtgccatttcccatctcattacactgctgaaggcgagtgacagcagcttcttggagggcgcactgtggcactccagccacgctccaaaaacgtagtgcagggaacttagctatttcttagttatcaatttcccccataaaatataaaagtattaagctaatgaagcgcgcaccacagccttcgcactcgttgttactggagtcggcgcatgctgggccagcgcagggctaggactcccttcctgccgcgtgcctagcacacatgtgttcctgggtctcccttgctcatctctcgc

SEQ ID NO: 22825 - DNA, 1189 bp, Mus musculus
ctgtactggagaagcaagccttctctaagtacagcctcactgtactggggaagcaagctttctctaagtacagcctcactgtactggggaagcaagccttctctaagtacagcctcactgtactggagaagcaagccttctctaagtacagcctcactgtactggggaagcaagccttctctaagacagcctttggtcttttttggtttttttgtttgtttggctggttggttggtttttggttttttttgagttttttgttttgatattttatgtatttacatttctcctttttaaatgttttattgcaatattgatcatgaaataatatcttttttaatgttttattgcaatcttaactcattaactctcctaggaagacagttaggttttttttctatgtaaacatttgacattgtcttaactcatttaatttaataagtccttatttttatatctattacagacaggattcttccccttaattaaggtgactagatattgctaaatattgctgcagccctgcaagccaagcgttctcggggcctttcggttgggggatttttgcttccatcacatcacagagcacattttcactcttctggaatcctggcctgagctctggactctgacagccgttctcctctctctgagaggagagttgggttttaggatttaaggtggtggttgtggaatacattctgcctccttgagctttgaaatgggtgtgtagttgcacatccccttaggaatgtttggcataccagtctagacccctagagctgcacctgtgagggccgttcctgtttcctgtgactcatacaggttactggtttgaatcatttgacaaaccaacccttcccttgcttcaaatctagtggtttaaaacagaaataaattatttgcttcatggtgctttgtaagaacttcagcaggatatagagatggctttcctctggcctgtgctgtgatagacattagctggaatggctccagagcctgggtgtcctggataggactgtcagcatgagcacctcggctctgacactggagagaagagtccttctccattgtctgaaagtacttgggaagaattgatactaattcttttcaaatgcttgatagaatttacctaaagccatttgatcctgacttcgcagccatacatttatgtaaggaatagagagcg

SEQ ID NO: 22826 - DNA, 1208 bp, Mus musculus
tggtaccagctgtgtcagaaaactttgtgtgttcgaggtgttctgggtagcttgcagaagctgtatgagtggtgacaaacactgctgctgtccccttgtgtctttgtcttctgacttctataacctgttgctttatacttaccaggcagcgtctctctcttgaccgtaagagaaggaaggaagctattaatttaacagtcttgggaggtagtagtgagtctgaaatgaagcattctagaaacttcttggaacttctgaagagataagctggaagcagtgtctggccagggcaccaggggttagactctgccttcagaaaccagtgcagtggatcaggagagagcaggggatctgttggctgttttcaagcatggacccatgacttactttacacttcctcaaattatcatggaggaaaacatgttagaacattgtccaaaatgaaatgtttgaatactattgaattatttgaatattcaacaaaataatataataattagatataatagacgtttagaaataagcaagtgcatgaggctggtcaccagcatcacacagtactgtgcctactctgctcgtcacttgccagctggcctccatctctggcctcctaaggatccgcttctaggggtccaacagacctggttaccagcagtctccttgtgtattggccatctttaccctgcccccgtctaacccttgctagcctctgctaaggggcccaggaatcaatccaaagagcagagtctcttaggctttcctttccagaaagtaagtagatgtcatctctgcctttgaaaaatcatactccaagaaagaacaaagaggaagcagggtgcctgctgattgagaccaatgacctctagccacatacacctagtctcctatagagagctggtcagctgtagaaacccatggcccttatttgctgttcaggccacatcagcagagtatcttgctgggtgggtttcctgaaacaagaaaataactttgttttttgcaaaactgaataacgaactcttatagatacattgttagtgatattgcttgcatgattctgtctcactggtagatacatgtatgtttattctgtagaggaggactaagcagggggacatatcattggataatgcagggattctgtaatgctaagtgtcaggctgtatgggatggacaccgggctgagtagtaggagcgagtgctgttag

SEQ ID NO: 22827 - DNA, 1145 bp, Mus musculus
ttagtatgttaatgaggatagccatatatcagattactataaaatattccaacatttaaaagggggcactgtgaagacttagatttggcttatagaaccagaaagatttaagcaatgtgtgtatatatatatatatatatatatatatatatatatatatattcctttctaaataatttttactttaataaccattgtgtgatttttacctgattattaactttgaagcatatattgattttaaaagactaaatttcgaaagttaggaatcattatactaaaacaacctctatgtaagccgtgtatgctaccgtgttaagacatagtcacaaggtgaagcaaatgtcttagggcactgtcactttaagcctcctagtgtgcttctctttatagtatcgccatggaaacagttgggttccagagcctggtagattcatgaaatgttctttgtgctcactgatcagccttcaggagtaagtgcagtacaaccctgacttcggcttttgactggcctctccttgatgtcgggcactctgcactatcccagtgcagaggacaaatctcatttccccatccttaggcctgctgaaatggggaagggtctgtgggagcagttaaaccaggcttttgaccttccttgttggtgactttcagctgctgtgtagaagggaaagtgtttgccaagtggtttctgattcacaattggtttttttctctccattgagttgaggtttatttgttttaatccttgtttcatttagtgcagtgtctcatgaaccccagatttttcctaatggctcccagcatttgggcagattctgtgctttgttctctactgtgatttccattatatgtgcttcatacccccctgagagatgggaagaagggagcttacagatgggtaatctagggtacagggatgctctctaccttgcctcctctcatccctagcatcctctgccttctgctccgcagctttgtggtctctcattgttttttatttttaaaatctcactgccggactactatggaaaatagtttacatttccccacagttggtgtttttctcctacagagacatcccaatgccccttgtcagctcaggagtggagcatggcaacctgcgcgagctggcatttgcaaga

SEQ ID NO: 22828 - DNA, 1118 bp, Mus musculus
ctcagggcaggactctgcctcctgggagtgctcacctgacccgttcatctggcttccaagttagaagaccaagaatgagcaagactgagaccaggttcccatgtgaatcttagcgtgctcttgttaggcctgcctgagcaacaaacttgggctgtagacattccttcttagaaggttgtatgtcccaaatcctacagcaagcacatgtaagatcagacataatgggtttctaagtacacgcaggagggctgatttgaaaggtgacatgggagctatccacattaacctgagtccatcagtcgttagactgtgtctcagggttcttggtgacattgtaccttccaggcctctctaaatagaatcctgtgatccaaggaatgcaatcctggtaaacccctaaagggtagaaagaagtatgaaattcctataaccttcccatgggaaatgagaggcctcggaactcctcaagcctttagttgcacttccccctgcttacaaagagaacataatttgctcttgacccagggaggaggttgaactagattgtacatgtgttctagaaccggggagctgcagggcagcaactgagtgcagacctgtctggctaaaatagagtcacagacacaatcacatatcctatgaagtgagcattatcctgctcacagtcaagaaaaactatgtacatccaggtatagttgccccaaagatcctgactggccactcagccaatatttgatcttggtcattcttgcttgcaatatgtgttattcactactgttctcatgatctgaccaactgttatgtttacataacatgcatgtgctcatgcactttcttccagagccgatgtatgtatccctgtacaagcgtagcactcctattacattgcccattgctcagcacgtcataatggttacattttaaaagataggctaacggcggtattttttagaaaggtgttttaaaggtgcctaaacatcactttgaaaattatgggaaaaaatccagttaccccagtgatgaagactcagcaactttctcacttggtctttacatggaggaaacacaagtttggctttatgtctataaaagcaatgttaaaagtattttaagcataa

SEQ ID NO: 22829 - DNA, 1489 bp, Mus musculus
tttgagtttctcacctgagatgatgtcatgagacatcatcatctctaaacccaaggcattttgttatcagaaataatagttttagttaattacttatattgttgtattgatgtttgattgaaatctaaattttagtttataaatggtcttttcccttttttttcctgtaggaattgcttcatgtttggctgtttcctcagcactaatgaaattgcattttctgacccaacaccagatggcaaattatttgcaaccaagtactgcaacaccccaaatttccttgtatataattttcataactaaagccaattgtaaccacaaatctggtactatgtgggaaagttcagctagatagaaactgattaatcgtagcagaatgaacatactaagactgtgcacatgtacatactagtttttttttctttatatgttaatttgctgaggattgtttgggattcaaagaaaaaaagatctttgtatactttctaaattcttaattttgaaaaacttcacagcaagatggcttttgcagaaactgggctcctttataaggaatacatgaacacacttttagaccatggttgtctcatgctccatcagtagactctaaacaccggctatgagctaactcctgaattccttatgtagcaaccactttacaagcatattgtagcagtcaagttgaaaatacttaaaaagtattttgaatttctgatgtgttaataagataggaattatctcatatccatttatataaaataattccataatcccttagaaaattaatcaaaagcatacttataaagtttaaggctatttgccactgttatctgattttttaaaaaattattacatgaaaatgctggtaggtaattgaagtcatgaatcagactaatggacctaagaacataatgaccttatggaatatttgtacacctaaatgcactcagattttctgaaattggatactagtttgtaaaacagaaaattcaggttgttctaatccttagaggtcattaaactgatacctggcatgagacataaaggaagaggggtttttttttgttttgttttttgtattatagtttgttgtaaaattggttcatctttaatttgcctgtaatacttccaaaaatagtgaggaagtatttaaattataattatgcaagcattttaatgctattttctgtacaaaatctctttaagtgttttattaaaagttttactagcatttcattgttcagtggcttgtgagaaatcaattataattgttactagtgtatgtgtgtgtgcatgtatgcactttaaggtgcctccatggtggttagaaacacttctctcctgccatagcttccgagggtccaagtcaggtagccaggcttctgcaagaaccacatgaagtgataatttgagtccatactaaaaagtgaattatggacaacaataaatccacataccctaaggcagaccgcacattagagaacagcaa

SEQ ID NO: 22830 - DNA, 1202 bp, Mus musculus
tgagtaaaataattgttacattattatacagtatctagcttgtagtaattagtttattatttcacttaaagatcctcagacaatctagaaggtaaacacaattagaattgttataactgtaatcatctcatctgaggaaacagaaatttagccaccattgcacaggtcctcagtgctgaggccaagaatagaattcacgtttgaatcaaaagcccattgggttatatttcctcccctacatgacactaggttaacaataactaaattttaacaaacatttataatcatgatataggtactagtagcttccattttacagatgggagaaattgtggcagagaagtaagtaataatagtttagtgctgttaagtcacggctgaatactgtgatggggaggtggtgtgtgaagggagagaccatgacaagtagaaggtctaagttttgtattgtctgaacatcttgctaaaaaaaaaaaaaaaaaacaaaaaaacattgatttttttttttttttcttcacccatttattgttgaatgtctaggtattcagaaaagaaatttttggcctagtcccgtgtgtgtgtgtgtgtgtgtgtgtgtgtgtgtgtaatattcctatggagctgccactgtactttgagtcaggatttctcactcaagtggccaagcaaagtgttgctgaatcctatcatgctggtgactatggttcctgggttgtaagagtcaacattagcatctgcctaggaatttctctacacttgagtgggtagatattgtcctaagatctgacagagaaagaaaagtccatttttaaagtgcagttagcttctacagcaattctctctatgtgtctctaatactccagaggaaagttctttggctgtcagtcagctctggatttgagatttggcactgaatttactcattgtgttcctttgcgtaggcgattacttctggacctgggctttctaactgttccatacttacttttctcttttaagacctgaagaacagtcttctgtgggatccactgcatgtactaacttcttgaaacagacaaatgtaccgaaaaatattaattccagagatacaaataaaggaggaaaagaccagctcgtcattgtgagtcaatttagagcaaaggtctttccacgcatggcgcgtgcagtcaacctttcacagtggttatctcgggttgtagatt

SEQ ID NO: 22831 - DNA, 1190 bp, Mus musculus
attggttccaaggccctaggaatactaaaatctgaaatatgtagatgatcaaaaccctctttttgtttgtttgtttttttgttttttttgttttttggtttttcgagacagggtttctctgtgtagccctggctgtcctggaactcactctgtagaccaggctggcctcaaactcagaaatccatttgcctctgcctcccaagtgctgggattaaaggcatgcgccaccactgcccagccaaaaccctcatgaaatagaaaattattctcatgtaactcatgttttatctccccatgtgatttattctgactattatcaccaaatacagtataaatgcaggcgcagatagttgtcacactgtagtgcttacaaaatgctgacaagaaagagtgtttgtgggattcctaagtgctctttgtgcttggttggatctgcagaaatagaccccacagatgcaaaggaccagccatgcatgggtgtgcacagatactgtaattaagagtctcaagactacagtgttcagtgtgagaaaaatgctcctcctcccccctgctctgttacttgctgccctgtgtgaggtgctccaatgaaaaagcttcagtctccttagaacattttctgctctgttaccatcttgtgttgtacaacctgatttgtagtgtgcacccctgatcttcatccagaggctgagacttgtgtgagataggactgtacaagctcatcaggaagggtactggtctctgtctgagacgagctagatgctcatcagaatgcttagttttccattgcataactgctttgatctgtaatttttagtcctttttttatgtgtgcttggaggcatatatcattgctcttgcattcttcttgctcatcagttagcactgggcaacaagaggcctgtctaagctgattagtagaggactgggaatctgaaatgtgatagttgtccaaggacagtcccagaccgcagacacacagttaaacattcctgtggtgccagatcacctgcccacacatccagtgagtggcccctgtatggagagtgcactgtcccttttaccagctgggtggccttactgttgtctgtcctcactgaccgtgtacagaagctgacatcggatgtttctgatgctgttcctaaagtttaggactctgatgcagtcctactagcacatttcccattgtc

SEQ ID NO: 22832 - DNA, 1805 bp, Mus musculus
tacattattacttggaagttaaagtaactggagggacttggaggttgtgtccactctcctgggtcatataagagctaatggcagcaggctgtggcgagctcagtcatcttcctgctgctttctgcagccctgctgctttctgcagccctgctgctttctgcagccctgcaccctgagagtcggactgagaaagggcagcgggtcgcatgatgattatgactgtctgtcgggctcaaggcctcacggtctcttttgtctcctgcaggatggtaacgattccgatgagttcatgtgagctgagcaacggaccctgggaagacatgaatgtgcagaccattgcagagcttttgatttcatctaggttctgaattacagaaaccaaccaaccaaaattctaccttcattctacatagacatcattggttttggagtttaaaaaaaaaagtcacctttttgctgatgaaaagaacatatgtataatatagttgaactcgaagacaacttaaagtttagggaaaggagaatatttttggcagaacatccgtcagtacctcatgaaggctggctgcctttgtctttgagatagacattggagcagacggactctggaaagtgcttctgtggctgtggtctgtcctgggaacagacgtggtaaaatgcgtttcctatctctaaaatatctacttctgtgaagaagactggcttactcaggccagggccctcctgacgacggtttcctgactagaagaaagggacgtgggtttgaaggcagcagcagtgcttacttaacctgcatttcagcatttggcaagttctctcttgctggcgtcagagtagctggcccagctcttagcttgttctgagggttctgctgtgaggtgagggccccatctcagcatcgtagttacatagttgatcttaactaagcttgggaatacgtcacctgagatcacaggtgatccaagccgcagatgtgacagctgggctctgaagctatttctgtgtgtggagggagacaggaaagggtgctgtgctagtagtgagagtgacacagattgcctcatgattgtctggagtgtatcatgaaacaaaagtccaccatggattgcaagctttagaacgaatcaagcattttccctagccaggcaaggcattcgtttccttactttggaatagtatttatgttgaattgtaaacccacagttgtaagcttagtgacttcacatgtatgtagcattggtactggtctgagccacctgctacccagtagatagataacctttttgttagtgtttaagggagcccctgaagagactcaacagaacagtgagaggagagagagaaaagctggcagggttgtgactggcatgcaaatccatattctagcacaccacacagtgcccacagctctgcggtgctgagccagcagaaatgatttcttcagcagatgtaccagctgtcatcactgacgtatgcacaaaaccagaccgttgatccctggtattccaagttgagtatgggttgaactggaaaattccctgaggcataacttgttagccaatttgaggagagccagtttgagggttatgaaagtcagcaccagagatcagtgagtgtgagtgtgtgtgtgtgtgtgtgtgtgtgtgtgtgtgtgtgtgtgtgtgtgtgtgtatgtgtgtgatagttagactggagttctgtgatttaaaaaaaattataataaagtatcatttttgtcagaaagggcattgatatctgaattcttagaacttgttttctataaaagagagcagcccccacctcca

SEQ ID NO: 22833 - DNA, 1173 bp, Mus musculus
ccacacagggcaagagaagtctgcctggctggcattcccaggccttatgcatggatactgaccctgacaagttcagagagtttttattcacatgtccagaaaattcctcttttcagtcttacctctgcatctcaagagtggcctggaagaaacccaagcagagtttcatcggcaggtcaagaacctacaggtcccagagcactctgcttgacttctatccagctcccaggaagaccacagggctggaggtgggaggacatatcaggggaaaactcccctctccaaagccaccacttgttcaacctactctgccttgtcttactcccagtaatagccaaggaggaagaagctggtaacacggcagctcttgcctcctcctcttggttgacctgagacagatgcacaatgacctcaccccacaatgacctaagatggctggagttctttcccacatgaacagcaagctggaccaggcatgcgaaaggctgaacgtgcacaaggaaccttagatgttacttctcgtctttcatgaacttcttgaatacactggcagaaagggatgctgggaaaggcctgcatttccttgactcattttgtagagctgccctgatccttcatactccagcagactcaaacactcctgggcagaggctagagctgtgtcctctcttgccctgcctcagagacctgtcttcttcttcctgttcaaaggctctgtgctaccttcttcatcaatatcagtgtgcaactggcttgcacgacccatctacccctgctgtataattgtcctgtctacatatgaaaatatcatgcaacacaatatcgctgacccagtaaagagctgtttccagtagggatgtgtcttctagtgtttatatccaaccggaggatgtgacctcttcagggagccatttcatattgaccttcagagatgtatccctgtcaagggttctattgcagaatctgagaattgagaggtcttcttggagttcctagtggttggcagtgaagcccaaagaaaagtctgaggaattaccctaatggcaaggccaagctggaaaagccacagctggaccctgtagctattggctaaaatgaaagtggaaaatagaacaggcccagaccctagagggatgcttcctgattctacttgtgctctttaagtcaaagaaa

SEQ ID NO: 22834 - DNA, 2321 bp, Mus musculus
ggtgtagactatttttagagatgatgaagccagcctatcaggagatgcctcttattgagtctatttgtcatttatgtttcccaggaagaggtccttgtcaggccacacagggaagccccaggatggtttgagacaagagtgggcaaagccttcacctaggctctcccaccccagtaggacaagttaggtattggccagcctcactgagcatgcatggctttagcatctggtctgaaccaggagtccccgtgttggttcctaggacaggattgtccttgactctctctgtgggaacactgtagggtgtgaggtactctggaatacagctcagagttgtgggtgtctcaggaaaggcagctccagggcctttggcagtggttaaggactgaccagcctcaagttagtgccatagaggccaaagcaccagaatgcagtgagtgagaagacagctagtgctgggttggaacatgagccccactctgttactcagtctttcggcacggaatcgacactggttggtcacctcatgctttgaacgtttcctctggaattgtccagttttctagaacactttttaaacctgtgtttccacatctgtgatttgacactagtccttggaaatcactggaggaaggtatgagaaggagcctcagagaatgctgcttcagtcagtgactgttggtctgggagacgagtcctggccttgctggccttgtcttcattggcttccacctgcctgtccttgctctgctctctgcagattccacccctttcctttatgtgtccctctgccttttctttctcagtcatgcctgtagatggagtctaattgccaactaaccaaatcccaagagatgttgtaaggaaaaaataccatctcaggggtgccctgtcatcgtcaagacctaggacctagcatcccaatttcagcctgcacccctcattacataagacttgttttaaaccacgccgattacccactaattggctctaaatgggtcatgtgcacttgtggattatctaacaagtggagacacagaagaaaccctggtgcaggccaggccgggagcagggacagtgttggcaagccagcttgtgagtgtcagatgcttgggcaccacggatgtgaaaggtgcgcctggtgcaatgtatgtgtttggttaaagaaactctctgaaattactgttataataagtttttaaaagttttttctttctttttaattttcaccttaactcttaaatagggtaatttcaatgacctagactcttagaaaaatttgacttaccccacaactgacatgtttctttcagagcttttgtaaacacaaattcctagtgtaacttgtacctgatctgtccttcccattgtaagattccatcgtgtgcagtgaatgtgctgtgcaacttgttagttgatggacatttggcttgttgcagtgtgtttagctgttatgagttctgctgctatgaaatttgtgtgcaagttttgtgtggctgtgtctcttgattttctgtcatataccttggagtctgttttccaggtcatatgataattattttaagccctttggggacttgccaagctgtttctaagagagccgtcccattttctactcccaccggcagcaggtgagggctggtttgtaacgaattctctctgccctcttaagctgaggaagctggagtaggtctcatttgccctgtagttgcgatctctgatggctggggagcatctttcctcatgtttgctgtgtatctgcttcagagacttcagggtgtttgcccattgggttgtctgaccttttattatgaaggtttacaagtttgttatgcattctagataaaagttcctttgtgtcagatgaatcacataaaaattttcctcctaattcagtgagttgttttttattgtctttacattttttatttttattttattttattttattttattttattttattttattttatttttttagggagtgagagatgtctcattggttgagatcacttctgctcttccagaggtcctgaattcaattcccagcacctctattggatggctgacaaacacttgtaattacagctctaggagatctaacacctggtgccttcatgcatgcatatacatacatccatacagatatgagaagtaatctttttaaatgtatttatatgcacgtgtatgtgtacaagtgcctatagaggccagaagaggccaccaggttccttggagctagaattacaggctattgtgagctacctggtatgggtgctgggaaatgaaccaggttcctttggaaaaacagcaaatggt

SEQ ID NO: 22835 - DNA, 2797 bp, Mus musculus
gacttcctttcttccattttttttttttttaaagagcctgtgatagttgctgtgggcagccagttcctggggcttcctcttgggccccctgcactcggtctcccctggagtttctgaattctctcacccaagtccctacacagtcatgaacaccacacccaagcctagccatccaccccacacggagctgcatccaacatgcagacatgcgccaccaagcagatcccagcaagggtgccccagtcacatccttggccatgcagttagcaccttcctgtcatggggaagatatagtgaattgccctgagctgccttcttttctttttaaaaatttttaaataaggttttctttgtgggactggggaggggtggggagggtgggagagattttttttttttttaatactaaattgaaagcctgattcaatattaatcctcgggtcttgaactggacatcctaatgatgcaattatgtaaccattaagctgattccgaggctggcaggctagggccgcccctctggaaaggttccatgtgtctccatccccatcccttactcttcgggtcagctgttgagaagaggcgggttttcttcattggcctagattttgcggcagattagaccttttgaaggttctccaccattttcgtacgtctcctgtcctggttttttcttctgcactcttggagagatttagatgttggtctcctggtttgtgtttctccgagacaatgctctttttttttttttttttttttttttttttttttcctcttaactctgtctgctcttaaagccaggcaacccagtttggtctcaggcatagcctgagcagatcttagttttgcccccaccaccatagttttgtgctatcctagtttctgttaagattggtgctatccaattcccatcactaggaggtggctgagcttgaggcttgccagacacaggaatggccccgattatgtcaccaatattgtcacatgtgggccaagaatagagtcacatgtggtggaaagatgaggagttaggctgtagaagtgacagtttccagtcaaatctgtaaacccagcccccaagctgagaccagtctccctgtggcggagccagccaagatggggccattctctctgtggaggagccccttccagcctttgtcaggaagtgtctttggggattctagaatgttgggacttctcagtgtgtgtgttgtggtgggggaactttttttttttttctgtacagttttttttttttttttttttctcaaaaggtctaacatggtggtggaaggtagaaatctttgggatacttagacttcaagtcttttacaagagggacaaccctattttgggaaacaatatctcatgggaagaaaactgtacacactgaacgcatagcccgcttagagatcacatcgcctcttagagaccatgtcacctcctatctgtcacccttcctcttcctgtcacagtgacaggtcttcactagctggcttctttctgtacttgctgacttctgtcatatttctttccagatgtgtttacaggtccctgtaagcagtgttaggtccataggcttttatgactccagtctgcaagcagtgttaggttgacctcataggcttttatgattccagtctgctggtatgaagcagagcatcaaaaaaaattcgtgattccttgagtgtccacacgttttgtctttgggggttaagggttgggattttgggtttgttgttaattttgttgttttaaaggtaaattgcacttttaaaaattggttgacttaatatatttgctctttttttttttttacctgcacttagagaggaaatttgaacaccagaaaccactttttttttctccctgtttatttgtttggattctgagaaacttgcagctcttcaccatttactcctgatgtttcttgtatggggccgtggcccttttggttgtttttggtcattttcttaaaaacacaacacaacacaatacaacacaacagttttaaacctgaagatttccgcagtccgtgtaagcatgtttacccgttggctcgctttctgtgtctgttaaatgaatgtcatatgtaaatgctaaactaagtcaacagtgtctcagaactgaataactgcagtgacttgatgctctaaatcattgtaggatttaccgctagatggttttgaacccttgaacctgtgattgtgacccatgaggggggacctttcagtgctaaagctgatcatgtgtgtagccagaaaggtactttttttcttttaatttttgttttattttttgtaaccactgtcttaatggcaaaataattatggtaaaatacaagtctcgtgtttattattccttaagaagtctgtgttatattaccacggaacacccaataaagcaaaatgtggttgtttcagaggtgtgtctgtattgagactcccacagtgtgtcggcctctcctctgacgtgatgcatggggaagccctggcctggcttagccttgggcttggtccagcccatgagtgctcacccccatgctcatcccaggttcctgtgagtatcctggctacaggatgaattctcaacccatgtagtgccattcctgggggatgaggaccacggaggctgaggatcatcagtgtcttaaaaccccatcccggaaaggcagtgagcatcccggagtgccaagccaaatttgaacctggggttcaagtggggccacagaaggcgaggtggggttttagtcgaggtgctgggcttgcttctcatgtgtttactctgggaaatcttc

SEQ ID NO: 22836 - DNA, 1427 bp, Mus musculus
tcaaaagaaagcgtggctttctctcttctttttctctatatccctcttccaggtatgtttgatccccataagccatagggtagaaggagagaaccaattcctgcaagctgtcattttacacacacacacatgtacaaataatgtaatttttaaaaccacaacaagtagaccaatgtttactcatacctttgaaaaatggactgaccttatttaaaaaaaaaattatacaaaacacatatatcctacttaatgtgtgcaacaacctactctttatagggtgtgtgtgtgtgtgcgcttgcatgcatgtatgtgtgtgtggaggaggggtggggcttgtggtacacttcataaagggaaagatgcaaaggtcaactaagttaaatggcctcagcaccaaaatgctcagaagtgaaaccagagcagaggcccagaacaagactttagggatccaccctctgtgcgtcgctcaaatgtgttttcttagttctgtagaggactgattttaagcactagtgttttaaactccttacatctcagacacccagcaggtagtatcaagtgtgctaatgaccaagtctcagtatctccgtgttcaccaagcttgcttttgtttccaaactgacccaggactgcagaacaaagctccctgctggcaatggtgagcctattccaaaagccctgtaattgtgcacagacttgaaaagccatagcgccttgtgagtatgtgtgccaggtcaagagtactagggcaccataaacaaacactgcttagttgcctgccaggcagagctcgggcacagttagtgtgcagcctgtggtagatccctgtgtggttagcaagctgcttggtttctctgaacatccgtttccttatctaaaaatgggctgccattaggatcaagtggcacaatgctttttaagggcttggagtaacgtttggaacttagaagcccctccatatactgaggatctttgtatttttgtgatagttgtcagctcaatgcatgttctcttgattgtttccattgtatggaaacaagtcacaaagtaacagacttacattccagtcgggatgctcctgcagtgaggaagaactttggcttggaagtaagtgtgcactagctggccgtccacatttgtggtaagtattccagaagtagttggtgactgttaatcgacttgactttggaatgatgacctgttcttccgggttgtgggttagtttaactgaagaataagaagttctaagaaaggtggtttgtttgtttatttaagtcatcatctgtgatggtttatctttcggaaatatatttctcaacactgtccagccacagtgatgtcagtgatgggattgtccttgaccactctagcctgactccacgtggcattatgttcctgggaatagctttgccgttgtacttaccaac

SEQ ID NO: 22837 - DNA, 2902 bp, Mus musculus
tggcaacctccaggacttaaaagtagatgatgttgaatttgaagtatcatctgaccagaggactgggaaacctattgctattaagttggtgaagataaaaacaaaaacaaaacaaaaatacatcctgaagaacgaatgaacggacacgttgtgtgtgctgttcctcacaacttagagtaaatctccagctgccccaagttagagtccaacagggagtgtatggtaccaacgtaatggggacgtattttatctgacttacacctctgaagatgtggaagggaatgttcagctggaaactggagataaaattaactttgtaatcaataacaataaacacacagatgctgtaagtgctcgtcacattatgctgttgaaaaagaaacaagctcgctgccaaggagtagtgtgtgccatgaggaggtgtttggctttatcgaaagaggtgatgttgtaaaagagatactctttcactatagtgaatctaaaggtgacctagaaaccctgcagcctggagatgacatggaattcacaatcaaggacagaaatggtaaagaagttgcaacagatgtcagactattatgcctcaaggaacagtcattttcgaagatatcagcattgaacattttgaaggaactgtaaccaaagttattccaaaagtactcagtgaaaaccagaatgacccatagccaggacgaatcaaagttgactttgtgagtcctaaagaacttccctttggagacaaagacacaaaatccaaagtgaccctgctggaaggtgaccatgttaggtttaactttccaacagactgacatgacaaattagtatgagcaaccaacctagaggctctatcaaatccatttcaggtcactaatgaagccagagagatgggtgtgattgctgctgtgagagatggttttggtttcatcaagtgtgtggatcgtgatgctcgtgtgttcttccacttcagtgacattctagacgggaaccagctccacactgcagatgaagcagagttcactgtggttccgaatatgctctctgcccaaagaaatcatgctgtcaggattaagaaacttcccaagggggctggagagatggctcagtggttaagagcaccgactgctcttctgaaggtcctgagttcaaatcccagcaaccacatggtgactcacaaccacccataatgagatctgacaccctcttctggtgtgtctgaagacagctacagtgtacttatgtataataatagataaatctttgggcctgagcaagcagggactggagtgagcagaggtcctaaatacaattcccaacaatcacatgaaggctcacaaccatctgtacagctacagtgtactcatatacataaaaataaataaataaataaatcttttttaaaaaacttcccaagggcacggttttagtcccttcccattcagatcgtcgttttctgggcaccgtaggaaaagaagccacgttttccaatcctaaaactacaagcccaaatagaggcaaagacaaggaggcagaagatgacgactgtggggtggaactgaccattgcttgtcaagcccaggatgtggaaggccctacttctcctcaaataggagagaaggttgaatttaggattagtgacaaacagaggcctggacagcagttgcaacttgtgtgagactgttaggtcataattctaactccaaacggctctcgggttatgtggcatctctgaaagataattttggattttttgaaacagttaatcacaataaggaaatgttcttccattatagtgagttctctggtgctgttgattgccttgaactgggagacgtggctgaatacagcttgtccaaaggcaagaaagtcagtgctgaaagtaaacaaacctcactccgtgaatggcattactgaggaagccaatcccaccatctactctggtaaagccattcgtcctctgagaggtgttgatccaacgcagattgagtaccaaggactgaccgagactgtggaggagggggatatgaaaggtgaagtgtatccttttggcacagttgggatggccaacaaaagggattgcctacagaaaggggagagtgtcaagttccagttgtgtgtacctggccaaaatgcacaaacaacatcacaccccttcataaggccactgtgtggaagatcagtttggctttattaactatgaagtaggagatagcaagaagctctttgtccatgagaaagaagttcaggatggcactgagctacaggcaggagatgagttctcaatgagctttaattggcgcactggaaagtgcagtgcctgtaatgtctggcgagtctgtgaaggccccaaagctgttgtagctcctccacctgaccgacctgaccggctggtcatcgctttaagaacatcaccctgaaagacgccagtgctccacatctaatggttcttcatcagccaagaggaccagataactcaatgggatttagcgcacaaagaaagacctgtcaagctggtgtcactgactaaccacgtccacaaagcacatcattaatccgccatggtcaagttggggaggttcttgtgaagggttctgagtatcttcctcttcatctctcccaaaatctggagtacttatcctattgagctattacaccagttttaacacattccttgtgttatgtgtaaataaataaataaataaatttaagaaaccattttaaaattatgcaccgttgcagcccggaaaacttaaggtggcacccgccttatagtgtcaatttaggagctttatttggtgcatttaatgcaactggtaattgcaaattccacttggcctgtgtaagtgaacaatacagactgctactctgttggccctatgaaattctgcactgcagtcagtataca

SEQ ID NO: 22838 - DNA, 2394 bp, Mus musculus
gtctttgttttgttttccaggacaaaaacaagcttccctaagcttgaatttatagttataaaatgaaaacaaaaccaaaaaaagaaaaaaaaaaaagcaagacacaagaaaaaaaaatatcctgggcaataaaaattactttaaaccagctccagagccgctcttttcctaagcctcctgtgccgccttcagtttgtaggaggcagcctgtgtgagtgacagacaggaaacagaagagtagaacatactggcagagttttacattaggatattgctgtcttttctacgatagagaatctttatttgtaaggaatgtttcaggcctagacatacatgaaacttatttttgaggtttttgtgcttttggtattttcatgtgttacctgcatgtgaatttctcatgactttgtttttctagtttcttttttttttctaagaagagacttggaacgagtctgattcatggtgttaatagaggcttcttgttttaggaagctttgcttacactctggagcctttacactctgaaggagaacttcagggttattccaagtacttgtgtgacttggaaaagtagacttgggttgtgggaacagttgataaagttctggaaagatgccattcattctacagtcttcccaaggtgtcctagtctctcccaggcccctgtgattttctcacataggtgtcttctcagttctgtcaaattcctgatgttctgcaatactcagaaaattctttgaatggcagactttcttttgtctgtttctaaaatgtgaagctttaggaccaaattgttagacagcatcaggattgcggattatctcaagtagattttgttagagttcagagcacagcatcactctgaaggagtctgtcttataaatacataattactgtttaagatgtacactttgctatagttacagaaccattgtgaatttcaaagctagcaacctacacggtgcaccaggttgacttgaataaatttggcaaccaggtttgcaagcgtgcagaaactaactcctctctcacaaaggcttataaaattggtgtgtcctatggaaatggaaagaaagatagataagacatttctgtcaattttcaagaacttggctgtttatctttaagaaagataaaatatatatccaaaataattttgtgagttattttccttctggcatttaatacctacatgatttgtgagctacttctgccttctccttctctgctcttaaacctggagacgcttgctctgccttctcccctatcacttcaagtgtttatacctgagtttcttaggaagaaagtaagtctgatggcttgttgttttgctgtagttgttttgaaaagccgaaatcaaatggtcaaggctgctgaggctaaactccagcagagtttgcagcgctgatgtgtgagctggcagagcagaatcactcttcaagcgcttgctcttacaggcagacatcgttttctctctaaattcagtagcagtttcatcgacagtgccattgaactatgggaacatttatgattttctttcaacattaaaactgaagttagttttgccatttttgaaagtattagtaaaatcatggaatacatcacagaacagctgtccatcagtgagcttgtacagtgctgatttgcagctccaacatgcgggatgttcatcctcctacacagattcttgttgggtgaaacagattgtcctatcacaaagcagaattcaacaaagttaaaatttaagataaggtttaaaaagctttattcctgtttacaatttgggatgagaagcaggcttcgttttaagtttattgaaaactggctcagatgtttataagtcaagaggaaagcggcacagagaacagcacagtgaagagtgaaatggagaaaactctcacggtgaagcagctgttggaactcctggtattaatggagccagagtgacatgcatccttcgtctgtctcatcagcactggcgtcattccttacagtttacagaactcatgtaacttgtagctataaacattttgtgccattaaagctctcacaaaacctgcctgtccatatatcattttgacttcactcttgttgacaaaaagcctttccgtgcctacatgcaacccttcccatggagagctcaccaggaccggaggacctaactgtcccaagtggtgctgcacaagcctttcttttgagagtagtagtaagtgaaatggtattgttgaatcagttggagtttgtagtagtctgggctggcctgacattaaacttggttactgtggaacgatacatgtagctcactaggagagtgtttgcctgccctgtgaagctgtggattcaacccacagcactccttcgtccccatgtaagtagggactaaggattaaa

SEQ ID NO: 22839 - DNA, 1798 bp, Mus musculus
catcatgaaactttgcttccttagaaacaggtaactcagacgaagaagaaaaatgtgcttaggtgctgtcaactttgttcagttttttagatttgttttttggaaggagggtttgaatgtttgtggtttaatatcaacagcttctatgtcctaactcaaataaactgaagagaagttgcttcctataaagtgctgggccaggatggtcactgacttcttacagtaaacacagtctctctcttgttaacatgtttgactgggtgttctgcctttacagtgttgtcatgactggatcctacaataatttcttcagaatgttcgacaggaacacaaagcgggatataaccctagaagcatcacgagagaacaataagcctcgcacggttttgaagccacgcaaagtctgtgcaagtggcaagcgaaagaaagatgaaataagtgttgacagcctagacttcaacaagaaaatccttcatacagcctggcatcccaaggaaaacatcattgctgtagcaactacaaacaatctgtatatatttcaagacaaagtgaattaggctggcattctctgcagaggagccacttcctgcttagtgagatagttgaatctagcattcatacctataagagagcggtccattgtggcgcccctttccagtgtttgacagtgtgccattcaacaacacatttgatagcctcatggagaaagctgtgtggatgcatcccaggctgttttccatgtctgctagccatttagggaagggaagggcacttttaatttaatgacttcttgcaccatcttgcctggtggactggactggactgtgtcagcattgatgtactccactttttatgccttccattgtgatgacgtcaaacacagtgaacgccttcagtcatgctatggaatttgtgtatcctcattactgtatcatttgtggggtacacccctcccctcttttttaaattaaatacagctcattcttactgtggcttgtagcattcctcctctctggcctcctggactcttccctccatctctcacccttgccctttccaccttgtctcggtggtggcgtattcaaaaaaggaagaacgaaagcacacaaaatgggtcaggttggggtcagtggtaatgggggaatatgttacgaacaaatgttttaataacagttggctgtaatcactccttgccatgtctggcactgaaaataaggaaaaaaaaaaaaactactactgaataaaagtgacaaagaatggagaatctggttttctttttctttttcatctacctctttaaaccaatgttttgtgtcatatccttgggcgcaatgaaatgaagtgggtttctattgtctccttggttttttttgtgaactatttttaacgagtgttcttttccatggagcctgggagaggatcatggttctgtgcgtccatgtgtttgaatatacatgactgttaagagttcacagtctagaaatggctagaaggttctggggtttttgttttgtttttgtttttatgtgtctgtgcttgatttatctgttaacaaagttgctgtcaatgagaaccacagttgaggagcttcactctgaagtcttcttccagtgcttcatttctttgccttaggaaataccaagtagacaagttgacttttctcgctgttcaggcacagtagactggaattccgtctggaagtaacgtggtagatgaaaccggatgctgcactaaagagctgttttgtactaattgctgtggaatcactgaattgtactttgccatagatacgtctttt

SEQ ID NO: 22840 - DNA, 1137 bp, Mus musculus
ctccacagtgctgggattaaaggtgtggtggctaccatgcccagctgcattaacttcttaaatagggaccactttcttcctgtgttgtacttctaattttaaatacaatcctggtttgtcttctttcttggaaattttcagtggatcattggatccactggattagaaactagatttcagcaggcaaactatgacatttctttagtatgttcctcttaagctattaaggggctactaaactgatactgtacaagcaaacactatgcattctactttggaatgtttttgctattcttgggattgaaccctagccttgtgcatgctaggcagatgctacaccacttagctacatccccagtctgttaatcccattgatatgtcagacatcctcctacaattgttccttagtcagaatcccactcaccctcagtcacactataaccttctaattacctcctgtggaaatcatttttaaaatctattttacattactttgttaaataagtatatttagtaccttgagtctccactgttacactttaagcctagtgacaaagatctttgtttctccgaaaatgtcatatgtaaactgcttggcctagaacaacacctggcatacagtaggcattggatatcttgagtgtcagtgttcctgttgctagggtttttaaaggggaagcagagagatagaaggtctaggatagtagaggtgaacttctgaagaggtctttctgtttcttgtttgcagctttataatgcagagaagggtccaacaatttagagtctgttgctctgccttgagcctttctgggttcctgtacttagccataaaatgaatgggactggatgaagtgatttctgctgtttctttctgcttttgttagttctcagatgtcagaaggaggtagcgccatattcttactactgatagttgttttaagatggttactcagtagggaccttaattaagaataatgtctttactggactgacttttcaaggcttaggagttttattaggtatacaaaacagagtttgacactcagctacaggctcttgctatctttgcctttttggtctttaaggcaaggcaggacacttatatgctaagttactgtttcatctacacaggtctgc

SEQ ID NO: 22841 - DNA, 1162 bp, Mus musculus
tagacatttgtgatgagtgtgtctctaagctgaaatgaggaaaagtggttcttgtgttacttacggggactgtaagtgtttgagggtcactgctgactgtcctttagttttactgctatcacaaagtatgagttgggttagatggcttggagaaggtgcctctgccaacctgacaactgagttcagtcctgctttagcccattaacgtttcaagtaactattaatatggcttgatttacatctactattttgccatatgctttgttttcatttcctttgtattaaaagttctgtgttaatgtattagtatttactatcttttgagctatacttcattctgtcttattctcttgctctgggattccaacgcacattcttataggtccttttggccatatgcatagctgtacataaaacacacaagtttatacaccctgtgtcttgctgatatacccttccttcctccttccttcctgtgacttatagtcctttttacacatacacatttacttggttgtgacgcatgcatgttgtcgtttttgctttaaaccatcaatgtctcatgtaaggtaagaggaaatagggggttttctgtgtttactgaacttcgatacctatttctgttccacttgtccccattttgtttgtttgtttatattaatccttaatgattaaatttcttcctggagctttctttcagcttcaaactgaatttctttcacctttcttgcagtgaatatctgctcaggcttttgattttaattctaaggtagatgggtgggtttcttcctgcgcagataaggcacaaggccaggttatgtttgtcacctagatgaaataaggtactgccaccttcttggcagttctttttcatcctcatgagacttactgtcattgtacttgatacccagttctacaatccgtcagagtggtaacatcataacaagggccgatgtgcctttaagtactccacttaatcccacccagaacaggggaagaagcgatgctgtgagcagtggggttttgttaatgtagtctaatatttcagactgcctggttatttgatgaacctggccatgagtcagacaggttagaaagttctttgttagtctaggagatggctcagccattccgagtgcctgctgacctagaggctcctagc

SEQ ID NO: 22842 - DNA, 1103 bp, Mus musculus
atacacacacacacacactcacctcattttgcaggtaaagacattgaggcttcacacaaaaagtggactataggcttttactaacaagcccagcttgctcacatatgacataccccaagataacatctctaacaaggtcttgactgcctagccccagtgaagatggtatttgaaaagtcccagatagttcttttttttttccattttttattaggtatttagctcatttactgtcccagatagttctaacagacttgagtgttattggcaaaactgaaagctttctggctatgacttggatatgccctgggcattctcgaatctctccaatggccttgccctgagtcttttcttccaagttcaagtgaacaggaggattcaagcatttgcatacccgcctcttcacgtctttgctaagggggatgcaagatgcccctggttcatcacagccatcagaggagcaaaatacagaggcatgcctggcacagcactagaaaagttagtatacacaccccagaaagccacaagagtctctttacttccatgatggagcacccaatgcagccatggaaagcacacgggctctgaaatggtctcaaagctcccgtgtcaccataagatttgcacttgaaaatctgagtgtttgttttctcacttttcaaagtgggggatagtccctcccacatgggtggttgtggggtgcaattaaggtttggaacggggtgtgcatcagtgactttcttctctctgctaaggtaaggtctgatacggtttggtttttcttcagggtatatgaggttgaattcagatatgcatcttccctaaaaaaaagaaggcagcctggggcaccatttgcacggaagggttaataagagttgaagattattttaagtacaaagaaccaggccctggtgtgaagaaggagggaaggaaccagaagggtgctagagggtttccagggagcttgggacttctgagaagaccctagcaggctggtgaaaaaggactcgaagatgtcaccttgctttgcaggccgccattgaaaacctgggtgggaaaagaaccaaatcctctgcctcttcttgcagtgacagtagcagggg

SEQ ID NO: 22843 - DNA, 1183 bp, Mus musculus
gcttcatcgagcgcgtgcacgagctggagcagcagaacaaggtcctggaagccgagctgttggtgctgcgccagaaacactctgagccttcccgcttccgcgccctgtacgagcaggagatccgcgatctgcggctggcagcggaagacgccactaacgagaagcaggcgctgcagggcgagcgcgaggggctggaggagactctgcgcaacctgcaggctcgctatgaggaagaagtgctgagccgcgaggacgccgagggccggctgatggaagcgcgcaaaggtgcggatgaggccgcgctcgcccgcgccgagctggagaagcgcatcgacagcctgatggacgagatagctttcctgaagaaggtgcacgaggaagagatcgccgagctgcaggctcagatccagtatgctcagatctccgtggagatggacgtgtcctccaagcccgacctctccgccgctctcaaggacatccgcgctcagtacgagaagctggccgccaagaacatgcagaacgccgaagagtggttcaagagccgcttcaccgtgctaaccgagagcgccgccaagaacaccgacgctgtgcgcgctgccaaggacgaggtgtcggaaagccgccgcctgctcaaggctaagaccctggagatcgaagcctgccggggtatgaacgaagctctggagaagcagctgcaggagctagaggacaagcagaatgcagacattagcgccatgcaggtatagtacggtttaagctcagtgggggtggggaggtccacggtaggggcggcggcggggggggggggagtcagggtgtacccagagagtgaacgctagggggttctagagcacagagcagctatcagagggcttggcttccgagaggttgtggaaaggatggggcatttggagggggcggggcgcgactgctgcctggggattgcttgttctggttgaatcagggttgttaggggtgagttgggaggaaggggcggagggagtcggagttgggcgttgccaagtaatgccttctctttactgacaacccttaactcccaagttaccctcagtacttcctggatctcctggttaataaatatgcctgctagctctcactagttttgggccacccagccttgggatagtttttttttttaatagggacacaagaatacagtcac

SEQ ID NO: 22844 - DNA, 1163 bp, Mus musculus
gcgtacagagggggaaactcagaggatagtgatgacctcaaggcacacaactgtactgttcccgagggtgttcaaactctaattcaactctgttgtcaatctgcacttgtaaagagggagggatgtgggaaatggaagaatcactgtgcatttttgtaattgatgacgtaaatgatgctgaaagtataacaacgtaaaaacagaattctaggcctttaggcccaggcttgggaatgtggcctttgtaaaggtatgctaatcataaaagagatagcgacattcctctacccacccgcttcctgggttcaaagagtgctcattcaaagaaagtcaccctggccattaccagaacctgcaatgcaaatgtgctattgttaggggctctttgaagctgtcttgagagttaacaattaccaggtattccttgtgactcttgtaactttacacttccttgtgactcttaactggtatctttggtatcttccaacaaagccctccccacttccttgagttccggtttcttcctttaaatacccccttacccagctactcggggcgccacggtcctctacccctgcgtggtgtatgaccgtgggcccgagagcgctcttgaataaaaatcctcttgcaatttgcaacaagaccgttttctcgttggtgattttggggtgtcgcctctcctgagtcagaacgtgggagagtcctcacgttgtgggtctttcaatgccctagagataaggatgctaaatgaaagacccatggcatggctcctccgaagagaaacagagggattagatggacatctgtatgagttgtccgccgtgggtgaatctgagagttggtgtgttgtaggggctccactctgcactctggagctagattccctgttaactctcagctcagtgatctaacttctgacttagtgtccctgcagccagagacagacttagagagataccagattctagcttcctgaactcttggaggtttagatacactgcctcactgtcactgaatgtatttggatgcatgaatttcagattgttttcttttaaattccaggggtgaagcccagtgtctccaggggtccttaataattattctgtttgtttaattgctgagtcagcaaggccatttattgatttagaaaagttcacatggat

SEQ ID NO: 22845 - DNA, 1512 bp, Mus musculus
gatttataaggatatccaaagataaggagtcgtatagacacaggaaaataaaaagtaactggtcaacataaaagtattgactgttattaataatcactcctttgttcaaagtgggaaaggaatgttgtgattccaaatgaatggcttgttattaagtcaaccatatttatacacagctacttggcaggaagtcagctagtaggaagaaaatgtcctttgctggaatccccagaggcaacagtacaggtataagaaagaggatcctaagtcctcatccaagcagaagccctggcctccaacttctaagactgttctcagccctatttgatctccctgggcctgtctcttatacttattttaattaagcacagtttcagcatccccccccccccaacccttctttctgttccagacacacagagagactgagaggagatcccaagtaaaaattttaaagtctgaataattaagaattgcctgattagcttcttcttcttcgggaaaacaccaaatggcgatgacaccggtgcgggagggggtggggcggaggggggagcggagggggggggcggagggggggcggcggaggacccggggggcccaggattaggaggccgcagtggcttccgcggaggaggaggtcttaggggccgcgtgcgtcgtggccgaggccgtggctgtgatcgaggccgcggggctcctggaggttaagctaaagacaaggagtggatccccatcaccaagctgggctgcctggcatgaagatcaagtccttggaggagatctacctgttctccctgcccgttaaggagtctgagatcattgacttcttcctgggtgcttccctaaaggatgaggttctgaaaatcatgccagtgcagaagcagactcgggctgtccagcggaccaggttcagggctttcgtcgctattggggactacaatggtcacgttggtcttggtgttaagtgctccaaggaggttgccactgccatccgaggggccatcatcttggccaagctttccattgtccctgtgcggagaggctactgggggaacaagattggcaagccccacactgttccatgcaaggtgacaggccactgtggctctgtgctggtgcgtctcatccctgcccccagaggcactggcattgtctctgctcctgtgcccaagaagctcctgatgatggccggtatagatgactgctacacttcagccagaggctgcactgtcaccctgggcaactttgctaaggccacctttgatgccatctccaagacttacagctacctgacccccgacctctggaaagagactgtcttcaccaagtctccttatcaggaattcactgatcatcttgtgaaaactcacaccagagtctctgttcagaggacccaggctccagctgtggctactacataaggattttgtacaagaaaaataaaagaattaagtctgctaaaaaaaaaaaaaaaaaaaaaaattgcctgattaatcagagccaagcatc

SEQ ID NO: 22846 - DNA, 1185 bp, Mus musculus
agataggaaaaggctcagtgaccagtttaggatagccataacctatctcggtcattggcatctttggagtgacatccaaggatggaccatcccacctgtgtacaatgataatactttagctgtgtgtgtgtgtgtgtgtgtgtgtgttcaggccatgtgacagtcaaccatttaatagatgagtgttaatttattatagataaatattgatctttaaaaatgggatgctcttaattcatgactttttaaagaattggattaaatatagctacttttatgtgagctttcccctctgtccccctgccccttctctctgtctcatttctcacaaccatcaccctccagtgtcacccccaaggctatatctccaacatactgctatgccattaaggttttatttaactttatttatggataattatgtctatgaacaacaaatgtgccgttaccggtcacacagtgtgtgggataagagtggcctagtgttgctttccgaatgtcttaaaatacctgtggtcaagattgtttttgcctttgtggcctttgggtttggagagcagcattgtgttcacatgtgtggatgtctgtcgtgctgctacagttgtaacactggagctggaaaaaataaagcattgatcttgaaaccattgtggggtctttgtggggatgcagaagggtccggagaatgggttcagaggagacttgatgcgctgggaactagctgaataggaagcagatcatcttgccagcagagggcgctcatgtacatcacacggcctagaggcctcctgcttgaacatcaggaggatggctccctcaccccatccccaccccgcccccgcacatacctctgtgcagagtccgtcaggaacctcttacagagaaagtctcagatgaccagagtccacagtctcaaaatatcacagccaaagccagagagtagaactttcccaagaggtacaggtgaggaagcctgaaaggaaaacgtttgctttgagaacgctggactctatccccagaaccaaggccaaagatctgctcagtatgactgccgagtctctcccaaaaaggtacaaagttagaacggaggctaagcctggaatccagccatggacacaggtgccaggtgggcaaaggtgcagagcggagagtgccacggagcaactgtctgacttgtctcctcct

SEQ ID NO: 22847 - DNA, 1361 bp, Mus musculus
tacaggagttacaccacacagctgaccatgaatatccccttccagtcaattcacttcatcacctatgagtttctgcaggagcaagtcaaccctcgccgggactacaacccacagtctcacatcatctcaggaggcctggccggggcactggccgcagctgccaccaccccgctggacgtctgcaaaaccctcctcaacacgcaggagaacatggctctctccctggccaacgtcagcggccggctgtcgggcatggccaatgccttccggacggtgtaccagctcaacggccttgccggctatttcaaaggcatccaggctcgagtcatctaccagatgccttccaccgccatctcctggtccgtttatgagttcttcaagtacatccttacaaagaggcagctggagaatcgaactctgtactaaaggaatggggcagtgggaagtggttctgacatcctttgttccagcttcatcctcttgttctcgcacccagggcttgtcctgaagggtgcttgcgccaggcccttcgttccctggtgccgtagagagggaggaccggcctccactgaccagcatgctgtctgtggggacatccgaggtggtggtaggcgggagaaacttggggagagggagaagttgcttttctcctccttcctccagaggaatgtagcttttctgcctcactgtggccttctccctagatctttagatcacaccgcagaggcaaacagtgacacagcaaagaaaaagtttatgtacataaaagtaccattaccccagtctgaaataggtggataatgtttatcctttatttttctacatagagatttttgaaattgtgtgtgcttgtgtgtgtctataaataatattagagttgggaatgatggacctgttttgtttttttgttttttaaataagagagttccattcttccatcatgagaagtaaaacaaacaacaacaacaacaaacaaggggaaaaaggcaccaaagtaataaatggctttatgtggcctgaaattgtgtgtagcgcccctcccatgggagtttaacttgaatgtaaaataataaatataaagtttatattttgaatttctcttttcatggggaaaaaggtacgttgaaaacaaatcaaaatagtctatcacttggagcttttttttgttttgtttttaattttaattttaaatacagttaccctgcgtgcctttctgtcttttctaagacttccaggaccaaaattagggtcctggagcattttctccctctgtagacacccccgtacagtcctcagcaccatggctgtctcagtagaataagaatggctggccttaaccttccgtgtgagtgatgtgagcg

SEQ ID NO: 22848 - DNA, 1150 bp, Mus musculus
gttaagaaaatctcgcttctcctaagccgttgactcattaatgcaccatgtttggtccattaagctgccgccgtttatggggtcgcttacagaatgtcgtttctgtatcttcagttcccctttggggccattatccttaaattggatttcattttagatttatgtgtttatctggctaaacttatgaactgggattcccttttgggaaaaggcgggtgtttttgtaatactcttaagaaaggggggagatgtgtgtatattataatacaggagtatcataaccagcagggcttcattctcatcaagtcatttaatagtgatgcactgcataaccaaacagcaacctgccgcatgctcagcagagccaccagcagccaggaagcagggggagagcatgctgaactctggtcaggtgaggccaggtctcatccaagcgtgttactttaaaatctgtttctttggaatttcaggattggcatttcctgtctctttcctgcctcttggcattttagcatctctccagtgggctgtcctcgaattctgaacaccaatttacgacaaatcgttgtcattagcatcctggctgcagctgtctcccttttatacttctctgttgtcataatccgcagcaagtatgggtggctgtcaaaggacaagaaatttcaaaggtaagagataaatactttgtgttccaggaggaacgtcataccttctggctgactttgttccagacagagcactgggtagcttacagagttcaagaggtgtatttctcacagttctaaaatggtgttctcaacctgtggttcataaccccttggaaagtcgaatgaccctttacaggggtcgcctgagaccattggaaaacatagatatttatattacagttcataacagtagtaacattacagtatgaagtagcaatgaaataacccttatggtatcaccccaacatgaagaactgcattgaagcatcacagcatgagcaaggttgggaacccctgttctagaagctgggggctccgagagcaaaacgccagcagagtttgtatccggtgagggccttgtcccagttgccacagcaagaaggggtgggggtcactctgatgtctcctttctcccgatctgttcacctcccagaggtaactca

SEQ ID NO: 22849 - DNA, 1461 bp, Mus musculus
cttctctacctgctgcggctgcggcgcatccaccgcagggcgccccgcactggctctctgtggatggaggaaggcctgccctcccagaagggccctgggcccttgtgacagacactgcgtcagcctgaagaagactctacaggaaaagccattttcacctcagggtttcttgtatgctcagacggttttgtttgcccctttcctttctgttacaaaaaccctctgattgtaagccctgctgtctggagggactaccattgtgaacacagctttaacaggaggggtgggaataggaagttcactctgccacacatcagcactttcagcacacgcacttgaatgcagtgccaaggggacagtggcaggttcccatcagcatgggtggcacttcagagtgtcctgggacagaaccaagccgtgagttagaccctctttcctctccaaacacctcaacctagaagggaggcgtttggttttatttgctgctcaggtccatcaccatcggtgttttcttgacagatgtaagactttagtctttcataggaaaaatcaacaagatggtggcacagggaggtgacactgaagagtggtcagtgatgagagctccagaggcgagccacgctctgccgcagacaagcacacacctgcaaagcagccgcgcttgtcctgtgctgagaatctctgtggccctctcagagcagccttggggtttgtttgagtgctcatttgttttgtttgtttgtttttaaaccagaaagttcttaaagttcccctggtccagtggtctgagagagagctgagtgtgccctacaggtgcccagcgcctctgagccgaaggtctgtgctgttgagctagctgctccaggctcttcctcttctgagctgtcgtcccactgttcagatctcttcactgtttttcttcaggacaccccacacattgcttgacagtccttgttgtcacgctgtggttgcagctgtcgttggcaatgccactgtaagcccacaccgtggaagagcctgaatttaaaataagaaataaatgcacacgttgaaaacagacttgacattttaaacagaaacctgaaaaggacaaccagggacatgcgaggctagtgggagctacgctcattcattcgttcattcgtccacttgctcgtttgttcttatgctgttgatttatgtcagaaatgtggggatccctgcacatgggggtcgttttgtcttggtagtgatggtgacgcacatacttcctacctccatagcacgtaagttgaagtagttggcagtagacgggtatttggagaaccttcagctgcttattcaaaactgagagagaagaactgcgactccaaagccctgtcacccttagagagagaagatgtggcgcatgtcacattggccacttaagacttcacatttatgaaagaaacccaagttcctcatctcttcaacatgaccatt

SEQ ID NO: 22850 - DNA, 2044 bp, Mus musculus
ccagattttgacagtgaggaactggagaaggagttggacatcctccttcaggacaccaccacagaacctttgagcctgctcgaaaccccccaggagacaacgctttataccaacagtgtgcctaagcctaggatcttggatgctgaacttgaagctgaacttgagaaattgtcattatcagaaggaggtatggagttgtttctcatatcctagatgtgtgactctggctgacagaggagccaggcatagaactgacaggttctatcccaagaactcaggttgcctgcctcctaaaaccctgcaagggagaggtggttatatacacggagaagcagatgttcaagctctgagatgctttgcttgtaggacttcctgttgaatgttatcttttcttctcacaggtttgatcccaagcagtaaatctccaaaaaggcaattggagccaactctctaaagccattgcaggaactcaagtgaaggaccctcatgtatcagagaggcagccttgcgcgtgtacatagttatttaatgagaaacactgagaagtcgttggaagaggagggaagaaccacttggatgtatctggatgctgctgctcacgccaagacagatacagcttctggaagccatgctatgaaggtgtgctcccagtgatgtcatggacctaccttctcgtctttatagtgccacaatttatacagttctgtgtttgacccgtcgtcttcatagcctgcagttcttgccattggctccgttaggtttgtcttcacccaccagcttcattccagccagtgaaggtgaaaggtttgcagctctgcccatctaagctagccctctcttccactcgtgaggtctttaaactgctcccctagcctgtgcttttctgggaatgggagtcaaacaagttttattcagagagacccaacagctgagtctggagaaacactgtccggaagatggttctctacattcttcgtcacagtctgggtattcgaggctctgaatggttcagggtcatggcagtttccagggtggcttatgtgattgggggccacaaccgcttccatcttagaagtagatctgctgatggagtgggggaaaggattaatctgccttttcaaggtgagcatgagaaacacaaaccctaggccccggggtgtgaaagaagctggattcatgatttggccccattataaaggatgtgttttctggagcaagccactgggcaccacatcaccctcaactggctccctccctgttaggatctggaaagtgtcttatctagtatccaccactcagggcaggggcctgagccaggatgtgcaataagaggcagggcgctgacctgccgcatctgctgcgtgctgcctcctgccggccagcacatctgtgactccaggaactgtaggacaggcagaagtagatctgaatgctctgggggcagcatggagaagagacatgacagccacactgccagtctgctgcccagggacggtggctgcctggacctctttgcactggcccttcctgcttgaggtgacttgagcagaggggagaactttgcctcaggccaggagcacgaatcattgttcaaagagtctctcccactcagccttggcaatggaaatagctgggggtgaagaaaaacaatcactattttttcttttttaatctggtaaataattaaaagagaaaaacaccaggttttgttgttgtctattcttagctggtgtcaagtttttctttttcttttcatttgtttgtttatttgagctagggtctcatgtagctgagactggccttgaattcttttatttttttatttttttggtttttttgttgttgtttttggtttttgagacaggatttttctgtgtagccctggctgtcctggaactcactctgtagaccaggctggccttggaactcagaaatacgcctgcctctgcctcccaggtgctgggattaaaggtgtgcgccaccacacctggctcaaaagatgtgtatcccaggctagcctcgagctccaggtcctcctgcctct

SEQ ID NO: 22851 - DNA, 1322 bp, Mus musculus
aacgctgcagcccaaccagagacagggccaggaggatctcagtgcgtttgaagtcagcctgatctacttagtgaactcaggacagccaaggctatgtagagagccccgaagatgcaggctcttcagtattatgagaatgtacttaattttttcttgtagtagttagtgtatcatattattgtattatttatattattactgttaagtactatgttctcttattagaagttgaacacagaacctctgagaacacatatgctacaagtgttctaacacacctccagcatcccggattacctttgttcctgaacaaggcacaattggtagggtatgatagggcctgcctatcatcctaacactccggtgatggagccaggaagatcaagagttcgaggccagctggttcacataagatcccatataatgtgcaggatggctaaacttgctgagagctgactctgtggtctcctgtcccagattctagcgatattcattactaagacccttgtccagagacaaaagaccacctctgtaacagagggaagaataaaacagccctagggtggaaactccttgtgaacacagccactgctgtttactgttagactactgctcagcactacacagctgcacggcacctccctgtgccaggtgctagtgggcagcctactgagggtacatctaacttgaatctaacacacttgaagtgagtttgctggtttggacacagagggagcattaagtgctacctggggtgacccttgaggaccacgccccctgtaagcatttgaccattgtgagagtaaacactgaaactcaccattgtcctgcctcagcctttctagagctggaatcataggtatgctgcaccggatccagaaggagaaataactacctttagatactgtgatagggatttctagaaagctgccacatacagatttttgtcctgtgtgaattcctattgttttttgtttgtttttaattttttattatttattttcttcattcacatttcaaatgctatcccaaaagtcccctatgccctccccccccctgccccccgccctgctcccctacccactcactcactcccacttttttttttttttttgagacagggtttctctgtgtagccctggctgtcctggaactcactctgtagaccaggctggcctcgaactcagaaattcacctgcctctgcctcccaagtgctgggattaaaggtgtgtgccaccatgcccggccttttttttttttttttaattaggtatttatttcatttaaatttccaatgctatcccaaaagtcccccacatgc

SEQ ID NO: 22852 - DNA, 1139 bp, Mus musculus
tcctaattacgatccacatatcaccacctttaccctctctctagacttacgaggtgaagtcccatgagggagtaggtcatgaaagttctggggtccccttccctgagaaaatgctttaggtaaggaaatactggctgagtccccaggacctagctaggttgcttaagctggaattaaagcaaccccagaaacaaatgcaacctacaattgtgtggtaccgggacctcgagttctgatctggtcttgtcagaaggaacaagtagtagcaggtctcacagtgctgattttctgtagtctgagcctggaaccgccaagcctgctgctgcctagtagttaaaagccctccagagttgctggctggggaagtgtgttgtgtgctgccctctactagctggtgtgccctgctgctgaattctaaatggcttctagtgtggagaagcctgcactcatggaaaaggcaggcagcttctcacaccttccttggacgatacaggggtatctctctcgggaactgtaaatgataggtagatgtctgtcctaatgagcaaggggaattgggtctcccaagtgatttacagggctgagccgcctggcatcactggtaatgaggatggacaggctagtaggagaaagatctgtggaggtggaggaagaccaaggagaacaccatgccccacccaggccagttcacccctcagggacccacccctacccccacagctgtcagagctggtgtgcagcaggtggacccctgtggccttgtatacccacagtggggggtggggctgtgagtgagccaggagagggaggtgctgcttgcagtcccttagtacatgggtgctctggattccagggagacaaaagcaggagaaactccagtgtgggacaagtctggcataacacccccaggggtggggcagtgtcccaagaacatgctcctctggactatgtcacatgtcactcagtgttgtcttagaggatgggggtaaaaacacaaacccacaacccctctccacacacctttttatataaggtttcatatttaatttggtcatgaattcataatacatgagtattttgtatctaatgacaagtcttgtactgttttatattaccaacacacttctaagaggcataag

SEQ ID NO: 22853 - DNA, 1366 bp, Mus musculus
ttgggccccttatgattgcagagtatctacgggcactgcccagagctgctgctccgtaggcctctatgtggagtctctgctccagtagggatgtgtttctgtaccactcacagttccactgcgcgtaccagttggccgactggtgtcttcaccatatctgcaccaactacaacaacgtgtgccgcaagttccccagagacatgaaggctatgtctccaggtgagtctctgtgtcaaccccacaagtttctgtgacagggctaacccaaagcatgggcagggtaggcttagcgctgccctgaaaatacctcctaacttcgcacccctggcattgttgtctagaaaaccaggagtactttgagaaacaccggtggccgccagtctggtacctgaaagaagaggaccactatcagcgtgcgcggaaggagcgagagaaagaggactatttacacctgcggaggcagcccaagcggcggtggctgttttggaacagtccctcatcaccgtcctcctcagcagcgggctcagcatccccctcctcctcctcctcggctgtggtctgagatgctgccaccgtcttctgatcccgctgctgttgtcctcattagcccttgtccttctgctcttctgtatcatcccctctacccgacaggtgacgagggaattcacctaaccagaatcctaagggcagagccgttctcaccagccaatgtggcccaggctaagaggagccagccctgcagatcagaacagggtccacctacaattccaggcagggcaggaaaacatctgccccaaggtggggagcaggagagagctcagagctcggatattttctctctggacttgacaatagagccagtggaggaaagcttcccctgtactcgggcttgtctgtattggtgtctgctttggtcagaggcagcttcctctccaggagctggtctttttttttttcccatccacagacttttgagggttgcaagtatttcgtgagcattgtccctcgggcttattgaaatccttgagaagttaaggtagaaaagaagtcttcagagcccacatcaagtctcctaggccgtgaggtgtggctgctggcggggagaagaataaactgcagcctgccagcatcctgtaaggactgactgcaggcagtgtagacttagtggtgggtagcagcggtgactccgtgttcaggtttgtaggcagcactttagtacaatgtgggttctctacttcacccttcccgcacacattacatctgacatggatgaaggaggaggaagaggaggaggaagggtgggttctgtgctcagcagttttatgctcctctggggtttctccccctgcctctgggcagcactgcc

SEQ ID NO: 22854 - DNA, 1191 bp, Mus musculus
gtaaaaggtgagctactcctcagtggaacgttatggttagtcacacctgcctgcctgagaacctatttccccagtgatctgcaactggtggttggtactactggcagccagtgctgcgaacttcagctggtaaccagaagaccagggtgggccacagagaaggatggggcctacacatgtctcatctgggagaagggggatgggcggtgggggtagttgtggggccagcagcatcctggctacatcagggatggataaggtcccagccaggaggtacattttggaggcagctacaggaatccacacttgctaaggtgagaggcttaggttgtgacattgaggctgaagagacagactcaggagcacactagggactcaccagttagcctgcccccccttccacctccccaccaaaataacccccaatggagccagtgtggcggtcagagaatgaagaacaagcggccccgagttcagggccctcattcactagggtttttgtttctcagagaggagggggtgtgaggaaggaagaagatgaagaagaggatgaagggggggagggagaaagaggatgacggggaggaaggcggggagaagatgaagaggagaaggaggaggccagtccagagctcctcagtattcctagggaggaatcagtagatcttcggaatggtggggaggggcatgcgatggactcccccccccccccggggtggaaggacaaatgctcagagctctatgggctgctggcctatcaagcctttcaataagaaccagcactttcctttcaaagagggtggaagtcactgttctcttgtctccgttgatgaacagattctgggtggcaggagtcaccatagaaacaggtgctatcttaagcaaatgagccttattaaccttaagagtggtggagttttcacaagattgcacatatagggtaggagggagaaggggtttggtggggggagggtcgaggtggctgggaagccgtgttgctccgggtagggaggcatgtgttgcatatgtgtgcatgtgtgtgcgctggccgcgcctggtgggtgcccatctatatgtgctgtgcaaagctgcttcagggaggaggtaagatcaggtcctgccccaccccctttccctaagaaacaagcatcctccccagtccccctccctctgccataaaaagtggccgta

SEQ ID NO: 22855 - DNA, 1237 bp, Mus musculus
aaacaatgttctgtagtcggtgggagacagcgtgagtcactctggggtcagggcaagtttgtgaggttcctgatggcagctcttcagagtggtctcctcagctgttcctagtctgtctcctctctcatttttccctactctgccaccctctacccctcttggtcttcttccctttctccttctctcttatgccagccacgtcctcccgtccttcttgtgaggagccaggagcccatcagcacccatcccctgcagcctatgaacagatccttcaggcaactaggcttcctactcacctccctccaggtgagccctgccctttgcagtgtcctaccatggtgagaatgtgttcctttgtgccctcctacagagcagctgtggcccccatgctctcatccagcactggaccgggagctagtgttacccaggaagggacttagagcaacgatgacttcattttacttcatctaaatggaaggagtcacttgaagccggtggttactacattaggcaacagaactcggtgtgtgtgtgtgtgtgtgtgtgtgtgtgtgtgtgtgtggttgctggtaccaagcgtttgattccagagacattctgggaagaccttctgcaccgtccaggctatatcccacgccagtgactttgtccagctctccttctgaacccaggactcatgagaggatgcagagctctaggtgctggccttggtaatggatggccttggctctgtgtttacatatggtttttcaatccaggcctgcctcaccaagcggcatgagtctaggaagtggagtgaagtctacggagctagtgagagggttgcgacctgactccgctcctggcaggcatctccaggttccctggcctgagctgtttgcttcacagtgctcagacttcctctttaaccataaatgtctcccggaaagccttcccacagaggcctcaggggctttctcagggaatgtgtgagtgtatgcatacagtcattgagcatgccatcccaaagagccatggcctagcactaagggtgtatgtgtgcgtgttatgtgtgtgtgtgtatgtatgcacaccctagtttgcattaagggttctgatgcatggagccctggctttatgaaatacttaagtcccaagtcaattgaaacaaccaaggacaagcatgcacgagctcctacagatatgcatgtactttctgtagagaggtatagggaaggaagataattatcctttgctg

SEQ ID NO: 22856 - DNA, 1204 bp, Mus musculus
gctccagcgacagatgcaggacttccgcaggcgcctgaccccactgcaccttgagatgcagcggattgttgagaaggtaagatggctaaagggtggccatagttccttttggtgaagccacagaagtagagtggagctagcctctgtggagaggcctgggagacacctggcccttccttgttgtgctagtcctccatatactgggttcttaggagactcagctactctcaatgctctgcactccagtggcaggacatgggagaagccttatcctccattgcttcatgtgctcacacaggctgacagctgggtagagaaagaagagccaacgcctagcaactgagtggctgcctagtgaggtctgcgatggagcctgatgacattagagcccttttggtaccagaaggcagctggagcagggcctgggagccacagcaggggtagcttgagttctgtgctcagcctctgcaggggatgtcaaactcagtatggggtttgtgctatgtggatggatatgtaaggaactccagttccagctacaactaaatacaacgtcctttgcacccctagaatgtcattttgccctcaatcttggaatttctcccagggcccttgtagtcttgtgctgtctcctgtcctcgtccattttagagcaagacgggaggaaaaggcatttccagcccagaacaaggtctaatgccaataaatgggaggaatgggtgtagagttgatgcagccaagaatgtccgtcctctgggcggcacaagtcccgcaggctctgtgtctgttaggtgatggagcccattcaaggagcatttggtgttgggtcagggttgccaatagaacactgtgtcccagctgcccccaacttgccagaagaaccagcacttacttctttctctagttcttatgttcagaatgtggtattggccctggcctagccccttccacttcccataattcttgcctctttccataattcatggtttcagttcgactttgtatataaagttgtttgttggtttttttttttttttttggctttttgttttttaaataaaccaaagtgaaaaacaaaccaagtgtgagtctttgtagctagctctcctcctctttcaagctgctgtaccctctctgtttgccaggcctcagttctctctagaaggcagcaggcaggcagtaagtgccacaggttgtgactgag

SEQ ID NO: 22857 - DNA, 1758 bp, Mus musculus
tccctgagtctttctgttcttaccacaggaaaactgtccattaaaagcagtgtgcatatatatatatatatatatatatatatatatatatatatatatacatatatatatatgcactcacatgtattcatatatatatatatatatatatatatatatatatatacacacacacacacacacacacatgtatgtgtgtgtgtgtgtgtgtgtgtgttcattcttgttcttcttggggaaacatgcttgaaaccaggaatcctgaaatcctgagaacacaactggggaaacagaaatttgctcagtttctctccctgctcttgcctcttgcctttgagacaaggcagcaggaagaggaaagttcagcaatcaaggtactagattggatgtcaggaccaggtcctggtaggcttagggtccagttttaccaaagaaccagttccttcaatgttagaagctaagctttatgttaccgtcatggttgttggtgtttgaaggcgagtctcatctctcctgttctatttctcctacaaatgctttaggaggtagcagaaattgacactcaaagtgtaagactgagcaggctgtgtgactcgtacctgtaatctcagcccctagggaggcagagtcagcaggctcaagttttataccagcctgggcttcatagtgaatagcaggccagtctgggctacatagcaagctcctgtgtcagcaagacaaaatgaagataaaaaaccgtaaaatttaagattgtaggtctgagggtgtggctcagtggtagcacgttttttgtccagtgtgtatgtgacaccctgaatgtcattcccagcaccaccacagccccccccccaaaggttgaaagattccactttacctagctcatgcattatatttttaactttaggagttcccctagctcctgtcctttaaatgcccttatgctggaatcggatggtggcttggtttgtttaaaagagcttaaaaagagtcttaaacatgagatagactgtctgccatgcacccttcctgtgaactcaagaactttgaggaaatcctggggcttcttcagggcggagggctggcatcagtcagacacaggtggggcgtgggagccaactgataatccattgctattggcaacagattcgccccatgagttgaaaatgtggccgttgaccttcttttgacttttaaatgttgaacttgctgttttaagcatctgtacatataagaggctgaaggggctacgggctgcttagcggacacttctcccctggccttactgcccatagcttctgttccctgttaacactagcaaggaaagtgcttgtcacacagaggagccctcagccaggccttggattctgtcattggaggacctcatttctgacctcaccttcagtcctccatccccgccctccaatacttagggtcaccagggggagcactctccggtacccttcacctgggttttaaatggcttctctctgtctggatcacctaggatccagttttagtgaaccctcttccaaagagatacagataagctggatgattttttgcataaagaaagaggattttactcatagttccctttacagttccatcacagtattttttttaaataactcaggtgttatgagaattagaaaataaaataatttatgtcatgtgaactgtaaatgttttatttgtaagattctataaataaagctatattctgtaattggtgagtcccaagtgtcggcttgcttcagc

SEQ ID NO: 22858 - DNA, 1191 bp, Mus musculus
attgccagagctcccaagtaaaacccacagtcctgggccaacctggtttctggtttgcctggaggtacagagaatttgcccttccagcaggttctcaggtgaacctgaagattgtacacataaagaatgacttccttcaaatagtggcctatgccagggtgtctcatggagactggccagctagagcctttgaggaggtcttgggcttgaactggcttgcaagaggactggaagggctgggggagaaggggcgctggggcggatagtctcggccattcaccaagcagtgtagccaaaggcccttggggtatgttttactgcaaagctaaagtacacatttcttaaattacctgcccactgaagcaggaatgttgagcagatgtgtcttagcctgaatgttggggtggtctcttttctaattctgcttgcagaattctgaggtctgcataatccagcctgggttgcggttgagcctgagtccaacacaaagaactcttgcccttaagacccaactggttctctgttttcacttggatgtctgtctgtgagagcctgctgctgtttaatctcctgctcctcatctgcctgcctccctgcccgttcattctccaggatgcagccaagaatgcaaatgccaggcctagtagctcatgcctgtactcccagctctttggttagttgtggcaggaggattgccaggagttttaggttggcctaggctacctagtgagttccaagccaacctgaactgtagtgttcgactacaaataaacaaatcaatcaatcaatcaatcaatcaaacaaacaaacaaacaaacaaacaaacaaacagaagtaggtaccagggggttacctcaatggcggcacacttgcctccagtgtttgaggctgggtttgatttgcaccacaattgaaccatatgttttcttgaacctttcaaggcctgttgtctgtagcctctaatgctatcccctgtgtgatttcttgtgtgtcttagtcactgtggacttcaagtagatgttccctctctactagtttctatggatagagtgttccatccccccaccccctccactagcttgtttttacatgttctaggggtctgaactttcctttaggggagctctcttggccacctctgacaccaggttgattgttctgttttccaacatttgtctgtggtggtgggag

SEQ ID NO: 22859 - DNA, 2133 bp, Mus musculus
ttttctctttctccatccttgtagaattagatttctgttcttcttttaaccctgatatcatagtagggtgttgtggtgcatgccttttatcccagcacttgggagactgaagcaggagtatctttagttcaaggccagcctagactacatggtgagttctaggctagccaagattacagagtgagaccctgtctcaaaaaacaaaaacaaaccactgtcccctcaaagcccacaacaaaaccaaagcctggggtcaaggaagcaagtttgtaggtagccgctggctgcccgctgccttcatggagtgtgtgccgtcagcgctgcttctcctcagccgagcgtggagcttcggacagggcagtgatgacatgttcttagcatgtcaaatccccctaccaaataagtcaagcaaggaaaaaatagcccccaaggcagcctgagcatcagttcctagaggttatgcctacagaaccatcctatttctggtggcagaagtgacatgaagtcattgcagacatcttaaaggagagttactgtgcagctgtctacatgtgtgaaagacatgtagaaaaaccagcgtagggtacagtcgggcgtatgtgcccacctgacccagggctgtgagtctgacttcccgagagtctggctagagctgcttttctggtccttttggttatttgcaaccatcatcagattgctttcctgcagcccgactgatacacgcatgtgcgcacgcacacacttttgttctttgtgactaatcttgaataaattcaattagaacacatggaaaggattcagcagacctaggaacatttggggtggagtgtagtttttctgcaaaagtctgtaaatgagattacgcaagagtctcttccagctgtgggctggtgttgcttggaaaatttcaaaatcccaaagtttcaggcttcccaaagttggcttggaaaaatgtgatagtctcacctgagtctagacatgtaggaaattttcctagggcctctgggcttcagtatttgggggaagcactggttttctgtgttatttttttccttctgtttcagaatcttcaagtttcttcaggcttcagtgggccatccctttactgggctctaaaagctaattttacttaaccttttcaaatgtgtatgtatctatttatgttttggtgtggtggatggatggtaggggactgagcagaaatagtcattttaaataacagtgtgctaggagagcctcagtgtgaagtcctgaggagcagcgggggctgtgggagtcagtgtcagccctcactcagacaggccaagcctgggctcgaagacaacattgtccagggaagcctttagtttgctatagcacccagaggttggcgaggaataagggttagggtcctcaaatacacccatggcttttggagtctatgaccaaggccaggctgagacctgaaatgtaaaagccatagaattaaacagaacagactgaaaaacgagtcttaagttccactttctggatttctctggaagtcttttgaatttgtctgtagaagttgctgttcctagcactccttttctctttaggtagaacagatacttgaccataatgccagaatgtactttctctgccttggtttttctatgccttgtttttcagtttcagggccaaacaattgggccctgtggtgtaaaataaaaacaatgtatgtgtatagttgtgtctgagagaatattgtttattaagtggcttttccttcaaagagaagcaaaagttagagttattcctttattattgtgcgtgtcaggggcagcaccattgggaacaaagtgatttcaccctgagcaaactgggagacctacatagcaatgcattaagtttgtgaatgtgtttgaatcatttggggctttgggtaaataagaaccctcaccagcttactaagagaatactctccactagtatattttcatcagggtgctaaaaaaataaatataattacttacttattttattgattgattgatttttcaaggcagggtttctttgtgtagccctagttgtcctggaactcactatgtagaatgtagaccaggctggcctcaaactcagaggtccacctacttctgcctcccaagtgctgga

SEQ ID NO: 22860 - DNA, 1094 bp, Mus musculus
aaggtgattaggtactgctgtgggcggagaatctaggtgcctccttcccatctgagcagccacatgacccaccaccctagcttcagcttctgcagcctgcacctcacttttggatatcccaatacctggctcaaatgtccctcactgcatgctggtggtcctgggcctgattacgtgtagtgggagcggacagcctagtgttctcacccaccttgtgtgttctcagtctgtcctgtacccatgggccaccagcgcaggcctaggcaggcttggtatgtttgtaaacagccgggtggggaggcagcctccggggcactgactcaggcacccagggttgtgcaagccaagcgggaaaaacagggcaggcactgccatctcgcacccaggtcagggggagcagccacctggcagggagagggtggggcatggtcccctcacacttcctgtgactgctgttccaggctcatatttggcatgctgtatcctgcgtatgcttcctacaaggccgtgaagagcaagaacattcgagaatatgtgagtgcaaagagtggggtagacgacaacattgaggaatggtcagggaggtggtaggacttggtgatgctggagggcctggcctgtcagactccaggggctcgatcgatggtggaacagatctcaagtagagtggtctagtggaaggaaggccagccattattaacaatagccatggaggatctcgtgggcgaagcatgctgggggggggggcactggaacggaaggcagtttctcaggggctcctgtctaagcagatgtgggaaactgtagccagcaatgcagtgggactggctttgaggaatctctgggttgggcaggctgggggcgggtcctggcggcttaggctcgtgagctgagctctgcactctgacccacaggtacggtggatgatgtattggattgtctttgcgatcttcatggcagcagaaaccttcacagacatcttcatttcctggtccggcccaaggattggcaggccatggggttgggaagggcctcaccaccaccaccaccaccacctggcctctggctcacacaaacccctccccttgcttaca

SEQ ID NO: 22861 - DNA, 1369 bp, Mus musculus
cagtaccttccttctgctgcttcgaggccctgaagctggggctgtgagacccttccctacagtgtcctcttcctctgctggctgggagcagcgggaggcagggcagaaacgttgggctccattcctcacggagagagccaagaagtgcacagtcccagagtcacgaggcgtggacttccttccccacgatgggccagggggccttaccatttccctgggctctactgcctagacaaacccagcccggactccagcacacaatgtttgcacccgttccctgtctgtcaccccacatgagagtccccagaagacagtgaggagaaacgaagggggcttagcggggaggtcggtctgctgtcctgtacagggggaggcggcagctctgggaccctgtgcctgtccacccaaaggctccagccagctgcactcctggcagtttcctgcacttgggcctgatgcttctctaactggcagaagcaggctctacctggacctccagctgggaggtcatcctccctctagcttgtatgtcctgtactttgcaacccctaagcttcaaacctcttgctcaagacccaagacttattcaaagctgtggctaagagcagagacgctgttcacacaacgcctcaccaccaccagcctccaggcaaaaccagataggatgcaccgttctagcacctgtccagggaccaccgagcccaggcctcagcctccctaagatgggatggagagtcccagctcccaggtccctccattgccatgcatctcctactgtgctctctacagaatgtaatttattggggcaccctctgctgcttccctgactccctgccctacctaattgcacttccagtcctgtctgtccacatatgtacgtgtatataattatacatatatatatatctattttgcccaggtctgggtttcgtttttacccagaccctggcactccctgtccactgtgtgtgtgatcatgctgggaggggtaactgcttggaattaaaaggttgcactgggtccctaaatctattgtttctatccatgcctgtgcatatcagacaagcactgtaccacaaccagttgtcttacctcttttttttttctttttttctttttcaagacagggtttctctgtatagccctggcggtcctggaactcactctgtagaccaggctggcctagaactcagaaatcctcctgcctctgcctcccaagtgctgggattaaagcatgtaccactactgctgggctagtcttacctctttagttgcccaggctagacctgacctctcactctgtagcccaggaagttttggccttcttggttcagtatcaagtagctggacgcataggcttaggccagca

SEQ ID NO: 22862 - DNA, 1200 bp, Mus musculus
ttatttattttgtgcatatgcttacaccaccattgctctcttcaggcacaccagaagagggcaccacaccccattacagatggttgtgagccaccatgtggttgctgagaattaaattcaggatctctggaaaagcagtccgtacccttaaccactgagccatctctccagccccgctgagccatctttttagccccttggtttttgttgttttatttttgtgtgtgcatgtgtgcgtgcatgctgtataacagatcagaggctgaggttagtcaggtgtcttcctctgtcactctccatgcctgtacacacaacatatgcacatacacacatacagtctcatgagacaaggttttactctgaagggcacattgtcctagacctcactacacagcccaggctgacttcacatgtgccgcgggtttcctgactcaggcccccaggtgctaggatcccaggtgtgggccactgcatctctcagttctgaggtccacctgcctcctgtgctcttgtctggccaatccccagcactatgccgtctgtctgtctgtctgccacaatgcagacaggatgggaagccagagcccttgggtagactctgtctacagttactttgaattaagtattcatttcctcccttcggtactgtgctgatcctccggttaattaaaatgttggagaagatggagctttcgggacccttgaatttaattggagagattaacccataaaagcatggttctttcattcaatttttggaattctctctccttcttaaaattaagataaaagagcatccaggtgtggtagcacaagcctgtaattcaatcacttgggaatcagggatttgaggcatgagtatttcaagttcaaggccaacctaggctacttatataatgagactctctcttaaaaagaaaaagatcaccgaatagtagatcagaagttttggaaatcaagctgggcatcctactcgtgtctttaacaccaacacttaggaggcttagaaaggactgggtggtggacctttgaggctgcgctatggagtctcaaaaggacaaaagttttggaactaagcaactgaactctagagctctgccaggcagcacacatgcaggcaggctcacatgaactgacttagtcatgctgtgagaactattctcacccaagggagtcctgcagtcaggatccttgctgtct

SEQ ID NO: 22863 - DNA, 1174 bp, Mus musculus
cgggaagagcaaagactgcgtgttcaccgagatcgtactggagaacaactacacggccttccagaacgcccggcacgagggctggttcatggctttcactcggcagggccggccacgccaggcctcccggagccgccagaaccagcgagaggcccacttcatcaagcgcctctaccaaggccagctgccttttcccaaccacgctgaaaggcagaagcagttcgaatttgtgggctccgcccccactcgcaggaccaagcgcactcggaggccccagtcccaaacgtagtcagggaggccagtagtgtgccaggctgggtagatgcccctcagcagccttccctctcttctctaactcatccaaagatgggggctggggaggaaggtggggagccagtctccaaaaggaccccgagggcatgaagtttctgatccccactgggaagagacagtacttgtgtatcccagggtgggcaccattctatggaacaggtttgaggccagaggcagaccccggcagaagaaatagggtctccttgacctaaaatgcctgcttcccagcgtctacctgaaataagcgggctgctcagcagattccagagcttgcacaactgtgctcaaatcttgctccctgaacctctctgaatctgaaccaaatagccaaactcttggccagaccgtagggacttacggttttgttttcaaaaacagacagagacagaaagagaaacaaaagccagtcagccactgttcttatttctcgccccaggcctgcgtccccaccccaagccccagaataaaaccattttcctgcaaccgggtccgctgaagaaaggtgggcagtcagaccacagaacttaactgcaaagcgtgcagcaccgagaagtgctagctggggaaggaggcacacaggtgctgcagcctgccagtcccgctgtgcgaggggacaaggcgaggcggggggggggggggggggatggcggcccctccctccgcgggctccgatgtccaggctcacgcgacgcgtctctgctacctgtaggagagaagaaaacccaacccctaggcgcggccctgagcggccgctggcagggacgggcgtcctgtggggcccaggcccgggggaggaggggggtggcaggatcacagcctggggacgccagaagtcacctcg

SEQ ID NO: 22864 - DNA, 1174 bp, Mus musculus; identical to SEQ ID NO: 22863

SEQ ID NO: 22865 - DNA, 1179 bp, Mus musculus
gctcactgaaaccgtggctgaggctagcccactaggccttccctcaatcctggggtggaaacctaggaaaagcaacatggggctggtttcttgctcgtggttgccctctgctgggcacatgagctatcgcagcagcgaggagacccatccagggagggggaggcagagggaggttctgatcatgcaaattttattgtggccctaggcgagcttgctgggggctcttcaccaagagcctccggaaactggagggctgggttacagggttacagccacaccaccttattacattcagactagggtggtggggctggacacctgcaccagagcacagctgctggacatcctgccttggacgcagaagatgctaagatgaggtcatttcttggtcactggcttctttgctctgggtgtagatttctcctgtgcagataagagactgaagagtctaccaaccctccttggccaggcagccttccccagggccagccccaatttcttattgctcaccttcttccagggactcttgtcctgagggctgggcctggaaaggaatagggacagagtgggcaagagagtgcagcttcatgccttagcttcccgggactggctatctcacaggaagagcttttgctgtttcaactgggcctggtgcgcaggcctgaaatcccagttactagggaggttgaagcaggagaataaccagtctatgacctgccagggctatacagtagttcgaggccagcctgggcaacttactgataaccctgtttctcaaaatcaaacaaaaccaccaaccaaaccaagcaaacaaagtctggggctgcagctcaagtggtaccctgtttgctaacatgccagaagcctcgggttcggtgctgagtgctagtgcggtggggatttaactgcatgaattacctcactactgtttcatcctcttctttttccaccttctttttctgggaacaaaaaccaagtgttatttggaaagctaatccaagaccccaagccagaacactgagtgctgggcagtcccagttgagaggtgcagagctcccgtggtggaggtcttggcttgtcccaggtgcccaacacgggaggcccagctcgggtacctcattctttccccccacctttgctatgctcatctgcttctggggagccacccttttgacttgt

SEQ ID NO: 22866 - DNA, 1543 bp, Mus musculus
ttccgtcgagaggtcaacgactcaatgaagaattccacttatggagtgaatagcaatgacatgatgagctgacaactctcggactctaccttgcagagcagcgtccctttggtctggtccagagggtgaacagttgcaagggagagagcctggctgatcccggctccttcctccaggggtatgggggaaatggcaaaagtcaaccagctatttccccagaaagtacggggaagtacggggtgtgcgtgcactcactgagggacagggcactgctggttcctgggggactggggtgggaaggggtggtgggaggagacagacgcacaggcatctgagcctccggccgctcctggggtcaccgtgcagggagagcccggcgccctgccgcagcctgccttgtataaacatgtacattttttcataacgttttcaacaaggtttatattgactcaagtttaaaaacaaaagtgtgactgaaaactttttacagagtctagtgcaccaatgctgacgtgaggggtgatgtatggcgagtgaagaaaatgtgcattgtggtggcctgaagctttattggacaaggatgtgtgaaagtgcagagatatatttagtgacacagtgtagagaggcaaaaaaggaaaaaactccaaatgtatattttttcttactgccctttccctccccacccccactgatgcgttcctgatgctgtattaaccttgttattaggaactctgagccatgcgggagcaccaccctccccatccatggatgctgccctgggccccccagcctcctgcagtgacagataactccagctaaagtctctggtgttcttatctccatcctttctcccattttacttaaccctcatcctcagaaagatgcctcttgctattaaaagtcggatttatgttttaggattcttggtctctatagggagacgacagagaattgagccatttgctctcttgttgagcaatttgcatgagtccaccagaggcctaatatgtgtggccataacttttgtcttccccagcctttgaggcagtgtgtgtggatgtgtgtggatatttatgtgtgtaccctgcactcatgaatgtatgaactggaggaagttactacaggggagggctctcaataacaaggtctacctagcatgaagtatttaacattctcccttgaaaaatatacatttttataaaataaaaaccataataaatgttttgaatattaaaaaagaaaagtgaacctacagaggaacattggatggagaaaactctttgccttgtactttcccacaactgctgctagttatatacatctctagtacagctcttacccatgggacattaccaattaggttttatttttattttcctcaatcctcacaaacaagcttattaattttccttctcctctggcgactgtgtggtgaatcttttcttgcgtgatcaggttgcggatagacttgtaagggtgtttgctgcatacagtgtaagcattgtgaccgccaataaacttcgatggtttctactgacctggt

SEQ ID NO: 22867 - DNA, 1100 bp, Mus musculus
atcgggcgttgtgagtatgagaagacatgcgcgctccttgtgcagctatttgaccagtcggcccagtcgtaccaagaactgctgcagagtgccagtgccagcccaatggacattgcagtgcaggagggtgagtgcagtgtgcagtgagcataggtactgtcagtcccctttgcctttctctgcctccctttgctcccctaccaaaaaaaaaaaaaaaagaatttattaccttctatcacgtccatgcacagagtgaatgaatgaacaagtgccaccgaggactaggacagaataattaagaactattacattgctaaaatactgcttgtatgatgtaggaatgttgattatctgatcactttcctctgagtatcaacctaccagagtaaattggtagccatcttctatcagaaaagtaagatttactgggggattctcgagattaagaagccttctagtaagaagtgtcttacaacagtggcaagaaggtagtcactaaagagtctttttcctactccaggacgactgacgtggttagtctatatcattggagctgtgattggtggccgagtttcttttgccagcactgatgagcaagatgcaatggatggtgagcttgtctgtcggtaagtgtaccctatggaagcatttcattctacctgactactgagtacccgttagggccctacttacacttcccatcaactccacaaggtcttcttcagcagctgaatgcccatgaggacgtagacctgctgctgctctagccagctttcttttgtgcatgcagtaagaactctgcctgtgacttatactgaaaacattttagcagtgatcaacatggaaatgttgtctagaattaggaaaactgagaggataaccattgatctgttcaggggtagtgtctggggttagagagtaggctgtatttgtagtgctgattcatctaagaggaaactggttccttggtctcaccaaaagtggcagcactcctgtagccatgcccttgttgacccacaggactgcacattattttgtatctgtagttctcctttattaagggggggcggggctggtgagatggctcagcgattaagagc

SEQ ID NO: 22868 - DNA, 1179 bp, Mus musculus
tggggtggccctgagccaggcacacagctatatgactggccctacaggtttcttcgacgctttgggcgtgacaaggtgagtgagtgaagggctgagaccaaagatgagttacctaaggagaacaacgagggaggggcagagagccaataaagagagagtggatcgaggaggaaggtcatctagagagacagcagaggtgggaggggaaggagtgaaagccaagaggcctaggtgaggagagatgatgtggagaagggatggggaggagcgtgttcttgccagatgtggtggcacacagctataatgtcagcactgagggggctgaggcaggagacagagttgaaggcctgcctgggctacatggtgagagccttttcccaagtaaacaaccaaccccaacaaacaaaatgcagaggcagaggggcaagagctccaagagctccaagagaagtttctggtgccagggtcagcacttttccatgtgggtggagtccagggaagaacagttctttccctcttttcccccctcactgtaggcaactttttcctttgaggctggcagacgctgtctctctggagagggcaactttgagttcgaaacacgacacggcaatgagatcttccaagccttagaaaaggtcattgctgtccagaagaatgccaccccttccgggcctccatccctgccagccacagggcccatgatgcccactgtgctgcctcgacctgaaagcccctattcccggccccacgactctctgccttctccatcccctggcacactggtgcctggcatgaggccaggggcccctgagggggagtatgccgtaccctttgatacggtggctcactccctgaggaagagcttcaggggcctcctgacgggcccccctccacaccttcccgacccactgtatgacagcattcaggaggatcctggggcccctctacctgaccatatatatgatgagcctgagggtgtggctgccctgtccctctatgacaggacacagaggccctcaggggagacatggagggagcaggccactgccgatgggggtcccagctccctccagcaagactcctctgtgcctgactggccacaggcaactgagtatgacaatgtcatacttaaaaaaggcccaaagtaggggatggccagaagatgggatatgtggt

SEQ ID NO: 22869 - DNA, 1156 bp, Mus musculus
gtgtgtgtgtgtgcttgttcatgttcgagtatggatagatgtgtgtcaaactgtgtgagaagatcaaaagacaaccttggctgcaagtccttggctttccatcctgttagagatatggtctcttctacactgtaaggcaggatagctatcgagtgagtgtctagagatctttgtctctgcttcccactttctataagtgttttgggattgcaggagcttggtctgtggtgtctggattttatgaggattgagaatctgaactcagatcctcagactcacgtggcaagtctgtatagcagctgagacatcttcctagccttggcttccgtttggaatgcatgatatgggtggcaatgtagtttgagactatatttcttattaatgcataataattatacagagtaatgggtttcacaatgacatctccactgagcatcacggggaaaaaaaaagaacaaaagcaacaaaatgggcatggcagaactattgtgaatggctggaagcttgagaggcagcaacaggcttcagcaaagctttcctgagttcagtagggattaaagcagacaaacagttaagggaaaacagtcaggatgttgagcactgcttattgtctgggcaatgagtaagctctgaaagtgtatctacaaaccccaaatgtctgttctctggagagaaagacaaagaaggtaattcctttcaattgcttgagacttctctccagggacccttgcttctcctgagccttagattgtagcagaaacaccatgccctcttcccatgccagttaataacctgggaatataaagagtcccttcaatctttggagatttgatgataattccctaaatgccaaatcagcacacacagctttacaattactgaggggactacagaacaaaaatccttataacagacatgaaatgttgggacctgaaccttcttggtctacaggacctaggaaattggattcagagcatctcaatgcctttcagagcagaaagcctttgcctatgggaactgcactttgtgcccagcagctcaccagcacacctacaatgatgcacattgccttctggatgttctggaccactttccatgccattcttcctggattctcagcctcataccccactggctgctatttgtactgtgaggg

SEQ ID NO: 22870 - DNA, 2088 bp, Mus musculus
tttctctctctctcccctacacacctccctgaaaccccagatatgccttctagtgaaacaagctttttaaaggacactgctatgatcgtgttgaccagtcagcataagtaaaacagtggcaaccacgtctgtgggtttcgcagatgactgccatgtgaaagaacagttcagaatgactagaatttacactaacgttctctacgaaacttgttcaagtctgatgctgtgaaagcaatctagtgctatacttctacctcctcatttgtcttaattgtttggtaagtgggattttgatgaataactggagggcttagcaaacaaaaactggatgaaggaatctgagtgaaaaagaagctgtttgttgagtgtggagttcttccttacacacacacacacttacacacacatacatccacacacatacacaaatgcatacacacgaactcacaagtgagaccaagaaagcacagacccagaaatacggatcattacctgaacagtacctctttttgggatttgagaacagaagacttttaaataataactaaatatgaagcccgtttagcttctgttttctgggccttgaaactcgtgtgtgtgtgtgtgtgtgtgtgtgtgtgtatgtgtgtgtgtgtgtgtacacgcacacatgtgcacacacattcacattgggtctgtgtgcagactgtcaggtaaggagatgtgtccacactcatcacctggtctaggctagctttgaaggactcccagtggttctgcagcatctcctgtaactactgctgttgccgtcagaatttctaatcaaactcaacctttttgtttggggtaccaaatctgaagacaaaattaatttgcaccagtaaacttcaagctgctttctttcttgagaaactaatgtttaatgtataatgtctgtttggatactgttccaaattgttgattgcatgtgggtaccgttgcattagagcactttgcaaattgcatagttcattgtttgtgagcttgcatttgtgagttattggatgatcagattgaattttgtcatatcacattgtacatctcgcctcgatgtcaatgactgccagtaataatacagtctgcaatgaatttatatgaaatttttgttttatcacatgttatctgtagacatctgtaactagcttctttaatttattatttggattttagagtagcgagtcactaatttttagttgctgaggtctgcattttagtgattactaagcacttctgtctgtcaaaaagaaatgtatgttttgtactttgaagatctctgaagaatttcccttataatagaatgggcatgtattgtaattgttttatgtcaatgatctgcgctatagaaaaaacattaacctttattcaaaaaagaaacggataaacttggcctctccaagtgtaagaaaaccctgtcactctaatatactgtttgtttacattttatttaatctcttatgaatagggtgataacttgtcccccaaacaactgcgattacgattgttttctagaacttcttaaaagtgccacatttggcagtacaaatgagtctgagtgtaagagcccagagatttctatatagttgaatgtctaaaatggtaaaatgtgccacacagtggcttatgtttttcatagtaattcaaatgaactcctatttttgatagtaaatgtcatttaatagtgtacttgccatttgagcctcactgcaatgttagtgcagaggagaaaacaatttttaatgtaatcttgattttacctcatatactgtacattccaaaaactcaactttttaaagattatagatacactaccaaacataccaccttaaaattgtataaggttgaacttcatacaagtgaaaaagtataatctcataagaatacataaactatgtagcaaaagtatctgtaaaatccatggaaaataaaagttgtatcattcttttttgagatatgttttttgtatttataaacagttcatcacttgctacctatataagaaaatgaaatatctcctgtccaaggggcttaaacattttcccagtgatatttgaacttcagcctgaggggaca

SEQ ID NO: 22871 - DNA, 1179 bp, Mus musculus
gttgaaatgttttaaataaattcaaataacctcatttttaacatgttagaggaaggaatgatttttgccgcagagctatttaattactgtcaagaattaaagaatactgtatccttttcataaagattcctttgagtaatgggactgacgtcactgagtaccggctggaatggggaggagttgaaggaagtatgcagatgtgttactgtgggcctggcctcagttgtgaattaaaaggactttcaccagctactacctattactgcagagtccaggtaggtgactgtgcctgggcacacactgtccagaatcttctgtttagaggtcactgccacaattgtgtctttgttaacttactttattcatttgtaggctatgagtgttgtaggtgcaggtcctttcagtgaagttgttgcctgtgtgactccaccgtcagttcctgccattgtgacttgtcttcaagaaataagtgatgatgatatagaatacccccattactcaccctctacctgccttgcaattagctggaaagagccttatgaccatggctcagaaatccttgcctacagcatagacctcggagataagcagcctttgacagtgggaaagatgacaagctatatcatagacagtttgcaaccagatacaacatacaggtatacctcaaaatctctgtttatgtttgcctaaaccagaaaaatagaatacataaaattgccataaaccaaacttgttttttgtatgtgtcatttagaatacgaattcaagccttgaatagccttggagctgggcctttcagccatacaattaaattaaaaactaagccccttccccctgatccacctcggctggaatgtgttgcctttaaccaccagaaccttaagcttaagtggggagaaggaactccaaagacgttgtccacagatgctgttcagtaccaccttcagatggaagataggaatggaaggtaggttttctacttcctttttcatgtgtataatttgggggttaatgtatataaatgttataatttgccagagcagaatgaagactactataaagggccactaggtggctcagggggaagagacacctgctgccaaggctcccaacctgagtacactccatgaaaactgcttaatgaaaggataggaccaattcctgccagttgtttgacct

SEQ ID NO: 22872 - DNA, 1199 bp, Mus musculus
ttctttccttttccttttccttttccttttccttttccttttcctttcctttcctttcctttcctttcctttcttttcttttttaggaagaagcaaacaaaaagcacagtcattggtcaaatgagtctgttacaaggagagcaaaggcagaagtgaaaatagagctgagttgggttgtgttccataaaagcatggcagagcaagccatggggaaggtgttaaggagtctaaagaaaggcagacattttccttgcctttattgggtgaaaactgattctagaaacagaaactgccattgcggatgacctaactgaagtctatcccatgcctgagcacagtgtggaagctagtagaactgaatacaaatagagagtgaggccaaagttatccagctcatttagggacaccagtcactatatcctcaacaccaaacagctagcctaataaatacttagaagtcagtccattatctctagattgaggtcctaactccctagatggagagaaactaagatttctgttatttccatgagatcttaggttccttggagatagaagctgccttttaattaattttacattcttatacttagatatagtaggtgtctgacaaatatttgtcaaataaattggtaaattttaataataatctttgtggaaggattgtgggaagttaatgagtatattattttaatttaaaaatcaagattgtctctaggaaatttattagtttgaagtatatatataagataatccaaagacaaaaatagtcttttgaaatattgaaagtatacagtaagccaatatgctcaggttctcattacccctagttaacattctccagttcaatggcacataatttctaatactagaaaaccttaataagatccacattgtactcacagctaagcacttgacacattgtccaaaacctgacacatgagcataatgctagcacatcaagaagccataagtagagggaaagatggaggcatatgtatggctataagaaaatgcaggttgtttggtttggcaggaatgaagttggacacatagtaataaccactgcctgggaccttttattattttacaccatgagcaacctcagttgttagatttctagtatgtttacccttcaaaaacaggaagaaagcttcaaaccagacaggctgtttagaaaagatgctttgtgatctgta

SEQ ID NO: 22873 - DNA, 1214 bp, Mus musculus
cacactctctgattagcattggctgtgataccataggctgacagttttcagtgcccctttcctatcactacatagctgagcctgatggtgaatcttttaaaataccttagccaggagtcacaagtcaaacttggaaccctacatgtattagaaatatcactaagttaatctaaaatatctgtgctgcagttgggtaatacacaaataatcaatattcctgaaaggatctagacaagagaatatataagcagtatagacatttaaaaagctttgccatctttactaacttttcttcaaatagaattttttgttttcactatgaatcacatggaatataaatttctgatcacatagcttacttgtgtgccttccagattattcataaatattaatcaagaaagcattttaattaatataatattgattttccccaatacactagcagatgaaaaaacagattgttttattgtattttaaaatgtagggatggcttaatctcagaatgataaacagcttgtatttcaagagtcagtttgtggctgcatcctgtaagttatctcttcataactcctttcatttgattttaatatctagcagcaacagcctcctgcaggacctgaagagttgtgtactgtacagactgcctcagtgttcaccagaccttaagggagctgactcctgtatcagcattctgtacaaggacacatttctgtgctttactggggaacagtcttttctctctatagtagtaataataataataatagttggaaactttatttttaaattactgcgtagatttttttaatgaaggaaaaagaataaagctctcttattttatgtttgcatctgtccagaattatcaagtgtgttgtctagttttatgccaatttgacacaaactagagtcttctgtaaggaagaccttcaattgagaaaattcctctataagatcaggctgtagggcatttttctaattagtgattgatgggggaggacccaacatacagtgagtggtgccatccctgggctggtggtcctgggttctgtaagaaaacaggctgagcaaatcctgaagagcaagccagtaagcagcactcctttgttgcctatagatctgcttcccactttaggtcccagccctgtttgagttcctgtcctgacttccttagctgataaacagaaatatggaagcataagttgaataaccccatt

SEQ ID NO: 22874 - DNA, 1184 bp, Mus musculus
ggggtagttttttaaaaaaccttggggtgaagactgcccacttttggcatcattttaaaaaggcagttaagagactcgaatacagtattcaccaggtaacagaaaaaacactgaagctttataagtttgcctataattattgtaacaaagatagcttagtagaaaataggaaaaaatatgaccaataaattcatagaaataataatgcagagatcttggggctggagaaatggttctgtggttaaaagcacttgttgctctttcagaggagctgggttccgcttccagccacatcatggtggttcataatcatccatagctccagttccaggagatagaacatcttctgctgatcagtcatgtatcaggtgcagatacgtacgtgcagccaaaacggatcttataaacgatcttataaaagatctggagacagccacaggaggattttgagaaattttgcttaaaacctcagtgagagatgacttaaaaactttgaagtataactagcaaattatcggggaattttagtagtgtcaaactggaaaacatgcactcaagaattactgaacagagtataaataggttttttttttctttttgaagaaagtagcagtttctgtctacttttaccagtacacttttgaatcatacctataatatagaaatattttcatagattcctggagaatgttgatactacatggctatagctgcagaggaaggcaaacataaatgaaaactgcaagtatgccagatgtgttggcaggtgccttgaatccccaccctaaggaagtagaggaagtggaatctctgtgagttcaaggccagcatggccttgtataaggagaccttgcctagaaaagaaaaaaaagaagagcttgaggctggagagaaggctcagcagttacacatgtgtactgatcttgtagagactcaggttcaatgcccagctctcatggcaggtgctttatagctaccgtgaactccaaatccaggagatccagtgccctcttttcatttctgtgagtattgcactcacaagcattgtacacatacataaacacacacacacacacacacacacacacacacacacacacacacacgacacacagacaaatcctaaaagcagaataaattaaaaatagaaggttaggcaccaccagatacatggaatagagcta

SEQ ID NO: 22875 - DNA, 1131 bp, Mus musculus
tctgacataattcttcacaaaaattgaaagaacaactttcagtttcatatgaacacacacaacacattcacacattcacacatacacacatacacacatacacacacatacacagagagagagagagagaatgagagagagagagagagagagagagagagagagagagagagagagagagagagagaacaggatagataaaccaattttgaatactaaaaagaactgctggaagtatcaccatccctgatatctcaagatgcactacagagctacagtgatagccacagctgggtagtgctattaaaatagacatgttcgtcaatagaattgaattgaagacccagacataattgcacatacctatggaaatctgagttttgacaaagaagccaaaaatacacaacagagaaagatagcctcttcaataaatggtgctggccaagttggattgctgtatgtaaaggagtacaaatagatccatacttatcatcctgcataaaagtcaacttgaaatggatgaaggaccccaacataagaccagatttcctgactctgatagaaaagaacctcgggaacaggctagaatttattggtacaggaaaggactttctgaacagaactctgataacacagacactaagaacaattgctacatgggatctcatgaagctgaaaagctcctgtgtggccaaggatatcagcccttgggccatgtggcagcctacagagcaggaaaagatctttaccacgcatacatctgagcgagcagagcttctcaacctttctaaggctgcgacccatgttgtagtgacccccaaccataaaattatgttcactgttacttcataactataattttgtccacagctactgatccttttagaaatgaatataccagaaattctttggtgatattctagtgcttactgaataaaaggttccttagtatcgaccactccagtgcatcaatgaatgcaacaaaaacttggccacattaattctcttgaaccttttactgtctacctgcttgtagttcttgctttaaccagtgttactgctactcagatcatccttaccttttactcagttgaagcatgaaatggcctgtgtcatttaccataagagatg

SEQ ID NO: 22876 - DNA, 1219 bp, Mus musculus
acccccagcagttatagtaacaggaactgtacaatagaaaactttaagaaggaattttaccccatcatatacctgataatatttttctggggagccttgggaaatggcttttccatatatgtctttctacagacttgcaagaagtccacatctgtaaatgttttcatgctcaacctggccacttccgattttctattcatcagcaccttgcccttcagggctgactattatttcagaggttccaattggatatttggggacttggcctgcagagtcatgtcttattccttatatgtcaacatgtatactagcatttatttcctaactgtgctgagtgtggtgcgtttcctggccacagtccaccccttccggatgttccatgtcaccagtgtcaggagtgcctggatcctctgtgggatcatatgggttttcatcatggcttcctcagccctgcttctggtgaacggccaagaggagaaagataacattatatcatgcttggagctgagtcctcaaaagtttaaaagtctcctgatcatgaaccacattgcagtagcggtaggcttcttgctcccatttctcacgctcaccgtctgctacctgctgatcatccggatcttgttaaaggctgagattccagaatcaggtccacgtgctgctcataggaaggcgctgaccaccattgtcattgccatgatcaccttcctcctctgttttctgccataccatgcactgcggaccctccacttggtcacatgggataaagattcatgtggggatgtgctacataaggccacagtcatcacactgaccatggctgcagccaatagctgcttcaatccctttctctattattttgctggggagaatttcaaagctcgattaagggctatattcagcaaagttcatctatagaaattaaagtcaaagtgcagccttcctgtttgtgagtagctgaagaacagaattaagagtataaggagctgttctgcaggcatgctcatgaacattggtgtccaccttcattcactcagagtctccaacttactttatatttgcatcctaaccaacaagttggttcctgacatttaattgaccacaacatttgctaataaagtctatttcagaaatttcattagatatatttttagtggttggaactaaatgggaagtgtaagaaaaaatatttctactggaatcttgcatgctgaaatgtgac

SEQ ID NO: 22877 - DNA, 1687 bp, Mus musculus
attttttaatttaacgtgaatacccttagaaaatgtgtcttgtcttccaaatgcaagttgattgactgtccacattcaaccaaattatcttgaatcttctactgaaacagattgttacaaactgggaaaaagtactaatttctacacattggactattttaatattagaatctaatgtgccgtgtgtttgtttcacatattttacttttgaaatacaagcaaaaaaagtataatcatatgatactgtcttactactgacacagatttcatacctcagaccctctaagaaccgattcttttattcacccaacacatgctttgaactgaagactattgataatactccgaggttgtttttttctttcaatcattcagatcactgaatttataagtacccatgtagtacttgaaagtcaagtttggccacaactgtgcttaagaggaccctagtacagtacaacccaagtgcactttttaatgtttctgggtcctgaagaatcaagatacaaattaattgtgatttacaagcagactgttaactatagaagccttcagtttttttccctcatagacgtgtctaattacatctcaacagtttactctgttcttctacatctggggatgtttgtgttctctctggaatggtacatcttccagggtcttttgaacttgcagttatctattttttaagccaatctggtctaataactctggcttcttcaaagccacaccatttctagtccagctgtgcagaaacttcagatgaaaacagctgcattgaaaatagaggcactcccttcaccccccacctaaaggtgtatttaaattatcttgtgggattaacttatttagagatggtataatttaaaataggggatatttaaggtagcatcagctagcatttaagaaaatcactttttctaaactccatactttttgaaaagaaatctggtcttgttaggaaacaaatttctattttgtcctcaatttagtttcagttttactagtttgatagttatctcaataacaaaagcaatagacagcttcccccatttcttcattaagttttgcatgatcatcacacagattagttaggttttaggtcaagggcttaccatacttctaggtcttttgctagtgagttcaagttagaattagtgacagaatcataggaattttcagagatcctgcttcgagatttcttaaagctgcagacactgcactattggttttgtttttttgtaccggttgaaactatacattcaaattgctatgttcctattttctataatagtttgtctattttaaaataaactagttgttcagagccttactggtgtgatatgatctctgagttaagtgttttctgcatctgagctttctcctcacatcttttccattctgatgaccgacagatttacagaaatatactttttatgcattcatatggtatgtattatatattaatatattctgttctcttgtgtctccttttttatgaaatgaatttgtctaaaaagctgtatgctttgtgaggccctcccagaaacaggaaaaaggagacactaaaaacttgaaagcaacgtatacagcagggaatagaaagactgggaagagacagtaggcggctgtttagctggcagctgccggctgcagggccttcccacatttgaacattacttcgttg

SEQ ID NO: 22878 - DNA, 1179 bp, Mus musculus
aattgaattgtgagataatgattacttgacttagtaacttttaaaactgtgggttaggacaatgacacagcgcaggccatgttgacagttacacaagaaccaggggactggaatgtgatttttttctaccatgtgatttttttttcttaaaatcaattctttctgaaaacatatcttaccatgatccattttctctttaatatcacacctctattttccacaattcactgttatggtcttgggtaacttgggagacttgacttcacagtcaaagtgaaaaatattttattttgttcagaatacattgttgatactggctgaaatagggctcagggatattctaggttgtgtgtctctgacaaaaagaattacttcatagtttctaaattatttaagaaaagccctttttttttcccaagacaataccgggccctcattttcctcttcttctttacttcctttctccttctttctgcatatcagccatttggaaagaactgcagttgcccaagtgaaagaaacaaaacatgagaaatagccccaagcctccaaggaacttgtgatctagtagagaagtgaattacagtgctgtgctgagctatggcaaaaaaaaaaaggaaaaaaggaaggaggaaagagggagggaaggaaggaagatgacagaccagtaagagtcaaactagtgagcacacatggatgagagactgcttacaacagatttgggaatgtgcagcgatcgaggatatgaaggtggccctaacagttacctaaaacccagcattcaaaagctgcagcagcagtttgttttctgagttctaggcaggcctaggtcacagaaggagaccctatattcacaaactaatgcacaaagcaacccctctgcaaattactcctgatgaagatgaaaagccagccatgagtaaaaaggaggtattttatacaagggaagacagcagacaattttctgcagtagctttgtgtgctagtggggtgggagggttcttggaacagtctgtgcctccttctctcacaaagcctgctttagtacttttgctctcacgctgacgatgccattgcagacatgattatgttagtgcactggaggactcattcactaaagattgctacaggcttttgtgtttgcttttttagttgtattagattatatgtgtgagtgtt

SEQ ID NO: 22879 - DNA, 1288 bp, Mus musculus
ccaaagaccctgcagtgatgcacaggacactgacctaagcccctatgtccctcatgtgcatctatttcctggcaccctccccaggcctggccttcccctgtcgtgaccactctgaagagcatttttgcagttgagaggcatgcccccaaatagaataagcacattttgtaggtgctgtgttttaatgtggaagaaccttcctaaggagaggacatagtggggactgtgctttctgaagcccattgtagccatgggccacactgtgttaaagtgtggatttgggaatctgcttatttgtgtttagcattgcgaatccctaaccttgttagatccttggtactacaaggtaggtgggtgggtagatagaattaaggtacttgcatagagggaggggatttgagtaggctgatcacaagtaggactaatcccatgtgcctcttttctccagatgtccttgctccgcagtacccatggcagtcaaatgacatgtctgtgaacatgctgccaccaaatcacagcagtgactttctgttggagcctcctgggcacaacaaagaaaatgaagatgatgttgaggttatgtcaacagactcttcgagcagcagtagcgactctgactgagaaaggtgtggcatgcacagactccagtgcggcagagttctgtcaagggggaaagaaaagcacagacctaaggagcccatgaaaatcagcgggttttcttcctagagcccgagcccctggttttctatctgttacacaatgtttgaggattagtcagaattactgtagtgtttggttgtacatagcagccctggcatgagactgaagaggaactcacacaactcatggagcatacttagaaagagcactgagccagacgtggtggctcacacctatagtcccagcacctgggaggctgagggattgctgtgagtgtcgggccgccttgagctacagaatgagctgagccaccagggtaacagagataagaacaggcatcggagcgctgtgtgatacttcagaagtgctcacttgaacaactcaatatatatatgtggtaaatactgtaatttgtgtaaataaacttggttttgtttgtatttaatttttttcaattttttaaaaaatatttttaaaatttaggtacaccttcagtgtaggaaggaaacatttaaatccagttgaatttgagctgggcagtggtggcacatgcctttaatccagcactcaggaggcagaggtaggtaggcagatctgagtttggggccaactttgtctacaaagcaag

SEQ ID NO: 22880 - DNA, 1142 bp, Mus musculus
taaggactgaacgagctactgaagaccttttgaggataggcagggccagcttgtaaaggattgagctgtgattagttaaaggggctgtggccaggggagacatagttgtgaggtagtctgaccagggtttggtaaaaattggttggattggtggggtggagtgaagagagtagtagggatgagtacagtggagaagcctgctgtgacagtgctgtaagataggatctgaggtgattgtgtggctcagtaggaggaagtctggcttacaaggtttctgttgttatggatgtagtagaaaacaaatataagccagtattgaaatgagtagttgtaagtcctggtggtagtggactgggagatagaaaaggaaataatggttttatctgaaactgctgacaagggatggatttttatattctactgtttggggagaagaggataaatacttattttttaatactttattaataggtgcaggctattctggtcaacatttttggaggaatcatgagatgtgatgttattgcacaaggaatagtcatggcagtaaaggatttagaaatcagaatacctgttgtggtgcggttacaaggtgagtgctggtcacctagttctttctcattctctcagtgatgcagtgctggtcacctagttctttctaattctctcagtgatgcagttgtaaggggcaaggttaatttaaaaaatgatttgcaaatagctacatcttttcaatgaaagcattaaacacaaaacttgaaaaatgttattttcctgttgctgtgataaaatatcctgatgaaaggcccttaaggagcagtttattctggcttatagttccagagggcaggttgtccacagtagtggaaaatgcactggggaggagcagggagcgaatgctcacatctcaatcacacacaggaaaagtagatgaggctataaatggtcatagcctgtctctagtgatgtacttcctccagcaaggctctctgtcttgaaagttctgtgacctcttcggataatgccagcaactggggaccaaacatgagcctgtgggaacgtttctcactccaaccaccacaatgtgattttgttgttggtttttgtttctatttcaagacagggtttctctggctgccttg

SEQ ID NO: 22881 - DNA, 1188 bp, Mus musculus
gagcatggctatgactagctgctttaaaggctcacccctttggcttccccacagtgatgggctgtaatctagaatttaactggttgacttctcaccctttattttgcttagttcacatgtttgtcaggtttttttttttaaatcaactaactctgttttcttgtttgtttttgtgtgtttacttgtttcaatttcattgatctgtttgccctgctttttattacacccctgacttagcttgggttctattgctgtgaagagacaccatgaccatgttgactcttataaaggaaagcatttaattggggctggcttacagtttgtggggtagtccattatcaccatggtagggagcatgcaggcaaacttggtgctggaaaggagctgagaagtctacatttggattcacaggcagcaggaagagatagcgacacactttctccaagaaggctttatctcctaatagtgctgattgggttccttttcttcaaagcaccatactacccacccatctactggttttgaacttggcttgttctgtttttttccttggaacctgagatgcaccatcaagttatttgggacctcttctatcaatgtatacacgtgaggcagaggttgatgttcagtctctccctcaatcactcttcacctaacattctgagataaggtcttttactgaacccagagcacattgattcactagactgtctggacagtaaattccagataccattcttcctgtcttttcatccttagactggcgggaggtgggggagggtttcagatgcatgctgccatgcctgggttttgtgtggtactagagatctgagctcagatccttgtgtttgcggaacacaaactgactgactgagctatctctccagccacaatatcacactaaaatttcagtgcattcattttataagtataaacttttataagtgcattcattgtttcccacagtatctggtatattatattttccttatcattcagtgctaggaacttttctatttccttgctgtttcttgatgacatactgataaatcagtagtatatcgttctatctcaatgaaattacatatgtcatgtcaactttcttctcttgaattctagctttactccattataacgagatagaatacaggaaatcatttgaattttcttgtagttgttaaaacttgc

SEQ ID NO: 22882 - DNA, 1187 bp, Mus musculus
ttattatggttcctctcatatttgatgtcacatatatatgcatgtatgtgtacatttaaatcaagattctaactatgatagaaaacacattgttctttgaacttggcttattttgcacagcatgatttctagttttcttgtaagtggcataattttcttctctttatggctcggtttaggttggtcccttaactgagctactgcaaacagtgctgcaataaaaattgatgtgcaagtgtcttgtgctatatttgctaagagtccttcaggtaaatacctaggggtggttcagctggggcacaggaaaaaaatctatttttttttcatttctgattttagaggaaatgctctccatttctcccacttagcataatggtggatataggttttccatatatactctttattatcctgacgcatgtgccttctactctttttttccttatgtctttattatggagggatcttaaactttgtccaggatcttttctgtatgtgatttatgcttaagtctatttgcatctgaatgtttgtgctgtgtttattaattcatttatgcttatgtgtttttgcatgcctggaatgaagccaaggcagccacagaggctgtgtgatcatcgctttaaaggtgcctttggattgggtttgcaaggattttattgagaattttcatatctttgtttatcgggctcattagcatatggatctctctgtctctcactgtgtctctctcccttgcccatctcctccctcaccgtgtgtgtgtgtgtgtgtgtgtgtgtgtgtgtgtgtgtgtgtgtgtgtgtatgtgtgtgtaatgttcccttcactttctatttatggggtcactagggtgctaggctttaattgtcatcacaaagtctgggaggattcagcagtgactccatttagcctggggattggtccagtggcattcatttttgtttatgtatctatttaagttgtttctgtccccttgatttaattttggtaggtcacatatcacttggagtttattatttctgctaggctttccatctgtttttagaacatagagtattttctattgattccccaaatttcattggcaccagtagaaatctctctctctctctctctctctctctctctctctctctctctctctctctcttctctctctctctccatctccaattttattaatt

SEQ ID NO: 22883 - DNA, 1190 bp, Mus musculus
tgtgtccccaccagcaggcactgtcatttgttttatccaccttggccattctgaccagtataaatgaaacctcaagttagtcgtcaaattgcattttcatacttgttatccagtcttgtctatccactccttcattcttttttatgtgttttttttaccccacccccttgcccacttaaaatttaaaatttgagtgacttcttagacagagaattggcgtttttatttttgcaaaatgttcacagttgagcatggtgctgcgggactgtaattgtagcactgtggatgcagagagagaagattgtactgtttaaagccatcctagcctattgaggtttccaggacagctaggcctacatagagatctccagtaacccaaaggaaaacgcactcgccaacaaaagagagcccacttccaggcagcatcatgacgtggcctttctgtttacgtgtgtttttgttgtattgtcttcacagtcgaaatcagctgtctgccctgcccgcctgcctgtgtggtctgcctctcaaagtcttaatcgcaagcaacaacaagctcggatcactgcctgaagagataggtcagctcaaacagttaatggagttggtatgttactgatttctaagatgctcttgtttgtttaaccgactataagcgttagaggtcctctgaaagactttgttacagaaggaaaaaggagaagtctgtgatcattcccccatccccctcaccccccattgctctaacaaaatacctgagactgggaattttatacaacagacatttttagaatacagttttggaggctgaaagtacgtgtgatccgtttggccactgctgcgggctttccttcctcacagctgatagcatcatgctgggagcaaatgtgtgagggaaagagcacatggctagacaggaagccaaagagagggaggggccagttttactcttatatgatggtccactctcattggtccttagtgccatcctgtaagcagtatgataaccctgtctaagagcatgcccagtgctacaatcatcttctgctaggctccatccctgaaaggatccctgtggaggtttgaagatgcttggcccagggagtgacgctattaggaggtgcagctttgttggggtgggtgtggtcttgttggaggaagtgtgttactgtgggtgtgggctttaaaaccct

SEQ ID NO: 22884 - DNA, 1165 bp, Mus musculus
ctttagtagtcggagttgtgggagtggacccataaacaggaaggagggtggtggaagagggttggggccttgggaatccgtgcagatctgacttaagtttccgaccatatcctgttctgttctttgcgggacgatttgtaccccagcgagcgcctagcgtttcccagggcagtgggtgccccacttttgtgccattgcctagacctcacgactgtcgttgtctcttccgacttgcatcaggtctcttaggcttctgaatggcttggctttcagatggggtccttcagctacttataaaggaagactagggggcggggcaggggagccagctgtggctttcggaggctaggtttctggttaattccataaacatttaatcaggagaccaattgaaaatttagatggagttctgagtccattggaggctagaagcactcctctggagtcattaaacggtgatatttgggtttaaggattgtcaggaatgggtaagcagaggggaaattccagaactcagttttcaacagctggagaggctcttgataggacctcatagttacagcttctcaagtagaagttattctaagagtcgcctgaatcattaaccttaaaaagtcaccccatgttttccttcccatctgccatagttagaatggctgtgtactgcagaatggagaatcagaatgccccatgctaacgtgttcgcgctattcagtagcaggcttagagttattccaacacttcagtattactcatgattcctcccaaggttgggtagagttggcatgtgtgctgtgctggcatgtctttgagaataccattgctttaaaagtagtggagggaggtgttcatctttcagttaccgcctctgtgagttgacactgtgtggaaagggtccttccttcctgttctctctgtgtgcggtggggtgtgcaggtgtccaggcattaggagtgttacatatattttaatgctcctaaaatccttaagtagtcaaaagtaagaggcttcatgctaattctccaccctaaaacagttactattttggagcagcagcggcaaaagaatgtcagctacgtttgtgggcacttaaggcaataccataaagaaaacaaaagcaaaaacaaaaacagtagctgaagagtctgttgttttatgtaaaagt

SEQ ID NO: 22885 - DNA, 1213 bp, Mus musculus
tctcattccaaggtcttgtgatcctaccccagcccactagtttcctgctgctaacgtctgcacatctgtccatgttaggtagtgaccaggcttttcctgagagccaggaagctgagctctttgctatggcctttcttctgctatctctctccacacaggtgggagacagaggctatgggggccacgattacccacaactccactcctctttagaatgaagctgtggatacctgggaacctagaattttctggaatatggtaccaagggggattgtgagagagccaaagtgtcatcgggagggacaagtcacactcctgagaagaacaggaggcagaaccgctctctcaggagcccgtgaaggtatcttcataaagtaggaggggaacgattccatctcagacatacagtttgcgagccgatgtttgtgcttttaaaaaaaggtttatatttatgggggcttggagagatggctcagcacttaagaacacttgctgttcttgcatgtttagttctcagcacccacttgggtggctcacaactatcctttaactgcaatcctagggacccgatgcaccaaatgtgaacatggaactcttacattcatataagcaaggcagtttgctcctgcctccccagtgattatactgtacgcgtacacgaggagtttagtgactgggctatctcccgggcccctaacatcacatttgaagacactattgaactttgctttgcctttttggctgagccttgggaagtcccttctattttacactctctggacctggttcttcctgcctctcccaggtcccctcccctccccttctctgtagctgccctagtgtatgtaggtcttcctatgtcaactactaagcctctgttttgtcctcagtgcacccagcacccaatccctgctgtcttcctgaaacagaagcccagctgtgtcccctggaaccctgcttagcattgcgctgtgaggactgcaaacatcctccggtcactgggctgggcactgtgggctctaccttgcagctccgttccccactaaatccttctatccccccccccacacacacacacactcccctttccctttgtcaaagccacctggcttcccacgtcaatgcatctgggctgtcagtcctctcaagaagctgccctcttcccttttcttcaatatggagtctgattagcctttggggatctccctcctgc

SEQ ID NO: 22886 - DNA, 1195 bp, Mus musculus
ccattgccctgaagaaacattgctgaaggccatgggtgtcagaccccagcacggcaaagagaatgccggggtgaaataggaggagagggaaagaaggagtaagagggaaaaaaaggaggaggagtacagaaaggcatgttcattcagaacatggctgctggcaagggatcgcatccaaagatattcgtgatctggctggaatacagacatgactctaatctcaggagatctgagttcaagatcagcctggtacagaccaagttccaggtaaagaaaagcataggtccaggcttggttgtgcatacctttaatcccaaacaatgacggtaatgttagtttgtagaaggaagcaccaatgtttgaaagtgatgtctaacggaggggcaaattgatgaatcagagaaagatttgacagaataggatgtgcccaactttcacaagaaaagagaggaaagataagctacttcaggaagagacagacagctccggaaggagtacagtacaggatacaatagagctcgtgagagcagtaagtagagttgggtgggagagtggagcagagagagggagaaggaggcagtgttaccgggggagtttttacagagacagattgaagagcgaacaggctggacacaggtaaagacacaacaagcaagagaatgagaaggatccagaagatagaaaagattggaagagttagttcgaggtcaagcagagtaattcaggggctgagagaaaacccagattgaagaagtcatctgggagaggagtttaagccagagtgactgaggtgaaccaaccacccagagctcagaaagaactagaaagagtgagctgattcagcagtaagtctcagaggctgagaacatgctaggcctggattcgattgtacagaggccagaagcttccagggctaggcctaggtcagcagatggaggcagtagactccaagatgacaactacatctagagaataaaagttactgttgcagaaatacttacataaactttctgagccactgccgtgtgtgtacctggtgtttttattaatactttcaattgcacgaactgcttcgctggccactagagactagaagaaataggatgaaaatgttgggtcagttttcagcttcaaaacaggacagtttgaactttctaagcaaacataaaataagcacattaattgaatgcaagtc

SEQ ID NO: 22887 - DNA, 1143 bp, Mus musculus
cataatctttcttgacgttctttggtttgaagacattgctaactacagaggcagaggagtcaccagccacatcagcagtgaaaacttcaatcttcagagacacgtgctttggttcatttaagattttccattaattttatacagtaattgacactcaggcaaaataatgtgaaaatgtctagatttagtaatttcgtctgtgtcttcattaaaattgaagattttaagaaaccaggtcacccctgctcttccagcctatgaatacttcttatgaaataaaagcactgattttcactctggatcaccatgcagaaactgaccttagtcagaaaggagtgttgccagaagctgctgcacaggctgcagggccgtgtacagagctctgaggagcgccagcctagtaagcatgctgggaggccgtctccactacaggaagcccaggtggtttggtttttttcttttgaaatttctaaaataaatgactccatgggattttttttttacacgtgtacattactacattatatattggaagtctttggacctttgagtggggtttaattgttcattatcagagactgtgtgctattttatttttaataaatgtatgttcccttttcctgttgtagattttccttgctctttattaatcagactccagacacctagaaacatgtattaccagcattatagtttcattcttcatatattttcctgcttgtgtagttagcactggacacttgcatacgtgtaaggacactggagggcgtacttcatatccagctcgcaattctggaggcaaacctgtgaccagggtgaaaatcctgccacctcagctcagttgtgagctgcctccgtccatcctgtgctatgtaaagtttacttctttaaatttcagactagcttgttcttgtatgtgtttagctcatgaagcaaactctcaggaggacttgggatagacaggaagctgaagaatttgggcagacagtggtgctgaggtgctaatagagaagatgttataacttgctcctggcttttcatggggctccgttaaagccatgagctgtgttacttctctcaggcctcatatcccatctctggagattgcttggtgacactggggcagtgtgcctgttcatcttg

SEQ ID NO: 22888 - DNA, 2208 bp, Mus musculus
tgggttgtgtggtgcatttgcttatttattatttgattattgctttgctgtcaccgtcattgtactgggagtgacctgaggcttggacttggcagaggatgcagctccctgcaggacatccagtggctataacttctcgggcttttccccctcatgtttctgagactggagatttctgagagcgaaagtccacagtacagctaacccaggctaacccaggcatccctgttgcttttcagctgaacctcctgctgtcagtttcaaagtagtcccagtggaccacgagtgtcagcagtctgtcccacaggagaggcctgaggagtcctgcagcctgcaggatgcccaagacccccatgtgggacggctcctgtagaacatggatgtgcagcctgcagaaggaaacctgggtgagccagagaagatcaaaatgccaaagactgacagcagggatagctgcctcattgaactggtctccagcagtggagagaagcgacagggggccacaattcacagtgaaatgttccttcacacagcttgtgcaataaagtaggttacagtagtgactagtgtgatgcactcataggaactcagctgactggaaagctgccgggtctcagcaaggcattcaccccggccattcctcggacgctgtgacttgaagaactcttccttctgtgtcccgatgcagagcttctcatgctgggtcgagcgaggttgagttggaatcggatggttgctgccaagaaggcatctagcttttcctggactcaggctgtcatctttctgtgggctgacacaaggcaggggcagttgcaagaagccaaggcctcctataaggctccttgaactgcatcctcctcactagagaggtgtatcttgatgatggggatcgccacagtgccggcaccagtgtgtgagtgggagtgaccagtgaagaggttttagcgtggcacagcctggagaggaggcggcctgtggggagtgggctcatggatggagcttagttgcagtcattctttataaagtgaatactctttggttgcctatgttgtcctagacactagccgtccggcatccccagtcctgccatagctgaacacctaagtgtggcaaacgctgcccgtaccttaaatatgacaccagtcaaaagtcaaaggactataagcatctgtgaatttccctacaaattcctctttgaatttgggattggattggctttgaccctggtgttacaataaatgtagccagtttcttggttcagttactcagaccgtcgtctgtagggtgggacagtgctgagggctctgaaatagggcagatgacctcatggtgcaggtgaagggacaggaacagcctcttgcacagttgcacgtgggtgacccatcccgatgcaacaggccagtttctcagcccagtttaaattggtggtggccgttgcttggtagagcatattactctgtattttgggaaactcagaggtaagagggtccatattttttctttgctatgaaatgaacgagttaggaagattgtacttactattttaaatacatgtcttatgtgataaaccataatctccagttctgtgtattatatgtacattgggtgttcagatagcctttccaaagaagcgaggacgtgaccgttgtacagtgctgtggctcagcagtctgatggacagagcaggacttgttcgaggactcttgtagtgctttgatttgtttgtttctgaaaacactcacataccttaccaactgctgggagggtgggactgatccagttcgtttgctgaatgaatatttgtttaaatctgtacagtttcacgtgtttacttatacagagtgtacatactttgaaataattaatttaaaatgctttatattatttagctagaaattgctgtttttaataaataaatttttttaaaaaataaagatctttgcttcctactttgctgccacgtgtttgttatgttatgttgattctctaaaagtgctttaattgagaacttggttgggacaagttgtagagaagtggaatatttatcagatatagtacctgagttcctttatcgagctctgctcagtgataacattttacaagctgtggtgattactatagctaggattttgacatcagaacacttggctagtcttagctttcccatgctttattgtgtaataattaattgtgaaaaggacatttttt

SEQ ID NO: 22889 - DNA, 1193 bp, Mus musculus
ctgggatatggagtctttatctacaccaagaatagtagctccttctagtttggaaattctgtgtggctaactgatgagcagtacttacaaatacacatgtgtttttgataatcgttttttaaaagtgattttcaggtccattgttagtcacttgattctcccgtgttggttgtctcacaaagatcccaagattatgactcatattgaggaggagaaaaatgtatttcctgattttgtatggtggctcctcactgaagtactgtatgtaaaatagtattgttagcagtctgaagaacatagatacctaaccttgtctcttcaaatgctgaaaatttctcagaatacttggtatgggcccaaagtacttgaggttttgttgtttttggtttttttttccttaaaccttttttttttctttattttggtggttgtttttgtgaatttcttttgagacagattcttctgtgtagtcctatctgtccaggaactcactctatagaccaggctggccttgaatgctcagagatctgcctgcttttgcctttcaagtgctagaattaaaggtgtgctccaccatgcctggctagtgttttgttttgttttatagtttgaacgtgtgtttggtatgtatgggagtaactgatctgcagtgatgtaaagtataaaaggtaataatgtgtgctggaataatttatattttgaagcaatataaaattagtgttaaaataaaagttgtaaacagttgacttgttgggggcatctaatttgaatgaactgttacatcttaagtgttgattctgagcttctagagcaaaagtagtttacggactgattcttgttcctcactcagagcgtgtgcccagttaccattttccagtcgatagttattctttctggctagaggagttgcatattggaaaaaaatcccgaacatctagctattaacaactgcattttgtccttcctttcagtgagctattggagaaattgtgcgtgtcgttgtatgatgtgttccggcccttgatcatccatgtcattcacttagagactttatcggagctctgtgggattcttaaaaacgaagtgcttgaagaccacgtacagcacaacggtaaatacgcagaagtgatcacttcaaaggacttggtcattgtatctgtggctcagtgagtgtgagaaaaaaaaattggact

SEQ ID NO: 22890 - DNA, 3301 bp, Mus musculus
ccatctctaggccctgtgaggtctcctcattcaacaccgaggctcttcgttcaatggtgtctctattgaaaggtatcgattctcattagaatctgctctaggagttcagggtatttgtgatttcagagtgatgcggttgaggtatctcgtggcgtcctggggaaggatgtggatccgtcagtgtgcaagcatgcttactgtggggtgctgactgaacatgggcacagcataccccagaagtgtttgattggcatccaggtggcaggcaaagcggggtggatgtctttcctggagagccaaggtgaaggggtttgcaggtctcaggtctgatctctctattctgaattgaccttgggcaacagctagggagacagcctgagactctcagcatggaactaaaggggacttagcaagctgcctgcaggtatttgctagtagataagctaagttgtctgttggggttgggaacattacattctcttggcagccttaacccgcaactgtagttctttttgacttacgaacaactgaagaaactggacttgtgaccacaagtcgtcgttctgacaaaccgacttccgcgacggtagcccctcctgtgcttctggctgcctcttactgcacagctcatcatggcttctgggatgggagcaatggatggagaccaggttcctcagattgccatgcgttggtcctggatgctttcatctgtgttcagagcctagagcataggaacacccactcaccggtggttaccatcgaagtgcccttgacatcctagataactgatgtacataacagatcgtccttgctgtagaaaacctgcaaggaaatgagaaccgcctgctgctttcttcctggagagtagcctcgctgcctctggtcttctggctgtgtacatcgcccctctgagggggctcctgaagtgggggagcactgttatccccctaccatcgggagctttcgtttcctgtcagtgaagagattttacattgggacagttgtaggaagtacgtctctagcatactgcacggcttcatggttcctgcttgggcagaatctttcacttacagtaagactcgacctttgtgaggcaacactaaccatttgccctaagatttttttttagcaaagtttattatttccatatatcaaatgggggtaattatgctttgtgaagtagggattaaatgaagggaaaactacagaggcggctgcgagaaggatgagtgtgcgcacacctgtcagtaaacagttggtcaaccgtagggacaggaccaaacgcctttgttaaataaagaatcctgcaggtgaaggttttttagtcagttagtgaactgaagaggtgaggctccagagttttagcctttactttatcttgaggtgagtttgttaaacaaacaaacaacaacaaaaaacctttatctgagtttttcctaatttcctggaaaattaatttctaccttcctctttcatttgtgtgatgacagggctaaaccctggtgcattctgggtatcttccccacactgagctgcacgatggcccacatcgatggcccgagggcctgtttatctccattctgataagagctgtatagtcctctacctagtttgtttcttctgagacagtgtctctaagcgccaacagctttctagaagggtgcccagtgcctgcaggttggccctgtgaaaacctcattagcactaaaggaggctcgaagctggagcaatggccagtgcactcccggggccccttcctccttgaggcagaagcatgcaggttttctctgagggttgggcgctttttattccataccttttccatctggcttttgaaattaatggttcctttgaaaaacagtttgcgaagtagaattttgtttctaaaagtaaaagctaagttgaagtcctcacagagctggcccaatggtggcttaaagacaattccctcacatgccattagatggcagtagaggatctgagcgactgctggcctggctcctagtattatgagttagagacttttttgttttttattctgacctgaacattccgttgaagtgttagaatccagagtctttctctctagttgaaaggattggctttttcaaacaactttttaacatacaaaaaaaaaaaaagaatctttttttttaattaaaattcttgtctttatcctttcttctttctctcttttttttcttctttttcttttttctttttttctttttcatctttctgtctttctttctaattttttcccccaattttccaagacagggtttctctgtgtaatcctggcgctctctctctctctctctctctctctctctgtagaccatgctggcctccagcccaaagatcttcctgcctctgcttcctgaactctggaattaaaagcgcacaccaccactagtgggccaaaacaaacaaacaaaattcaaaacaacaataacaacaaaactactttattttttaagtttgaaggtaatttctaaagtacaaaaaggtccattttgaagaccatgtaaagagtggctatcagtattatcaatttattcaaattaggtatatatctatacctggataaaaagaaacctacacttcactgtaaaacttcatgtttcaaggcaagcttgcagtattttacgaccaggatagtgtcaatttattaagtgccttatagggcagggtcttaacctgccttctctctggagttaatgtggttgttgatgtttctaaccccgagacaacttgaaacacttggtgatgtgggtgtggctgtaacacttcaccacctgtcaatttcctcaagtatggtgaaaactacttcacacttttgtagctaagtggaaggcagttgtgtttgtgttgttactgatgctctgtgtaatgttgctagtctgtaatgtcaaaaatggctcctgtgctccatatttattcgtgagctatgaaactgtatgtattatgtaaagagtacacattttccataagcttttctattccaggctctttatacattgttggactgtgtggcataagccttgtttcattatttaataaactgaaataatatatgataatatggcttacagtcattttgggtacatagagagatttaaacagaccaaacgggtcctgaagactggggagaagcagtatctgtgaaagcagccgtggaaacttttctctgcatggagaagttactgggatcaactcactctttgccttgtccttaagagatggcccctgccctcacccccatgtcattttgtgaagtattcaacattcacaggccaat

SEQ ID NO: 22891 - DNA, 1152 bp, Mus musculus
ttatatggatgctcataaaactgttgattgtagtctgtggactgattgttaagtcactaaagtcaagagcagattgccctccattgaattcagtaaacatggagcagccattacagtatattttcctctagattcctctctgtttaggacttccaggcctttgatgcacatggtcctgtgtttagtgaggaatacgttgtaggactagagaaatggctcagtgggtaagagcactaactgcttttccgaaggttctgagttcaaatcccagcacccacatggtagctcacaatcatccatagtgagatctgacgccctcctctggtgcgtcaaaacattgtagaatcagaaaaagtttgttgaacccttttataggaaccccatttgggttttaaggatgctagtttttgttacttgtgagtatttagtgtatttcattttaagtgttacttcctgccttgataacctcatctgtggtgctttttttgttttggtttggtttttagggatacctgaaagaaatcttgaaagaaattggcattcagaatgtaaaaggaattcacaagaacacatgggagctgaagccggagtacaggcattaccaaacagaagagaagagcgactgagagactcgtgtgctaaagagtcagtcacaggcaggcctggccagcccacaccacaagttgcctgcctgcctgccttgacaggacaaagacacctgggtctaccactcctctcagtaaactgttaaagctgagattccataaaagtttcttaagtgttttctgaagagaaagatgttatttatagactaaactcatgttacaccattcagcgggcatgctggcacatgaatgtgtccaaaactcaggagactgaggcaggcaggtgtgagtttgagaccagcctggaatacacagcaagacctcctccatagaagaaaaaaattatggtatgggtggagctctgggaattaaaactacttttgtttttattggttaactttgcaagcgtaaatgggatatctcctaaatgaaaattttgtctctgaggaactaaggtaagaaaggagaaaggtgggaggcaggggcatcagctaagaaatgattacaggaacacagagtccaaattccttctgcaactgaagaggga

SEQ ID NO: 22892 - DNA, 3415 bp, Mus musculus
atactgttaggatgagggtcttaaaactcacacccacagtgacacacctactccaacaggccacaccttctaatagtgccactctctgggccaagcacatacaaaccatcacacaggcccttgcaaatccatcaattttaaatttcttagcttgtcttccaaactgaacctagtctatacagagcatgggggtttgtccttcctgctgttgtatttatttagttcctgtcaggttaattgtttttattggttttaaggtaaagaagctgtttggattatctcaggttaaggaaatattgtgattttaacagtaaatatttgtaggggaggcaatctgaaggacattatactcacctattctcattcatgtgaagtctaggatgctgtcttcatggtctcaccaaagctgcctgcatcttggaacgtcacatgtgatcatctgattcatatatgtatatagcactttgtatctggtttactggaatattaattctggatggcttttaaaaataaccaaataatcactggaaatggggaatctgtactcgcaaccacccagtgggagtattatatggtttagtgctgtaagcaatgcctcttgagctgttaaacagacactcctaatgagggagagaaaagctaaatgcgaattctgggcatttctagcaggtttttttgttctgccgactctgtattctagttttcacaaagcatagagttgtaatgggaaaatgttttgattcccaattcatgtgaactttataaaaattaggcaaactgttcaaattacaatataaagtatttcttaatagtggcacaatttttatactggtataaacagcctattcaaggactgctgcttcttaaaacctgaattattttgagtaaattaaacagacttcttgtccccatagatttagatagatctaccctttggctaaagtgaatgggtttctgcatataaaactttatacaagagtattaattctgactagcatggtcatgagtgcctttaatcccagcacttggaaggcagaggcaggcatatctatgtaagctcaaggccagcctgctctacagagtgaattccaggacatccagtgctgtgtagagagaccctgtctcaaaaatccaagaaaaaggagtatttattctgtccttttcatattgtgattatccccccccccatgagaggaaaatgtttttttagctattagaaaacctaacatattttgtgaaatttgttacttttaaaagttattatgtgtaagtacactgtagctgtcttcagacactccagaagagggtatcagatttccttacggatggttgtgagccacaatgtggttgctgggatttgaactcaggacctttggaagagcagtcggtgttcttaactgctgagccatttctccagcctctttttaaagttaaaatactaagaaatcaatcaatttaaaggaggtagctgtcggcagagcgtgtacagctcttgcaaatcacctgactcagttcccagcacccacacctggtgtccacactccctgtaactccagctgcacggggtctgacccctcttggggtccatggtcatctgtgcccatgtacaaaatgacactcagactcataactttaaaaataatcttaaaagtaaaaataccacttctggacactcattggccttgctttctcagtggaaggggttaggaatatctgtactatgcttactatttcctgtgacctcagataaaggacagcccaccagatgtatgattacctcgctggcaccctggagccagtgctattttctgttacccagatgacagttgcagtaaagtatatgccatttccagggaggtttggccacatggagacataaatctcaattaatattgaccataaaaaaatgaagcagctctgtgtgcattacagaaagatgttcctcatatcatcccatcttccaaagagcagaggcctgctggagtccactgccctgacagtcagcatttcctaataaaagcagccctgcaacccctggccatgttttacagggagtgaagaagaaaggagttactagcaccaggtcaaaccctggtgtctcaccactaacgttggccatcaattccctggatggccttgtccaggtccgactgctcagcctcaaacagtattcacatcactggtgagcagacggttggttttagtagtaggggaagatgagggactaaaacaagagaggacctggccaacccaggataagactttcagattggcctccacagggaaaactgagctctgcttgtggggtgggggacatagtctacatgagttttttcatttatttagctttaagaacacattcacttattcatttatcctttgttaggtgtgagattgctatgtgtatagatctgagccttccatgtttcagagtcacataaatcattcgctgttacatgatactatggttcttatgcagactaatcatgttgataccattgtgaaatacatgacagtggtgcagagctcataagctcgaggcctcgtccgcttccacttctccatggtgttattggtgcttctagaaaagcctctccagggcattatacctgagaggaggagtctacatcgaggaaagtggctccagatgagagaccacgaagcaccacctacctgacttctgctgccatactgaggcttcgtctgggctgcagatacagagccttgtgctgctgtagaagagctttttgtttggttgttgttgttttgtttacagctttaaaaacccactctaacggggcccaggcatgtgggtgagcgtgaagtcctggctccatccccagttctcagcaccacccagaaattgtttaactgtgaccatggtgtgtacaaggttgaaaggttgtatactccttgtagccgtttcatttaggaaaggctgcttttagaaaaggatcattttgaagtatagttttatatatacatatatgaataaaatgtcctctatatctgagaagttggaatcttccttttttgtttttctttgttttgatattcttagctttcctgaagcaagcagtactggcagcaagaatatcctgaacaggtttcttctggttagccagtcattgtggactattatgcaggtgatgggaaggagaaaaagaattcgggtgggggaggaggagtgaagatgctggtggcacagacctgcaaccccactattgagcctaaggcaggagaatcacaggctaaaggcctgcatgggctgcaccatgttttccagttcagctgcgatgagcgagaagcactatcatggaactgactgcagggtcaaaagcctgtgctgggaccatggagtccatcttacctttgattcccgccagggttctaatgaaaattccagtgtttctta

SEQ ID NO: 22893 - DNA, 1213 bp, Mus musculus
gctcatctctggctggtcctgagccttattcttactgtagtttatgaaatgatgaaagccatggagctgtcttggaggcccagtggagcccagtctgtgttcctaagcagtaaacgcctgttagggttgaagggctgactctgcactgtgggcattgcgcctcttgagagatgcagagcagaggtagtgaacagtcagagtgaaccgtaggtgggaataggtttcaaggaattgtccaatttaccaattggccgcagctgtcaaaatggtgattctttctttggttatcaggtaactgaccagtcaaagctactaaggaaaacggtgacagtcaccgttattccaacaccttttaagttggaataagtcttaagaagagaaatcatagaattaataataggagaactaaaatgttagcctctcaacatggaagactatcagctaagagataacctgcttttagtctttcttggctataaaaactatttcttaattataactcatttttcaaaagttttaatgcttttaaaagtaaatattaaagataattttgaactgaaaaattccccacagaactctgaattcctgtagaatgatgacagctttgttgtcctgccttagtaagatagcttacaagtggatctaaacaaaagttggatttggaactgaaactgggatttactagacatcctgttgtattctttaaaccacagtaggagccattttatgcctgagcccactagccttttgtctcagcactgaagacagaaagtgatttacccttggaatctcaagctttaatgaatttcagctctgttccttaaagtatgcaaacgagatgttagtgcattcctattacctcatacgctacaagctactgcaaagtcaaactttgtgtatcactgtgaactgttttgtttgaactttaattctgatgcattttctttctagatttttaaagaacaatttcgtgtcacaatatgcaatcctatatcttttccgtgtttactctatgaatattaatataagtgattttttcctagaatgatttattgtgtaatatttgtattatgtgatcatttgaaaactaataaatattttctccatggaaaaaatgcacttactgataaatggcttatttttgtttcaggagtagaaagtgaaaattgcaaccgtatttttaagtgtatttatgtgtcttttgctaagtgtt

SEQ ID NO: 22894 - DNA, 1928 bp, Mus musculus
cacaagtgtgctttaaatgctctttggagatagaataaataattggttagggagagtccaggacctagtaagctaaagcctttctttgcctcctgttttcaggatctggtgaaaagccatttgatgtatgcggtgagggaggaagtggaagttctgaaggagcagatcaaagaactaatagagaaaaactcccagctggagcaggagaacaatctgctgaagacgctggccagtccggagcagctcgcccagtttcaggcccagctgcagactggctcccctccggccaccacgcagccacaggggaccacacagccccctgcacagccagcatcccagggctcaggatcaaccgcatagcctcctaggccccaacagaactggctgctgctgctgctgtctgaactgaacagaccgaagagatgtgctagagagaagccgcctccacagtcacccatttcattgctgtctacgaaagagacgtgagactcacacgctgttctcgctttctccccagtattaagcactcataagcttttggcttgaagaaatgtactagttgagtgaattaaaggttaatcagagagtgagcagggatgtgccctgtgcaacgtggcagatgtctgaggaatggtttaattgaccccgaggagctctgtgccttttcaaccctccccagccgcccaccctgcttctgagagctcgggcggctcgccttcgtggggctcgcctgcgtggggttcggaaagtgggctgctcctggattctgcgctctcttctccttcccttcaaagaactcggagaggccagaaacaagactgcaatggggggcggggggagggatgatgcagtccttatacaaaaccgacaactgtcaccaaagcttataaaacacgatagtactgtccctcttttctgaaccatcagaagacacaaaactgttagtgacacaacggtgacaggtagctgggacctaggctatcttattatgaaggttgttttgcttgttgtatatttgtgtatgtagtgtaacgaatttgtaccatagaggactgtccgtaactactgtttagcttctacacattgaaatgtagatgtttcattggctgtctgaaaaggtgtggcttgtccttcctagagagatctacttaaaaactgctttgtgacaaaaaccacacctgaagaaattttaagaatttggcccagttagtcactctgtgtaatcccggaatctagctgctgaagtcttgcgaagtaaactccccgtgaccgatgtcagttaagctggtgatacctggagaagtggtcagttgctaaggaagtggatttcccagtaggggtttctgcacctcacctgtatagtcgttctgcgcatgtcccccacacagtccccactgtatttacctgttctacttgtcacctttcaataaagcatatcaaatgttgatacacacgtgtttctatatgacgccattaatacattcatttccacagctgctcttcatgaagtcaacagcagtttgcctagtaaagtctcagggcgctgacaccagtgctttgactccagaagagaggagacattgttttgattggggggggggggggaatgcaggcagaagggctcattctcttgtgactaagtcacttcacccctctggactgataagagaatcttcacttctccaatttaaaatttgagggtttatgtagagcttatttattcgtagttgctgaactgagagggaacaagcctggttggtgtgtgaaggttaaaggaagagggacaggttcgtttccacgttgacagctctgctgccagaatgagtttctggcccctgggagagtagttgtgtttgtagacactcttctgggggttgaaaggatgtactgggcttgagctaggtaggacctgggacatctctcccttc

SEQ ID NO: 22895 - DNA, 1174 bp, Mus musculus
acagaatgtatttggacaaagcattgcagccacggtgaacatgtataattttttgggggggtcatgatcccataaaccatgaagtacaacaacagaatagtatttgcactgtgtgaagcttgatagggtctagagaccctttagcacatgtgagaagatgtaatgaatcataagaaaacactaagccattttatgtaagagacttaagcagctatggactctgctatctactagagcaggggttcctggaactaatctccaggaaggtgcgggataattaaactgcacatgagtcaggattggaaaatgcttggttaggaaattcttagagcctcccagctatgttcacgaaaatgtatcatggtgcctttctttgggctggctcagatggagttccattgcgtacctctttatcttcctagagaagtgggggagctgagtatatgctttcagggggactaaggagtatgagaccctctgcatgtcccaaacattcactcccaagccaaccgttgctccttctacacgctttcttcattcactttgctgagttctgatacccatgtgtctcccacaagcttctattccatccgggacttgtacccttccaaccttgttcacagaactctcgggccaaactttctgaagatcttatgtgtatcacccccaggtgtgattcttaacacacatctgtatggttacctcctggctcaagattttcatgatctgacctaggcccatggttatggcctagcttagtgacatttgtcctcccgcaagtatcttaggctctcggcaggacacacaccccgccaagtcctttctcatttccatcttactacacccacactttcctctacatggggagctaggacagacattcaaactcactcagaaggagaccatattaacccatatacagtaaatgccagctctagtttcaactctgaggctttgtcccccagggtgaactaccggggactggtgagatcttttggggactactgggaggtccttatgtcattgaagctatgtccttgaaggagatcgtaggaacctagtcctccggcctcctaaccatcaggtgggcagattagctctgcttcctgcttcagtcatgtattgctttaacccaggcacaaagcacaggtgccaatcaatcatgcaatagaaa

SEQ ID NO: 22896 - DNA, 1195 bp, Mus musculus
cctatcagtcacactgtctccaggtaccagaggctgtgaaggcaaaatgtcattgcctcttctaagccattatcacacccataacttcatcccatagcctgggccaaagaaccagaataaataagaggcaggattagaaaagaaagggaggccaggtcccgtcaggctctggccacctgagtccttctcctcctccgccaacgccccgctgcagcagcctccaccaccatgggaatgcaggtggaaaccatctctcctggagaccggtgcaccttcccaaagcacagccagaactgcatggtgcattacacggggatgcttgaagatggaaagaaatttgcctcctctcgggacagaaacaatccttttaagtttacactaggcaagcaggaggtgatccgaggctggaaggaaggggtagcccagatgagtgtgggtcatagagccaaactgataatttcctgagactatgcctatggaaccactgggcacccaggcatcatcccaccacatgccactcttgtttttgatgtggagcatctaaaactggaatgacagaagtggcctcctcccttagctctgcacatggatctgccatggaggaatctggtacctccagatgggtgcacatgaatccatggggcgcttttcctgacgtcccaccaccctttgtgtagacacttgcctgactgaatgtgttctgtcactcagctttgcttcagacacctccatgtcctcttcctccttctgtatgtgtgttgacctaaactatatgccataaacctcaagttactttattttgaggtgaagactcagtttccgtctttcagatctaagtttccaatgaagtatattgtcaagtgttaacagcacaagcgatgggttaacttagaataggaattggtgttgaggggtgggcgatttgcaagaatttttattttattttatttttattttttggataaaaaattttatctattatatattaagacattctgctgctgtgctgcaaagccatagcagattcgagatgctgttgagggctggatttttctctagtgagggaggtcctatcaaactgaaagccctacccaaactgaggtgggaaggaagcgggggagagagcctttgcttctgacagtcctcccatcttctgaaactagctgccttttaaagcaggtcccttcactgctat

SEQ ID NO: 22897 - DNA, 1145 bp, Mus musculus
tcctgcccttactccaaaccacctccgtggaacttaacacacatcgttattctggttcagaagctcttctcattcagcttcaagcctacccttttagagtctgccaaccacttgttgtttgtcaattagggggcatttgggtagcaaggcagaacaggcttaccttttgtgcttccttgctctcccgagagcatcataaacgaggccgttcaccctggaagcagtattacttgggcaagtagcagcaaacctgcttccctggaccagcagttggtagggaaaggtcctttcctcagattctgagccccaaatccaagcgctgccaagcttctaagctctgatgacccaggccctctttatgtgcctgcacagcctcagagctggtggcagcatcctgtagttaacagcttttggtgctcagtgctatctctgcaacagctccagtatttgtttaactactttcccatgttaaactctctctgttaaaatcactagtggggtttctgctttctgattgtaccctggcatatatgatatcctctgtgggttgcttggttcctctgtgtgtgtgtgtgtatgtgtgtgtgtgtgtgtgtgtgtgtgtgtgttatgtaatggttgggacagctgaataaggcattgaattaaaaacatacgagtttgcattctggctccttactttctagttgagaagtcttggccaaaatacttggcttctttgagactccaattttcttattagtgaaatgagattattaatgttgatcttgtagttgaatgaggtaatgtctaaaaagtgcctggcactgactgagttttcgagagatattggctattacgttatgtgtgtctgaaataaaactttggatctatatttcagtgagagggacctactggcttctttgggcaagtctggtctctatttcagcttccttggttcatttagggtgtttccttacccaagaagactacagctcttctattctacttggcatggattcagactgatttagaaatgaggtagggagagcaaagaatgtaaaaggagttggttttacgctgcccgataaatcacagtacaagcaatgtccttgttattcattggagattgccactgggccacctgacagacagtgtgtgcctct

SEQ ID NO: 22898 - DNA, 1170 bp, Mus musculus
ctgcaaatcaaagacccaggccaaattctctgagtcttcatgtcttagttctgccagggctgtccccagggtgctgtcctagaagggtttgtgctcacagggtaacctcatagagcacagctgtgcagtgacagctggcccctcgctggcccagaagttgtctcagggtcatgctttctctttccaccaacctctcgaagattcagatctatgcattttactgaggaaggagcccagggcctgggcactgacatcaaaaccaggggaattcaaggcaagagcgggatgctctattgtccctgccagatcaccccctgcattgtgtctttcaattggctttttcccttctgggcaggctgggtttgtgttacaaagactctgcctggtctattgtttgtgcagggatgctttcccagagcagggtgggcgtttgatggatttattcaataagagcgaggaaggacaaactggaaccaggaagccaccactcaactatttgtggactttggaggaggtttgaagaattcacaactgaacagtttttacaaaggcattttgagcctttcactttctcgtgtgaacatttctgtagttgtcatcgtgacagaaagtgtagacttcagtgtagaagtctggttgccagctatgcccagagggattttgctgactaaatatactgttcactttaatattcatcttagacctctgctgtgttctcctaggaccctgaccacccaccagggttctttgaggactggatgtgttacattcttgaagtcattatggatcctccagatcacgagggcgatagataagtaaggtggctaactttctgtcttttctactgaggaacttgttggcgtctgacagagcatctcagatttcttacataaaatgtggaattgtcaatagtcagatgcatcagtggccaaggctatggtgtgcagtttctatcagcgtgtacaggacatcctgcctggttttggcctcaaggtaagttggcaatagtttggaagaaggtgctattccatagagctctgagacggtgtcattggtggtacaaaagaaaccacttcttgtagccgggcaatggtagctcacacctttagtcccagcacttgggaggcagagacaggcggatttctgagttcgaggccagcctggtctaca

SEQ ID NO: 22899 - DNA, 1157 bp, Mus musculus
agctaacatttctattctgccaaatggaaatccccattcagttgcaacagcagataaagattagctagcccttgttctctatttttacaaagaagaaaaaaaaaagcaatctaccatgtactcttggcagcctctgttctgcacccacggggtgtgtgatgtgcattcagtttaaggagggctccgatccacgatgctcctctgctgagaagaagagaaaggcatataataattcagatgaagaaagataaataacaaggggctgggcagtcctctgcctcgaaaggacattcaataagtgctgtgaaaatggccacttctgaaaggatggctcaagcccagcaggcagctgccccttgacctggatatgtatctgcagaacgccctgtgcttgaatacagacacagtggctttgtcacacagataacgtgcatcaagataaggagctaggcccctctctcatagctcaggattgccgcgctctcttctctgtgatggcgtgggcgttcgcctgtcagattctgtcactactttctgacacagctctggggctgtgtgtcagcatcacagtggacccagagcaccttggactgtggactttgacctgcctgtacccctaacccatgacctaccacctttttaggttataaatgactgattaatgaacaagtatttcagaacgagctaggaacaataacataaaatgaaaaagatagactcctcagtttctcagttattcatataaaactttctggtgagccctaacatggtcaacagtggagtaacgctgagaatcacagattctcagtgtgaagaaagaaaaatcactcttttctctacctcctcctcctcttcttcctcctccacatccttacttgtcacctttctatatactctttaaatcccaatgacatactgaataatgtattgaattctgtttatgctcaagacaggcattcacttagtactactgtggagcctcaaaggacattgaagtagaaaaaaaaatcccaaactataatatacatttgtttattaattaactctttgtaaatagctggcacataaatatccagcacacagatcttacacttacataaatacgatgaagtaggcagggcagggtttgtaccccccacatccaagccaagcagcct

SEQ ID NO: 22900 - DNA, 1150 bp, Mus musculus
atctggatcctgtcgctaaggagcccttttctaatggaagcctttctcctgtgcaaatggaccctatgtatctgggttgtaaattcctgatcttagtggaaatttatgcccttactgttacgtggcacctagcgatgccacagttggctcctgacttctttcataatgagcaaactttctataatagagtccttccctgtgaataaaattgccctgtgcttttgaaattgccttgtgtcccggagacccaagcatccccaggactcccctattttgctgccctttcttaaaactcagtggagcccttgttaggtcctaacaaccacacctgtgctctgcgtggagcaaggtaggcgcccccagtggctccccatgtgtccttcagcctggaacccccacatgtacttacaaagcacactgggggctctgtgccactctgtgtggctctggcttcctgctcaatgcagtgagaccttttaagcctgaggaaaggcttcagctactgggcagctgccaggcaaaagaaaggaatggggaaagttaaatggttgtctgaaatggagagccaaggatgcttgaattcagacaaggtctcagcctcactgcctgcatacagcccgcagaaccccaatgcttctcaacttcccagaacaccatcatcttcattatggcttactgtgatttgggggtacctcatagtgttaagcaaggctcagaagagaactgtcacatgagagagacttcacccacttccttagcaggctctgaggacactgagggaatatttatgtaataagatgcaaagttgctatggaaaatactatagcaacctaacacctcctggagccaggcaggggcttgtaacagcagtctaaatttacatctactggagtgtcattttatcgactcttagtatctccttctgacaggatgttaaaatatgttttcagctccagtttgggcaaaattaacacagaatgtctttggagtttaagggtagtcttcacaacttctggaaaaaactatcagaataactctggaaggggttagatgacagagtcttggtgagtttgtagattccctcaaattagtcactgatctcagcctttactctgtaagcagtaagtggaaaagcctgattgtgaaatgg

SEQ ID NO: 22901 - DNA, 1167 bp, Mus musculus
agtctataggctcattggagcatctgccccatttgaagtcacttttgagatgaagataaaggcacttgggagggagttctagaatttccccaagtcttcccaatagcccgtgaggctatatttggagggataactgaggctaaacctcacgattcttgatggtggtctcctctaagattttgagagtggtgtacaggaaagggcttcggacggagttcactagagctgactttttaaatcttacagaggaaactgaggcccagagatgcaaaggataggggccagcctagagagccagaaaccaaccactggacccaacccacagcctccacctcagagggccctgatggggagggaggaggcgggtccctgagagcgaagaagagtgggagggcgaaggaaaggaaggagggcagatgtgggagtgaaagaggcaccctcctggaggctgattggctctggaggccagctctctccacgaggtttataagagttagggctgcctggggtaccctgccatctctcccacgtcccggggagccactgccaggacctctgtgaaccggtcggggcgggggccgcctggccgggagtctgctcggcggtgggtggccgaggaagggagagaacgatcgcggagcagggcgcccgaactccgggcgccgcgccatgcgccgggccagccgagactacggcaagtacctgcgcagctcggaggagatgggcagcggccccggcgtcccacacgagggtccgctgcaccccgcgccttctgcaccggctccggcgccgccacccgccgcctcccgctccatgttcctggccctcctggggctgggactgggccaggtggtctgcagcatcgctctgttcctgtactttcgagcgcaggtgagtgattgacatccctgtccgagtctctgcggtgagttggggggtggggtgggggctgagtctggttctaggacttattctggaagggaaagagacccaaccccccacaaggaagggaagttgggggcctccagccaagctcatctcctatcagcgcagcgtgcagaagctgaactctgattctggctgaggatgggtttgaatttccccccattggccgctcccctcgtgtgcctcaagtgatcgcacgctttctccccaccgtgaattttt

SEQ ID NO: 22902 - DNA, 1160 bp, Mus musculus
acaatacgatacttatatatcatttgactgttttcagaaacaacaacaataatcttccttatttatttcaatattctcaaaagtttgcttcaaaggtccaatactcaagacagtatttttcatttgataaaatgctagtattagtagttgtgtcacatgcttagattcctcatccaatgaaatgtgcatatttaaagccaagtgctttcttactttaaacgtgttgctttgggtgttgctgaaaatagtatacagagttgagtacatactgaccttggtcacagcaacttttcttcagaggaaagcttaacagggagtgtactgggtaaaagatgggaccaggctgtctcatactgcagtgggaatgtgaaaattagcctctatcctggtggtgatctgatggttcaagaagagaccctggtgagttctgctgtgtagatttggacgtaggaaatgtttatgaaaccggtgtccttataccagttaactaggaaaagtaatcaccagggacagaggataatgactgacattccttgttgccctgaatgggctcgatctcctctgatctcggaagctaagcagggtcgggcctggttagcacttggatgggagaaacgttgaggcgggctagagtgcaattcccaacactggcccattgcttagtgtttctgagttccaagctcctcacttgtgcctgactcatttccttcttccggataacatgtctttctctcttgctttagaatcccccagtgctatttactaccttcaaaacttcttttgaccaagcacttgccatatacactaaaactagctgtactgtgcatggctttcccaaaagaatttttcactgaagacaatgattctcacccttcctaatgctgcaatcctttaacacagttcctcatggtatggggaccccaaccataaaattactttgttgttactttataactgtaactttgctactgttatgagtcataatgtaaatatctgatatgcaggatatctgatatctcccaagggggtcacgacccacagattaagaacagctggtctaagagagcaatgtttctctaagggtcctcttagcaccttgacaggatcacacctatctttatagtatccctgtggcatgggtttatttatttaatagttgc

SEQ ID NO: 22903 - DNA, 3071 bp, Mus musculus
gtgtgtgtgtgtgtgtgtgcgcgtgcgtgagaggataaactttaaccttcccactagtttattcttttactttagtgttttcttagttagaaaaccactattaacattaaataaaacgtctaaatattgtgcagtaagaattttgtcttttttatttattccacaaatgaaaattcaggttgtaaaataaattgaaattttaaaaattaatgtagaaatgcattcagaggagcctagtagtaattttctgtgttggatttttgaagaagaagaaaaaaaaaaaaccctcctcacttcaccaagagtaatttcttttagctaagtgtttctcaaccttcctaacactgcaaccctttaatacagttcctcatgttgtggtgacccccaaccatcacattattttgctgatatttcataactgtaattttgctactattacttggacatattggtgttttctgatgggggtcatgtagccccagaagaggttgcaacccacaggtcgagagctgccatttcagcacagaagcacctctcccccagtaaaatgtgtctggactgtttcataaagtctcttctcatgatcttttttggtctctacattccctactgtgttttttagagattgcaggctgctctgagtgaggtgaccaggctgtgtctctgtgtctgagatttgtgaagatgggagggtctcccctaaccgattctggaatctaaagcaggtcgtattgcttggggctggtgatttttcttcattacatttttcatttttcctcaagctctgacttttttagaagctacagtgagtagaagacacagcacctatcaggggacttaggttaatttgaattagtaattatggtgaagttatttttatagagatgtcagatttgctttgactccagaaacaatttaagtattttgaaactacattataaactgtagtttttcctcaattgaacatagagacacggggcctgccttaaacatacatttttaaaagtttcttcaagtattttccagagtggggaaatgcagggaataatacccatgtgcactctcctgcgcttgcacgaggaaccagcacactgcacgtatgtaatttgcatgatatgtattgcttagattaacagtaaaactgacttctaatttctttgaggtgcaaatgacaatgttggttttctaaagttgaaagtgcccaggcgtgtttcagctgctggtgtagttatttgaggcgagctttaactctgctcctggttcctttgcattctggtgaagccaagcagcgctcactcagtgttcttcattcagtgcaacagagacggagtggacctcacactgcgttggctctgtgcagggacacgggaaacagaagtttcggcagggtgcgcagcagtgtaggttgactttctgtaaagaaagcgtttgagtgtagagcagtgttgtgggccggacacaggggaaggaggcggctttaaagcactttgtctttggagcatctctattgagatgcgctccatcttatcacagatttcttgacatatttatattggaacttgtatactgtcatgcattttgctcctaatgaaatacaatttactcaaaactgttaaaaagttgtgatgtgcagtgagctgattcttgattcaccagttttaaaggtattctgtgatccacagacagacagacctttgccggaaaaaccaacaaacaaaaaccccacagaagaaatggcagtagagatgagctggctccttgtggtgtaaatctaacattataacagccttcagtgaactcatgtagtacctttgtactttcagaaatgcttcatttacccctaaagatatttaatgtgaattaattcagttcatactactatacctctgcttagcaaaggacttatagtgctggtaggaagctgtatactgagtgcactgtgtggaaagtgaagagttggcccatgtgacagctggcagctctgacagtggtggtgcatgctctccgtccttgtccagagcctcatggctacctgctgtccaccagtagtgtttctccacagctacttgcagcagcttctagtcagtgtattattttgtaatttttcaaagaaatctttacacagagtttaaagatgttgggtccacacacgggtagggaaaatgctctccatttaaaatcatgtctgccagtcagcagcacatgagaactgtgggagtgtctgttgggattggaagcggcgtactcaagtcaagtgcgcttggctcgtcagcacaagccctgtaggcaccccttgtttactgtgcgcctgctctgcacacacaggcgcggtgctgctcactcctgcctctctatttatttattttgaccatgtgtacattcctttcatagagttagaactgcggttctgcaggctcctattgcagtctgttgtatggtttggatactatttaatgccaggtttatatgttgctggatttgctgccttcagttacttgtgctgtgttccaagcaatctgcattcttgttcacttaatgaatattaagtagaagtaactttgaataattgtggccatttatttgagtttgctcatttagtgcactaaggtcttatactatataacagtaactcctctttttgctcttgagtaatttaatgttcatttaccaaacttggaatttcaagatgcactaaagttttatttagcggtggctcaaaaaatgtttcagaacttacttttgtaataatttgcagttaattgttcttttgtctttactcttgttcaagcctgtgatctttcctctcccagccaagaattattcaataaatttaaagaaatgtcaagccatggttttccttctttagcatcctgttcattctttgttgaactaaaacaaaggcattcaagactggtatgttggaagacataaaaggaactatgtgctgatatcatggattttgaggataagagaaattaggaatatttttagttgaatactggattctatcttttcagagatgcctttactgggtaatataggagacttaaaagctaggctgctcattttgg

SEQ ID NO: 22904 - DNA, 1231 bp, Mus musculus
tcaaaaccctcacttaaatgtaccaagtcaaagaaatgtgctgccagctttaagtcattccgatgaaagcatacagacgtgcacttttgcaagtgatatggcagctgatgtcattgcagaagccgagaagattgcaaacgctagaagctgtatgcttttcaggcatgagaggaacatttgtcatgttgaaggtggccgaggtaaagcagaagagaaactggatgtggaagatgttgcacatccaagagaagtcgatacttgtgttctttcattaccaagtggcatgccaggtctgacatacaagtatcccagttgtgaaagtgtgactgatgagtatgcagggcatgttattcaggtgctccaacagcaaggtggcagtggagagctaatcatggagcagtatgccagcagactggcctaccggtctgtcactgcagcagctcgggaagcagctaagacagtgaaaatgaagtgcggttcgaaactcttccctctgcacggctgtcatgggaaaacaaacaaggaactgttggtgttctcaagtaaagagcgtcaccaagaagtcgatagacaaagaaaaagaaatggcagccatctttgcaaataccagacatgtgaaaggacacaggatccgtgtagaaatgaactttctgaactgtacagtttttcagcctctcttgctagcagcataacaagagatgcaaagaaacagctcacagcacctaaagttgacttgccaaaatcctcaacagatggttgtttttttgaaaaatctgaatgtgttgacagcagtgagaatgttactggaccagaacgttcaaagtcttgtcaacctttgcaaagccatggattttgccagaatacaggctatctaagtggatatagttgtgcagagaatgctcaagctatagaacagtatgctagaaaagtagtgggtgacactttagagctaagtttaggacccacagtttttcataattcagagaccacagcatcagcagatagaattacttacgcagaaaaattgtcaccgcttataaatgaagcttgcagatactgtgaccttaaggaattccatggttgcaccagaaattctgctcagctcttttcaaagcagagtccgtgtgctagtgctaagccaagttcacgttcaaaacttagtagcattcgtcagaaatcaagaatttttcatcttgatgtacctcagattcatgttaatcttgataaaagg

SEQ ID NO: 22905 - DNA, 1168 bp, Mus musculus
ttaagaagagtttgcatggggcctggtatcgtaacttagttttctacctgtcacttccagagctgatcaatatgaactgttaataaaatgtgtatatgctaattatgtgaattactagttgaaatgcttattggtaaacttgtcttttgttttttttttctccctctcttcctttctattacttttgtttttctttctatgtttccttttttaattaatttttttctcttactttttcaggacctggggattccgaaagtgggtcatatgaagcgaattctccagggaattaaagagcttgaacggaaccctcccaacttggtctgaggggtggtcacactggtgctatttctgggaagagaagtcctcactcaccactcaatacagagtccttggaagccgctgcctgttgttgtgatttactgcacagataagcacctctgaagcacctctcccgactgatattttgctgtgggtgaaagttttgatttgaggtattagaaaataatttttgtgccaaaaaaaaggccattccacaaagccatgttctcattgtgcaaacctgacatgctaaaaaaaaatgctcacagtagtggaagaaggattagacatgattgccttgtctaaaaagtggacttgtttgcccatcatccagtgagggtctttagatctgggcccacaggaggttcctatgtgtgcctgcaactgtgttaacagtatgcagctggaacttcgcaggcttcccagtgaaggcattggctcctctctagaagtcactggttaggagataaagataggggttgtacttttaagtttttcaccctaagttctcagtatccactggtcaaaaaatacggtgaaaccaacccatagctcactatgactgatgcaaatctgatgcacgatgttccttgcctgagttgtctttctttttcttgcatgtcatgtatattattgtaatatttcaatagctttgatgtttattataatgaaatttaatttattaccacccaactacccaagcactttttggttggttaagggcactttggagtaaatattccatacctaagagtctgggaatgtttgtctgtgccatgatcaacaaatgatatacatcttatgcaaaccaaattctttgcctgttccaaactacaggtgtgcacat

SEQ ID NO: 22906 - DNA, 1195 bp, Mus musculus
tgtgcacatgtgctcatatgtgcacataatcgagctaagccaccaaaggtcataagtgagtacactcaggttacagagtagatcagtatgtaaaaactgcatatttatcattatatttctatataccgcaactgagcattctgtccatgcaattaagaaaaaagttccacttgaaattgcatcaccaataacaaaatactcaggaatgaatttaacccagaaagagaaatgctggaagctacaaattgtagaactgctaaatggtaagtgagaaaatatcacagatattccttttcatgtttttctctttattacaacatgcagacatttggaaatattaaaacacttcacgtttccaagcatcatcctctgagctttggctactgagtggtcactgaaaaccaggcgctgggagcaagctgtttgagaagggcaggttgagtggaccaggcctgagtctgcttcctcttaacatgtgatgctaatgtttctggcaggtttgagagcaggacttgctgcctccattgctgggagttctatcatcaacaaaatgttgctggcgaacatcgatcctttcggggcaacaccgtttattgacccagatctagactcactgtaaggaacacttttgtagctatttgacttctgtttttgtttgttggtttgtgtttctgttttgttcaaatcctaaaactttgcatgtgtcccaaagtgtatgagtctatctgcaaaaaaaggggtggtgtggatgctcagaaatggatcatggtctgtccctgagatgggtccctttctcacctgctcagcagccactccctggtgcagagatctgtgcctcgccctgaggggtgaccttagtgctggtttgtacttgtattcatgccatccccagcctttctctcttcagtctgctaaccctgccatctttcctcaccccattacacagtttccttatttctagcttctaacccacattgactgcatctcttttttagactccccaaaacacttttggaagcttgagatatatttactattgttttcattttaaaatttgcacacacacacacacacacacacacacacacacacgcatgtacataccatgacttgtatgtctggtatggtcagaggttgacttacaggagtcagttctttctgtcaaccatgtgtcctgggaattgaactctggtca

SEQ ID NO: 22907 - DNA, 1223 bp, Mus musculus
taaagtagtcagtgttagagtgttaatagttggttcacatcgagaaacaactaatgttctggctttttaagctcattttacaaaattgagaactatgcagagatgccaccaagccagagattgtgcaagactgattgttgaaatttataagttatgctatccacccagagttacagctgaatggtatctcaattctgttttcctgaatttaggggacacattagcagctgttccctgacacaagtctgtctcaatagatggtttctagagttgaatcatccctttttagtaaattgtgatgttgaattatcaagaagtgtggattatgaacttgagccagctcaggagtggagaatttctattttgtattagtagactttaggggctatttttatatcatccttaattattgttcaagaggaaaggtattagtgaaaagtaaaacattctcattaacttcaagtctctgcttgtataaataacatggaaatggtttcagttctaattagataggattccagttaattagcattctgacatatcttcctggtaacttacagcgctttgagctccaaggttctggacattccctgcttcctaaggagattgtaagagtggagaggatgactgacagccacggctcctatgcccacgtgacaatccgggtcgcaggaaaagaggtgaccattaaggtacttcatcatggtttattcatcctaaaatctgtcgcatgccggccactcctgtggcctaagttaggctcttgatcccctgctaagtcttgggctctgctgtacctccctagatccttcattttatggctacatctatgtggtaacccagagctgtgtgtgaaaaattctttccttcacaaatcaagtgttgattaacaaacatgttttgtgctatgagttctcactaaggaatagtgctttcaaatggacactcactgccaaagggaaaactggtttcctccaatggagtgtcactggtatatcagccacactcctgggcaggccccatgcccagaagtagtgggcaacagaaaacaaactccatgacatttgtttctttgtttttgtgagctcttttgtttgttttggcttttttttttgttttattgggtttttgttgttgttgttgatgatgacttttgtgttgttttgagagagaaagaacatgaagtaggatgggtagtgggtggggaggacctgggaagaatt

SEQ ID NO: 22908 - DNA, 1135 bp, Mus musculus
tctccaattcttatcagaatatatgtttaatgttctcctgaaattatatttgtcctcatttgtgatggcaaaaccaatctttgagcctacaaggctaatagccttggcagacttacacagacagtatgagacttcttgaaaaacagctaggctgtttcctcccagtgtgtcctctttgtagttgaaatgttatcagtaagcattggttgtacgaacaaaatgatcctgaaagcctctatctactgaattgccatgttctgtaagctgaactctaatgggtgttgttggaccttacattgcgtgtgttatctcagcagataggtgtatacgtgagttcatggccattcttgctcttttcctttgtggacctatattgggtctacaatataaactggagaacaacagtgttttttgtttactttttctttgcttaatttaaatcctgaagacctggaggttacagaggccaccttgtgttgtgtgttggccagactaggcttctctggatattagcaagatgttgctgagactaatgctatgtcctgtacaaaatgttcaggtgaagtagtcgccgggtctctgaagattggcgccgtcagtgtgccagtgcacaatgcccatgagaagatgaaagtgcctgacgttcttttctacgacaatgttcaggtgagaccattgcttcgtggtcttgagctaatcatgtcatagttgttaattctgatccaaatgatactgatgtgtaattgtagtcatgatttcctaagttgagttcaggtaaggtaaaatgaagtgctgaaatatttttattacagtgatataagacttaaaattccttctaatggtcaaaattagaggagttactgctatgggtttaatatgtgtgtgttatgtacacacatatgtatgactgtgctcgaggctagtaaagcattttattgaataaaaactaacagacctattggttatcgctttggtgtctagttaagtcctttctgtagctcacaggaggcaagcatcttatacatcctgtctttctctttcttccttgctgcatattccaagcttcccctttgttttccttttttctttggagagtggactgtggcagagattttgcctttaaaccttaccagta

SEQ ID NO: 22909 - DNA, 1221 bp, Mus musculus
gggaagagcagtcagtgctcttaaccactgagccatctctccagccccttcagtcagtttttataaaagcttttatttagttcattttatattagttttcttctcatgtaattttctctgttattctcttaatcttctttgctttgtttttctttttctctttttttttgtttcttcatcatcatcatctcaggcctgtggtgatgtttctttaatttctgattttaatactatctgtttttccctttagtcattccaggttaagttagtgattttgttgatctgatccaaaaccagcttacaattttttcctttttctgtatggatgtgttggagcatgcctacggttttatactaccgcctcagttcttcctgtccccatgtgtagtagaaaggccaggaagagagtaacctccttggctctccttagaccttaccatgtaatttagaaataggtgtccaaggaggctttccctccctccttcctgcctcggaggctgccgtaaactctggactcccttgcatctgcttcttttgagcattgcgttacagttgtgtgtgctgacattactccactctgccctgcttcacagtcttgtctgtctgtcctgtcctctctgtctctgtgtctgcctgtccttctctctctctctttctttctttctttctttctttctttctttctttctttctttctgttggccccactggctccggcttgcttgcttgtttatttatttatttattaattataagtacactgtagctatctttaggcaccccagaagctctcattacagatggttgtaagccatcatgtggttgctgggatttgaacctctggaagagcagtcagtgctcttaaccctgagagccatctctccaggccctcacagtattttcttgaagaaactttgtataaaattttgctaaattccattattggtcctattttttctttaataatttgtggtagattccttacgatgtctgtcatctacttttatatctggatttaagatctgttccttattgggaatggtggcccatgcctttaatcccagcacttgggagacaggcatgcagatttcagagttcagggccagcctggtctacagagtgagttccaggatagccagggctatacagagaaaccctgtctcgacgcacccccccccccaaaaaaaatctgaaatctgttcctcttcactttgccttata

SEQ ID NO: 22910 - DNA, 1295 bp, Mus musculus
ttttgagacaataagatgttgtttctactgtatggaatatatcttaaaatgataccccttttcctgaaaagacaaagttgattaggactggagatttggtttagaaagggtagcaatttgaaatagtaatgcaatatgcaaaattcatacagtccctgaaatccgattatttcaataatttgctgtgctaaaagtccatgattaatatatgcatagtgaactacataaattaattaaggtgtttagtggattttgttttgcagttaattagtatgtttatattttgatttctctagtttttgttaaattttgcctagagctatgaggtcttgtttattactagaaaaactggactgagaattgttgtattttgaaggtaataacattttccttcagaataatgaaagatgacattttttaaagtaaatttttagttatcagttatagtttgttaaaactctagtatgctctccttcctttctgcaaagaaagaaacattaaggttactaagtagtgactccatactgataatgtgttcagtggacttacaaggtcacaggaaacttaaaaaatcaggattccactgtttccaaagaatttaaatttttactttaaaatttaaaaatatatattggtaaatatgacctgtttctcacccaccactttcttgaaaagaaaccactctagtaatgtcatcaattatttaagcacctttctaaccccccccccaaaatgtgagaggtaatttgctttataaattcacagttttgatcggtatatgttaaatgctttgttgactcagaagaacaacccttcactggacatgatttaaataatgtacatttttcttcattggtcatgcactgtcttaaaaagtttgcttccctaaaatattttggctatatagttttagtattcatcttagaggctttatcagcagaaagtgatttattcttcaatgttttgtgacgtaatattggttttgaaaatatgtataagctaaaggcagtattttattgagatcagtagctatagtgtttatcaactcaagttaagtgccagcaaagacctttaaaacttcaagctgtgtatagaactgtcctgtgtagtattgaaatattgtcagttttttaagttactagaaatgttcttgatttgcagcttgaacatatttttgtattaaaagttgactcttaaggaacttaagtggatggtgggtggtggcatttggggccagtagttaaagtatgtttcttcagttctttccttaatcagtggtatacatggccatttta

SEQ ID NO: 22911 - DNA, 1729 bp, Mus musculus
agaacaaatgagactcatcctagcacatgttcatctgaggcagagttgagtgttttgagactaacgtcagcattataaatgtagagccaggcagtacacacctaactcaggattggagggatggattcagaggcttgggagcttgaagtcatctacactaacatcagagagtatacggttagctaggactacatgaaacgctgtctttaaaacccaaaacagaagtagcttagtgttcccaggtgaccagcttctgatgtaccctcggttaccacttagaaggggcttgtggttcatatgcaagtaattaccgtactctgtcagctaacagctttctctctgctccagagaagaagttgatttggaacttccaagcactgaaggggaatgtctatcaacttcagaagctggcgttggggaaatcaaagtggtatttaaagagaaaacagtttcttctctgggagttgcagcagatggagtggccccagtcttcaaaaagagaagacttgaaaatggaaaatctcgaaacttaagacagcgaggtgacgacgagtgactgtgaagctatggatggaaggggtgtcctttccaagctgctctgtgctctgtgaagctgtggagaggaggtgtgtcctttccaagctcctgtgctttgaatactgtagtgctgcattttacatttatgctaaatatattttatgtgaatcaaaataaatcttttttcatgtgaaatttatttttgttccttaagtggtagcctaccacattgcattgtaatacagtgtattatgttcaatgtctaaaattgctaattatataataatttaagatgctatgtatctgttatttaaaacatggggaagacctttgctctgttcttacttataaacatatttattctgcattgaaaatgcattatttccatatgctgaaattaacttgttacctgagaagtaagaaatcagacacagccccaagacaatgtggttttgacagtcctttctgaagcctggatgtagaaaactgcagatcggcttgtcttactccatttaggacggaagaccaggagaaggacgcacctgagcactgacgtgcagagtgacagctggaccaagggttgaaacctgtgcttgcctcagatcagctgatagctgtagtatcttacaaccattttaacatggggccaagccttggggggcttgagatagaggggcagcctctgccctaccattggttacgttctggcacagccctttcccagtccggcatccttttcatagccctggatccgttggaaggtttacctaagttaactgcaaaaggcttgaactgaaataggttgtgttgtccacttagatgttccccattttctggttccatttcttcaaatagaagtttcatattctatttgaagtacttccctttattacttttgaatatttttaatcatttttcttaagttgtacagtaccttttggtagcaaatgtctttttacaattgttagtgtacatgtaagaatagcttattaaaaaccataaagtaaatatcggggtctctttttcttctaatatgcatcaaagttaccttaacattgacaaaacagtatttgaagtattagtcttgacaatcactcaggctgaaactctgtattttgcggtattttaatttttgttttgttaagagttttgctgtgttgcccttgaagactaacctcaagtccagatcctc

SEQ ID NO: 22912 - DNA, 1160 bp, Mus musculus
tcagtaaaatgctctgagcatcatctaattgtatataatggtaactcctttctgttgctgaggttggattatgtgctagtgttttatcctccgattttgttaacgtgtgtgccttggcaccatcataaggaatttaagtgaattattttgtgaaacagggatggtctctgcaccttttagagaagttaacacagaggcttagagcttacatatgtaggcctagagtggacaactggttaatagtagagttgggactcacactgtggtcatccactctgaagtcagtgtcttaaccattagtctactgggcaaatggttaatgttagtttcttgattctttctgcatgctctgtgtgtgtgtgcctgtgccgtaaggtggagaggccagaggaatcaggcgctctctagccctttcaccttattcccctgaggcgaggtttctcgtgtgttttaggccagccccggagagtctcctatctcttccttgcagtgctggggccgtaggtgtgtgaggcccagtctcttttatgtctcggctgggtatctgaacgtgtcctcaggcttgatccataggctctcctccctcccgagccaccttcccttaaggtagcctgagatgtgggtagatctcccttactgttccctgctactctttgtaattcattatataagtttctttcttaaagagattaaaaaaaaaaaaaggcccaaagtttcccctatttttctgtctaattttatcgaggaacaaagacaacagttgcaggcaataattttcatgttgctgggttttagtcttaaggacccaaggcttctggaattgaggcttaaataaaaataaagctgtaattcttaattagcataagatgcatctctatgagaattcaggtcatgataccattattccttaacctcctctaaacagaatctttgttttttagacaacaaataccaaacaaaattggcagtggttgaaattacttaaaataagaggtgcggcttctccgacactgccttaggtttaattaagataggtagttgtcttgttttttgtatttaaaagcatagaattttgccaggctattacagactcctaaagtcctagtactctgaagctgatgcagttcaggcctaggttacataatgaactggaaacttag

SEQ ID NO: 22913 - DNA, 1213 bp, Mus musculus
ggaactttgagaaattgctgcagagaattccctcatttagtttttatgagaagtatttgtaactgcagcaagattttggttctaccttctaaattctcgaataaagcatagattctcgagtttaccagcacacagatgtaactgtcaataagtaatctgagttggagaccaagagaatgccaggcctcctctgccaccattactgtggtttcagtacttaaatggagagagatgcccttagtttcagagtgtatagtatagcagagagaaggctgacattcaggaaaacttaggaatggctgaatgttgggctacagaatagttttaacaaaccaaaaaaaattaccccatgatgaattctttgcagtctataataatgcatattccactggcaactcacagatttgacatcattttatcagcctttgtatagcctagtggcgggtctgtgctctggtaggtgttactgataattttgtggcaagacactcccttgtatcctcagagctgatggtgaagtgaaggagaaacatgttggaaagcatttcagctgcagaaagtgtaggagagttcatatttacagtgggctggtcccagaccctttgctaatagcttgtggaagtgcactggagattaggagaggctggctccgaatgaatccctgatgcccgcctcaccttccagtgactgttacgtgctggataactggcattaccggttcacaccaccatgtttggcttaatctttttgttggtggtgtccatgctgaagttctaactgaccttttgcccacgtaaagctgcaaactactgtccttgttcttgagcactaaagggaaaggcaaggttgacttcttgctagagtggagttcaggaattctttcctttgggaaacaagatagtgggttgtggtctagatgttaaattatctcagtgtctttgatcctaaggggaagagaggcttgctacagaagcaataaaggcaggacacctccaccaatgtacaagaatttccagcccactcactttataattttcagcagttaagcctccccccacaagagatatccttattgtatgtgtatgtgtgtttgcatgagtgtatgtacaatatttgtgtgtgtatacacccagtgccgcagaagaggccgcaggatgctctggaaatggagttgcagactctgtgagcctcctccatgtgggtgctgataacc

SEQ ID NO: 22914 - DNA, 1137 bp, Mus musculus
taagcactcctgggatggaaggtgcaggtccctctcacatcctcttcaggtgaaagcagggcccagctgtcaactcagatggagctctgtgccgatgtgtcccttaaggctggtccccagccaggaggagacactgtttatatctcagaggggacaaaacaaagcaccaagtcctctggtgaggcttagctcctggtgctgtgtaaagtttttctgcttacgtcagactcagtaacttgggaaagctgagaatgaagggaattcattaatttggccaacatcttcagagaagctttgtaggatcccaggcgtgcccacacacatgcacgcctcagatacggatctcaacgaggttataactgagaaccagttccagtctccaatctaagtgggaccatagcatctgccaagattcccaggctgtgtgtgtgtattcaacgggagtgtttttttccttgtctgtatttgttgcatcttaacaaagttagatgctacaagtaaaatgaagggtatttcaagggctagcaagacggctcgggattaagatgcttgctgcctaccctgatgacttgagttcaagtcctagaaaaggtgaaaaggaccaactcctttaagttgccttctgacctccacacttgccgtggcacgtgtatatacaataataagtgtaaaattaaaacagagttcaaatatgcataccgttaatcacaattttaagtacttttattgttaatggaccaatagaaatgactttgaaaattgaaaaataaaataaaaaaagaaagggctgcatggatagagggacacttcctgagctccatacacagttggagtagccaacaagagccacatggcttaggtatcacccctcatcatcactcctcctgggtgtggtctctatcctccctgccattcctcaccttttcatcagttgtattttcctctgtgacccttatttctacctgaatttatattttcttcttattggaaaacaatgctaaagataaatccatggtagctgggactttatcttatgtttatctgtacacataagggaccaagtgactacgtggatggacaagtaatcctttatctcctagggcatcactgggatccgttttgctggaggagagaagt

SEQ ID NO: 22915 - DNA, 1228 bp, Mus musculus
attggttactctgtataagttgatggtaagggccttacttatgttactgaccaagaagaaatcaagctggtggccgactaaaagcttcacccctgctgactagtaagtattcttggtgatagaaggtactttgcacattactgaaggagaaacatctaactaaacctgtgacctacaatagtcaccttcttgcaagatatactgatatgatagtggcacaaatgttatggcagcaaccacttactttttgattggatttaaagcccactccatgagatggaactcccatgcgacactgctaaaatgtccaatagtctgacactaaataggttatgcaatctaagggaaaaccttatactactattctggtaaaggaacatagcaataaaaatatgtcattaagagttcgttctctttaagtgtgcacctacactcaacacagtattctatggaagataattcattgaggaggaaattgaaatatattgtaaagtggggttgaacagtaagtaggtttgcttaagttcacatacacttacttagcaaatttgttcctgttgcttcaaggaaggttctagaattactataaagactgtacttgccatacttgtggtggtttcacccatgtcctatcattgagagccttgggtttgagggagttggcctgataggaaggaaaggaggaagctgtggtgggtctcacctggttccatatgcagatgggtaggaaacctctgtaaaccaaacctaccacttacctctgcttcaacttcagccccaagaacatggcccagactggcccagaccagttcagcccagaccaggagtagctcagtgggggcagagagtggagaaggaaaggctgtgggggaaagtagatgcccagagctaccccgaaccttggtttttcaatatggattagaagaaatgtcaggtgacatttgatatttctaaacagccttcttacattttggtataaaagctgtgaacttcataactttgtaagtgagatataaagcaagtacaagaagaaaataaaatacttttactaagtgaaaaaaaaaagagtttgttctcagctgggttttgttttaagatccattcattctgtcttttgtgtggagaattgaggccattcatctttgaattattattgaaatgtgtgtgttagttttgatcaccatgttgttgatttttggtgttgtggtcttagtcgtcatttttgttt

SEQ ID NO: 22916 - DNA, 1692 bp, Mus musculus
cttggttttcacactgacaagtttcatgtttcttttttccttactgtagaaaatcagaaaatgcagttgacagaagggtcacgtccacaccacagtatcaattgcaactccaccaggactccagtcgccaaggagcttaattataatctagacactcatgcgtctacagggaggatcaaggcagttgagaaggaagcctgtaatgcagaaagcaacaaaaaaaaggaaatggaacttcttggctctgttgctaaaagcgaatcagttcctgaagttgaagccctgctggcaagattacgagctttataaatgaaactggttaaaaaaaaaaaatgattaagccaaacaccaagccatgctttcagctgtaacacttgaaaagttacttttatgtaagtgactttatatagttctaaattatgatatatattagaaaaagtaaagctaaatacatgattgcaatacttttcctgtatgcttgaagtttttgcattactcaagattgtaatgggctttaatgcttttatttttgtcttctggtattcctttattctgtatttgccaattaaattatacctgttgctttagagagcaaggaaacagccatgtgttcaactgtgtccttaagaaaatgaaatctttctaagtaatttttaccacttcaacattaatgaaagagcatcaggttgaagacttggtgtctgtccctacctacttcaaatttgctatctgaatagccccaaatgtttccaatacagagtcagaaatgtgtgtgtgtgcaagccacaatgaccagtattggctcacattaactaacactggaagacacacttccaaaaacgatgcagtaggaatgtttgcactttctttgcaaaacatacaggcattttgcaaagtaggaatatgtgtgtgtgtgtgtgtgtgtgtgtgtgtgtgtgtgtgtgtgtgtgtgtgtgtgtgtgtgtgcatatatatcatcacaacatcacagtactacctaggtcttagccaaggggacactttcaccctcagtactatggctttgacctaaaattaccatttggaaatttcccaaggaataaattttttatttttgacaaacttaggatttcatttttttttaagctgacaatcagtaactgtgacaacaatctgatgttttggggacagtttccatatgcaaatgtttcagttgtacctcacttggcaccattcctttgttatttccttatcaagaataaataaataaacttgctgcttgcactaaaagacgtatgtctcttctcttgctcatattctttggatgtgatggaggcagatgtagtctaagtatcctttttgccttattacttgtaatgagtgaatgctctttaactttcagttaaaggcagctatgtgcaactagtctgacaaggtcttctgcgttttatgcccttccttaagtcgccacctcctttcagctccaagttaataaaattaattagactatgaaccaagctctcttcatagtcatcaaagaagcatttatccacagtattgtgggaataactttggccctgtagtactacagtgagcattctagtctctacttgcaattcctgttttccataagacaaatcttaacaatgggggcaggggatgaagttatcacatttaagtaaataagccatggtgacaaagcataattgtttg

SEQ ID NO: 22917 - DNA, 1148 bp, Mus musculus
taccccccactgagaactatgtgaaggaacaaagcattcagtgtagaggagaatgcttctgtttctttgaagttctttaatctctttacagaaaagatatcatatgaaagggctttgtaactgaatactctattatcatcattgatttctaacctctcttctctattccattcactgggagctcttagcccaagtcttaaacacttttatttttaatgttggtatgcgctgcattgtccctaaggttaatttttttttattattccattgaattttgacaccatttgcttatttcttttaaccattgagtgagaagttaaaacttttaattggaaattaaagtatcataacaagaagaatctttaacataccagccctcttgtgggtgaagtgtgtctaggtcaggcatctgagccttggcgtggcgaggctggaggagggagactttggcaatggatccacatagaaagaaaggtgtgtgagtagaatgtgaaaatggctgggagacctcggctgcttttcaagacctagtggcttagtcatcttaagaaaataaaaccctggagtgggttaggaactagttggagcatgaagccaagaggggagaagggcaggactgtaagagccaatgcatggacctggccattgcctggggctgctgctagcctttccagaattgttagagtcaaaggaactgactccatccctcaagagcacagtcacgcaagtgaaaattatttggctcagtgatttcctgacttattataggtacatgtaggagaaagcatcagttaacatatgacagaactgcaaatgggagctcttggcaggacttagtacccagcttgctgcttagtgcaatgtaataaactttactttttatttaaaaaattataaatgtatatatgtgtgtgtgtgtgtgtgtgtgtgtgtgtgtgtgtgtattctaaaagtggaaatggctagttttgtaccaaatgttttctataaattttgttaaataagatgtgcaaatctatatatcaaatttacatacactcaagaataattctcatgtaatgtgaaattctaatttatctgatagaatagaaattacagtttgttaaatatagactctgtgttttcaagagttctgaccaagctaattg

SEQ ID NO: 22918 - DNA, 1161 bp, Mus musculus
gcttaaggaatgctatcctttaaattcttaaaatcatctctgagtttaccatcttacttgtaaaagataactttcatgaatcatatgaaagcttgtcagagggcaatatacatattttatctatcagcagaattatatatcaggggtgtgtgtgagtgtgtgtaattagaaatatattcattcatagagtcctgcatgaaaatggtaagttttcttttctatggtaagttttggcaggcccagcttctgtataataggcactgtaccatacacctggtcgcttttagaaactagttttatgctttaaaaaataactcatttctaggagaaaaaaatatgatttatgatgactgcagacactgaagtacattccatctaaactcaccgtgccattggtctatataagcaatgctccacactgcgtctgagaagccctgtcctctttagtgggcaggacacagacacactgttgagatggctctaattaaaaaatggctgatttaggacagagctggaattttttttgttgtttggaaattcctggtctagttctgatgttctgtccttctgctctctgccaccaccatcgcccgcatttgcatgtgtgctttgacattgctctggtaaccccgagggttgatggaattccctgcatctcttttcacagagggagatgagacaggagtgatggatagtctgctggaggccttgcagtcaggggctgccttccgcgacagaagaaaaaggacaccaaagctgaaaggtgaattcttttcttatctcatgttactttctagggaagagcggtttctccccttaattcttttaaagtcatttgtcacaagaacagtgctgtgggcagaaattgtttctaactttcctaaatttgcttaatcccttgcagagacaggtgtcagagagagatgcattccagttggctggtgtcagtagtgcattaacaaatcgatgtgcattgaagctagacaatcctgaccggtgtgatgagtctcatcaagagacccatatgcaccttgccccagtggaggttagcgtcccacagttaaatgtggggtaaaagtccaagcatcactgttccgagtgtttcagggcggtcaagcattgcaccatcactgaaaagacctaagcttgggaaaatcacag

SEQ ID NO: 22919 - DNA, 1132 bp, Mus musculus
cacacactctctaccacacacacacacactctctctcacacacacacacacaaactatctctctcacacactctcacacacacacactctctctctttctcacacacacactctctctctcacacacacacactctctcacacacacacactctctctcacacacacactctcacacacacacacacactctctctctcacacacacacactctctctctcacacacacactctctctctcacacacacacacacacactctctctctctctctcacacacacactcactctctctcacacacacacacacactctctctctctcacacacacacacactctctctcacacacacacatacacacacacacacacactctctaccacacacacacactctctctcacacacacactctctctcacacacacactctttctctcacacactcacatacacactctctaccacacacacacactctttctctctctctctctctctctctctctctctcacacacacacacacacacacacacacacacactatctctctcacacactctcacacacactctctctctctctctcacacacacacacacacacacactctctctctctctcacacacacactctctcacacacacacactctctctcacacacacactcactctctctctctctcacacacacactctctctctcacacacacatacacacacacacacacacacacacacacacacacacacacaaaactactccatttgaattatcagacactgaacaattaaagaattcatagtcctcaagtatgttggaaacactaaataacagatttttttgcatgtataatttgtctgaaaccttttacctaaaagatacaacaaaaggtcaaaagagacgggtgcagaagaatcttttctaagtgaggcattcaacaaactatgtaggactcagaagacattgcttctgagtttgtaaagacttgaaatgtgctaataattctgaggaaggagaaggaagagcaaaggagttttcactgaaaaggaagccacatcaggataaggaaagcattaaagataaaatcctgccattcagaccaggtgagtaaaaccagggc

SEQ ID NO: 22920 - DNA, 1213 bp, Mus musculus
gcaaacaaaccttttttagacctttctgaatatgttttaaacatgacctagtgcatttcggtattgagtaaagattatttagcgattctgtgactgctttgtcgtctgtttcctatgcatcccgttacatttcttaaaactttgttttttgttttaatgcttatttgattgcttaattaaacttcactgtttcattaaagctttcttttcattgcacatctgaatttttaattttgtttttgaaggatggctggattccttacagaaacaagcagagctcctctcttcctgccatcagtttcaagggacatattgcttcttccgtactgtcataccaataaatcatcccagattacttgccgaggtacagtgctgaagtataccatgcattttaaaggaaatctgctattttcttttcaatcagatgagcaatgtgaagagactccggccacggctcagtgctattctctttaagcttcaatttgaagagcaggtgaacaacatcaaacctgacatcatggctgtcagtactgcctgcgaggagatcaagaagagcaaaggctttagcaagttgctggaacttgtgttgctaatgggaaactacatgaatgctggctcccggaatgctcaaaccttcggatttgaccttagctctctctgtaaagtgagtttgtttttttaacacacatatttgcctgaacacttacttttaaatgtcagcctgattacattatttaaatatttttattttgatgggctcattatcaagaacttgaaatgaaccatgaactcaaacctagagcgaactgagctaatttactcaacctctgaactaaatccaaatattaattttctctgatctgcaaatccaactgaaggattttatttaataactaaattatatcctaaacctatgctttctcaaaccaatgaaatagaacatcaaaatattacttaagctttatatttatttagttcaggtaccatcatctagtttattgcttaggatggttaaattttttgcctgtaactatttaaagatttctctatgttgttttgcatatgcaggctaaaaaataaaaaatgaaatatgaaatatgaaagcaaaagtattaggaaaacacatatttcagacctcattgatgagttgaaactattatgaaaactgagtgaatttaaatagttctttattgttttctcctggtttctttca

SEQ ID NO: 22921 - DNA, 1187 bp, Mus musculus
gaagatttggacagtgcttgggcctgggttgatagttggctgttgaaatgtgttaggacttttttttttaaggattcaaagaccaatacttttcttttttgtcctcaaatattgcatccaaatttgaatctttaaagaaggcctcccttttttgagatgggatctggctttgttcttgagttgtcttagaacttctgggctcaagagatctttgtggttcagcctgttgagtaactgacactacaggcatgtccctctgggccaggctcccacctctctgttcctgcatcttgcaacttactgcatgtattagaaacactacatagaaaatccgcacaaagcatggaatcccttcattagaacaataatgcaatactatgtatgtgtttttgaaacactcacttttttacttgttgacacttttatttcttctcccaaacaattctgggaaagaaacaaggcatgttatctacactttatatataggcaaaagttatgctttgaagagaagttcatctgaaagaagcggggctggacggaatacagatctgagtgtgagaccacggcactctctgctctgccatgcggctcctctgattaaaagaaatcctattatgttttatttaaagtgttcttctttgatttaaaataattttcctctcatctcctgccaccttaccactgccccacagcggttcaccctcatcccacgatttatattaaaggctttaaaacttgccattttttattaagaccatctttcatcatttggcacctctattcacatctgtaagtatttgagctgtaaataccaaccaccatgctgtggtgtggacaggagacacaggggctctggagtccaccctccaagtgcataaccctggcttttacagctatggtgttttcctctatcaaatgggggacataatacctgtcttatgcggttattgtgaggatgatagcatgcatattgtaaagcaactttctcagtggccagctcattgtgttgctcagaaaagagcttacttttgacactgtaggcttcatttccactggtaaagttttgtttatcatctctgacttttcgaaaatgtaactttctttttgtcattaaagaagtaaaattgtctttcctttgaagattcatattttcttttcatccagtagaatacaatttttgtttagca

SEQ ID NO: 22922 - DNA, 1099 bp, Mus musculus
gagagagagagagagagaatttatatcagacttaagcagaaaaaaaaaaactgagtatataccacacatatcctcttggggctggattattttttagttgagcggaataagagaactaaccttgaactcattggtacagaagagaacttcctgaacagaacaccaatgactcaggctcagagatcaacaattgataaatgagacctcatgaagctgaaaatcttctgtaaggcaaaggaccctgccaatagggtaaaatggaagcctacagcttggaaaaagatctttaccaaccctacatctgacagagggctaatattcaaaatttataaagaactcaagaagttaaacacccagtaacccaattaaaaatggggtgcagagctaaacagataattcatagcagagggatctcaaatatccgagaaacatttaaatgttcaaagttcttattcagggaaatgcaaatcaaaacaactcttaagattccatctacaccagttagaatggctaagatcaaaaaactcaagtgatagcatatgctggtgaggctgtggagcaagtagaacacgcttcccttgctggtgggagtgcaaacttgtacaaccactctggaaatcaatttggtggtttctcagaaaactgtgactgactagttctacctcaaagttttcctactttagaagtctgtaagactaacatgttattgccttccatcttatactgttcactaacagtgggctcaccttggtcatcttgttgctgagacattcctataatgaaaggattctatgattgagatttaagatttgcttattctcctggtaccttaggaagtttgtttcatggacagttgatttatatgtagtattagagcttgagaaatttaatgactgtgtagtctagaaaagacatttctaggatttctagaaatagttgatttaaagaactgtgggtcctcagggagctgaaggggactaaagccccatagaaggaacatcaatatgaactaaccagtatccccagagctccttggaactataccaccaatcaaagaaaacacatggtggaacttgtggctatatgtatagcagaggat

SEQ ID NO: 22923 - DNA, 1099 bp, Mus musculus
tgagcttgctgtggctgaactgctgtcttctctctttcacttgatgctcttctagattttgtggagcttaatacatgtgacataatcactctacttctgacccattcttatacaattgttaaaatggtttattattcagttattcttacaaatctgacatttttaacttgggtccttgtgttattcccactgggtcacaaagttggtgtggcacatccaatttccaaataaagagcttataaattattaaagcaaaaacatgtatgtctaaaaggagacattgacaattttgcttcaagaggtaattaaaaaaaaccagttatttaatgtatatgagtacactatagctgttttcaggtacactggaagagggcatcaaatcccattatacatggctgtgaaccactgtgtggttgttgggagttgaactcacgacctctggaagagcagtcagaggcaatgttttaatgagcttaaacaacactcagtagactaccaatagactgttcgtggcatactcgactacatgtgctgttttaaactgcccaccttttctggctttattgtcacagctttatgaaaatactacacccattaattctcatccgattgatagtaaataaagtcctactgataaggggctagagaggagcatcagtgcctaagagtattgctgctcttccagaggtcctgtgagtttgttttcgagcactcacatactgtctaagaaccatttgaaattccagttacagaggacttggtgttctctttatggctccatgggctctaggcatacacattactatgcactgacatacatgaaggcaagataatccatccacataaaattagtatttcaaaatacagaattcataaaactccccccacgttaatgttgtatttaatgatgaaagcctgtatcttgccctcgtaagatggagagtacaggggggcctgcttgcgtttctcatcaccgcactgtaggttgtacccaggacacagaggcaagggcagcaaaggaaaagcacgctgattatgaatggaaaaatgaaagtctctgtttgctgaaggcaagagtgtttaaaaagagaatttcaaa

SEQ ID NO: 22924 - DNA, 1180 bp, Mus musculus
agcttaagacatttctctagtattctcttaaactttgtgtgtgtgtgtgttggccagtctcactgctaagaagcacagtagtgtgtcttgagactacactttgctagtgaattaagattgtcattaatttccagtgtcacttataaatgaagatcatatttatactatagaactttacctatctaagttaggattcacaataatcaattccatattgtgcattttcctatgggcagaacatcttcaaacccaatacaaatgtaagcattgaaaggaacattgtgtcttcccatagtgatctgttctctagggaatggtgaaaaggagtggaaatactgaccaaatgtcaaggaaagtagagttggcagacagaatctgtggtacttacttcactgaaaaacaaatgagcttgatagatgttgtgaaaaatggggattggatgaaaactatgacatggaggtgttttcgtttgctttgtttttctataataaaacaatgatcaaaagcaacttggggaagctttggttttcttcagcttacaaattacagcccatcttcagagggaggctaaggcgggaacctggaggcaggaactgaagcagagaccatgagggacgcttcttactgacttgctcttcctggctttgtctgcctgctttcttaggcagtccaggaccacgtgtggtattagagtccacagaggattgggtcttcctttatctgtcaccaataaagagaagcccacaggccaatctgataaagacactttctcaagcaagtttccaccttcgccaggtgtatcaagctgagaactgaggttaaccgtgacaggaggctaactaaggagtgaaaggcaggagagagtgcttttggctggatttataataggattagaaagaagtagcttataccctgattttcacgggatactttaacctaaggccagacgatgagaacataagttatttacacctcatcgctgtttatctgctaggcagtcagtaactcagtgctatttcttttggaagaaaaactcaagtgatgtttaatttttaaacatatctcttgttttggcaggctcatcttcagttgtagaaatcactatgagtagcatgcctttcctagcctggtataaataggctctgtattcagctgccgtggcgctgatattagtgggttt

SEQ ID NO: 22925 - DNA, 1161 bp, Mus musculus
tcatttaaggttgaaatttttcttctaatgctttgtgtagagctggatttgtagacagatttatttttatcgtgtattgattcccctttctcaatttttgtcattgaaaggttttttgaatatagctgtctggcctggcagctgtggtcttgtagcatatttagaacatctgcccaggatcttctgggttttagagatcccatcaaaaaatcaggtgttcctctttatacctttatatgtcactttgtcttttcccctttcacttcttaatattctttcatggttttcacatttaatgttttaattattatatgttatggtaaatttcttttctggtctagtctgtttgctattttgtattcttaagctctttgttaagcttgaaatttttcttctatcatattgttgaaaatattttctgtgtgtatgagctaagtgtcttcttgtatttctgttgttcttagatttggtcttaccatagtgtttcagatatcctggatgttttaagctggagtcttttaaatttatcattttctttaaatggggtatccatttcttcattatacttttgctgtttaagattctttcatcctgtgtattctgtgggtgaggtttgcctctgtggctcttgtttgtgttcctaaattttccatttccagttttctcccagattgggttttcttttgttggttcttttttcactttgaagtcttgaattgttttactcatttccttccacttttgtttgtttcttagacttctttaagggtctctgtcatattcataaagggtattttgaggtcatttcctcatgcctcagctatattgcaggtttcagggcccagtgttatggctttgctggcctccagtggagacatactagcctggccttcattaattatgtttatatgccagtgtctagccatctgggtatggggaggttgtaattctaggtactgatagctggtcttgtctcttttggtgggtgtcttgttctttggtttctgttgctctctctgtttcttagagtgtgttgcctggtaggaacaacttctgggatcctgataggtgtggactctgtgggtttggggtaaaattgttcctggttagtgagagctgacagtcaagaatgtggatggggactgagattccaaagcaggg

SEQ ID NO: 22926 - DNA, 1326 bp, Mus musculus
tcatttagaggggtgtggtcctgaagggctacagtactgtcacttttctgccttaagtgttttcataacccttactttgaattttatttgtttaagtgtggctgtatgatggctttatcagatgtcagagctggtttgctgattgtatttggagccacaatcctctgttgagtactcatttatgatttactttcacatattttaaagctggaatgagacacctaaactatttgtcagaagcaggataataaaatcagtgcatcttctgaaggttttgccattctttccctcctgtgtgcagagtttgcatagattaatatatactaattttcatgcagtttggactgtgggcctcactgttgaggaaaaggcagccattcttctgtctgcaagaatagttacttgagagaaacatctccttgaaatatagatgccaccagcttaacatttctcttctctccccatttaagcaatatctatgtgtgcataggtacatacataagaattcactgcagcaatacaatctatgcagatgtcagtacatgtgatgtagagtcaaggtagaattctcttagctctgagagtagttgtgttgcagtctaagagcacatttatttctgtaccttgggatcatctcaaggttaaattaatcaaaactctacaaaattataagcaaaacatctactgtaccaacaggaaggcagccttagttgaccgactcactgtacagatttaaagggctgcagaggtgcagagaactgctaagaggtcttagcatggttgttcacttacactgtggaatcttgaactttcagcttttgccttcttgcactacatatgtgtgtatttttatgtgaaatactatgtttatttgattaagatttatgtttgttattggcgcaagatgttggaagatcacctcttaagattttcaaaaataccagtgatgatttagcaaaggtatgtttttccagtaaagcgcagaacaatcaaaaatagcttgcatttaaaccaaaaaagcctttataaaaaccagttgcttgtactgcttctcagttatgtaaggatgaatcagcaagcaaacagcatgaaatattaagagacagaaagactgagttaatagtttggttgtatggaaaattaaaataaaaactaatgctttaaatctaagtgttaatgtttttctcatgaggtttaggggttaagttggtggccaaatatttatttatttccctttccaatctggatgtgcccaccattttatttctagaacatattcagggatgatattttagacactcaaaatacatgttctgattttgaatg

SEQ ID NO: 22927 - DNA, 1749 bp, Mus musculus
atttatcacgaaacgcgtgttcccaaggcggccgtgagcgcagcatctgattgcctcttgaaaattttttgccccttttacgaggggatttcctactttaatttttattttttaagcctcaagccaggacagctggagagtacaaactccaggagcgggccatattgtttttgagagccttttgtcttggggcttttgcagtcccgtgcaagtcgtccggcacacgggtcccggctcggagcctccctgctccagccttctccggtgtcgctggtgccacctgtgcgctgcggcgcgtgccatagctcctcggagccccttttgtcctgcagtaggccttgttagaagtcctcctggcggggctcggggtcgtggggggtggggagatgaatgctgcagccagcagctaccccatggcctccttatacgtgggcgatttgcactcggacgtcaccgaagccatgctgtatgaaaagtttagccctgcggggcctgtgctgtccatccgggtctgtcgcgatatgatcacccggcgctctctgggttatgcctacgtcaacttccagcagccagctgacgctgagagggccttggacaccatgaacttcgacgtgatgaagggaaagccgatccgcatcatgtggtcgcagagggatccctcgttgagaaaatctggggttgggaatgtcttcatcaagaacctggacaaatccatagacaacaaggcactgtatgacactttctctgcctttggaaacatcttgtcctgtaaggtggtctgtgatgagaacggctctaagggctatgcttttgttcacttcgagacccaagaggccgccgacaaggccatcgagaagatgaatggcatgcttctcaatgaccgtaaagtgttcgtgggtagattcaagtctcgcaaagagcgggaagcggagcttggagccaaggccaaggaattcaccaatgtttatatcaaaaactttggagaagaggtggatgatgggaatctgaaagagctcttcagccagtttggtaagaccctaagtgtcaaggtgatgagagactccagtgggaagtccaaaggctttggctttgtaagttacgagaaacacgaggatgccaataaggctgtggaagaaatgaatggaaaggaaatgagcgggaaagccatatttgtaggccgtgcacagaaaaaggtagaaaggcaggctgagctaaagcggaagtttgagcagctcaagcaggagaggattagccggtaccagggggtgaatctctacattaagaacttggatgacaccattgatgatgagaaattaaggaaagagttttctccctttggatcaatcaccagtgcgaaggtgatgctagaagatgggagaagcaaagggtttggctttgtctgtttctcctctcctgaagaggcgaccaaagctgtcaccgagatgaatggacgcattgtgggctccaagcctctgtacgtcgccctggcccagaggaaggaagagcggaaggctcacctgactaaccagtacatgcagcgtgtggcggggatgagagcactccctgccagtgccatcttaaatcagttccagcctgcagctggtggctattttgtgcctgcagttccgcaggctcagggaagacccccatattacacgcctaaccagttagcacagatgaggcctaatccacgctggcagcaaggcgggagacctcaaggcttccaaggaatgccaagtgccctgcggc

SEQ ID NO: 22928 - DNA, 1241 bp, Mus musculus
agaacttgaccaacagagactagggacttaactatgatggaaatgttagtatgtgtgtttggagcctcaacatattttaggagatttttgatatagatttattattaggcataaatttataatcacataaaaaagcctaaaacttctgtactgcatattaaaatagtcaactagtaaagataaaattttaagatttaatgctataaatagacaaaaatacttgagtatgaaattatttaacaatagtaggtgttagtatttgaaacataatgatttttttcctcaaataaatgtaggacacattaaaatatatctgggtctcattgaacgcggaggcagctgccgggcattcctggtctcgtcgtcagcgcagccgggcctacccacaagcaaccatgtctaagggacctgcagttggcattgatcttgggaccacctactcctgtgtgggtgtcttccatcatggaaaggtggaaattattgccaatgaccagggtaaccgcaccgcgccgagctacgttgctttcaccggcacagagagattaattcaggatgcggccaagaatcaggttgcaaagaaccccaccaacacagtttttgatgccaaacgtctggtcgggcgtaggtttgatgatgctgttgttcagtctgatatgaagcactggcccttcatggtggtgaatgatgcaggcaggcccaaggtccaagtggaatacaaaggggagacaacaagtttctacccagagaaagtgtcctccacggttctgacaaagatgaaggaaattgcagaagcgtacctcggaaagactgttatcaatgctgtggtcacagtgccggcttacttcaatgactctcagcgacaggcaacaaaagatgctggaactattgctggcctcaatgtacttcgaatcatcaatgaaccaactgctgctgctattgcttatggcttagataagaaggttggagctgaaaggaatgtgctcatttttgacttgggaggtggcacttttgatgtgtcaatcctgactattgaggatggaagttttgaagtcaaatcaacagctggagacacccacttaggtggagaaagttttgacaaccgaatggtcaatcatttcattgctgagtttaagcgaaagcacaaggaagatgtcagtgagaacaagagagctgtccgccgtctccgcaccgcctgcgagccaagcgcaccctttcctccagcacccaggccagtattgaga

SEQ ID NO: 22929 - DNA, 1239 bp, Mus musculus
gaacaagaaatttaaatgagaatatctaaagttctttatctctttaattactaaatattttatattggccatgaaatggataaggttcttataactagaatgtgaaacaatgttgggctgaaacaaatttgattagttttaaataaatttatagacacattattaaaacaaagaggcgaacattgtaacttttcttctgctgaaccctacacaacatcgttgggcactatgtaaactaggcagtagaaggagtttcctagttagttttgccttgactccctattttgaatgcaaacaaaatggtgttttaggacataaggtgtagttttttcttaacttttaattgattctttgtgaatttcacatcatacacccaatcccactgattttgttgctttgcacacaccctacaccttataaataccttctcctttaagaatctgattgtagccgggtgtgatggcgcatgcctttaatcccagcactcgggaagcagaggcaggcagatctctgagttcgaggccagcctggtctaccaagtgagtcccaggacagccagggctacacagagaaaccctgtctcataaaatcaaaccaaaccaaaacaaacaaacaaaaaaagaatctcattgtagaaagctgtagtatttcgcagagtcttctacagtgtatcctttttccatatttctttacttgttcattgcaatgagtcattggtctggttctaggcctctggcatttgctacattgtcaattcaggatccttactcagattcctttaatatagcttgataattgccccgtatcaatcagatactgctgctttatatatgtaggaccagttccttcatgcactccaggagttcatctatggggtagatgttgggttgtgccaactcacacccccaaggcgagctcttgagcacttgatgctgttgatagctcattgatgctgttgcccgcatggggcacagtcagctcttacactatcatagcatcagggatggttcacccacttgttccactctcatgagatctgtaaccagcaagagacatggccgttctcttgcttccatgaccaggggccagctgtcccatctattgcatgttgcaagggccaagggtttagagggaaagactgagggcattgatctcttgtccacaccctctcatagcagaaatgtggcagggtcagctcttccatgctcttcagaacctgctcattagcaagttctgaaa

SEQ ID NO: 22930 - DNA, 1209 bp, Mus musculus
gggatctgcaaccctataggtggaacaacattatgaactaaccagtaccccggagctcttgactctagctgcatatgcatcaaaagatggcctagtcggccatcactggaaagagaggcccattggacacgcaaactttatatgccccagtacaggggaacgccagggccataaaaggggagtgggcgggtaggggagagggggtgggtggctatgggggacttttggtatagcattgcaaatgtaaatgagcgaaatacctaataaaaaatggaaaaaaaaaaaaaaggaaaaaaaaaaaaaaaaagaagtttcaaggatatgttacacagtcatatgcatgcatacagatctgcttataaaagtacacacacattcatacctactcacacacaatttctttaacacctaatagttttaattgttttcactaccaacatacttgggtattaagttaggtttggctatttaattgatattttcaccaaataatattcttaaatatcattcacacattaagactgaagagggtatactccggtttctcttcagagcgtataaatctttcaccttttactaaagatttccatggagaggaacaaccctgagtcttaaaccaattttttgaggcgttgtcttgacaaggctccacatattgtcattaaaagtagaaacactaaataaagctaatataagtctgttaaaaaaaagattgaagagggttgaatatagtaaatactttactactttgatttattttttaaaaaaccaagataaacaatttaaaaatgaaacttcatgaaaatgaagacttatgtaaggcaaaatgtactgtcaatcagcaaagtggcaacctaaagaatggaaaaaaattgccaatgccacctctgatagaggcctaatatcaaaaatatgtgaagaactcaataaaatagatgtcaacagacaaaacaatgcaattgaaaaatggtgtatgggtctaaacagagaactcatgatagaagaatgttaaatggatgagaaacacttaaacacatccttagccatcagggaaatacaattcaaaactagtttgagaccttacacctgttataattactaacatgaacaacacaagtaacagctaatgttgggatgtggaacaagaggaaaactcatcctttgcttgtaggagtgcaagtttgtgcagctgttatggaaatcaatatg

SEQ ID NO: 22931 - DNA, 1178 bp, Mus musculus
gaaggacaacatttaattggggctggcttacaggttcagtccattatcatcatggcaggatgctagcagcttccaggagcagacacagtgctgaaggaggagccaagagttctacatcttcgtccaaaggcagtcacataccacatacattgcgtatgagatatttaaattacaattcatagcagtagcaaaattacagttatggagtagaaatgaaagtgattttatggctgggagacacaaaaccatgaggaatcattaaaccattaaagggtagaagcattggctaaggaccactgtgctaaaagaaaatacaaaaaaaaaaaatcctcatagatccgggccttgctcagtcatcatcagagaaatctctgtctgtactaaactagatattatgcagagaataaaggatcttgggaagttcatctgtaaacaggatgttttcatcaaatctccctcctccctcaggacacagagagttctgcagaagggaaggtataaagtatggaagaggaaccagaggggattaagaacaacaagacatcaaggcctctggacacaaaatgggtagtgtacttatgaactcattaagactgtgagaagaggcacagggcttgcacctgtctgcagcagctgggttctgagaaaagtggaaacgtgcccctatccctaaaccagagagaagtggaaacttgcccctatccctaacctagaagctatatcaaatgatatcaacttgcaaatgaaaatttatttttctccaagggagactgactacagaaataatccacttttcaggtaggcagcatgttccgtagtagatgtatattacaaataaactccatggtgtccacataggttgtcttataattagagtcaatgaagttatcttggtcatacttatgggttctttgtatacatattaagagttccagtttggggttcttatggcattcctgtgtgtacaaacatgtaaatgtctgaggctgtatgtgcttgtttgtttgtttgtttgtttgtgttgttgcttttaaattggcttttacttaattatttgaacacattcttatttgttttgtattttaatttaatttattttaattattcctcagatgtctttttgatttctgcaagaaagagaagggtgtggagctggatggaaacaggtgtagaaaaac

SEQ ID NO: 22932 - DNA, 1190 bp, Mus musculus
tttgtgtgaccacgtacaattgaccaggacaggggtgttggaagatggttcaactgcatactcaagagctcaagggtgttgtgaagggaaacataaaatcaaacagtgaagtctgatactgtcagggtaataaagtcttactagggttgatggtgagacagctggcttaatggtaccatttttgagagagaggagggaaccaactcctgctgtccttatctgtggtatctggggttgaatctctcctccacccttccccttcctccctataaccctggaccattgtggtcccacatgagcccactttccagaggccacccaggcagacctatctctcacagtctaatcacttctgtgtgtcctcacttccatacctgtaccttagtgttttgttgctgttaagtttgctgagcttaaagaaaagattgatcggcgttctggtaagaagctggaagatggccccaaattcctgaagtctggtgatgctgccattgttgatatggttcctggcaagcccatgtgtgttgagagcttctctgactattctccacttggttgttttgctgtttgttacatgaggcagacagttgctgtgggtgtcatcagagctgtggacaagaaggctcctggagctggcaaagtcaccaagtcggcccagaaagctcagaaggctaaatgaatattacccctaacacctgccaccccagtcttaatcagtggtggaagaaaggtctcagaactgtttgtctcaattggccatttacgtttaatagtaaaagactggttaatgataacaatgcattgtaaaaccttcagaaggaaagaatgttttgtggaccattgtgtgtgtgtgtgtgtgtgtgtggcaggtttaagttattagttttcaaaatcagtactttttaatggaaaaaacttgaccaaaatctgtcacagaactttgagaccattaaaacaagtttaatgagggagagagagagagagagagagagagagagagagagagagagagagagagagagagagagagagaccatgacagtggcagctcttaaaaagaagactatttcattggggatagcgtatatcagaggtttagttcattattatcatgtcaccaaccatggtagcacatgggcagacatggttttagataggaagctgagagctctgcaataagattggcaggc

SEQ ID NO: 22933 - DNA, 1099 bp, Mus musculus
atattcccaatgggcttaggttttaaaaagtctcattcaactctccctcctccagcaactgagcacacgtggacagattcatgacaggcctacaacctgtgcatccatgagagtgggtgactgtcactttaagtcagagtttggaggtggcttctcatagaacaaacctgtagttaaagctgattgatgtagcctttgtgtgtgctaccaatgaaaccaaaatcaaatttgaaagtgcttttcagctatgaaagaaaaagcatagaaagcctgtgtattgctttgaacatactctcatgtgaacatactctcctgtgaatattcacacacaggtgtggatttgaggttgcttgttgaaacgcaacaacatacaagagagaaagaaaccctggagttggatggatggaaaggcagggtggatctaggagaagatgaggaataggaaatcatgaccagtatatattgtattcttaaaaaaggggatctagggctggtgagctggctcagtgggtaagagcacccgacggcttttccaaaggtccggagttcaaatccagcaaccacatggtggctcacaaccatccgtaacgagatctgactccctcttctggagtgtctgaagacagctacagtgtacttacatataaccaataaataaatctttaaaaaaaaaaaaaggagatctacttttaatagaataaataaataaataaataaataaataaataaataaataaataaataaaatgtaaataaagattttgggggtgactgtctctttcccccgtactacttaatataatacccactgcctagtctcctatttcaagctaacacagttttttttcaattttgtattagatattttcttcatttacatttcaaatgttatcccaaaagtcccctataccctccccctgccctgctcccctacccaaccactcccacttcgtggccctggaattcccctgtactggggcatataaagtttgcaataccaaggggcctctcttcccaatgatggccggcgaggccctcttctgctacatatgcagctagagacacaagctctgggggtactggttagttcatattgttg

SEQ ID NO: 22934 - DNA, 1173 bp, Mus musculus
tcttcttttcttttctttttttttcttttaagacaagcttttcctgtgtagcactggctttcctggaactcactctgtagaccaggtcagcctcaaactcaagagaactgcttgcctctgcctcctaagtgcaggggttaaaggtctgagccaccatacctagtttcagtgttgagttttatcacaggctttgatcagatctactgagaagatcatgtttttcactgatcctatttttgtgctatagtgcatcgattattttggatgttgaaccatacttgcagctcttgagtaaaacaaaacttgaccatgatatatgctcttttaaaaactatatttaaaaattatttttggttacggctctagcctctctctttctgagctgctagcgctcctgcgaacatggtgaacgtgcctaaaattcgccggacattctgcaagaaatgtgggaagcaccaaccccacaaggtgacacagtacaagaagggcaaggactctttgtatgcccagggaaagcagcgctatgacaggaaacagagtagctatggtgggcagactaagcctattttccgcaaaaaggctaaaactacaaagaagattgtgctgagactggagtgcgttgagcccaactgcagatctaagaggatgctggctattaagagatgcaagcattttgaattgggaggcgacaagaagagaaagggccaagtgatccagttctaagcagattttgttatgaagacaataaaatcttgacctttcaacccctttgattgcagttgttcgtttgggagggaatacattaaaagctttcagaaattacctgaaaaaaattatttttatttacatgtatgcctcatatgctcaggtgccaatggagtccagaaataggtgtcaggatccctggagctatagttttaggcattaagcagttgtaagccaagtaatgttggttctaggatcagatctgtgatcctctggaagagtagaaagagttttcaaccacagggtcccatgtgtggcattttgaatgtgttaatgaattcagttggaaaatatttcacagaagatgtttgtttatgctcaccaaatagtttaattttttattatattcttataagactttatattaggggataatatttggttcccgagtgagttttgaaacatttt

SEQ ID NO: 22935 - DNA, 1242 bp, Mus musculus
atctgataatacaacaaaaaataaaaatcattgtatttttccagtaaaaccaattgagttgtgatgtggaataactagctgtttgttaaatatggtataggtagatttacctccatggttgtcttaactatggtttcttaaaataatggatcttgctctcttgttttgtctaggctgctgaaaacacaagctgacttccagagaattcctgatgagatatgtcaagcttagcaagaaaatttgaagattccatcatagtcaagatataaaatgacaatgctgcatgctgagtagaaaatgttttcttttacaaagaattataaaaccatggctgagcatgtcagtgggaagtggcttgagcgagaatcagcacgtgtgtttacatcacgtcttgttgtaatggccccaactccagagtgttgccacacttatttatgtatatttatagctctgctagctgtgagtttctaaacagcatctacccgacatgcacagctgctgagcctgtttgaagttagtgggttgtatcagaggtgatgtgtagtagttatgacttgttgacattaccaatataaaccttaattttgaattgtttaagcataaaaactggctgtgtgttccattgagctgtaagttaatggaatttgagctgctgtttgtgaagttttctgtttcacatcttgtttttaaaaataggatccaaaacatctcaaatcatctccttaacagaatattttgttttttacccagtttttggcagttaaaggtgtaaagaagatcatttttatattgccgaaaacttagaacttttagaaacttggatttttaaaaaggaatgccagggcttgacttagcattatttgtagtttgaaccattaaaatctaataagaacagctgaaatgcatttctctgtaaatcttataaccacataaaggtccacaaaataatgtatgaagtgaaaacagcaaacatacaaaattcctttttaatgttattgcataaaaacaataagcttactagcgaatcttgagtggctattaagtcagtacataggtggtgtatttcaacagattaattcatgttttctaaagaagtaggatttccagttgttcaacaaaaactaatgaaatatgtaccagtattatttgcagaaaatgtttgtaatttttaccattaaagcttttaactcattaaaatgatggtcaaagataaatttgaaaagctggatggagttgcttctg

SEQ ID NO: 22936 - DNA, 1161 bp, Mus musculus
ggactcccagcaggcagcagcggcagcaatggcagaacaatagaacaatcagggaggcaggctccaccctaggtgatctccttagtggtaagcaaagtcaaggtctggctcagcctgcttcaggcttgtgcgggaggttacatgggacaatggctcagtgaagcctttgagatacaaacatggttttgatccccagcgttcaataggagtctgggttcagggatgtgtttcctagagctggggtgccagggtagagatagggttcctgggtcctgctggccagttagtgcagaccaatcaatcgacttaagacctggtcaagctaaggtggaaggtgactgtggaaggcacctggtgctgattgcagacacttgtgcactgcacagagaattacggaaccacagttatcactactagcactttagagacctctcttccctccatagtcactgttctcagcaccctagctttcccctccagcatcctgagttctaaagtagacattcaccagtctcactgactgaactaggagtctgaaattactttaactttagaaaagtttatgctttgtttaaatacaatcttctttttccactgggtttttcccccttttctgttacatctatcgtcttcatttatgttgaatgccactgtaatgtgttcctttcatgcaaatagatttccttccacaaatatacaacaatttaccctttctgtgctgagtagatactgagttgtgctactctgagccttatttagcattattgtagttcatagctcttcatgcttatatatgtgcagttgttctaggtatgtacccaggcataaaatgctgggctgttggttgtgtgttaatgatcattacagtgccgcgctttctttcccagagtagttgtcttgatttatatttcaccagcagcacatgatttgcctctgcttcatgttcgtcagtggtcagccatctctcattaaggagcatgtttgggacctctttgtgtaaattgcacttctgagaaccctaagagtgaatgcagttcatggggttcgcccagcctttttaaaaattcacttgctttctttgtcatctttttaaaaactcagtttatagctttcacagcaggatgaaaactgcaaagttagtaggaagcagtgaagtgaacc

SEQ ID NO: 22937 - DNA, 1227 bp, Mus musculus
atgaaatctccgcgtccatctcagtgcagccgcccgtagtctcaagaccaaagacgggtgctcagcgagttagtgtgatgctgatgggtgcctgcttcacgtactgtgcctacttccctcagtaatgtgaaaggctgcaaaggaaattggtgctaggaccagaaactccaagttgttaaattatgttttttttaaatcaataaatatttctatatttgcttcaagtggcttgtttaacaagtaaattatggcagacctcatggctttctcctgtcctacagggtcaatgaactgcttgttaagactttgaatggtagtcttgaatttatcagttctaggaacatgagaaaaatgtggaaacggaatgcactatgtatttttacatgaaactgtgtgaaagaagtcttgaaatataaaacttacagaggtaaaaggaagtaaaatggactccctaaaatttcatttctgtggggaaattacttggttcgtggtataagcgcgctagttaatactctgaacactataaatgtagaaaggtgctactgggcaccatccaaatgctgccatctgtaggggcgaacatgggctgccacgatagcatgtacctccattcctaggcttggtggggagatgaacagaacacagcagagtcagaatcactgggagaccggggaatttctgttgagaactatgaagaaacaattgggaaaatagctaaataaaatacatttaaaaacctgtctgtattagaaaagaggtggatataataatgtgtttgagaacaaagactgtatttttgtactttcttaaaaactacataactcaaaatgattcattagtcctagaaaataaagatttactaccgttatgtcgttttccttgttctgtatggtactccatccttggtatgtttattgctaacttacacacactgtgaccgtacctggtccaccaatactaaccatgttatgaaatatacaacactggaagttgactagccagtttgtttatctggaaatagctattatctatgatttctgagtcttaagaggagtagcctccctggctacctatcagttttctaaaatagtaactataacctaggctcaaatgacttgtctccatacttgatctaggctttatatgttaaacaggaatagcagtcctaaaagggctctttgagtcagatattctcatattgtagccttagctttcattcaactttta

SEQ ID NO: 22938 - DNA, 2215 bp, Mus musculus
tgccattttaatttgcctacttacattgtgttcatatattttgaaaagacttctctactttaccgtggtcctccgttgtgagtgttgcagggctataggaagacaaagcctggggtacccgcatctggtttggaaccctgagttttgttgttcagtcagcagccctagtcatggttgccaatagttttcccaagcaaggcgtcaccgaggaggaagaaagggggtactctcatgtctgcttactcacaaaaacagatagtggcttaggaattgtggttatatccagttatacaggcgaggaggggctgtggtaaagacagattaaaaggaacaaatgaagtctcatttggtgtgccagattgcccctgtcttacaaatcccagactgattaattggtattggtatttaggagtattttatcaactttgcttcctccatttccagttaagtagttctacacaaatccccaggtatttgtagatatagctacaggttttacaaatacacaggcatttggtattgttgattttgtttttcagctttctgttactgtggaaaacatctatatgttaaggcagaactttttgttttttttttttaagaaaaaaacctgtatagccccggctgtcctggaatttactctgtagaccaggctgtccttgaactcagaaatctgcctgcctctgcctctcaagtgctgggattaaaagtgttgccaccactgcccggcaaggaagaactaagcaagtgtttggtccaattaaaatggatcagtgactgagactagagcgggaggctgcaaacctgttcgtaaaggtcacagcatttcagactgttggctgaattctagccatagcaccgctctgctgtaattgtagtttataagcatccagacaatatgtcaacaagtatggttatgttcttggaaaacaaaatcattcacccaaggaaacaagcttcaattttatgtataacagttctttgctgtggaatcgggcatatagcatacagcttagtggttaacttgcctagtgtgtagaagaccttggatttgatctattggaaaacacaagactgctctttaccaggtgctggaaaggtggctcagcagctaagaggcaagcactggctactcttccagaggatctcaggttgattcttggcactgacatgatggctgttaggcaactgtattctgcttccaggagtttcaataccatgtcgggccttcagcattcaagtagtacacagccatgaataaatacaggcaagataaaatttaaaatgttaaaatacatttgtagtagtacacctgcagtagaggccatcttggtaatagaaagccagtaagttatgtcttttatcttgctgtgtgtttgtgtatattagggcaacaaaaataatccaggctttaatctcagttaagcagattatgataaaaaacctatataccccaagcctcttccttgaggctgtaaaatgttttctctagtgctagttatgaaactaaacagatttcatggtcagcctctcagtgttcaggctgtgcatctccagatctgaaaggatgaagataacaagggctggagagatggctcagcggttaaggacactggctgctcttctgaacgaaggacctgagttcaaattccagcaaccacatggtagcacacaaccatttgtaatgagatctgatgccctcttctggtgtgtctgaagacagctacagtgtacttacatataataaatctttagaaaaaaagaaaaaaaccagcatctatgctgaatgtgttacaactcttattagtcagtattcacccaaataactactattttcattgtatttatattgtagaaattagaaggaatttgatgtatatggaaagcttgaatatcttacatgcaaagactgccacttagggacattagtatcagtgttgttgttattttaatctatgggtggtcctagaactggttcctcttagaattgaggatgactagactgctctaaaactaaaagagcagtcagataagaaaacacccttgaccttcacattctagggattgaaacaagactaaaagttgaatgaaagctaaggctacaatatgagaatatctgactcaaagagcccttttaggactgctattcctgtttaacatataaagcctagatcaagtatggagacaagtcatttgagcctaggttatagttact

SEQ ID NO: 22939 - DNA, 1138 bp, Mus musculus
atgtgggtcaaataaattttaataaaactttgaagctatcttaaagtatatgttgcattgaaggttaaggggaactaaacgtatgcattgaggtctaaaagtcaggccctcaaagacagttaaaagtcttgttttttcccctaaacacttttgatttactaaaggattttttgcttgcttattttatttgttttcatgtgaatgggcctttgtgcagggaggccagcaggtgctgtcagtcagtcctacagctgtgctaactgatgatcactgtgagccatcacgtggatgctgggagtgaacctggctcctctgctagagcaacagtgttcttgaccactccaccccaacacgctgttttaatatactgttagcgaacagtgtagcactgccgaggcgatacataaagggatggccgattgagtacaataaactatgacttagttgtaaagttgtaaagtgtgcctttctgatgacactttttgatttcagggacactttgtaaagaatttaggcgatgttggagagaaggagacagaaacggaagtgttgctgctcgagcacgatgttcctcatcagcccttttcccaggctgtgcttagcttcctgcccaggatgccctggagcattactgaggaggtcagtcagagcactctgcagtgacgttcacattgctagcttatcccacagtgtgtgttgctttgttgttaaattggtgattgaacctagggccttatgcaagtcagtcagacactcaaccactggagtaaatccttggccctattttacatcttggtttttcttttcagttgggttttttactatgttagccagtttgccctggatctttgtcctgccttagattcctgcatatctaggaaccagaccacgaagtagtttaatttctacatatgtctttaaataatgtagaaaccatggctgctgcttcacagttagttagttccagcattattagctgtttactgttctaaaggtagtggagcctgggagtatggagactaaaaatgaggcagactaaagtcctctgcaatagccaactttattcagagcatcagacaatttatactgagggttgaatataggtaatcaagtaaggggtacaattacatggacaagt

SEQ ID NO: 22940 - DNA, 1170 bp, Mus musculus
aaaacaccttgtccctacacacaagacgccccaggtttaacccaaaggcccaggtgtgttggagcacgcctgtaatccgggctctaaggaagtgcagatgagaagagatgctaagggtcatcctcagctagggttcaaggacagccagggctccaggatacttacttcaaaagagggggggggggagagggggggaggaggaggaggaggagaaagcatgcatgaatgaggccttttcttttggcctatagtttttagtgctgtatttcaggtaatcatagctcttcctggaagttatgtaagttttcagactttgctgcgttagcattctctttctccacctcttgctctccatccccaatgcctgcctggaaacacacacattcatgtgttcctgtgtttattactgagtcatttcaaaataggctgcatcgaatgcatttatctcttcagggtgtatttcgtaagaaaagaaatgttcttacagaactccaaaaacatattttaatacaagaacatttgatagcgatgtgcttacaacaatgcattatcccaataatgttctttcgtagtacctttcaatgatcttttaatcacacatagatcagaagatagcttctcgaattgttcctttcttcctccatgaaggttccttgcatgatgcttagtgtgcttacccgctgagtcactcactgacctcatgttactgtgtgtacggtataggctgcagcccaggaacttgtaattctcccctccctccttggcctgcttcaatctcaaacccttcttgatcttgattttttacctaacccattttgctttcatggcatttggttcattttcatttaatgttacaggtatttcatttaaaatacaggtaatttttaatattaaaggtattcaaaagacatgaaagaattatagatttctgttgggctcttctactcacctttaatgctgtaaggtacaatcagcaatggttaaaactcagtggtaccgtgtttcctagctgatttagctgcacagcaagcattttaatcagaatgcctatccgaaactttgcgtaggcacttgaggaacacaactggtaattcacaaatgctgtttcccatgctcaccttccatgtcactgattaagacaataaatctttattgatacctaatactgtg

SEQ ID NO: 22941 - DNA, 1102 bp, Mus musculus
aaatatatgcaatcttataagataaatctctggatttttttccatcctgtagaactaaattcttaccatgaaatcccctttccttctcctccagccattggtaaccatcattctactctctgctcacaggaatttatctaatttagagttatctttctgtttattttactcagtgtagtgtcttcaagattcattcatgtatgttatatctctaaaaaaaaatagtttcacctgggtatggtggttcatggttgtaatttcagccctcgggaagcagaaatagagttatctgtttcacagttcaacagaaattcacaatatattgaaggaggagaattgacaggtataggaacagactggatgacagaccgcccccatgaggaaagataggaaatgtgggataatgcgttccagtctgttagaagtggaattttaagaactacagggagctgggagggtgctggaggctggctggtgactagcttgcttttatttttttattttttttttcgcccttttaagactggatctcttgggctggtgagatggctcagtgggtaagagcacccgactgttcttccgaaggtccgaagttcaaatcccagcaaccacatggtggctcacaaccacccgtaatgagatctgatgccctcttctggtgcgtctgaagacagctacagtgtacttacatataataaataaataaataaataaataaatctttaaaaaaaaaaaaaagactggatctctctttgtagattttgctggcctggaaatctgtgtagatcaccaagcctggaactcctagagatccacctgtctccgcctttcaattgctgggattaaagaaatgcaccactagccctgtctcaaaaaacaaacaaacagaaacaagatatggagaaaatgtatagaaaagatttcaagctgggcatggtggtgcatacctttgatcacagacaggactctggaggcacagtgaatctctgggagttcgaagccagcctggtctctaaagtgagtccaggacagccagggttctctttgacatggagaaaccctgtctcgaaaaacttggggggaaaaaagcttacaagaaata

SEQ ID NO: 22942 - DNA, 1175 bp, Mus musculus
tctggccctggggccttgccattggccacaacgctgccagtccggtgagctggccctgcctccccggagttgggtgaaatagaggcgggcgtcaagtgtcagtagtcgcggggcaggtacgcgctctcttaggttgctggtggagcttgggggtggcgggagcgggttccggcgagagggtgagcgagcgctggggcggggcgggagaaagtggctgcccgaggacctcggcggtgacgcgtggccgagcccaggagccccgatctccgtgcccgccttcgtgagcgtctggctgccggcccaggggtcccccgccgcggccccccgccgagtccgccgtcccgtgccagcccgagcgaggtgggatcgcgatcgctccgtgtcccgctcccgtaatccccagaccgtccatgcccacgcgggtgctgaccatgagcgcccgcctgggaccactgccccagccgccggccgcgcaggacgagcccgtgttcgcgcagctcaagccggtgctgggcgctgcgaacccggcccgcgacgcggcgctcttctccggagacgatctgaaacacgcgcaccaccacccgcctgcgccgccgccagccgctggcccgcgactgccctcggaggagctggtccaggtaagcagagcggccggcctcccttccccggctcgggcgtgtcccgccgctacgaggcgcgggcgacaggggccgctccagactgggacgcgcgggaacgggtgcccgggtggacagccccgccctgcgctcccagacggggcgccggggagtggatgggggagcagggcgggggcccacccggatctgtccagaggagctaaagagagccgcgcgctcgcgtgcaccttctctttgcttgcgtggggatgaaagcttgtgcccacgctcaacttggcttaaaatgcttcttgaccgctctctcccgatggccctggccttggaagtccacctgcctgcgtcctctggggtgaaatagaaatgcaaattggagtactggggtttcatatacccccgtggaggctcaccctagaatgtattgtagggccccgtttggaaaactagaatcttaaggttgtattggaacaccgcttttcccttaaaaagaaacacggacaaaaaaggccaggggtgttgtttttcttagtgtgcgcgtaa

SEQ ID NO: 22943 - DNA, 2595 bp, Mus musculus
tctggtttgtatggttggccttgagtagtggtgtggaaggccgggtggactgattcccaacataccatgtacattatcctcgccgctacttgtatatcatcctcgccgctacttggggggggagggatggggggcgcactgcacggttcaccatggggatggggtgtgggctgtgccgctggtcttgcagcagaccacctcaccctgtctcttccttgtcacaggcgagaagccctacaagtgcacctgggagggctgcgactggaggtttgcccggtcggatgagctgacccgccactacaggaagcacacgggcgccaagccgttccagtgcatggtgtgccaacgcagcttctcccgctccgaccacctcgcgctgcacatgaagcgccaccagaactgagcgagcgagcgctgcgcccacccgcctgacgccttgcagtccgctctgccatcctttaaaccgcagacctaacttcataaaaagaaaaaaaaaggaaaaaaaaaggaaaaaaaaaaaaagcaaaggaactggaaatgtatattttgtacatttgaggccacagggaatacattgtatcaataccaaagtgtttggtcattttgagaagctggaagcttgctctcatgctcaccactagctttatcccagcaaacttcctctccagacaggcagccgcatctcagcatggggaaccggtgggggtgcacggggtgcgtatgctgtttctataaagactgcacacacgcaatcgtgtgtgccattttttagggtaaacaaaccgattggcaggcacccaggcacattgtcaagattttacttgacgtggactcgttttttttctgaagatttgattatttccagagatgggaggtacacggttgtgtgtacctggcagttcacaaatagccattgaacaaaaattttgtttttgtttttgttttgttttgtttttatatgagttgcctatatttgctattccgaattttgtaaatatgcaaatcagctttatagatttatcacaagtttttaaggattgttgggggggggggaagaaatcgtacttttgaaaataattatgaatacatttccaattagaatttgtggtgagatacctctcagaaaaattaccaaatccatttctttggggaggggataatcattcaaatgagagtaaaatgcaaatttcactcactgattgaaatgagattttattttaaatatgagagttttttttatgtgaatttaaactgaaatgcttaaagatagctaccatacacagacgctaatggtctttaccataagttaaacagtatcttttttttttgttttgttttcttttttttttgttttttaagtggaggaggactgttgtggctgtgttccttgttgaacttaagactctgttttcactcgtggaagcattgaatttccaggatttctaggatgtttgctcatgcagtgctgttggcgaaatgacaatttatgcggatttttgcatgtactatccagtgagacagtaattttattgaaattacagtgccacgtagtaggtagcctgttgttaatactgactcgtctgcctttgatatcagtgatgtgttgaaaacttaaccaatatgcaacatggctatgaatgtgacatggatgctgttaaccaaaggacagaaaccacaagcaaaatgccaaaagcgatcttaattagaaatcttaattttgtttttaagatattgttttatcattatttattttgtggtaatatagtaaggttttttttcttttcttctttttttttttttaggaaacaactttcgtaacttgataaattatagttttgtttgttagaaaagttgcttctcaacgtgtaaataggcgacaaatggtgtaaatagttttgtaaggctccaagatgtttatacgtggacacacctacatcagaagcataactcggctgctgttctgccgcctcctcccttatttttgtattgtggtaatttcctatgcaaatatcagagcaagcagctgtcgagctgtagaattttttgagagaatgagatgtttatatattaacttttttttttttgaaaataaaaagtgcctaaaagatgtatgtggtgccttcttgaccctccatccatatcacgagcatattatagtcctaaatcaagtttctttgcgtgggtagcatcaggagggtgaaccgggtgtggggttacaggctttgtaatcccagccacggaaaggctggatttaaggacgtggacaacactttgaatcataactcctggaggacacaaagctgaaatcgggctggctgtgtgtctctgttgggaagtggattgcccagcctgcacaccttacaagaagccggcagtggaggtgcgctgccgtagtcccggcccacacaggcaggaaggagtggagttcaagggttaccctattccacaaagtttgaggctcgtcttaactatgaaaatagaaacaagaggtgtatagagagggaattcacaaatgctgaggtttttgtgacctctggaactttttagcctggtcagctggaggcagcgacttgtattactctgggaaattgtcga

SEQ ID NO: 22944 - DNA, 1099 bp, Mus musculus
tcatgcttctctactaacattaagaattaatacttaattactgcttcacctctttaatttcaatatattattaatctgaggttttagttctagattcatgttacaatataatttcaaagacttctcatcttctgcgtcaactttcatgatgttgttaaaggcagcatttgaagtcagccgtaggactggctgtcaccaccagtcagaaatcattcatttatgcctttcttgcctctttattttaaccccttctattttatgtctcccttgaaaacctaaggcataccagggcatccaggtccccttgcttggccagctttgccttctatacccagaaaccacaagttatgagcaatggaaatcttctccctgtgtgctctgacattgagctgagtgacacttccacaagactgacatttgctcctctcactcagtagcccatccttatctgcagctctcatctgatctcaggccttgggccatgttatggaaggcagagtcactggggttctctggaagaaggttggtgaaccaacacttgacattacacacattgttctttgtatttgttagcgagacggggtatcattatatagcacaggctgacctcaaactcagctcctcatggttctactctctcagtactggaattattagcatgcacaaacatctgtacttttcttgttaaaactatgaaactggatcacccagagctcccagggactaaactgccaaccaaagagggactcatgactccagccacatatatagcagagtattgccttatctgacatcaatgggaggggaggcccttggtcctgtggaggcttgttgtgtagggggatgctggagcagtgaggcaggagtgggtgagtaaggggaggagcacccccatagagacaaaggggaggggggagaggaggggtgggatgagggcattgtggagggataaccgggaagggagttgatcatttgaaaatgtaaacaaataaaatgattaatgaaaaataacctatgaaactctcattcattgttgtttttatttcacattcttaagacaactattagttttaggttatatattaagccagcatctaca

SEQ ID NO: 22945 - DNA, 1115 bp, Mus musculus
caaacagacacgagtctctgttctgatcctggaacgtgtgaccttgagcccatcacctaagctctctgaaactgggttctgtcatctgcaaaatggaaataataccctataatactgagatggttcagtgaggcactggacacgtacgtacactgcatagtgtgtcacctggcatgtgactgtcatagggactgatgaaatctaaagccacatcatcaccactcataccactcaatgtaatagtaggttttagctgggtactgtagaggctgcaatggtccagtttccacgtgtgccgcaggcagctgtgaggaccatgtttctcagcttctgttttagggcttgagtatgggacagaagaaaggttaaaagtaccacagagccctgaagcagagcggaagttaagcctgttaggaaaagctactttctacgtcttttccttgttattcatctggtagacacttgggtttctttgtttaactctctgcttttcttgacttgttttctgattctgctcatgtcccgtgttttctttcccatttgaccattgcttgccaacataaacgaaggtattttcttgtactatgaccagtatcgaaacgaatacaagactcagtacagagaaacttaagtatttgttcaaggcagtggtatttctcacatgatatttgtactgttgtgttaaagcttatagattttcagtggaaactgggcatggctgtgagctctgacagctgcagatctctcaagtatccttacgtggcagtgatgctgaaggtggcagatcactctggccaagtaagcagcaagtccatcgagatgacaattccacaatttcaggtttgtcgttcaactcactgaatttaagtgttattgctggttcaaagctgtatacagtctctcttcttaagagaacatttatttacttgcaagttgatatattttacatgtagttattgctaaagttattttctctggaagcttaagtttttgtttttcaataagacatgccaatttgtgtatggtaccattttaattactctaacagtttttgatggttatatttaggaatatttcatcttctctacaagatatctactttgtaattaactttt

SEQ ID NO: 22946 - DNA, 1244 bp, Mus musculus
cagatggccctgagggtggaatgccctgagtggaattttgtgtatcagccaactgaattaattagcaagaggatgtaacagagcagaaatactggtgagtccatatgtaaccaaagggggaatgccatcaaaatcccaaatggaccaattgcatcccctcgagcctctatcaagacagttcaaggtatagtgaaggcatgctttagttggctgcagaaggtttctctcctacggctatcaagatactttcttaagttaccattgttgctgccgccgatgccgagtgtgactttaaatgccaaccttgcacagcacacgtgaaagcctccgttccgttcttgttccgcatctaggtcagtgagtgggaagcgtgtgtgctcctactgtaataacattctgggcaaaggagccgccatgatcatcgagaccctgggtctttcttatcatttacattgttttaaggtgagcctgagtcagagagcttgccgccgctgccaatgccgatgctaccaccaccgctgccgctggcctgccgcactttgcttggagagcgcatggcttctatgagccccgccccgggttgtggatgtgccactaacaagcttggtgctgttatctgtccgtctgtgccgtgctggtgttgcagattgcttgctaccgcttaattttccaacctggaatcttcttttatatgttagtctggaaggcctatgctttttgtagctcaatatgctagaattctataaataaaatttacagtgcacagtgtgttctctagcgtgctgccatgggtagacttaaaatttaatttaccagtgtttttagcaacatggagacatgcagttatcagtgtctcaaacgatagcttttaatagtgtctagaaggaaaaccactgtaaatatttttacaattgcatagcctgcctgcctattcctgatatttttgttttttgttttcctatatagtaaaaggttcaggctgtaattctttgttttatagtgtctaggcctataaacacacatcaggtttcatttttgagctttcattaggccagaagaaagtctccctatttttgatcctggaattccaaagttagcagcttgcttaagcatataaatttgtgctgtatccatgtagaatagactgagtcagaacagtgtttgaacacacccaacacagacacacacacacacacacagagggagagagaaaaagagagacagagacagagagacagagaaca

SEQ ID NO: 22947 - DNA, 1201 bp, Mus musculus
aacttctttcctggttgtccaggccttcctggaacgctgaccctgaaggtgggagaatgtctaggctgggcatggggtcttggcagtgtgtctgtgtgtgcacttttctctcttaaacccaaagccaaacataattgatttttggaaccactgctcacgccttttctctccttcagtacgagtaacagagagttgaaggttttgtttttgtgttcattcatactctgtgttttacaaataaagaattctagaccccagaggctgcaattgcctgcctttgtcctaagactaagcggcaggtaactcttcctacctcactgggccactctgagtgacgactgcttatgaactcccttgagctgacattcccgtttctgaatctgagtgcttttctctcttctctcctttgcctaatcagctggacggccaaccgccatgtgatgtaaacccccattcgaaagcgctgttgcagatagaagaggaggcgcttgtcactgatgcagagctataaaaaaaaaaatgctggatggttttttcccctcttttttttttttaaaggaataatcattgcctcgttaaatgacataggaacactgtggtgttggtaggacctgtatttttgttgtttatttataagaaggtaattatgtgtgtgtgtgtgggggggggaggagtgcagtattgaccttttaaattcagcatcctaaaagcacaagtggaaaagaaaactaaacaaagctcaagaacttaaaatccttctcatactcatatgattaatgatctcgtttgactctctagtggtttttcgaagaaggtattttattttaattttttaagttcttaaacattatttgaaatagttaatataaatgtgtaactgtgtttgtttattataatgtattctaagttaatgtggatccatatgaaaaatttcacttaaatccactcataaatttgcttcttttgtggttttctttacacggaaataatccaattgaaaaataattttgcctctctgtaatgttttattggtttgaggagggcactcaattttctttacaaggactgttgatgctaagcaaatgccaggagagggctgtttactttcagtaatgaaaaatatccatggcttgtataccagtgatttcctccagaaacacgtgagctcttctgttccgctgcctttgtaaataaacttggt

SEQ ID NO: 22948 - DNA, 1166 bp, Mus musculus
gagtggttagtagggacagtcagcccttacttaggtctaggactgtgggagggttggggagggaggaaagatgggaggaagggcgggagggaggagggggacatgctcatttattatttgaaagttggaagtttgtataatccatttgagtatgtgcgcatttaaaaaaatatgaaacagtacgtgtaaacttagattttatcaagattagtagaagacccatcttcagctggaagtctatcgagctattttgagtcctaaacttagttgctaatacttgtataacctaaccaaagagttacctagtagagtttttagtgatttgaacatttatttttcttgttgattctatttcctcacttatagcctatttacttaagcaaaataagtttgatttttaattacttagacttcagatctctttattattattattattattgttagcagtagtgtttttaaattgatgttttctgcaaggccagcaagtgtgggctgctgggctgttctgaaaaccggaacaatgctctttctttcctgcgtttgtttgacgttgcagtgacagattcgaaagatcaacggaagcacggggggggggggctgcccatctgtagatagctgtcaagtggaatgtttctaaatgaaggcaaataagtacttcagtgtgagccgagcaataacgcggtatttaggtgaatgcaacagaaacaggggacctttgccttattgcctttcctctcacgtggaatgaattcccagtgtgtatcctgtgtacaccacagcagagaggaggtatgcccgtatgcttccacaccacagcagagaggaggtatgcccgtatgcttccctctgagagacgtcctttggataatctgtgattacagagaagcctttgtgtatgtgtgtgtgtttgttttatcatcttactctgaaatatgtttttaaggatttttgtaagagccatttgaagtgtttaaattagagctattttttccttgtttttaaaaaacgaaccttgtaccgtgtatctcatcatatccgaggcagatgttatgaattgggacagttttattctcagactcctgtgatcaaatctgtacataccatatacaaacattttacacgaatcatttagttttttaattcatctactgatgctataaaat

SEQ ID NO: 22949 - DNA, 1486 bp, Mus musculus
cttgttttataactttgagtattggtttctaccaatgaaacccccctttgtcaaaataacatacgaagaaaccccgttacctacccgacatacaacatttaccgacttgtgacaacttccactctgctgctctccagacagcagcatccatgttcttccagggctgtgtctacagtggtgtctttattcaccttccctccctggggctcactgttggaagtgcagtatctggacatttcaagactcttgcagagtagcagaaaccgtaattgtactggccaaagtgaatgggttgtaatcgttatttgagaattactccatctcagctatggagagcctttgatcccaaggtagcatttttctcgggctactttttctgttacagtagtgctgtttcgtagtttaagggtttttttttggggggggggtcatctaaagaattgctgtttttatagttattaccgccttaggttccaggtctattttctattcacaaggttttaaaaccttgtttggactctgttactggaatagtgcctctagccatggcaaatacagaaaaatttttggctagctggctgttgtgacagaagcaatttaacatctctagatttatgtccttacctctaaagtgattcatctaccaggagtatgtagattgggggcacctatgtaggcacaggaaggcacacggagtgcatatacggtgtccactgggactaaaagaacacaaactgccatccttgaatttgcctgacgtacgtacaggccatccattcctgggtaattgctgagactttgagctggcacagtacacattgcttctttagtacaggccatggaagcttctggctccagacatggctaggtgaagtgtccttctgacttcctgtgcatgtcctctggtttctctcccaccatcatcagagagagcacactttcctggaaaggacagaagtttgtcaagggcctttgttagcttgctatgttgcttttaggggcattagacaggctatcaagctcctgtattttgatcagttgaactcattttgttttcctatctaacactagcataataatggaaaagtcttttaatatagaaacatgccagttattaatttcctaatttactaatagctggctgcttcttgagacatcagtacactactgtgtcttaagaagtctcatctacgtatctgctggcccagatgtcagggcttagcaagataaagtgacctggaattaggttctcactcaggatacactggaggctttccagcactcttcagattgtggcctttagaccggtatctgtgcaccaaatgttaccagtctgtgttattgttcagtctaataaaaaacataaacaaaacaaaaaaaataaactcaagaaaaaaaccagggcttgcatcttgtatctttgatcttatttgtccaggaatttactttttattgtttgaaagtataaaccccacaaagcaaaagc

SEQ ID NO: 22950 - DNA, 1215 bp, Mus musculus
atttcagacactatcctttagtctgtgttctagttgaacacgaattttttcttcatctgtgagtttagtgtaatttctttatgatatggcggctggtactcaaagcctgagcttgtagccaaccctgggctgcagagtgagttccagggaggaagaaaacagagtgatgctgtacattcctaggataaatcttactttgttatggcatatttttaaaatgacggttatgattttcttgagttataaatgagcaacaaggatatagaactgattttataagacaaatagacaaatagtatgaatgagtataacttctaattcattatcacaactgaatttttaaaattgcattatataatgtggctattttctaggacatgcacttgattaaacagttgaacagataaattttaaaataatttataaataattgggctttgttccccccccccccccccaggcattctgtgtgtggctgaccagtgtcatggcttacgagaactggccctgaactaccatttgctaagtgatgagttgttgctcgcactgtcttctgaaaagcatgttcgcttagaacatttgcgcattgatgttgtcagtgagaacccgggacagacacacttccacactatccagaagagcagctgggatgccttcatcaaacactcaccgaaagtcaacctagtgatgtatttttttttatacgaagaggaatttgacccattctttcgttatgaaatacctgctacgcatctttactttgggagatcagtcagcaaagatgtgcttggccgtgtgggcatgacctgcccgagactagtggaactggtagtgtgtgccaatgggttgcggcctcttgatgaagagttaattcgcattgcggaacgttgcaaaaatttgtcagctattgggctgggggaatgtgaagtctcatgtagtgcctttgttgagtttgtgaagatgtgtgggggccgcctgtctcagttatccattatggaagaagtgttaattcctgaccaaaagtatagtttggaacaaattcattgggaagtgtctaagcatcttggcagggtatggttcccagacatgatgcctacttggtaagggactgcatgacacaggacataatgagtgagtagtaccttcattcaagaaacgtattctaactaaaagtttatctgctctaaagctgatacaatgctactgttctgtggc

SEQ ID NO: 22951 - DNA, 1067 bp, Mus musculus
ctgccaaggaggaagaattcaggtttaaaattgtaacgtgctttatagtgataaaagagcctggtagagtaaaagaaataagtgatgtgtgagagaaagtgatgctgctgaggagaccacatgcccatgggaaaaacctgtctttagataagaaccgcattgctccttccactgtaacctgagagagaatgaaggaaagaaaattggttttccagtctgattattaatggagattataaccagttgtttctatttccacagaagggaaaagggaaatcatgatgagcttagagtgtgaaggagacgtaacggggctatagggaaagagtgaaactcaggtgtgtgtgagctgaggaacatgccgtgacagctacaaggttgcaggcagtgtgctgatgcagacacagtcactgaagtggtaaatgacggtaactgcataatcaaaagtaaactttttgctatccactttttaattcaggcccagtgaaaatatgcttattcgtgtcaataacgatgggacctactgtgcaaactggactccaggggctatcgggctctacactgttcatgtgaccattgatggcattgaaataggtaaatagagtgttaagtaagaagttgctgcaaagaactagaattaaaatcatccttgtattgtttacccttgtgacatacatataaataggtttcataacatctttgtggcttcattttctccttcatagtgagcaattcattaggacattgcatagatattatttgagtatgatttatgtgatcactcattggggctgtcatgagctcccccactttcctagtgtgtcagtgaggtatgattccctccttatctctgtgttatcctgtgtatgccacgcccccacccccacccaccctgccacagcaacctgtacctaccatcctcacctggtaggagcagacgccatctatttgacaggtgatctggtttagataggggtctggcagagagtggctacttagcacacattgctaactaaaagattttatttctcactagttttggaaaaaatactgatttttctataatg

SEQ ID NO: 22952 - DNA, 1194 bp, Mus musculus
aatttattagaaagtagccaagttgcagttacaattggtaagactctaaaggcattgcttggttgacttaatacatgaatacagtattaatttaaattctaatgccacataaaagtattttaaaattagactatatgaaggacttagaaagtatctattaaaaatctgtataattcttcatgtgagtatagaaacagaattttgttataatttctttcataattttatatatgatgctttattattttagatgattttattctgtaatgtagattgttgtgtccttttaataatgctttctattatttaagtttttactgcatataaaataattgaagtagtataggaagtgaggttcagctataaagttcacttgtttccttgccacgtcctaatcaagcataggcacacagccttcacaaagcgctctgctgtgatggatacaagggcaaaaacccaccgtcagttctagtctagaataaatacagattagctcagtcagtagactctcctaagtgcatcacaaacttatgcaactgttattggttggttgacacttgggttcttcttaggcttttgagaaatctgttgaaatgaacattgttaaacctacaactgtgcggagagcagctctagctttacccaggcattggatgcctgaggcacagagcatctactgtggaagagtcatgcttcccactagtgccccttttattagtttttcttttaatttttgcacaaggacagtttgatctcattgttaaacagcacaaaatacttttttgcataaatgtgctgtgtacgttgcagtttaatatcttaatgttcttccacttagggctttccatagtccttcaattgattttaattgcgtatgggttattttagatttttcctcaattaatgagataaaattaaataagtacctttgacctaaaatttcttttcaactttgaaggaattttccttaggataagtgagaactgcagggcatgtatccatgtaagcatttgtgcccgaggtgaacattgggatggcttcctcagggactttccagccttaacagttcttgagacagtgtctctcccctgaacatagagcttgcctttttatctcaaggcaagtagccacttccctctgcctcatccttggtcttgccatgcctgcttgttaatgtaggtgctgagattttaa

SEQ ID NO: 22953 - DNA, 1199 bp, Mus musculus
atgactgtatccttatttgtgcccagcttctcccaaaagaaaatagtttattttgataagagggaggctattaatttgagtagcatttaaaaatgatatgctcaagcatgttttcccctcatatttgaaatggaaaacttttctagtcctaaaattatgaaattttactttgctttaaactctcatctgtccttccctcaactgaaggcagagtatttcgtacaggtatttacagaatatttgctgagttataaagaaaagagttattacattgtactcattgtactagttttccattcctgtgtatttgtcgtcctgcccccagatttgattccagcacttagtggatgttggtgagacacagggaagcgtcagcagagcatcctcctctatgctttcttttgattctcagaatccaaaacctgctttgagtgtgatgatacttcagaacatactgtctggcacaagatttcctttaataagtcatttattttaactcagtttctatgaactgttattgaatctgaaaacaccaaaggagtcttttcttgtctgaagactgggttgttccagtggttagcacctgtgcccatgattatcccatttcatgaatgcgttgttggcatgggggttccctgctctttgagaggagcaaaagtaactggttaagctgtagcagcttatttttaaaagtgatgataaaacttgaactgaaaaaggtaaaacttgaactagaaaactactcttgtatgcaaagaatgtttatagtgaatgtgtttatgtgggttgtcaacacttctattatttatagttgaattatgttgtttattaaatatccatgtttattatttttatattttgaaatttaaaaataaaatagtcttaataaaaacagttgttaatgttttaaaattatggtatctcttataacagttatatttacatgcttaaggtttagattcaccatgcacacacagtggagacttctgacactgttagtgaagaaatagccaaatgtttcctctttcacgctctaccctcttcccacttgagttcttcaaggtcaaccatggttccaatgtattatcagcccagtgcctttgcccatgcatgtgcaaaccttagtctctccggcttctatacttctgattttctctttctttttgtctggtagccaaaaagttcttcctatgttgagt

SEQ ID NO: 22954 - DNA, 1188 bp, Mus musculus
gatcaaaattatattgattctgatttttttttctatttcctttaagttctactcagtcacactttcttctacaaagctgatacctgcaaacactttttccctcttgagtatgcattgtgattgtcttcatgaaaaacaagatgtgacaaactcatagtcgtatataagtgatctgtcttgatccacattgattatacatgcatggttaaaggaaaagcatgtatattaggtaattaatcatttaaataataatttggatagccaacaaggtatttttgtttggttgtgccccaccacatgcccactttttgtgtgtgtgtgttttttttttcttacaaattggcagagagccatgaagtattcataaatgtttaatcagactagttgatacttttttattttcaaaaaagactttacagtagtagtgttatagctgcttaatttagagccaaaggacattgtctgaagagaccatacctgccagtgactcttttgatttgttcatagatgaatgctacacactgtcaccttaactaatcttgccattgctttttactttgctcttgaattaaaaacaaagcaaaccaacgtagaatatgcccttgggaatcaaaggtcgtgttgatttctccttaagatcattgcccttttttttttttaattgttggtagattcagttggtcagttatatttaagtccctataaatcagctaattagagattctcttttaaattttttcttgaatagacttgtcatggagctacgtgtacataactgtacaaaatcatttttgtgtcattgaatggagcagtttacctctgcatgattgcattatggaagccttttatatatctttatatttttcaatatacttagattttacaatattggtcgctctagtcatgctatatttgttttttttaatagaatttataaatatttatgctcaaaatacagatcaactaaatatttttggtcttgtttacaagataatactttaaagtgatacaggcccctcaagtgtcttaggaaacagtcattggtgctataaaacctttcagtgtcattgagtctgttgtttagtctttgctaggctttaatctactatcgcttacactttagctagcagcagaattataaagaggtatttgttagcgctggggtaagagcgcaaccccattagagaa

SEQ ID NO: 22955 - DNA, 1112 bp, Mus musculus
tggtttgatgatagtttcaaaatttattataaatttccctagaaatgtaactgaaattaccaattctattcagttaagctcataaatgcttatcaatttctttagcctaaaattgcataataacttaagaatttcagtattttaagttgtgctttgaatgaatcagaagaccaaatctgactgtttggtcctctcgtgtgaggactgcatcctccaggattcactagattcacagttgtgctttataagcactaatctgcatttcgttatagatgttaggggtgtgtggctattgagttttaattcatgagtgtgtttctgaatactagtattttatgtacacatatttcttcatttaaaacataagataccttttaaaagtagatggtagttcttgtttttctaataagaaaacagactgttagaaatgaagtggtttacctaaagtcatagtgaccaagtggaagtactgtattcttagtataagcattgtgatttcagtaccaactttataaaagaaaaaaaaattgcagaactctgctgctgtgtccttcctaattattgatcaaccatgatattgtgataaccatggtagtctttacctcaaaatcctacaaagaattagcagactccttggtcttcaggcagttcatgtttacccttttaaaaagcactttgttcatatctctgttataatattcaatgttgtactataatttatctggtttatatgtctgtcttcccccactagattgcaagctcctccaggaaggggaccatgtcttattcatctttttatctctagtgcttatagtaaacctggctcatgtgagcacttagatgtttgttggatgaaataatgaatgaatggatatttacatttataataatgaggttgacaattacctcccttgttaattcttatcaattttctaaaaatctgatagtctcctcagtcactggggccattttataaaatgatagtgttatgtgtctcttcacaggggttacaggtagcgatggaggtagatacctagaatcaaatctgacatttttccagctcaggcctctagattgtgtaatattaagtaagtactatagtcatttccagg

SEQ ID NO: 22956 - DNA, 1224 bp, Mus musculus
tcgttcttggagaagatgatttgactgatcattgatctgcatatgctagagctctacctgtgtttcattagtattatctaatggactgttacatatttgtaaaaacaatttttggtaaaatatgatgacgatggatttcacaaatagataaaagaagaaaactaccttctgatcttgtattttgaagattgatgtttgcattttatttcagtaaacaattgctaaagacatctcaataggacatatgcaatgtttttattacatacttctattgaacattacagaattctttgggttatttgtaaattaatgaatagatttgaatacttatgacccaatacttgttataacatagaggattttgttttactccaaataaggaatgaatttgcatttaaaatcttaatgaatgttttcaaaatgagtagatgacatagtatgctaactaacgtctccaagttatgtattcataatactgcacagtagtatgcttaggctttactatgtattagccgtttgttggatttgtgtatgtattttatcacatgggtgttaatgataatggtgtatgactgctttacatatgagtcctatgcatctggatgctaaaaataaagtggaatggtctcttaaaagaaaaaagaaaagaaaaaaaaaagcaatgacaaaaaaaaattcatgacaatgttccttgatttaaaaaagaaaaaagaaaaaagaaaaagaaaaaaagaaaaaaaaagaaaaaaaagagaaaatgaaacagaccattccagatggtgatctgcttaccccctatcaaaaagagttataatcactaaataataatggttactggtacctttacaataatgtgcaatccaatgtttaaaatttataccacttcagtttggcttgatcatataaattttcaacagatgtcttaaaatttaaaagcaggctgattagtttggaaccagacttcaagtagcgctaacatttggtgaataagacaacttcatattacattttggatgtatgaaagaaaacttgaccatttgaagatgtatgaataaagaaatgtactatagatactactttaggaaaaccctgtttggtaagtgtcccagtctgatattttaagtgtgcatttacttttataaaaatctttcacatttgcaacaatactgtgattttttttttaaagtggattctctagcacgtgaatataattattgaaagtta

SEQ ID NO: 22957 - DNA, 1224 bp, Mus musculus; identical to SEQ ID NO: 22956

SEQ ID NO: 22958 - DNA, 1203 bp, Mus musculus
taccatctaagttacttttcaaagactctgcttacttaaatattcttgattaaatcgttctttagaaatcagtgattattgaaatatatttaggacccatgttaagaatttttcaaagagaatcaaagatctttaaggatttactataagagatatgtttaatactgaaatcatagttgcagtatggtttttagtattaaatgagatagtttagtaattggtgtattatataatgaggcatatttgccaaaagttttatgaattttgttattttacttactgagtatacatatttcagttttctttttgtgtatgttaagaatattagttgataatagcttatattattgagaatgaagagagttcttataaaatgtaaattataattttacccaatactaaatataatcttatttttgatatcatttgttagctcagagatagtttatatttccagagtcttttgcatttatttctaatgatatttacttacagaaaaggggttctgtatgagaggagacatgtgtccttttgatcatggaagcgacccagtagttgtagaagatgtgaatctgccaggcatgctgcctttcccagctcagccacctgttgttgaaggaccacctcctcccgggctgcctccacctcctccgatccttacaccgccacctgtgaatcttagaccccctgtgccacctcccggtccattaccacccagtctgccacctgtcacaggtcagaagatagatttgtttcccactattcattatttgttcacctaaagtctttttgttcatgctcatctttttatgcagtttgtaaagaaggccggtacatgcctggtagaaaccaagtgtacccccttttgcaatatcatgtatgacttcagcctttggtaaactagttactgtgctttgtaagagcctgtgaattatatacatcctgataatagcccctgcctttagtccttcctagttcatatcaaacctgttttgtaatacatttaaaagaagatttactataaaaaagctagcttacttgttaagaggttgttctttgtagaaaacattttagcttgataaaagaatatcaggtttgaatgtataataatttattttgtttgtttgctttcagatgatatttcttattctttggttttgacaggacctcctcctccacttcctcctttgcagccgtctggca

SEQ ID NO: 22959 - DNA, 1125 bp, Mus musculus
gaaaataatgaaaaacaaaattcctagaatactacccagtgtaattagcacctttcaaatcaactgtactaccatttcatgttcttttcaataacttaaaacatatatacttagtgtgtatgcgtttagtttttctttaattcaaacaaagcacattattgtagcaactattcagatgtctaacagttaactgctagtagcgtctacactgtatccctttctaatgtacattgttgttaaatttagctcctattcttgtttctttttttttttttttttttctcttttttttcctttggagacagggtttctctgtgtagccctggctgccctggaactcactttgtagaccaggctggcctggaactcagaaatccgcctgcctctgcctcccaagtgcagggattaaaggcgtgctccaccactgcccagtctcttgctttttaaatttaaatttaaatttgcatgtgttctttattattcttctagttgatgacttacaaaagcttaattatttaccatctttggtttttaatgttttttttttttatgtaaagtttttttttttttgcatagttttgacatgtaattaaaaaattcatactgtttgcggaaggactgtaagtacattatgtggagttaagcaaggctgctttgaaatggcaacagtagatctcagcgtggaaggatgaagaggagcttcctaggctttggagaacatattttatgaatgtcgagcagaggaagagaagactagcaatggttagtgatgccagaggcgctggagatcgcacaggactttgctgagtgaagttaatcatgttgtgtgttgttgaagctttttgtagaagctagcaaagggcttagggtagctgagttttgagagtgatggagaatgaggtaggataggaaagacaggttgcatttttagccctaaggacaaatatgtgggtctgtttactcagttataagttctgtagttgtagcagaattctgttctttttttttctttctttcacaaatcattaaacatttaggtattgaaattttctctcaatacttagaattgatgtcttttgatttttaacccgtttgcttagtcagtcttttgcatgcatttttggt

SEQ ID NO: 22960 - DNA, 1326 bp, Mus musculus
ttctccatcttttctccaacatgttgtctcttactttgtcctgtatttatttctgttatgcttttaggcccaggaaatcgactcttcatttattttatgactgtattaagtccctggctcttcccctatcatagtaaagaagactgtaaatgtattttttagaacaagtgtatactacatctgaagatttcagtataaagctcttggataaacttccctttggagaatcttccagtacaaatgtttataaaatcatggcgatgactgcccaataccacaggtgtagaagtaactgcaatatcatatgtgtttaataaaattttatttattttattttacaaactgtagatatttaaaggtgcttcaacatttctcggccaggctagttagcagtaacttagctgtgcatagaaatgactgcaagcgctctcggtcttagcgccatcttccttgagactcctgcgccatgagagcgaagtggcggaagaagagaatgcgcaggctgaagcgcaagagaagaaagatgaggcagaggtccaagtaagccagcctgtgcacctacgacgcctgcaggagcagaagtgagggatgctgagggccgggacaagctatcggactgtgtgctgccatcggtaatgagtctcagtagacctggaacatcacctcgccgcgatcgcctggagaaatgaccgcctttcttacaaccaaaacagtccctctgccctggacccccggcactctggactagctctgttctcttgtggccaagtgtagctcgtgtacaataaaccctcttgcagtcagctgaaaaaaaaaaaaaaaaaagaaatgactgcaagcatgcagacacactgtatcttgacgtccacaagagtctcaaatgtatttttgaatcataattggtggctcttttccactgtataatctatggtcaaccttggaatggctgttccctcaatatctaatgtaacattttggggatagatcaaataaagcaaagtcaaattgggagtatgtcatgatttataagaacataaagacagatcaaaaaattaaatcaatatatacataggagttcatttaaaatgtttgccggagctagagaaagtacccatggagctgaaggggtctgcaaccctataggtggaacaaaaatatgaactaaccagtacccccagagcttgtgtctctagctgcatatgtaacagaagatggcctagtcggccatcactgtgaagagaggccccttggtcttgcaaactttatatgccccagtacaggggaacgccagggccaagaagtgggaatggatgagtaggggagcag

SEQ ID NO: 22961 - DNA, 1148 bp, Mus musculus
gccctccccccccgtaccccccccccccatccccggccgggccccagaccctcctcccccgccgcctccaccccctccgcacccccacccccgcctcggcttcgccgccgcgcctccgcaacgcccagtctgcacgagcgagagctgcgcgccgcagcgccagcggaggagaggggccggcggagcgcgcagcgcccaggcccccgcgcgcgcccggcccggccctcggccccgcgcctgcctccacttgggagcagccccgggcccccgggtcttggcgagctggccttaggttctttgtaaggccgtgctcgcctcgctttctctcatcgaccaggaaaaaaagagactcgccaacgttgccgcttcggcctcttgttcattgagaaaaaaaaaaaaaggagagagagaaggggggaaaaaggaaatactccgcgtgcgcttctggaagggaggtcatctatcccggaatccgggagggttccaacggtggaggactgggttccaaaatttccccgtggttttaatccaccgattgcttggaagttggactgaagcagagtttggaaagaaggaaaaagtttgcatcaggactggatttatttgcacatcgctggaagaagaggattcaagggagaggggttggtgcaaagccgcgatcacggtgaggagcgtttggcttttccccttctggaaccatagccggccgggagtggggtccgggttcctctctccactaaaccagcttgcttctcgggagcattagggaactaccccgcggatctccttcgcctagaacaggggttcggccatggccgggctacagggtacgcctatgcagtatcccccgtcccacgacagctcactcgtaaggggtttggggcggaggaccgcttcactgcgttctactcctatccctgcattggcgacgattcagtcgccgagagctttaagggagggaaaacacaaagtgttttctaggtcgctgttgcaggctctggcattgctaacctgttcctccattcgtttgaaggctaagttgtagaagagccatcctgaggcggaggcgcctgtggggctgcggtactgggcttctcacctctccacctcaccgggccaggagacccggcaggcgagcggaggcgaga

SEQ ID NO: 22962 - DNA, 1172 bp, Mus musculus
gggccgggcagtggtggcacacacctttaatcccagcacttgggaggcagaggtaagcagattcctgagttcaaggccagcctggtctacagagtgagttccaggacagccagggctaaacagagaaaccctgtctcgaaattaattaattaattaattaatatagaaaataacctatgcagatgcaatagtatcagaaaaaggtgaaatgtttcaaagagagaaaaatattaaagattgtgggagcttcggttattaataaatatgttagccagctttgaggacagtttataaaagcttaactaggccatgttacaaaacaagacatttgaatcattttccacacccgtttgattgtttattcagtgacccaatactcattttgaagctgtagctttgataacagtatgaaagctttgatagagcatctgtctctgaaacatcagtagacaccggcctgaaaagtgggcatccttccaggacgcttccctctcatccttctacagaggaactctgtgaggcccattcttcccggagagatgcaacagatagatattaacccaaacggggagtgtacgacagaccaaagtaaggagggcacgaaagtccgcgttagtgaactgctgagttgtggctggggttgctcacaggaatatagatagtggttacatgcagaaacagggatgtctcaaaacagctggagaggaactaaagaaaacagatgtgatactgaaaattccaccatcaataggtcacaagtcatgaaagctgcagctttccaaaatgttctctgtacaccttggtggtatctctagtctcttctctggaactcagttggtaagagtgtctctttctctctctctctcttatttgatattttctttacatttcaacagttatcctctttccaggtctcccctccagaaacctcctatcctattcccccccccccatgagggtgtttccccagccaccaacccactcctgccttccagccctggcattcccctacactgggacatcaagctcccataggactaagggccactcctcccactggtgtccaacaaggccatcctatgccacataagcatctggagccatgggtccctccatgtgtattccatatgcctctgtatttgtcaggatctggcagagcctctcaggagaca

SEQ ID NO: 22963 - DNA, 1183 bp, Mus musculus
tcgatttcgttcataatggcggttaactccagtatttctctgtataattttttgtttgagtgacctgttaattcttaatagtggggatttcagttttagtaatgattttcctacaaatgcatatgctgttgcattttgtgaatagatgttaaaaatcacaatgctttcttggtggatttttcctttgatgagtttaaagtggtgtcttttctatctcttttgattaatcttggtagctatttcattagacattagatttagaaattagaataactacaccatcttatttcttaggtacatctacttggaatatctttttccaattctttactctgaagcaatgtctattgttgatgcttagatatgtttcttgtatgtagcagtaagatcttgactgttttcatttccattctgttagcctgtgccttttttagtggggaattgagtccattcatattgagagatattaatgaccatgaattgttaattcttgttattctgtagttgttgtcgttgttgtcgttgttgtcgttgttgttgttgttgttgttgttgttgttgtcgttgttgttgttgttgttgtcgttgttgttgttgttgttgttgttgttgtcgtcgttgttgtcgttgttgttgtcgttgttgttgttgttgttgttgttgttggtgatggatgaagtggtgtatggttgtgtttctcttcttttgttttactggtgtgaacttatgtcttgtgtctgtaactacttacatgggtattttgttccccattctaaggagggacgaagaatccacactttggtcttccaaaaactcacgtgatatgcactcactgataagtagatattagcccaggaacttagaatacccaagatacaatttgcaaaacacatgaaactaaagttagctttaaggtagatttttggaattttcagggcttactgtaataggataacgggtttcttgtggggacaaacttctctagctgttgttgactgtgttcttaacatgttgtttatgcatctcagtttgttatgactgattataagtcttggcatcactgagttttgttttatattgttttgttttgtcattgttgtttttgtatgggtgttttgttccttggcttctgttttctctctgtatttttagtcattgtggcctagactagccacatgacaca

SEQ ID NO: 22964 - DNA, 1193 bp, Mus musculus
tggagtctaccttcttgagttctttatatatattggatattagtcccctatcccatttgggataggtaaagatcctttcccaatctgttggtggtctttttggcttattgatggtgtcttttgccttgcagaagctttgcaactttatgaggtcccatttatctattcttaatcttacagcacaagccattgcttttctattcaggaattttccccctgtacccatatcttcttaaaagagtgacaaaatactcacaggaggaaatactaagacaaaatgtggagcagactgaaggaaaggctatccagagatggccccaactggggatccaacccataaatagtaaccaaagacagactctatgtgaattccaagaagtgcttactgacaggagccttatatagctatctcctgagaggctctgcaagagcctgacaagtacacagatggatgctcacagacaaccattggactgatcacagtgacccaatggaggagttagagaaaggactgaagggtctaccgccataccacccagaatgtacccgatctcgtctgatctcagaagctaagcagggttgggcctggttagtacttgaatgggagaaaggactggcacctgaaggggtttgcaaccccataggaagaaaaacaatgttaaccaaccagaaaccccagaactcccagggactaaaccaccaattaaagagtacccatggctccagctgcatatatggcagaggatgtcttggttagacatcagtgggaggagctgtccttaagtttgaggcagatacggggtgggggggggttgttatatgctccagcgtaggggaatgcccggttgggaatgtgggagtgggtggatgggtgggtaggtaggtgggtgagccccctcagagaagcacgaggagggggatgtgatagggggtttctgagaagggggaaagggaaaaacatttgaaatgtagataaagaaaatatctaataaaaaatattaatatgaggaattgttgcttgcccatgggctgggattcaaattgggccagttattggttggccagtcttttagtctctgaatttcttttagacaggacaaattttagatcaaatgttttatgggtgaatttgtgtccttttccctccattgggtatcttgcatggctacaagagatggcttcttaaggttcca

SEQ ID NO: 22965 - DNA, 1214 bp, Mus musculus
gcatgctcattagaaaataacatgaaacttcaaaccaaactgaataatcaattttggtaaagtctgaaggacatcaatattccactcgggcaggggaagaggtgctatatatgtgtatatgccctgctgaatttcagacaaaaactattgggaaggagagacttgctgattaccccccttaattttttttgtgtgatgctctgttatttccttctttcctctctcccttgcaggaggtaaaatgcacgtttgctgccccccagtaactttggaacaggaccttcacagaaaaatgcatagctggatgctgcagactctagcatttgctgtaacatctctcgtcctttcctgtgcagaaaccatcgattattatggggaaatctgtgacaatgcatgtccttgtgaggaaaaggacggcattttaactgtgagctgtgaaaaccggggcatcatcagtctctctgaaattagccctccccgtttcccaatctatcacctcttgttgtctggaaaccttctgagccgcctctatcccaatgagtttgttaattacacaggggcttcaattttacatctgggtagcaatgttatccaagacattgagactggggcttttcatgggctgaggggtttgaggcgactccatctaaacaataataaattggaacttctgcgagatgatacctttcttggcttggagaacttagaatacctgcaggtcgattacaattacatcagtgtcattgaacccaatgcttttgggaaactgcacatgctgcaggtgcttatcctcaatgacaatctcttgtcaggtttacccaacaatcttttccgttttgtgcccttaacgcacttggacttgagggggaacaggctgaaacttctgccctatgtggggctgttgcaacacatggataaagttgtggaattacagctggaggaaaacccctggaattgctcctgtgaactaatttctctcaaggattggttggacagcatctcctactcagcccttgtgggcgatgtggtctgtgagacccccttccgtctacacggcagggatttggacgaggtatccaagcaggaactttgtccaaggaaactcatttctgactacgagatgaggccacagactcctttaagcaccacggggtatctacataccaccccagcttctgtaaactctgtggccacttcttcctctgctgtttaca

SEQ ID NO: 22966 - DNA, 1290 bp, Mus musculus
ttggtctataaatgaaatggaataatgaatccagaactcacatcctacacattctatgaagttataaagtcaagaagaggaaaagcggctacaacgccgagcggaggaggtaggaacctgatttccagaagcagcttgtaggcaccatggccgggaccaccaccatcgaggcggtaaagcgcaagatccaggttctgcagcagcaagctgatgatgcagaggaaagggccgagcgcctccagcaggaagtggagggagaaaggcgggcccggaagcaggctgaagctgaggtggcctccttgaaccgcaggatccagctggttgaagaggagctggaccgtgcgcaggagcgccttgccactgctttgcagaagctggaggaagcagagaaggctgctgatgagagtgagagaggtatgaaggtgattgaaaatcgggctctaaaagatgaagaaaagatggaactccaggaaatccagctaaaggaagcaaagcacattgcagaagaggccgataggaagtatgaagaggtggctcgtaagttggtgattattgaaggagacttggaacgcacggaggaacgtgctgagctggcagagtcccgttgccgagagatggatgaacagatcagactgatggaccagaacctgaagtgtctgagtgctgctgaagaaaagtactctcaaaaagaagacaagtatgaagaagaaataaagattcttactgataaactcaaggaggcagagacccgtgctgagtttgctgaaagatcggtagccaagctggagaagaccattgatgacctggaagataaactgaagtgcaccaaagaggagcatctctgtacacaaaggatgctggaccagaccctgctggacctgaacgagatgtagacctcccccatccctgccccgcggccattcctccctctgaccttgactccgccagaggccagcctccctgaagctgaccttgaaactgagggctgatctttttaactgaaggctgctttccctcctgccacccccttttacccctcttgtctttttcacaaaactgtgtcagccttttcccagagttccagttggaggggctgaacacctttgggaacaatatttaagggaatgtgagcacaacgcagtgtcttcgatgcagttatgatacgcacattgtgattactttctgtcttagcaaccatttttaacattccaagcacttctgccgcttggagcagcacattttagcctaatggatactgtctcgccatggaggagaaacccaggattgggc

SEQ ID NO: 22967 - DNA, 1217 bp, Mus musculus
tccactcacaaacacctatgcggacaaatacagtccgtgtccagaacggaagctaattactatcttgtaccttccccggttggatggtgggcttgcaatacaggacttactccctgtgtatcaactaaggtttttaattcatctcatgatttttgtgtcatgatccagctgttaccccgcgtatattatcaccctgcatccagtttagaagaaagctatgctggccggcggtcaaaaagagaaccaattactttaaccctggctgcattcatgggaataggtatggcagtaggagtggggacgggagtgtcagctttgatagaaggaagacagggaattcagtctttgagggatgctgtcaatgaagacctagcggcaatagagaagtccattgacgctttagaaaaatctttgacctccctgtctgaggtagttttacagaacaggagaggtcttgatttgttgttcctaaaggaaggaggactgtgtgctgcccttaaagaagagtgctgcttctatgcagatcatacaggaatagttagagactctatgcagaaactgagagaaagattagagcgaaggaaacgggaacgggatgttcaacgggggtggtttgagtcgtggtttgaatcacgaccatcttggataacttctttaatttccgctgtagccggaccaatccttatgatatgcttagctttagttttcggcccttgtataataaatagaggaatggctttcatccagagtaaaattgatacagtaaaactcatggttcttcaaaggcaatatcaacctatagttcaggtagatgaagagttaggggacaccaatctctaaaattctatgattagaattagtctaaacagaagaagaggggaatgaaaggaaataaaactgtaattcatgtaatgtatgttaaatagcccaaagagttgtttctgagctttgaaacctggggctgagaacatagcagaacagaccaggacatgcccgggcaagcccatcgcctccctagctcccacccctctgacctaagttaaatgttacaggctgctgatgtttaaatggaccaatcatgtgaaaccgtgccaattcctcccccagccccactccttttctataaaaacccctagcttccaagcctcgtggtcgaatccactgtctcctgttatgtgagatacgtttcgacccggagctccgccattaaaaaacct

SEQ ID NO: 22968 - DNA, 1440 bp, Mus musculus
ctttggctttttcctttttgtctaattatttatttcaaatttagcaggaataaagtgaacctcaccttgggactgaagctgtgaccagtcagaataatgtcaaagtgcttacagtgcaggtagtgatgtgtgcatctactgcagtgagggcacttgtagcattatgctgacagctgcctcggtgggagccacagtgggcgctgcctcgggcggcactggctgcgtccagtcgtcggtcagtcggtcgcggggagggcctgctggtgctgcgtgctttttgttctaaggtgcatctagtgcagatagtgaagtagactagcatctactgccctaagtgctccttctggcataagaagttatgtcctcatccaatccaagtcaagcaagcatgtaggggtctctccatagttgtgtttgcagccctctgttagttttgcatagttgcactacaagaagaatgtagttgtgcaaatctatgcaaaactgatggtggcctgctatttacttcaagtgttgtttttttttaaactaattttgtatttttattgtgtcgatgtagagcctgcgtggtgtgtgtgatgtgacagcttctgtagcactaaagtgcttatagtgcaggtagtgtgtagccatctactgcattacgagcacttaaagtactgccagctgtagaactccagcctcgcctggccatcgcccagccaactgtcctgttattgagcactggtctatggttagttttgcaggtttgcatccagctgtataatattctgctgtgcaaatccatgcaaaactgactgtggtggtgaaaagtctgtagagaagtaagggaaaatcaaacccctttctacacaggttgggatttgtcgcaatgctgtgtttctctgtatggtattgcacttgtcccggcctgttgagtttggtggggattgtgaccagaagatgtgaaaatgacaatattgctgaagatgccgatttccactgtaaaaatgttcacgagctgatggagtgtatgaacacattctgtaaactgtgatttctattgctttcgttggtgtgtaaaacgggatttttttaattgaaatttgtgtttttaaattgtggtttgtttttactgaatcatttcattttcgtgtttgctcgctggatttagtaagaagttgtgtgtgggggcttaggtgaagttaaactgccttttgaacctggtatgacttcaggtttattttactctaaaacccattaacatgagttaagaaaaatgttactttctttggatctctgtttattaaagtgtgacaattcagatggagtgttttctgataagattattcctaatccgtgagttcttaacagttaacaggtggtggccactctgttaatgtgcacaccctgtaagaaagaactatccttggactgttcttaccatgtgaccccctcaag

SEQ ID NO: 22969 - DNA, 1440 bp, Mus musculus; identical to SEQ ID NO: 22968

SEQ ID NO: 22970 - DNA, 1440 bp, Mus musculus; identical to SEQ ID NO: 22968

SEQ ID NO: 22971 - DNA, 1440 bp, Mus musculus; identical to SEQ ID NO: 22968

SEQ ID NO: 22972 - DNA, 1440 bp, Mus musculus; identical to SEQ ID NO: 22968

SEQ ID NO: 22973 - DNA, 1440 bp, Mus musculus; identical to SEQ ID NO: 22968

SEQ ID NO: 22974 - DNA, 1440 bp, Mus musculus; identical to SEQ ID NO: 22968

SEQ ID NO: 22975 - DNA, 1123 bp, Mus musculus
atatagttgctataagctttcaggaatgggggtgggttactaatgtcttatgttatatgaaagtagttaaatttatcctatattaagaaggaagcattattgagactatatactgttgattttactaaaaactctaagatgtccattttaacaggcaaacctagcacagaaaaccagctggattttccctgtgcatggtttgaagagtcagtcctacataattgctgacacaatgcaacctgcaactgcccggagaaagaacagttcactaaaatttgttgtatttatcatccaattctgttctgtaactggtaacactagtttgtctggctttagagaataggtgaatctctaaaacagtagaaacagctcagttgggcaagggccgttctagtagcatgcctgctccttggagttttccagattattttgtatagcctattccagattcttgtctaagattgctttgctctgtgcactcagaattggtgtgcctttctatttgtgtaaatgatatataatacattgctagttgtctaggatctattcaggaagtgcgtgctgtgaattttaaagtatgggaagattgttaacaagggtttcaatgttttgtttttttttttctggtaagctaaaatagaacattgtgaggtacctggtttattgtggttacagacttggaataatgttcattgttttgtgctaataaattgtgttaaaatttggtgtacatatgagcatttttaaataaagttattttgtagcactgatgatcttgtatcttgttttttcctgtaagtggcccaaatatctttttcttgttgagggcatggggagaccagtcttagctttaaccatggagtttgtcttttgccttaatttacagggaagaggaaatcattgtgtgtcctgatttcaaacctcagaataaggaaaattagcagggtaccttttacaagttggtcagaaagcaacaaattgtgcttgtgtgtttgacttgggttcttaggattttgtaggaaagtctccaggatcaaatgctaagatgatggacgacacaaagcctatctgcccactcaggactagaacactgtatgtatgctgcagttaagacttggagact

SEQ ID NO: 22976 - DNA, 1914 bp, Mus musculus
tttgtcatccccccccttcctgtttttaaattatctctgggttttgagtcagtgaaatgattttgcttatcagtttagtggcgtgataaagcatatctgtgaatcaaagtgatcagaagtaaagtggatctccaagttgttgggcattcagcaccgccatgcagagggttttggctggcatttaacagcttttgtgcttgcctgggcttctaactgttcctcaatgagccctgtgatttcctggatggagacagacaggcataacctccaagaaagagaaaggcttgaaaatttactcatgttctgttttttgcctgcctctttcccacaggtatacttcagacggaattacccagatattacattcaccagccccgcggttatgaacacctccaatggacagccctcggccttaacaatatttgaaacagcattgtgaccaccaggacatcatcgtaaagtctgtcttgaaggtgttccccaccccgcccaggggcttgcacttggaggactacagcacacctggtttcctttctttctgccacagatccttcacagacgagagactgttgtctttggatttttccctccgactttactctgtgatttcaggttctaacaacatggcctgtcgttttattttaaaagttcctgctgttctttacaaatccagttctgaggtgcaggccaccaacagcagcgtctaccaggttttgtgccttaacagtctcaagggctgaagcccattcattttataagctgtcaccatgggctgctgcttcctcttgccttaaaagtacactctccaggtgtgtcagggactctgtttacttgaagactgtgtgcagttgccagttcgtctccctgctgtctttgagctaggactcataatttccctacaaaggtctctggttaaaatagaataggtagaattaacaagaaccacaacaacaacccccccaaaaaataatccatataatttaagtatattgctggagagagactatcccaccacctatacatctacaaagatatatgtctaaagttggaaaatcaacttctgctttctcagaatgggagaccgagcgcaggttaggcacccctcccccttgcatctgtgagtccctctgggcggctcgtgtactgatcggatctgtgagtccctctgggcggctcgtgtactgatcggatcggcaccatgacacttcccctagactgtgactcccaaatgcataatattaatctcatttggcttctggtttacagaaggtaaagctcctattggctgtgagccgttggtgaaatcctttcacatcgacaccaaaagctctccccagctagtgaaaacctgaacatcgttagagtcaccgactttacatgctcagaatgctgtgcacaagccacgctttctaaagcccatccagattagtttagctctgaccactaatggcaggtcttaaggaccttgtgattagtcaatcaacaaaccacaacacttcctaggacctgttgtactccgtgtaactataggtctgaatattttctgggtggtggtggcaagggtctatgtcagggttcaagttactaaaggttttactgtcataatttaaaggggactcttcacgacccgtcacaataaaccattctcaagttatctatgtgtgtgtgtatatatatctcaggtttttagactggttgacagaacaaagcctgttttaacagtggaaccttaaagagcacacctacaccaaaccaccaaaaccacgccgagcacagtgactgtttgactcttggtattcagaagtctgtaatgaatgtaattatgtttaggccagtaaatgatgtagattcgtcctttattggtagtcgcagttgatatttcaagagagtgagatgccatgctgacaatattaa

SEQ ID NO: 22977 - DNA, 1115 bp, Mus musculus
aggagaggctacagctagggcccagcttttgcttttccctttcctcccttcctcccttcctcccttcctccctccctccctccctccctccctccctccctccctccctcccttccttccttccttcctagaaaaaaatgtttcaccggtttctctttttaattctacaacacttcatcaggagagggaagattttcaaaactgactttgagctgcccagaaaataacaagatgaaatattatatcacacatgatgattttggtagaactgatagacgacgattgactaaagctgttcgtacctgatagtggaatgcaagcgagcaggaagacaaggcacctacagacaccgggcctcacgttagctataaaaatcagtcaatgatagcttgtaggggcttgccccagggcctctttatagcatcctggccactcagccgctcttttatagtgtgaagaaaaggccagacagatctctcagaggtgtggtgctgaaggctttttagtcagccccctgaggaaagtgtgatttcacttgaacgatagctggaacgtcacagattgtattggtcagtggcttttataatgatgtaggaagaaaataatgaggggttctgtgtctttataaatggcatcaggtcatttatagtaataataataatacaaactatatttgtattaagtagtgaatatacacattgaataagaaagggacccaaccacagaataattgatctgttgtactcagtctctctcattctctctctctacatacctgtcgccatctttatcttgattctctttctctggttctcccgctcacttttttgtgttcgcatgtacaacaaacctccacggttggctctgtcttatgccagactttgcctgtgatagttatcagcagccacaagtaggtatttctcatatgtggggtccctttagacctcattgttatcccctgattgggggatgttttgtgatttccctccaagattctataatttgtcagtttaatattcatataaagcgtgttgatttggatatcttccttcctagattcccaaatgaacattcagttttctttccttcatgtcttggcttgcatgtcacggtgt

SEQ ID NO: 22978 - DNA, 1168 bp, Mus musculus
agaggcctctggatgagggtggagatgccacaccgtttgaaggcatcaggctctttccttctgagcctgtgctctgtgtggtctcctctgtgttgaatgtcctctgccagttctaaagctcctgacatgctgtggctgtctgctgactcttttcccggcaggatgagcaagcctttctgctccacagcctttctgatcctgtctctttccacctctgccaactgtgtcctgtcagacgtaggtgatttcagtaccttgtgcccccctcaatataccagaatcatttttgggttttcttcagcagtcattcacaatgttccataatacgcagagttggcagaggtggctgactgttcattcggccttctatgtgtgtgctgcatgtaggacccacccatgctgcatgtaggacccacccatgctgtgggagcagaggaccgcctttgactctgggtccctgtctgtgcctgtgattgatacacaaaagttggctgccttccatgtggcttatctgtcacatctgtccccctcaggagtaaaactgcggctttcacggatgccaggatccggaccatgaatgaagtcataacaggcatgaggataataaagatgtatgcgtgggagaaatcgtttgctgacctcattgccaatctgagaaagtaagtcttggggtagactggactgtcttgtgcacttttctatttcctaattttaccgaatgaatttagagttctctttgatctccctggtaactcacctcagatatgatgtggtcacctgctgtggcagagtgttaagtataatgacctgggacatcccttttaacctgggcttctgtgtgccattattcccaggcaaaagctgcatttctcctcttcttgttcgtacctgtctgtctctgtctgtctcgatctcattctggttttgatggtgctggggactgaaccaagagattcacttgttctggacaagtatcacagcacacaccactgagccgcacgtccagccttcaggtgcactgccatagtcgaatggagttcaaaatgttcctgaatgcttcaccttccctataaataatgattccaagatgcaaaactctgagataattacattggtgaagctctacttgatgtcattgttcattgggaaggtggtatgaaccggttgc

SEQ ID NO: 22979 - DNA, 1348 bp, Mus musculus
attcagctggagagcagtccagccatcctcagggtttctttcgcctctgtctcctcagcaatgggattattggtacgtgatgctgtgtatgatgtgtgtgtgtgtgtgtgtgtgtgtgtgtgtgtgtggtcagaggacaactgggaggagttgtgcgtccctccaccacgtgagtccaagggattaaatccggttgtcaggcttgctggcaggtgtctttgcttgccgagccatcttgctggcacaggttggaccatctatgactaaccacacacctccgtgcggctttctcacctgtacaacctgccgttctctgagtcttgatctcagacccacagactggaagcccagcaacagggatctggctttacagctcgtgggctgcacagatgttttcttgtagcttaaaattcaaggtctgaatgttagagagtgtagcagcaaaggaggagggagatttcaaaccatgccttttctttctggtgctggcagcagaagtgctgagggggcagtgatggctggtgggcactgtgctgagccctgcagtctcatattggactgaggtgcatatggtgaagccctgatggaagaagccatccgagtggagatgctgacatcttcactgtcagaaggccatcagtgtcttgagaagttagtgggaagtcaagagttcccagagttgatcagaacttcacagggtcccgactcagactgcttcaagcctgtaagattggggttcctaggacactcacttctgacacagtgaatataaattcaggacctcctatgacccgcttgggcttaatagcaatgtctcacaggactcaggaaagtgctatacacagaactatgatttttctacagcatgtacatactggttgaaatcagtcaggatcccaaaagcacagctttctggtcctatcccatgagctgggatttgccactttctggacatgctaatggctggcacattgtcttataatgatacccagagtgttggcaaccgagaaagctcataaaagcctcacctgttgggcttgctttctgcaggtggcattgatgtgcgtgggtcatgagatccatctcagactttctgccctctaagccccagagtctaggcaaagtccatgcctgtcaatacatgattcgtccatccggggcagtttccatcgttggttttatgtagtataaactttccaggggacctaatgtgagtcaccttgttagcataaaccatcagaccctgtgacctgggaaattcccaagacttagaaaagctagggtcaaagtccagccaaagtcaccattgcatgagtcccctccctcccaccactgctatctagatcct

SEQ ID NO: 22980 - DNA, 1207 bp, Mus musculus
ccttcactctagccccacccacaccttcactctagccccacccccaccttcactctagccccacccccaccttcactctagccccacccccaccctcacatgtcactctctactccattcccacccctcaccacatcactttatagtccctccccctcaccacaacactctagccccatccccaccctcacacatcactttctggcctcatccccaccgtcatacatcactctctagccccaccccatgtatgtaaaggaagctgttgttatagatgggggggtgtatggacaagaatcttaataagaaaacctatatatgtatatagtcctacattcttttttcttaatattagaaacatggtaaagcatggtagtgcaatgtacttataaaagtacgtgatgtggatggagggcagactatggacataagcagaaattccgtctcttgctgtatcttcatcagcatcactcctttatataacagtaatgaaaatgacttccttcaaggtcttgtgaagattaaacacaatgtatccaaagatctgggatgtgattggttaaaacaagggatgcatgtctacggccacaccactctgaatctgcttgatcttgtctggatgctgattggtttgctcatagatcttctctctgaacgtatatgattacatttcctgtaaggatggtgttgctcagagctggagatgaggatcagtggatagagggattgcccagcatgcaggagtcgccagtgtcacaaaaatcctggcatgaggccaagactgcctccagaccccgtctcaaaaaatacaaaaagaaaataacattgatttgatatacaccgacagtaggtggatgtggatggattattttgcaaattttaaactaaaaaaggcaaaaagtgttgaactgccaacaaaaaaagaggttgatgccaagagctagagaagaaagataccaggaagcagatgggcagggccaaagagaggggccaaaggaagttaggagaaaggaggagacagagacacacacacagagacactgacagagacagagagattactcctgggcagcagtagctggatcaatagccaggtctgttctacagtctacaccctttattgagaaattgcctcctaccaagacagctccctgtaactcacgcactaactcattctatgcctactaagtgtaagaacaaacaccca

SEQ ID NO: 22981 - DNA, 1164 bp, Mus musculus
tcactggacacacttatacatttacatctgtgagtcacatggctggtgtttgaaaatggaggcccagggtagatggatagatagaaggatctggaagtcactggaggactgggctggctgaagtcatctagttagagatcagaagacccaaggtcaatactagccgcccccgcccctccccccataactttattcctcaagaagggcaggaagagagtggcaatgagggtgacttaggtaggcattgtcttgaacagcaagggggaaaaggttccggaaaggtggcagtggtcaagtgtatcagatgttcgagaggcaaagaagactaggatgcagatggggaacgtcccgtagctgcacagcagttggccttgacatcgaaacctcaaggaactgataaagaccacatgtcagtttgaatgagttgagagccagtgaggaaatgctcttaaccaatctgttatccatgtgtcctgggaaggaaagccagagacctgatacatcagttgaaatgtagagacaagagaaatgtgtcttatgtgggagttagcatgtttgggtgctgatagaaaataaccagaaggtagaaaaaaagacccagaaatgggagagtgctctgtggtttacccaaggagtcaggtttcccacagactcccgtcttctcaaagactggagcgtcccctcctccccaagcaggccagactttgggccaccgtaacctacagaagtgtttccaacagttgtgctgattttcttccactggggccagtctgtttgtattcctgcccacaatgctttgtagtagaagcaaatcagatggcagaaagtttcattgtagaaccgtggtggaccaccgatctgagtaagtggtgtattggaaacatggaagtgttgagcggtttgtaagtggcccaccattcttcggtgtgaaactgatctctctctctctgtttcagtatcttatcccacctcatactcgtgtcagagagcgcttcagactctgaaacgagtattgtttcttcaggtcatctttgagattctgactttctgctttggttcccatacctttcatgtctacactcacagcacatgtataccattcagtcatgtgtacatcctcgtgtaagtacatgtacataagtatccttcctttcaccacctcct

SEQ ID NO: 22982 - DNA, 1191 bp, Mus musculus
ggaggagctgtgatctttggtggattgtgtctcagtattcttaaaggagtgtggacagctgagcttcatttttggaggaacagttatgcttagactttggtcagtccattcacttgcaagtatttctgtaccagtgtcctcagctctcactgcaggaggggagaccgtcttccaggaaacttaccagcaggtggtaggctgtatgtccaggtatagactggaagtatttttgttgttgttttatatctataggagaataccaatttcacttgaatttaattgttaaactaaacagagtaagttaaagtatatgaaagcggctctgtggttctctagacaacactgttgaaagtcagtttgaaatgctttttaagaaagtgaagttccaagttgtttggtcgaaattccctgtcacaaaattggttagaagtggaaagttgctctgtcaacatgggcagagcattatggttgcctctcgcaagcagtgcgctgaggcagctgtctctgttgttttccttgctgggttttggactggctgttccctggctgtttcttctgtgagaagaaagtagaggcttgcaaatcgattcaactctggctgtgtaccttctatcattcacttaataagatggcacttcctcctgagacattcccgtccctcttactttaaagcagatacttaagaaatgtactagtcagtatttgtatactgtataatttttgccttaaaaatctgttgctaaacaagaatattgaatacttatggaactactgatgctgtgttgaaaacttagaagaattactctggtaagaattattgcctctattctagaaaaaaaaattttaaacattgtgagatattttaagcataaaggtctaatatattgcttttatgaaattaaacattttagttaattgtgggaaggaagcatgaatgtagcagccaagcacaaatcattttgttaacctatagtcatatcaacttgagcagatatagaaaaagattttgttaactgcaagaacatgaattacataagttgagttgggcaaaacattttaagtgctttttgcctctacttaggagcctttttcttaccaaaacacttaacaatgcatttcaaaatacctttcagctttcattttgcttcagtgtctcacagttcaaggcaggcaagaaaactcacagctttt

SEQ ID NO: 22983 - DNA, 1921 bp, Mus musculus
ctttcagtctgactcactccttttgtgatgtcactgacagttgtgaactggagtgacggcacctctgctttgcacagcccagtgttcaccagcagaacaaaggaggcatctcggtgcttacactcccacttagagcgatgtcagctgcccgtagtgtgggttgaaggtgggctgcatggacacaggtcccagatctagctacctcctaacttgcttcccagaagggttttctttttctctttttttccccttcctacttgtaacaacccaaagtaactgaggattaggctttgtcattgcaaattttggtgccaaaggcatatgccgtggcaggaggttagtgaggtaaccctcctgtgctcattagtgaggtaggggtgtccagcctgccccaggcgagtcacagcgtcagaacagtagtttctgctacctgcctgacattgcaaggcaggcactgtggaaccacattactgaaaaagcattctctgcctttgtctttccctctgtttgcagagccacttccacattccaatttctctgtttaggaactgcaggtaacctgtgtagtaattctgggaaaaatatgaccaaaggtcactttggctgaactccgttctgtccatagacgtcccctcctctgtggtgagcttcctaagtacagtgtcactgggctgtgtccagtgctcgtcgctctggaagaaggaaaggcacctgctgtggggccacggggccactccttttatttctcagctctaaaactttactctttcttactgtgaatagaagaaaacctgaaaaacatctcagtggtttattaatgtgaattggatgtaacgtcttaagttaaaaatgtagtgagtgttaaaagtctgtttttaaatagcagtatgcagatttgtcactggagttctgataatgaatggaattaaaattcttttttttttaacataagcaggcatggtggctcaggcctgtaatcccagaatgtggggctgcaatagcatgtcactgtgactttaggccccatttcaaaaataccaaacttaaacacatccccaaaacgagtgtgagagaggattacagataactaagtaaaaaatgtcagtggtcaccgttatctattcctgggtcagaagctggcatgtgccatgaaggcggcaagctgtactaggtaactgtgactccgcaggccctgtgggtgccgacctgccttacagatacgtcctgggtaagtggggggccaagatggtttgcttgactgtactggactttgctgtaggaggagggagggaaatggtaatcgctaagagctcatcttttccagatcgtatcatttctcttctattagtggcagagttgattctgtaatttcaaatgatgttcaaaggggaggtatttttttttaaacagatgatctcatttgctgaatgatttaagagtaaaatttagccactgcgtggctttgtgtatagtaacaacaggttttattgcactatctatggttgaaatacctgtgcaaagaaatgcagggcacaggggaggtaaaaattcaagatgtttgatacgttaaattattactcttaagtttatatttgttttaaatgggacacatcttacttaatccatctcaatttagtgttttaataaaaaaagaactaaaattatttcaacttgggcttacatgtgtcaatatgggcaatatgaatatgggcaatatttttatgcccgtgtattttcacatttaataaaaatatttatggtcatatccactacttgcttcttattcatgtttagcctttgacttaaaattttaagaaagtccatcttagaagtctgtttctacctttatttcacacagcatcagggacagagttgatgaagggctttcatttatgtgagtttgccaggaagagcagagaac

SEQ ID NO: 22984 - DNA, 1183 bp, Mus musculus
aattttttttttgatagcttccttttctcatcttgtgatttgaaagattaatttacatgtctcatttctagatgagtaacatgctggaaaatccagattttttgaattgtgtctttctttgcaaggacatttttaaataaaatgacctgggttggatagttttatgtcaagctgacagaatctaaagtcatctgagaggagggagcctcaatttagaaactgtccttataagatggggctgtaggcaagcctacaggtaaattttcttgagattgatagtgggagggccaagccaattgagggtagttccaccgtccctgggctgctgtcctgggttctgttaagaaagcaaaatgaataagccatgaggaacccttccattgcctctgcatcagcccctgccttcaggtccctgccatgtgagttcccattctgaaattcttcagtgaacactgtgagagtgtaagccacataaaccctttcctccccaactcgcttcggttattgtgttacatggcacccattgataaccctaactaggacagaaatcggcacccggagtgggctgacgctgtggcagacctgaccacattgtcttaggggagatgattagaggttttggatcgctgaagtggtcttgtaggaagtgttccccatgtcacacacaagctgctttctagaggctgtacagcctgctggtagccaagctcagcaatgtccatctcccaggtgttgctcctcctaaagacatgaagtggtcagggagagcagctgaggtgtggcaccatcaagagggcacaggagaggctactagggaatgtgcagcccagttgcagcagagaccccagcgttttggagtcaacagaagcacgggacaaacagcaacagcagcagctgtgcagtggagctggtctgagcctagaggacaagctgtgtgtgccgcagagagcagaggcaggggagtgacccaagcccctgcaggagtccagaagatcatgagtgaacactgggcattgagttagttatacaggtggagttgtgtcttgctttgatctatgactctgccctggttcttccctcttgaaataagattttttttttaacactataggggcctaacttgaaagacttatgattttaagactctggattttttttaagactggatttttaaagtgtttga

SEQ ID NO: 22985 - DNA, 1129 bp, Mus musculus
tggctccagcgccaagatgacggaaatgttccaagtcagacttctattcccaatttttttttctaagatttctctattgctattccagtgatatccctaaaagacatctgtgtaggagaacttttaacaacgtggaggaatgtaggtgcattggaagtattgagtttattaacatgaaatgtgtgtgactatcaaggtacactgtttgccttttacatttaggttgaaacctaaacatcactgcagataaatctctttgctttgaaggttttattccccaagttccttatgtgtgctataaagaataattaatataatgaaaaaatcaatgctgtgtataaattatttaagctttactatcgttgtaattttctcttcaacacctattgatctgtaacaattcatttgttaatttcgttctactaagatattcattgtgttaggtctgtggtagtgctgtcgctgcactttcacgagcaagtcatcaatgactaacgatacttggaactagttaacttactagtgagtggcctgaacggctggatactttgaaacattttcctacaggaaatgtgtgggtgaccactgttatatttagggtgtgtatttgtgcacattgtcaattagaactgctttacagttctctgggttgttgtgctccaggtttgaatgccttttctttccttttctggtgctggggatagagtccatcacctttccagtgcttggcatggcactctaccactgagctatggcaccagcatttgcctgaactcacacccgttccatcatttttcattctttttcctctctcattccttccttcaatttaacagttttacacattaatgaagctcaccgcagtatttaaaattgtgcatacaatatatactgatcaacttttcccaacatttgatgtttactattctatactggaattaacttcttgtctctcccctcccctcccctcccctcccctcccctcccctccccttccctttcctcccctcctcttctctcacctcctctctcttcctctcctttctcctccactcctctcttttcttctccccttccctctcatcttctctcttctttaattctctttctcttctctccacaccccacc

SEQ ID NO: 22986 - DNA, 1324 bp, Mus musculus
aaaccacatatacatacacaaacacaaacacacacacacaaccacacacacatacacacacaaaaccacacacacacacacacacacacacacacacacacacacacacacacatccctaaatacttcctataaccttctcagactgtgtgttacttgtatgtgtacgttttcaggaaccaagggtagtgactgagcacttggtgtgctcttccctggaaagactctttgcccactcatcattcctcagttgcctgcagcacattgtgtgtaactgacgccggctgagtttgcccttgaccacatttgcacgtctattgttgatcttctttagctcacagtttgtcagtcatacttgtgagacttatggatgtagcccttgaaattggtaggggacacattctcacagcaatctctctgatcttctggctcttaaaatctttctgctttttctttcacgatgatccccaagccttaggtatggaagttgtttcataggtgtatcagttgggactaggctacagatctcattttgattggttgtagttttctgtaatggtctccatttttgcaaagagaagcttccttgatgagtgggaagagccacacttacctgaggatataagaacagatacttagaatgtagttaaggattatgctggtttaatgaagtaatggttgtaggttttcctcctaagatgcctggcatcactagacctgagtatttggctaagtttctggtaccaggtatgatcttcatcttgttgagtgggtcacatgtccaagtagagagcagttgcctatcaccaacgcatgagtgccattactgtatcctagcttccacaggaaggaagcactcaatagtcctgtccagccatgatggctgtgaagcacactaatgaccagcatggcacgataacatacctaagtgcttcaatggactcttcaatgccactgtcacttgttaacttaatcaccctaatggtagataccagatgactggagacagtttctggctcctgggcaggctaaaatgaagaagagaaagtagctacccggcttcactgtttttctcatggaaactttaataaaggctctggaccatgtttttaccctcctttttttctgtcttctgacatcatctgatgctcctcatgtgaccatacatggtgttctatctctcctgtttccgaggatctgtgtgcaaaagaaaaatctgtcttccttcataatgctcattctcaaatatgattccacaaattctttgtgtgtgtgtgtgtgtgtgtgtgtgtgtgtgttaggaaccaaatctaggtcctctagaa

SEQ ID NO: 22987 - DNA, 1102 bp, Mus musculus
atttccaataaatcttttaactggattctcgcatggcagctatgtaatggtaatcagtcacagaatgtaacacttggatttaattaagaatataatgagaatgtaatataattaacattatcactgaattccctataatttattttcttttaaaaagatactgttatgtccagtataaaaataggcattaattggatgcttatcctatagactcactgagacttctatcccaggctcactggcagaattaaagttttacctttctcagtgtgcttatatttgtaaccttctgtatcccgttgcttggttgattattgaaacaatggtccctaagattggaatttcttcatcagtcttgtgttggggcaaaggaaaggctgagtgaggtctgtcaccaacccaggaaggaacttgtctgacagcttatcatcctgccttacatgagagacttgcgcaaacacagtgttgatagggaccaagaatgctaagttatgtcctccatttaactgaaacctcttggcaagaccctttgggactggggcttcttggacccttaatttgtcccttaatgtggctacattgactcaatcacctacttttgtcactttaattggcttgttggtcctccagggtccaggtgccacccctcccaacctcagtgacacggcagccagcacagccttctgttgctgagttcaggcaagagctgcagtgtgaagaggctgtgggcgaaggctttgctcaggatgcttacgtgtatttctgtgcactctgaattttttctttgctaagtgtgtggtctttcttgtttctcacatttcttctgccaagagtctaggagcccttctaaccacacacttgatttagatggaaatcctcagtagatctctaacacattatatcattttttttatttacactataatatagcatgcatttcttgtacacttacaaggcagatataattcctgtttgtcctgtacagtgagaacagactttgcgcactctatacaagcttgtcccccagagttcattaaatgtttaatagttggatcactgcatttcaaatgagttaacttatgcctcaggacccagctggatt

SEQ ID NO: 22988 - DNA, 1199 bp, Mus musculus
tctcttttaaaaaattagtatgttttgggtgaaaaattatctttgaaaatgcaaactaacgtttagaaaatgaagatattttttatttctgtggtgtgtagtcttcagtattttaaatcaaacaaactctagtatggattaaaaatatgtggcaatagctaatatttgtgtttttaataggtgtcttcaagattcctgggttcaaatctgaatatttcatttctgtttataatgtttcctgatagacaaagagtttttaaagataagggtctcctcattgctgaagggccagagaattcctcgcagtagcaactctgtgtctcattggggtaggtcctggtcttccgtggtgtgtgcaccacctacactcatctgtctcataggatccaaaggcaggagggatggtcggctgtttcctgttctccccaccctagctgcatgagaatattggagggcctcctggtttcattgtggtagtcatttgggtgtaccagagggactctgtttctgggacataaacccatctttgctttaatagatatcgtcctttttcatcgcaaagaatgttaaaagtgcgtcttctgcattttctcaggtgtccctgagagtcatttggctggctccgccaatgtgcaagggatgtggaagtaatgtcaggagcgaggtctcttccactttcctgcagaatagagcccacaggaggaaatgcatcttctgggataggagaggatgctgcagaggctgtgaggtgttctgctagtcgcttttgtgatgcagaaaggctttaccatgtacatgctttaccttgtgatagtgtgttctggctggccttgtcttgcccacactggggaggtgattcacacagcacagtggccatggaaaattacttgtatttctgttgccaactcccaaacaacttggtctctttaaagatgccttgtgtgtgaggcagagcctgccctcaagaaaggctgcaaatagaactggtccattctgagctcaaacctctgtgactcttaatccaagctatttcctacctcatctcccaagtttattttgtagttcaggaggaagaacttagggtaaatgagagattttcttgttctccaaagcagccctctatcaccctggtcacttctcaaaggcaaaggggtaaaacttgcatggattaaaaaaattttttttccaagggtggcaag

SEQ ID NO: 22989 - DNA, 1119 bp, Mus musculus
gccatatctagctgcagagaaaaactagaaaatgtatttattattcactgccagctgttgtgataagtggggaaaggtctattgttaaagaaacaatggaaaattaatactgatgaaagttattagtccataagtatacagtccttttcaatgtcatatattttctcatcaatttgacataggaagagactgagatttgctgtgtcagcatttaatgctgttcagccatttctgtgccgtatcttgattggcctgcctatgttgtgatagactggctggcattttcattctcttacacttgatcatttggagggaggattcggagatgctgaaaggattcccagttcgcgttcatttacaggaaagttgctcagagcccctggtctttcagccttggagtttttcccactactgtatgctgcctggcatcagccctgggactgggaattgcaagaatatgaaattaagtctttattgatttctgtctctcttttttccaacttgttgtagagttgcagtgacctagaaaatgccatggaccagtccagtgtactcttagctctgcccccagcgatggggcctctcactagaatgaattgttcagatagagtgtagtagaggggagtcagagaacggcacatgaattcaggggagacactcaaacacctctagctggataccaaccctattccacccccaaacaatccaatatgcacactgaggggataaacatataactccaatggggcactcagccttccagaaactcaaaatcagtagctgaccactaggaaagctgatcgggtgatcaataggaactctgctcatgaaatgccaccatctctctacttccccgagtcgctggtgtttcatcaacaacacattgtgacagttcttatatattttattagttattcactgggttcctctgcccatcgctggagagaggaagtgctttacactgtaataaataaacaacttcactcaggttatcagattccttcccagtcatctggctgatggatcggagactgaggactatggaccacatagcaactatagaagaaagtagggctgcaagaggcagaccacccaatgagagaaagatgatggttaaaa

SEQ ID NO: 22990 - DNA, 1185 bp, Mus musculus
tttatgcaaatgacaaacaggctgagaaagaaattagggaaatgcctttcactgctgcgtcctcagccatgagtagactcaggctacagaagaggcttgcctctagtgtcctctgctgtgggaaaaagaaggtctagttggatcccaatgagaccaatgaaatcaccaatgccaactcccgtcagcagatcaggaagctgatcaaagatgggctgatcatctgaaagcctgtgactgtccattcccgggctcattgccagaaaaaaacatcctggcccaatggaagggcaggcatatgggcataggggagaggaagggtactgccaatgctcggatgcccgagaaggtgacctggatgagaaggatgaggatcctgcgccggcttctcatgagatacagggaatctaagaagattgaccgccatatgtatcacagtctgtacctgaaggtcaaagggaaggtattcaaagcaagcggatcctcatggagcacatccacaaactgaaggcagacaaggcccacaagaagctcctggctgaccaggctgaggcttgcaggtctaagaccaaggaagcacgaaagtgccgggaggagcgcctccaggccaagaaggaagagatcatcaagattctgtccaaggaggaggagaccaagaaataaagcttccctcatgtctgtacatagtggcctggctgtggcctcacttggatcagtcactaaaataaaacaagcctttaaaaaaaaaaaaaaaaaaagaaaagaaaagaaaagaaattagggaaacaactcccttcacaatagccacatataatataaaatatctcagggtaactctaaccaaacaagtgaaagacctgtataacaataatttcaagtctctcaagaaagaaattgaagaagatctcagaaaatggagagatttcccatgctcacgacttgtcagaattgacatagtaaaaatggccatcctgccaaagaaaatctatagattcaatgcaatccccatcaaaatcccaaaacaattcttcaaagacatggaaagagcaattctcaaattcatctggaaaggcaaaaaacccagaacaccaaaaacaatttttaacaataaaagaactgctgggggaatcaccatccccaacctcaagctttactacagagcaatagtggaaaaaaaaaactacatgg

SEQ ID NO: 22991 - DNA, 1216 bp, Mus musculus
ataaataattgacaagcattttaaaggcatatagtatccataactggacaattttatctgatgtttattaattatatgtaatacactgtagccgtctttaaatgtttcagaagagggcatcagatctcattacagatggttgtgagccaccatgtggttgctgggatttgaactcaggactttaggaagagtagtagtaagtgctcttagccactgagccatctctccagcctgaattttcttttttattattattattttttattttatgtatgtgagtagttgtcttcatacacaccagaagagagcatcggatcccattagagatggctgtgagccaccatgtggttgctgggaattaaactcaggacctctagagcagtcagtgctcttaaccactgaccatctctccagcccggtgaattttaattcttaatattcttcaccaataataattgtactgaagaaggataacattggaaaatatacttgattagggaaccaagatatttataaaatagacgttccttgctccctctttggcattttctcaggaaaggaactgtcctaaaactgatggagtgagcgagagacaagagaaacatttctcctttgtgggcaggagagggaggcaaagcttgtaggttttgattatgtatagtgaaatcacatagggttacaattttatttaattatgtatagtggaatcacatagggttagaattttatttgctccaaggtagtagtggacactggacagaaatgaaaaatgcaatctctgcactgtagaacttagtctacctaggctatgaaaaagatagactggacttagagctgtgttccagtgtgcctttatccttgcctgttctcctgaagtgaatgtaacacaatgtttcccaccgttgaatatacaaatgagaggccctcttaggagtccaatgccattcatactgaattttcccgttcatcctggaaccacgtgactatttggcatactttatttattctcactttgaaagaactggcttggtgacaccaatgcgccccccacgcccccaaggatgtcaatccccagaaactatgctgggtttttcaagaaggattgccatggaagactttttttttccccccgagacagtttctctgtgtagccttggctgtgctggaactctgtagaccagctggcctcgaactcagaaatccgcctgcctctgcc

SEQ ID NO: 22992 - DNA, 1106 bp, Mus musculus
ggcaaggccagggcgggactatatagtgaggccctgcctcaataataataataataataataataataataataataataataataataataataacaacatctccagcttcagggattcctggtgttttctccagtttgaaaacaataattactttgatttcaagtttggctctgccttagcaatggggaagggagaaggtgtgggttgtaggtatctgtgtgaccaaatagacacatggaagtactcccttctctacagtctgagggtgagcagtgttactgtctgctgacaccaacctttaaatgcacagtggtcctcttaacattgctactgttatgcttagattgctttaatggaatgctaatagcgtgggtggagtctgtactggtgtgcgttgtgagtcacacaggtgtctacactggagtgtgttgtgagtcacacataaatttataaagtttgagctgcacacttcatgtctggattttgtatttgtagatgaggacggcaacaaccagtggcctgaaggtttgaagttcctctttgattcagtcagctcacaaaacatgggactccgggaagctgcccttcacatattttggtatataatctgttttaatattttgaacactttaatgtcactaacatctaaaacattttagctgattgttttagcctcgcagttctgagagttataataatttaagttttctctgttggaaacaagtctgaaagaaaaaacagctgttcttttcacacttggcattcctcatgtgtctctgacaattctgaagtgttttcacacaggaccaagtgtaactttagaaaaaccacattggtgatgatattttgaaaatggtaaccccatgggagatgttgctggatcttctgtggtcgttttataatattttaacaaacttctttgtatttaggagcagtgattgaagcggtgactgttatgtggttgtctgctttgtttaaaataaaatagcagcactaggttaataactttaccaatgtaagcagtatgtaatgggttttaaacacatcactgctgtatttcagtaaaagtgtttcatttagttgttttcctaatgcacaggaga

SEQ ID NO: 22993 - DNA, 1085 bp, Mus musculus
tgtgattaagccattcttacagttgggaggctgttttcattgtggtttcgggttttcctctcccaggactcaggcctaagtgtgtttggtgtatttggtgcgtgtgtgcatgcgtgcattctacactcaaaaggaaaggtattctcttaactccgggtagcacatttgtacttgcctaattgcagtgggcaagtatttagtgcttcttaggaataaagcactgcatcacaaggtgagtcttgagcacactggttttctgtttctcatttgtaggctgtcaatgactcatgctaccagaatgatgactcggtcctaaaatcccttgttgagattgcagacaccgtaccaaagtacttgcgccctcacttagaagcaactctgcagttgagtctgaaggcaagtgaactccctcgatcaggatttttttcttcttgtcatgttccggtagtctgaactactgaacatataccaatttgtctttgtagttgtgtggagacactaacctcaataatatgcagcgccagcttgcccttgaagtgattgtgacactgtcagagactgcagctgctatgttaagaaagcataccagtctcatcgcacagacgagtaagtcaaaactctgccaagacttttgtgattgcaagcttgttgagtacctttgctaggatttgtgtagtttctcagcttattcagaatatgagtatgtgttgagttaggggaatctgggaatctgtacatgtttgaacccagtattgtggatctgcttttaggactttgcagatctctgaaacctggtgttagaactaaaactgccattcttaaatcatgtacatagttgatgagtacacactgatgaagagaagatagatacctgacagcaaacagaaaggagagttcatggctgcggctcccagtgcagacgggaccacagtgcgctccactctgctcactcctgacagggagggctgcgtatgctcaggaggcccatgtcactgttgtgctgtggacatactttagcttagggaccaaccttcccattctttatgagcttgatttagaaagtgaatgcacagcagactgtagtt

SEQ ID NO: 22994 - DNA, 1121 bp, Mus musculus
gcgtacatgatccggtctgttaactgatacccagcctggggacatcctgagacatctcagaggcagatgagctcacagcagtggggatccatcctgccggtcctgagcttctgtttcaggtctatgttctgccacaggtgaattgaatgtatttctaggatgagagataaacagttttcctcaatagctgcttttaattaattcttgaaaaataagatgcagacaacaggacaaaaacctggtagactgattatgaagtttctgtgtgccaggctagaggtgtggatctcctgtggaggagtgcttgtctaatgagctggaacccttgtatctacccctgacttagcacagtggttttatttaccgagtgctccttctctacctggagggctttaaactcacaatttgcataaaagactgaattcttctctgtataatttgttctatgtactttttgcttattctaatgtcattgtgtgtttagcaatgcagttgctggtgagagtgcattagaccgaatggcctgtggacttggtggaaagctcgttctgcccatgattaaggaacacattatgcaaatgcttcaaaaccgtaagctaccagtgcctcagagtccagtagtgtctgtgctcttcttaagcttaggctctgacaaatgttttcactgttaatctgcttgtttctagagtgcttaacctaattcttagattctcctgatgaaattctattcagtctaaagctaaagagtgtcttttcaggagccaggcatggttacatacccatccctgaagtcccagcacttgtgagcatatgaagaggttcataataagttcaaggccaaattaaactgtatatcgtgaccctgtctcagtgaagaagttttaccttaatgctgaagatattactctctttttttccccctctagaattaatatccgtgcagatattaattttttttgttgttgttgatttgacttgggacagttagtgtttctgccatagctggcctgggactctgaagccaggcttggtggtaaacagctgtaatgccaggctggctgtcattgaggaggggagatggacaaagatcaggctgcataagaccctgcctgcaaatacat

SEQ ID NO: 22995 - DNA, 1174 bp, Mus musculus
aaacatagtttcctagaaggatcattcagggagaggtcagtcacaaaaataaagagccaggcaaggtggctcacacctgtaatcagggtcaggagtccatctgccttggccacacagcaacctgctgtccgtgtgatatagtctgagctgctgtctccaagtggtgtattgaattacagaaggaatctttctcggtgactcagtaggacagcatgaaatagagtattgatttaaatcagtaagcaaaagatgagctttctatgtttaaaaggaaagaaaactagaaatgagtccagattgtgttttatcagcaactgtgctctgagatagagctatgagcttctgacttctggaagggtggccataatatctgtttagaaaaactgtctgaagaacttgggaggggtttccagttagatactgaaatgatcgttttcatgtcttcccttcagctgattcagaaaggcaccaagttagttttggaacaagttgtgacatccattgcatcagttgcagatactgcagaagaaaagtttgtcccctactatgacttgtttatgccatcactgaagcacattgtcgagaacgcagtccagaaggagctgagactgctgcgagggaagaccatcgagtgcatcagcctcatcgggctggccgtcgggaaggagaaagtaagcgatgggatgggttggtcagaccggctcttggtagcatggctccagggccttgggactgctgggggaggctgtgttttctgtagagtcaacagttcctgaatgcttttgggttttgtttttcttaactttgccctcacacattttaactagaaagacataattttaattttaatctaattttaaatagaaagacataattccttactttttttcattgttaatgttaaggattctgctttggtctggttccttgaagtttcttttctctgtttttcaagacagggttctctgtagcactggctattctggaactctatagaccaggctggccacgaattccaagatcctactgcctctgtctcctagttttgggattaaaggtgtgtcatgtcaccaccacccagctcactgttagggactcagcccacatcattgacagcagtgacagcagtaaatctttgtcttactattccaaagcccattttttgtttttacta

SEQ ID NO: 22996 - DNA, 1884 bp, Mus musculus
ctgagtggggtttcagtggtgtgtgtggtgctgtgccaggcagtatgtgttcctcctccaaaaagatcgaggcctaaggcctaaaagtcagcttcactttcagttaaagtggtacagatacagagaaagaagaaattgtaattgcatcatagggggaaaagtaggacagcctcacctgccagctccattgggaatgtttggagtgtgtgccattgggaaatgcatgaacatgtcaatgaatgtttcctcaagaagggaaagtggctttatctgtctcagttacccattgccttacggcctgtttggaatgttcccccagatttcttacatgatctcagcatgggccaggatgtgcaaaatccttgggaaagaattccagcagtaccttcccgtggttatggggccgctgatgaagactgcttcaattaagcctgaagtggcccttctagacagtaagtgccttcaccaggacatggtagctgggctccatctttcccttcctctcacgtttgtctgtctctggttactagcccaggacatggagaatatgagtgatgatgacggttgggaatttgtgaacctcggagatcagcaaagttttggtattaaaactgcaggactggaagaaaagtcaacggcttgtcagatgttggtatgttgccttgattaagctttgtttatcccctcataatatttacttagttagttcataagactgtttaataacctcatgcaaatacattagaactttgtacgtctagatttttctcctttgcttatgcttattctgcgtgtgtgatgtatgtgtgtgagcgcacacacacaagctccatggcacacaaactcagttcagaggacaactttcagtgatggcctgcacccttccactgtcacacagtccacgtaacccacactgggtctcaggttgtcagcctcacacacaagtgcttacccagagctggctgtccccgcctgtgctacagaaagtttgcagagggtttggggatgggctgtgggagtaacttttgtgggggatttttgtgtatttcagtcaagtctatatagtgacttaatatcttttgaataaatgaacagaaatgtgctggtcgtattaaaagctaacagtctgttttcagtgtagacaggcatggtcagagaatcggtgctgatctctggaaaccccataacctggcccttgatttcttttctgacaggtttgctatgctaaggaattaaaggaaggttttgtggaatacactgaacaggttgtcaaactgatggtcccgctgctgaaattttatttccacgatgatatccttcaacagttgaatataagcacatctgggtgtagtaacgtaatgtctaccctcacctgagttgcacatggccattgctgtgcgcctgctctgacttggttgtgtgtgcttgtctacgtatgccttcatttctttcacctcatgcaccaaaagtgtgaaaaggaaaggctgaaccatactgtagttggctgtctgtgaccttactgagaattgtgaaggctgacacttgttgtaaggctcctgtagtgtgataacacctagtggataacatctgtagggagcatcgtggtaaatctcagaggtggttgataaggcatagttaatactgtgggtgtttgtggtctacatgtgtactcactttaataagccagcccagccctcctgttcaggggtgtgctctacagtcagttccccagccaacccctgctaatgctggaggagcaagtagcactgcgttttatcaggagcacagggccttcacgtaattgtgcatctgtgtccattatccagaggaggccagaagatgtggtcaaagcccctggaactagacttaaagatggttgtgaat

SEQ ID NO: 22997 - DNA, 1139 bp, Mus musculus
cctgccgcctcttcccggcctccttaccacaccgagaaccgttctggtcccatttctgctttagtctccccacccagtcccatctacagcacaacctgtgcttattctcatagatggaaatgaaatgaaggtggagcggtatctaggcctgcaccgcgccagcctgtctagggaggagaggttggtagtgctaaagtgtgagaggctatcaagcacatacagtgagtttaggctgccgcgcgggccggctctcgtgctcctttcagacttggtatccctccccttacatacagtcctgggacagtgacaccttagtaatcagtgactggaccagagggaaccgttcatgttcatattcctccgtgttagctgacctgttcttacttgcttattttagatgcactcccgctgcttgtaagagtcattcaggctccagaggctaagaccaaagaaaatgtcaacgccacggagaactgcatctcagcagtgggaaagatcatgaagttcaagcccgactgtgtgaatgtggaggaggtcttaccacactggctgtcatggctgcccctacacgaagataaagaagaagctgtccagaccttcagttacctgtgcgacctgattgaaaggtacaggccaccttctttcctcactcgtgaccagcagcatgagagagagagtgagtgtgtgtgtgtgtgtgtgtgtgtgtgtgtggtaaccaccctgacctgttaccttgtaaccctgtcaagctttaacggttggataaagatgatgtaacttgaagttgttctctttgtaattgtgttagctaatattgtttcatgaaagctaccctcagctattcagttgcccactacatttgctgtagatcaggtcagtggggggcgaggtgtatggtaaggcatactgaaatctcgggacaagttcagtgtagaaagatcctgtctaaaagaaatgaggtccaccaggcagcattgtgatccggcctcatgtgtggtatcgctcattcagttttcaacccctgcaacagcatagtggccttagaaactactacgttgtatgattgctttggtgtctttctgccctctagttctggctctttcactgttagttactgggtttagtttgttggttcaggt

SEQ ID NO: 22998 - DNA, 1828 bp, Mus musculus
aaacgagatgcagtttaatgatgtcagaacaaagcaattacggacgactcatttagtgacttgagggtaggacataggctgctttaaggtaccggctgccgggccagttttattgaggtagaggaatgcactctgaaaaaaaggtcagatttattggttttacaatagtcgtcaaattaaggtatagagcgtttgtttgggcattgttacagtcgtgtgtgtttagtacttgaagagatcactatgaccaaacatgtgcatttccccctagacttctggaggattgtggactgaatgcatagctcaactcagtccggagcagcaggcagccatccaggagctcctgaactctgcctgaagggccttaactaccacctgccagaagactaactccaaataaacgtttacccttttgtttaggtttctttgttttgtttttgagcaagagagcagtagtgttgtgtgtaggccgttcttctggagccgtgcacaggaaaagtaaccctgtgtgcagggtggactgccatggatctcatcaaacccgcagaggaggtccctgtaagcctgatggtagcactgcagagtatttttctattgctgtgtctgacccacaagaagggaaagaggaaacgattccttttttctcatagacctgcagaaacgtaaggaacgcagctttcagatcagttcatccacatagatgtgtgttacacagactgggggacaacctagtgtttattctgtaaatggagtgagagtctggggggatggaaagaagccaaccagctgctgacaagccagaagcaaagggctgtcacttgatgtcacgctggttctttgcaagaaggctcatgcagtgactcggtgtggaggctgtcccactccctcccggcccttgaatgtgaagtgtcgttggcatgtctggcagtcgtctcattcactcctcaataaacagcattgaaatacaaagaggcctgtgtagaacttcagtactgtctgtcgttgattcctttcatgttttaatagaagagtgatctgatatttttttaaggtgatagttctggctcagtgttttacctccacgctctgcagtgcagccttggaagtgtgtctcctgtcttggaaagcgcagttataacacagctactctgttcacaattggtattctgaaggtttgcacattcaaccggcttttttaaagcttagggttgttctgtagatccaaacgttttggcttaggatttccattgcagattgtaattgctttagagacacacgcagcttttgaatttttttaattttacaagtattatggctaaacttatttactgaaaatttcagtaaaatgtgtgaaattttctttatgtattaacctcagagcagtaactgatgagctgttgtttcctttaagtaattttctaagggatcttaatagatttctgttgaaaccttggtgttaacgttttcatagtttgtactaaatttaactgtgatacaaaaatgagttttatgcataaatcagaatttaaaattaaaaaattttttctttaaatgatttgcattacttcattaaaacaaaatttggaatgaaattgaaaatgaaatggattttattcagatggctctgattggcatgtgcccttggactgcgcactcagcctccagctctgcatggttcaggtctgcaggaaatatgctgagcgtgtggcttgagcatcccatcgggcagtgcttccagaatgtcaggtgcttggcctcttggagaaggggtgtggtgatgtttggaggggcttagtgctctgttcccgtaccagtgctgcaaaccctc

SEQ ID NO: 22999 - DNA, 1166 bp, Mus musculus
gccttgcttgtccttcctcagtctgggagcactgggctaactcattgcaaagctctggctctatgcctgagtccctgctctgtactctagggatcctccagtgctcagccttgccctggctctgaggtcatctgaacttttccagatgcagctgagtggctttgtagtcctggccaggggcagggataggaatctccctgacttacagtgggaattcctttgctcgtagcctctgccgtctatctcttccagcctcggctttctgcatttccctatgatatgatatagtctttggttgagccggtattgagtgcatgtctttgggactgtatggacactgctcttaaacacttaaaatttttactagcagtaattaattgaaaacatttgggggagtggtgctggcaagatgattcagtgggtaaaggcatttgttgtctagcctgggttcactctccatcatccactagaaccaacttctgtaaactaccctttggcctccacgtgggatgcatgtgtgtgcatgggcaggcacacgcgtgcacacacattaaatatgatagaattttttgatgctgtggtaagagaagtattccccccaaatcccactacccattaaaggcgtagtcagtactcagggtgacactgcagatagcggagccctcagaaggccgagcctatcatggagcttttacagcggtctcttgaagggggctgtgagaccccggctcagttcttctctgttttctgggatataagtgggattgcctaatcctgggatggaaatctctagagacatgaacttaataaaccttttttctttatccgtgcattttctcaagtattttgttgtaattgtggtaaatggatggatatgtgtttgatttttctgtgtattttcttcctaagtaatttcaacaaaccagtcaaattttcaactgatttgtttaattttcccctctaatttctattatttgatttagcaggtctttatttttttctttaaatcccatctaccaagctttactttggttccccctctggtttctttgatgtttgaactcactagcaataataggagctgtccttaggagaggttgtcacgttgctttctgatacattgcaaactctcgccctttctgtgtgttctgtattaaacgcttcct

SEQ ID NO: 23000 - DNA, 1170 bp, Mus musculus
cggagcggagcttggttgttttaattgtgatcctggtctgtttaagggacttttccttatttctgcttacacagaagtctgataactaaataggaatgagctcttttagccttgtaatgtgattgcccatcccctgtgcctgggaacctgttacctctttccccttgtattgtagcacagttttctcctgattggttctgtgccagcaaagccaatttatcttccgcttcttagctagtatttaagaaagcaacagtcccagcaaattaatagtgcctaaaagaattgggggcaggtttgttccgaaatccaacatcccgtcatctgagagtagtcactaactgtccttacaggggcttatcctctgctctagaagatttcagaagttagtcagagaacgtgcgtgcctgcagtgagccgagtgtagcagggttgctgaggtgacaaattgtccccgatgtccctatgcaaagctcagaaagcaccaagccttcccagaactccccattctctgaccttgtgacctcaggctccaaggcttccaaagcccacagtctccatctgggacttagaaaggacctatatttgtgtgacgttgaactgaggtgaggaaggccagtgtcacagttggctgtcaaaaacgcaaagcagagaccagagggcttcctgagacctcagtctatccactgcagcatacatgcttcgggcctctggactgaaggagcctgggcctttgagccttgcctactcgctgctgctctgcaaacagtatctcacggccaagggtgggagacagagaaactcagagtttaaagctcctcgcggatgctctaggaccccttacattgtgatgttatgttagattttattttgaaatatatctagtggttccccatgtggatccttgttaagagcaaactgaaaaggcatgaaattcctttagcgtgaagaaatgcacttaatgagttccagagcccaatgtgaacggcctcagcccctgaaacagtcatctggatgccatcgatggtattttattagataggcatttaattagaggaagcttttgggccagattctttcttatatgtgtgattcatattcaggaatttcttacacggccatccccctccccacccaccccacccccgctctttggccctgcgcttaaaa

SEQ ID NO: 23001 - DNA, 1158 bp, Mus musculus
gtcattttaggtggatggaagtgatccgaagtgccaccagctcagcctctcgggcccacatcttgagtcacaaagaatctcacctgtactgacggctggacacgcccactggctgcgccagccacggatgctttcctggaggatagaatgaagcctagcaaaatccacacctgtgtgaacacgttgaagatctgcagtggttcttgcccacatcccttcatgggcctatctccaaacattgtcttccccataccaacctctttggacagcctttccctccaggcctagggggtgggagggcggtgtcttgccattctccaggggcgctttagtttgtgccactactgacacattgtcatcaagagtgccaaacgacagtctcgtcctgcagcatggccagcgcagggccatacatccgttcacctgcagactgctgtttcccaaacggatttttccagtgttcacaacacatggcgcagtcttaagtaaatgagatcattttggatttcatttttttttccaatctttctacttttataataggacattcgtaggactcaacttttctcagataagcaacttgtggagtactccattccaccgaaggggtgggctccagcgagaccctggtcgccacacctactttcttggcggaagttgaccaagctgtttgtgattcctatttacaagatgtagtggggttgttttctgtggagaagcagatacccagtgcaatacgtgggcgtcagcgccctgtgcgtggcgtgtacagtggcggctcctaggccgtgatgttttgctgtctgtttcacaagcatgagaagctgtatgtcgttgactggggtcgtctgtgctgttacatggggggcattgagtgagcttctcgggagaagcatcgtatggtaatggtacgtagtcccagccccagtgattggccccaattccctgcaaggccgtggtttggtttgaacctgcacattctctagtagtatctattgtacctgtctccaagtctttctctttttatactcattccttctgggcatggggtacagacaggatgacagcccacatcctggacagactcctctgggggacctggctgccaaacactacctgagcctcccagtggaaaactgtttgcctgttctctagggc

SEQ ID NO: 23002 - DNA, 2588 bp, Mus musculus
gctttatatcgatagctcctcccccgggagacagagagtcgctctggtggatcagtgtacagattgtatatagcgtcatttttacggaaacccttttggcgtgcataaggatcactgtgtacacattggccaagtgcttctgtagataatgtctgtggagtaaatatttgacaggccagaacttgagtcttttgccttgcctttattacatgtaaattttgaatctcgtgaccagtgatttggattttattttgtatttacagggtctgtcattaataataattaacccccctcccctcatggaacactcccgtttgtacctcaacagatgcaaattcccctctcgttcaccctacgccctttttggtacacttagaagttttccttttccatcaatggtactgtttcttagtgttttcaattggaacatatcttgtctcacagagctttaaattattctcctaagtttcttgtggatgaagcgctctcatctaacctatgttgggttgtgccaccacgtctgtaccagatgtcccatccggcatctttccattgaatcttgtagtgcaacttgcgtatcatcttctccacctccaagtgtctgaatgcttacacaaataaattttataactcactcattttgcatactattcttgaaatgtggctccacggagcagatggggcacctgttttgcacatgtgcatggttgaggaagtgtgtgtatgttgagacaggttgaacgactccaggggaaagtgcccagatgtcaaaaagccaaatgtccaggttatcttcctatgcaatgtgtgtgctaggtccctgagttacgaccgacaccacgggtttgtgaaactgctgaagttcttgcgctgctgtgggggccgcatcttctggtcctgtccgccgaggtcctgtccgcgaagctctccgttcttttctcttgcatccctcagcagggtggggattccccggttctcagagcaggtcttgctggtctcactcagatctgtgtagtgttttttttgtttgtcgatgctaattactgtcctccttttggagggttaggccttgagaaagggtttttggagcaggaactttgagtgaacttagtgacatcagcgtggccttgtgctggtgtgtatgtcgtgttctaggaaggcaggccaaggatagatgtgtcaggcgtgagacaattgcttagatttattaagtggggtctaggtttttagactattgtgatagtctattagaagtagtagatttaggctggagtaataatttcatccaagaatacgttttggctaggggaaataaagacaattttttttttctttttaaattgagtctatgagttatgtgtgcagttccctcaaagaccagaagagggtatgagattcctctcttgggaactgtagttacaggtgagctgccctgtgggtcctgggaattgaatctaggtgttcttgcagaacagcctgtgttcttaactgctgagccatcactctgaccccagtccagtgttattttataccaagtatgttacctggaacaatagtttgagaatatttcgtgtttctagagtactctgctttggagtactgtgtgtctctttttctgtacgaggcttgatgtataaaccaaaggttgttgcaggaaagtcaccaaatgaacctgttctgcagagtgctgttgacttgaagagcgtccctgagggccacaagcattgctagtggaaagctcgtcaattgtacaagtgggtagtgatacagtagtaaagccagttgtcttttctctttccagtgctagtacatgaaccaggacttgtgtgtgctgggtcagtgctttcctgggcttttcctgcaatccccgccatcctgtctttaacagcttctgctgagctgctgagaggactagatgctaattaagcataggcttatcaaaataaatgtaggctggtcctctgtactcagtagaccacaaggcacgggttcccatctcctgtgaaagcaacaagatggtctttgggagtttgttggaaaccttgctgcagatgtggggttgacagttgtaaagtggattgcctcgttctatagtctcctctatgttgttacattgtagcacaaaataaattagatgttctctggacgttttgtttagctcagcttggcaagctgtattcatgtgttcacttctagtcctttattcagagcagggcctgtctgagaacaccactgctacccatttcacatcacaggctactgtgggtgagcacagcatcactcagaagtccttccacagtgtactgtccacagctcatggcaaccatgccaccagtctgggaaaaggagcacctcagagagcggtgaggcaggccgagtgccgactgctgagctctggctcacagacaggttgtcctttgggttatccatgttcctccttatgagtgccgagattgtaggcatgcctcacatgttggctcaatgatggcttcccccacccccactgctgtcccactaggtaacagcctgtgatgtggaaccaaccacctgtgcagagtggaagacagtgggttccttcctagcagctg

SEQ ID NO: 23003 - DNA, 1151 bp, Mus musculus
ttaggagcaggctctgaagcagaatccagggctgccccgtggtgcgatggtctggctttttaacccagcagtcttgtctgtttgtgtgggatagagtggggtgaagaggaaatgtcctctcgtggtgatgacttcgacatgtgtgctttccagaggcccactgctaaggaattattgaagcacaaattcataatccgcaatgcaaagaaaacgtcctacttgaccgagcttatcgacaggtacaagaggtggaaggcggagcagagccacgaggactccagctcggaggactctgacgtgtaagttgccctgtccaggctctccatgcctgtagcagagagttgggccctgcttcgtgggggtgggggtgggggtgagctttttttgtgtgtgtagctgtggccagggtgggggtgggagggcaaaagagagtacaaacttagagtcatggccagaaggaggaacctgcggagacactgaggccccaaagggactaatagtgaagtggcaggcggatccttaggagaggtgtggccactgtgtgctggaggcagcagcaggagtgatggagctggtggtggtctgggcagtgcagcccctggcctggtgttggtgaacttggtaggatttctgttccaagggagacagatggccaggcgtctggaggcagcgactctggggactggatcttcactatccgggagaaagatcccaagaatctggagaacggaactcttcagctctcggacttggaaagaaataaggtaccgtgtgcccaccagccagtggcgctggggaatctgtccacagtaagcctgctgtgggagcggcatctgccccttaaggcattgacaggttaaagattgagttctgtctgaccattaggattgaggtgcgggcttacttagggctgaattgtgtatcttcaccttgtgtgcaacactgggtcctcctgatctcgaccacaggtgggcttggatgtgaagtttcctgtgtgagaattccagaagtagctgttggatttactcaagataccctgatttttactggggcagtttttattgcaggcccttaaagaccagtatgttccttttggtactgaatatagacttcatgtggatgcggtgggtttccactacgattagtttgtc

SEQ ID NO: 23004 - DNA, 1105 bp, Mus musculus
agcaaatgttttcttgtgcacaggagtgagaagcccctcccacttgtgtaagctgtggccttccgtaggcgcctatagaatgtggcgttctgcttccccgaggtgactggaaaggagctctgctgtggcagcagtcctgtgcagaaagtgtcatcagcccaccctccatgtgaacatgactggtgtgaagagctaagatgatagcagcttaaatcgtttaagagtgctagactttttgttgtttcgttgtgtttttaggctgggtttctctgttttgtagctctagctgtcctggaaccactgtgtagaccaggtgctgggattaaaggcaggaggcaccagacactgctgaccgccccctcccccttctttaatgtatggcccgttgcatgggacatttcagctgtagctgggtcctcatcctttctgcagcaaagtctgcgtagcctgccctgctggaggcctgtgatatcggggggcctctgagacttggcggagggcctggtgttgcttatctgctggctctgccagcccctttcctgccgtggccatgctgttcctgagtagtctgttgaaaatggtgtgaactgggtgtgaggactaggagaggagtgggcactcccttcccccaggaaacacccacacctcaccctgtattttcccgcaacctgaatatgggggtttcctgctttgcccatttccccctggtactcacaacataggtgcctgtccatgtgtcatttagaactagatggaaaactctcctgaatttccatagtcttaggatgatgtattttaggttcctaacaggtttctatccttctctaatacaaggcctgcctcaaatccagggcagaattctgtctgtctgtgggtggttggttgttcatgctatagcatgctcatatgttctagttctcttcactgtgtgggacccagggatgcagcaggccaataggcatggtggcagttgtctttgctgcttcagccgtcttgcaggaccttcagaattcgagttagaaacacacgcgtgtacattttgtccacacgcctgcttgggaagcattgagttttctgtggttaattgcattgcacacattgaaca

SEQ ID NO: 23005 - DNA, 1156 bp, Mus musculus
aacacctgtacttgttcttgaggtgggagagtagggccctagctgggctctggagaggaggaagcccttcagctgcatggctccttctttatcagacttgccctgagtcactgaactcaggtacctctgtggagatagctctgtgggagattagttacatattactgggcaaaagcactgtaaggaagggtttaacttttgaggagagagtgcatcgtggagtggaaactagtggtggtggtgggggcgtgggaggcagctggatgaactgtctggaagcaaatggatgttgctattcagcgggctttcccttcccctttttaatcaacactgaatggacccttagggtgccactatgctgccttcagtgtgggccttccgcgacttaagcctcgcagatgcacgcagagatatgcctcctaggttattatgcctctaggtcatttacagcctgctcaccagaagcccacaagaagtcccctgaagtctgtatgggtacctgctgttgccagcttctggggtgttggggttcagctctatgaactggttctctctgctttctccacgtgtcttctttgctgtcttctgctgtggcttgagactccacattcacgagctggaatcttagctttcagatttatgtgttcatcatgttggatgtatagcttttgggaagcagggctagacaagaccatggtgcatctcggtgatgggccaggtctgtggggagaggggacccctgagctgacttgctgcccttactgcctgaccgtgggactttccagcatttgaggctatgagaagtgagctccttttgtaaattacatggtctgcagtgttctgtcttagtaccaggacaggcttgagttctgtctctctgccctttcttcttatctgctttctagcaggtgcagtctcctggctggcaggtgaaacaactaagtctcacctttgtctggatgaaaaggatgacaatgaaaaagaggcatctggatgggtccagagtgaactgggccaagcgggaggggagggggatggttgagaaaaagaacagagaaggggagaaggctaaggagaccaagagagcacgtggaaccaggagggagtgcagctaaaatgctagtttatataggatcagagaagctgggggaagggg

SEQ ID NO: 23006 - DNA, 1204 bp, Mus musculus
aagagaaatgctggctcagcctgttgggacgcttcaccacgggcttgtaagggcacagcacaagtcagtgagccgtgaaggacatctctaatacaggtcagaactcggagagatccctgagagcaagtggctgccaaggccttggccttctcaacaggggaaagcgagtgatccattcatgcccttatgtcatcaaattgtcgtttggagatcgaaagccctagtgtagggtctgattcatccattcaatacctttctcctgaatcttaggagcaggaagaaaattcctcttgctacttattgtctttgtagaatgttgtattcttataacatgcagaggcaactatgacctttgtcttcctttaaatagctaggacttgtgtttaaacagctttgccaagtctaggagcctcctcgtgaggagattgatggaagtgataggctttagctcaagcttcctgatcctcagaggcactggtggtctctagagtcagaaacaggtcttcatctgtgaggatggagacaagtctataagcagtctctcgcctcccaccaaggagaccacgcagataagtgagcatctctcagaccacagggaactctatagtgatgcctcttcttctgccctgtgcagttgtgtttgtccttggcagtggaatgtacaagaagttccagccccagggcaacatcatgggcaaagtggccaagtgcattggtgtaagtgctcctccctctccctccctgtcccctcccacttcccttcccttgcccctccatccccctctcactcactctccctcctcctccctatctccctcccatccccctccaccctcctctcactcattcctccaccctccccacccctcccctttcactccctttcctttccacctcctctcactcaatccccctccccctccacttccttccccttcctctcccttttccctccatccccctctcactcattccccctccccctccactttcttccccttcctctccctttcccctctatccctctctcactccctcctcctccccttcccctctcttcccctccctccccttcctcctcttcttctccctccccctccccctcctcttctgcctccctctctccctctcactgaatcaatcactccagaacttttctctaccttccaccttctttaaatcaaaattcagttttaaaaaagaa

SEQ ID NO: 23007 - DNA, 1149 bp, Mus musculus
gagtatcctttgtccttctctgacgtcttcattctgtatgtcacacaatgttttgctcctggtagacacagatgtgccttattcagttgtcaagcctgcgtggggcacagaggtgatcctgagctatgcaggagatgtccttggtttatttccgtctcctgctagtcgatctgtctcattgctgtctctgtgtgggaataactaacatacagctataaaagtcacaaaatccacgactctggttctgaacagaaccgagaagttattacatgtgtggtagatctcggtgtagcttccagtgctggtgtgtgagtgtgggctggtgagacacgtgtctaaatgttatgtccccgtttgtcagggttgcttcggttacccgttgagcatcttcttcatcgtggtcaatgaattctgtgaaagattctcctactatggcatgcgaggtaagtttccggctcccctcacccttctgtaagagcaggtgttgcctcagcccgccctaactctgtttctctctccccctgcgcccgtggaaagcactcctggttctgtacttcaggaacttcctcggctgggacgacaatctctccacggccatttaccatacgttcgttgccctctgctacctgactccaattcttggagctctgatcgcagactcgtggctggggaagttcaagtgagtgactgggtgggacttgatcaccacgggaacagagatgtatgtaaactgtgagctttgcgatttgggatggtagactcccgggttggggaggattcaaggaaaagaaactcacaggacatctgtgaccttctttctgcttcatattgtattcctagcactcgtaacactgtaaattcaagaaggttgagttgttgttgttgttgttttgttatttgttcacaccacacacacacacacacatacacatacacacaagcatgtacgcacacacacgcacacacatactcacaaacaaactgtatcattttgaaatagtggcagggaccctgactatcatgggtgagaaacagactctgcctgatgctcaggtcttgctgctgcagggtcatgtggcttcatggatgggaagccattgtgagtactcacccagacaggaaaattaccagggaaagtctctgggaact

SEQ ID NO: 23008 - DNA, 1194 bp, Mus musculus
taaattttttagataatagaaagtcaaaatccattagacacaataacagcaaaagcccatgtttagtcagtgattagacacactggcaccactgagctctccggataagggagtctgaagtctagatgtggtcctggtcatacttatatctcccagtgacctacaggctgttccggaaacatgggctcgcccaatatgctcactgagtggtcttaagtaaaccaagccttgttgaaattgaaatctgagttcaaatcaagtctcttgtggcccctggctctacacttgtcctttctatgatagcggtcctgttgacacaggtacattcagataagaagtgctgacttcagtgtatggccagcagatagcttgggattctataaaaggagcttagcaacctctgccctggaataataaaggcagttctcaggaattcacacctttcaaaacacaaaatgcttcctgcaggatgtctgggtcctgccgtctcaggcttctgcttcaagaagacaagctgccctgcaaccaatcagggcactgaagaatacccacagcctggtttgctctgctgccctccctggggactaaggctcttcttggctgactgtagccaatctcagctactttgtgtgttcttcttttttccaccctttatccccctatcactagagaagagaaaaggggaggagagagagagagagaaagagagagagagagatagagagagagagagagagagagagagagagagagaggagagagaaagctggatctaatatttttttctaatttctcctttgcttgagtgtggttggacacttccttttccataatgaagttctaagcctgatgattggtcaactaagggctcagccctctaaacattacctgtaaccgtatatacatttgctgtaaatcagtgctaggtaatatttaacagggatatatagtctctgctctggagataagattcctcccctgtgaaccacgacatctagggacacaggaaagatactgctgaggtgagtctcagcccggctttgtggactctgggcttacatccctccctcatgagaacacctgggcctttatgttagtcttattccttgcttggtcctttgaaggccttggggagaccacattctctgaagtgtaagtagatagagcagtgtgctgtctcctcaagaacaaaag

SEQ ID NO: 23009 - DNA, 1192 bp, Mus musculus
tctgcttcttccaactagaaggaagctggacatcttgggccctgtccatccatctctacttcccagtccatctgtcccaaagccttcctctcccctccctgagtgtagatgttccccgggactcttaaactgtttcctcctgtgagcagtcttcagctccccagtataagccacatactcccctgtgggaaaacccagcatctggccaacatgacagccttccttctgtttgtcttggataaagaatatgtgtagctcaatactcaatggcctctcaacttcagcttcttcatttgatgttaaggccttccctttgagcagcacagttgccctgtggctgtaagatgtgcctgttgttcaggatgctgcaaccattttcagcatctgagttccaccttaccagtcacttgagaagagttttacttgagaccacacaaaccactcttaaaatcagcccatcccgttactgtactttttggctactttattgggctcttaaacctatcatccttctccaccccgagcccttccaacccttcaacactaggcaggagagaaaggttagagggaaaggggtgtagatgactacttcctgctgattaggggcatcaagttgcttgggaaaagtccaatctttgtcgtcagaatatcgacaaccagcaaccagcaatccaacaaacagcaactgctgggaactaaaaaagggggggcctggggaagaggggaagggaaggcccacaccccgccagagttccacctatgctctggtcagtcaggcgtgggagagctgccatacactttccactcatccctgggtgggtatctaagcctctgacccactcttaggggggtggcagaggggcagcccaacctgagagccctggtgctactttgctaaagccaccaccagggttatgggagaaagggatgagggaagaggttcccaacactggtgagagtgagcgcagccttgatgagcagagactgtctatagttttagagctttattggagaaaggcagggagaaagagagaaggtagaagagagagagaaagagagaggggggaaaggctagagagaaagagagtaagagggagaggagaggagaggagaggagaggagaggagaggagaggagaggagaggagaggagaggagaggagaggagaggagaggagaggagaggagaggag

SEQ ID NO: 23010 - DNA, 1127 bp, Mus musculus
ctctcacacttagtggtagcctgcacatctaccgcatacttggggctgcagtacttgtgttttcaactctctgtctcttagctcgatgaatgagaggttaagttaaagcagggtacgcccagggtctcgtgacctttgctctcattccctgtttccgtggtagaccaaggttcccccccacccccaaccccaccccccgtcctgtggcacacatgccacactgctagatttccttcttcctggactatataacagagtagtttactacacagacactgtggaggattttcacacaagcagatgggggccctatctcagacatagtcactgtcgaccccctgctgtagatggacgccgcagcaggagccagagacagccagctgcagctagaacagccctgtgagctgggctgctctctcctctgccttcctgcagtccatggagaagctggtaccctgcctccttccttcctctgtcagttctcagtggcatcctgtcctcctgcgtggtcaggaagccatgttctctgactcctttccccttggcctgtgtctctccagtccctcctcctgtgaggttgttctcccatagctgaatggcctgtgtcttccaggactcagtctttctcctgacctctggttctgatgaggtggcttttaccctttcccaccaccctctgtttcagcacatggaacctggccaaaaacatgctaagagaatatcttcctgtatctatcatgtgtacaatgtgtatgactcatatgtatgcatatatacctgttcatctctacgtagatattcagtgaaagcttggggccatgcatgcccctctacaaacaaaacaaaacagaaacttacacagctgtaagcacaatgccttctcttaatctagccaacataagtgagcagcctgccagggagacacaggggctggggtgaacttctctccatggccatttcttccctttttgtcagacctcagctaggccagcagggggcagcagaggcctgtgacaatccgtcctctgtaggcctggctgcctgtgcgttccctaaatccctggagaatccacagtgtatgctgcctgtgggacacaagcatttctgaaaacagtgcatcttaatag

SEQ ID NO: 23011 - DNA, 1192 bp, Mus musculus
gtgacactgcctcctgcttgggtaagacataggtgttcagcttattcatttaacccctgccattgcatgtgtgtcttctgcttcttttggtgaactggtttggttttttttttcaattggcataatagtctgctcttgccacatgtaattcagggaggtttgcagtgttttcttagttgtcagaatactgttatctccatactggaatgaggttctctgaaaagttgcatccctaatgaatgtactttctcagaacgagagagactctgccttggctcgatcttgctgcttcgaggcctagtggctttgctgtgcactgttggagctgctggctgtctgtccctggccacatggctgcatgtagcctgactgccccatgtacaacgctccagcttcactaactctcccgcctcgcttggtgtaacgcgtctaacgttgcttctttcccatttcactcatgttacaggaaccaggaggggttgggacccataggtcatgatcgaaagtctcagacattgcctgtttcccgtaacagaacaggaatgatgcatgccagattgcagcagctgggcagcctggataactctgtcacttttaaccacagtaagtcccacgccaaaccatcgtaaccgccaagccatctcagaagggagagcccctgccacactgtaccgcgtcaccaacttgatttttcttccagagccaaacaagtaggaagaagagttccctccttggaggagagtcctgtgcagtgggggggtagcagaatgtggggccaaatcaactacagcacccgtctcaaagtgcccaaacttcaggcaggatgcagcagattccgtggccagacattggctcgtatttttgttcattttattctaccctctgctgtccctcctggcacatccgggtcagattcggttgcctctctcgctcggtgcatgtaattggttgagtgcccacattctgacgttccgcccgcaagagaccgttaagcccgtgaatcaatttgtgagggtgtggaaagcatccagtaacgaagtgactttttctgtgttttcagtgtgagaaagatatcaagtgtgcttgggatttctgtagacaatggtaagacttaatcaggttggggccgcttcccttgcaaacaagacctttccattcatcttgcctaactgcagggcttgcctaacttcac

SEQ ID NO: 23012 - DNA, 1201 bp, Mus musculus
tatctgagtgagtggctttatcctttcctgtctccttttcgtctctctagctaggaggtgggaagcacactgtcctcagggcaggaatacagtgcatgacacagtttccttcacgagtcagtcagcagtagccagccttaatatattgtaaaaaattgcttgtggctgctgagatacctctgtggttcagccacttcaataaaacgatacaaaatgtattcaccgtgttggtggctactgtttttctaagttaaatctagagcctgtttgatctcttcagaataagcttctggtttcttttcagctcgttatttttagaaatacggacccatagcactttttctaaaactgctgagggaagataagttttcaaattcagaatttgggttgtttttgaaaatttgtagttagtgtttctcaacccacaatagctacagctcagacagcacccttgatcaaacacattatatccatggcaaaagaaaaaaaaaaaaactcttcagttctcttgattagtgttatcgaatacattgtgatgtatgtaagcagctttgtgtctgaaatatattagaaggagctcagatgcaaaccttgttctctgaggggaatgcctgtggaactggcctgctggcaggagtggtttagtctatgactgctcccacgattggcagtcaaccaggacaactcgttctgttagctaactcttattaagacgtatgggttttaaagattcagttttgtagttctacttaaaacaaagcaagagagttttatatttgatgccagtgaagggaccactccacacacttgagccaaaagagagagttccttgcatagactcatacgaggatgggttaactctcagtggcgtggaaggcctgctaccttctgaggcacgctgccctggagcgagtctggccgccctgagtgagtgactacttttcttctgtttatccatccacgaccaccattctgatggccacacacgtgggcctcccctgatgtgttaatgctttcctgtgggtggagaatgaccttctagaagattcctgaaagccacgagctagccatccataccttttttcgatattgctaataggcttcaaccagtggcttgagcacagttttatctgcgcgctctctaatggttgtcatttgtctgcagggtctgcctgcaccagttccagtacatggggaagcg

SEQ ID NO: 23013 - DNA, 1144 bp, Mus musculus
tgggatgtcttaggtcttgtcatgtgttggttgcctgtagcttgagttacagatgatcacacacctgatggccacataggaaaaggcagaggtcccataagccctcctggataacttaacttagttcctcctgttcactgtggaaaacctcgggaggccacttcagccagcagtgttatcatctaaaatcttttcaaaccagtgtatgactctgtcacccccaggtgctaactggggggatctgtgctgtttggaggttattgggtgtttgctgcctttgatctcctgtccaaaccagctgacagtgaagcctttccagagagtcgtgcctgcctgctgccagtggtcacagctgctggtagatgtttcaggaagagctaaatgcctgagtggcaggacttaggcttcctcctcattctaaacaaattagctctcccacttttcatcttgtgagtggtttgttttgttttgaaaaatcccagtcattctgaatgtggttttcttcctagataaggcacctctgtcgaagagtcttctgctggtccccagtgccctgtccctcctgctgactctcctgctgcctcactgtcagaagttcttcgtgtatgacctccatgctgtcaagcacgacttgcaggtgggcaccctgctcctttggcatctgggtggagagggggcgcttttctagacttgccctttcttcctacagttccttagtctctcaaaacccctaaagtttcaacaacagcttttaaagttttctttaaatatatgcttgtattttgattatatctaccctctctatccccctctagcccttcccagccccaccatgtccttctaacttcatctcctcctcctccaatcactgctgcccgtctgcacatggatatagggtcattctctggaacgtgggaaaatggtcagtccgtcggggtcacacctgtaaagaaatagatccttctctttcaacagccgtcagttgctgatatctcctcggctaggactggggctcatgagcccccgtcttctccatgctgcagtgttgactggcttgaccttgtgtgggtctcatttaggctctgcagcagtgagttcacaagtgagacagccttgacacatccaggacagtttcacagcatgt

SEQ ID NO: 23014 - DNA, 1732 bp, Mus musculus
tctagacttcctattcttttactacaggcttgacttgggagtagacgtgaactgactcgggtcaatttagaagcttgagctttcccacaaagccacgtgaggcacatgtggtgctaaggatacgctgtgtgttgttgagcctccattttctgccctctttgcaggttgcccgcctcatggagatgggattttccagaggggacgccttggaggccctgagggcctcaaacaatgacctcaatgtggccaccaacttcctgctgcagcactgacatccagccactgtatgacagtgatgtgcccgccaccacatcagcctgaggaccaagcagaccccagcacaggtgttctcaagaggagacggtggttcccaccatacactgtccttaaatccaagatggttgccgtgtagtatcaaataagtttgccattaaattagcatgtattttctatctttatttttttactgggcatttctcagtgtggagagccgtcattcttacgtgttcaaatgcatgacggttacaggtttcggtggctgttttatagcaccgcagagagagacaactgtcctgaagctcgagtgcagtctgctcatcctcacgtcagggaagggcggcaggccatgtgacctcagaaaggctgtgtcacactactctgtatggactgggttttttttctcttcagtttgtattcacatctcagtgacagagggagctggagatgagcctcctccagcctagagtctgccccaactcctgctttcagtacagataatccagtgctggtgtgaggttctagaatgccccgtgatgcctacctggggtcattttgctcagaatgcattacagtggccacttgggcaaaggagtgaattggaataaagaaaaaagttgcttcagagacttagtggggctgtgcagagagcaggcgctggccagcaatggctcagccccggcctgcccaccctgggccagcctgcagccctccatacaccaccagcccttctggcagcacaccttccctggccccatccttgccccttgtagtgggtgaggcagtgcccactgtgcagacagtcagggaggtgtaagcaggaggcagcccctgtgagcaagagcagctgtaggaattgacgactgtcccgtaagcaaactgcaccgggtgtattctgcacagtgagcagcaatgtgtcaaattgatgcaaatctaggtgtgtgatacttacaataaagtttttatgtgttttacttttcagtagtttttatacttctccaaataaaactttaggcaattccaccaaaaagaaaaatgaacccagacaacgtcttgagaaggccgaggcctgcacagtgagcactcccttcttttgccgcagtgcggtcaccgtgggcagtgctgactggggccctgaacagggttggagctgccctgcaggcccagtgtgagcacggtgaccagcttccttcactgacggggccaagggacactgctcctggaggtaggagtgtaaagtgaggcactctaagacccacccagtaccgctgtatggactccttgtctggagttcaagcctgggttcaagagggcaagggctctctgtaagtgtgatggcttggtagggtgtagacaagcttctacgctgagggctttatgcagatgctaacaggttagccttggttttcagaacagcaggtccagaccagaatgggaaaggagtggagaaaagttg

SEQ ID NO: 23015 - DNA, 1505 bp, Mus musculus
tttttgtaaggaatttaagtggttttcttcaaaacagctcacagagctgtattacattcctttcccacaagagtttaaaagaacttttaaaagttcttttaaaagaactggtcattttacatgtgggtttggttgttttatctcttaatgtaaagtaatgaacttgtgtgttttcttttataggaacaattggcttctttgcatgcttttggtttgttaccaaaatatacagtgtggtgaaagtggactgaagaagcccagtgtgtccagttaaaacagaaataaactaaatcttcatccacaaagacctgttttgtgactaccttgagttttctcagacttattggcctagtaatccttcagaaacaacatacttccaagtccacctctcccatgcacctgcacctacaagatgtgtttcaacactaaagcatttgtattgtgattggattaagtatatattcagttgttctcagtgaagagcagatttaaatattatgtgcatttgtaaatacgatagctataaacttttcaatacttctaatggcagattataggaggccataatactgatgaaagactggacagttgattgtaaataggattttctagactcggtaggtggaaagaattatttttctttgaaggaaataactttttatcatggtaattttgaaggatgattcctatgacatgttcattggggggaatgtggcttttaaaaatcttgtattggttataattgttcatatcttcttacttttctgtgttgacttcattattcccatggtattggccttttaaactatgtgcctctgagtctttgaatttataaatttgttatcttaataaatattgtaaaaatgtcttcattgtatcactccctgcatattgaagaaaactctgtgaatacaaatgtgttggccactatactattttattggatgatattgaatactgtggatacacactttctgtttccacttaagtgaaactgtcgggctttgtcaagtctgaattttcactctgaaggaatgataaaaattgtagtcatgcctgtctggtcagataaatgacacatttagaacttaaatgcaggccttatattgttactattaaaaatttacactgtagacttacgttccaaagtgtagtaattttttaagtcagcagggtataggagcacacctttgtaatacctctaatttggaaggtgaggcgtaaggatgatgtgtgtccctctgggctgcacagtgaattggaggcccccctggattacagactcaaccctgtccttgcacacagcatgagttaggctctctggtctgcacattagcatttgttacctcatgattgcagtgggtttcacaaataattcttgtcctagattaggagctcactaataactttcttacatctggcaagtttgaaccagttcatatggaaagctgacagatgacagtggtgtcagacagatcttcatcaaaacaccttttattgatggc

SEQ ID NO: 23016 - DNA, 1156 bp, Mus musculus
gattggtcctgtctgttcaaggaagctcccatcaaaatccaaaaggccagggtttggagagcatccaggttgctaaactcatgcagctttctgtaaggaggtgtgcttagagagggcatagaagcttccacccctcatccatgccctgccctgtgtatccttctatctggctgttcatctgtatcctttcgaaggtctctgattgtaatcagtttccttgagttctgtgagccctcctagcaaatgaactggacctaaagagtggagtcttaggaacctctgacttatggtccgtcaatcagaaacacaaggaaaacacctacagcttttgcttacatcttaagtaagggcagacatgagggactgggccctaattgtgtgggcctggtacttactctctccagctgtaaaatgtcagagctgagtgaaaggatatctaggtggtgtctgcatttcctgggtatgtggagagcagccctccccacagaaagctgcgtgagcctacgggagaatggggaccctctggtcatttgcttactgttgagtttgctgttagtgtatatcagctacagtctgtcatcagatctggattttggaaatattttcttccagtctgtggctttccccagcattctctttagactatttcaaaggggagatatttctaatctgtgggtcctgagagtttccccttcccctgttctttcttttggaaggtaaatgctgctgtgtatgcatctcagatctatgacccctccagctgttctagtcagtttgttgaggaacctgtccttgcttcttcatccagcagcagttggtagcatctgtaggtctttatgggctgtatgacaatgttcccactgctttgcaggcactctctttatgaccgtcttgtctgctgtattgtgatggctctcctgggcctttcacttttctaggtaaacttcagaattagttcgttaattccacaggctaatttactgggatttgatcagtatttcattgagtccatacagtgagtcagaggaattaacattttaagaatcttgagccgggagtggtggcacacccctttaatcccagcattcactccggaggcagaggcaggaggatctctgagttcgaggccagcctggtctacaaagtgagttccagg

SEQ ID NO: 23017 - DNA, 1129 bp, Mus musculus
tgtgtgtgagcgtgcgcatgctcgagaattttcttctttgccccttcacaaagggacatttacataataatgtgtatttgctagccccgatggtgccttttcatgacaactgaccaccacttcctgataatttaggctccatctcctgcttccagagtcccaccttattatttctactcatttataaaataactaataaaagcctccacaatctcaggcatgttcaagaatgtatggggtctactcggtttctactactactggtgctggcttaaatatgttgtcttcacttaagcgtaagacctgagcctctaaatggagtgttcaagtgcttctgcctgagccttgatgccgtgttttctatgttaaatgtagaaggcctgtttaagatagattgtaaatttaccttagtgtatatttcagagcatttattgtaccagccctgctgatatcccttgagccctgttccgggtgtctctatggttggagagttacagagttagaactatggttggccaaggttacagaaactgttttcagaaccacactccagtgggctggggacactcttcctgagcagtgggtattatagcccaggtttaagcactgacacgttccctcccctcagggagaaaaagaaaattttattttaatacaaggctttccaggagacattcgtgtgtcccacagctaagtgtattttattacagtaggcattcaggcactttctgcctctcccaaaatgagggtcttcccaccccccaccccccgcccccaggtccaaccaaaccccaaagcactagatcaggacatctttgaggacagatgtcacaagaccagcttatgccattcctaagaagtgagctattccctaccccccacccccactcgcagcttcctggacacttgttatagtgttatctttgggctgacactctccaagtgattgcacaaaggaggtaaatctgctaggggcccctgtgatccgctttcctctcccaaacgcaactacgagtgattgtattggaaattgttccagtccactagacatatatgccattccacacttcttccctatattcctgccttcctgcgtattggaatagttacttttctgggagacagtttc

SEQ ID NO: 23018 - DNA, 1168 bp, Mus musculus
gaatctctcatagtcagcccaggctggctttgaacttgctacgtagttgaggatgaactgaactcattctcctgcctcagctgctcaagtgctcggatacaggcacggaccaccatgcctgtttagttcacacattgttcataccactcattctttgactgtgggcatgtttgcctctctgcgtgcatgcgtggatatgtgtgcctctgcgccttacagattataaattcagttctggaaagaaacactgataccatgccacacgagcacacttttgaagaaaaggtgcctgcatctgttttccacagcatagatgctcttgatgagaagacagactccggaggggatttgtcttttatagacaaagctgaggcagggcatctcttgtattatacaataccaggcaatcaattggtaggtaagcccaagctcccaccgtgtcatgcttccagtaatactttaggagacccaggaggtcatcagaaaagcagctgcttagatgactagagctagaggaggccctcagcagcactgaaattgtgtagtatatgttgagttgtatgtatttaacttgaattaatttgccgcatgtgtctggtggccatattggatggtacagcttttgttcataggtacaaattacttatgagctacaagctttttcaattaaggtaattttaattaaatttacttcatgccagattatttatcatctctgatataagtagtgaataactgagtgtatcctgactgcatatgaagtgcacatgagtgaccctgactgcatatgaaatgcacatgagtgatcctgtctgcacatgaaatgtacatgagtgaccctgactacacatgtagtgcacatgagtgaccctgactatacatgaaatgcacatgagtgaccctgactgcacatgtagcaccatgagtgatcctgactgcacatgaaatgcacatgagtgaccctgactgcacatgtagcaccatgagtgatcctgactgcacatgaaatgcacatgagtgaccctgactgcacatgtagcaccatgagtgatcctgactgcacatgaaatgtacatgagtgaccctgactgcacatgtagcaccatgagtgatcctgactgcacatgaaatgcacatgagtgactctgactgcacatgtagtgcacat

SEQ ID NO: 23019 - DNA, 1157 bp, Mus musculus
tacatacatgtataacaatgttcttatagagtccagcacacgtataatggagacatacatacatacatacatacacgcacaggtgtacacacacacagagggagagagagagggagggagagagagagaaagagagagagagagagagaagaagagaagagaagagaagagaagagaagagaagagaagagaagagaagagaagagaagagaagagaagagaagagaagagaaccacagatggttaatgtggtaagagatgagaataagctacaaaatccatacacagcaccgggcaagagaaagaaaccagcagtcagttctaaagacgtttgaaaaggtagagaagggcctagaagaacttctctgtgaggtgggggtaagtagagcaggcagggtgatctaagatgtcaggctgtgtcaagaagacagtagtccaagatagagggctctactagctgaattctttagatggacagtgtttgtgtccaggggagtacagaggggctggccaatgggtgaggtcagaaaagacagccaggcagaaactttcaagaggacgcctgtgctgaggctcagcagagggcaaaacagctagagatgtaggtcatgagagtcttgtctctaaggagcctaaggagcgtgtttgtatgatgatccaagtgacctgagcagacagaggcagacagaggtgtaagagccaagggagttgaagcaagaaaggacattaaatgagtaatgtccatgtgtcatgtgggatcagagcccatgtcaaagactggctacaacttaaaacatattttttcatttctttctttctttttttttttttcttttttttttttttttttttgaggtaaggtcacatttagctggtttcaagctcactgtgtaactgagggtgactttgaaaccctaatccacctgcctacatgtcccaagaactgggattatagtcagatagcaccatttatgtgatgttggggtcagaagccagaacttcctttatggtggtaggcaagttttctaccaaccaaaatacatctttaattggagtgaaatctcagaacaatggggctggagagatggttcaatggtcaagagcactagctgctctcccagaggatctgggctcgattcccagcacccacatggcag

SEQ ID NO: 23020 - DNA, 2366 bp, Mus musculus
gagtggaaaaattgagatatacactgccaatacaatttgtgtgtgtgtgtgtgtgtgtgtgtgtgtgtgtgtgtgtgtgtattaaaggggggaaaaagaatattaagtcagaacttaatacatcaaccaggacccctccatgtcccagagtgcctctcagaggcctttgacaccataatgagggctgcttttgagccttctggtagagacttaattctgcaaaggcttcttgattgtaaaacacacacttgctgcattgacaacagatcctggactgtacctgtatccaaaagtctttgtataacaatcaaacaaacaactttggtttctaatactttatcactttaactccgctgcttttattatcaatctcaatgtaacctgatatttttatacaggattgttccttcagtatcttgtgtgattttaaaaaaagcaaaaacaaaaaccaaaagtcaagccaagtgcagccaccttaagatagctccatataccctgctactgtgattgttcaagcagaaatggagagaagctactgagacagacaactgggaaactgtgatcttttataaaccagaagtaattcaagtgctttctctgtcctctgctggtttgtgttttgattttaaatagggaatttcagatgctgcctcctggctgtatccaaacttgttgagtagtaaggagttatggttttgaccataagttctttgggatgccaataggcacagtgatgtctgaggaagtgttagggtacatcctgtccatttttaaaagatttaaaaaacaaaagacaaaaaaaaacaaaaacaaaaacaaaaaaaatcaaaaaaaccaggccaactcctcttttatactactgtattgacttttttttaaataaaaaaaaaaaaggtctttatttttaaatgcatttcctttcatctgtgccacaaggactgaatcttccgtttataatgacatgtgaagtgtatggtttattttacaagaggaggagttgctgtacatgttaaaatttttaaaaggtttatagttaaccaccaaatgctgatgaatgtgtgacctttgccagagctgtcaagccaggacacaaagggtcaaggacctaggacaataactcttagtcagtttatgttcggttggtacaacacatctcctgtgcaaactgtagtccatcagaaacaccatacacatatgctaaaggtactaatttatcctcagagaccctgaagacaccccctcccccatgatttgtagaaatttgttttgtgtgctgtgagtggttaatgtagtcttgtccttgttaataacttgtctgtgaatacttttatttgtacagtttttaattaatttatttttggagatctttttctggaagagttcaaagcacaccaaagaaatatattatacattttggcgaaagattgtcatttatgatccattgtttatttaagaaaaaagaaaaggaaaagaaagtgggaaaatataaaaatatatttttaagcttacttgaatggacaaggtaatgtgaaaactcgactcttcctgcacgtctttttgcctcgtgttatgagattatgtatagtttataggtatattagtacagtgcatggtgctgttacgtggacaccttttaatgttgtcttcagattgttacagtaaataggaaacatgcagaccttcctttacaaagagagagacctacaacttgaatataaaataatcctacattttaaaggtttatttgatttttttttcctgttattcactttcaaatagaaaagataaagtatgaacttgggtgggataacttatgtactgtaagcttgttaggacaaagtattcctgatgtataatgagttgttttatttatacaactttttcaatggtagtttgcactattctttatcatgctacaggtttatttattatgaaacaaaggaatatgtattttatgtattttgccatgaataggttaactctgccacaaatttattggttcctgatacactgaaaataaaaccttaaaatgtgtacctcccttagaaagaagtcaagaatggtgatggacaaatgtaataaaggtattcttcctatgtattgctacattttatccaaggcacatctctgtcattcttttaaaacagaacagttgcaaaaggagtgaacctgcctttccctgatctattatgagcttctgaagaagggacaggtgggagtgggtggggtagcttggattacttaccatctaatctgaagcagtgagtctcagctttcctaatgctgagactctttaacacagttcctcgtgttggggtgacccccaaccataaaattactttgttgctactttgtaagtgtagttt

SEQ ID NO: 23021 - DNA, 1551 bp, Mus musculus
ggtgtccgcagtgcaccgaggcgcgggttctggcagcagcggctccggagggggctcggcggccggcagcggtgggggcggcggcggggcgggcggcgggggcggcggcagctctggcgggggcagcgggacaaccggaggccatagcggcctctcctccaacttcaatgaatggtacgtgtgaggggccaggcctttctcccattccctgttcccttatccaccgtcgccctcccaaaacccatcgagggcaccttaggatcgtcttattaaaattatgaatctgatttttatggtgaaaaaaaaaagattttaccagcagaaggatttttttaactgttttttttttttttttttaagaaaacaatctaggcatgaaaagcaaaatctctctgtatgtctgaaactgaaaacataaaaaaaaattaagaaagtaaatcccacaaaaatatcgagccaaacttccctagcccactttccttcccacatgcttcctagtctttttgacaaactgtacatagcggacgccttccttttccacggtgattttaatggcttattggcttattggtggatagaagtttgtccatttgtaaactcccggattgcgttccctcccgcctttctcccatttcccttccccaagtgatgggccttttctttttccttttagtttcccggtttctttctttcttttatttttttaaagtaatgtggaagaaaatggtttattttgtattgtggtattaaatattgtgttccttttaaatgaggcaacttgattgtaaacttcatgcgactatagactggaaaatatgagccgtgccaaagtctcccttctgtttcttcaacataccaacccatagcacacatcaccaacaccaccaacgcttgtgaatgtattttttctgttagctgggtttacatgtgatgtttcagtgcttttgcgacgttcgatttgttagttcttgtatgaaagattggggggtgggtgggtgggagtaaacgttgtgccgttagcttttttccgaaataacacccttctgtaaatatccgttgccatatttatccatttgtaattaaattatggtattaacttgctacagaggaaacaatatttataaagaatgtttcttaactataaatatgtacaattgtgggcataaactgtttcagattttttatttgaaggtttaagtggtttgatcatttcttgtgatgttttgagagtaatgcatacagaaatataataaaatgtgttgaaactgcatgaacatactttttccccccctagcagagttattgaagagaatgggaaggagtcagcttgaggcatgacgagggtatggattgggggaggggggaagtgccaccttgcattctttggaggaaggtctatttatgcatagagaatgggctaaactgcccctttggcagaaagtctcaaaattattttctacatccttttgttgggtagctgaggatgaattaaatttttggaaagcccctgtgaggaatggcggcaggaaccttcagagtgtctaatggctc

SEQ ID NO: 23022 - DNA, 1226 bp, Mus musculus
accaccaaatgtgacttcactgcttcgtttacaccatctcatcatcagagccttagagatgtggatgttatacatgtttcactgcaaagtgtgtttgtgcttgaccgcagtaacaaaagatagtttcttttaaatttacgcaccttaatctatttcagtattgtccttgctagacaagtcggggaagggtccattaaaaactacatggtgttatttgggaagagtatattcactaatcaaggaatagattagatctaatcttttgactttattgatgcaatgattttcctatgtgctggctgctaagtactttgctctgtgctgccagccaactcccctctactgatgactttatccttgctaaatatcttttctaaattgatagcaagaaacaaagagcagtctttattgttatgtccagtaaggtgcttttcgtggaaaatctaaaaatagccgaacttgtaaatactttttcatcttccagaatccttactctgggtttgggatttcttgtgatcccctttcttcctgcaagcaacttgtttttccgagtgggctttgtggtcgcagaacgtgtcctctaccttcccagcgctgggtactgcgtgctgctgacctttggatttggagctctgagcagacacactaagaaaaaggtaccatagggctggggcagtgatgcagtgggtaagagagcttgctgtgcgagtgaaggctgagttcaaaccatagcactgatgtaaactgcctggcatggctttgcatgcctataacccccaagcttgagggctccaagctagggagatcctggaaactcattgtcctgccagctttgcgttctaaggcctagagtgagaatggaagacacgtgacatcctcctgtggcctctgcatggacacaggtgtgtgtttacatctgtgcacccatgtgcgtgcaccacacatatgtacataccaaaaagaaaaacctagaatgctgcctcagaaaaccatagcaccacatgttactaatgacctctgccaactctattcagaaacctgttgccgccatcatcctgggcatccttctcatcaatgcactgagatgtgtgatacgcagtggtgagtggcggagtgaagagcagctctttcgaagcgccctgtctgtgtgtcccctcaatgctaaggtaccttgcccaccagattacatttttaatcttccagtagataagaacatacaccatgga

SEQ ID NO: 23023 - DNA, 1157 bp, Mus musculus
ttagagaaaggactggaggagctgaaggggtttgcaacccataggaagaacaacaatatcaaccaaccagactccccaagagctcccaggaactaaaccaccaaccaaagagtacacatggagggccccataactccagccacatatgtagcagagtatggccttgtccaacatcaatgggaggagaagcccttggtctggggaaggctcaatgtcccagtgtaggggaatgccagggcagggaggtgagagtgggtgggtgggtgggtgagcaccctcatagaagcagggggagggaggatgggataggagagttcagggggcgggaaaggagataatatttgaaatgtaaataaataaagtatccaatagaaaaagaaaaaaaagaaaagaaataaaaagaaatgttcaatgactttagtcatggggggttgtagtctcccctcccctagcctgaaacctgcttgctcaggggtggagcttcctgctcattcgttctgccacgcccactgctggaacctgcggagccacacacgtgcgcctttctactggaccagagattattcggcgggaatcgggtcccctcccccttccttcataactagtgtcgcaacaataaaatttgagccttgatcagagtaactgtcttgactacattcttttctctcgccacctagcccctcttctcttccaggtttccaaaatgcctttccaggatagaacccaggttgtggtctgctggccggacacaacagggggtgaggggagaagtggtatagtaggcacaggcatgccacctgatttcatctactttgacagaattgctaaagtgagtcaataataatgatcaaaatctgtctgaacctataaatatgcacatttcaagataaaaatatatcaataaagtttggggctaagtctttcatgactacctaacaaacatgtgcagacatgttttacatgtaaaatgctcctcacaggttcatcacatgttgaacacttttcccaagctggtggtgcagtttgaggaggtgtggggaaactttaggaggtggggtacaaccagaggaagcagatcactcaggaacagatcttgaggtttacaacctggctccactcccagtctcctgctttcctgacctgcccaggtgtgaacc

SEQ ID NO: 23024 - DNA, 1183 bp, Mus musculus
gccaggaagtgggagtgggtgggttggggagcagggctgggaagggtataggggactttcagaatagcatttgaaatgtaaatgaaggctccttctctcagctggtctgctggagaccccctgagcgccatttccattccgactctatgaaagaaaggatcatgaaccaggagaaactctccaaactgcaggcacaagtgcgcattggtggaaaaggaactgctcgtagaaagaagaaggtggttcacagaaaagccacagcagccgataaaaaactgcagttctccttaaagaagttaggggtaaacaatatctctggtattgaaggggtgaacatgtttacaaaccaaggaacagtgatctattttaacaaccctaaagttcaggtatctctggcagcaaacaccttcaccattacatgccacgctgagacaaagccgctaacagaaaccagctgcgtgcagacagtctgactagtttaaggagactggctgaagctctgcccaatctgtggatggagaagcaccacttgctactggagaggatgatgatgatgaagttccagatctggtggagaattttgatgaggcttctaagaatgaggcaaactgaattgaagcaacttctgaagaaggtgatacttgcagaaattacaggagctgctattttatatcatgactgctttttaaaattcttttgtttattatgaatctgataaaatctagatccctaatatttttaagcccaagccccccaccccacccccaccccccggacactgcagctcttttcagttttcgattatatctaattcattctttgcggcaaataaagctgaagaatcctgagaatacagtttggaaagggttaataaaattctttgcctagttaaaaaaaaaagaaagaaatgtaaatgaagaaaatatctaataaaaaatgttaaaaaataaaaatagaaggtctgtaagctacaaacttgagctaacaataggtccttaaggactatgaatatgaccttacaggggattgtgggaatctagtttctgcttctgattttaaatggcttgctgactataaagtatgtggcttcactcaatcatatgctctgaccatatgttgtctattgttgatttaaaatcaataacattaaccagtcagggactggaactccagcattataagc

SEQ ID NO: 23025 - DNA, 1843 bp, Mus musculus
gagcagttactctcagcagaacacctatgggcagccgagcagctatggacagcagcgtagctatatggtcaacaaagcagatatgggtagcagcctcctactagttacccccctcagactggatcctacagccaggctccaagtcattatagccaacagagcagcagctaggggcagcagagttcattccaacaggaccactccagtagcatgggtgtttatgggcaagagtctggaggattttccggaccaggagaaaaccggagcttaagtggccctgataaccggggcaggggaagaggggaatttgatcgtgggggcatgagcagaggtgggtggggaggaagcaagttggaatgggcgctggagagcaaggtggcttcaataagcctgatggacccatggatgaaggaccagatcttgatctaggccttcctatagatcccgatgaagactctgacaacagtgcaatttatgtgcaaggattaaatgacaatgtgactctggatgatctggtagacttctttaagcagtgtggggttgtcaagatgaacaagagaactggacaactcatgatccatatctacatggataaggagacaggaaggcctaaaggtgatgccacagtgtcttatgaagatccaccaactgccaaggctgccgtggaatggtttgatgggaaagattttcaaggaagcaaacttaaagtttctcttgcccgaaagaagcctccaatgaacagcacggggggtggcatgccaccacgtgagggcagagggataccaccaccacttcgtggaggtcctggtggcccaggaggccctggaggacccatgggtcacatgggaggccgtggaggagacagagggggcttccctccaagagggcccggaggctccagaagaaacccctctggcggaggaaatgtccagcatcgagctggagactggcagtgtccaattccggactgtagaaaccagaacttcgcttggagaacagaatgcaaccagtgtaaggcccctaagcccgagggcttccacccgcgatcgtggacgaggtgagggggaagaggactcatggaccgtggtagtcctggaggaatgttcagaggtggcagaggtggagacaaaggaggcttccgaggtggccgtggaatggaccaaggttggtggaggaagacgaggtgatcctggaacaggtgggaggaagaagaggtggacgtggaggacctgggaaaatggataaaggcgagcaccatcaggaacgcagagaccggccctactagagacctgcagagctgcattgacgaccagatttattttttaaaccagaaaatgttttaaatatataattccatatttataatgttggcgacaacattatgattattccttgtctgtactttagtatttcaccatgtgtgaagaaacattaaaacaagttaaatagtagtgtgctgcgttttttttttttttttttttttggttttgttttgttttgaattttgttttgttttgtttttttgtttttcctttttactatggttgttttaagacttaacaatgggaaccccttgtgagcatgctcagtaccattgtggagaaccaagagggcctctaattgtaacaatgttcatggttgtaattttttttttaaataaaattccaaatgttaaaaaaaattaaggttaaagcaggaggttctcaagttccagaccagcctgtgctacatagtgaaatcttgtctcaagagagagaaggcagccgggggagctgaaaaccatatgtggaaaataaactatgatacagaaattatatcattcggtatctaaagtatcaatgga

SEQ ID NO: 23026 - DNA, 1182 bp, Mus musculus
actaaattatttaaaacaaggcatacctctccccaactcagtctaaagacacaatttcattttgagaatgtttacagcccatttaattaatcagtgaactaaaagtcatagaaattggatttgtgcaaatgtagagaaatctaccatattggcttccaaaatttaaaaattttatgccacagaacatttcatccaaatcagatttgtacaatagggcacctgaaaagtgactgcagcctttggttaatatgtctttctttttcctttttccagtgttctagttacattaatgagaacagaaacataaactatgacctaggggtttctgttggatagcttgtaattaagaacggagaaagaacaacaaagacatattttccagttttttttttctttacttaaactctgaaaacaacagaaactttgtcttcctactcttacattctaaaccgatgaaatctttaacagattacactttaaatatctactcatcattttctctctcagagtcctagcttgagttgcactgcatgtatctgtgcatcttgttctcttcatttaatgctgtactgttctgctgagctctgagggactatcttgagagatgtaatggaaggaaagcgtggtgttaatctgcgtactgcttaagacagtatttccataatcaatgatggtttcatagagaaactaagtcctatgaacctgacctcttttatggctaatacgactaagcaagaatggagtacagaattaagtggctacagtacacacttatcaaaataaatgcaattttaaaacctttcaagtgtgtgtctttattgttcagcatgctcacattgaaaatagaagtgatttttttaatgccttaaaaaaaaaaaaaaccaaaaccctaagttgtaactaatgcattaagtgctctgctcaaaaccgtcttcgcatgaggcgggtatctttgcaggctgcaaggcgctgctctaggtctcggatagtgttctgcagacttgcaatttctttgctcttttcttcctgaagatgctgaagcttctaaatgaagcagaaataagtctgtcacagcaacttagaggtaaggttaggtatagtgaaccacaaaacaacaatcacaacacttgtattttaacagactagcttactctgaaaggcctgccctctcatttttgtgtg

SEQ ID NO: 23027 - DNA, 2341 bp, Mus musculus
tttagtggatcataatcagttaatcaagtgcttccactccctttcccaaatgcacttatgttttacaaccatagtaccgttgtagacgtcattattgctggactggtctttgtggccagataaattactttacttgtatgacgtacctttaggaatactgtgtctaaaggcttttttcagccctttccagtagaaattagatgttcctttattttctcgcttcctttcacatgtcaccacagtacaatgtgttgtaattttttttcttactactgaacgaactccatatcttaaaattttatctttgcacacactgttcattgcatggtaggtagtaatgtcttctgaattaatgaggcatgatttgaaatgccaaactttgcacaagacggttgctgctattgcattccaaactgccatgccctctataccagtggttgatatagcaaaagggagcatgtcttcctcggaggagtcaagtgttacctggacactaaacctgagaaaataagactgtcttcacaagctgagaacttccatttttgcctttatgacctttgggggctcactggttgatacaattatgagggtatttctgggtgctttttgtacaatttactcccctaccccaaacaattggagagcaatttatagaccataatagttgtagtactttctactgtggtgttataaaaggaaaatacatcttttggtattaatcttgatgagtaaattgttttatttagaatgaagtaacctcaaaataacaaatactccacataacaataagcctataatagaccctttcaatagctaatatgtgcctacaacatgccatattttgtcctaggcactgaggatataaacaccctcctgttacaggcttttagtggaggaagaatgtacagtatgccaagtgataacacacttagcagggtgtaggggactattgtgacgtggagatggtgctattgtatttagagtggttagaaagatccatctaagcactgtcttcaatttccatcctgttttttctgatgccttgtgtatgcagtacatctgaagattttcctaaggaagtggctcttaaaacctccttttattgaatctaatggctttctcattcgtggtgtttctgatgcctacagcctaaaggtcttgggttctttattcacttgaggtggttttctgtccaccgcccagttcccttttctatcttctatacggttattacatctttccacagaaaccaaaactctgtactgtctttagtattacttccctattattttaaacacagtatgaagtagcattgtatggaaacattacagtaagaggtacttaatatagacacagcgtatgtattatatcatgctggtgtttggtagcttttgctttcctgcgtctagtgaaaatttatcttcggtttgaattctctgctgttgattaaatgtaaaatgttacaggattttcccacaatccttaaacgtttatcactctttactcagtgtgagttttctgatgtggagtagactttaagacttgatttaagagcctgtctctcttgctatgtttataggctgtctggctgctgtgcattatttcatgttaagtcacatatcatgacatccccttatcctttgcttacagtggaaaaaggtgaaagtcatgactaagaggccaccataaaagatacattcccagcctcacaatcttgtgctcagtcttgtgatgttcattaaagtatgaactgtgtctgaaggtgttttccagttatcttcatgacattttaaatacccaccgctactaacttggtctgcttgtagattgcttgtctcctggggcccctttataactccatgaggatatttcatctgtcacagagtccaggattcaatagtcctctagtattacttacccttcattcatttactataaaaggaaatagattataaaagtattatgtctacataagcttaagatagccaggattaaaagtattcattatgtactatgccggtgtttcctagttttgtttttgcaaattttagtgacatgttccagctacagtgttttggaacatatacttaataaaataaaacgaaacccccctacttgtttcttactttcttttatattttattcttgcatcacttttctgtcctaatttatgaataccttctttctggtcctagtaactttcaaagagagtagcataatgattcagattgtgagttcttgaactagaaggcctgaggtaaatcacaaccctgtcatttcctaactggaactgtgtcaattgctaagtctttctgtctttaaatagtatatatttttaatt

SEQ ID NO: 23028 - DNA, 1182 bp, Mus musculus
tggccttctccaagctagtaagtggtatgacaaaggtttattgtcagagcttttattagtgttgtaagaactgaattctaaatgtccttcccaggagtctttagtgacatccatgtgctggctatgatgtacagtggagagatgtgctactgggggttaaagcactgcacagatcagcagtcagaaaaccatgaagttgatactgatgtttttggagcaagctgcaccacacacaaagaaaccttggatttccgagaagtaggagaaaaaattttgaagaagtatgtgtcggtgtgtgaaggacctctgaaggagcaagagtggaacaccgcaaacgcaaagcaaatcttaagtttctttcagcagcgctgtagctaggtgttcatctaggtctcaactcaaatacataaagatgctgaagtggggaagaaggctttgacaaaggagatgtactacactgatcttgagacggttacactacataaaggtgcccagtgcactacgcttctctaatgctgtcacctttccctgagtggtcttaggtctgtgaagaatattctctaatttctagaatggcatatatgccattctaactgaacttgaactacatataaacctgccactggtaaggaggaacccaatgtagatggacagttgttttctaatattttaggttatattttttattgtactaaaatatatgtaacacagaatctccttattttgaagtatgcatacttcaaagatggaaatcaggttttctccttgtttcaaatataaagtatagctataaatgtaggcaattagaatattgtgactaatatttagatttcatttccagtaattaaacaacaaaggatttaaaagatgaaacttatttattttgccatgcattactaataatacttaatttacttatccattttataaattattttattttatttaaaacaaaaactgcatggttactccaaaaagaaggtaaattcagtatagatgagaccaccattagttcagatgcttgtagggcacatctttgcatataatgaactttacacatattttgcctttcagtaagactgaaatgctgaaggccaaagagcctagtttgctgtcttgctcacctttctctgcctacctcaagtcttccgatgcactagacttctgtcccagtgacatctt

SEQ ID NO: 23029 - DNA, 1943 bp, Mus musculus
cccaggctgccaagattgcattttcaacacataggatttaaacggaaggatgtcagtaatcaatagttacattacacatttagcaagaagtttcggctagttttcttctagtatttctggatttgtgcagccatagacattgttctctccatcgtgatatatcagttccgtgggaaaaaaaaaaaaaaaaaggaaaacattttattgtggtcttgcttcatgagtgctaagaaggttgtctttatcattgttgctcacagtggatatatgctcatcttttatgctatatgtattaaacctcgacttagccctgaaggtgaattttcatgtgcatttgtgatttggtagaatacttttttgatgactatgtatcttttaccttcctctgttttgagagatgccagttatgcttgctttcttagaaagtcctccttccctccacacttcttatagctaaatagatactcgaaaaagcgaacaggaatgtccctgtgaaaagtaagtagaagaaaggacaaggcatatgctctgctggtgctgacatcccactaaatgttgcctttaaagacaaccaaccgtctacctatggtgtgctatacctttgtattctgaagactgtttttctgtattgatcaccaatgtttacttatacatctcttgagcaaaaaaagaaccatgggcaattgatcatgagtcctgaatcatagtgacagcagtatttaaagagatgatattccaagatatctcccctttagcctctccattctgctcagcaaagattgtaaacactgagttacttttttacactacagtggtattctgcataggttagttctcttcacaaagggctactgctttagccttatctgtgctggggaaatgatgggaaaggctcagatctgagtggctagcagggtttgtgtggcagagtgaatgcagtagcttgcattcatcagggatgcttcctcagaagtagccacaatacagacagttgccagggggcatcactccagaagcttccttgccttggtatcagatatctgaaaacctaggcaccctgaagccagactggacagctggcgtctgcacagtgaaacgtatcgtctttctggcactaattagaggaatttatacacgtcttaggtgatggttggcactggaactcactcctcaagcataaccacagttagcttgcacatgttgtgaaggggagataagcttttcctccatagtacaccctctaggtaggactgctttagtggatggccacgtggctgaaagcatcctctgccagtgttggtaagaagaacccgtcttagatggtacaaggcccaggagagtacgtatgttagagcacacatttgagaaatcatcttgctgatattgatatgtcttcaggcgcacttgcttatcattccggtctgttactttaacgcaaggggcttctaagaatgtcttaaacttcaaagcctgaatagacaactttctaagagtgccatgatattttttaaaaaatgtgttaaatgacacaataaaaattgcaagttgatggagacgaatgtgtgtgtcctcttatttgggaatggtgcgtgagaaacacctcaaaggttgattctaacaaccattggtcattaggtcagcaggcttctacttctaccacgttgttaccgtctctgtctctttcttttgtggggagggagtgtggagacagggtctctctgagcagtcctagctgtcaaggaacccattctacagacagactggccttgaactcacagaggtccacatgcttctgcttcctgagttccagcatcaaaggcaccaccatgcctggcattagatttgctttttaccttacctaatacatatatttctttttctagaaagtgaaagaaatattacttaattgaattctgctctacctttcgccccatcactgagac

SEQ ID NO: 23030 - DNA, 1407 bp, Mus musculus
tgccattacaagatggcgctgacagctgtgttctaagtagtaaacataatctgcacacgtgcaggggcagttttcccgccatgtgttctgcctttctcgtgacgacaactgggccgatgggctgcagccaatcagggagtaatacgtcctaggcggaggataattctccttaaaagggacggggttttgccattctttctcttgctttcttgttcttgttctttttcttgctttctttctctctcttgctctggctcttgcttcttactcctgaagatgtaagcaataaagctcttgcgctcttgcgctcttgccctcgctcttgctctcttgcactcttgctctctggctcctgaagatgtaagcaataaagctttgccgcagaagattccggtttgctgcgttcttcctggccggtcgcgagaacgcgtgtaagagagtctcaaggttttctgcgtggagacatctaatgtagcaggtcttcttctcttgagtaggccttctggagctgctttttcgctcgctgtctcactcactggagcaccttgagcctagagaacaaaggctgggaaagctactatgttacaggactctctgacttggcagaagaaatagtcaaaagctgcgaggactgtgctatgacgaggtagaatttctaaaagaaatcttcccaaggtaatggacctgcctttgttgcccaggtaaatcagggactggccaagatattagagatcggttagaagttacattgtgcatgcaggccccaaagctcaggacaggtagagagaacgaatagaaccattaagggacccttaccaaattgacagcggagactggcgctatgattagatagctctcctaccctttatgctcttcagggatagaaacacccctggacagtttagactgaccccccatataaattactctacagggggcccccctccactggtaaaaatagcctttgtacatggtgcctctcttctttggaacgattcccatctgctaagagctgttgctgacctttggaggaagcgctttaactgtttctgtcttggctatggaaaaataattctcaaagttgctccatgtttgtttcttgggtcgctaagcacctagtacttacaaggttctcattgtaagcacacgaaacagtcaagagaacaaaagagaacgtagttcccaagtcagacctagaaacagcagaggtagcagtgttaaaggccaccatctgcccaccatctgtcagcttgtgactctgataaactgctacgtatattgactcttagtgagaatttttaaaaataagtttggtattttttagttgaaaataatcatgcatatttatcaaaaatacagaatgatatttaatccatatagcaccaccatgaccttatctttccctta

SEQ ID NO: 23031 - DNA, 2693 bp, Mus musculus
cggccacatcaaaacgaacctgggaaggctggctttcccggatcgggatcccagtcccagcactgcacaaccgccaggggcgccgccacgcactgggtgtctgactcccctcgagccccgggaccggaaaccagacggactgccaacaccgcagcagccccgacaccgccagaaaccctctccaaccaggaggcgggccgctggggagggcggagccacagcgccaggcacgccccctaccggtgttgcagcccaatcggctccctggctctctcgcccgggagactacacctccgcacccgaggcctgatagggctgcaccaagacccgccggaagtagtttcctgggcggaagcttatccacaggaagtggcgggggtgctttctcttccggtctctttggcctcgccggtagaagcaagatggtgagtgtggtttctgggctctgtaaatctctctccatccttcttcctcgggctgtcctgcctgttgcccggcgcgtcggtgacaaggttgcgagtgaggggagctgatgggcgaggagacggcgtgctgtggtccgcaggaactggaaggatggctgctgtgtgcagagcccggcccacggtcctagcgccgctgtgggtctctctgggctttggaggagacgtacgcactgcagccccgggtgggtgatcaggacaggcttggggacatctgtccccagccgccgagaaaccggctgcttggtgggcagtaccgcgactgagagacgggcagaatgttgtccttaacgcctaaagccaaggaggcttaggtccgcgcagagtaaggcattataatggtcgtgtggatagccggtagtgcttcctacctaccctacctgtgtgctaagatttaaatctttacaccgttttgtcccgtgtggatcttgtttacgtctcatccatactcattgctaagaaaatgccagagtacattgagaagtcagatttcagagttgcttatatgtggggttttttttcctgctttttcttttaatgtgcagacgaagggaacgtcatcctttggtaagcgtcgcaacaagacgcacacgctgtgccgccgctgtggctccaaggcctaccaccttcagaagtcgacttgtggcaagtgtggctaccctgccaagcgcaagaggaagtgtaagtactgtaatccgcaggcgggcttttaccttgacctgaggtagcgatgtaatagaaaacacatttggcacgcaacaactttggaggttggtttgttggctgagtggttaaaacatagtaatgacactactgagaaaatgggctgacactgggtgcttgggaaaaccatttggaatcctattttttttattagataactggagtgccaaggctaagagacgaaacactaccgggactggtcggatgaggcacctaaagattgtctaccgcagattcaggtacagttttggctaaatgtcattggtcctccagggtaggatgaaactttgcactcttactgaagggtaggaatgatactggggtttggtgtgggcctgagacgcccacatttgtcaagactatgagtgggatctggggggcagcttacttggatctgcctccagactttgctcaagtctgctaagctgttctgggtgccagtcataacatagatgggtatctttttactggaggctaggccttgatgttccttaaaagtacagaatccccagcccccctcttagactttcctgtggggtctgtgctttgacaggtgcttttgtgtttgtctctgttttaaactcagtccagttttgtgaacttgatgtgtagtggcttgctagtgtttgataggctagtggcatgttttgagcctgattaacctttatgtgcttagaatcactcatcttcctatgtagtattgagtagaaatgagtgctacttaacatttagacttctgagttgagcagcttcaagatcctgttaagcttggtcagtgtttcctgttactaaaggaaaggtgccaggacctgtcctttatagcttaaggaatagcttcataaatactttagttcttgtggaaatagggaaaatgagcccaaaattgttgagacagttaactttaatgtaatgtgggtgtcttgattagggtaaactaatagcttatcaatgatgtcctaaaaaataaatgtctgaacatatgactgctataatgatttcagcatttaactgagataagctcattacggtctgcttgatcaatttggaggcaatgtttgatattgctgctttaactttttttcttatctttaacatggcacagacatggattccgtgagggaacaacgccgaaacccaagagggcagctgtcgcagcatccagttcttcttaaggatttcaatcagtcataaaataaatgttctgctttcaaaaattctgtggtgatctaaggtactttaacatcggttcagagttcggttatatgattgctctgggatcctacgcttcttccttcatagttcctgtgggtccgaagctgggaggggctgggtggactctcgggaaagatactctgagcctgtctcggtccccatcgtgtttgcttggccctgggcatggaagtgggtgagtgatgagctgaacgagcaggcttgctagagatgaggacagttactggtgtggttatatcactaccatgcctacagtgt

SEQ ID NO: 23032 - DNA, 2693 bp, Mus musculus; identical to SEQ ID NO: 23031

SEQ ID NO: 23033 - DNA, 1220 bp, Mus musculus
ctccccactaaataatttatttatccactttacatctctatcacagcatcctctcttctcgcagcccctcctcacactgcctttcctctcagctccccgacccttcatctctgagaaggcggaagtccttcctggggaaccaacccaccttggcacctcaagtttatgcaaaactagttacattttcgcccactgaggccagacaaggcagcctagttaggggaaccagatccactggttaagcccctcccccagttttgggggggacctgcttgaagaccaagctgcacatctgctacacagtccagggtctctaggtccagcccttgcttgctccttggttggtggttgattctctggaagcccctgtgagtccaggttagttgactctgttggtcttcttgtggagtctgtttgtcctccgagtacctcagtccttcccctaactcttccaccagacttcccaaacttggtgtaatgcttgggtgtgggtctttgtgagcctctcggaggacagttatgccaggctccttcctgtctgtgaatccaggctgacagatacaaacagcctgggactccaaagaggtagaagggaggacagtagtccagaaatgtgtctgtagcctgggctagcctagaactcactatgtagaccaggctggcccgcctctctctctaagttgctgggattaaagatgtccacttaggtttttgagacagggtttctcactggcctggaactcatggactaggctagattggatggtttacaataaatgctaagtatataatcccaaatgagtcaaagagaatgttcagagcttcctaccctagtttcttacttgatgaaagaaattatatctacagttttggataaacctcaagtgtttttgagaaacacttattaatgtgtgtgtgtgtatgtgtgtatgtacatggtaggggcgtgtgtgccacagtgtgcttgtgagaggatggccttaggaagttatttctctccttctattatgtggaccccatactttcaaaggcataggattatctctgttgcctcaaaataaggacgctggctcctctgcgggttgccttgcctgggtttgctgctgtgcagaccagcacagctgtcgccgtttggaggtttctcaatttgcctcctgcattggattcctgctcttttggggacagagtctaagtcaccaaggctggtcttcagctatctt

SEQ ID NO: 23034 - DNA, 2342 bp, Mus musculus
aggtacacacagcgtaacacacacacaatggactgtaggtctcaagcttacttgacttttggccatttgaatttgctgtaacaggtctcagtcgaccataaatttaccataaagccttcacatattagtacatgttgatgtattttatattagcttcatgaatttattgagttgcctggaatcctcatagaccttattagataatgctgttttctgggctccttaacttccaaaatagctactagtttccatttttggttacattgtgaactatttccatattcctcttaacatgctatttttgtgtagtaagtcatttcagagagcagtctggatttaacatttttctttggcttgtgagcccccaaagccccagaatttatatgttcagaccctccaagccctgaatttactttttcaggtttgcccttttatatatgaagtgctgctttggatccaagagccgagttgctcacactgtagtgaatcgtgttgcttctgtcagtgcacagagacgctatcatgtcagccagtgttgaatgtctttggtattttctaagccaatccagtgcatagaaaggacagtgtttatacgctctgaatgctaggattggggttttagcccctgattttattctggacaatttttaaagaaagaaaagttgcaagaatttagtgactgcatgtgtatttactacttagctcctacaactactgtttggccatatttgctctctagatccacacatgtataatatacagatatgcacatatattcgagtatatgtttgcttttattctgaaccactgagatgttaaggtatatatatatatatatatataccagccctgaatacttcagcacttcctaaaaataataataatgtcctttagaaaccttctgaaaccattataaaatcaataatttccagatagtgcctggttttccagattagctgtaactgcccagaattccatttaagttacagcctgattttatttgcagttctttaatcaggttaataacactattttgaaaagatgtagaagaaatcctttcttcaaactggccaagtttatttcaggttttaattcaaaataatgagtggctaaagaagtgtgatttttcttcaatctctgatttatatgcctctctccttttagtggtagcatagcataatgggtgtaagtgaagatttaagtcacgctagacaaagccggtattgtgtgagctaataattaatgtcatattggccatatttggtttcctttaagtttaggaaattggtcagaggctctagcccagtggtgaggctgggtcatctccagcaacgtgaaacaaaatgcattttctttaaacattaaccatcccccctttgtaagagagacttttccccccactgcattcatttaaaaatattttgccccatccccaaacctgtccagcacttatgtaagaacgcatttggaggacatgatagcttgcataaaagatgacgctatagtttatgcactgatttccggacaaaaatgatgcttctttttgttcggggcttgttttattcaactccgaattgaatgctgtataaagtaatggagactccatttacctgagttcctgactgtatttatacctgtgtgtttgtgccctctgtgtggggctccctgatgtcacgtatgctgtctgaatgcagcgctgtattcccgctgtgtagaacagaaggctgcatttgtaaagttatagatttgtaaataaaactgaggaatatctctataaactgttggggggacggggcacaaaaggaggagccaactaaataggaccttctaaaatttgttaattttgtaatctttgcttcttttataagttattctgtgattccttttagttaccgagttttattttgaagacattaaaatattgcacttgtataaatagtatgataaatgcagactattgcagtcaaattttttaaaagctaggatatctgaaatgacaactttcagttaagtatgtcaagcccaggacaggattttcacaaatgtattgtagtttgcaaattcttacactgaaaatgtaaagggagtcaatgcaaatgatttttaatcttttttttattatcttttcagcaatttatattttcttgtgattttatgcaaccatatttttactttgtcttgacaactgaaagctgtgtgatgtttttgacagaaaagtactgtatacatagttttaaatataacagattttgctgatatgtaaaaattttgccattaaagttgatttctcatgaaaggaacttttctaccaagtcgggagacgcaagagcttaatatatcta

SEQ ID NO: 23035 - DNA, 3261 bp, Mus musculus
accctgaactctggaaggaagacctttcttgggccagaaagctccaagaacagcagaaagtagcccagaggattgaaaacaaagaaatgcccccggaaggcccggacctctctccagggtccatcccggactatgactttgaaagcgatgagattgttgctgtttgtgcagccgtggcagaaaaacagaagtcggtgtctgcaaataaaacaatggttattgtgtcggcgtctgggactgtagagatcgtaaacgagaaggaagagggctcttccaccccagatggctccgtctttatcaaagcccggtgaagccatacacaatggagagatgtttgaatctttttttttttgttgtttgcttgtttgctacttaatgttttgatgacataggatatgcactgtggaggaagagggggaaaaaagaaatcctgttttaaaacgattttttaggtgaaacatagaaaaatcaagttgtggaattattcttcagtgagcggactatgcttctgtaacttcaatatatatacttagagttagcatcttacgtgaaatgtgttctgatcgataagcatttaatttgactgtatgggaaagtacccttaaaggcacagtttggaaagtgtgttcttgaatagtgtgtcttgacaggcgtgttactacagtgccgacatggagactttgctttgtgataaaggaagtgtgcggtttctttccctcctgtaaatctgctgttgtcattctcccatttttcttgcttcaccagtgtaagttttcatcaagattgaatatttctgacattcttttggattcaaagttattgctttgttatatgtgaatatttgaaatatttcaagtttgcctaaaaatgcatgcagatgtatgtgtcctgaacatttctttgaaggtttcgttgttcttgttgttgtgctaatgttctaatttgtgcttctgttttgactttaaagttaaaaagtgctaactgtcttcttcaggacttgataactggatactggtgtgtcagagatggattcattttactgtcaagattgagtcatctttaccacaagtcagtcctttgtcaagatgaatggcatttgcagattgtcagtaaagtctatttctgcattatcctggtcaaaaaagtttctttccttttattcttttaggggagaggctaagtaccccagagcgctggattagcacctgcccgagctgcatcctcagacctctttcttatttttgaaagtgtgaagaagcttgaaaacatttcttgtctttagcccatgctagcctcagggttatcttcctgccttagcatctagactgctgggaatacaggtatgatctaccactgctgacaaatacttcttgcttgtaactttgcagtgaacaatttataaacatctttctaaacagcttttttgggaactgttcagtgaaatgaaaaaaaatagttacaatttcaattaagtataaaagtaaaaagagagagttcttagagtgtcagggtgtgactgacggggagctgggatgtgatgaatagtgtaatcccacaaatacgggacgggtgtggtaaggaggcagctcagtgtcaggagtggtagcagaggcctgtaatcccagcactgaggaggctaaggcaggagagttgtaagttcaaggccagcctgggcaacatagtaagcccttgcctcagaaaaaagcaaaatcggtgggaaaataaaacaacacaagaaaaagtttattagagattctcagtcacagtcacaaatcagtactattattgctatgagttactgtttttgttgcatatattatagtgcaagtatatgcagtttacttatatatatgcatatatagtgcaagcatatgcaatatacttatatatatgcatatatagtgcaagcatatgcagtatacttatatatatgcatatatagtgcaagcatatgcagtatacttatatatatgcatatatagtgcaagcatatgcaactgttaggtgctgttcattctgatgctcaggcagttattattgatgtaactttttttttctttcagagatacaaattatctcagttgtattatgtaatcttagcaaaaactgttgtgacatataaatgtgctctgtatttttatgaggatggtatttttgaagtattttagaggaatgttcactagttttttgtttttttgttttttgttttcagagttagagaatcagcagttttcttaagaagtattatataccgccctccccaattatatcttcagataattagcccctggatagaagagagttttagaatgactaaaaaaattattttgttaaataacaagggatattctcagagagtacctagatgccaagagaattgatatgttacatacaaatacctgtttattatataatttgtgaatggttttccctctgttttggagattttcctcttagattttgacaattagatttgtatatcttttttttttcctgtgtagaagtatatgtgagccacttggtatggccccttacacatgctagctagctagttctaggaagaacttgtcttagttcggaaatacttctcacttcttcagaattttgaaaagatttttatagtcttttatccgaatgaagttactgcttgtgaaactgaaagatggttgtcagctagagattgttcttagcgtagagtctgtgcctctacctccaaagaggcaagcccacacgtggcctgcatgttgctgctgctgaacctgttgtttcaactgtcctggaattggcgggtcatgctggtctttctgttaccccagtataaggtacaacatagatgtaagatgtgggggagggagaatgagttacgaagaaaaaagaaaggttcatttctccagaccccaaaagatactttagctatcattccgtgtaggaagctaaacatgcatccattgttttgctggggtgtgagcaacagtatataaaagtttactaaagctgttaattctaataacactcgaattttatgaatctggagaagatgatactcataatgatataattatatttaatggatgatcataaacaacagtgttagtgattaaaattatattgaatatggatttgtgttgttctggtttcaaaatttatatgctatagatacttactcaagtgttacacgtcgagaccatacgtgtaaacttgagactcgtgatacctccaaggatgcaggtgcccagggtacaaagcattgtatcgtaatta

SEQ ID NO: 23036 - DNA, 1144 bp, Mus musculus
gctttattctgagtaaagctgctatgtacagattattcattctgtttatggacacatgtattactttctttatcttaaatggatacaactcctgttgtttgtacagcttacatgaaacttttaaaggtctcccaaattatttcccaaagtttgccttattttggatttacgagcagctgctgaagagttgttcattttctgatacctttgtcaatcttggtatcgttcatctttattattttagacaggctagtggttgttatattttaagtctgtatttccctggtgatgtggggctgcatttcttccttttttctcctcttttctgacacagtgccgtgtgttctggctcaggcagctgtgaacttgccacacaattagggacgaacttgagctactgatctcccgttttcttcctttcaagctttgacagtagaggcggtgtggcccatcacaccgggtttatatgatgctggagactgagcgccaggacaggtaagcacttctggttggcctgcatcccagtgcctgctgctgtttttcatggacgtacctgacattatcttttggggagaagtatagattcaaatttccccattttaaattttgatttctttactccattttacaactaacactggataagaattctttatgagttactgttgtgaatattttctctcctctgtagttttcttcaaacactattcagaaagtagacacgttagactttggtgaaggccggtataaaggggttttctcttcttccatttcgtgctgagagatcaattcttaactaagtcacaaggaatttctgtattttctactatatattttcagctttgctttttatgatcagttttgttgtttgctaagttcattttatatgtgataatagtaaaatctgaggtttggtttttgatgtctagcactgttcatagaaaaacagttgtttcctacctggcataggcctgtcatcttagtacttgggagcagaggtgccattgtggtatccaagacagctggagcaagacctgcctcagaaaataagcaagtacataaattaattaattaattaattatgtctttttgtgataaggtacacagttactatacaaatgttaagtcaattacatttctagga

SEQ ID NO: 23037 - DNA, 1170 bp, Mus musculus
attttcagataccatactcttctaccttttatttttaatgctatttctgctgttattagataaatacaagtaattatggtatccaacttaatttttaagaagttttggtgacattctgttaaaactacattttagtttgtagaaaacttgtagagaaaaacataagatggaaatgaactacttgatatgttttgataaaataaaatttcaaataccacttaaaaaataaaatatgaagaaaatccaactggtcttcttatgagattaaattgacctttgactaaagaaacaaggcacacttaaatatacaaaatatgcttttgtaatacacattatttgttcttactgattgttactttcaaagaaatgtagagatgagtgacaccagcaaaaacagcaggtttgttttttgtttttttttttttgttttttgtttttttaattgaaggagacactgacctctttgcgatcaaagataagtattaggggatcaggaatgttcaatacactaggttgttccatcaagaaacataatactgtttatttgtccagaagggcgggaatagatgtattcattagcctggtgagcagctttgctctgtgtggctagggacttttccagtactgtatccactgcctcagacccttaaactaagcttgtttttctcagtcagtctatagaacctatctttttaaaattattgttattagatattttcttcatttacatttcaaatgctatcccaaaagtcccctatacccccccccccccccccccccggcagaacctatctttatggactttacaaaacaattgcaatgtagttatgtctggtctgtacttagtttacttttttcctccaggagatttatgcaaggtttgttgtgcaggtggggttgggttaattatcaccagagtagttttcatcaaattgtgctgtgcttaaatatgcctaagataaccacttggagtcagactccagaagtttgagacaatttagtcatggtgaactgaattgccttcttgcctgcagctcatctctctgatagccatttatgtcccagagatccacaccccctgacacccccctccccaagtagctaacattagaataaataattctatccagttatgatgcagatgaaccacaacaatgaccagcatggtag

SEQ ID NO: 23038 - DNA, 1171 bp, Mus musculus
accggatcccaaacatcctgtggacaggactctccctatcatcatagttatccaggtagttaccatgacttttaagaggcagaaggtagtgtggatggaagcagagatgtgactctcagcgatgcgattgcggtgtagtctctatggagtggtgaaatcatgtgctatagagtgctggtggagcccaagctgaccacagtggggacaggaggcaaccatctgtgttccaaccctccctgcttttcctcttgttataatttttcaataaccccccccttttttttttaccaacactattttatggcagctctactgctccacatcctcattatttttagtaactatttattttttttcaacacaagttgaagcgcttaagtaagtgacactctccctggaactgaagctgaggtgttaggtcctcagtgacacaggttcatttgttcatcttgtctcttacagagcctcaggaaaaactcgtgggtgactagggcatgtgtgtaactcacaatggttctggttcagcaggagatacaaataatactgttcagaatggacgaggactgttacagctgtagaagcagaggcagctgacgctatctctttcatagtgttctaagaagataaaaaaaaaaagacccagtgtctgagttaccctataatacagctacatgcgaactatttaaattggggtgagttcaattattccaggtagaattatatttttaggaaaaatgaaatgaactacatgaaagcctaggtctacacatactaggtgataaagtgttttcgggtgtctcagcatcggattgtatttttggttacagtcagacccatatctaggagtggtggtacacagcatcttctgttacaatagaaacaagcagaatctgccctggactcgttggaaccatccgaagggtatctgtctccgctggggagcacggagaagcctcagcgtgagagaatgaatgctcttccccatcatccctgcttctgcaagtgtagactgctagatgccagcccttggggatttaagtcaagccaagatctacaggaagttctggagtgattgttaccacttctttggtacataggcctgctttatccttagtttctctacccttccattctgactccacacaaggtgtggaaaatgtgattctaaaat

SEQ ID NO: 23039 - DNA, 1617 bp, Mus musculus
aggaatcgtcgctattgtactcataactccacacagacatgcacatatacatagttagaagtcacataaaataaattttaaacaagaaggttagagaaggcgggcaggaaagtactattatcaaattgtcagatcctgagtaattaaacttaagtgttgatgtgacccttgtcagttactgtcccaccaggtagggagcaaactgggtatgtattcagaagattagacaaaaggttaaaggctgctcctagggaggtgtaaaggtattcaggatgttgagcaatcttacagagagttctggaagccagagccaagccctccataaatagaacaaaatggtttaatattagcagaaatttggaccaatggatacagaagtagttgtagagaacatttgaggttgcctttaagagtattattccagggagctggggaattcatgtggaggtcagtgtgaaagcaggtgtgagtggaagcaacagaaggagtcatggctgccaaagtgtttgagtccattggaaagttcggcctggcgttggcagttgcaggaggcgtggtgaactctgctttgtataatgtggatgctggacacagagctgtcatctttgaccgattccgtggcgtacaggacattgtggtcggggaagggactcatttcctcatcccttgggtacagaaaccaattatctttgactgccgctctcgaccacggaacgtaccggtcatcactggtagcaaagacttgcagaacgtcaatatcacactgcgaatcctcttccggccggtggccagccagcttcctcgtatctacaccagcattggcgaggactatgatgagcgggtcctgccttctatcaccacagagatcctcaagtcggtggtggctcgattcgatgctggagaattgattacccagcgagagctggtctccaggcaggtgagcgatgacctcacagagcgagcggcaacatttgggcttatcctggatgacgtgtccctgacacatctgaccttcgggaaggagttcacagaggcagtagaagccaaacaggtggctcagcaggaagcggagagagccagatttgtggtggaaaaggctgagcagcagaagaaggcagccatcatctctgctgagggtgactccaaggccgctgagctgatcgccaactcgctggccacggcaggcgacggcctgatcgagctgcggaagctggaggccgccgaggacattgcgtaccagctctcccgctctcggaacatcacctacctgccagcgggccagtccgtgcttctccagcttccccagtgaggccagccgggccacggcctccatcatgctgaatgacgccttccttctgccccaccccagaaaatcactgtgaaatttcatgattggcttaaagtgaaggaaataaaggtaaaatcacttcaaaaaaaaaaaaaaaaaaaaaaaagagtattattccagaaagattgaattactgtgcacacttgtaaaataactaagttatgttgtcttagataggttttccagtgctgtgaagagacaccatggccaaggcaactctttattataaaggcagacatttaattaggagctggcttacagattcagag

SEQ ID NO: 23040 - DNA, 1085 bp, Mus musculus
gtttattacttcttcctagatgcatgaagaagcagaggctgtgttggcaattccaccaattcagcctatagttgatgagtctgctgaatcctgacctcatgcttatgacgtttatagctggatactctatatgtattcctactgtggacttcctgaaagccccacaggatactgactggctgacagtgaggcaggagagccttctgacactggccagcagttattggtacagaacagctgggactgctggcattcctagccaagccaacttctctcccgcgttgggcccttctcggggttcgtggttcattaccatggttttaattcagttaccatcatatgcaagagccaagcactgaatatctacataggttttctatttttttattttcaaagcgcaatggcagtggaacaaaacaggacatgaagacgcatccttcacaccgttgttttctgaatgctttttaatcaagggtaaatacaaaagatgccttgtttgttaactaatttgtggaaagcaggagtcactgactccgagactgcatcctgttaccccgtgggctgtaactgctggtatcagaggaacacactcgcctttccacacttcttaatgtctgtaacactacttcagaggtttataacttcacagcagaaggaacacctcagcactcggaacttggaagttagtttacgatgctagatgcataaggatgcttacttgtcctctgtcgcttcaggttgttgcaatacgttgttaaaggctatttctactaattaaggtttttcactatggttgtgatgtagtaaggagtaaatacttctcgtgttcagagcacattgtacccaacctcctccactcctctcaccacttacaagggactgagccagatgagcagtctggacaaagcaaaggaagcatgaagtgaggctgcagtctctcaaggaaaagacagctttgcctgcagtttacacattccatgggaaaaaggaagagccatatgtcctattaaaacgtcattgagactcgttattaagattcagaattgtggtgaaaagccttaattactaaattttaaagcagcgat

SEQ ID NO: 23041 - DNA, 1151 bp, Mus musculus
tgaggaagacacaggagtctgcactagtctttacaagagccgttgtcatttcaggtccccgggggttcattacagtacatttatacaactcacaagagtgtgggattccgcccctttgagtatttttatagttaggtggataactgccgcagatgcatggattgcacattttgactctataatacttagtatgaaaaattaatttatgccaaaaaaaaaggaaacatatcttacaatttccccaactaggttgatctagcacaagatgcaaagtcttggggcagagcgggagtggtaaaatcttttaatgtatgattgttgaaaaatgttccattactagcctgtcaaaaaccctaatgatgcattgtaaaacaaatgatgtaaattaaattagctttgaaaagtggtaagggattataaagaggatctcagatttaatgctctctgaccacatgacctttttttttttttttttagtaatacgctgctacatttttggaggttctggtgtttgtaggtcactgaacagacattgaaatctgatttatattgtataactgtaacatagaaagaaaaagtatttatatattttccttaagaatatttcattgagttgtgtataatttaaataagatttgtcccaaaatggttttgctcactttgatttttttgttgttgttattgtggttgtattgtttttgtacaatgtgtacagtttatgttaagggcattaaagcctcctgaagcataatcttatcaaagggattcattgttaataaaatgtacttaaaattcttaaacttgtggtggtgttgacattatttgaaaatttaatgtgtctcattgggccttggtatgaatcatgtgctgatgttgacaggtgtggtttctagtaaatgggggtttttgagtctataaatgggcatggtcttgtaccacgaaaagaggtcccacttgtacttccttggcattctcccaaatttagtgtgccatgcttactcttcaatttcaaatcattacggtgaaggatttggacctagaaacgtctttaagtagaagagctctgggcttgctgaggtagtgttaagacaacgaccaccatggaagtggtttgatgctcaggagtctacacacactcgcctgagcagata

SEQ ID NO: 23042 - DNA, 1203 bp, Mus musculus
ggtgttcagatgcttccaatagcaccagggttaagggcctgtatgcccaaggctcacctgatgccagcgaggtacgggaacactccgatcccattaggtcctcctctatccagcttcctctctccccaaccctctcccaaaaacaaataggaaaaccagaaatggactaaacacagtctatcaggaccatagcttctggcttaagcttgacttttctcagcttacttttttgggttagcctcagcagagagtccagaacctcatggacctggacccagactctgcggtgctgagtacaaatcaaggcagattgtacgcgcagatgtaccatttccccggaaggagctcaagacttccaggcacattgtggacagatgagtgccctgccacgtggggcaggctccatccagccctgccctgggcttcaagatacctgaccgtgtcagactgttcattgaggacaacgccggactttcttctttccatgtaacagttggataagtctattctatataataactcgtcttcaacaggagggcttaagaacattttaaaatcttttaagataattaaacataggaaataatcttgcaaggtatggagtctgaaggtgctgtttgcttggagtctggaatacctaaaaaaaaaaaaagtctaagaattccataagaaatccctgattcctgtggaatcttgaagaatctgatgactttagcaaaacataccctctggccacctcctttaacttgctggggactatgggccccacctgccatatgctatttgctttggccaccagatatttgtagtagctctgtggctgcttcaagagatagcatcggggctgaggaatggtgggatgtcagaacatgggtcacagaataagtcctaatagtggtgggctctgccagaagtgggaagagagatgtttcttaacatcatttttatccgcgaagtgcattggaaggctctagccatgttgttgttctgaccctggaatgagctcattgaaagtccaggctgggagagaagttgagtgtgctattaagtgacgcttccccaaatgacctgatcctggtggtctatgtaagcattaagacaaagcaccgccttccgcattagcctgcccatcttaagttgagcagggctttctgacaccacgttggcttctctctgctggatcccctaaccctaatgcactgt

SEQ ID NO: 23043 - DNA, 1882 bp, Mus musculus
gcctttgggtgcatgacagtttgaaacaccccaggagtagacgacctttatttgtgtcatctgaagtcccccaaatcttacagataatggcttgttcttttagttcagattttatcttttatttttattttattttttattttttatttcttttctgacagggtctcactatgcagccctggctttcctggaactcactatgtagataaggccagcctcagactcagagatccacctgtttctgtctcccaacctggaactcactatgtagataaggccggcctcagactcagagatccacctgtttctgtctcccaagtgttggtgtgcgtgtcaccatgcctggcttcttattttatcttctaaagaatcatgtgagaaaaaaaatacaggatgacaagggacaaagtcatgatcctgtttttaaccctaggattcaactacattttggagctccatgatatagttagtagctcttagaaattttcagtactgaaaaatattccaagccagagccaacaccaaagagtttctgtcttccttgtgccctctggctccatcctctacccagccactctaagccctgctgcctcctccccccacaccacgcccctccccttctcccaccccctccccccctccccactccctgaaacatcttactactgctatgccctgcttggcctctgccttgttccccagtgaagcttctcagtttcttattcccatctaattgggatcagagtttgcgaaggttacagctcatcattccgcactacgttaatctgggaacacgggacggtcaggagaaatggactcattctgtccaaaggatgtccttttggcgtgggtgtccagaatgttgggagtttagagtgctgctcaccccaccctgcctctcaagtccattctcaaggaccactgactgaggtatgcagaagcggggcagccctggattattgtaggagaatgtgacgtaggactaaggccaaggcagcttttttttttttttttttttttccccattgaagtgaatgcagctgcctccctgggcagtgttgttacctctgtgggtgtgtatataggagtagcctaaacaggaagaggacaagggagaagcagaccaccactgccatgcccttaatacctgtctcatggtttgggactttggcaagtgtgcactgcggcatcagtgcaagggtcgttcgtgccttcagtgcaagttggcctcgtagtggatatactctgacgtcgggggtcactgtgagagaagagcctacaggtgttcccagctcgaagtggatatactctgacatcaggggtcactgtgagagaagagcctacaggtgttcccagctcgaagtggatatactctgacgtcaggggtcactgtgagagaaaagcctacaggtgttcccagctcttaggaaaaggagagaaactattccttcctaagaagagcccagtcattggccaggcaactccagatatctcgaccagaattaggttcctgtctgtctgttgaacagagccacatgcacacccttttgtaagccagtttcattcagatttccctggtgagacatggagattgagggtatcataatacttatgagtggccattttcaataacatctaattaaagagaacattcttaaatacttaataggctttttgagttttacactccatgaattagtgcacatgtaccttcggaatcttcctgttggttgaacctgtggtgtcccggccttgagacggcagctctgcatatctggaacgctgggttgtgtttctgagctgggtgatagaggtgcttttgttcctgcagctggcaacagaagccgccattcatcgggaagctcgagggaggagctgtcag

SEQ ID NO: 23044 - DNA, 1186 bp, Mus musculus
actggaaggattgcattccgaacacccagcactgtcgcactcagacatgacagtaggaaatcacagtcttagaagttcttgcaaactgaactcttgttagaaagctctcctgtcacagtaatcctgactgtatttgcatccgtcccagccctttcagtgctcagtatacctaatttagtgaaaggcttaagaatgcttcctcccgatagaaatttgaagtcaatgtcatggtattttgcaattcaagtaccccttcatatgtcaatatgcagaaagtattatctcaaagtctcttactgcttaggcacttactcagatagaatttgttgtgtttgcactaaggtaatttctactgtttcctgtttgaaactgggttgaaatgagcaaaatggccttttaaaggatcccgaaagtacaatacttggcatctcaagtgaagtgtgggggaagggccatcagctgctaatgccaggcacacagtgagagttctgtgtctgtattgatggggtccctttctagagtgtgacagattccgtggaactgtcttgaaggatgggagagattaagatgtgactcgcatagataaaaaagaattgactgaaagatttggatacattgtggaaacagccccacagtgtgagggaaactgtgaagactcatcaggcctttcactagatgcgccctgtcagcaccctattcactgcagagttgtttgcttttgtgtcatgagctattagcttggagacccatctgtaccaatctggcttgcgttatgtcaagcagcatgcatgagcgagcttagctgatcactagaagaactcattgtcttggtaagatataccaaggcatttccttgaattgatttgatactttcttgtgaaaaaaagtttcatgctgtcatacctgtcttacctcagtgtccaggacaaaaaaatttacagagggggtgggggtggggccaagcaaaaactgttaatcttttagacataaccctagaatatccttcaaagtgatttcgcttgaatcgtggattctgcccagtgctattcaccctgtttaaacctcttagtttactagggttgttggatttttgctccctttatcttaataattacatgaccatattcatgctgattataatacagaggacttatttctaaatggaggcataaatgattgtgagcaa

SEQ ID NO: 23045 - DNA, 1250 bp, Mus musculus
gattgcacattaaacaagtgtgcaatttttggttgctggaaccgaatactttaaaaatgaaaaaaacatgctgaggataaaagacaggaacattaatgttagttgattcatatgggccttcaagatcgcctttgtatagacaatcaacatgaaaagaaatcccgctgtaataggcattttgctgtacttatgcctagaatatttggtacatctaaattggctgccttcctaattttattctgatttcttacatgcgcttttatttgtaattattccatctcaaatgggtagtttcaactttccgaactagctccaacatccagtagcatatctttagagatcaaaatatctttaggtagtaatcccatcgtccttaagtcctgagcagctgagccctttggcaggtggtcctagaacaaaaggctgaagggaggtttgcggggcgatgctctcctttgatgcaaacactttcactgtcttttccgattagctcaattataaacacccagctccttccgcttacgtttccttctgatgtagtctttgacaaagtatgaacagcatggtgaaggaatgttgaggaatgaaccctgtccagctccttgtgatggggtagatgttaggggataccacaggacacagctgctaaaagacattctctttagagttgctttaaaaaggttgttctggatagagagatacgctgagtcccagatgataccaacttacaggcatgtccaaaggtaaagtaagccatctgaaaattctcattggtcctaggaaaattttttaaaatttattttaccagatctttcactagcagacaggccatcagccatcttccctgtaacactaagaaattaccactttttttcctttcaaatttgcattacagtgcattactgtttacaagacacacatactgtgaacagatctaagtcttcgtcttttgtaaggtttgtagaatgaatgttgttttaaaagatggtgtcatgttaaatatctctaggtctctgtaaatgctagctcctgtttactaacttttgtttggtcaggtgtgtgtccatgtagctgaaagaagatagaaattgctgtttgcataactttcccctgttttgtttcttgcaaaattatcactacagacttgtgttaaatcaaaggatcggttatgatgtgcaatacctaaaatcatgttcagtcctataaggaatcttttcaatgctcacacacaggacataaaggagattgat

SEQ ID NO: 23046 - DNA, 1180 bp, Mus musculus
cttgagaaccagtaactgcttagccagacctgtagagaaccaaggaagagaaagaactctaaagccatgtcgctagcattgtcctgggaccattcgtgggtggctggggtttctgaaggcacttgaaagccccttggccccttttcttgctctctggttcataggtgtctattctctccaggactacagaaagaatcaaccctgctggatttgtatgatggttggttataatacacagacatcaaattcttcctgatggaaaaggatagtttttaaattgaaaattgtctccaactctgcttaacaaagtaacccattcaggaatagcttttaacttacttgaagagtaccagacattaatctaaggacccggaatatactgctgaacaaagctaatccagatctctggccatggaacatgaattctagttgagaaaggcatagcaaaattaatttaaaaaatcaaattctgtattaaagatatatgctatggcgaaagggaagcagagtgaatggagttaaagggccatggctttaaataaagtgggcttaaagggtaacatcattagggcctgagtaggggagaatggactcctgtgccctctgccctctgccctctgccctctgccctctgcacatgcactgtggtgcacacatcctccctcctcataactaaccaaatgcatgtagaggagagaacattaggaaggaaaactgagccatcaagtgtaaaggactccagtggttcaaatggggcaagtgtgtctactgtcactgttgtttgatttgctttttaacacttgcttgctagccgacattggagagcagcgccccagatttgaggaaagctaaggaaatgtggagacctgttctttcagcccgccccacccccaccttcacctccacggggcggggcaggaggatgccaacactgactctggaatgactcagcccacttcagtggcacacagcttacaaaccaccttggagtattgttggatgtgaattagcaacttgcaggctctttgtagctttctccatagttctggagtatcagaaaagggtttgcagccatttaagcatcaccagtcaggtgagagtagagtttctaccaaagggatttcagagtttgcaggtcttccttcttaatggaagagcgggatgttagaggcaagggcta

SEQ ID NO: 23047 - DNA, 1244 bp, Mus musculus
aggagaagctaacacattccgttcagattttatgggagaactaggcttagataacgaaccatgaaaataacgtggattagcttagtcctcagtttaatgcttctttttgagctaggtaacgtagttaacttagcgtagccgctaaggaccaacactttagtttaatgttttcagtggccagataattttgcattaaaaaaagaaaaacttctttctttccattctgagtgctggggttaaaggtgtgtgagccagcatgccagccgagacaaagtaagatttaagcaatgcctttactctcgtagtgcttgaactgcaaatctaaacgtagttggaaatcgcagtcattataggacaggtggggtttcctgagaacttggtgctgtgcgcagagatgcctagagcggtgaagggtctgcagcagcagaagaaagagtgactgtttctgtgtttccagggacacaagcagcagtgacagtgagagtgacgacagttctgattcatctgacgatgagctaatcggccctcctttaccccctaaaatggtaggagaatccgtaactactgtggacgaaggcacccttggccctttacctccacctctgtgtgaagaaggagaagatgatgatgatgacgagttagacgatgaaggagaagaggatgtgagtattcaaaggttttgtatgaattcagagaggttgtaagttaaaagtagtatagagaacaaattcctgctaagctgacagtcatgggtaggatagccaccacctgttgagtatgaaaatcagacttgggctgttgacatggcttagccaggaaaggtgctagcctccaagtctaatgccctgagttccatccctagggtcacatggtagaaaggaggcagctgactctgaaagttgccctctgacctctgcatgcacacacatacacaacacacaaataagtagatgtaataaattaattttttttaaaaagcagatttatttttggttagcttttatatttgtttcattttgtggcgctagagcttgaacccacagtgttggcatggtaacccggccctctgtcactgagctaggtccccagcccccagctgactttattacagtttccaggttctctcctgaaaatacagcatcctaccgtgtcgtttacagcatcactgtcctgacacgccactcagaaacagtgactttagtaaaaggtaggcaaggggaagatgcagcagactttgctaagtg

SEQ ID NO: 23048 - DNA, 1202 bp, Mus musculus
aaccatgctgcagcatatgttagaatttccagtctaagactgaataacagtcttttgtactatacatatataatgtttatccatttttgtcccttttgatgtattctacttacttataagataaggcaagttatcatgactgaccaaattgatttaatgtactagggtatgttatacaaggcttgagaaactcagtcctgggaaacttgatgatgccttctagaaggtcctctaggctgttggtttagtggcacttaagaaacgagagaaggcactacagtgtttttatttttcacgtaggcctttgcaagtgtttccagagtgtattcatgccagtgtatttcatggggatgagcacatgattgccccagttggcggtggttggaggcaggggaggaatgggggtgtcactcttagctatgctgtatttgacatgaggaagcagttcgccctgtgtcatttggtgaaatgtcattagttgtattttgtcattagaggctcaactgagtgaaaagatttcacttcaggcgatccagcagctggttagaaaatcgtaccaagctctggctctctggaaactcctttgtgaacatcagttttctgtcattgtcggagaacttcaaaaggtgaggtgggttttgtcctctggggttatttaatacccaaaatgcttctttcttttttaagtttatgtgttctgtgtgtggtggcacatatcttcgaggcaggtggatctttctaagttgtaggccagcttggtacacatagtgaattaattctgggacagccagggctgtgtagggaaatgcatgcacatgttctgcctatacgtatgtaagagcatgaaatgcttgcctggtggtgttccaaggaagccatcagatacccttagaattggagttactgatggttgtggtcttccatgtgggtgctgggaactgagcctgtgtcctctttaggagcagccagtgctcctgactgctgagctgcctctcctgtcccctacagatttagcttcaagcaacgtttcacagtgatccccagttcttttcctggtggccagagagtggctgtggttgttgttgcagtctttcttgatttttaaacttacataaacttttgttttccccttttagaaatctgaaactctcctatttagttgatggaaaccatttcattttccctggcaggtagctggtggc

SEQ ID NO: 23049 - DNA, 4016 bp, Mus musculus
gcccctggccggcaggcttccggttgacaatggtgcttagggtagatgaccttgccaagtcccctttctgtttggaagcacttaccgcttactgagtaatctaacccttgcttttcatcgggactctgagaaagttaatcgaatcttggtctgaaacgactctttgaaggaaatgggtttcagtatagctggttgagggcctgaagcaagccagggctccgtgattctgaacgctttctgcttttgcagaggttctgagttcacttcccagcccccacatagcagctcagggccattcatagcaacagttgcagggtgtctggtgccctcttgtagctgtggggggtcctggacaggtgcatggtgtgcacacacacacatacacacatgcaggtaaagcactcagacacataaaaataaaggaataataataaacaaaagtcaatgagtgacctgaagtctttctccttacaggagaaggtttacaaatctctgcctggatgccgtctgtggatatctggtggaacttcagtcaatgagttcttcagtagcagtacaagccatcactgggaattttaaatcgctccaagcaaagctggaacggctccattgattactgtagtatattttcttgtttgcattttggtctgtaaaataaaagctcagctgggtccagaaatcaggtgttgtatatctaagaattttggtagaacatttttttaatgaatgatagttatctacaaatagtacatttgccaaatgatttagtttttttttttatgattagtattttttttaattgataagttgggcccagatatgtagctcagtggtaaaatgtttgtatagtgtgtaaaaagttagtagtaccacacacagacacagcagtctatgaacagctggaataagactgtgtatgattatgacacacaaagattttgaatttcactagtggtaacaattttgactttgtattatttatctacaggtttatgtaggatgttagtattaaaacttataggctatgccaggtttggtagcacatgcctttaagtccagcacttggggaagcagtggcaggcggctctttagaactcactgagatttccaggccaggggctacacagtgagaccttatcttcaaacaaacaaacaaacaaacaaacaccttataggctgggtctgttcccttagtgctagattctgtaacagtcttaattagtcatttttaggttaatattttatcaattacagccctttatgttctctcttcctctttttttctctctccctctcaccataagtacatacattagattttatgtatacatttatatatgtgtgtgcaggctatatatgtatgttgtatgtatatacaggattgtttgagcatgtgattgtaacacttctatgtacttaaaatcttcatgatcacccagctgtaatggtgctcccctttaatggcggcactcgggagtgtgggggagagtcagagtggccagtctggtctacatactgagttacaattcaaccacagctctacagggactactgtttccttagaaccctcactgtctaactgtatgcttcaagccagcaacagtagcagcaaattaaattacaaattaaattcctggctctctggtcagatctaccaagccaaaaactgtggcataaatgccagtctctgtgtcttaacaaccgttccagtagatgcagatttatgtcttattgacttgtaaatcctgttttatctagtttgtttttgttttttaatactgatgggttttcatgctaaacaggtaaatgtgctcccactgaagtttaacatgttaaaagaacttactaaactaagtgttccaaattattatcaaagacaaaaaaacctgagaattactaaggctaaccaagagaagagagagagaaaaagtgaaaaacaactggtttctactccttagttgttttgttattttatttttgcagcagattgtgacatagcgtaggctagtgtcaaacctaactgcctagagtgatgttgaaattccgattatccggcccctaccacctgtgtgctaagactgtaggcaggcttcacagtgcctactttttgtgatgcaggctgttaaattaagcgagcaccttacctactgaatgagttaagttcacagtcctcaactccccacccccactcctttttctttttctcttttctttcctttccttttctcttctcttctcttctcttcttttctttttttttttttttgctaggtctcactaatatagcccaggctagctgcaaacacatgttgatcctcctgcctcagacttccaagtactggaaatccaagcatgtgccaccatacccagcctccagtgttatttatactgttggaagtattctcttctgtttgttggcactggtggaaattgggcagtttgtgagtacacctgaatatatttctacttttatcttctcctgcgattacggatttctttttcacaataccgtagaatgcaattccgttttcactttgaatgtgtatttcctaaaagatcaacgtaatgctcattgggtgtcactacctcgtgtttctcagtttttcatcttattaagtaattttatagcatttgatatattaatggttttatgcatttatacttctgtcatgctcattttaaatgaaggtcttgtttaaatgctttaatctagttgtgtttccatttctgctagacatacacgacactgtctccagttctgtggtaagcgtgtttacatattagcatgtgtgttacatacacttagtcatctgggtgaggtagctcttgcatctaatcactacattcagcatgtttaggtacgagtactgaaaatagagatgtggctctacacacatatgcacagtaccttaatagatctgcaaaatactatattaaaaaagatgtaattaacagatacttaaacacactctcctttattcttaaagcaccttacagggagcttaagaattcgcctttaatcccagcacttgggaggcagaggctggcggatttctgagttggaggccagcctggtctacaaagtgagttccaggacagtcaggtctactcagagaaaccctgaattttcacttcacagctaatgcttgcaatggccttcctacaagaacagacactgctagtccattgctgctaacatttctcatccgtcaaatgaaattatctaaatggcctgtccattcagatgtctgatttgaacctccaaaggggtgccaattctggaactcggtggtcagacgtagcaatggcagcgttctagcatattatccactatgtaagagtactttgttcctggacttcggtcagtgcattatctttatgctgtatgtagtgcgtttgcgcaggcaatgaatggttcattggtagaacatcttgagaaagtgtgtttattgtgtctgcgagggtgttgattgtgatgtagttttaggtagtttcagtatggctgaatggttagggaagaaagacactatgcctttctgcaggatacacaatactgacctggtttgcatgcaatatgcatttgacaggttttcagttgttaactaatgacttcttcattgaacttggagtcacataagctcctctttatgtcttatagttagtttcatctcagaagtctatcacaggttatttgtatattttgtttctccatgttgccctgctccttcactagtggtgatatagtcatagcaaataaattaatcaaaaccccaaatctgagttttttgaaagagattagtgtttttttaatagtctctattaatatcttttcttaaattatcttaataagaccttttatacttttgagttctctactaaaacttttaaactcttcacagagttttgttttcttcataagtgaagtggttgaagctaaataagactcttaaagttttgtaaaaactaacgctatttctaaattgccttactatttttcttcaaacagtagatgttaa

SEQ ID NO: 23050 - DNA, 1199 bp, Mus musculus
tatgtgctgttagtctatttgctgctttaaaatttctggttgctttaaaatttaccttctacttgattttttttttttttttttttttgtttttcttttgatacaatgtctaggtgtgaatttctgtcttacatctaggtagaatctccactttgaagatttaacattgggcagtttgtgctgttgccatctccttcccctctgttctgaaaatgcttgttaggtttattttggaccttgctctgtttctttaatttttttaaacttacatgtttgtttatttgctcgggggggtggggcagtgcacacctgaaggtcagaggctgaactaagggagttgtcctctcctgtgtgagtcctgtccgaccgactgactgaaattctcgtgcttggcagcaaatacattcttctgctaagccatctcaccggtccctggtgctgctgtgtttgttttcagtgtgtgtgtgtttaacacttcacaatttcttagggtttagggctcagtggtgccttccccagcacttccccagacctgctctagctcactaactgctgtctgttcgctgtcccagtgggtcactgtttaagtttgctaactatcttccgtagttaaaacgttgtttctagatcttactgtttctgctgtggtttcctatcttttccctttatgtttttcataattgtatgcctgcattggattagtgtctttgcagactcaagaggacgtggaagagcaaaaggatgcagaggaaacttcagagactgaattttcagaagcagaaaatcattctagccagaaaacctatgcatgcccttctgtggggtctgctgcttgctcttctgtgggctggaacatcccttctcctggtactgttctcacttcttagatttatatgttcttgtgttgcattaaagtgttactgaactgcacctgggaggggcacaggtataaagggttgtgagttaattttataatattcacttcagggaagaaaaacattttaaacatgccattcaacataaaaaaaagtcacaaacacttcaaaccatctatagtaattagtattatttaattttataaacattgagatgttaattattagaatgttgacatttaatttataacagtcctattggttatttgctgtgccccaaccatgtactgtttcttgcacagttcctttgtaaggttggcgggg

SEQ ID NO: 23051 - DNA, 1099 bp, Mus musculus
aacatcataagcattgttcttattccacagtggctcatttacatattttgtaactaagccatctgcctcattgccgaccttaggagaaagtcatctccctttcagtggtgtagacacttttttgggtggggaggtgggtgggtgctgtgcatgatttagtcctaggactaagtccgccctaaggcttacttctccacttgcttatgaactctctgctgaaggaagctttgtgcagctgttagtggcattttggttttattgttttgttttttacaatttcctttttctttcagtctatggtaaaagacaaaaggaaagagaggaaaacgtcccctgctaaagagaacgagtccagtgagagtgaagaagaagtgtccagacctcggaagtctcgaaagcgggtagattcggagtcagactcagactctgaagatgatataaattcagtgatgaagtgtttgccggaaaattcagcccctttgattgaattcgcaaatgtttcccagggtattttattacttcttatgttaaagcagcacctgaagaatctctgtggattttctgataggtaagtttacataagagtgagagaaaagcatgccctggtagaggatccacaggcgccatagaacaatattagaagaaaggaaaggatacttcttcactccatgcattccagatttaaatgaactactaatttattgatttacataaaaaatgctttattagagagttagtctaattttaaaatatatcccagttttaacaagaaatgccgtgcagtaagagtatagacatagcctgactatagaggaagtaaagatagagaactatcagaagccactggagacattctgagcatctcagtcattgggagcttagattcttttctttttctttttttaaatcaccaagtggggctgagaaggtggggttaagagcacctattcctcctacagaagattccgcttcagttccaagcagccataggagatctgtcagctttctctggcctgtgcaagcaccacacacacataacatacaaactttttaaatcttttgtaaaaatatcacctagtcaagctgggcgtggtggcgc

SEQ ID NO: 23052 - DNA, 1149 bp, Mus musculus
ggacatgtgtttgtatggccctataaaaataaattttcatttatcaagtcatagcaaataatactatcttcgataaaagttacacataagattttagtgaagctcaatgttattaaatatataaacataaatgtatatgtatgtttaattgagaatactgaagtaaaggaaaatactgaaatatagaatacctttctatgtatactggtctaactcaagattttggactagtaagatgatagcttacacatacacacacacaacatgtattttcatgctgtattgtgttaagtattttaaaatttatgagaatgttgtttgcctggcagatactacgagttcttggtgaaaatgcaattgccgttcgaacaaaagccatgaagtgtttgtctgaggttgttgctgtagaccccagtattctagcaagggtaagagcaaaaagtctttgttttacttttcttctcaaatttgaagatcctctctgtggctgtaaatgacattttgtttctctccctcttctttagcttgacatgcagcgcggagttcatgggcgactaatggataactccactagtgttcgagaggcagcagtggaattgctaggtcgctttgtcctgtgtcgccctcagcttgctgagcagtattatgacatgctgattgaaagaatattggtattggtcttctgtcttatagtaacttatgaatacataccttaaacatcacaccttattttaattttagtataaaatttataattaatctaaaaagaataaatgtgaattacattttttctgttgcttaatctgaactgtatcaccattctaaaggttatgctttgaagaggcaagtattataaagcccattgttggtaaaacttagatccatttttcaattattcttaggccagtttataatcactaattagtagtaattatgtatgataattaactgtttttggataggactctggagtaattatattgtctttgcagtgtgtgtttgtctgtctgtctatgtacgaattacttccatagcaggcagaccccccccacttcaagcatattgattccttatagagctgtacattgatgcattagcacacagtgttatacattgctgcaatggcaaggttttgacattaccattagt

SEQ ID NO: 23053 - DNA, 1130 bp, Mus musculus
agagggcagagccatcttgcctggatgtatggtatgagttgagctaggagccatgagcactcagtgttcagctatctgtctcttcaaacaatggttcctcttctaactcagaactgagtagagctctaaagaggaaactttgtgttctactattgtttaaaagaatggtaatgttatatcttccatagccaaagaaaaatatttagattgtttcttgagtaatttgaaacttttatcaatgagtgataaaacaacttgtatttccttttagctttcaactgacaaaactgtgaaagtcctaaatatattggagaagaatattcaggatggatcaaagctttccactttgttaaatcatgtaagtttaagacctgtgttaataattttacacctggtattgtaaacctgtgtatatatatatattttattcctactttattaacaatgatctgttttatagaataatgatactgaagaagaagaaagattgtggagagacctaattatggaaagagttacaaagtcagcagatgcctgtcttacaactatcaacattatgacatctcctaacatgccaaaagctgtatacattgaagatgtaattgaaagggttatacagtacactaagtttcatttacagaacacactctatccccagtatgaccctgtttacagagtagatccacatggaggttagtttacccttttgtactggtagatatttttttttttggactgggttgggttcgtttgtttgtttgtttgtttgtttgtttgtttcagcaaactatcagaattattcattgtaaatttttaatgctaaatgaatcaaaatactaagatttagttggctcaaattaatagattatgtataacatacattggttttgatttttatatttaactggaatataaacatctttactagttcattactttaacatttgtaggttgaacacccattaatctgaaaatccaaaatgctttgaactctgaaaagtctttgaggagctagagaaatgtgtcagcagttaagattgttgtctgttcctctagagaattaaatttggttccctgaaactatacacaaccacctgtcacgtcagctcagtgggagccagcatgtggca

SEQ ID NO: 23054 - DNA, 1195 bp, Mus musculus
aagttcctaataaaagtagctcatagccacgtagcacagtttctctttttacaagtttatttaattgttttatttgtttttttaagcagaagatactctaaatttactaaatatctgctttagttggaaagatacaggttctctgaacctttttttaaaaaaacagatttaattattcttgctgagacaaaaccaaggcttgagagcttattgaattaagtctgtattgtcactatttcttcttttttgtaactcttaaaaagtagccaaaagttttgtttcagttaggtaaaggagaattaatgcatcaaaaacttaaaattctatagtttacaagattatttaatgaaaatccttcctttccaaggtgaatgtggataacaaaggacatagaattgactagtgctttaaaacttcagtgataattagataaattataattcactaatgaagtaaagtaagtgttctgtcatttattttccaagaaccttttctctatacggctcttaaggtagctgccagtttctattactccccatattccgcattaatcttttattataacgtatttggatcttgtgtgtgtgtgtgtgtgtgtgtgtgtgtgtgttacatgcatgtgtactttgcatgctcattttatgtgtacatgtaatgaagcctgaggccagtgttgagtgccttctgtcattccccacctactcttttttagccccctctctccttccctctcttccttcctccctccctccctttttgtttttgtttttgtttttgtttttttttaaacagtatctgtccctgaacctgattggataagactaacagagcatcgagctgcaggaatcttgtttctggcttctcagatctagggttacaggtgtacaccaccaccctgacccagatcttcatgcttgtgtggcaagcacttacaaaccaaaccatctcctcaaccttgagattttgaccttttttttttttaatgaggatttttagtcgtttcttgactcttgtctcctgttttagaaaaatcatgctattcatagtgtaggaaagattcatgagaaatgaaccaattttggaatatattcttagaagtaatgtttggtctcttaagagctgtatataaaacaaaactgggttgttttctttgacaattatcaagtatgatacttctcacctattataaaaatat

SEQ ID NO: 23055 - DNA, 1193 bp, Mus musculus
tgtaagtttacatttatttaatttctcgttttatctttacagtgtctttgcaagattattttacatgttcattataaggatatacatcataggcaaagggcaatattatttatgtagcttccagcgattaaaatagtatttgtacttagaattccaactgaaagttaaaaaattaagaagtattatatcataagtcatttcctatcttaagaaaacaattcctgcagatgcagaatatgactaaaactgaaatgcatttgctcagaaccccccccccatgtaaaaacatagtaattagagtggggtgatggaatcacaggcacaatctccttttaactattgctccagtatttataatataaatatatattacatttacaataaggaataaaaaaaaccttaattgtctcaaaaaagctaccaaagatcagttgttgaaaacaatacataaactaaataaaaacttgacagtacatctgaaaatcatagcaatttcgatagaaaactgggcactgtggtacaggtatagcagtttgaataagaataaccccataagcccatatatttgtatgctcaatctgtagtttgtacaatgatttgggaacgattggggatgtgtggccttgttggaggaggtgtgtctctgggggtaggctctgaggttacataagcccatgcccctcccagttagtcctctttcctctctctcccactccctgcctctctatcctgcctcaactctataaacaatgccccaataaacacttctataagtggccttggtcatagtgtctcttttcatagcaatagaaaagtaagacatgtagttatttgcaaaaggagattattattttaaaaatagtagagatagctttcacatattactgaaggactttaggcattgaaaactgatctgtaaactctaatttagtttccttattttttcatgtaagttgcatctagcagtgtggtttaatgggccattcagtatggctagttggaacccacagatactaagtgccaaaataccctggaggctttcttgaagttgctgaaccaccttctaatgaggattggtttggtatcttggaaaaatactggttagtgtttgcttgccctgctgcctgccccaatcccagcccactgggtgaatttcatgtcatatgtcagcagattggagaaacagatatcag

SEQ ID NO: 23056 - DNA, 1130 bp, Mus musculus
ccggggccggccagtcagggagagcagcgcggcctcggctggccgccttctccgggattgagggtggggggctatgaggcccggagcgcctgagaagagggagatcccggcctcacgccaccacagcggaccagcgcccggctgctgtcgcctcgagggggaccaaaaggaaaaaaaaaaaaaaaaaatcaagccggtcacccgagcaacggcgtagacgccgtcttgcagaagcgaccccacgggcagcatccacggccgtccgttgcacaggacaagggcacggagcagaaccgccgctgctgctcccgctgcctccgccgctgtcgccgccgccgccgcgcctccggagcccgcgggagccggcgcgctgaggcagagctgcgagcccgagtggcggcggcggcggtggcggcggcggaagtggagtagggaagagggggtggttgttagtgtttggcgccggcggagggagtcattcctgcagctgcacttccggtcggcattttgttctgagagggagagacggaacgagagagagagacacacacacacatacacacacacatacacacacacacacacacatacacacacacacacacacacactgggctccttcccccccgcccgccctcccgtccctccctccctccgtcggtaccgactcacccgacaccagcaaagccgccagggagggacgcccccgccgccaggaggattggttcccgggcccgcggcgatgcccccccggtagctcggggcccccggccgggtgtttgtgtgagtgtttctatgtgggagaaggaggaggaggacgaagaagaagccgcgatttgtcttctcggctgctctccccccggctctacatgttccccgcactgaggagacggaagaggagccgtagccaccccccctcccggcccggattatagtctcgctctctcgctctctctctcttgccaccgcggcctcggcctccgcttcggattcagacgccgattcgcccaggtaaattcctgctcttttatttcggcggcggcggtggcggcggtggcgccggcgccaggtccctcagcgtttctcctcctcgctcccctccccgccgtttcctcagcggccccgggtct

SEQ ID NO: 23057 - DNA, 1868 bp, Mus musculus
gggtggagcttcctgctcattcgttctgccacgcccactgctggaacctgcggagccacacccgtgcacctttctactggaccagagattattcggcgggaatcgggtcccctcccccttccttcataactagtgtcgcaacaataaaatttgagccttgatcagagtaactgtcttggctacatttcttcttttgccccgtctagattcctctcttacagctcgagcggccttctcagtcgaaccgttcacgttgcgagctgctggcggccgcaacattttggcgccagaactgggacctgaagaatggcagagagatgctaagaggaacgctgcattggagctccacaggaaaggatcttcgtatcggacatcggagcaacggacaggtacacatgctagcgctagcttaaaatttcagttttgtaaagtgttgctgaggatgcggtaggatacgaattaagcttgaatcagtgctaacccaacgctggttctgcttgggtcagcagcgtgttaatcggaactagaaacggaaacaggcaggttagccgcagctttttaggaagctgcttaggtggaagaagaaagggtttaaagtcgtggatcaggcggtaggccgtagctctccgaagctacatgaggtgtgagaaaagaaagggtttattaaaaggaataggcggattgccccagttaataaaaaatattctccggctctacctcgcctccccaaaaggtaccaagagccacatgtgtgggttttacccacgggaggaatcgggtccatgtccacccaagccaaggttaaaagcccactcatctacggatgaaaaaatcatttgatcacctcagttaagcgttgccttatttaacttaattaataggggggagagagattggagacgtactattgaaagggcaagcccttcactgcctcccacccaaataaaaaagccaattggccttgtactacaagagccggtcactccttctccctgtttcccacctatcttccaaaaatgcggaggaatatcaacttagtgctattttcacatcgttcagtcaaacttagccagagttccaacgccctacttaaaattcaactagaaagttacctaccaagtactaattagcattataaagtcagagtctgcagctccaggcctttcagttagttgtttactagaaaggacagtcttaagccagatacagtttaccataagaaaagttaaagaatcccagtgaagcaagttttttctttaaccctagattccaggcagaactattgagcatagataattttcccccctcaggccagctttttcttttttttattttgttaataatagggaggagatgtagtctcccctcccccagcctgaaacctgcttgctcaggggtggagcttcctgctcattcgttctgccacgcccactgctggaacctgcggagccacacccgtgcacctttctactggaccagagattattcggcgggaatcgggtcccctcccccttccttcataactagtgtcgcaacaataaaatttgagccttgatcagagtaactgtcttggctacatttcttcttttgccccgtctagattcctctcttacagctcgagcggccttctcagtcgaaccgttcacgttgcgagctgctggcggccgcaacaggtgtcacttggaaatttctccccacaccccagcactttaactgaatgaaatgataacgtaactctctgtaaaggatagactctgacagaaggtataatcggctaggcgtcatccccgactacctttcttcttctgtgtgtctatgcgtgcttactttgaaatttggttcatattttaaaagtggaagtgttcaca

SEQ ID NO: 23058 - DNA, 1784 bp, Mus musculus
ttttttctgcagatacagatgaccagccatgcaccgaccttgttaggattcttaatgacaggctaccactagagtcaaggtgacaaaatgggacgcgtgtgctctcctgctgattctgacagacaagagctgttcaccgtgagacggactaaatggactagaattatgtcaaagcttctgtattatttacagttggtaaccaagagcattgatactctttagaggcaggttaaataaaggattaagtatttaggatttgaaatttaactgtacaagtgttgttttcttcctaactttgtggaattggccatgtgtatcagttgattagtacattatttttatagtacttaaaagtaaagatttaaaaaaatttttgatgatggagaattttgataaatcctgatgttgacttaactgaagttggtaaatgtgttttctatagctaagaattttctaattctaggaaaccatgatggaatcactattgattgaaaccatgggaacagattatttgtagacaaattctgacttgttttgggtgtcatcagtgctagatgaaacacatctatgggacatgtcattgacactttgtaaagtattaatttccatagcaattattgttcagacaagtaactgagtccgatagcccctttcctgattttggttttggatttctattatgaaatcaaggattagaaggataatcaatgattgtgctctgttcagtaaaatgttcaaagacccttcctttagtattgggcatggactctagtaaacacctgggacttaagacagaattttggaattgccttaaattagtattgtgatttccatttcctgtattctaaaatttaaacaatagctttgcgggatgaacagcttccccatcttccggtatgaaaaccactcttagttttggagaaaactattttaattcttgattttgttttcatgaaaagcttctccattgctagataatggatggtattttcatgctgggtttttcagacttgtgcattttcagttgttggtgaacttccttttttattgacaatatgaagactcattctgtgccatctaccatataagtatatatctgtatcatgttatagatatatatgatataatgaattgttgcatagacatcgaaatagaccgtttatggaacttgagcttcgtgagctcagaagtaaaaaactaaagctaggatgtatgatgagatcaaatgctcttagctttgccaaacgcaacacgctgctctttaacaattaagaaaaatgaatgtcactgtgtgaggtaatttagatctgtctgggtttgtgtgtttatttagaacatttcccttgactatagaaggaaataagtgtttttatctgagccaactctaatttctagtttaactttttttttttttttaaatggatatatttaagatatccctttatatgaaagttaaataccttgttagaaaaaaaatgccactctcatctttaatgtacctagatctggttgtccatgatttaccacacatctatttatacgtaccactaattggtaatgagctgtgtgaaatcgttcttaaactacccttggaaaggtattaaaattacttattatgctctgcctacaatctaacttctactctgtggcaggcagggatttatttgtaatagactaatggcaaaggatgttggaatatcaaaaatgtctttaaatgggttaacctttaatgaccactttatgcaaataaaattaaacctttgtccatttttactttgttttct

SEQ ID NO: 23059 - DNA, 1393 bp, Mus musculus
ttcagcatgcttttttaaaagcgacatttgagccaactcttccaagtgcccttctaattaagtctatttagacccaagttttaaaaattacccgtggctaacaatcttcatggtgtttgtcataactttctatctatttaattattcagtattttataaaacttgactttgaagaataagctatatgtacggtgagctgggcggaaagcagcagaggctggtagcatttgaggtggtcttttctgggattaacacatttcaactctgtgcaggcatgaggttagtttcacagcagcacaggagtgcatgatgtacctaaaactctaaatgagaaaacaaaaacacagagacacagccggaagcaggacaggattggtgcaggattgaaaacctcaaaggctgttctctaaaagcaggttaatatgaagaagtatcctttaatgtttttaggaattctaccatgtttccagaatcttaaattaggtgagaaaatctacttgtgtgctttttaaactttataatcaatgtatgttacaatatatgtgggttgtttagctttttaaacttacttgctttgttttaggaatgtgatattattctagtcagccttctgaaaagtcggatagaattccgagctgatcgggtgtgctgatcgttcctttagtactgcggttattttttacattactctgaaatcaagaacttgaaattcttttaagtggtcttaaacagtaatcgcttgaaactgcccgttaggttactggacctaaaattgttaggttgaactgatttctgtccatcggcaatctacacgggaagcgtgcgcatgtgcagcttccgacccgggaagcgtgcgcatgtgcagcttcagagcaggtgccgcggcttgcacttcacctaagtgtttaagaatcacggggcattaaaccttttgataacatatggtttttttagcacttgatacacagaagcaaagggatcaaattgtgtttcttaaaaaatgaaaagaaaaaaaagaattaaggcagttacctctgtagagtatttccgtgctacaatccatttctattaacttcatcaaaaacttttagttaacaacatgaagtgccttcatctgctcagacctaaagaacattttaagtgtcacacaagaatggtcatgcttcaatcccctagtagttaaaagagtgctaactactacttgaaactattgtttacacattagtgatgggctgatggcgggctctggcctccagatgccctcagacatacagtacctgttcttccttacgcaagtccagctgtgagctatttttgccaacatgtcgcggtaatacatgtcgcagtaatctgtatttttgtatgtgatttctacttttatagactgatttta

SEQ ID NO: 23060 - DNA, 1173 bp, Mus musculus
taataagtgtccatgattcccctcactgagctgaagagacctcctggtaagctgctgtttgcctttatggactggcatttggttctattggggtttgtctttctgttttctgttatgaattgggatttcctggtctttccagccagttactttgctacataaagagttgtaatccaggggttcccacagttcctttaacatttacggcagattcccaggtgctctcctggatgccctcggcaggaaacttctatgttgggacagtcctgtgtaatgtcaaacttctctatctgcctgcctcagatgccccatacgtcctcctcctgccttgtttaacagtgaccatgaccatgacatctgtttgcctttttctagatctttgtaccataattaaacgatgccccaacctcatccgcctcgacttaaggtactgttttagatcaaactttggagtacattggctgtttgtgaactgggggaggacctaaagcagggattaagcagcagtactctcgaccatcatggtttgactcttcctttcggttgcagtgacagtatcatgctaaagaatgactgctttccagaattttttcaactcaactacctccaacacctctcgctcagccggtgctatgatataatacctgatactctactgtaagtatgatttacatttacgctggtgaaaaagcacaggccaaaactcggtagtaaaatccatctttagatggatgaatacatgttcaaagcatgaacattgatattgatgtgccacaaaatgcccaggaaagaatatcgaaatagttcacagaatgtccagtaatcctgaatcgactaagcttattaactaactaacagctactgtcttagaatgctatcctagtgtctgtgaaggaggctttttcctctggggcacccacagagagcacggaaggcatgcccaatgtgagtgggaaacatctcccattcatttttaaagctcacagggaattcctgtaatctaatgatgggcatctcggatcgtaagaagaggtgagaagaactggtctatgagagcctgatgttatctgaaaagagggcatcttatgtaggtccatgaaagttaagaatctcatgcaggcattgcttacttcattccaaagtcttccttacaccaaataaaagtgtacagca

SEQ ID NO: 23061 - DNA, 1156 bp, Mus musculus
ggtgttaaaacccatgctcacagtgacatacctactccaacaagcctgcacctcctaatagtgccactccttgggtctcgcgtagctaaaccatgacattccacttcctggcccccataggcttggttcaaacacatgaatctatggaagccatacctagccatagcataataaagaagtatatttagtccaacttccagagtccctataatctatagcagtctcacaatgttaaaagtccaaagttctaagtctattctgaggtttatccaatcacttaactgtaatccccaaagcaagtcaggaaaccaactgggcaaactcccaaactctgcatctcatgtctgatatcaaaggggtcttcagatctccactcctttttcatctttgttgacctcaacaaacttctttctcctgtgctggttctactccctgttagcagctttcctctgcagatatcccatggctctgacatctttaacagcttgaggtcttcaagtcaacctcagcttcccagcttcttgttccactgtctgggatccacacatgatcttctgagctcctgcaaaggcttctgtagcaccctaggctttggctgactccacgccactgctgctgcagttcttggtgattatcccatggtaatggcatctctagtaaactggggtcttcacctacaattaggcttcaccaatagcctctcataaggctctcttcatggtgcccaaacttaacttctttgcatgacctcttcagtcctgggccatcaagtataactgaggttgcaccttcatcaattgccttccctggcctctcacagtgccaaatctcagctgctctccttgaccccttcataccttcaaaaccagtatcccctgggcgattcttacacattatcaagtccagctgcagcatgaggtacaacctttcctacacacagcttctttgtgctctgagaaaacacttctcagaagatttcacctaagtgatgctggtctcttcttaatcactgctaatttcttagtttcagctgaccagcatcaattgtcccagtaatctctcctaagcttggcagtactgaaacttgctgtagattgaccttgaactcagagatctgcatgcctgtcttctaagtgctgggattaaagaaaggtgt

SEQ ID NO: 23062 - DNA, 2033 bp, Mus musculus
atagccaaagagttccccagattctctaatatttaaattttttttaagatttattttatttacataagtacacagtagctgtttccagacacaccagaagaggacatcagacccctttacagatggatgtgagccaccatgtggttgctgggaattgaactcaggacctttggaagagcagtcaatgcttttaacctctgagctctctctccagccccaattctctaatatttaaaagatgcctgtttatgctccttgtaaagaaaacatctggctgttcagctattgaatggtaaaaataaaaataatccatttatgagtattgctaacacttaaattatagcatagaaaaaaacccagaaaaatgtatttgaatgaaatatgtagtaataacttgtttgttaaacatgcttattattttagattggttgtttcaacctttgcatttaagccaaagttgggtattatgttttaaagagccagtgttttattcccaaatgaacatggcttagcatgtgttagcagggattgttctatttgtgtttctcacagaatacgttctacatggggtggtcagacttgaacttgtccagggcagtttctcacctgttcccctgcagttattacaagtgctcaagtgttactctgtcatatgtcgaggacatagttctatgtaggtactgaaaggaagtattcatttctcattatctttttttttaaatggttgcattttttatgaccttccatatagattccccctttaaatcattatcaatagatagatttactctgaattgaaggttgcatagcccgcttgatcctaggacacatttgcatataaccttttactgtgaatgcagtcagagagcagttgaccagaacagtgataatggaatgctgcttataatttcatgattggtttctggaataacttaggcagatcacggaacctttcagtgcctcagtttcttcattttcagaatgaaggacgtatttactactttcctactgatctacctctctaacctgttgtgagggagttaaagtgatgatcatgtgctggggttaagaaagaggaagcaagttgtctgctgtgctgtgcccttgtgcccttgctttccgtccctcccctcctccctcctcactcctccctccctccttccctccctccctcccctagtactttgaagggacacggatggttatcacagaaagggtctttgagaacgttgaagtccctaaagcaaaatgaactagtttgtctgaaggtgaaatagtgactcgccatttgttctgtggatttattttgaaatatttttcttaaatatgtttttgggtttttttccccttaatactcagatgctactgtcagagtagaaggataaaaagaggactgtcccgttttacttctaacttttataatgctctgagacagaatgataggaatatgcaaaggggttcaggcccttccccttagggtgacactagcagaagtgtacactgtgtgcagatgcctcacaaagactgcagctctctgtaggtttgagttctttccacagtgagtttgtgatgtttcaatgatccagagtgttcaaaattttaaagagtttttcttacagggttttgtccccaaccatatagaaaagttactttgctgcgtaaacttgagtttagaaggcagtggtttcaagctgaaagcattgactttattgctgaggaattaagttaatatttattaagctgctctgtataaagcattgatagtgtgtacagtattttttcagacacgtattaacatataatgacacagtcacaaaaatattactacagaattcacatgctttatgtacaaagtggcttccttaaagaattatttctggtactctttttcttacatgttaacaaacatcatagaattatgtaaaattttgatttttttgagacaaagtttcatgtagcccaggctggcctcagactctgtatgtagctgaggatggccctgaagtcctgatccccctccacctcccaagtgc

SEQ ID NO: 23063 - DNA, 2361 bp, Mus musculus
ttgctattggaccacatacaagagttttaggatagtttcatctcacagaggatctcatctcacaaaagtgttaagagttaaatcaaagcatgaaaatccccatcataaaaacccatcagatccaacagtccacagtgtccaaaaaggaaaggttgctggttgatatgtatctggcctttacaatttcaattgtccaatgtaacatgtaagcataaaatatgttcaaatcgagtgtgggtaggaacgtcactgtgtgtttttaaagtatattttagcatgctaatggacaaatttcatttatgtttatttacagacctcattttattcctttaataggtttaaggaattttttcaatagtatatcgattaccatattacagggaaaataaaacctttagctacatttcaggctgtaaagtaaaatttatacttaaaatttgaatgggccatgcctgaaaaattacaaggatgatagtacatttgtacaaagagacaaaacatgtccctaaggaattatacacacttgcatttcaaagtgcagtggactgtacagtactggacgttaaaagctgagaggtaaatgcgtgtaggatttgtctttctctgtgcctccctccctcccacctccctcccaccaccctcccacctccctttacaacatggctttcatgtgctgataggcttttctcttttgtttatgtacacagttgataatgagcagtacactcaaggaactactttacttcaaatcccactcagtgaaatcgcagtcttgtacctgaagtagtaaaacacattttgctagactagtgaacaatgtctgaatagaagcacagtgcatactagctcagtgcgttttctttgatgttactaaagaggacactgcagtaaaaatgttttcactgtaaagttttgtataaaatgatttttaaaaactcaacattaagaatgtgagatatttcatcataaaaaggaattcataaaagtgcacatgttaaaagtggaatagattaagggttacacaccaggctgtggcacatgcctttaatcccagcccttgggaggcaagaggcaggtggatttctgagtttgaggccagccttgtctacagagtgagtttgaggacagccagggctacacagagaaaccctgtctcaaacaaaacaaaacaaaacaaaacaaaacaacaacaaaattaagggttgcaagaagagtgaaatttgatttctttttggatagtacttccaaatcagtggcttttgttgctagagacttggaagcccaggcaggtttggcaccatttctgggtctcagccctgtgagccatcctcctgccctcctttctcctgccaagggatcatgctctcacctccatttccttccatattagccactgtaacaataacaaagttccattctcaaatgatttctgggtggagatcaggtgaggtcttgctataatttaaaaggttcttaataaagtaagactgtgtaattctgctactatcttaaaagatgtttttgcttcttcctagaaaacccttccttttatgattatattggtaacttgtaaaagaattttgttgtgtttgatgcaaaagaatattgggagtggctgactgtggcagacatgtaaggcaaatccacagcctattaaagtgcacagcatttgcatttggtattatggcataaatctctatctttattgaaagaatactggctaatatcttccctgttaggcatgccaagttgtaggggagagattgtgttatttatttatttttttttaaacaatccaatggatttgtttttgtctgtattttgagaacaacttgaaggatttttttttcattttagaagatagagtatgtatacctgccttttaagttactataacctaatatatataaattataacattgaaaagtgcaaaaagctctaattattgatgttatttccctggtatttaatttttataaatggttttgtaagtaaataattgtagtattgctttgagtagtttaaagtcatccttaaataagttctgactcaacatactgccttagtacaatattctaaagtgaagtactctgatgtgaatttgaaacatgcctgcattttctaagtttcttcatatgtatatgtacatacaccagtacccaagaaaagcataccagaagcctgatttccacattgcattgataaggagcttggtcttttgccttcatataattcagttgcctgggtgaaatagaacataaatctcttcaaatgtctgtccattcacagttttcaaaatggtaacttttcatctggggaagcatgatgccaagtttatctgtaatcagctctattactgga

SEQ ID NO: 23064 - DNA, 1196 bp, Mus musculus
gcccctgtgttatttatttattgtttctagttccatttttagatcctggatggtttcattcctttccttggcctgtttgattttgttttcctgtaactctttaagggatttttgtgtttcctctttaaaggcttctagctgtttacctgtgttctcctgtatttctttaagggggttatttatgtccttcataatgtcctctatcatcatcatgagaagttattttagatcttaatcttgcttttccagtgtgttggggtatccaggacttgctatggtgggagagttgggttctgatgatgccaagtaaccttgatttgttgcttatgtccttatgcttgcctcccaccatctggttatctctagtgctacctgccctggctatgtctgactggagcctgtccttcctgtgatcctggttgtgtcagaactcctcctagtcaagctgtctctgggatcctgtgactctgggatcctgtaatcctgagatcctgggtgtgtccaagctcctgggagtcaagctgtctttgggaccttgagatcctggtgtgaccaagttcctgggatcctgggcgtgttagagcacctgggagtggacctgcctctgggtgttgttggggctggctgtggagtttgcgcccaaggtcctaccaggtttcatgattaagtttgcaaatccaagaaggtatagggctgtagttacagtttagaaaggctccttggtgacattgtggagaatagattgagagatgtaatcttaaaagccaagaagccacatcctctgagcccaggcttgagccaaggtgaagggaagaatcagatgcacattcctcataggtcgtacggtgggagggggtgggaccagacaaaagcttgacattccatgtgtagagtttaggtttttccaagagaatccaggaaaggcatagatgcttatggattttttccagaaactgagtctggtaaggacttatcatggtttctttatcatggagttttcctgggagcactttgggagtttcttgggagagcagggaaaggctgagtagagaggaaggttggtaggaatgttggtgcaataacatctctggtggatgattcttcagagctggtaaatggtaagctaaatgtctgagcccttgtgttcctgacgcaccatcatcaattgttggtgattggatcatctggggaatggt

SEQ ID NO: 23065 - DNA, 1194 bp, Mus musculus
cttattgggcctgcctctcagaggatagtagccatgctaggctcctgtctgtaagcacaccatagcatcagcaatagtgtcaggccttggagtttccccttaagatggatcccaagttgggttggttggttattgaactgcctttcctccatttttgtccctgcagttcttttgacaggaacaattctgggtcagaatttctgactgtggaatggcaaccctatacctccacttgatgccctgtctttctatgagacgtggactctacaagttccctctctgcactgttgggggtttcatctaaggaccctccctttgaattttgagagtgtctcacctttcaggtctctggtactttctagatggtctccccacttcttacctcctgagtttgcatatttccattcattctgctagctctctgggcttctctcctgtcccctcccccctgatgcccaatcttgttcccttttccacctcctctttcctctcccaccctctttctgcctcccttgattgttttcttcttcccaagtgagattgaagcatcctcacttgagcccttctgcttgttaaccttgagttctgtggattgtatcctaggtattctgtacttttttggctaatatccacctattagtgagtacatgtccttttgggttagagttacctcactcaggatcgtattttctagtcctgtccatttgcctgcaaaactcatgatgtccttgttcttaatagttgaatagtattccattgtgtaaatgaaccacattttctatatccatttttccattgtgggacatctgggttgttccccatatctattcaatagtgtgtgtgaagttctggctagagcaataagacaacaaaaagagatcaggggattggcaaagaataagtcaaggtatcactatttgcagatgatatgatagtatacacaaggcaatcccagaaattgtaccagagacttctagagctgataaacaactccagtagagtggctggatataactcagacacatcggtagccttcctctatagaaatgataaatgggtgagaaagaaaatagggaaacaacactcttcacaatagtcacaaataatataaaatgtcttgtaactctaacaagagaaaaacatatgacaagaacttcaaatctctcaagaaatgaagaagacctcagaaaatgg

SEQ ID NO: 23066 - DNA, 2125 bp, Mus musculus
ttgagacagggtccctttatgctctgaccggccaggaacttatgtaaacgaggcgtagatccacctgcctttgcctcggtgctgagattcagagtatgctgtgcttgttttagagcattctgtaatgaagtcgtggctggtttaccttttggcaatatacccaaaccacaaggaatgtttcttttttgttgaagattatagaagaagacgctgctctagtggaaataggacctcgttttgttttaaatctcataaagatttttcagggaagctttggaggaccaaccttatatgaaaatcctcattaccagtctccaaacatggtaagctgggggttttagttgattctcttttgtttcagtctgtgattctgtagttttttagccaaagtaattttgtaattagtgctttaccactcgtaacactaaatttgttttgctgcacatttctgcaaattcccttttaaaatgattttggtgagggtacatacatgaatgccttaattcaaagcatctcctctttgctgtgtctagcatcggcgtgtcataagatccatcacagctgccaagtatagagagagacagcaagtcaaagatgttcagaaactgaggaagaaagaaccaaagactatccttccacatgaccccactgcagacgtgtttgttataccagcggaggagaagccagtagaaatacagtgggtgaaaccagagcctaaagtagatctgaaagcaaggaagagacggatttacaaaaggcatcggaaactgcaacagaagatgagcagagggagtgcaaagtgaatcagaggataactgtatttattttgtattccatgtgtaaatacttttagtatacagaacgagctatgcctaattagggcaccattttaaaaaactgaaatctttaagtcggtgttggtctttttctaataaagcatcttaactcaccagctactttattcttttcagagcctcacttagcacacttacgagttggcttgccctgtttgcttagaattgcagtgtggttaagctgatattcaagcagactagttgggtctgtaattacttaccaagacgttagggactttagagtggattttttttgtgggtggcagagtggaggagatggtcatttactgagttttctctgctgaagtcacgaattcatgaagccttgagaagccgacttgtgattgttaacggatatttgatctcactgaaccaccaaattgtggtgtttactgaaaaaaacctgttctagttgtggctcagcctttgcacacacctttaatcccgagggctgaaatactgacacaccattaatcccaaacaaggtaacatcagtttgtagaaggaaacacccttgtttgaaggtgatatataattacgtggcagacaaagtgacgagtcagaaaaagatgggagagaataggatatgcccgatgcgggaggagagaggctcttgagagcagcagagaaggcagcttcactggcacagttgcacagagacgtgctgaagaaagaatgagccagaagattagaacagatagccagagttcatttgaggtcaagcacagcaaagaggccaagagagaagtcagattgaatccgtcagcttggagaggagtttgagccagaacacctgagttgaatcagctagctggagatcagaaaactagaaagggtgagcttaattcagtctgttgaggctgaaggcactctaggcctggaatacattgtacagaggctagaagcttccaggactagacctaggttagactgagtatgcctcggagacaacgatgacatcaggagaatacaagttactttgacatctgatcatttcagtgcctctacctctggtgcatccaagtcttaggttttgaaaaacaagacctgtttgtaagcagttttaaatttatcttagacaacttcagattctagagagcagtagcaacagggaaaacagcaacctgagccaccagtgatgatggggatagctgactagggagatgcatgaacatagatgatatatatatatatatatatatatatatatatatatatattatacacacacacacacccatatatacatatatgtatgtgtatatatatat

SEQ ID NO: 23067 - DNA, 1517 bp, Mus musculus
agtgaatgcttaagaccctttctcctgtggatttaaaaactctactctgtccccccagctgccttaaatctcatccccttgcttgtggtctcatcatttgatgagtatcattaactaaagtacaacgttttaagccaagagtgaagtctccttaaaagttttcagtaagtcaacatactgtaaattttctatgcaaacttgcctagaaaactttccacaatgctcaggaagtccagatatttgtatttcaacaaaggacagtaaactatgtgtttacagccaaaagacatgcctcatagttcttaacctcaattttttaaaagtgttttttttcctctatgatatttttattggcttttaaagatgttttcatagctaaagccctaagtaagtgagattagattatattaacattatttttagataaacatacttaagacttctcaaaaatgtaactttttcctcaaaagttttcagagggtagttatatattccaaactcagtatgagctgccaccagaaccactaggaatttctgtagtctacttctgaatgcagtaaatactccttttgcccgttgaacttgtaaacacctcaaactctagcacccacgaatgattcctgaaagggctgtcagttccagtcagcttctccatgttgaaagtaaaagttccaacatggcaccgcggtgcatagcagaaacctcgggggaaatacgcctaccgaccttactttcaggttgaaaaggttcaacttgcttgcagcttctcttacagcccccatggtgagggagataaatgaaataaaggaactttgggtgtgttactaaaggtagcggtctactctgacaggacccatctgaggccacgtggctgagttgggtctgttcatctgtcttaggtaacgatcaataccagcatgaattgggtctgttcatctgtcttaggtaatgatcaataccagcaaaacaaaagtggctttaggttggtggtgatacttttcttaagttgtctgactacagttaagcatttctcaaaaatgtccccaaagaaatgtgaaaggatttgccacgggacttaagaaatgacaaagccacctccccttgtgtccccacacagaaatgctgcagagtgtttaaaacttgagacattttgtaggacgcctgacaaagcgtagcctttttcttgtgtcaggatgcgtatttattacaagtattctggttaaatattgaaaagttatatgctgtagtttagcattttttttgtctttgtaatttacagaaattattgcagaaaataaatgtggttcattttgcatcccttttatggatttgtggtgtttgtgagcagatccagtggctacagtaacacttgagggtgacggtttttacatcctgcttgaccagtgggagctatccccaccagatcacttaagaatccactccaccatcctggagctgtgcccaccagatcacttaagactccaccatcctggagctgtgcccaccaggtcacttaa

SEQ ID NO: 23068 - DNA, 1146 bp, Mus musculus
caatgatgtcataatccggcagctccaagattccctgcatgatctgcagaagagattggagagctccgaagcagagaagaaacagctccaggacgaactccagtcacaaaggacagacacgctttgcttgaacaacacagagatctccgagaatggctctgacctcagtcagaagctcaaggaaacccagagcaagtacgaagaggccatgaaagaagtcctgagcgtgcagaaacagatgaagctgggtctcctctcccaggagagcgccgatggctactcgcatctccgggaggcgccagctgacgaagacatcgacacactaaagcaagacctgcagaaagcggtggaagaaagtgcaaggaacaaggagcgggtgcgggagttagagactaagcttgcggagaaggagcaggccgaagcgactaagccacctgccgaggcgtgtgaggagctgagaagttcctactgctctgttatcgagaatatgaataaggagaaggcatttttgtttgagaaatatcaacaggcccaagaagagatcatgaaactgaaggacacgctaaaaagtcagatgccacaggaagcccccgacgactctggggatatgaaagaggccatgaacaggatgattgatgaactcaataaacaggtgagcgagctgtcacagctgtaccgagaagcccaggcagagctggaggattacaggaagaggaaatctctggaagatgcagccgagtacattcacaaagctgaacacgagaggctgatgcacgtgtcaaacctgtccagggccaagtcggaagaagcgctgtcggagatgaagtctcagtattccaaagtgttgaacgagttgactcagctcaaacagctggtggatgcacacaaagagaactccgtgtccatcacagagcatttgcaagtgataaccacgctgcggacaacggccaaagagatggaagaaaagataagcgccctcacagggcaccttgcaaacaaggaagcggaagtggcaaagctggagaagcagctcgccgaagagaaggctgccgtgagcgacgcgatggtccccaagtcttcctacgagaagctccaggcctccttggagagcgaagtcaatgccttagcaacaaagttaaaggagtc

SEQ ID NO: 23069 - DNA, 1135 bp, Mus musculus
ttacactctagaattacctgtatagaatgtctgtctggtaaagaaacggcagacaaaatgttccatgtagacatcattttctctctggaaagttcaggtcaaacattagctgtctcttagttagagcgcctctccctcctctccatttctcctccacccttgctcagtcttcactgtgacagatgaaagcagaatccctcatcggtcctgggattccctcattagggtggaattctcctgaggtctccttggagctctctgagggtgatgagcgaggagtgcgtgttatcttccgtgtgtttgattagaggggatgcattaagtggttaggaaagcactgagggtaaatcagtaaaggggagcccttaactgtgacaaggtggttacatctgtcagtgcttagctctcctcatcttccaggagaaataagggtccagcgactcaggcagcatccgggaaggtcgcactgatgctgggtgtgttgctaaggaaccaagggaggcagagcatgcccagccttgttctaccttgacaaaatattatattctacttgggcacctaacgctttctataaaggaaagaactcattttttttttttaaatctttctctatacttgcttatgtattagagctggctgattaagtcagttgcctgatttataattatactatgcctcttgttgcttcagcgtgaattgggctcagggtacttgatttatcatgggaagcaccaaatagggagaagatagatttcttcaaacctgcttggtgcttttaactgtagaaagccaaaccaaaccaaaaccaaaaaagtctttggctgttgatcttaagaacagccttagaagaatttggtctgaggaaagatcacaccaacatgtatgaatatgtatttaacttagtagatttcaggtcatggcattgtttgtaatgtgtgaggatagtcttttttgggggccggggggacctgaatgtttcacaggcgggaagggagataggctcttcgtatacggaagaatgacattctggggataatgtctctgagtcttccatctctgagtactgtgagtcccctatccgagtatctctgagtctgtctctgagtactgtgaaccctcttgaacactgtgagtt

SEQ ID NO: 23070 - DNA, 1123 bp, Mus musculus
ttctcttccaggagtagagagcgaagaattatcctcattatggcgggacagtgggaagcctgtcagacacatgagacgcggctagagctacttctgagaacctcagttgttttctttttagttttatttgttttatggttttcaactttaagatactcaattctaacattagaatatgtttaattttagaacagcttgggtatgcatatctattttgagtgtaaagctcatagacagtaaattacgtgtcaggtgtttccaataagcatgtaacataggaattaagctatactaaaattgggctgaaatttaagcatatggtttcataatctagtaattatcaaaactgctctctgatgctgctgaagtgatcctttggctaccgtaggtcatataaaatgttatccaagttgcatctcactagtttctttgctaaagtgggctatcagaaaatacaaactaggatttacaattcatttctcctgggcagtgtagtgcataagaccctgacagcaacacacaagtcagaatagcaaaactcaaccctgacagggaagcaaggctggtcatggggaagcaagggatgtctttccatcagagatgggaatcttcacactactcatatttatctctgagggctccctgccacgttcctgcctggaatgctggagtgcttcctgccgtctgctggtatgtgcaaacaaccctgcatttgaggatgctgtctaccatccttaactgtagcttgatgccactgatatcagtggaacacctcaacagaacaagcacgttttaacgctgtggttctggcttttgtggcatgagtatactcgtggtgagtggacgtgtggctgtgtgtgttttctgttctctgtccttagcttgggaatgtaattgttctgacttgtgcttttgctgtccgtagaggggagtttccattcttggatctcagatttataaccacttccttattttcgtcctgcctcctaatgtgctttctgaaaagggacttgaccttcccataatccagttttccttgaagtgttaaatcatccacttaagctgtatgggctttctgtgacctgtggaatgtgaatgtctctccattattgacagtcaactg

SEQ ID NO: 23071 - DNA, 1150 bp, Mus musculus
ttcgatgtctccctacgtggaattgcttttatatgatgttttttttattaggttcactgccttaagtgactcaggccaaaagttttaggtacttaaagaggtcctttttaaaaataaccagaacattttgtaagcctgaatgtatatggccatttgtccacctcagtgtatcttaagttacagggaagttcgggtgccctgggatcatttctgctgttgaggaaagtccttccaggtctctcactgaagtctcacagagcttcgcgccttgtgtttcagttgttggtgaaaaagagaaagccagtggcacggtgaacatccgcacgagagacaataaggtccacggagagcggacagtggaggagacggtgcggcggctgcagcagctcaagcagacgcgcagcaagcaggcagaggaggagttctagcaggcacacgctgtgcccgagctggcgccgtgtcagggaagaccttgtacaccgggaagcaagcgtggcttcaggccgagcgtggagtagctctgcagtctgcatgaatcggcctttgatctggccaagtcttagagaatgttgtagatgggggttaagagaaccatttaaagtattttgttcattaaatgcctctttccaaaaatggaagatccaaaaatggggatgttttatgtacccgggttattttgtatgaattcaatcaattaggaaataaaaagattttaaatgtgtctaaggagaaaacagagttgaattatggcgttaaaataaaatttactaccaaagatatcaagacctctgtcctcacggttatatagaagcgctggtcaggttgtacccctcagtctccatctgaggcatagcgtatgctgatccctaactgaggtgggagctgggtgctggcttgttagtgacatttttatttcttctggggaagacagctttaacttaaaacagtgatgctcaaacttttaaagctgtgtcttcaatgaaatagctgtgtatggaagactattccatgttaaataatctatattatgatgaaaaacttcaaatttctataccagctaatcattttatggaaaataacatgagggaaatttcttgtgtaattttttaaaagatttatttatctatttatttattatatgtgtgtacac

SEQ ID NO: 23072 - DNA, 1150 bp, Mus musculus
aaagttctcctattgaacatcaggaactgaattcccagaagtaaacctcattttggtcctttgttctctttttttttcccccttgtaattgttgtactgatcattccatatttatttaagttctttcttatattagccctagaataatctagaatactttaccaacttggtagtttattgtacattcccatttaaggtggatttttgtgttcccttttgtctttgtcttctttgtgctggtgcgctgtgtccaataatctttcctttagatttcattttggtgagtaaggcttctatttccagaaaattattgtatcactgaagagtttatcttaattctccttttgttgttcatattatattatgtaaatttgttaaaagtcactccccggatgaatttaactgaaaagttctcaaatggctcacgtgacactgatgctgctttaaggaagtgtcttgctcacctggtcaaacacccattcctcactgcattttgccaattcaatccattttagatgtaacctcgggtatggtgaaagacccaccggacgtcttggacaggcaaaaatgccttgacgctctggctgctctacgccacgctaagtggttccaggttcggaacatcattttacttttttcttgtagccttatgagagagtagttcagtacaacatgtttaactatgcttaaacatttcaaacaattgcctaaacaacactattttaaattaaatctcagaaaataagttaccatagaaagctgagtgtaacgatctgcattttgcggttactattaatttgacaataaacaggtttggggggtgtttgtagtctgggttttttatttttagtggctatatttaaagttgacttgcttaggaacatcacatgtttttgtatatatattatattccataaggctgcagattaactttgctttaaataatggaatatgtgtttaaagctttgtgtagagttataagacttttcctcttctttctcctaagttactaagtgtagggaatgaaaggtgaggaagcagctgcttggtttagtgactttgcagacatgcaaaggcacggagaggaaaccaaacagatttccttaacctttcagtccctagacaaactttagctctttacttttccatt

SEQ ID NO: 23073 - DNA, 1882 bp, Mus musculus
tagagtgttttggctttaaattaattctatattctaactctatttgcagtttgcattgagactccttgcattccgtcagatacacaaagttctggggatggatccattaccacaaatgaatcagcgctttaacatccacaacaacaggaaacgaagaagggatagtgatggagtggatggatttgaagctgaggggaagaaagacaaaaaggattatgataacttttaaaaagtttgtgtaaatcttcagtgttacagtaggtgccggtttattggctgttttccattcatattaatctctactttaaaagtttatcaagagtataaagagtttcatggaagaaccaagtttttctatgattaaaaacttattgtacagtgtcaggtattatatggatggaaagaaagagatttgactagggggaatatattggtctttccccccccccaccctttttcattattttgattttattgactggttgcccttactccctgtatttttgtgtcttttattaactagtgcattgtgttattaaatcttttctgtatgtaatacaggatttgtgcttcagttgctctgtgtattttgatacttttattgagaagttctgtttgctttgacacagttgtaagttactttgtgttatagatggcaccctttacccttactactttatagcagtgcggtttttttgtaacgtgaaactgcaggagttttcctttgttattctgtatgtgaaggattacaatataaaagctaccctgccatctaagtgctcagaaatagctgtttctgcagatcttgtggcatttgtctatctagtgtgatatataaaggtgtaattaagacaaattccttaatctaatcaagtttgctgttagttgtgcattagcagtataaaagctaatatatattatatggtcttgcaacagttttaaagcctctgcataattgataaaaaaatgcatgacatttttgtttttaatagacatttaaagtaataattttaggtttaacacgtagatctttgtacagttgactttttgacatagcaaggccaaaaataactttctgaatactttttcttctgtacaagtggaaagggaatttttcacatctaagtgggctattgttttcaaaagaactttatcattgtgcaactaacaataactagccctgactatgtgacagttccctgttgatgtgtgcaattactctagcggcttctacagtcttaacacagttgaatgatccccacatcctgtcacccagatcatttataggtctattaactgtgagattgataaagtattactgatttaaaaaaataagagtatctaagaaaaaaaaaaaacagaaaattatttggtgtggccatccaacatgcttatgtcttatacagaatgctaatcccctggcagtggtgtaatgagaggtcacaccttactgtgatgtgtgtgtgctctggtgcacagatgtcattttgttgtcacagcactacagtgagatacagaataaacacttaaattcatgtaatgacttacttgtgttatgtggtaggcttgatggtgacaacttttgcttgatctgctacttgcgcttcggtaaaactgcattcatatatactatgtgtatatgtgttactcctgacaagggcgtggtggctgacctcataatcctaacatttttaggtttcaccaccatattggttcatttttctaaggttggaacccttccccatatgaaagaatacaagactggcatttttgcagatctgtctatattatctgttgtgtttataaaaagttgagagaaggggatatgttttggtggatgtgtagtcaggtgtggtaaggtatgaggtaaggggtgcctccg

SEQ ID NO: 23074 - DNA, 1099 bp, Mus musculus
cttgcctctggtatactttgtcccatttttttcccagtccaaaatcatttctttttctaagtgttttgtttattttgaaactaggtttggaatttcgcaggctggcttgggatttgtggccctcctgcctctgcctccagaatactgggttcacaggtgtgcatgctgtccttgtttttcttgtaatgtgtatttttctgtaacaaggatgcctgacttttcttttagacatttaaatcatggtttaaaatttcaaaggcctttttctttaatgatggtctcaacttttattcatctctcctaaggtttttccccctccttggaattatagattctgaaattaacctctatttttgacttgatgttaagtatatttttccaccttatagcagcctcttataagacaggtaacttcccagtcccttagcctaaaaagcctttcagaccccagctgcgtgtcggtgtctggtctggacaaggtggtcagacagcaagtgctgcatgccgtgttgcagaaggtctcagcagatgtgctgtggtagccgctgcacactggttccccagctccagtgtgtgactgtaagatgaggcacaagaagccttatccacttacctttcaccttgaccataactaaggtacttttcctgggactgtcttaagccccaaaccggccccaacttgattgttttcttcaaacactggtctctctggaggctgaccgaataacagcgccatcttcaggggtttccacagtgcttgagctgcagataccgcctgcttgaatgcaaagaggaaagagtctgagaggctgaaagcttagtcttcatcttctttttgaaagctagattaaatgaatttttagccaacaagtgaattcaaaagtgaagaaagccagagggagatcccgtgggaatgatggttgtctgctgggtgacaagaaaattcctttgtttttgttgtaaagttttctctccacttctgcatgtcctttcctatccttacgcaaacaccagcagaatttctctgcttccatggagcagaggctgctctcagccctagtgtgttttggctgtagagtctgtcttcaggagctgtagt

SEQ ID NO: 23075 - DNA, 1073 bp, Mus musculus
acctgctctgtaatgaacacaagagaaggcagccgaaagctggggcaggggtgtgaagagggaaggctcccccaggctacacagtgagctccaagccatctgtgtaatatagtgagacccaggctccaaacgagccacacagaagaggcttgaggccagtatgagctgggtggatgagaggtcagaaggtcccaaggtgaggctggccctgagccattcggtgactctcccgctcagcgtcactttctctcctcagttagcagtccctgctcctctgagtgagctgctgtcaaggctgagctgcagtgtgtttgtcctgtgtaaacagcgggagaaacttcgtgttcacattccgtgcatttccttccctgaggcctctgaggagagcttgctttggttttccatcaggtgaacagctgctttgtgaagccagcacagtcctgaagtatgtgcaggaagattcgtgtcagcgcggcgtctatgggagactcgtgtgcactgacttcaagatttccttcctgggggacgaggactcggccctggataatggcggggtatgtgtgaactgcatttgctgcgtgggagggaaagtgcaggggagacgccattggtttccctgcagcttctccctcctcccaacaaacacaaaagaccaacgtctcctgtagtggtctgctcttgcccttcaagggctccttccaccaggaggaccccttagaaataccacctgtacttcatgactcccttgctcttgcccttataagttgacaccatcaactctttcccgattccttctgcactcagcacagcttgagtcacttgttggaatagccccacacacagttcctcatggttcctctctgctaagcactttcacagattcgggaactgaaggctgtagtgaaactgaccaagagcatagcctttgagcttgccttgtttctgtctgatctgaacctagttgcagggtcatggtgagacttgtgtctacttaggagtgagctgtaggagaggaacagctgtgcctcccagtgaaaccctgccagggccctgccggactgaccccgagtatc

SEQ ID NO: 23076 - DNA, 1097 bp, Mus musculus
aaagtgagctccaggatagccaggactacacaaggaaaccctgtcttgaaaaaaaccaaccagcttactctcttactcttgtgtctctctcctgcctcttgccctcttgctcctcctcccttcccctcttcccttcccttccccccccccctccacgtggtcatggccaacctctacttctctactctcttcctctctctgtctttctcagcctctactgccctcttaactcccctcccatgccctggataaactctattctatacttaaaaaaaaaagaaagaaaagaacaaccaacaaaccaaccaacaaaaagccttcaagaaataaaacaaaaacccccaaaagaatgctgctgggaggggtgtgtcctgagaagctgacagtcttcctgctctttagcattgccatgtagcactcatttctactcacattgattatagtgtttgatgagaaaaagaaacctctgtttggacaactgaagaagtaccccgagaagctcgttatccattgcaaagacctgcgggtgctccacttctgtctgaggtacacaaaggaggaggaagtcaaaagggtaactagctgcatgtgtttttagggttttcccatcaggcttcccccagggactgtaggcatggcttatattgcctgaaggtggaagggagcctttttcttggtgcagctgaaagcagctggactcacgtggagagagtgggcaggcaagactgtattgacttggcaagtgctttgagtcctccagttcctagagctggccacctagaaagaagccctgcagggtgggaagtgatgagttaggtaagggtctgctggagagtgctcaggctggtcctcgtcctgacagtctgctaaacaggagcactaccttccagcaactaagagtcagtgtgcttaccactacaaggtatcggttccgtgtggacctagaaacacaggtcaccaggtgtcttagtcagggtttctattcctacacaaacatcatgaccaagaagcaagttggggaggaaagggtttatttggcttacactgccatactgctgttcatcaccaaaggaattcaggactggaactcaagccgg

SEQ ID NO: 23077 - DNA, 2240 bp, Mus musculus
tctccttttcttccacagttctggaagacattcaatgaaagccatgcctctagtatgcataggacggagttcctccttgacctgtcataggatggggtcgtctcctgacatctgtattatatgtatacagaatggctcacggccaggctgctgtgagagctccctcctgttgtttctgtgccaagataattatgtagccattccgaacaagaggtattcagggatgtgcttagaccatagcatattccttgacttaaaccatagcatattccaatgcgtgcgtgtacacacacacacacacacacacacacacacacacacacacacgcagcccatagagaacttggacagttctgctggtgtcatccatcctaatgttcagcccctccttcctgggctgtaacaacacaggatgcgggcagcctccttcccttttcctttgctgtcactcccaccttcccttttcctgctctatgcataccatcctatgagtctaccttggtgtgcatcgtcccagggtcctgctgctgtgacctgttgattaaactgggggcagtcctctgtcttccacaggggagctcattcctggagccctcagttttgaccacacatttggccctctgctcaccacacctggactgtgcctctctgcagcccctcagctggtccccttgccttccccgttaccctcacagatgctggggtgggcaggccaattcgaatgtggctttcacaggaaagcggtcgtgtcagaagcagttatcactcatatatgcctcagcgatgtcaaaagccatagaagaaacccagctctgcctagtcaccttggatctgctgtcttaaagatatatatttttttaatgtttgaaagaatcctttgtaaggctcagtcctatcattctcaacagagccctgttcagtcccacaaacggtgtgaagagtgggagtgggcgagggacctcattgagtctgcctcaagtgtttgccttttatctatatttgctggtcaggagaggtcctgttgagggcgtctctgttgctcatgggcaataagacattttgaaacttcacaaagaatcctttctgattgcactgaatcatctttcatacataatgataatttttcctcgtctccctccataataatgcacaatccgggttggtgtgttgacccagcaagttgaggggaggtcaggatttgtgtttctggggacaaatgcactcagtctcggttgccttaagagtctttcaggccaggttcgtgctaggcttgcgctaggaacttagaacacaccagtccttagctccctctccctgggctccttgggcttctctaaactagcactaaccgccacgccctgagcctctgccacaccctcagcctctgcctcccaagtcctcagcggagagaactatttttgttaccatattataacgtgaatgtttatatggtagactctacagtcttagtgattttctttccaaaaaatgcctcttgtgatgttttgtacttcacaacgtatggtttaaaggcacatggtcatgacccttggtatagcagttgaatgtgcattaaaatatttttctatttttttaaatcacaatagaaaaagtaaataagctgttatgacctgtgtggttatgacttatgtatttatatttgaagccagatttctataacttggatttgtgtacagaacttcccgtgggtttatatattgtgtatttttattcaagattgagatgtggattatgcttaacattaaaagatacaataagaccatttgtttaaaacacactgtgcaagtttggaagtgtctgttaataatttactgtgtataacacttgcatttgtttatacctctatgtttttacactgaagataaactagctttaattaaattttaaaaatttaagggattaagctattagactgagtcagcttcactgtgcagtttattttctgggtgttaatgaaagtttatacatgtctcactgcattggagctgactgcagagattaaagcacaactttgaaacagcgccatggttggtgtgcacggtctgctcctagtttatcctcctcattcgttcaggacttgataaacgtgtcctgggttctggcaggccccacagcaggcagagcccagggaagcacaaagctgtgctttccaggaacccccacacctccaccctttcctatcctctgcgtatatgcatgtatgaacactcgtgtggttg

SEQ ID NO: 23078 - DNA, 1178 bp, Mus musculus
gccctgaccactttacagccgcagtcggaggtaggaaagttttacaaacacaattcgtcaatttgtttaacctctctacgccagagcacagtacatgaacagctttaaacgcccgagtgtagatgactccttttgaaactcgggagtttcacaggcgaagagccaagtcctccccgtaggtagtgaggacccgggctatagtggctgatccccagggatgctgaggtctcagtggggtccgccctagcctggcctcggcttctgggatccaggagagatctcactggtcgctggcgccaggccggacctttagagtgaactgagaggcggatgaaagccgggcaggtcaccgatcgcaaacctttcgtctccagactcagggccactagcgagtccagaagctcaagtgtccgccgaagtgggaggcggctagccacgccccccgctcgcgccgcttccggcaccccggccccgccccgcgccggcgctgccacatcctccggtgacgtcagcgcgcgccgccatattgggaagcgccaccgccgccgccgcctccgctcgggctcctgggctgtgtggggggccacagccgcgggctgaaggctcccttgtgtaccccatcgacgcccggcccgccggcttcgcccagctccggctcctcatgaccgccttcggccccgcagcccacggacatcgccccagctccaagaattaacacggaagctcccggggccggggccgtgagggagagccggccggtcccgcgtccctgtcggtccggcgcggctcttgtgcgggagccatgacctcgctgacccagcggagctcgggcctggtgcagcggcgcaccgaggcctcccggaacgctgccgacaaggagcgggcggcgggaggcggcggcggcagcggcgaggacgaggcgcagagccgccgcgacgagcaggacgacgacgacaagggcgactccaaggaaacgcggctgaccctgatggaggaggtgctcctgctgggcctcaaggaccgagaggtgcgggcgccgcggccccggccggggtggcagccggggtggcagcgggacccgggtggctccaggtggggcccgggtgggcgctggccgaggcctcacctgtccctgcttccggagccccgcgcccctgagcgccctctcgtcccaagga

SEQ ID NO: 23079 - DNA, 2620 bp, Mus musculus
gattagctaaaaacctggtagaaaagggtgtactgacgacagagaaacagaacttcctcctgtttgacatgacgacacatcctctcaccaataacaacattaagcagcgtctcatcaagaaggtacaagaagctgttcttgacaaatgggtaaatgaccctcaccgaatggacaagcgcttgctggccctcatttacctagcccatgcctcggatgttttggaaaatgcgtttgctcctcttctggacgagcagtatgatctagccaccaagagagtacggcagctccttgacttagacccagaagtggagtgtctgaaggccaacaccaacgaagttctctgggctgtggtagctgcgtttaccaagtaactgtcagaattcaatgtttcctttttctcatgtgaaccagtagtttttcttctattgactctggttttctgcagtttgtactttcccacactaataattggcttttgttctacaaaatggtgggtggatatttctttttgtatgtacgcaggattctgctggtacgagaggccttcctctttctgtttgtaaccaaccttctcgccatattggcaccctaccccctgttgccactctcactgttcctgttttgggtttctggtgtactgtgaccttcagagtacctccagcccccacctcatgcacagcgttctattacctcagcttgagtctcccacatgtgcttattcacctggccttctgcctgcagttcagacaagtcacagccaggccttcaactcaccaaaggcaaacatctgtatctattaggacgttttatacacaaacctcagttgagatgtatacttagcaaaattatttttcaattgaaacagcacagtaaatacataatataaaatgccccttgaatttttgcttcctttgtaaatctgttgtgtgattacagttgttataattttagctgttcaatcataatggtccaattgtttcacaaagccagtttgggatgggctgcattccactaatgctgtatatagtttgaattatatatgaatcgccccttcttctggccacctctgcctcattttagtattgaattgtgcatctggtgcccctcacttgcttcattcattgttatctgatggcaaaatagagctctcattattgaaggagagagatgtgtgaccctttcagggctctttatgagctatgcccctcatgatagtctacctgtgcatcccttttgggacttttttttcctcaacttttcctgttttttatgatttgtgtaggaaagaggcttgtgaccagtactaatcttgagtacagtttttttgttttgtttttccacttttctgtccttaagtaaattaatgtctgctctgatatatcgttcatctactcatcttctcttgagaaaagaaaatcagatatcagtcctagcagatgttgcatgtaaattggtagcaagtaacgactacaactcaagacgattaagaattttgtaacagaaagctctgctatgttttaatttttatatacaattatgatattagcataccataagactacaaacatctgctttttaatgttgattttattcattatcattgtttatttactattcgtttcataatgtaaatactatacattgaacaaattaaatgtcaaatttttattattatagttcatgttaatagtggggctttcaggtgtctagaaacttttggttaacatttgatgcaaaaatactagatgcgtataactttagagttgaattttaagggactccctaatatgtatactatctttttatctggagtaataaataaactatgatcttgaaagtgcctgaatcagagcaagcatgccatttgatttttgtgctctcgttctctttgctttaggtgaaggttatttagtatggcacggtaacatttcagctgcaaggcttgggaaactgtcttaaaagaaccagataggaaatactttaaacttggcatgccacatatggtgtttgttgcagaaactcaattctgctgaatgaaagctgtcactgacgatacaaataaaaggcggcagaacactagagaagcaggcagcgtgtttgccaccaaatgggtttgcccttccctttataatgatgtatagggaaattaaagaataaattaagaaaatttaattttgttattttatgagtatgagtgtttttcctgcgtgctctatatgcgtactccaggagtacctgccagaggccagaagagcgcatcaggtgtgagtcgtcatgtggtgcagggagctatacccaggtaggtcctctgcaagagcagtgagtactaactgctgagccatctctctggctccataggctaacccactcccccacccttccttccttctctccctcccctctcctccccctccctccctcccttttctctctttctcttcctcttcctcttcctcttcctcttcctcttcctcttcctcttcccctcccccccacctctctctttttctttttgagacagggtttttctgtgtagccccgactgtcctggaactcactctgtagaccaggctgaccttgaactcaagagatcttgccccctctgcctcttgagtgctgg

SEQ ID NO: 23080 - DNA, 1244 bp, Mus musculus
gagaagcaaataagggcccacagcagtctcagggaaaagggagagccacggctgcgtctggagaactgtcggctctcagggcacccttgaccataagtataaagtaacattcgcagatggcatgtcagaagacccttgccagtccatgacggtgcttgcagaaagtctgccgcgctaagcgtgttggaattgtgcccacgcggttgctggatcttctccagacttgtttgtatgcaaggggtctggttgaatacacctaagcaaaattttgttgttgttgtaggttttgtttgggttgtttgtttctttttggttggttggttggtttggtttggtttggggtttttgtttgttttttggtttttttttgagacagggtttctctgtgtagccctggctgtcctggaactcactctgtagaccaggctggcctcgaactcagaaatctgcctgcctctgcctcccaaatgctgggattaaagatgtacgccaccatgcccggccgtttgtttttgatgggttggttttgattttctgagatgacggggtttctctatgtatccctgatagccctggaactcggtctgtagcccagtctgacctcaaactcaaaagatccgcctgcctctgcctcccaagtgctgggattacaggcgtgcaccaccactgcccagctgcttacagtggaaacgccttttgggagttttgccttggtggtcattatagtcctcagttggcattaagcatttaagcactaggtgtcattttcttggcagtcagtcaatcagtcgagtggttagaaagttgctaagcagataagggcacttgctgctcttgcagaaggctggagttcagttcctagtacccatatggcagcccacaacctcacaactccagtgttctcttgtggcctccaaaactacacacgcatgcgtgtacatacccacatgtaaacatataaacataaagtttttattggaaagacctgtcactgcatagagaagagaatgttttctgcgccgtgcattgaagatgatgcttcatatatttaatgagccaagtttgcccttagccagagagtggctgcagccactactatttaccctgagttcccaccccaccaggcgtgaatgggaccgtctttatcctagaagctaatttctgcttgcctgttccctgcacttttgttcagtaattactttataactgcttaatttctttaaagggtaagatgatatgtaaag

SEQ ID NO: 23081 - DNA, 1129 bp, Mus musculus
tttaatccagggtgctcgccccatctggcccttcgcagacgcctgtggctgctggggtacgctggttatttcttacagctccttccttccagacacctatgcaaccgggctatgctgtgaaaccactctcactgtaggtctgtgggcaaggcggctgattgattgagtactgtgggtgggcgggctgaggtatggtgggcactgctgtctgacaggctctcccattgtcctgatacaggtgagtgatccaaacggggagggatgtgccctccttacagagtcaggagtcaggagtctggggacttgaatgtaaatgtccctgtcccaggtttccagagccccggccttagcataacagagctcccttggttggctgtcagttatcctcaattatggctgtttctcaggtgagctctggcttgctggctttttctgatgtctcactgcaagtgatggaagttttccctgtgtcttcaggaagcccgctggcattcacatctgactttgacttgccactgtcgtcctctgttgtacacgggatagtaggtttctgtggagtcatagcctcctcggtgaactcttcagagtttagcctaattgggagccccaccagccaccagggaatatgctgagacttaagaagccccacgggggatttcatgccaactaaggattggtacggaagatggtccttgccatccatgtctaaaatccatgaacccctcccctctctttttttttttaattttaaaaatttaaaaattgctgtggtttcaaggcagggtttgtcagtgtagccctggctgtcctaggctccctctgtagaccaggatgccttcgaattcacagagatgtaccaactgcagcctccccagtgttaggattaaaggcatgcgccatccccctccccaagcgatccttattttttgctctatagttctaaatacttggtatgttgtattagctcttccagtggtgcccagttctcagagtgaaaatgggatttgtctggctgccggataccagggttcatttgtactgcttttaccactagtgataggggctctgctagtcagaaagtcggctctgctcgggaatgtcgtctttgttcccatttccttagcttact

SEQ ID NO: 23082 - DNA, 1204 bp, Mus musculus
gggagtttggggtgagaaaatagttcttacttgttgtagaataaatgctgtttctatgaatttttatagagttaaacatactcaattttccccccagcatgcaatgatgctgcctgttctgacccatcacatccggtaccatcaatgcttaatgcacctggacaagttgataggatatactttccaagaccgttgtctgctccaggtaagcagtgctttatagatccctctgagcccacggtgaggctggctgagctcaccctgcacagtacaaacggaccctgagaaagcaccaaccctccctgagctccctgccttggccaggatgggatcctccctgaaacgaacgggtggggtttcgggattgttctaggaaaatcgtgcagcccagttctgcagatttgatgctaaaggaggagccgcgaggctttcctgcagtgtttgtttggtatggagtatcatgagtctcggggccgagtttttaaactgagcttgtttcattacaactatagcttgccatgactcatccgagtcaccatttaaattttggaatgaatcctgaccatgccaggaattctttgtctaactgtggaattcgacaacccaaatatggagacagaaaagttcatcacatgcacatgcggaaaaaaggtgtgtttgggtgacagtaagacgctcctgtctgctctgtgctgcttccgaaggcccagagccacccgtccttgggctgatcccctggtggctctgtgaacccctccctctgcgcctcatgcatcctgggtaacagtcactttgggtgcggaaaatgttcttacttcagtcacatattttgaataatggaatgcagatgacaaactttttaaagtccaattggggtgagaagaattcctttctttatatcatatgattttctaaaatagttcttaaattatttatttgtatgtttgtggtttttttttaaataggaattaataccctaataaatatcatgtcacgccttggccaagatgatccaactccttcaaggtaaatttttaaaaagcagacttgtgagaagtaatgtacatattttgtaatttactcacttcaagtatagacttcaaatggtttggcgagtatattcgtgaaattcttgaactgtaggtgtctaatttcagggcattttcttcatattaaatccaataccctatgcccacgagtagtc

SEQ ID NO: 23083 - DNA, 1112 bp, Mus musculus
ctctccacccactccaagtgagtatgaccgaccgtgtctgcagtgagtcccgaaacttcatggccacctttcccttccctgcccacctgtagtctctgactctcttccccagaactatgactttatggtgggcgtcagggaaatttcagaaataaatagtagactgcgcacgcacgtgtgctcaggtgacctggtaagcatggggatggcgctcctgaggcgacaactgcggctgtggaggaacagccctccacacagtgggcgcctcacaccgtgttggcgcttgcacgccatgtgcctgcccgtggagggaaagtggtgttagaggcgatcttaggcatagttaagaaagtagagcaaatactaaatgaatattgctaaattttaacctagtttgggctttagaaatcgagtcggattgtataatatttactacacagtgctgcatgagagctttttactttttacttgggatttaggaatttaaaagatctatacatagtgcgtgctttccctcggttagctttaaaagtttttctgcttttctttctgctttagtttaagatatgtatatttcccttagtctcacgttatatgtgaatatgtatttaacataaatagtagtcactagtgatcagatgttcatcgaaggtttaccatagtaaacggcagttcagcgctgtaagaagattctagtgaaaataagagttatgcagtactgttgaaaatgttaatcttagttatacttcttaaattttctctttgccagttgttaaaggcttgttgcatggagcaccacctgtgtagaggaataatgatatccaccggaagtaaattcagttttaatgatgctcatttgccaaaacagtttgcatagtatgttcaagatgcgcagtagtccagttactccaaaatcagaggctcctaaacggcagctcccagacagccgttcccatttcctagaaacttgtcagacagaccaactcccagcaccgcgcgcacacacacacacacacacacacacacacacacacacactgacgcgcatgtatatggcagctgttcttcagctttcgtcttccttagagagttagtctaataccagagatttt

SEQ ID NO: 23084 - DNA, 1182 bp, Mus musculus
tcttccctctattcttcttcccccaccctcctctccccatccccttccctctcctcttttgtcttcactctgtcatttcttcctgcgtttttctccctcccacaatttttttttctcatctctgcttcttatctttttgtctcctcatctctctacccagtcaatcctgttctacctatctctcttctccctttcattgtttactctctttttttctctttcactctcatatacaaccccgtgtcttcctgagcccatggcagtacaggggtgggtgggttggggaagtccttcagtgacctatttgtaaaaaatataaactttaaatttgaagctataaatttgtttttatgagaattttaaaagcttttataattctttaggaactatattaattcaatcagaattgcaggtgtaaatacatcaacctatgtcttgttatttgttctctggggacaaagtttaagttttatttcatttgtatttacattttcattttggttgcagaataattttcatacagaattttttatagtttgtgttaatggactgaatgctgcagcacaataaatgttaaagcatttgttttgcttacctctttggcatggtctgctgatggccagactctgtttgctgcctatacagacaacttggtgcaagtatggcaggtgactattggtacccgctaaaagttttatgacaaaatcttagaaataaactggctttctgaaaaaaaaaaaaagattattcttaaccctagagaatcttgagcccccaggaaatggggaggcctggtaggggtggaggtggggttgggggtggcggtggggggtggaaacatcctcttggtgacaggggagatgggatgagtggaagggaggactgggattgggggtaatgactggattgtaaaataaaataaaataaaataaaataaaataaaataaaagtaataaaaaccaaccaaacaaacaaactctaaaaatgattatctctcataagaagaaatggattacattcagaacacaaacacatgcattaggatagaattcaatatgtaataatttgatgtttgagattaatgtgtaagtgcctttataaaaagaaaatgaaaaacttttatctgagagtagctcttgttattttatttgttatagattttgattacctcagtttttagat

SEQ ID NO: 23085 - DNA, 1149 bp, Mus musculus
atattttccggctctacctcacctccccaaaaggtaccgagagccacatgtgtgggttttacccacgggaggaatcgggtccatgtccacccaagccaaggttaaaagcccactcatctacggatgagaaaatcatttgatcacctcagttaagcattgccttatttaacttaattaataggggggagagagattggagacgtactattgaaagggcaagcccttcactgcctcccacccaaataaaagagccggtcgaactccttctccctgtttcccacctatcatccaaaaatgcggaggaatatcaacttagtgttattttcacattgttcagtcaaacttagccagagttccaacgccctacttaaaattcaactagaaagttacctaccaagtactaattagcattataaagtcagagtctgcagctccaggcctttcagttagttgtttactagaaaggacagtcttaagccagatacagtttacaataagaaaagttaaagaatcccagtgaagcaagttttttctttagtcctagattccaggcagaactattgagcatagataattttcccccctcaggccagctttttctttttttaaattttgttaataaaagggaggagatgtagtctcccctcccccagcctgaaacctgcttgctcggggtggagcttcctgctcattcgttctgccacgcccactgctggaacctgaggagccacacacgtgcacctttctactggacccgagattattcggcgggaatcgggtcccctcccccttccttcataactagtgtcccaacaataaaatttgagctttgatcagaatgaatttgtcttagctccgtttcttctttcgccccgtctagatttctctcttacagctcgagtggccttctcagtcgaaccgttcacgttgcgagctgctggcggccgcaacagacgccaacaagtgcttactgacaggagcctgatatggctgtctcctgagaggctctgccagagtctgacaaatacagaggcagatgctcacagccaaccattgtactgagaacagagtccccaatggaggagctggagaaaggacccaaggagctgaaggggtttgcacaggaggaacaacaatatgaagccccga

SEQ ID NO: 23086 - DNA, 1166 bp, Mus musculus
gatggtgggcttgcaatacaggacttactccctgtgtatcaactaaggtttttaattcatctcatgatttttgtgtcatgatccagctgttaccccacgtatattatcaccctgcatccagtttagaagaaagctatgctggccggcagtcaaaaagagaaccaattactttaaccctggctgcattcatgggaataggtatggcagtaggagtggggacgggagtgtcagctttgatagaaggaagacagggaattcagtctttgagggatgctgtcaatgaagacctagtggcaatagagaagtccattgacgctttagaaaaatctttgacctccctgtctgaggtagttttacagaacaggagaggtcttgatttgttgttcctaaaggaaggaggactgtgtgctgcccttaaaaaagagtgctgattctatgcagatcatacaggaatagttagagactctatgcagaaactgagagaaagattagagtgaaggaaacaggaacgggatgctcaaggggggtggtttgagttgtggtttgaatcacgaccatcttggataacttctttaatttccgctatagccggaccaatccttatgatatgcttagctttagttttcggcccttgtataataaatagaggaatggctttcatccagagtaaaattgatacagtaaaactcatggttcttcaaaggcaatatcaacctatagttcaggtagatgaagagttaggggacaccaatctctaaaattctatgattagaattagtctaaacagaagaagaggggaatgaaaggaaataaaactgtaattcatgtaatgtatgttaaatagcccaaagagttgtttctgagctttgaaacctggggctgagaacagaccaggacatgcccgggcaagcccatcacctccctagctcccacccctctgacctaagttaaatgttacaggctgctgatgtttaaatggaccaatcatgtgaaaccgcgccaattcctcccccagccccactccttttctataaaaacccctagcttccaagcctcgtggtcgaatccactgtctcctgttatgtgagatacgtttcgacccggagctccgccattaaaaaacctcttgttgttacatcaaggtgttgtgttctattcgtgattct

SEQ ID NO: 23087 - DNA, 1106 bp, Mus musculus
ctttacaactaggggaggaatatcgactttaccaaaataaagtaaagccccctgagggattacaggactggttgaatcgataccctcaggcgtgggcagagacgggaggagtggggatggcaaaactggtcccccctgtggtgattgaacttaagtccggggccacccctataggggtccgacaatatcccatgagcagagaagctcaagagggtatacgcccccaaatcaacaaactgctccaacaagggattttggtcccatgcaaatccccttggaacactcctctacttccagtaaaaaaacaagggaccagggactaccgtccagtacaggaccttagagaagtcaacaagagagttcaggacatacaccccacggtgccaaatccttataacctcctcagcaccttgccacctggtcggacatggtacacagtcctggatctcaaagacgcttttttctgtttgaggttacaccccaacagccagcccttgttcgctttcgaatggcgagactccgagagtggacaagccagacagctcacatggacgaggctgcctcagggattcaagaactcgcccactttgttcgatgaagccctacaccgagatcttgctcttttctgagccaataacccacaggtgactcttctgcaatatgtagatgacctgctcctagctgcagaaacacgcgaggactgtgaaattgggacccaaaacctcctgggcgagttaggtaagctggggtatcgggcctctgctaaaaaggctcagttatgccagatagaagtgacctacctaggatatgtcttgagagatggacaacggtggctcacagaagccagaaaacgagctgttatgcagatcccgaccccaaccactgctcaccaggtaagagagttcctggggaccgccgggttttgcagactctggattcccggttttgccacactggcagctcccttgtatccactaaccaaagagaaaggggaattcacctggaccagagaacatcagctagcctttgaaactctcaaaaaggcactgctgcaggctccggcattggccctgccagatttaaacaaacctttcaccctatacatt

SEQ ID NO: 23088 - DNA, 2439 bp, Mus musculus
aatctatcaccaggctccggtctccaaggtgcctcaaaacgggcccactaatttggctaaggtaagaggtaatgcaggggccgatcgaaccttcctctgtgttccttgaaaggcttatggaagccttcaggcggttcactccctttgatcttacctcggaagcccaaaaggcctcagtggccatggcctttcataaggcagtcagctcccgatatcagaaagaaacttcagagattaaaaggtgtattacaagaaggagacagttatgcgatctagtaaaagaggcagagaaagtgtgtgtgtgagagagagagaggcaggagacaaaagaaagagaaaacaggaggaatagtagacaagaaagaaatttgccacagtggtaggagaaaaagaaaagacaggatctagacaggaaacctgggcaactgaagaccgagcctcagctaaagaggctcagctgtgtcagactgaagtgacttatttgggatacacccttcgaggtgaaaagcagtggctaaaagaagccagaaaaagactgtaactcaaatccccaccccaactacaccaaggcaagtaagagaattcttgggtactgctggcttctacagactctagatacctgggttggcgaccgtagctgcccagttgtaccccctaaccaaggaaggtaggtgtttgtgtggaccccagatcaccaaaaagcctttaaagagattaaaaaggccctactgatggccagcctatgcctgacctaaccaagcctttcactctttatgtaaaagagagagcaggggtcaccagaggagtccttactcagactttgggactttaaaaaaggccagtgacttacctatccaagaagttacaccctgttgccagcgggtggttttcttgcctgaaagctattgctgccataatctgcttgtcaaggatgctgataagctcactctgggacagcaaataactgtagtggcatcccacactcttgaaagcattaccaacgctcctgtgacacatcagagctttttgttgtctaaatgagtgatcttcgcttcattccacctgctgtcccactgcgtgagactgcacctactcatcactgcgctgacattctggcagaagaaatgatctgaaggatcagatcagccttggtctgaggacagtagcctcaaggttaaaggtaagcagaaggcggggacagcagtatggtggtgaacagaaagcaagtgatctaggccagcagccttcctgagggacgtaggcccagaaagctgaacttgtgactttaagacaagctctataaatgacaaagaaaagtctacactgacaacaggtatgcttttgccactgtacggggcaatatacaaagagggctgttgacatctgcagaaaaagacctaagatactgtggctaaaaaaattcaggtggcagatctaaccgccaatcaggaggcccaaggagcagtgatcctggcagtcaaggagccctaaagattattatgacatcagagagaccagctttagatacgtcgctgagcactatcaagttatggacagtatttgacttggcctgggggccaagaaattcaaaggtgtggttaggtcctttgactgctatgttacaggactctgacttggcagaagaaatagtcaaaagcttcaaggactgtgctatgatgaggtagaatttctaaaagaaatcttcccaaggtaatggacctgcctttgttgcccaggtaaatcagggactggccaagatattagagatcggttaaaagttacattgtgcacgcaggccccaaagctcaggacaggtaaaaaaaaaattaatagaaccattaagggatccttaccaaattgacagcggagactggtgctatgattagatagctctcctaccctttatgctcttcagggatagaaacacccctggacagtttagactgacccccctataaattactctagagggggcccccctccactggtaaaaatagcctttgtacctagtgctgacatgctgctttcccagcctttgttctctaggctcaaggtgctccagtgagtgagacagcgagcgaaaaagcagctccagaaggcctactcaagagaagaagacctgctacattagacgtctccacgcagaaaaccttgagactccggtggaaaggcccttatcttgtactcttgacgaccctactttctacctttatgggaccccttttgattttgcttctgcttttaattataggtccatgtgtgttaaatagacaagtcacctttattaaaacagaaattagtgcagtgtgacttttagttttaagacaacagtaccatgccctaaagtaaaggatcaagtatgtcaaaaaaaattgtgtctagatctaagattagaactactaacaagtagaaggggggaatgaaagtataacaacgtaa

SEQ ID NO: 23089 - DNA, 1190 bp, Mus musculus
acaccattgttctgaacctagacattaaaaacacagatatctttcccaggaggctgccgaagatggcagaggggcaggttctggtattgggtggccgaggccatcttcgtggtctcctggcgcccattgtggccaagcaggtacttctgggcaggaaagtggtggtcgtacactgtgaaggcatcaacatttctggaaacttctacagaaacaagttaaagtatctggcctttctccagaagcagatgaataccaacccctcccgaggcccctaccacttcagagcccccagccgcattttctggcgcactgtgcaaggcatgctgcccataagacggagagagtccaggctgccctggaacgcctcgaggtgttggatgggatccctccaccctatgacaagaaaaagcagatggtggtccctgccgccctcaaggttgtgtggctgaagcctaccagaaagtttgcttacctggggcgtctggctcatgaggtcaggtggaagtacaaggcagtgacagccactctggaggagaaacggaaggagaaggccaaggtgcactgtctgaagaagaagcagatcttgaggtcacggaaacaggcagaaaagaatgtggagaagaaaatctgcaagttcacagaggtccttaagaccaatggactcctggtatgactccaataaatactgtttgcctcatgcctgcctggcctgcccttcctctgccgccgacggggaagtggggaagtggggaccaaaggttccttaggcactgctcctgtgggtagaggggacatttagagagctgacagtgtaccacttgcttgagttttattaaagtgcaaaccatggaatgaatcacttgagcttcagtgttgaaaatgagtagcagggctgccccacccacctgaccgaataccatattctgcagcatgaaaatgaggtctgcacatgagctggggtttagaagtgcacactgaagcactgccttgcagcagaccacaaagcagtatttttttctggaggattgtatgtgctaataaattatttgacttaaaaaaaaacccagttgtcaaggtcagagcatattctataggtgaaacaaacaaataatcagaaacaacaacaaaaacagaatgggctaagaaatgaatattttggaaaacttctataactaatcagaggtaagcat

SEQ ID NO: 23090 - DNA, 1199 bp, Mus musculus
aaaatttatgatagaggagtgagggttgggggaacccatccttcaactgggggccatgtctatctactagaccttcttaatattatgtatttttacaaatctcatttcccatagtctttaaatcctagggagccttttcacttgtacattagtaggaagatggcaagttcactgatttactacagacctcagttaaaaaaaataaggaacagaaaccaaaatatggaaaccaaagttaaaattgaaaaaatgcacaataaatgactgtattgagtgggaaagacctcatcgcatttgagatttgaataaaaatatctatacttgaattctgagaattttctgtacagcctgataagaaagtacattgtctttctgtctttctctccatctctttttaactctatccatctctatctctctctctgtctgtctgtgtgtgtccgtgtctctctgtgtgtgtgtctctctgtctctctctgtctctctctgtctccctctttctctctctctctcctctctctgtctctctctgtctctctctgtctctctctgtctctctctctctctctctctctctctctctctctctctctctctctctctctctctctctgtcttctctctgtgtctctcctctctttctgttagggttgaacccaatctcatatctgctatttggctttatgtcccaacccgcaagactctgttttccatcagcaattgcttattgttaatactatctagggaaagaacatcaatgcctctttagccttgtaggtttcctgaacttcctaagccttatgaatttcccactctcctggaaagaaagttctactctctggaaaaaaaaatgtacataacaagcataaagagaacagtaaaaacaaagacacactcacaacctgaagcaactctctacagctttggcaacaagttgaattaggttttcattgtttaaatgcagatagaaatggtaagtattcatacgttctgtaaagtcaggatcactgtctcactttaatttctcaattattttcaaacaataatgctcttatgtcaaattagtaaaataataacatttttaacatataagttgtttaatgaaaacttttgataatttttttaaaattgtattatttcctggaaattttatgcaaatggctgatattttacttataaatcaaaagctatgatatcat

SEQ ID NO: 23091 - DNA, 1152 bp, Mus musculus
ggccccggaggagggcgaggccaaaaagactgaggctcccgccgccgccggccccgaggcgaaaagcgacgcggccccggcggcttcagactctaaacctagcagcgcggagcccgcgccctcgtccaaggagacgcccgccgcctccgaggcgcccagttccgcggccaaggcccccgcgcccgccgcgcccgcagccgccgagccccaggccgaggcacccgccgccgccgccagctccgagcaaagcgtggccgtcaaagagtaaccgggacagccaaccagaaccgacgccactcgcaaacgacctgtcttctcacgctctctctctctctgtttctcactctgtcctctctctgtctctatcctatactaacttgtttcaaattggaagtgaggatatgtattgcccaagggattaaataaacaaaagaaaagaaaagagaaaaaaaataaagaggatgtgtcccatcaggggagggagggggcggggagaatccaaatagtatttttgtggggaaatatctaatataccttcagtcaacttgaccagtcagtcctggattttcgagatcattgtctgaaagtacatcatctgtaccctgaaccgctgtcccctaggctccatccttaaaaaccccagcatctctcccgcgatgcagctggggagggaggcgtttgattctgcccacaggaccagtgccaaggcaatcagatctttatgaaagcagtattttctgtgtttcctttttaatttacagcctttttcttaatttttttggtatttttttaaacgttcgtggatgaatgccaactttcagacggagcccacttagcttgtccacatgtatctcaatgccaaccctccatttttcctctccagatatttttgggagtgacaaacattctctcatcatacttagcctacctagatttctcacgacgagtaatgcatgtccgtggttgggtgcacctgtagttctgtttattggtcagtggaaatgaaaataaaaaaaaataaaaaataaaaaaaaaagaagtctgcgttcactgcagcgccagttttcttccatctgtgtctcagacaccaacacaccacccattggaaaaatggaaaaaaaataaataaaaaaataaaaaaaatgtacaatg

SEQ ID NO: 23092 - DNA, 1176 bp, Mus musculus
tgcagtctgtgccagttttacgttttgagaggttaccagggcacctccagttttttacaacagcagccagttaagttctggaaggtgaatttaagtcataaaaacttacatctagtgagttttcttgctttatttaaaaatattcttttctttgagccactgttagttttataaccatgcatttccctgcgtgcctgtgactggaagagaagacgagagcgaggcagacacattcttgggtaatggaaaaggagtaaatcttacgccacagtttcatttttcctttcaggatcattgatctccaacttgcttactttactaaggttcccagaagatgaacgaccgtgttaatgtctggcattgaggcaattgtcaaatatgcatcttaactgtggtttatgtaaaataaacccctctccctcagcactggagagatgtttcagcagttaagaacacttgctgttcttgcagaggacccaaattcagtttgtagtacccacatcaggtagctcacaaatgcctgtaaattcaggtccacaggatctaacaacctcttctggcctccacgggcacgtacctgcatgtggcacacagacttacatataggcactcacacacatatcaaatacattaattaattataaataaataataaaatctttaaaaacaaagccctcataaccaatggatcaattaggataaattaggataaagacatgattttttaaaagtagactattattaacattattattattattattattattattattattgaatggtaggtgtagttgtaaacctgtgtagtcccagcactggggagaacgaggcaggagaattgaaaactgagcaccaggttggacctacccagtactcaaaaacgaaaatggtatgagcgagacggctcggtgggtaaaggcccgtgttgtacaaacaggagagccaagtttggatccctgggccaaaggaagacggggtgcacccatgagcccacgctctgctgggtggagacaggaggacagctagggtttgctctctggctgggtgaaaactggggctctccaggttcagaggactcgtggaagagagtgagcttcctgcatgatggtctgagaggaacactctgcagatctttgcagagcagaggatgggaggatgaagaaccctccgagt

SEQ ID NO: 23093 - DNA, 1383 bp, Mus musculus
gtggactgtagtcatatgctacaagatagactatttggcaagaggaaaaggcaaagagggagagatggtcagataggcctcacaggattttgatggtaaaaggtcctgaagacctgccatttgtcccagagcttcaaggcacacttggagatgatatctttaaggccttggaaaggtgcccgtcctttgcatgctaaagcacccattggggaagtggggtgtctccctcttattcgtgatcacgatctctctcaacccccgccccccactttcctgaaattaaataagtaacttaaatagttgctctttaacttcagtaacaaccttaacaattcaaggtgccattttgtttgtttgtttgtttgtttgttttttcagactgtggtctctctattgtgagtgcatatgtgtgaatataggcactcatatgggtgtgcattactgtgtaaatatggatgtcagaagaggacactggatcccaggaatgtagggctacaggcatttgtgagccaaactctggtccccattgtttgtttagcaagtgctctcaaccactgagccatctctgacaccccaatgatactactttcaaagtcttgcacaaacttcttcattttgacaacatcctggatgggctctaatggcacatggagcaagaacactgggcagacagcagtgtgtgctgccagttagaatggcacggttcatgaactagcacactgcaccctggagacggactgcaggacctgatgctgctcgtctgcccttcctggctttctgatgctttgtttttgttgtgttgtaatctagagggtctgtctgtctgtctttctcttttctttctttctttttctcctccctctttcttttccttcctcccccccccttctttcttccttttttttttctctgtgtactgctgactgtccttgaactgctctctagaccagtatgtaaactcagagatctgcctgcctttgccgcccaagtgctaggattaatgttacatgctaccacccatagctttagagtgttttttttcttttgtggtttcttttaaacattctgacaataatatattaagttcctctgatggttttttagacatcttttattacatacttttgtttccttacttttggtgtttgtttggcttttttttttttttttatgtattgctttaaaagggggcggggtcttactgtgtaggctagactggttttgcacttagaatcatccatttgtctctgcctcccaggtactaggattaaaggtatgcactatcactatagtttgtaagtgtcagtgtcgtgtgtgtgtgtgtgtgtgtgtgtgtgtgtgtgtgtgtgtgcgcgcgcacctgaggtaggtatcttccctcag

SEQ ID NO: 23094 - DNA, 1217 bp, Mus musculus
tgttccccttttcctgtggtctcattctgaagttggggcctgtcatttggttgaaggatggagcacattacacaatttcagtgaagcccagattagtaaatttacattagaccacaggtgcacacacttgcaaaccctctgagtcttcagtagcttgcagatcaggggaatgaggtcctgtggaggtggaagaacaggttggacctggtcatgacgtcactggactctgctttccagctcccgagcactgcctgctattcattcctcagagcagaggagcagaaacaaagagggtccagagccacaaggctgtgacgctggccacctctcaaaccaagcttgcttgcagcctagtggcctgagccagccggctgctcacgggctcctgctacctgagacaagccagtggccctccgtgatcaatactgcctcctaggttggccagcgtccatggggtgaacgcttttcctctcgcatgctcagtaaagagaagccgctactgtacaatcgccacctgttccgtagagcgcactggccctgcctgcgcacagcctgcctctctttcttgttgcaacacgttgctgtaggtattgaatggttgagagagacggtgctccgggtcctgagcagccgacctggaggcacaggtacgcagatgggtttggtctggtttttggtggtggtttgccgtttcttttcttctttacccttttcaggtcttactgtagacatacagccatagtcagaacaccacccactctgttttgcgtgcttgtcagggtgctgtggggagacctgagaggacttttaagagtgttccctgacatcctagggtttttaaactttgatcaccctgtgaccttccatggttttgtcatgtcaatcacagaatctcagccggatcctgcatgcatccctggcaacctagtgaccccatagcagtggtctctcagaccagggctgtattgtagcatcttgtggggtcagtggcagagactttcataatcttgagagaacaagttaactgttcttggcccagtgaataatgttgcctttcctttagacaactcatggcgaccactggggcaaatgattccttctctaaacatttctggagtggagagcaacatgtaccgtgttggacacaggcttcacaggtgaatgccatctgcctgtagcctgctgtgggtgcctgtggcctcaatgatggtgcaaac

SEQ ID NO: 23095 - DNA, 1211 bp, Mus musculus
aggagatcctccgcctggagaaggaaatcgaggatctgcagcgcatgaaggagcggcaggagctgtcgttgaccgaggcctccctgcagaagctgcagcagctgcgggatgaggagttgcgcaggctggaggatgaggcctgccgcgccgcccaggagttcttggagtcgctcaacttcgacgagatcgacgagtgcgtccgcaacatcgagcgctccctgtcggtagggagcgagatttcgggcgaagagctcagtgagcttgccgagagtgccagcggagagaagccaaacttcaacttcagccagccctaccccgcggaggaggaggtggacgagggcttcgaggcggatgacgacgccttcaaggactcgcccaaccccagcgagcacggccactccgaccagcgaacgagtggcatccggacgagcgacgactcatccgaggaggacccttacatgaactacacggtggtgcccaccagccccagtgccgacagtacggtgcttcttgctgcgtccatgcaggactccgctagcctgcacaactcctcgagtggggagtccacctactgcatgccgcagaacaacggcgacctgccctcccccgacggcgactatgactatgaccaggacgattacgaggatggcgccatcacgtcaggcagcagcgtgactttctccaactcctatggaagccagtggtcccccgactacaggtattccgtgggaacctacaacagttccggagcgtaccggttcagctcagaaggggcgcagtcctccgtgagtatctgccatcttgtccctaaaggtgggagagtgggggtgggggtgggagggctctcattggcctagacctcacccaggagtctatagtgggctatgctggccagtgacccaggagatccacctacctctcttccctagtgctagggttataagcaggtctaaacaactcaagctgtttttacaaagactttgagaatccactcaggtagtgtacgtacttcactagcagagccgtctgccaagccataaactcctgactggttggagatgagatcaggcacattcagaatggtgtagtcatagatagaccagaactggcatcttaaaaatgaggctcagcatggcttttctgcagaccctgaggaagctggcccactcactctcctggggtgtattgaagtacagtccaagccactcaat

SEQ ID NO: 23096 - DNA, 1177 bp, Mus musculus
tttgttgtgttttcttcggtagtttttgtttttacctgtgtgtgtgtgacatctggaagagggcaaaggtcactgaactgaagtggtcaggattggagacaagcaccttaacccactgaaccatattgcggccctcctcaaaggtttattttctgttcctttgtagcaaatatttctataatggagtcgccagtaggatgacctccatgtgtgtggctggttggctggttggcttgatttctgttgctcttgatctagattaacattgggttcagctggcttcagacctactctgtatttgaaggtggtctgaacccctttcgtccacttcccaaatgctgtcccggaactcagagtcacctgcccctgctgggattagaggtgtgtgccaacaccgccaggcagtgcagtgcaactctgcaaaagagggattgacttttcctgatgtgcattctgggtattcaacccaggctctggtgcaaagaggcaagaactttagccctgagctacgccccgcgtctccatctaaatattttcttcctcaagtcagcacttataacgtttcagacttcagaacattgcggattgtagctggcagcgcagaagtgctgagctagcatgtccttctccattcctcgtgatgacctactatgaaggaacggcaccttggagagtggaatcctggtttcattgctgctgtttagccactgccccaggccagcatgaatgtccttatgtctttatttaagaccgctgactggaaggaagttttcctggtcgtatagaacagagcaatactcgtcagacaggcctgcgtgtcaagtcaggccatcttccttgtgtgttttctttgcagatgtggagggtttagtcagtgccagagaccacaaggcctcagccagccacactgcgtaagccagtgagtcgttccctcctgacaagtttcccagcaccttcacagaggagctgctagattccttacggctgcagccacttaacacgatctctgatgactttacatcgaagctttataaaaatctaaagctcttattccgagatactttaattgcttctgggaggctgctgggctgggtgtggtaggtaggttggtatggttatgtttgttctgaggcagcggttctcagcctgtggtgtcaagtccccccccccccccctc

SEQ ID NO: 23097 - DNA, 1289 bp, Mus musculus
tgtcaacctttaacagtctgcacaatctcttaagctttagttaaaaatcctagatgagaacttgccttaaagaaaaaaagaaaggggagaaaaccacacggccaccaaagcagccagaagtgccttaaacttgcagagtggaccctaatcgaccttaactgtgctactgagggggagcgctttcacctcccggtggggtttgcagagcttggaggcggggcatggatccactgattgtgcactaacctccccagcctgatttcctgcaaatgaggggagctgagggggcggggcgaggcagggagacagcagagggggacagtgtgttgtcggagtgctgctggcagccttccttacgaacatgtattaacgtttttggggtttttttgtttttttgttttttgtttttttggttttttttttgctttgtttcaactgtctgtgcttgcccgcgcatgcatgtgttcacacactcaacactttaatcattgtcctgtgagcattaaacacaaagggaaagaggatgtgcaatgttgtaaacagtctgtatattttcctagttcagagttctagtctcgaggtggctttattaacagacccggatcctggacgttcctgtctttgctgtattttttggaaagaaacattttttttggactcggtttcgttttacatgtagctagggcggcgacctgtgactgctgtattactaacaggtctacagcccagagagataactgtatttataaaccactcttaaactgctggctccagtgtttttagaatgatatgaagtcattttggagtctttttttcattctaaaagttaagttaaaaaattttttttgttttgttttggtcttctttgaagggtaacttgtgttatcactctggctagattgcagatataaccatgtcgaatgtgggggaggggggagctgctgcattcccaaactctgtacccctcaagcaaacctctaagggacctccaacacaaacgctgaggctttaatggaattcacacgttgttttgtccctggttcctacaggtggcctgaacacagcacctgtaagtaacagcggttgtaaccagaagaaaaaagaatctggacttggacttttatttttatatgggaaaaaaatatataaaggtgggccaaacgagtctgctcacaaagcaaagttactttggccttatcccttacggacagttacgtggaagcagtgtctcttggctcacaaagtctgacaataaaagatattaatatgctgtgtttgctttccttgag

SEQ ID NO: 23098 - DNA, 1618 bp, Mus musculus
agtgaagagaaaaaaaaaaaaaccaaaaacaccaacccccatcaaactattaaggtctttctataagtattctttttcgttataattcccaagcatgcagagatttatcataacttgctaaaaagtgacagctgtgagcacatgctgcagcagccccttcgttatcatctcagaagcagtccatcaaatcctgacagatgttaatgtcaaaaggagaacgtatccaaacgtttgtagttgaagggctatggacatgctgtcaaaattaattttctaggaaaacctttaaaaataagtactacctataggctgaaatatttccatgttacttctacagttgtagacataggcttacttgtcgagtggcatgctccactgactgccacatctagtcttgaaaagaggtggtactgacccacaggaagcaggcagttatgtatctcttagtgatgctcttgcaatgtttgcaatggtaagtgcacactattttgcacactcagatgtaagcaaaccccgatgtttctgtattgtgttatcgtctcctaggattgtaaaactagctactggtatggccatgagtgatgtggtcattggtgatgaaaaactacttctgtttttttcagtttacaaatgcagaacagagaagcttgcttgaacttgaaagtgtatactctgccactgcagtctcaatatgtaatccgtttcttactgggaatctagaccatgctttttcctttaaactgtcttttcatcacctttacgtaatcaaatttgacttacagtggaaaccaagatagttgtttttgcgaaacaatcttttagtaagactgagggaccatgtcagcaactatcttaaatcttcagttatagctggcatttccacacagacatgcaagaccctgacaaaggaaggggtaataatataagactatagaaatctgtgtttcagtttcatctcttttatttctaaagaataattacaggtaacttgatcttttaatgtaccatctcctatttatttattgttttctttctgaggtattaaaatatctagactgaattttgccaaatgtaagagggagaaagttcctgaagactctgactacttgcttatttttgattgaccttctatgcttatgtcattagtgcctcacaacgtgtttgatgtcctttattgatacaaagtgagcctgtgccttcattttcttgcccattttggtaccaatgtaaatttgtgttagaaaatcttgaaactctgtgagtctgggaagaatatatctgaatcctattcaatacatttgctggatgtgaagaaaaatacagccacatatttataaaacagttgttaccagtattcctttttatgtgtatgcctcttcatttagaaaatagtctacatttaaaaaaacaacaaaaatgatattgaagaaaaaaatttataatgatcagtaatcaaaaatcatgttttagatcacttacaagaagataaactagtgacaagcctgaagtgagatccagctcaaggggaggctccaaggcctgacactattactgaggctatgacacgcccacagaaagggacctatcatgactgccctccaaaagacccaacaagcag

SEQ ID NO: 23099 - DNA, 1243 bp, Mus musculus
tcgggaaaacaccaaatggtggatgacgcctgtgcagcgagagggcccggaggacccgggggcctaggattaggaggccgcggcggcttccgcggaggattcggcggaattcggtcttaggggccgtggtcgtggccgaggccgtggccgtggtcgaggccgcagggctcgtggaggtaaagctgaagacaaggagtggatccccgtcaccaagctgggccgcctggttaaggacatgaagatcaagtccttggaggagatctacctgttctccctgcccattaaggagtctgagatcattgatttcttcctgggtgcgtccctaaaggatgaggttctgaaaatcatgccagtgcagaagcagactcgggctggcccgcggaccaggttcaaggctttcgtcgctattgaggactacaatggtcacgttggtcttggtgttaagtgctccaaggaggttgccactaccatccgaggggccatcatcttggccaagcttttcatcgtccctgtgcggagaggctactgggggaacaagattggcaagccccatactgttccatgcaaggtgacaggccgctgtggctctgtgctggtgtgtctcatccctgcccccagaggcactggcattgtctctgctcctgtgcccaagaagctcctgatgatggcccgtatagatgactgctacacttcagacagaggctgcactgccaccctgggcaactttgctaaggccacctttgatgccatctccaagacttacagctacctgacccccgacctctggaaagagactgtcttcaccaagtctccttatcaggaattcacggatcatcttgtgaaaacccacaccagagtctctgttcagaggacccaggctccagctgtggctaccacataagggtttttatacgagaaaaataaaagaattctaagtctgctgataaaaaaaaagaaagaaaggaagaaagaaagtagacactttgctttcatttctgcattgatacaacgtatgctcagtatatctgcaaatacaaagtattcccatgtgatccgaaactgtccacgctctgtgaccacagtgtacaaggctagagagctcagttttaatcactctacagctaactttctgaacactaagtggaggagtcattgcttggctgcagaaactctcctaacagtttttactatacgtagcagaagagagaaaatgtgaaactaagaccaaggggtgggggaggct

SEQ ID NO: 23100 - DNA, 1297 bp, Mus musculus
tgatgtgtcttcttttaatctagaaaaagaagatggagaatgagtcagccaccgagggagaagactcggccatgaccgacatgcctccaacagaggaggtcacagacatcgtagagatgagagaagaaaatgagtaagcacaggctgctgggggccaccgcagggacagtcaggacaacaactgtcgtctctttcctcctcctcctcccatcaagttgttttctgttgtttaatttttattcttggttatgaaagaggccttgatttagaggtttcgtataaattctctagcatactgggtatgctcaccgatgcagggacctgaagaaaggtctttactgtcgctttgtaactcagaatcgctgacttcacgcccctgcttcataaaacccaaaagatagagctgcctcttggtcaacgtttctactcccttggacaatctccactttggaaccaaaggacttgggccagacttttcctgttcatgtttgcctcctcctaagaatcaacaggttgaagctcagcctctcttgacttgctccccaacactgtggctctggagtcatgaactatctgccgcacatactggtgggccccaggctgcagcccacagtctccctgttcccagaggaagggctggtggccctgctgggccaacgtagtgggaatttaatctcctgtagaaattgggtcagtcaccaactgacttgatcgtcagcatcccattgttttcctggtttcactgagttgccgcaccccacagtgtatatacatgagctgacttttcagagctgtcccgcaagtgcagctccagtgtcagcaccctccgcatgagtttccctgaaggcttgcgtttactcgccttccctgaagatggcactagagcgagaagtggagcgttctaactgtccatttctctaactgtccatttcgttttcacagtgagcaaagctttaagtcgtaatctagcatcctaatgccagggtcttgtctcgtaacttctgatgtagatgtgccgcctatttctgcaggacaggtaaccgagtgtactatggtactcccctccacaccataaagcaagacattttataaacagtatcaaggtcactatgtgataccccggaaataatgcattggaaatccacttagtgcagtatatttttctaagttttggaaagcgggttttttcctttaaaaaaaattatggacacagttcactaaattcctgatttagtcaaagtaactagactgaaagaacctaaacaaaacaaatattttaaagatataaatatatgct

SEQ ID NO: 23101 - DNA, 1175 bp, Mus musculus
ctcctctaagggcttatgacttaatgtggtcatcggccactcatttatcgtctttggagaaatgtcttccaaatactttgttcaattttaaactgatgtcttattgtatactttattaaattaacattaaattttttatgttccaaatataagtcccttttggatatgtactccattctttattatccttcttgactaggttcagaggggaggagactgtttgcagctaagctgttgccactcattgtctgggatagtgggtgcagctcggtgttgggccatctttgcccgtggcttccctcagaacactcatttgcttttccttcccaggttgagatgttccttcttgcctatgctgtccgccacagcatccgggtgtaccggctgtccaagtataacacagaggagttcatcacagtctaccccactgatccccccaaggactggccaatggtgaccctcatagctgaggatgatcggcactataacatccctgtcagagtgtgtgaggagaccagtgtgtgagggacacacatgtgactgccaagagatgcgcatgtgcagctcctcctctgggggcctcagatctgcaggtctccaaggacaatctgggagaactctcgggcccctggagccaactttggaccattatgttctgaagactagctgttgataatgagaattaattagccaagccttcactccttgttctgttatgcagtgtgttccactgggggcttcagcacgtgcctttggaaggtgcaaactatgtctccataaggcggatgcttttgggtcaaagaaaactgtttggaaaggaatctgtccaatgaaagttctgacggtaaactggttttacttctctttttaaaacagtagttttgtatttgatttttattccctttttgggggggaatggtggtgatggctctcattcatggtcttcctatgagatatgcttaaatggtagtgtcctggaatgagtagttacaatatcttttgatagcctcatctgcttttggagggatgagcaatatgccaattactatattttaagtagattgtcttagaagacaaagaatggggtccggctggaagaggttcagaagaaagtgtggaggagtctagacttcatttgctgaggctttgtgccctggcattgggagatcctcttt

SEQ ID NO: 23102 - DNA, 1201 bp, Mus musculus
cccatatttctgtgtttttcaaagaaaccaaaattctctctctatacccctactcagagaaggtgcctgaccacacaacctgctcagagcagtgcatttcctagagctggagtgggttttccacgtgtaagaggactggatcatcgagctcaaaaatctttcactggagaggatgtggggctcaccttcttggggcaagctctggaacctctcttggtcttcctcggagcatacaaagaagtactgaagggtatggtgtacatccaagaacaagccctcgggaatgaggacctgctcaccagcagacctctagccaattcctcttccacatattcctgtagctatgagttggtgctacgctgctttggctcctggcagatcgcacgtgcgtacctgcccaggagtatctttggatccgcaaatgaaacacacacacatttatttatttttaaaattccttggctacctcaaaggctgggcactcctaaaccttccactgctaccctaggcccagtcagggaagtgaccaatggccacttatccaaaatctcacacggctggttgactttatctcctgctgctcctgtatcccatccttcttcctggagtcctggtggttcttctgttgctctctgcatcctacccatgcaactctaagggtcccaccccatctcgctttacccaaccattgaccactggcatctttattgctcaatcaaaaaccaatgggggaaaaggacctttagcggttgggcatgtagattcccgattgaatcaaagcattggaaccaatctccaacatgtgcccttgggtttgttctttgctgctctgtgcccagcgccctcctgtgtgagtggggctagcgctgcctggctcagctcatagcactgagagtgctgggcctgtacaccatctttataacactgcttagtgttaaaggagcctgcatatatgttagcggtctctgtctttgtggtaagaggaggttcctgctccttgctggtggtgcctccggcttccattgctgatatatcagcttcaccctcctacctggtcactactcagtcattcagagatagttttgagctgctgttgtgggcttccttgtgcaatatatttccttcttccttctagttcctaagtattttttagaagactttttaaaagttgccataaaataaagaaaaataaagtaagaaa

SEQ ID NO: 23103 - DNA, 1182 bp, Mus musculus
cctctgctctgtgtggaggatgctgttgcctggagtctcccacctttggctctcacagtcttgctgcctcctcctctgtatagctccctgagcaggggagtgtaagggagttagagaaacgggaggaagagagaggggagctagagagtgggagcaagggagaaaggcttgttaaagtcagtaaagcatgtgtgttagcgtaccagagtcctcatctctccaaaccttaaagaaaagcatttcttcttgtacattagaagaaacagaatcatgtcatttgtgacatcctccagtcaccgcttagaacccagacgtttcccgagtcccgagagagcatgagatgcgcaaagatgacagaggcactagggtttgtacttccttcctgaccgtgtggtagggttagccacagttctgcctgaatggatggatggagatgttggacttgcaagggcatgtagagcgttctgtctgtctgatcttgccccacctaagtttgttcccaacgtttattttgtaggtggtagagataagcgtggaggtcccattttaacatttccagcccgcagcaatcatgacagaatacggcaggaggacctcaggaggctcatttcctatttagcctgcattcccaggtaagctctgtgtgactgccttgccaatgttttctgaagttctctgtctagaagacagctaaaccgtaggtctagttccaaagagagatcaaacataaaattaagattgtgatcttcatttttattgccacttttataaccatcgtctgattattcaaaacactctggctcaggaaccagaaggcaggccttcacgattgcagaacgttgagtgttgatggtggaccttgggtgctcatttagctgggattttaggatcttacactgccgagttggaatttaggaggtcttcagtgagtcttacagcaagctccaccactccagattatcagaaacttgttcttttggacaacctgcgtgtatctttcttacactgagcttccgtgcatcccaagtattcttttgatgtgtagcatgaagtttgtgagacattcaacatctttatcagctggctcatactatcttaccagtttggagatgctattaaatctgagagattagtgacaggctttcggtgtggatgttgaccaaaaccgtgggcaagcagttt

SEQ ID NO: 23104 - DNA, 1188 bp, Mus musculus
tccactcgggtcttcggaatatgagcagaggctcatgggacagctttgggggaaaacatacagaaacagaaaaattgcacaattttaatagcccgaaccccaccacccatccctaccaccgccgtgatatatttcagatatcagggactttggctgttctgtctttaaagtgttcaggaagtgtgtggatgccagcagctcatactgtgtcaagtattagggcacggtctctaaactcattgcctacaaggtgaaagtggggatattgcccattggtcccagcatgaggagaaagcagagggtaaatacactgatggtaggggaaggggcacctgcactggtacaggtatataagagctgatgtacacgaccatggcgacccctgcactggtacaggtatataagggctgacgtatacggatggaccatggcgacccctgcactggtacaggtatataagggctgacgtatacggatggaccatggcgacccctgggctgtacaagtgcataagggctgccttataaggaccatggtgacactgatacaagaacctaagggttgccttatatggaccatggctatgacgatttggccaatggcctggcctgttatatatttggtgccgtcagccgaggagaagctcagtatgtcttctcaggaccatgatcctctaaactgtgcaagaagtgacaaagaaagatggctccatgaggaaggaacacctacctgtgtgaaggctcacccagagcctggagcggcaacctgaagcctcagccaggagtgacactgcgtccatctgatggggtcacagtagggggatgaagtcattcagtggagactcgtactcctaagtgggctagtaatatagctaggagatggaagcagcagcattcacttgccttcacccaccccacgaggggctggacgataagctagaagttggtttcctgcagagaagaaggtttgaccaagcaaagtcctgagcccagctttgcccctagcatgcttaccacatctggagttcacagcgagggcagctgtctctaatagcatgtattctctcatggagggctctcatctgtgcctgggctctcctgtgtgggccagcaagcaggcccatgcagggttcctaatagaggaagccaacagtgcagtatggtaaaaagggaacaaaggtgtagtgtt

SEQ ID NO: 23105 - DNA, 1129 bp, Mus musculus
cctcgtacttttgcagcagcagtctacctaaaattaagccatcctttttagcccccttttgtctatttgacagccacactgctaaatgattttccaagttcatggaataattcttttcccacttaagaaaagaaaaaagccattctccctcacagtgccgcacctcaggcaagggttcattcggccttactgctttaggtttgccaaacaaaagccgtggagtcggatatgagacgtgaggaccacacaggaagggctcagatcaaaggggaggtcattcctaggtgatggttttcagccggagaatgaagactggaaaggagaagaaaatgaatgacgttccggtttgctgacctgatgattgctgaggtcaggttgttagtcctgtgtgctggccttgtgctgagactgccccctgcctccatatgtggagtggttagaaagatccgtgctgctgggtgttggaaaggtgacaggtgttgctgtctggcactgatatttgctcctgattattaagctgatcatgggatgtactgtccaaacagagatgcttctgagaatgaaacggggtgttgctgctaattattctggaaaagtaggcttaaactggaattgttctgtcaagtcgagatggatggctgccttactgactgcagaggtggagagagtcacactcagatattgatgactcaggggtagttttctgtgacttatcatctgccttgattcagtcccggacacataatggtgtggacagttgacgaagagtgggtctgagacatgatgctgagtcagaggctctgccaggagtgtgctgtctgaaaggacctccagcacattccacgctccctttgcccagctcccggagtggctggactgcttgttttgtgtgcagtgagctaagtgtgacttgagtcctgaatcaggatttgtcagcactcgaggcctggccggcttcctaagcttcttcctaagagctgagccaagggggtctttgtgcccccgcctcccacacgggactgcagagggagcaggctaaaacaggcctttcactgccgaagaagggggctagagggttattggccactgtccctgcctgctcctgggcagcctgtcagctcccctgcct

SEQ ID NO: 23106 - DNA, 1120 bp, Mus musculus
acacttacctagaaaaatcacttatgttgataggagcgagctgtgttagacgataaaaagcagtaacggtgaccttccaatccttcatcagctctacagtggcgtggccagggttaccttgagcgtgttatcttgacaggacggcaggaagacaggtcctgctcggacactgaaggaagaaagcatttgagtggcacttctctgaattcctgtggaatgtctttcctgcctgggtgtcctttccctcattcctgcttctcttgtcctttggtgagctggcaggggccgagccatctgcctggaggacaggtgtgctttgcatcttcactttattgaatcagatgcagcggccaggagaggtccacagctggagcaagaccctggctccctcccagagtgctcttctttcttttcagagttctcagaggaggagctgtcaccaaaggagtggcacaggaatggccatgaggagcttttctgtgaccactgcagagctggctgctttatcacattttggcttagtccctgcctgtgtctctgaattgataaaaagcagcctaaggctgtgggggaaggccctacaggtgtgggtgtgtggctgtcacctctgctttctgtccctgagttttcctgatttctggtgttagattctccttcctttaaagtaactttgccttacctaactctccaccaaaccccttctatacttcagctccctgctggcttaaagagaccagtatctctaataggctgtcccaaggttgtgatgtgattaggccttacacgcaagacctccttgtttatgggaaatctccctctgaacatttatggttaatctgtaaatgttcatttgcaattcttagtcaatagtagacacattaaatttccttcataactgtgttttgacttcataatttcccctttctattctttatccacctaaggaagccccttaagatccaaataaggagccgcctgctttcttgggaaagtttatattgcttgtcacagagctggtgagagatgttcacttgggctgcagtgagcagagctgcaggaagagggtgacctctggaattgtctctctccagagactttgccccctgtggagtgtttagtc

SEQ ID NO: 23107 - DNA, 1123 bp, Mus musculus
ctcgcgtccgcgcgtccctgcgtgcagtccggtttgcttgcgcgtccgggaggcggcggagggcagcggcggccgggggcctgcagttcggagagcagtccctggccggccaggcttgggagtgaggatgcagactccgcgctggagagccagagagggcggcccaggtcaggatccggacggacgggcgggccagggagggcgcggggaggctgtttgcccgcctccgggaggacggagagcctcggggtctggtgagcggcctgcaccggggtgagcgcgggaggctgacagctcagggtctcagtggcctctttcaaagtcaggtcccaaactggaagagatcagggccgcagtccaggtcattaggagctagcaattgaagcgaccagccttgggcgaggcagataacttctgggccgttagacacctggtttagttctgtcttcttgatctttgtctggcagggttatttttgattcgtcttaaccgattggttatgaagagaagtgacacgttccgtctcgactgtgtcaacttgggtttagtgtgctctttccagctctccctctccggtgagggccttgtagaaagctgaggtttagaaagacatgaactccttcaaatgaaagctttaacggtttttaacaatgtattatttattttttagtgtgtgactggctggaggcatggcccaaagccaccattctttctttttttccatcacctgtcacagactaaatggttttgtgcagaattcatcttcccaatgttcttgcgtcctagaggtggattttttttttccccttatggcttaatgcacagttcaggaatgacttgtttccaagattctccaaagacatgctggtcttgattgcctctcttcactctgggctctgctcttactgttcgtagtcctgggtagctcgttcgttttagagttcctgatcaggtaaagccgcttactgccttgtttcctttattccacctccaaagtgacttgaaggagccagcgcagattttcagttggtttcagagttgtcccatccccctttagaatttcatttcaccctccactctgaatccttgccccagatctcagtggttggcatgtaggctggtg

SEQ ID NO: 23108 - DNA, 1109 bp, Mus musculus
ggcaggcagccagccagccagccaagcagacaggcaggcagacagaacaagcaagacagagaaagagagatctggtgtggctgggcattttatgtacctggcagcagtgagcaatgacccaggcagttgccaccactgagttgctgagaggcaggttggtgaagcacctaatttacaacactaatcactcagctggttcctaaatacacatcttccccccacacacccacccacccaccgccagttccatgccagtataaagtacagaataaaaaattggcatcatttactcaatagacgaataacgacatgcctttctataatgtgaaaactgcctccaggtaggcatacttgcacagactgccccatgaagcatgaagagtaaatgaaaattgcatcccttggaaaggaaacaagcccttgatggcctaacctgtttttccttcatgggaaatcccaaaagacaatagtttttctgtgttggagaaatgtcgaaagaattttgcaagaatcttggcgctctctctctctctctctctctctctctctctctctctctctctctctctctctctctctcttagtgatcctctgtatggtataactaggtgacattcagaacaatgtgtatgaaatggaaatacaactttttaatatcagtttcgctgcccgcattccagcagcaaagcagccagattgaatggtcattttacaactgctaagtggtggacctgagatgcataggctaggctgccagatagtctacagactcactgtccctgccacctcccccctcacacacatacagagttatgtaatttcactggtatactctgatacaagagctagcatgtaccggtcgtacacattaccctggctccctgtaaagtaaactaatgattaaagttattcttaaggaactattagtgggaaattaatctgttgtaaaaaaaattaatctcagttaggggcttctacctcacctttgacatttgattcctaaataaaagacacatagcttttattatttataacaagccttaatcagcactagagctgagcagatatctgtcctctatgctattatgtctgcttccctgccaataacc

SEQ ID NO: 23109 - DNA, 1167 bp, Mus musculus
gtgataactccagctgtgtcaagttgacacaaaactagccagtgcagaaagatagatgacaggcagatgatagacaggtggatggaacaatagataatatagatgtatatataaagatagatgatagatgataggtagatggatagatgatagatagatagatacatacatacatacatacatacatacatacatacatacatacacattatagatgatagatagatagatagatagatagatagatagatagatagatagatagatagatagatgataagaaagatgtgaaatttggagagaagaaagtggtttgtagacatgagggaacaattgtaggtaaatgcattcacagtacattacttttcatatatgaaaatgtcaaaattaaatgaaaaaggaaaaggtgtttagtaaatattcgacaagttaaatgttcaaccagtggcagctactgatcccagttttcaatattaagtgaggaaaaaaaaatcttatcctaatttttccttccacaaaacctgttttcccttactgtagcctaattggccttggaaataatattactatgtagaattcctgttagtaaaagtaccataaaccaaccataactaatggcgtaaacagtttacctcttggtctcttaaagcagcttagtctggctagggaatggtgagagttgttcatttagtggttgctcccagcacaaggaggaattaatttgtactcgctgactatttaagacttgttaaagtcttctcctttgctgacactctttgcactagaaatgtttctgtgacccagaatatgaagtcaaacactcattgctaataatttttaaataaacactttaaaatcaattctctgttttccatgtaattgttcagtaaaaggacacacgtgttatttttacataaagaaaatttagctgagcaattaatagtgaagcatataaagcatctccaatatttcctggattgattgatattttgattttatcaataccggtggtgagagtgccagtttgcatagatactataaaatggtgaaggcatatttagggccattccagagatagttgtccattctattctaatcctaagccaacactcttgtaagcagtttgtatgaaccttgagtcagcaactcacagccatccttgacagc

SEQ ID NO: 23110 - DNA, 1129 bp, Mus musculus
tcaagtccactggcaactatgtcgacttctactctgcagcccgtccttacagtgaactgaactatgaaacgagccactacccggcctcgcccgactcctgggtgtaaggagccaggacacgaggcactccggggacagtgcatgtgcatgcatacaccacaggacattttgtttctttttttcttttcttttcttttgtttttttttttctttccctgcaaatttagtttgttaaagcctgttccgtaggaaggctgtgataaccaggaagaaatactcagagctattttagaaagctaaaatgaatcaagagttaactgggaaatcgataggaagctaaacgcaatcctaattgtgaccgcattcaacacctttctagtttgaactatagcattttgaaagtgctttatagtccggtgaggctgaaggtaggagagaggagacagtcagggtggtgggcgtggttatcgctaagcacaagacagactagtttacacactgtggggacggcttctcacgctttgtttactctcttcatccgtgtgactctaggcttcaagttgcattggggttcctctgtacagcaagacgtctcttgccttttgttaatgcattgttgtaaagtattcgatgtacattacagattaaagacgaagagtgcattgtgtatattacaccaatgccactgtgtttcctcatcaatggttctaaatattgcttcaatttcaaacttttgaaagatgtatgggtttccaattttctttttttttttctttctcccagtatgttttaacaaaaaaggaaaaaaaaaaacaggaaaaaaaaaaaaggaatatttagcagtattgttcgttctgatatgtgatttgtttgtggcaactaaacgcggcatccagcagtctctcccaagctaacaagtcattccacacccctcgtcaacaaaatgctttttcactgcctaaaattctagatgtagatatttgaaatagatttttttcatttataccagttttctttatgataatacagtgttaaaagaaaataaattacaattgatctgtcatccatccttgctaagaatgtctatttccatggaccagtcttacaaaatacacattcttgcacgtgt

SEQ ID NO: 23111 - DNA, 1124 bp, Mus musculus
ttatttgccaggtgcaacacacagttctgccccaggctgaagcaagcctgtgatgaagggtgaagcctctgtcagaccagtggcagctctcagcattaggtcatattaatggggaccttgaatgacattcagttaaatatgcaaacggaagggccagagctgtgcttgtgaatgtcctagctgtggtggctcacagggacactccctccccaccccaccccccaggggatgactctgtaacctgttcggatggtgtatatttagacagattgcagagtctgagagtctacccagattcccaaacaatgtgaaacctgatagggctggagttctcctagcctaagctgttctactagaaggtgatgctgccccaggtggccaagagcaaatagcgtggctgcatcagggtcagctctggctttgatgtgtgccattgcaggaggggcccagacctgagagaaccccacccctggagagctcccatagcctccagcctactgcgtgggcatgggggtagactctgtgggaactggcataggctcaccctaggacagcatcttactctaaaggagcattgagattcctagtttgcctcagtatgagatctgctgctgctgaccagggcattgcgctttgaaagctttctctggctgtggtgtgattcctgttgttctagaagaaaatgaagacgggagaaaaacgaagctggccatctcatatagagcagtggactttgagtaatcagtcagttaagataatagttagagagttctagaaactggttcaaaatggttcgactatgagtaggatgagtggatactaaatgtcccttgctcccatcccaccatcccaatcctacctagagcctgctgtggagttagaacccagaactccattcaggtgacagctaagtctactacgattggaaccttcttggttccaatgatagttctggaaagcaaacaatgaaaagagaatcgtgcccagtgtttgctgggtgtgagggtcttcggcagtggggaccagatggtgaggaacggaagcaggcttctgcatcgccagggttcaggttccttctcctggtttgagttctgtttttttttttttttaaatgtgaagagatt

SEQ ID NO: 23112 - DNA, 1099 bp, Mus musculus
tgctgtctccagcaggtgtccctatgactttgttgtcacatctgctccctggtatcaccttgtcttccacttgcttccttctccagtttgattatcaaactccttgcaccagatgccttggggtctaaggaggcagaggaacaaagaagcctttggtagtctctctgcattaccaagctgcgacctctaaatccccaggagtgcatggagggcggggctgtggcttctgccctctgctttcagaaggaaggctgggtctattctcctgacttggaggagcagaggagcaggcttggggctaggcttgcactgtgtttattaactgtaaatagtgaattccaagctgacaggtgtcttctcagggatttatacataaatacagttaggggaaagttaaagtgtattttaaatctttaaagttgaagtgtgttttaaatcttttggatgtttgagtcaattaggattaaactggacagaagacatatttccaagatagtgtcaatgctgctgtttctaagagcgatcttggaacttgtctctctgtggagatttatgggcaccgtggccatgggaatagctgtgcatattaaagccagagttgtatgtcagttgcttcttctgtttgtgacccttgggtgaacagttgcctccagttagtaagcagagacaactggttgccagatgggccatccatacccaccccacccacccccagtgctgtccactgctcccctggtcttttctccttgctttcaagaataaaatgttcagtcattctgcagaaacccacatagctcttcaggaaggatcagggaaagttctgcatacttggcccatcatgtccttgatgggcagtgtgcttgctgcgctagaggaagacggcaggtgacaggaaggactttgtgccaccttttcagctcctaccaggcttcctagccacacctgatacctcaagaacagcaagatggtccccttcagctttggattcccctgtttctggaagcttattctgcacatcaggaaagaggactcaagatgttggctagagaatgggtttataggctcagagaaagtataccaagtgctctctgcccattcc

SEQ ID NO: 23113 - DNA, 3352 bp, Mus musculus
tcccctgcacatgtttggactacagtgacgagcactcctaacctccccagtgtaatacagaccccatcactgagcatcatgtgcagtctccacagctctggcccttcccacaaacctcaccttatgccagaccctcctccaacgtgctggcctttgtgctcgctctagacgccctctagcctgcctcttgaaaggttgctagtaagctgctgtgaatacagttaacaaggtgtcactggaagaatggcatatgtgtgagtcacacaagaaagtgaccaccctgtttttgtactctaggtaccttgtggggcagcgcctggtgaactatgagcgcaaatccggcaagcaaggcccgtctacaccgcctccggtgtcgtcccaagaataaagtgcttgtctcagctccttgagcttctccttgccttttcgtgtcctttgttgtggacttctcacttggagattctcctgtgatctcagcgttgtttaagttaaatgtacttgacttgtctcctcagcattcagagagcagcgcatccggcactactgctcctccctgcatctgccgacatcactgctgtcttgagatctgtacatgtgtaaataggagttccttgatgccctaaaaccttggattaaacagaatgtgcattgtacatctttaacaaatgtatattaatttattaaatctagttgtcactttattttggacctgctgtgatctcgacaggaaatgtgccacagagcagtagtgtataggcgagactttgagtgacatcttttggagcacagtgcatggtgttgccagcagttctcaccaggtaactgcatcctgtccttggctggtcagtccttccttaccaggagccgaatgggcagtggagcctgtggtaggggactggacggagtgcctcacagacagtcgtatttggaaattattacatgtaacaccaaagctgttgtacattttctactgcctgattgttttcatgtgtctgtgtttgtaatattgtatagtatattgtgctagatgaggaaattatttttaattttgataatttaatattcctagtgatcagcattgggagttggggtttttgtgcttgttaggggcatgtctatacttagaaagataaactacaaatgaagatttttttattgacctcctccccttccatacagctctttctttttgtcaacagtggccaaaagtgtcatgccggatgagaaatctaaggggatgtcatcaccaacaggaccagtagtgacaggtcaaggccctaggccgtggaatgaggccgactgcatcagggacgatgagtagaacatcctgccgtgctggcagcacattgcagctgaggctcagttaatataccaggaaacccctgttcctaaggcatggtgtttacagtaaaccgcaaataaaaccaagttttatttgtttgaaaggaagcagactgagttggccttcgccataggaaagagttgcattggagaaatgctgtgagattttagagaatttaatactcagaggaagcctggttcccctagcccaagcttcatgtttaaagtttaaaagattaggatggttgtacgtcattcaagtgtttaatggtaaaggtgtattataaggatagtgctagaagctttcatagactgtaaagagttccatggagtattaaacccatagttggaaaggtctgagggcccacccccacctctaaatacaaagccaaacaaaagattaagagcaatgctttctggttttgttcctttcttgattttgtctttttgtcgttcttaaattcactaagtaataagcaaatactttgttttaaagcagcattatatttaaaaaacaaaaacagtcttgccatggatccagtgttaacactgtcattttgtaacagcctttctctcctgtagcaagcctaccttcactctcagactttgtccttccataaagaattagcattttaaaatgcagtgccacctgtcaatgggaatatgtctataaagcctaatcttttgatgctggtatattggacatataacattcaggtttcatttttaatttttaaacaatttatggatctaccacaaaaagctaagcattctcagtcatctggaattgtaagtgagcttactggatgcttttctgagaacaaccacaaacagcgccgattgccaaggtgggccccatctcactggcagggcctgctctcctgtgtgctttgtccagtggctttcaggaagatgatgtcctcgtggggatttattgtgcataacatttgctagggtgacatacaggttttattcaacaatatcataaacatttaaaaccctcaattcagaaggtgttcctatttgctgccggtctttacaggaaatttatagagatgtgcatcattttgaattaggctaacacccagtcttcaagggagtttactaggaaagacctttgtgctttattattgataatttgaagacaaatcaccacttgggattagttttacatgaccagttatcagatggtcacttcgaaatgtatagttgttcattattaacaaattatggtttgatttttaaactacaaagtactaatagtttagatgaaaactgaagaaaatgccaatgtaaaatttgtgtgtagctagccttaatgttccatgtttatagttgtggttccagcccccactcccgttctccgggggtagggtagggagataagacatgtattgaacagtaatttttgttttaacagtcagtatagctgttattactgtgaattctcaagatggtccctcccctcaagggacaatcctcctatgagtttatcagacatgtcgcttctgtgtcgcacaaatgctttattaaagtatattcctaaattcaggttgagttgatgaatttttaagacaaacacaaaatacgcattggacatttgtaccctgttgtgtttgcagacacaggagccagtgccattatgcaagaacttggcacttggcacggtgctccaaattagttccttcctctcctctctggggtggagaatatcaggctagttactgtgatgcctcattttacattgtgatgctcaaagttcttgtttaaaacaatcctctaggatcgtaactgttcagtcattatcaaggggagagatgacatagtaccactgaagtgttactagagacctcatctgtgaagggtctttaaattctttgcttaaattgccctgtagcggggcacttaatttgccctgtcaatcagatgttttgtttcagcttattgctgttgttgtcaaagatttaaaacagctgtcgtgagtaagggcttcttcagatactctccaata

SEQ ID NO: 23114 - DNA, 1172 bp, Mus musculus
tagcatcacacagattctgtgtccaatggctgtcgcaggaaggttgctttggagtttggcgtgactcatgctaggtttctgtgagtccaggtttcttttccacagatcactctggttttgtttcaattgtctccagagtcactgtagtggttttttctgtttgttttgtttttgtttttttgccttattcacaaatacacataagcacatctcttgcctaagtagaactcagttttatctcaggcataaacaccttcaattttaagaagagccaggtgctctctttggttctggcttgtagccagcaaaaatggccttgcatcaaagctttccagacaaattgggtttttttagaagtccttttcccagccagtctccacagacaccaagatggcagaaagatcagacctcattcttaatgcacaggctcattggtccattttctattgctttaataaagttgtctttgtatgattttacagatgttactgtggaaatgcagaacttagttcacaataaaattgtctttgttttaacaggtgttactgcagagatgcagaacttagttcaccggcggatttacccatttttattgatggtcgttgtgctgatgggaatcctgtccttccaggtccgccagtttaagcgcctttatgaacacattaaaaatgacaagtaagtctagagttctgttcatgtaaacactcttaaggtggtgtcattttgtgggttttgtgcttgtcttaggattttattgctatgaccatagcaactcttataaaggaaaacatttaattggggctagcttatagttaagatattatcatcatggtgggaagcatggcagacatggtatggtgctgaaatagcggagagtattacatcttgatctgaaggcactaggagactatgttccacacttggaggtgttgcgcatatatgagacctcaaagctcacccctaccggggcacacttcctccaacaaggccacactactccaacaaggccacacctcctaatagtggcactccttgcaagcctttggaggccggttttattcaaacaacctctgtgctcagtatggtaaattacatgagaaaaaaatgctcatttagtggacatactgggatatagcatcagcaggatttgtgaacagattgagtgcatggcg

SEQ ID NO: 23115 - DNA, 1214 bp, Mus musculus
tagcacaaataatagaaaacttgtgtctttattatattagcataataatttcagttggtaataaaaagtaacagaaagccgggcgtggtggcgcacgcctttagtcccagcactcgggaggcagaggcaggtggatttctgagttcaaggccagcccggtctatagagtgagttccaggacagccagggctatacagagaaaccctgtcttgaaaaactaaaaaaaaaaaaaaaaaagtaacagaagcactaatattcataacatcccaggctagaatgaatttgtaggtggcctggcagatcaggacactcagctcattgactctctgtgttttgggtgtttcttaaccaagtaattctatttcctaaagtgttgttggttgtttttgtttattctgatgtgaaaatatttatagaacatcaagattacagttctctttacctagccacatgtctcatttgtcagcctttctattttcagtatttgctggccgttggttaatgtcattttggacggggactgccaaaatccatgagctgtacacagctgcttgtggtctctatgtgtgttggctaaccataagggctgtgacggtgctggtggcctggatgccccagggacgaagagtgattttccagaaggttaaagagtggtccctcatggtaggtttctggaataagagattgatcttattgatggtcataaatactttaacagctatttcccatttgttttcttactgtgttactagttttcaggagagttatctttttatcagaaagcacatttgtttaagatggtaactttctatttcactggaaccatagttctggaagtacccagacatacatacttaagagtcaaccagaaggggctggagagatggctcagtggttaggagcactggctgctcttccagaggtcttgagttcaattcccagcaaccacgtggtggctcacaaacatctgtaatgggaatctggtgcccttgtctggtgtgtgtgaagacagcaatggtatactcccataaataaaataatctttaagtgggggaggggatagggagtttttggaggggaaaccaggaaatgggacatttgaaatgtaaataaagtaaatatcttaagtttaaaaaaaaaagtcactcagaatcgtgagctgctaagtaatctggtgaaaaaactaagaattacagaaagtgctattggagatg

SEQ ID NO: 23116 - DNA, 1130 bp, Mus musculus
ccagggctatacagagaatccctgtctcaaaaaacaaaaaacaaacaaacaaaaaaaagagtcagggactctagtggtttggatgtaagctgtaaagaaacttctgtaaagaagtcagggagtcagaaatcctgttcttagcatgggaggatatagagttacatgtatgagagatatgtgattaatagagagagcaggattaatagtttggtagatgcttggtcacatcagcgtgcatcactgagttccactgttgatatttaagttaggagtcggggaagaaatctctactactgtagataaaggtggtattccagctagaagagtcacagtcatacaaagaataagctaggctgagaaagaggacaatacttgggctcttgtgcttctagactggggagtcaaagggggagcagctctgtagcacactgctgtccagcacaagtgagcatcacagcatggttgttggtgaacaccaaggaaccaggaacagcttcagtggggtttaggaggatagcctcactgacttggagagaatgggaggaaaggctataaagacaagttcatttggctttggagatttgttatcggaatagatattttataaattataatagggttcatgtagtaaacctggctttttgtattgtagtgatgctccggtgagtgagctgtcccttgagctgctcctactgcaggttgtcttgccagcattgctggaacagggacacacgaggcagtggctgaaggggcttgtgcgtgcatggactgttactgctggatacttgctgtgagtatggcagctgactctgtgggcatctatgttatctgggtctataacctttttgtctaaagccagggcctcatgcatactgtacaaatgctatactacagagtaacaactacagccccatgttttatttttaattttgaggcatattcttacccaagctgtcctcaaccctagaatatttgtaccctagtcttcttagtgctgagcatacgggtatgcgccactatggccagtcttgttttataacctttctgaaagaagtgtgttctgtgttccactcgataaagcctagtttcagaagctacagagacagctcagcagtaagcgtgcctgctat

SEQ ID NO: 23117 - DNA, 1135 bp, Mus musculus
attcagtatcacttgagcagcacttacctgtaacaaccacagcacaccaaaaagcaacagcttaaggaaagaaactgtagaagaacgttgtagaatcatctttttttgaataacagtgctttgtatttctggtatttgcatagtcaactctctgggcttccctgttggctttcagaggcaagatagccttgtccggtgtccttctggggtcgcatacagggccgcccacacagtaagaggccgggttgtaagttgactgtaatagagctgggtagcacctgcccccacctagggtcccacctcctcagagcctgtctgatgaaccacgtggtcctaggttaagtgtagttcatttatggttccattttggaagttcactggcattgactacatctgcctgtcctctctgatgcatcctgacagctgatcgccattgcaacaggaggacggattgtcccacggttctcagagctcacctctgagaagctgggctttgctggtgtggtgcaggagatctcctttggcactacaaaagacaaaatgctggttatcgagaagtgtaagaactctagagctgtgaccattttcatcagaggaggaaacaagatggtaagaattctgtccttgggctggagagatggttcagttcctctggaccagcatgaggaactgagacatggcctcctccccagatcatagaagaagcaaaacgatctctccatgatgccctgtgtgtcatccggaacctcatccgtgacaaccgtgttgtgtatggaggaggggcagccgaaatatcctgcgccctggcagtcagccaagaggcagacaaggtaacagagtggcagtgagaactgctgtctaggtctcgtgtgtttatgtcctctcagcttcattctgtagatgaaaggaagtttattaagcttgccctgagtgacttttcaatgcatgcttatgaacagctgttgggttggctattgcccagtgcacttactgtccctgtgtctttccagtgcccaactttggaacagtatgccatgagagcttttgcagatgccttggaggtcatccccatggccctttcagaaaatagtggcatgaatcccattcagaccatgactgaagttcgagccagaca

SEQ ID NO: 23118 - DNA, 1115 bp, Mus musculus
ggttttgcagctagcacttgtaccactatgccaacttggcagctttatgacctcttgttaaatagtgtgagtggtgcttagatatgtgagctgttagagagggttgaatatgctacctggtaagtctgagctgtggagcacctgaggactgctcactccgtgtaactgaagagcctgctaccactaagggcttcatgcattcttttaagggaaaatcaatatacacttgggtttcaagacttgtaagttcaaatcagagagggtttgcacggctcagatttactgctttgcctagaccactattgaccccggtccattttgaactcagaaagtagccctggtcttcctagaagtactgttgaggtgtatggtgtggctaggatgctgcagtcatatgagggatgtaaaagttgtgtgttttcatcaggattaacagctgtcaccgacagatggctgagatcgccgtgaatgccgtcctcacggtggcagatatggagcggagagatgttgactttgagctcattaaagtggaaggcaaagtaggtgggcggctggaagacaccaagctcataaagggtgtgatcgttgacaaggacttcagccacccacagatgccgaaagtgagtgcccgagtgaggcgtgctcttaggctcgcataccgcttctaactcaaacccatgcctaaggtgatcttcctctccccatagaaagtggtagatgctaagattgcgattctcacgtgtccatttgagccacctaaacctaagacaaagcacaagctggatgtcatgtctgtggaggactacaaagccctgcagaagtacgaaaaggagaagtttgaagagatgattaagcaggtgagacctggactgcttcctgaactgactccaccggttcctagaggaccagcactaagggattagcatctggggcttcattgcttagctacaagtagcatgcagtacaacctgtgttgggtatcagtcaaaaacagccactgtcggaaaactaaatggtgtatgaacaaagaagttgattttgtcctgggctaccatgacggtttagctgtgcctttcattactttatcctggccttgagtggagcaaacgagagct

SEQ ID NO: 23119 - DNA, 1171 bp, Mus musculus
attaatcaaagaagaaacaaaaggaaagaaatttgtttccaggatctttgtttctttctctcctgtctaataataagggatgggaaggggtggtaaagggtggggaaaggaatctacaaagtagcaaaggccagctgcaggcctacatcttcctgtttttacacttattgtggggagggtcagacagagatcagaatacaacttttgggaggaagttttcctactgtgaattccagggcagttggtgttgacagtgagtgccttaaacctcttaagttcttattatctaaatcatctttaaagggcagcctgttggaccttgactgtggtcaaaactgagaaggtgggggtctcctcctttcaataatagccctggattacatccagccctattttagaatgttgtgatttcggggtagcatgtgaggctatactaaaatgtgtgtcttagattgatggtctgctctgctgcttgcagtcttggctggggccttgttggaagaagctgaacagctgctggaccgaggcatccacccaatcagaattgctgatggctacgagcaggctgcccgaattgcaatacaacacctggacaagatcagcgataaagtgcttgtcgacataaacaaccctgaacctctgattcagactgcaaaaaccacgctgggctccaaagtgtgcgtgtcctatcagtagtgtactgtggcctgtaagccttcccttcagagggctgtgcacctgtcctaaaatgcagcagtgtggtttgttcaagtttctgttctgcttgtttccctgtgttctgattgggagggcattttgccatttaggttattggatcacctaagattttcctaacccgctcttcccgtcacctcagcactagggaatcattttggggaagctttttttactcagtacacaagtgtactgatctaaagatttaatgtaattagaagaatggtcttaaaattgatgtcaacatttcctaatgtctacttttacccctaaagatcagcaacctcagtcaaaaactgctcctctctctacagtagcaaaaccttgcagtctgctgctgtattaaagcccaggggaagcagttacacgtgtgctacatttaaccctgctgtgtagggttatgctgttcctgtggcatttcatacgtgtttacttg

SEQ ID NO: 23120 - DNA, 1181 bp, Mus musculus
ggatgcagattgcacagactttcagtgcctcctgtggtctctcaggattcaccaaagcccctttaaggttgttcctttgcccccccccgccccccaacaaagctctctggtcttaaatgccctcttcctgagtggtgttaaggagactagatgtgttttaaaagaacactgtaggagcttagactctcacatctcacacccacaagaaggagcacaattggatatgatacaaagtgcaggttctccatccttaaggtaaatttctaggctgctaggatgtgtgaaagagcctcaagcatggccctctctacagactaatgtcttatttagggtctggcttggcttcccagggctgatcagagaaatgtgacaatggactctgtccctggttattcctgatggttgacatagactgatctaccttcacccaccccaagtgagttctgcttttctgtgacctttgaaattcaacccacactaagaatggcattctttcacttcaaggccacatccaaagaaggagctcagttaagtgtccaggcctcagcagtaaatatctgcaggatgtacccagacacacactctagaagatgagcctgtgctctgtaacagggtggggttcactttctaaagttttcttcttccttgacatggtcagtgactcttcaagcttccatcgggatgtcatattttacttaacctgcatttccagaaattaaagcattctagaaatctacaagcggtttggctcattgtgtgtgtgtgtatgtgtgtgtgtgtgtgtgtgtgtgtgtgtgtgtgtgtgtggttagatttctagatatggttttttggcaacctaatttccttaagataaaacgggtacactcaaagcagttcaagttgtcttttagaaatatggaatgggaagaagaaaaatgctaagtttaaacgactcttggaatatcttcaggaaaggcagatggcttctggcatgaagatagagagagtatccttagggtttcctcggagttattttctgacattgagactcatatatgtcttgggtgtttataagcaaagagtagctgtacttatttttagaaagatattctgtacttattaactaatgtcttctaccttcctctgtctttgagaaatggagccttgaggtgacacgaatacttccagaagtacatcta

SEQ ID NO: 23121 - DNA, 1177 bp, Mus musculus
gaggaaaagagatgaaggcttgaaggcatgatatccacagcatggtgactggatccttctacccagagcctcaacacattcaacgtctggtcaatctcttcctgctccatctggcctgagttgctgctaaactcaggttactcacgaaactctgcgttgtttcctgtgtccagccagcacttgaattgcattgtcttacaatactcacgtggactgtggtgtgccatctgaccctgcggggtgactaatgtcaacatctgttctgcaagcatagggaaggaagggagaagctaagaacgccactcttcttcacccacacgtgtgaacaggttggcagcgtctgcctttcagccactttcaaagtgttaaaataattagctgacccgtattttaagtaggatctgattcctggcctctgactgttccctgcccagcatcttctctggctatcagcaggaagggaagctgggatcagatcacacgccatgaagttgtgctggtccagaatgtcttgggatcatcagtagctctcaagagtattgtggcagagacccacttgggtgggtggggacgacttcaaatcagcgtaaggtgtcagaggccaaggtaattttcatgagacattgggaagcatccatgccgttagttagcctccctgagctggattatcctcatttccaggctgacatctttatcagacagtggacagctatttacataattgaaggcactggtgaattaattttgataaaatcagtgaactatattacctggagacaagcctcgtaaatgcaatctaaggtacagctaatctcctttctctaaacatgcagatatctacttggatattggtttaagtgcatatatcccacttggcttctagctaatcctaatcttaactgtttatcccccacctttttgttctgctttagatagtggaagggaatggaagaggtgtgctgtctggctttagtcatctctgccggttcgcatcaccatgctccctagaagtggctttcgacagagagaactgggctgtgagatgtacaattagttacagcatatgacagtcatatttttcaacagagtggcttattaatgaagaaaaatgcggcctttgcgtcttctctttctgacagtgatgtgagtggattcccgggtttctaggcctcttcat

SEQ ID NO: 23122 - DNA, 2399 bp, Mus musculus
aggttggaactggccaaactaattcctgaaagccttgaccttctctttttcttctcttatctcagccgtcattgctggtggtgtgatcggctttctctttgccattttcctcatcctgctattggtgtaccgcatgcggaagaaagatgaaggaagctacgaccttggagaacgcaaaccatccagcgcagcttaccagaaggcacccactaaggagttttatgcataaagctcccatttagtgtctctatttaggagagcactgaacttttcaaaataaagctttggcatagaataatgaagatctttgttatctgttttgttcattacagagccatactggccctttaatgatgagaattccattgtatttaaattttttcgtgtatttctttagaatgacataaaagtaaaaatctaacatctgcagtgttctgtgaatagcagtggcaaaatattatgttatgaaaacccctgacattcatggaattgatttgaacatctatgtgcaaatacaaaatgattgtgtttgtcctctggttcaaagatgactgctactcccccttgtcagcaagtctccagttaaccttactgagttggtcttcatttatttatctcttgtccctcttctctaccctcccttcttgtcacctttcttagaaacaaaaccttatgccttttgtagctgtcatggtgcaatttgtctttgaatgattacaataatggtaatttagtgtatatgtgatttttctcaaatatgttaaccttaacctccactttatataatgtttttaaatatcagactatccattttatgcttgctttaaatttcattacttgtagcttcaggcagatttgcaaaggcaaattaatgtgtaaaattggattattactacgaaactgtttagtcctagctatcttcttttgggaggatttgacataacggacaagcctcagcaaacccaaagatgctaacagtattttgagaagttgctgcagattcctctggccactgtacttgttaatttcttgtcatttgaaggtacgagaaagagtttaaagaaaaaaaaaaaagatcagtttttgttcttaacatgcatttaaattgcaaacatctttttaagcctttgaagtgcctatgattctatgtaacttgttgcggactggtgttaatgagtatatataacagtttttaaaaagttggtattttataagcacagacaattctaatggtaacttttgtagtcttatgaatagacataaattgtaatttggaaacaacaaaaaaacctgctgaataaatcacatggcctaatattgaaaatgtcactgttataaattttgtacatttcttaccaaatgtacatctccccttgctgtgactgaccgtctgctctcagtgactatatgggtttggtttctgagtatctcatggtgtctgtcaatcaagaccaaagaacccctcagtgaggctgttaattacgagatttacctctaaattgttcagaggaaaagtattgttattctgcatgtatttgggtgcaggaataggatgactgccaggggatttcaaggtttgcagcctttgtagtgtagctactgacaatattgagagagatgccttcttttgcaatttactcttaaaagtataaattccaaagaagcaaagcgacctttctagaagtaggtgtctggggaacagacctatagaattgcttacctgtcaaagctcccctacagaagaaccctgtaagtgacaaccacagccactccatggggtaggagggaaggtagggggctctgcctgttgaatgacagcctggctgcttaagatggatgtttctagaaaaggtaatgccagaggaggagttggaggcatgggggtgccccgattgggtactcactgaacagagcatttcctttttttgttctgttttctattttaccattagtttttagttttaaactgtgagccatggaagtagaaagaagacagcaagatccgcagcttttccagcataaaattaacttttgataaagtttggctacttcgtttgagcaccttccctgagcttgtcacagaacacatttaaacaaaactaaagtaacacttgaaacagtgctgtgtctgaatctttaatggccttaattcatacctttctgtccaattacagctgtaattcaccatgttaaaaggaaatgatgggcccttccaaagctgcacaatgcccctcaattacggaggctgagaatgtagtgggtatacctctaactgtgtgaaacagtggaatttaatttgtagaataacttgcttggaatatctatgccagggaaaaaaaaatcctggcaaatattttgtcactgctgtaaagcacatttgttaaaagtgccaaaataaa

SEQ ID NO: 23123 - DNA, 1196 bp, Mus musculus
atgctggtatggaagacttcattcttacctttgtgagggggtccttgagaaaataggcaagggaatcagggcaagataggtatgaacctggtattgagtgggtcagtaaaacttgatagaaatgcattgtgatgctgcagagatagttatcctatctcttagtgatgaaggtgacagaagagaccttactcagggttgggatgggagagttaaaggtgtatgtaaacaagatgccaggtcaaggatggattcagagttctgggcagtcttcatcatcgttagttaatttcttttttttttttttttttttgtaattacagaaacaaaccaaaagtaatgttactatattgggtagaagttacatcctaaagtgtgtaagattatgctaaatgctgagtatttgtcctctaaaatcttaccacattttgtatttttgtctaatgaggaaaacagagctgtataagtttgcttttgctatttattatgtaaatttccaaaaaataagagtgaagaaagtggtgcctggaccctgtgtaccttgtagctagaagcaatgagtaacctaatgtcatctgtatcttcttcctcctgcatttttcgtgaaagtccaagtgcatataccagtgcagctggatctactttgggagactggggcattgagctgaaatgtgcactctcatgatcacaataactccactaatgtgaattttgtgtgaactgatgatatttttagaagtgggactcataaatgagtcttcacaattagtggaactcaaaagagcattggtgaggatattctgccacagatacaaaagaagagaccattatgttgtaaatctgcctatgaccctgatgtaaggcacttgagacccttttctcctttgtaacatagagacttgtatggactgttagggttgctgtgttctgtgaaaataatcaaatacaacataatcttttcattagtttctgtagttgataatttgatatcctggtaataatgtgattatttccctgttcctaagtggcataaatacttgcaagtgtgcatgtacaatggaaaaaaaataaaaaaaatattcttgtgtcaccattgtatttaatattacaaagtaataattggagggttatgaggcgggagctgagcagaagcaaggagtgagtggtgtatactagcctaagtaagcaggtcccaggcc

SEQ ID NO: 23124 - DNA, 1196 bp, Mus musculus
gcctccaaacccacacagctcaaggagaccccactccaagactagagtccgcccggccccgcccatcgccccatgtgacgcatgccccgcccacagcctccacgtgacccgaccggcctccgcgcgcagcgtggatcgcggccggagccgccattgttccgccgggggaggacagcgggtcctggcgctggcgccccgacgccgcttagcggccgcctctggagacactctgtccccgccgccccgtgtcctcctggtggcggcggcgtgaggccggctgcggagactgggaacctttggctctccccgtggcggcggcggccctctatcccctactccggcgtgagggttggccgcgatgcgctcggcctgaggtgtcgcggccctgtcgcctcccacgactgttccagcggcggctccgctccccggcgtcatcccgcgagtctctctgacgggagggaagatggctgcacgaagctggcaggacgagctggcccagcaggccgaggagggctctgcccggctgcgggagttgctctcggtcggcctaggttttctgcgcacggagttgggcctcgacctggggctagagccgaagcggtacccgggctgggtgatcctggtgggcaccggcgctctcgggctgctcctgctcttccttctaggttacggctgggccgcggcttgcgccggcgcccgcaagaagcgaaggagcccgccccgcaaacgggaggaggcggccccgccgactccggcccccgacgacctagcccagctgaagaatctcagaagcgaggagcaaaagaagaagaaccggaagaagcttcctgaaaagcccaaagtgagtagtggcgaggagcccggtggtcaagggaagcgagagctcaggtcgaggtggtaggtgaacacgttccttgagaagggggaagtcggaaagtgtaagaaccagtaggaaagtcgcgttttcctgaatggaaattaactccaggggtaggtataaataaaagtgaccaaacttacagccatcatatgagaaccttggtttccccaaaagcagatccttcctagaggcctgtgaaagaaagtaggctgcatgtggaggttaatgggaccttacagtgacgttgggaagttctgaaaagactgcccggtagagagagatgtctatctcaagccacgttgagacctgagaccgt

SEQ ID NO: 23125 - DNA, 1105 bp, Mus musculus
ccactaaagttaaaaatttttagaattggatctagggaacctgctttcttgtacctgcctgttactcaggatgattgtgaattcctggctgcaagtgctccttgcaaccttagccctgagtttttggcactacaggtgtgcaccactgcctggcttcttttttggtttttgttttttttttttttttttttttttgttctctttctttttcgagacagggtttctctgtgtagccctggctgtcctggaactcactctgtagaccaggctggcctcgaactcagaaatccacctgcctctgcctcccaagtgctgggattaaaggcgtgcgccaccaccacccggctgcctggcttcttaaatttgtattcgtaacatgctgattagtttgaaaaccactcactggaatagaactataaagtctatactataagaacttttattcttttcttttttgtatgcttgttttagagacagtgtctcactatgcagctcccactgtcttggaactcatcatgtagaccaggttggccttgaaatcacaaagcttcacctgcctctaccttcaaagttctgggattaaaaatgtgcaccgctatacagatgaccttgtaattcggcactgaggctagagaattacgttttgaggtccatgccattttgaactggtattcatcaaaagaaaaaaaaaatcttcctagccatgcagtggtggtgtgcctgtaatcataaaattcaagcagaggcaagggagatcttgaattagaggtcagctatgcagcaagactctgtgccgcctcccccccacccccaattttttttttttaagttgagttacttattcaggtggatttagtcatataaactaatagtttctttgaatgaacattttatgtttcaggatattgcctaagtcatgaaaatccatattttcaaaacgtttgtgtgtgtgtgtatgtttgtgtgaacttgtacatgtgtgggtgtagaagccaaaattaatgttgaatgtcttccttaaccacccctttctgtcttaaacattttattatgtgtttgaatgttctgtttgcacataagctttgcttggggccatggaggccaa

SEQ ID NO: 23126 - DNA, 1248 bp, Mus musculus
taatgtgcagtcattatatgtaatataatatacaaaattatatcgaagggaagaacatgtaactaaggagaagtcttcattttcatagtgggtgagtattcagagtatactagatatgtgttttcagttagtcattttgctattgagaacatcactagtatgcattttctgttgacttttaaattaaggaatctgttagccaggcattgtggtgcatgcttgtaatcccagcatatcgagggagaggtaggggaaccatgagacttatgtaagctacgtagtgagaccctatctcagaaacaaactttaaaatcatgtaagaacttcatagcttaccttcttatactcaggctacttaaaggacactaacagggaaggaaagagtactaagtactgataagctgagctatcatagaaatacagaattaccccatttttttaacaagaaaccatatatctgtttttaatctttactttcttttaagtttcttcaaggctgaatgaaaatcttactgtcaatggaggaggctggagtgaaaagtctgtaaaactctcctcacaattgagtgaggagaagtggaactctgtcccacctgcttctgcaggcaagaggaaaacagagccatcggcttggactcaagacactggtgacactaatgcaaatgggaaagactggggaaggaattggagtgatcgctcaatattttctggcattggtaagaacttttagaaaaaaaattgtttaaaattggtaatgtgatacagcttgaatttttcaggaattgtgaaggaaagcaagccattaatagaaataatcctaaactgggcatgttagtagtgcattcctgcaatcccaggctggaggatcgggaggttagcctcagtgccataatgagttagagaatagcttgggctacaggagatactgtgagagagagagacagacagacagacagacagacacacacacacacacacacacacacagacacacacacacacacacacacacacacacacacacacacacacacacacacgcaaagaaatactagtcttgccatgcagaagtaatagtgataattaacttatcttagattctttgcacagaatagagcaactaacatgactaacatcatttactttctgtgtagtgctttcacattcttgatcacatttgctcatcagtagagctaactgatatacttgtgtgatattgatatatttttttaaaggtttatgtatgta

SEQ ID NO: 23127 - DNA, 1152 bp, Mus musculus
aaggaaaggaaaggaaaggaaaggaaaggaaaggaaaggaaaggaaaggaaaggaaaggaaaggaaaggaaaaaagaaaagaaagagcttacatagtctgtcatgatttggtaaacctgaagagcctgatcttgaaaaaacttacaaggatgggacaagtgtattatgagggtatataattttggtactattattaaataaagcttaattctgtaccctaaaaaataaattggtataaaaatatggccaggttaaaaatagacagaggaaaaagtgaagattaagaagactgacaaaggagagtaacattaataactaataaatatgttttgtggtatgtctaaaaattccactaaatcttgtgcttagcaacatttggacaatgttttcactttttcctagctcttaaaatatgctcagggaaaagaataatagtttaaaactacagcttaattccatataaagaacttttagtgtttggattttagcttctggcaaaatgacagataactaattgaaattattattttttagatggtttgtcttctgctgaccctagctcagactggaatgcaccagcagaggagtgggggaactgggtagatgaagatagagcttcacttctgaagtcccaggaaccaatttctaatgatcaaaaggtaaatacttgttaaagagactgaggagaattctagggcacagaggcaggcactattgagtctcagaaaggaggtggtattgaacactataagaaacagagtggttagacctaaagattgtctgtgtgcttttcattacaaagtttggaatcagggttgagggtgtagctctgtggaagagcatgtgctgagcatgtacaaggccctgagttcagtcctcagtatcaaaaagattaagagaatcctggacttaaagccatatttcataaagttaagaagttaagagattattattagggtttggagaggtggctcaagggttaagaatactggctactcttaggactggatttgattcccaacacccacatggtggcctacaaccgtctgtaattccagtcccaagttatccaacacctcagatagagcaatgctgcacaagcaggtaaaatacccatccatacacataaaataaataattttctttaaaaag

SEQ ID NO: 23128 - DNA, 1148 bp, Mus musculus
taactggatagcccactatggagtgtgtgcctttattcattctgccaggtagcccaagttagtagagattacttttttttaaaagcttcccccttgaaattagattttcataatattaacttgtgtatgtttgttgactgtcctggcactcaatctgtagaccaggctggcctaggactcacagagatcccctacctgtgcctctggagtattggggttaaaggcatctaccaccaccaccaccaggcagtgcttatcattttatctcaagctatattcatagatgctatagatgatgttttgtttagttgtgtctctagagggcagaaataaattacactgctacatataaactaatcagaagccattttaattttgcttgctgctagtctctggatatggctttactatttcatattatatgaaatttacaaaattctgagacaattttattccaaaatagcctgtcaagactcttcctcctgctatctctgccgagccatctattaccttatcaaaaggtgactctgacaacagctcttcccaagtgccaccgatgttacaagacacagacaagcccaagtcaaatgctaagcaaaacagtgtgcctccctcacagagtaagtgctttgtttgtcttgcatctttttcttacatcctgtaagaatttagcagtctggtgcgatagtagagcagcactgctgtctaaaaatgtgtggtcccttgaaagttcacaggcttgagttgtgaggaccaggctgctaaactgatgtaagcaggggcgtgcctacttgcttggctatttgccctttaaatctgcacatgtctctgggacttctgggaccttgtgtttcgtgttactccttttccctccttcagcagctgtctatcccaaggagccagcttaagcaacataaggctgtcccctctcaaaaagaggcaggagggaagaaaagaaaaagaaaaagcagattctgtaggttgccatcagttcagtgtcagcagttacaattaataccctgggctgtaaaagaagggaggcagagaatagctaacttgaaaatatccaagactggaagacttattaaacaataaaatgttaacattagtagagttttttcatcagtgttactttttgggttttgggg

SEQ ID NO: 23129 - DNA, 3052 bp, Mus musculus
ctggccttgaactaatctacctgcctcccgagtgtggggactaaaggcatgcaccaccactacctggcaccatagttgttacttttatattgttgatatatactggttatcctccttacattttttttctctcctcaccttctccttccctttttttcccatttagccaagtctgaaactaactgggaatctccaaaacaaataaaaaagaagaaaaaggccagacgggaaacgtgaatttttttttcctgaattggacatgtgtttacaaacactgtcttgaagattatgctgtttatgcaataatttgtgaacatgtacagagttttatataaatttaaaccaatttttaaaacaaaactgaacacaaccaccataaaatggaatcaaaggaaagttaatttatgaaataaagaggtcaacagaatacacagtgctggaagacacttgggagagtcttttcaattgaacgagaatgatcgtaatttaagactattatcctggttttacaacagttacctgtttacaacagactgtgccctgtctcctctgcagctgaggaataatgaatggattctgattagagagaaggctgccgtgaggccagtaggcaagtccttggatcttatgcacgaccttagaccatttgaatctgttttatgcttaaatcaaagtgctttgatcaaatgtataatctgccatatctttacatatttgttgtagcagtttgtattaaaagaatcacaagtgcaaattaaaaggtcatttatcatttatttaactaaactgtcttggtttagtttacagttctttaaaagttctaaattaaaacattaaaaaatgcaattgacagacacttgtatgacttacaaagttatttttgatagtcttaacattacttgaattattcaaaataacagtatattttaaattaagaaaggtaaatatattatttgtttgatacattaagactgagactaacaatgctcttgtttatgatttgaaaagttttcaggcaaatccaacttagtgtttttcctttccctagcaattttccagtgtcaactcttagttgctagtaatttttttaccttaaaaatgaagtaattcgcaacttttgagcatatgacggagaatgcaaaagtagtcagacagctttaattgatattgtggagacctccggttatcaggaatacatttttttactgccttaacctcctgtagtgagtagaatatgcatcagtttcttgaaggggattcgtgtttttataagaattttcatgtaactattgcaattgtggttaaaaacagaaaggaacattttctgcttgaaactgtgttgatttgaatgacgtatgatctgtcaccattttcaggcactgtgtgatccctaggaaagtggcaggcctctctgtaactgttaatagtgcatgctcggccatgtacactgtaaatagcctttaccaaacgtgtttgacaaggaccataattaacatcactttagtaaattgtgatttttttaaaaaaagccatgatttattgatgtgagtggcttgttttcatgtggcgccagaaatgaacctgtttaaaagctataaccaatggtactgatctatccattaaatactgtccttaaactgtagtttaatagtattgtcaactaggaaagctaaaatggtttttgttctgttgaagactggccttattaatggacagctttcctcagaagtgattaacaacttttttattgggtgttaacatctgtttcaagaacatggcagtatgtttacatgtcgtcagaagttttctttgaatggaatttctaaattaatttacttgtttaaataaattcagaactgggtagcattgtttttatttgcttcactattgaggtgaataagagctgatgtgccacaaatggagccttcagatggctgctttgagcttcgtgttccctcaggggatgccaagatatgtctcaaggagagattaatgaggggtttgtaattacagagtgtgccaaggtcagtgctcacaagtttaattgaactctctcaactctacctcactgttccttttccttataattctctgggctaggtcaaatcagaaactttatttttcggttcagtatctcccgattcaatcacttgtaggaggtggtaactacacttagcagtaagaatatcacctttttgaagagatgtgtattatgggagtggaagcacagcgatacactgggtaggtcagtgtggaagtcgcctctgtgccttccttctcgctggcttgtgagccaggcccccctcccccccaacccccacgccggtagaaggaggcaggtatatgagtcaaaatccagttctcttaaaatcgttgctctttacctctctatagatctttgtgtggcagggcagtgatttttttttttttttttttgtcactgaacagaggaactggcttctgtcatcaactcagaaaactctgatgccacctgtttccctgaaataggctctctgaaaagcctttctgttgtggagcagggcgtggccatgtcagagttctccaactgcattatacctataccctaaattgagaaacaaacagttgagagagtccaaaaataaaagttgaaatatcattgatgtaattaccatgtttcatttgtgcatgcattttattggggatgggaggttggaataatttatccaaatctaatggtattatttcataggctaatccagtttgtatttgagttaaagatcccagagtgtagtaattaattgcagcgtttggtttttcttaattaaaagtagtcctctattaatatagtgtgaaatatcaaaatttaggatttaagtttaaggtctaatggctattttaaagtttttctgtaaattctttgcacaaactagaattggaattgctttcaaaagacttggggaatgaaaatatgtcatgtgtaagatgcactgagtgttgtaaataaaacagaccatttttgttttgtttaaattgttacattctctgtgggaagggactttgtccttttgtt

SEQ ID NO: 23130 - DNA, 1102 bp, Mus musculus
gcacctccaaacatatttcttctctgtttttataaaacacaacaaaggtaaacaaaggggcttctctagacctcaggttaggatggtggtcccaccccacaactccaaaaagcagaagaacaagatggcagcagctttacctataccagaggaggctcttcttccttacaaaggaaaaacaggactgagatgttctccaccttcttaccaaacacagaaataagacagactacccaaagagtaagagaaacaaaacagagaccttacaaaggaccacataggaggcaaactcatctattactctctgttagtatacagattccactgatctaccctcagggacctatgtcctctgtgtcctctaccaggtatctgaagccagcttagagaaccctgccacccgagccccctctctgttccagcatttgttttctctccttgtctcattgtctttgtgtgtatgcctctccctagcgctctctctcactctctctctctctctctctctctctctctctctctctctctctctctctctcttccccgcccttttctctgtcctcatggctctgcctttctgcatgcccacccctgctcctctgtcccttccccagtaagcctcttttataccagggatgtcataacttctcaaggacacaccttggcctgggtctccaaaggtacctccttgccccattaaatttcataacatcctgggatggagagctgttcctttagtcctagagatctgcaaactctagtaaattagattccccaggcagtcctgatatagagtggttaggaactgaactctaccatgatagttagtattctctccaggaaaggagtacataggctaaggacagacttcatgtcagtgacagttctattccactgtactgatacagtggtgcgctggtttcatattgcataagttcaccaggggtgaaatctggcatccaatttcagggcacagataagatgctatctccagaaaggccgagggctctcattagtaggaaggctaattgtgacctgagtatggggatcccgcccataaacactgtgctgggaacaaatatggcttgcagcaagagcccca

SEQ ID NO: 23131 - DNA, 1099 bp, Mus musculus
acatcccaagctcaggctgatgatggtgtgtacatgctcggcccaggaagtggcattattagagggtgtggccctgttggagtaggcggatctctgtgggtgtgggcttcaagaccacatccaagctgcctggaaatgagttttctgctagcagccttccttcagatgaagatgtagaacttaggatccccaggctctgctggccttcgagctgctgcaatgttcttccaatgaaagcagagtcccagacccactcctgactcatggatctctagtaaaatagtgaaatgtggatttttgtcatcaactcccttagggcttcacttccggtaacaaactccagtactacaattttgtagcttctgaagggagataagaaaatccctctgtgggaaatgggttttgatcacgaggctataaaaaagagcagtgctgtccgctgtcttttcagtcaggcgctgagtgggttttcagatcatgtctggtggctccaaggattacaacagagaacatggcggcccagaaggaatggaccccaatggtgtcatcgagggcaactggaatgaaattgttgataactttgatgatatgaatttaaaggagtcccttcttcaaggcatctgtgcttatggttttgagaagccttcagctattcaatagaaagctattatccctgtattaaaggatatgatgtgattgctcgagctcagtcaggtactggcaagtcagccacatttgccatttccatcctgaacagttggagattgagttcaaggagacccaagcactagcattggcccccaccagagaactggctcaacagatccaaaaggtaattttggctcttggagattatatgggagcaacttgtcaatgcttgcattggaggaacaaatgctcaaaatgaaatgcagaaggtgcaggctgaagcccctcatgatgttgctggtacttcagggagtgtttgatatgctaaatagaagatacctttctccaaaatggatcaaaatgtttgttttggatgaagcagatgaaatgttgagctgagggtttaagggttagatctgtgagattttccaaaaattaaatacaagcatac

SEQ ID NO: 23132 - DNA, 1791 bp, Mus musculus
gcccttgtgcctacacatgggagaaccgttcttattcccttattcctttacatataccctctggctatgcaggcacacgtagaccatgtcaggaaaacagaggtggcagaagtcatgccccagctaaggtttcaaagtctcatacaaaacgtgtccacttagtcctagaccggagtaccagttctcagaagactttaagtgtatgcatgttcagttaaagcctggcctcggacgcagggagtggatgcctgcttttaaacactgactctgggctctcctttccaggtgctgctgcctccgtacgatgatgctactgctgtgcctagcactgccaaggaaccaccaccaccttacgtgtccgcctgaacctggtgcggaagagctgagagcagcagtttgagcccttagctgcatgaattatcctgtggtttcacttccatgatgaactctctgagccacattttacaatttagatgttaagctgaagcctctgttgacacatgccctgtagctaagcactgactagcgaggctgtaggagtggagtgtggtgagttcccagagtctttctcaaaactacagacgttggtccccgggctggcttatacctgcctggccccagagctgggtgggcagtcatacttttcttctccattccctctgattgttttgaaagtataaaattaaaattagatgatacttaaatctttccagtatacgtaatacaaatagtattaattgctctaattagatagttaggagcccttccatatgtgatataagaattcccctactatccctgaattcaatgatactctgaatttgctggtcaaggattttctttgggccaaataaagacccccaaggtaataggcaacagtgagggcaacagctgccgggctgcctgttgttttgggctatggttgatgtgtctccctgtgtgaaaggggggccagcttgctctgcactgagagactcacactcccttttccttggttacctgcaccaacagagccaccatgtatgtttgggaaaaggtgttcacactcttttcttgcaaggtacaacctgctttgaatttctaagtatgcctaatcattcattaaaatgtcaagcagtcttcagaaagataaggaggtttgttcccatgtagaatactctagactgtctggattgtgaaagacgtttatgttcatgtctctgaatgtgagcaggtctcctgcttggtccttgctcaatgtgctgtacacaaaggctttgcaattaaagtttgtctgcatccaagaaaacagtcgtggctccgctgactgcctggtgactctccctgtcctcagtgctacacagatacacacagctcagcccatttcacacacacatgttctaatacttaaatgctgatgaatttttttggaccaaccacaccctgtgccgagtcactcacctgtccttgtacagtgctcagcagtgctgtatgtgatcatgccatctccatggtacccacacccgcccacttttttcttccctaagagatgggttcttgctttatcctctaatgttgggattataggtatgttccaccacattgggtcacaaaacatgctctttgatttttggctttttgaggcagggtttctctgtgtagccttgtctgtcctagaactttgtagaccaggctggcctcaaaactcggagatctgcctgcctctgcctctgcctctgcctcctgttaattgtcaacttgataggctttagagtcccctggacagtgaggccagtgggcatgatgaggaag

SEQ ID NO: 23133 - DNA, 1250 bp, Mus musculus
gacatgggtttgattatccactgctagtctttgtgatgtgggaccactttgtcagcctttctgaggtcagtgccttgttttacgaccagggctgctgtgggaatcaaatgagctaatatataagtgtgcctagcatggtagcctgacttgttgtagaggcttagtgaattctctctcatccttgctttctgtgaagagattaatggtaaaaatacatgttgccagtagttgcatgtgttattgaaccttgacttgcattaaaggatcgagacagtgacttttgttttctttacagggaagtcgagttgaaatcgaagcaatcgctgtccaggggcctttcatcaaggcatgactataagtagccatgctgatgttgactccggaggttttagaatgtctttcacactttaatttttacaaatgatgctgggaagtataaaaatgaccagagtggttgaagttattgtggaagtgatcaaatatgtggagatttgacattaattggagattattcagtatagtgactgatgttctaatttcacttatgttgctgggtgtgagagaagaggtgcacagctactgagatgggaagcagaaggaaagatgggctgttgtacatgagaaatagtaaggagcacatctacttaaatcatattaatttgctcatgtgaaatacttagttcttatgttagatataagaaactaaattgaaatattcaaacttgaatagtaccaggagaacaagtggaccaaaatcttatacagataatattactttaattgaaataaaaaatagatgtgtaactttcccttggtttttaattttgttctcttattttttttaacagtttaattatacattaaaactactacctaatagccaggcagtggtggcgcatgcctttaatcccagcacttgggagacagaggcaggcgaatttctgagtttcaggccagcctggtctacagagtgagttccaggacagccagggctacacagagaaaccctgtctcaaaaaacaaaaaacaaaacaaaacaaaaacaaaacaaaacaaaatactacaatctagtaaagggtgagtagaaattcttaagttatgggctagagagatggctcagaggttaatagaggttaatagcactgactgctcttccagaggtcttcaattcccaggagccacatggtggctgtcaaccatctataataggatcttatgccctcttctggcatgttaggtgtacatgcaga

SEQ ID NO: 23134 - DNA, 1192 bp, Mus musculus
ttggttttttgagacagggtttctctgtatagccctggctgtcctggaactcactctgtagaccaggctggcctcgaactcagaaatccacctgcctctgcctcccaagtgctgggattaaaggcatgtgccaccaccgcccggcaaaggttgtgttttaatgctctaaaaaacaacaccggttcctttctttagtcttggtttcatcaggttactcataaaaattatacactgggattttgttttttgttttgctttgtttgttttggagggggtgttgttttgttttgttggttttttgagacagggtttctctgagtagctttggatgtcctggaactcactctatagacctggctggcctctaactcttagagatctacctgcctctgcctactgagtgctgaaattaaggcatgcaccactgcccagatatacactgtttttctaagtcttgttttgagtttgataaaacggctaaaactaaagaagaaaaaaattattttatttatatgtgtatatatatatatatatatatatatatatgtgtgtgtgtgtgtgtgtatatatatatttgtatgtatctgtcttctagtggtgaaaacaactgttttactggctgacatgaatgactttggcactgtcaatgagatctataaaacatgtaagtgatttgaccttattctcactcacttttaaagggaaataagtctgctgatataaatgtatcattgtcaagtaaaagtgagatgtgaaaatggcattttgtcctgacacaatccattatctggttggaaacacagtagtagcatgcccttgtgagaaagatctctatttctattgcagttcttaaaaatataatgtgcataagctctgcatattcattttcctagaacctaactttattgtttgtttctctggctttgtaagcctcccctaaatctttttagacatacagacttattgctatgatatggtctagctaccttcttgtggctctctgcaaatcaccgggaacttactgaacatttccatactagttcttagtccgtaaagtgaggacaggattctgccaccttcgggcgttgtcagaatgattacattaattatcctgtacagcacttagaacagatactggcaaggtctaagctccgagcaaatgctcctgttgctgtcattgccgtagcagggg

SEQ ID NO: 23135 - DNA, 1209 bp, Mus musculus
atatatttacagtagccaactaatattgtattcattcatattaagtataaaaattgtatatataaaattttactttgctttagtatgtcagaaaaaccacttccttttctatacttaatacattttgaaaactatatagatatttttattaaaaagtttgttttgagcataaaaatagaaataagttctttcagtgctgaacacaggtttaaatttagtcatttaaatacatgataattataagtcacattaagaacagtagtataagtaaggagctagtaagtattataagaggtccaggtcaggaaaacacagcttgtttgaagggttgaaaagcttcaggattgatcttgaaggttgggtctttttttgtaaagagaaaggaacatatcattaactctccaggttctcttttttgcattgtttttgtaagtgtagttttcgttagtcagaattaaatacagcatttatgcattcactttttaatgtctgcttggagtttaaaatgttagtataaaattgacttcttctaggtccaacaagtcaacaagactttccttcagggaaaaatgaggatttgggaatagtccaagaaaagtctaccaagagtcttgttatcgggcctctagattgccgtctggacagcagtgcggtgcatcgggttttgaagatgattgtttgtgctctggaacatgaatatgaaccatatagcaggctaaaaccaggtttgtctttgacctaaatcttttttttaatacttaatatatttttatttttaaaaagcaaaagattatgatttgtacattatacagtgccacataatacagagtattacataaagtattatgtggcacccgtcaaatacacatcattttatttcatcaattgaaatgttatttaaacctgtctgatatttttttttataagatattttctacatttacatttcaaatgctatcctgaaagtcccctataccttacccctgccctgttccccaacctacccactcctgcttcctggcccgacatacccctgtactggtgcatatgatctttgcaagaccaagggcctctcctcccatgatggcctactaggccatcctctactacatatgcaactagagacacagctctggggggggggtaatggttagtttatattgtttttcctcctatagggttgcagacctcttcagctccttggatact

SEQ ID NO: 23136 - DNA, 1127 bp, Mus musculus
acagtaaagtaatctttgtggaagaatccccttattaccattccttccattatccccactcatatttaatgagttcatacttgacctctttcacaagatgaagtccactgtctacttttattgtttttgatttaaaaggaaaagtgatttgaatgatatttaaaaataattgtatatttaattttaagagcagtgattgtttctgggctctttttttctttagagttgaatttttatctgatacaattttatttttggcctacaccatttctctcataatctctcaagggtaatcttcagtagataaattacttctgtcacttcagcgtttttgtcttatctggttattgcataggaatagtcatttataactatattctttctaaaaagaggaatattgccctttttcttaaagtgcctgcttcagcaacattttactttcatacagcagtacatgcaggcttgaaattcggtgcatcctaacagtatttattacttgtctctcctcttacagcttgttatttttgtataatgattattgtataataatttcaaactattttattttaggtgctgtatttctttgtagtgtacaaggactcgctgttaacattgacccaatactgtatacttgggtcatctaccaaccacagaaacgagcaaatagacatgcacaacaggtgagtggtctgtcagttatgttaacacatccaccctttccttagctgggaagatttcaatgctgccactggtactaaagctaggactacatgctgcagtcattaatgactcacataagaagatgctattattactgatctattgtgaagttagatgatgctgttcttatggactggggttggatgagactgtcctaactggttttctctttattttatttatgtgctagttctttaggccccattatgcctttcaaacaagatctgtaattttatgtatacgaaactttagttcaacacagtttgtctgttgaagtaaccttgtgcatatttacatgcttgtaaggctgaaagattagcaacactttttttttttttattcttacacatctttggatttatcgaataaacctgctttgaactttaaccctggtaatttgataggta

SEQ ID NO: 23137 - DNA, 1191 bp, Mus musculus
tggtacccgcagaggccagaggcatcacatctcttggagctggactttcagtctcttgtaatcttcctgatgtgactgaactcatgacctctggaagaacagcaggtgctatccagtgagctttctctccagtctcttgaaactatctttaaccaagaaagtgctttgacattttatgttagcaacaaatttatttccccctcttaaatttgcccttcaaatatgaagatttccccaattgaatgattccttttttaaattttatttatttatttattcattcatttatttatttatttatttattttagtgaaatcttcacagttaatacagaaatctgtacaggaatgtgtacaagagacagacagaaacaaggcaaagtcagtggtgttgttcacttattctgatggagaaaaagaatgctatcccgaagaagtcacttgtgcccagttcttccatttacccactttaaaagccagggcaacctacttgatagtggtgaatgatcttttgatctgttctcggatttggttggcaagagttttattgagtatttttgcatcaatattcataagggaaattggtctgaagttctcttgctttgttgggtctttgcgtggttttggtatcagaatgattgtgccttcatagaatgaattgggtagtgttcctttgtagaatagtttgaagaatattggtattaggtcttctttgaaggtctgttagaattctgcagtaaacccatcttgtcctgggctttttttggttgggagacttttgatgacagcttctatttttttaggggttatgggactgtttagatggtttatctgatcctgatttaactttggtatttgatatctgactagaaaattgtccatttcattcaggttttccagttttcttgagtataggcttaataaataggatttgatgatttttttttaatttcctcagtttctgttgttatatctcccatttcatttgtgattttgttaatttggatactgtccctatgccctctagtcaatgtggctaagggtttatctatcttgttgattttctcaaagaaccttgttttgtcgatctttgtatagctgtttttgtttctacttggctgatatcaatcctgagtttgattatttcctgccatctactcctcttgggtgtatttgcttccttttcttttag

SEQ ID NO: 23138 - DNA, 1175 bp, Mus musculus
gctcagtattctattcataagtgttctattagtttcaaagtaattataaatagaattgttttatttttactttagtgtattacaattttatgccctataactttgtaaaactcattctaacctttctgtttctgtgtgtattattagaattttctacattataaaatattacctacagattttacttcctttgggtgtattttctttttctcaactgatttttctgattaggactttaatactatgttggcaagaattggcattttttttttttttttttttttttttttttttttttttgctgattctaaaggaaaagctttcagtttttcatcaagtgcaggttagtaatagattcatccgcagttgactatattgagatgtagtttttacattttagaaagtttacagtctagtaggactagactttatggatggtagtaataaagattgtttatcattcacaaagctattgtgtttctctccatagaattctttggattgcgctccaaagaagttcattgctgacctgcgctcctgaactatgaaacatgaatatgtgtgggctaaggaatagtttctttcaataaacagtaattatatggacagtaagtctttgcttggttattaatgataattcagagcctttaatacctgacgcctaatgttcttataattctagataaatattataaagacaactcctataattatctggtcctggctttggtgtcctggagtacctatgagcatctgtacttctggtcttgatgttccaatcctatcattaaaatcagcctttgcaggaggcagaggtagatatgttactgaaccttgagctggaggccagtagagtgagtttcagggcagcctggaatacatggttagatgccaactcattatttttggttgtgagcttagcctttaatggctgagctatcactccagcccaagagatgccattctataaaaatctgtccttagatttcactgccagtctttggtattgctgttgtcaccagaaagaaagttaattgacgtactattagaaaaattatttttattaatgagccaacaatatgtataatgaatgtgaatatgtgtctaatccagaaaaacacttaactagtattgaggaatgtctgatagtcacttaaagtctgaatgtagatttt

SEQ ID NO: 23139 - DNA, 1143 bp, Mus musculus
cagcagtgtggatgacagtggtgctacccgaggccacacaggcggggcgtccagtggcttgcccgaaggtaaatccagtgctaccaagtggtccaaggaagcaacaggaggaaaaaagtcaaaaagtggtaaactgaggaaaaagggtaacatgaagatcaatgagaccagagaggacatggatgcacagttgttagagcaacaaagcacgaactcaagtgagtttgaggcgccatccctcagtgacagcatgccgtctgtagcagattcccactccagtcatttttctgaatttagctgctcagacttagaaagcatgagaacgtcctgtagtcacggctccagtgattgccacgcccgcttcacagctgtgaacacccttcctgaggtagaaaacgaccgactggagaactcaccacaccagtgcagcagcgctctgctttccaaagctgcttcctgttcagatgtcccacagcccagccatgctgcagacgagcatggcaccagcagaagtggggggaagcctatggtggatttgtgttttggtgatgcactgagagagacaaataataaccactcgcaccagacagcagacctgaaagttgctgtccagactgaaatttaggcccgtgaatgctgcagagtaagaaccactgaacaaccgtgttgggagctggttgaaccatgtgcgactgttaagcttaagttaccagcaaaagccaggtttcataatcgtaatgcaaatacattttgtatgtctagcaaagcattgtgtttcatgttgatattaattaccaaattatgaattgaaggctttaaagtgcgttagtacaagatagtaacataagaaaaaggcatgttttgtgttcttgtcacaaaacactgcttgatgcacatacctgtgtatttagatagaaatttgacttaatttataaccgtatgatactaacactgttctacggcattcttaaggaagatggaggcttagggatgagtggttagtgacattttattgaaaccactaagggatggaacgtggcagattactcagtacatgatcctcttggtaacatttctcttcataactgagctgaaatttcatttcttcatatgcaatgtggatatcaagcttaatgcagccca

SEQ ID NO: 23140 - DNA, 4729 bp, Mus musculus
acactgcctggaattgctgaggtgacgtgtgttcagatggagacaatcctgggcatctcctcctcttaacagatttgtcagtagaataagaagtagtcttgtcctttgaatgcagtttaaatcatttaatgatgtgcctgtgtggttgtcttgatttaaggaggactgtttcatgttggactttaattgtgcaattctattctcgttgctaccacagataatagatgtaatattacatgtctataccttgaatgctcttaagtattgattgtaaggaactaactcagttaatacaggatggttctagcattaacaagattatttggttcaatgactgagtataagagacagttcttggttattctatcatttccctaactttcttttttctttataggtaatgatggagggtgggcgcagcaaagggtttggttttgtatgtttctcatcccctgaagaagccactaaagcagttacagagatgaatggtagaattgtggccacgaagccactgtatgtagctttagctcagcgcaaagaagagcgccaggctcacctcactaaccagtatatgcagaggatggcaagtgtacgagctgtgcccaaccccgtgatcaacccctaccagccagcacctccttcaggttacttcatggcagctatcccacaggtgagtgtgaagaagaaactaagtcaggttggcttcataagctctccacgataaagcactaagttattcgattgggaagacaaatgacaagggtggtagagtcagttgttttgagagcatgtaatgatagttgtgttttgtggacttattttctttacccagactcagaaccgtgctgcatactatcctcctagccaaattgctcaactaagaccaagtcctcgctggactgctcagggtgccagacctcatcgtaagcctcatttagttgtgtctgggaattggagacttggggtgggagtgggggcatgtgtgtagctcagtgatataacaattaacttcccatgtgctaggctgtgggttcaattccccagtgctatcatatgaggcaaatttgtcctattgtagtgattaaattgctcctgataatttatagttgttagatttggctttttttgatttttagatgtgtagcttaggctggccctgaactagcaagcctcctaccttatctttgtgactgctaagatgggtattggactgattgtcatacccagctccaagtttaaaaacaaaggaaaaaaaatgccatcagtgggtatttgcttcaattcttaatttgccttggtagcaatagctttcattctacagggtaatgtgtggcattttggtccttggccatggtatataacaagctgggtttcaggagcacttggtgttactttttaatcctgcttttttttttttaaattttaatctcagatattaaattgaaactcactttctgtaagggtcttttggcttttcataaacccttggccctaggaaagcttaggctttgactcacttagtgaagttcctagttcatacagggtctttcttttgaatgcagcattccagaatatgcccggtgctatccgcccagctgctcctagaccaccatttagtacgatgagaccagcttcctcacaggttccacgagtcatgtcaacacagcgtgttggtgagtcttaaacctctctgtaaagattgatccccaatttaaaatggcacaattaaagtcatttttctctttagctaacacatcaacacagacaatgggtccacgtcctgcagctgctgctgctgcagccactcctgctgtccgcaccgttccccagtataaatatgctgcgggagtccgcaatccccagcaacatcttaatgcacagccacaagttaccatgcaacaggtacagtttaatcatttatttgcaagggtcataatgttcagctgaaatccaaggtctgatggtaactgcacaagctatgagcatagacttacctgggccatcttattaaggttctatgtgaagaaagttgacgggcagccagcagtctccctatgtggtgtcttgtttaggatgggtgtattagacttaatctttttcctagtcctggaaccaaaaactataaagaagactaaaatgtaattgcatctcaagcacagatgtgccacatggggttggttatctgtacttgctgacctttagtcagtatttctctcagcttctctagatcaaattcaggtagcactctgtccttcctatgactatccgttgagagatggctggtttatgtctcattacttcaatattaagagggttttctgttttatgtgtagcctgctgttcatgtgcaaggtcaagaacctttaactgcttccatgttggcatctgcgcccccgcaagagcagaagcaaatgttgggtaagtaactttgttgtcttggtctgtcagttagagttgacgaaaataacaaggaccacttagacactttgcacctaaaatgagatggcttaggatggtatgtgaaggaatactagaaaacatggtgggctactgtttgccattgacattccactctagccttgaaacaaagaagcattgtctatgttaataccaaacacttgaggaactgataccaccagagaagtgactgccttgtgacagattgtgctatacatacgggtgtggtagctagtacatactctatattaaataaggtaggttcctaaacccctggttgataatagccattgccactctgattagagtgtctgttgttctaggtgaacggctgtttcctcttatccaagccatgcacccttctcttgctggtaaaatcactggcatgctgttggagattgataactcagaattacttcacatgctcgagtctccagagtctctccgctcaaaggtattttgtgctttcagcctatgtccttcacaggtttattcttcagaacatgtaaatggagcccttatacaaatgagtatacaattaggctttatatgtaaatactgactacaaacctgtgataaacctgtagtgcttgttttctctattttgggtaacttgctcaaagcttactgctagtagattgcaaagcttgctcagatcagtttgttcagctcctgcagccggattcatgaatgctgctacttagggctcattttaaagtgtttgggtgagaattaatttccttgaaccattatgttttccaggttgatgaagctgtagctgtactacaagcccaccaagcgaaagaggctgcccagaaagcagtgaacagtgccactggtgttccaactgtctaagtgagttctccctcgcccgcttgttccagacataaggacattaggtcagctttccagaggggtatatacataacgaaatctttttcaccttaaatactgatcagcaattttaagtcaatacttggaaacagattttgcatagtaaattgtatgcaatgccctgtaacggaagttggctttcataatcggtactttttaaaaaattgggtgatggctttaagcagtttcttggacctctctctgtcccactaccaggaaactgttagtgcttggttgagtatatatagtaaggtcagtagtaaaaagatactagaatcctgttttttgtgggccatgttgtatgtgatgtgatagctgtgagtattaaaggagtgggtgtggctgtgccagtacaaacaggcagcagactgacccactgaattcaggcaggggctttaattatgtctttttttaacatttacagattgatcagggaccacgaacagaaactcgtgcttcaccgaagaaaaatatcttaaacatcgaaaaatttaaatattatgaaaaaaaacattgcaaaatataaaataaataaaaaaaggaaaggaaactttgaaccttatgtaccgagcaaatgccaggtctagcaaacagtgctagtcctagattacttgatttaaaacaacaaaaaaatacaaaaaaatagtaaaatataaaaacaaattaatgttttatagaccctgggaaaagaattttcagcaaagtacaaaaatttaaagcattcctttctttaattttgtaattctttactgtggaatagcttgggacatcagctctgttttaaggagcagaactgatgactgagcaaggaaacgtaatttggattataaaattcttgctttaataaaaattccttaaacagtagatggttatgcttttatttactttgattctctgggcaattggcagatgtagcggtagttgctgacttaatagtacagagctgaaagcagctaccaattctgtgaagcatacgcagtttgggggtggtgtggatttagacaatctctctgttgctggctagccttagccactcaagttttgggttcgttatgtatgtctcatcgttttcacaattctagtgtgttctcagctacccacattaatttattgagctcttctgtgtatagttagcttgtttttaacataccaacttaccattagtatggtttctgtgctacaaaataaattcacctggtttttttttttttttttttttttttttggtaagatgtgagtcacagtagctacccaatgtattgggaaaaatggcatagtaggcaccatgactaccctgtgctacttttaaccctaccagctttgaggtagttaagtaccgtctgtgcctcacccagaccacttggaaagtaaagatgga

SEQ ID NO: 23141 - DNA, 1748 bp, Mus musculus
cctcaaagcccaccaatcaactgaggaccaagtattgagatgtatgggggccatcattcaatcactcctagttctttctgtgcctgagcctgcttatggtctccacaaaaggggaaggcagaacttgtgttttaagaaacattctttcaggtattttatgcctgcagatctagccattctctgtacttactgttgaaaaacagaaggctttgaaggattattttgaacaagaaaaatcaagttaatgatgtaaagggacaactactgagctaagaataaaatcttccataagcttgaaagaaatcaaacagtatttagaagtgcatatggtagaccagtaaaaccttagggctgggagggctgggacttttgtgttacatgttaggacatgaaatgtgtacattaagtggactactgaattactctgaattactttttttagggcctgccttaagtgtgaaagtaatgacagatgaaagtggaaaatccaaaggatttggatttgtaagctttgaaaggcatgaagatgcgcagaaagtaagagacttaaatcattttttattctatcaaaggcgggtataaaacttgctctggtattgaaatttatatacattattgaaatgtgtatacatttatatgcggacattaatggaagctttccgtattgtaatcagttatttgcattctatgtattagagtgtgtacgccctttatagcctggagatttggggatgagtctgttgttaatgttagtaattggacaaatttttcttgttaatgagatatatgtatttcgcaagtaacggaagtgttttttgttgtccttttttttggtttctataaggctgtggatgagatgaatgggaaggagctcaatggaaaacagatttatgttggacgagctcagaaaaaagtggaacggcagacggaacttaagcgcaaatttgagcagatgaagcaagataggatcaccagatatcaggttcatatttactcgaacaagcacataagacagggatgaggaaacctgttttatgttcatttcagttacttccaggtaacaggttgggagggaagagaagagatgtgggctctacagtaacaggtgtgcttaggtagcacgatagtcttcctgcctctcttcatagttctcttcttttcagggtgtgaacctttatgtgaaaaatcttgatgacgggattgatgatgagcgtctccggaaggagttttctccgtttggtacaatcaccagtgcaaaagtaagtgtgcactatactttgagttgagattgtgtgagtaaatttttaagctagggagtttttgatccttaggttctgctctatcactaactgtgttcactgatacctgttgacttacatagttcattctgggtagtcagcctccccccaagtagaaaagatcctatttcaaaaaaaccttgggagtcagattgcaaagcaataggattctaacctaaattctaggattttggtttaagaacttaagctgtgggtgttttatccagtgtccatgatttgtggctaccttgccccttaattctgatttcccagacatgtccgtagacttacgtagacttagactttgttagaaacaaaatatttacaggtatattgggtaaatgcaaataagaaacataggcatgcttggcttgccctgtgttttagcgtgcagttttttctagatttagtatttctagtgtttttgaaggtctttcatttcagtgttgt

SEQ ID NO: 23142 - DNA, 1107 bp, Mus musculus
aaaaaaaaaaaaaaaaactaaatctcattatgttttctgtgcttttgaacagagaacaagaagccttcaagttgactttgattttttgtgtggggttacagaagtttgtattcttcttttggtgtttattatttatgtcatcttatttaataatgtggaagaattgagttttagtgttatgttgataatactgcaattagatcaagctcttgtattagtagagagaattgagaatttctgtttaaggaggtggtacaatgtaggaccattctgaaacagctatgaagaagcgcgtgtatgcagggctttttggcacagaacagttatttctcttgacaggagtgaaccctttaacccttggctaacttgatcaaatgtgcattgaaagaaaactcttccctttgtaattataaattgttttttaaaatttattcagtgaagacattttattttgtgatatattttgtaaaccatcagccttcatctgagctttatgaaacattttactaggtttgttggacgatttaaatctcggaaggaacgagaagcagagcttggagccagggcaaaggagttcaccaatgtttacatcaagaactttggagaagacatggatgatgagcgccttaaggaactctttggcaagtttggtaatgtgtcaaagttaaatctttatacttagagtaattgtctaaagttaatgactaatatttgactagtaagttttaacacttgatttgaattaggctatagttcactgcacaagagtaatatgcaagtggaatgctgtacagtgaccaacacgagccgtgggtggctgaggagatgtaaagggtttgccacattaagtaagatcctctgagtgcagacattagtgtgaggtaggtgggtgatgtcgggatcctggagtaaaagacgaggaaggcaggattatttgtaggtgacttcctccctttctgttgagcctaggaatggccttttttgtttgtttatctagttctgtattatatctaacatcataaagctgtgttgagctttgacaaagacaggacctcagagttgcagctctggcaggcacacaactcccaagagatgcctcctgagtcc

SEQ ID NO: 23143 - DNA, 1489 bp, Mus musculus
tcaataactacaattattatgagatttgaaatttgcttcaggtgttcaagtggactgtttcccccttgaaggtctcatctctttacttaatgatagtatttttttttcatttaagacaggtaatgggtacatggcagaggtggctggactccaggccagcctgggctgcatagagatcctgtatccaaaaaaagtttcagctttagcacttctttttatagtacactttttttttttaatacaagtattcaatcttttttggggccttgaaattataggctaggttttttgttgtgaagcataactatccaaaaataagtgggataaattgttcattacaatgattaagacttgactttaaagaggaagttgagctgaggccacatggctatccttttactccctgtcactggtaattttatacaaagtggctaatgaggtgttagaagtaatacttactctgaaaatgtgtctcttgtagcggaacgtgctttggacaccatgaattttgatgttataaagggcaagccagtacgcatcatgtggtctcagcgtgatccatcacttcgcaaaagtggagtaggcaacatattcattaaaaatttggacaaatccatcgacaataaagcactatatgatacgttttctgcgtttggtaacatcctttcatgtaaggtaagctgagctataacaggttagtatttgcagcgttgtgctacttttagatttggaagagatctttgtgctgtctgttaaatactgtcattatttctgaagttcctgggattgggtggctaacatttctacagagtaggaaagcaatagcaagtagtgaaaagtgagtgttctgtttcaccctaggtggtttgtgatgaaaatggctccaagggctatggatttgtacactttgaaacacaggaagcagctgaaagagctattgaaaaaatgaatgggatgcttctaaatgatcgtaaagtgtaagtatagctacgtctacagtggatatggtcagtctgcttttaatagttctctatcagtttaaaaacaagtaaatatgtgctcttaaaatacagcgaactggagctggacttagtagcatgcctttattaatcccagcaattgagaggtagaagtggaggcaggcagatctctgtaagatctttgaggcccaccttgtctacataggttagaacagccaggcctacatactgaaactgtctcaaaagaatgtaactggattagtatatgcctgtaatttcatcacttgagagatagaggcagaggatcaacctagctaggctacatgagaatatctcaaaaagatccatcaaactgtgtttacatacatatagcactgactcatatttgctgggtttcataatcattcatgatcagtaatgtcagttactcatcatagaaacccaaaatgaaccaggtaaaaactaaggaactagttcatcagcctatttcattcatgtttagggaaact

SEQ ID NO: 23144 - DNA, 1121 bp, Mus musculus
gggctcggaacacacatttattattaaaaaatccaaaaaaaatctaaaaaatcctttgaaaaaacccaaaaaaaatttacaaaaaaatccgcgtctcccccgccggagacttttattttttttcttcctcttttataaaataacccggtgaagcagccgagaccgacccgcccgcccgcggccccgcagctccaagcaggaacccagagaccgaggccttcctgccgcccggacccagcaccgccagcctcgctcccccggttccacggccgttgagtacgcgtcgattccggttgaattttgtccctctgcgctcgcccccgctcccctccccccggctccgtcccccggccccgcactcgctctcctcctctcacgggaaaggtcgcggcctgcggccccgcgggcagccgtgccgagatgaaccccagcgcccccagctaccccatggcctctctgtacgtgggggacctgcaccccgacgtgaccgaggcgatgctctacgagaagttcagcccggccgggcccatcctctccatccgggtctgcagggacatgatcacccgccgctccttgggctacgcgtacgtgaacttccagcagccggcggacggtgagcggcaggccggagggtggcgggcgggcggccatgcggccggggcggcgggcctagcggggcgggcgagggggcgggagggcacggcgccgcagcccctcgcgggccggcacttcctcctctgcgaccattttctcgccatcggtcgctctcaaactttagggcgatgacgcgcccggagggtggttgagatagccttcaccgcgctcccgccacaagctgtgggattcgggggtttcgagtaccctcctggagcggcgggtggaggtacccctccatcccctgccctggcccggcagtcaggccggggaggaagtacgattcagtgttgggaaataccacgtgttgaaccctgtaacctcacaggcccgaggcctgttcctgccggtggctcaatcgctgggaggagccctaggctttagaagaaagttaaatagggtgatgcctggtggtggtggtccttagggtcgtaagctcgttcctaatagcacatctctgacctgtg

SEQ ID NO: 23145 - DNA, 2554 bp, Mus musculus
tgtggacatcggatacccaaggagatgaagcagaagcaggagaaggaggggaaaattaaccggccttccaacctttgtctgcctcattctaaaatttacacagtagaccatttgtcatccatgctgtcccacagatagtttttttgtttacgatttatgacaggtttatgttacttctatttgaatttctatatttcccatgtggtttttatgttttaatattaggggagtagagccagttaactttagggagttactcattttcatcttgaggtggccaatatgggatgtggaatttttacatgagttacacatgtttggcatagtacttttggtacattgtggcttcagaagggccagtgttaaaactgcttccatgtctaagcaaagaaaactgcctacatattggtgtgtgctggcggggaataatcaggataatgggttccagtcatgagtgtagtctttgtgggtactgtaaggcctggagcacttgtgaggctgtgacacaaacaccctgtggatgcacgctaggatcgtgtgtgtctgcgtgcacactcttgaccacagctccagaagttgtctctagacaaagtcgtgacccaatttactctggtaagggcagaaacggttcacattccattatttgtaaagttacctgctgtttgctttcattatttttgctacacattttatttgtatttaaatgttttaggcaatctaagaacaaatgtaaaagtaaagatgcagtaaaaacgagttgcttggtgtgcccggctccatacgtatcaagcacagcggtaaacaaaatcccatgtatttaactttttctttctttttttttttttttaaagttttttgttttgttttgtttttgcttttgtgattttttttttttctttttgatacttgcctaacatgcatgtgctgtaaaaatagttaacagggaaataacttgagatgacggctagctttgttttaatgtcttaagaaattttcatgaacaatccaagcataattgttaagaacacatgtattaaagttcatgtaagtggaataaaagttttatgaatggacttttcaactacttttctctacagcttttcatgtaaattagtcttttggttttgagacttctccaaaggaaattgtctccttattccctcttggcagctaatgggcttttaccaattttgaatgcagagtttatcataaaaaaaaaaaaaccgctaatgtagcttccatcctcagccacctcccacattttccccttactcctcaacaattgaagtggacttttatggggtggggggtgattggcaaaaggtaatgtgttccatttataattttggtctatggagttttctaacttaggaagccacaatgttcttggcccatgtgactgacactgggcagcattaactgttaagttctgtgcttccaagtcgctgttggttttaagaatttcctgatgctcttacagtctgcctgggattctattcctctatttccatgttgggcacaggctcacttcccttttactgtcttgtcaccaaccattccaacttggtggccatgtatttgggaaaagggccgcatgatctttctggctccactcagtgtctaagatacccgcttcccctgcttgcctcccacagcctcccctcatcctctctacagcccagctcgcctcagttgagcttgtgtttatctccctggaagtcctgccctaaatggtctgtcaccgtctccctttaaaatccttcctcctcctcttcctcctcctcctcctcctcacataatgatggggctaagtcacacccaaagctcacaccctaccgagtatttcctcagtactttacagaaaacaccaaacaaaaatgccattttacaagaggtgtatttttttttcttttagaatgtaagctcgtctagagcagggacaatgttttctgtatgttctattgtgcctagtacactgtaaatgctcaataaatattgatgatgggaggcatgagtctcagtggtgagggaggggagagaaatcccaagcatgttttctggcttgcttcatgatgatctgaatctgaaatcccactccttttggacagattatcacaactactgcattcaggtggggtggggtggggtggggtgggggtgttttctggagaaacgacatcacacacgtggtgccatgacccatcttcctttacaactcaattccttgattttgcctcagctcccagactgaggaagattaagcaatggacagcaggatgtcatctcatttgagtaaattacaaatgatacctggaacctgtcacatttgcctaattggcttattcacatgcattagacattgctaaactagtttgattttagttattgatgtggtttttttttttttttatgaatagtgcccagtagatggagaaagatttgcaacctcaaattttccaccccctggaatttgaataataaatttgtttttaacttacttccctaattgtcccaaatcaaggcttcacgtctgttttgttaatacaacaaatac

SEQ ID NO: 23146 - DNA, 2754 bp, Mus musculus
gcaactatagccaaaaataggggggaggggatgagtgaatgctggacagctctgagcagagcatgaaagacttgtcagctgtaagaaaaccatcatttcaagggcacaagggtcttctccctgaaagtcagcaacttagtgactgtgttcttaacgttcctatttacagtgctaggcagagcttttttctgtattaaaatatagagcaaaatacaggcatgctcaataggaactcctttgaagttatttttaatttcatgtatagatggatttcttgccctcctaagtagtgtagtacatatgcatgtgtgtttgagacttccttccttccttccttccttccttccttcctgcagagactgacatgttgatagtctttcatgttaggtatttgagatgcttgtcagtcgttacagttactgaagctttttcttatgtcttacaggtgacttcacggcacctttgactctactgtctcagaccttaggtaacaaacctgcggctgcttttttaaacaaactgttggtcagcaaacaataaaggggctacagaaacactcgtttttacgctgttccctttgggcttcatgcaaagacaactctgtgtaaatgtacagttgactctgatgtggaaatctgaaaaatcagtccattcttgttataaatttttttacaattgtaattatattgatgttcatattgtgtaaaataactcatttaataaagtagtgctttgattttacaacaccgcaggataaatggttctagaaattctgttctaactttccttattatttgccttataacaatgaattgatcagctagtgttgcaagagcagttctctccctttctcagctcagtggcaggtttgttaaaccagagcagactcattcattaaatcgtgcacttgattctattggcagctgatgcgggttaaagaatggctgatctgcttccgtgtattcacagctacacaccattccccacttctgatcatttcctgtgtgtccatctgggagtcattgtagatgacagattcaattcatacaattggtagagttgccagtgagcccttctggacaatgtgtgaaggaacaaatgtgacctataaaggcctgtgtctttgcaaattgttcaaattcatttgaaattgaactataatttttgaaagatttttgaaagttatctagctaattttatgagtgaatttttacatttaacaagaagaatagaatgatttgtttcagattaattcgcagaacattctttgtctttcaaataaaactctaattttagagccttagtgctggctcctgaaatcaaaggctgtctagtctgacttccacctgaacgagcagaacattgtagggtaaggtaaagtctgccagtgaaggaagactaactagttctgctggtgtaggttacaagcaagtctgccggaactcagcttaagtttagacggtgatgtaatgggaagaacattccgtactgacagctgcttagagctatggccctgacctgtggataacaaacggatccctcgtgatgtagcctgggcagttagtggacagcttagcatactctgaccacctggctcgtgcagctgtgtttgaaggaaggtgattcaagggccagtctagtgcttgtagtctgcacaacagccctgtccccaacctccctcgcagaagtacagtccctctatttaattccctgcctctcacacttggtatccactcttgctacaatgttgctgactagagttagttacaatgttgctgactagagttttcttgtggatcttacattctagttaagtggcaattttagagcttctgaaagtgctttatgcagatgtacggtttcttttagtgacaaactggttattcagagcctgatcgcaatttttgatttaaatcttcttgtttgtttcactgttgtaattcagaatagaacattttcagtcttgtacttaactgttttctgagcagctgaagacaccgtatttcactctgtatctcagtgatagggagtaggtgatggctcttcattctgagcgtggggattgccagcacggtcctaccctgtgctgcagttaaacctgctgtgaggaggaaacgacaactcgagcatctgtaatttagtgtgcagagtctcctaacagacgagtttgtttaaaaactgtttgctgtcttcaaaggtgatataaaatagcaggaggggactgatctgtttgtactctgtatgttagttgtcaaaaggaatggggttcacattaaacttgtttccattctcatccccatgtttagctgacacacttgagccctcacgtgtgctgtaatgtcttattaaagaagatgttaaaacgaaactagtctaatttcttgtaccgtttaagaggtttttacatcgcctctcccccctcctccccctctgatagtttggtaatccaaagtctgacaagtaaagtcttgtagttcttttattggccattggtttccctatatatagctgtctgtaagatactgcctaagagtaaacaaagtgtcattcagaaatcttgctgtgtgtagtgtacagtgtactagaaggaaaaaaaatgatgttaccaacaagaacaacaaaatacttaggccagttgacagggtggttaaccccttacgccagcaacacttgaggcaagacctggggcgttttggtgtggtggtggtttagggtttggtttgtttgtttttgagatagggtttctctgtgtag

SEQ ID NO: 23147 - DNA, 1143 bp, Mus musculus
tgctcacacgggtatacagactggactttcacggccattccccagaggagcatgtctcagtttcactgactgcggatgcttttgggagacaaaggatttgataaacattttggaagcaggaaaaatcaagtcacaactcctttctggtgtggaaaaattgccttttggcaactggtgctgggtccctgctggtgtggctaactgaataataaaagttggttgcagagctttgttcttttgacatgtgattaccaaataattctaagtctccatttttaccactggatttttaaattgtgatgtagcctgtcaatgtctagaacacagttaaagactttcgttgacctgttagaatttttttttgaggtagagtttttcatgttttatttgtatttgtaaaaaagaaagaaagaaagaaagaaagaaagaaagaaagaaagaaagaaagaaagaaagaaagaaagaaagaaaggaagaaaataaaagaaaaggaaagaaaagaaaagaaaaaacaggacaaaaaattcccacaagaaaacaaacccccaaatctgataacaaaaccaagcaaaactgtgccttctatttatctttgattctgatcggtcctggcaattgtttaaagaaaagtaataaagattctagatttgttttcagattcaaagaaaagaaaaaaatacaatattagcaccatttcctagttttttttttcacataaagaaaaaaaatgaaagcagtactcttcggcttcattggcacggtgggtatttggttgccgggagttttgaagagtagtgtattttcattaactagattttgaatgctctgcaagaggtgtctaggacatatttgtccccttcctttgtccccttttccttcctgcctttgattcttcttaaagtgggggtaaggatatgattaagagcttctgccccaccaggcagtggtgcacccctctcatcccagcattggggaagcagaggcaggtggcttactgagtttgaggccagtctggtctatgaagtgagttccaggacagctagggctacatggagaaaccctgtctcagaaaaaaaaacaaaaacaacaacaaaaacaaaaaacaaaaacaaaaaacaaagcacaaacccttcagctcctctg

SEQ ID NO: 23148 - DNA, 1218 bp, Mus musculus
agatctatctcaaaagcaacagaacagcgaaaacaaacaaaacacatggaaacctgttgttggtaaatagcaatctatttttgtctttttgaaactttcagtatctcatttaagggaatgagaatttgaatagaaggaaatataaaactaaattctaaatgatttaattttatctaaatgtacttcagtttatttatacaatgaaagtgtgaccaatatgtcttttttttttcctttttgtcataagcacttaagatggcattaagagcatagatttaggagtcaggtatgagcttgatattctggcttactccttgatgtgaccttggcaagtcagttagtcactgtaaacgtcaggatatttatctgtaaaatttgtataatagtaagtcccaagttcatggaggtgaccagagggctaatatacagaaatagtttgtttatctaatacttttatctccactgcctcacctgctaattaatattagtgagaagatcaagtacagtggcgttgtgatgcagtccactcctcgccagagagtgactgaggggtggattgagataaagaattcattgaatctttgtggttttaatgtttgcaggaggaatataagggtctccttagagagatcataattcttgtcaactgctttgaattcattaatctgcagtaaagaaataatatatagctcttaattgcttatcgtgggaggcttatggagtagtagactccaggttaccatggttgtggttcttgtaagcaaagtgattcttctttaggaattaaaaggataactgttgccagggacagcccaggggtgtttagaacctggattgatgggcatttctcaaagttgtcttctcaaacctggtagatcttcagagttcttgtgatggaaaaagagatgcagtcagtgggcttggggaaggctgagcattccatccctgcctagaatgcagtctgcaaagcagctgcccacatgtacacaacacaaggctgtcagcacctcccacagctactgagtgcactggggaaagctgtcctagaatcatttatacacactggaaatggagaaaagaagggaggtgggagggactagtgaaccattttggatttgtgccaatctgagaaagtgatttaaggttgacgtcatctttatatccttatactcttaagtctctacactgttataaaggaatgttcttttaatggactgt

SEQ ID NO: 23149 - DNA, 1604 bp, Mus musculus
ctttttcaaattcagggtctgtttctctgtgtctctgtctccgtcttgctctgtgtgcctctgtgtgctcatgtttctaaacacataagtaaagcttgctcagtttgtataatgttatttggatggatgtatgttttaaaggctgaccatttggtattcgataaccaacagagtgctttctaggaaagtctatttctcctgctccccaaattccttaattgttgatagtaatgtgtttatggttgaagcctcctgggctttctccccatccatattaacatgcctgttgttgtccttagcttatatttaggcagttgtgttagtgaggctttagtttttaaattgggttttacacagtggggttgtttatgttgctggaattcaaggtgactattaacctattaaaaccaacattgtaattatatatccttgtttaggtttacttctggacatctagcccatcattgccagccagtgaagaaggttttcagcctatgccctcgatcacaataagaccaccagatgaccaacatcttcctactgcaaatacttgtatttctcgactttatgtcccactctattcctctaaacagattctcaaacaaaaattactactcgccattaagaccaagaattttggttttgtgtagagtataaaaagtgtgtattgctgtgtaatattactagctaattttgtagattttttttcccatttgtctataaaagtttatggaagttaatgctgtcataacccccaccccaccccacccccggtggtaccttaaagagattaaatgcaaacattccttgctgagtttgtagcttaaaggcctgagaagcactggcaccttttctctatgatggtttgctagtcgccaacttctaggtctaaccccagccaaagatgacagcagaacaacataatttacactgtgatttatcttttttgctgagggggaaaaatgtaaaatgttctgaaaattcactgctgcctttgtggaaagtgtttcagcaaaggttcttgtatagagggaatagggaatttcaaaataaaaaattaagtatgttctgtgttttcattttagcttttttatggtgttatttgtggttggctgcaattgtgtatcatgtatatggaacttgtaaaaagttcttgacattcggattttagagacaaaaccacttttacctataaaaacctcacttttagtgtgggttatttcagctacattgagctctaggatactaaatacactaatagtttgcatgtaatgtgttcatttgagagaggcacttttctgtacataaaatgggccgacgcacagtaccttgccacagtcaccttttttctttgtacccctctttcagtgcaggtggataggtcacactgcacttgagtgctaaccagatgtctgtactaaggttatgtgtactcagcctgggcactttctgataactgtaaaatgttttataagatcatgaatactgaaaattttaaattttggagaattttaaatgttcttgagcagcttaactacttttgtatctagcctttttttttaagtatcttgttacattttacttttttaaataaattacagaag

SEQ ID NO: 23150 - DNA, 1143 bp, Mus musculus
tttctgctttcgaggcaagtattctcccaattgacctgaggtcccaacgtgtttttatttgaataacagacaataatatttaacatacagaaggtggaaagatggcccagcagttcagatcaccttgctcctcttccagagaaccaggattcaattcccagtagccccatggctcacaactgtttgtatctctagtctcaggggaatctgctgccttgttctagcctctgctgtgccttgaatacatgtccaaagacatacatgcaagcaaaacacccatacacataaaacaataataaataagttagaaagcaaaaaataaatgagtaaagaaattagcaaataggtaaataaaggtagagaaaagatgtaatgcacagaaggtctgtgtgttttagctttacctttaatagttattaaagtacacctttaatattgttatgcacacacatttaaacatgaatgctgttctgttttccttttacctcgaatttcagagaactatttcattttaaaaatgagctcaagagtctgattcctcatcattttgttcttaggaaaacagaaagcgccatggctctagtagaagtgtagtggatatggatttagaggacacagatgatggtgatgacaacgctcccttgttttaccaacctgggaagagaggattttatactccgagacctggcaaaaacacagaagcaaggctgaattgtttcagaaacatcggcaggtaaactaactgttcttactacttggatctggggacatggggttctggggattgaacccagggctttgtccgtgctaatcatgctctctactactgagctactcctctagccgcaagctttctgtgtaggccaggctgggctcaagtttgtgatcttcctgctagcctcgcagggctgtggaatcaaaggtgtgtcatcacttggctaaaaatatattattatcttttaaattggatatgtacactattttatattaggcagaaataaggcttggagaatttctcaaaatattgtatatatatatatatatgtgtgtgtgtttatgtatgtgggactagttgtgtaattagttttgaatttaaattatatttctgttcttatttttaggattcttggactatgtctgttg

SEQ ID NO: 23151 - DNA, 1649 bp, Mus musculus
agctcagctgcttctccttctagcaagtgaagattctctgagggcgagagtcgacgaggccatggaactcattattgctcatggacggtaatgtggatggtggaaatgacatttcagtctagacagcagctacattattcccagacccagcggctttcactatgtcctaacaagtatgacacggctggaggtagtccaatgactaggagtgtttgtcgctctcccagaggccttaggttcggttcctaagacccagacagaggctaacagccatctgctcctccagtcccagaagatctcaccccttcttctaagccttggcactacacaaaaatctctataaatacaaagtactttctttacatttctaaagtggtgtcttcaaatacataagtgcaatagctgaattttttatgcttattaggttataggaggtatttggtatttagaattgttctgttcacaagacaaagctagcctctcacccctaacctcctgcctctgagtcatgaatgataggacttgaaagactctggcttggaaacattttatttggaagaagtgtatgggaagttagacctcagattcctccattgggagtacccatggcaggagactacagtacgctcaaagaactttggggaaatctcctaacttcttttgttaaatacaacatttcttttagggctccaaatccacctcaaaactttgtacaagtgttttctttcccttctgcaaagtatatttgtttgaatatgaaatctaaaaatatcaaatagtccttctgctcacagtgacatcaggaagatctgctgtgcttagatggcctctgttttgggctaactctttcaaccagcttaaagcctggattactttaaatgaaaatttctatggtactgtgaaccttgtacattctagatgtcttggtcatgttctattgctgtgaagagacaccacagtcaaggcaactcttacaaagggaagcatttagttggggccggtgtatagtttcaaaggtttagtttattattatcgtggcaaaggagcgtggcagactggaaaagtagctgagagtttagtaccctgatctattggcagcagaaagggagagagctactaagcttggcatgagcttttgaaacctcaaagctcacttccagtgacacactgtctggacaaggtcatacctccttatccttctaagacttcttaaatagtgccactccctgatgacaaaacattcaaatatattatgagcctatggaggctgatcttattcaaaccactgtactagataccagcacagtgttaacatccctagccccaggtaacgagtcttcccaatcatcattttggatagggaacaggataggtacagttgtagaagtagtatacacacttgggcctgatagcagaattaaagagccgctgcttgctgtgtgctagtcttagcatcccataaagactactatgtatgttatcttatatcagggagcctttgccatgtcttgaattgtatgtgtagctaatggaatttggggggagggttgtttgtattttgattttttttttgtttgttttatttttgaaacagtgtccttgccagtgtagcacaagaactagccttgagtttcctggggaatgcaggc

SEQ ID NO: 23152 - DNA, 1178 bp, Mus musculus
gtaatagtgcttgctgtgagattaggaggactctagttcaaatccccagcaaattaaaaactgggcatggcttacatgtgcttataacctgtgttgtggagtgacaagttgcagtgagagagcctgtatcaaaaggcatggtgatagacatctgtgatgcgtgcacttagacacacgcacacgcgcacacacacacacacacacacacacacacacacacacacacacacacacacacacacacacaggacatactgcacacaccccagagcctgtatcaaaaggcatggtgatagacatctgtgatgcgtgcacttagacatacacacatacacacacacacacacacacacacacacacacacacacacacacacacacacacacgacatactgcacacaccccagagaaagagaaaggccctggcagcacagaggattttgagcagccatgttttcttgtgtttttctctttttagcattgactgaaatataacatttttcatcatgtacttttctcaatgtgttgtatttcatcttttcttctaggtttaatgcaaagattgaggaacagaggtgaaagagaccgggagagagagagagaacgggaaatgaggaggagcagtggcttgcgtgcaggatctcgaagagacagggataggtatgatggattttaggtgttactgaataccaacattttaggcaagttggataaggctttttgtaaatcaatgtacgatttgttgtttggacaaatgcatgggaactgtagtctgtaacttttccaggacatttgaaattactctgcctttttatttatttactaacgtttgacattttgttgcagctattgcttcactattttaattaagtctttaattgtggcaaactgtattacttttaattttctcttgttggaatgggttacacttatttttgtttaaatagtcttttggagtttggtcctgctccattagaattaaattatatcttacatgtagattcttagagacaaacctagataatctgtatttctcaaacattttgtatttaaatgtcataccatcctgatgtcatggttgtcaccatctgtatgcattgtggttttctagtgatgaaggtgtgctgataatggagtcatacacctttcttcctttcacagagacttcaggagacag

SEQ ID NO: 23153 - DNA, 1113 bp, Mus musculus
aaattctagaggggatccaagagacattgacctgaggagaggaagtgaaatacagtgggagttgaagctccaaggcctcctgatgctgtggatgtggatggcaccatcagtcatacacacaggagcgatcagcatagcaagcttctttcattaaataagacatgggttgaaatgtcttgtcttctcttctcttctcttctcttctcttctcttctcttctcttctcttctcttctcttctctttcctttttcttttctgacagggtttctctgtcctggaactcactttgtagaccaggctggccttgaacccagaaatccgtctgtctctgtctcctgagtgctgggattaaaggtgtgcgccaccacgcccggttggtttgaaatacttaagagagcaaaatattaaaaaaccaggaaaggtactatcaaaaagtttgattttaaggagttgattaattgctttcttctctctttatttcaatttttcccaggcctcagtgcagtttcatgggcatggttatctcccatgacatgctgctgggacgctggcgcctgtctttagaactgttcggcagagtattcatggaagatgttggtgcagagcctggatcggtgtgtactttgtgcactttaattgtattctgcatgctaagaacaagttttattgaataattgttttgcttcttttttcttgttttgtttttgtttttaaagattttaactgaattgggtggttttgaggtaaaagaatcaaagttccgtagagagatggaaaaactgagaaaccagcaatcaagagatttatcactagaggtaaaggtatttagattttctctatctctagtatgccatgccacacttaaacattcagaataataataaatattgcttagggatagatacatgtttataattaaaattttaaagaaattataattacagaatttagagcagtaattttttttaaaagagagtttttggttggaaatgattcagttggtgatgtgcttaaggacctgagttcagatctcagcacccacataagacgccaagtgcggtggcatggtggggagatacagacaggattcttgctccttggttagccagcct

SEQ ID NO: 23154 - DNA, 1199 bp, Mus musculus
aattggttaaggagaatcttgtattaaaattattgagaatatgtaggacctgaagcaccagagatagtattataaatacttgctttgagatattctgaggcgcttctggcgttcacactggagtatggtcttcaggtccccaagcgcagattgcactttgattggggaaagctctggaaagggagcactgttaactacctggggttcctgtggatcgctgtgaagttgaaaatcttttttctccccttaatatataactttttattcaaacctaatactgtataggttcttccaactaaaatgtcttatgctgccaatctaaaaaatgtaatgaacatgcaaaaccggcagaagaaagaaggggaagaacagagcctgctggccgaagaagctgacagttcaaagccaggtccatccgctcctgatgttgctgcccagttgaaaagcagtttactagcagagataggactcacggaaagtgaagggcccccccttacatctttcaggtactcctacatggagcaatactcttggggctctttttctttttcaaatgtgatctgtccccccctgccctctgctctctgctctgctctgctctgctctctgctctctgctctctgctctctgctctctgctctgctctgctctgctctgctctgctctgctctgctctctgctctctgctctgctctgctctgctctctgctctgctctgctctgctctgctctgctccctctgctctctgctctgctctgctctgctctgctctgctctctgctctgctctgctccctctgctctctgctctgctctgctctctgctctgctctgctttgctctgctctctctgctctctgctctgctctgctctgctctgctctctgctctgctctgctctgctctgctccctctgctctctgctctgctctgctctgctctgctctatttattatgtaagtacactatagctctcttcagacacaccataagaggatgtcagatcttactatggatggttgtgagccaccatgtggttgctgagatttgaactcaggacctctggaagagcagtcagtgctcttaaccactgagccatctctccagccctcttggtactcttattatacttttacgatcatttttatttagagatttcataatttgtaaatttgtatattgatattataatttattgt

SEQ ID NO: 23155 - DNA, 1395 bp, Mus musculus
tattggttacagcatttattctttcatttttattattatacgataaataatgaaataatgcattcaattattttgtattgtcacttaaaaaaaaacaaaaaaccaaaaccaccaaaagctaggtgtggtgtccctggcctgtaatctcagcattgaggtacgcagaggcaggtcaccctggtcttcatggagagttctaggacagccaaggacgtcacacagtgagaccctgtttccaaaacaaaccctacaaaatgccaaaagtttggattactaactcatgcattcatgcgtgtttgtgtgcatgagtgcttgtgtgtgtgtgtgtatgcatgcactgcaggggtcaaacacaggcccagggttttgtacatgctgtgcaagagctctatcacagaatttcctctccagcccttaacttgctttctagtatattaatatttaatagagattccaagcattttagattgaagaggttaacatttctaccctttctaattactttttttttttaatgtttaggtgctactttgaatgataaggatgacgactctcttcctgcagaaactggccaaaaccatccatttttccgacgttcagactctatgacattccttggatgtatacctccaaatccatttgaagtgcctttggctgaagccatacccttggctgatcagccacatttgttgcaggtgaactaaacagatctaatgctctttcatagttgattttgaaatgttcaatctaactgtaatgtgtcttgttaaaattccagccaaatgctagaaaggaagatctttttggtcgcccaagtcagggtctttattcctcatctgccggaagtgggaaatgcatagtagaggttacaatggacagaaattgtctcgaggtaagatagtcaaagtttataatatatttcttaattagcagttttcctcgcatccagatatgaggagatgtattaagtgcagagtatgtaccccgcagtagaagtgtcagaagcccctttctttcagcagactggagctgttacttttactggtttttagtgtcaactcatttcacacatcagagggttactaatacatgctgcttaaaatttaggtttctaaataagaatacttctatacagacatttgtaattttagcttcaagttttttcccttgatgtgctgttacttgaatgaagaataaaattacttaaaagaggcagcgttaacaatgacacacacctaaataattcattctgtctctggggtactgcctcatgctttataaccaagaaaacactaagaaataaagcttgacgagattatgagtttcaagtgggaatttcagttatcatagctagttatacgagagatttagattttggaaagtcatgttattttt

SEQ ID NO: 23156 - DNA, 1146 bp, Mus musculus
gcagcagacaccctgaatgtaggtctttcagtcataatcagtgttatttttaaagatcatttataaatgttctgttttctctttttaagacttacttattttcatgtttgagtgctttgtacacgcagtatccaaggaggccataaagggtgtctgatccccatggaaatggagctatggggtggttgactgccaccacgttatgtgctgggaactcacctgggtcctctgcaagaatatcaagtgctcttaactgatgagcatcagttaaggtcactccagtccagtcatcaattctaaattttacatatttatgaaatttcatacttgtggtttttataaatattttcatttgtttttgctcctatagacgtgctacattgctgagcgcccgccagggaatgatgtctgctcgaggagactttctcaattatgctctgtctttaatgagatctcataatgatgagcattctgatgttcttccagtattggatgtgtgctcattgaaacatgtggcatatgttttccaagcccttatatactggattaaagcaatgaatcagcagacaacattagacactcctcaactggaacgcaaaaggtatatccatattttggggttttgtttgagaactcctgtgtggtatctgagtaaatggtcacagtttggataaggagatgagcactgcaaaagagaacaaagattgttcatgtcgaaaagtgggcttatcctctagcaactgctcacttaaaaggagaaaccaaaatctaattaaacctattagttgagacatttgtgtttaagtattgttgtattgaggagggggggagtttgtgtggacactcagtatttcttttcggatggggaggttttgttaagtgctttttgttattgtaatgcattaagcagaccactttactatttccccttttctgaaactatacagcagtgtttggttccagatgagatgtctgatggcgcttgcctaaccacctgagttcaattaaattcagttcctgcagattgtcctctggcttccatggacaagctgtgacacacttccacaagcacacacactcaagttagatacccagtgacatctccagtgttcctctcacctgtgttctttttcataccacataagt

SEQ ID NO: 23157 - DNA, 1391 bp, Mus musculus
ggtgattcttatctttgaggtcttttgtcaggtgttgcttacacccattgcctttatctggtagacatcagtagtattcccagccctgtgttcttcacgactctccttgtaacagctaaaagtgtctgcacacattgccagatgcttgcttttgtagtggttatgaagtacagaattattcctggatgataatgtattaacttcttgtccaccttaacactctcttcccccaaacttatataggagaggtatacttttttgctcatgtacatattattagttgaccatttagatttgtataagcctatataatgtcactagcagttagcaactatataagctcatggtaattgtcctttctccttatagcaagttctgcaggtttgatttatattgatccttcaaatttacgccggagcggcaccatcagtacaagtgctgcagcggcagcagctgctttggaagctagcaatgccagcagctacttaacatctgcaagcagtttagccagggcttacagcattgtcatcagacaaatctcggacttgatgggccttatccctaagtataatcacctagtatactctcagattccagcagctgtgaaattgacttaccaagatgcagtcaacttacaggtatgatctactgaaaagttatttattgttttgcctatcaattaggagaatttcaatataaatggatattgcaaatgcttaagtattgacatactagtactatatcaaaattagctctgtttggatagttttgactattttagtttgatcttcatagaactatgtagaagaaaagcttattcctacgtggaactggatggtcagtgttatggattctactgaagctcaattacgttatggttctgcactagcatctgctggtgacccaggacacccaaatcatccccttcatgcctctcagaattcagctcgaagagagaggatgactgcacgggaagaggccagtctaagaacgcttgaaggcagacggtatgcagtcctccatatgcattcatgtataggaacagaaagcccctaaagcctaggctagaggtttttaattgctgtacatctgacctcatcttaatggcaaagaagaaggtaactgtctcatcttacttggtaggcagttgaagcaaactagtctatgtcatcctaggaatctatactgaaaactgttgtcagctttgtgtcctgctcctcctctgcctcccttcatacagcaggcacatgttctctgaaagacttggttttgactaaggctggacaggaatgcaagggtcaagtgtgctatcacttttaggtcggcaccacacatgtgtgcacaggcactatcttgtttaatcataaaatgcatttatgtatttgtatatg

SEQ ID NO: 23158 - DNA, 1219 bp, Mus musculus
agtgcaggtgacaaactttggtgggaagagcagtcacttagaagtcagtcttgatcgtgttagtttgaaactaccctgtgttccagccaacttgtcgacattagttatactcatttgtggctgtatatattacagtgatgtcagcaagcttccatttattgagtgccaggaaattggacacataaacttgttttttacctaaagactaagactaaagatagttttactgttggccttttttttaatagtttaatgcaatgtatttgaaagtatagaaaattcagcccttccccatttcccagaacagttttatacttctaattttgaagcctgtttttagatactaattacaaactatgtgatatgctgatggaaattttcataatgaattgtcattagtaaatgattttaaaacagcataatacaaatttagaaacccttattttagagagctttaaaattttagtttactaattctatggacaaaactggtagagacaggtttattatgtgctgtgatgatctataaataaaattgtgggttcaggttgaggtggtggaaggcgtggctggagaggaggatcatcatgatgaacaggaagagcacggggaagagaatgctgaggctgagggacatcacgatgagcatgatgaagacggtacgtgggagtgggaggagtcaggtgcctggagagcagcctcgtttgctctgcagtaaccgaattcttttcttctgaatttctctgtagtatttttacagtttaggaagtaagtcaacatacatcaaataattgtatttgctaaaggaacttgtttgtgtgagtcagggtgttgtgtaccccaggtctccctcagactcactgtggaggtgagcatggccttaggcttctcacccttctgcttccacttcccaactgctgggactagaggtgtgcatgactatgccaagatccagtcagagctacacgcacgcacacgcacacgcatcgagcaagcactctaccagctgaactacatctctagcccaccttcttttctttcattctaatggggaaatggttgatggctcagtgggtaaggacatcattgtccagcctgtgacctgagttcattattattcatttacttatcatttacttatgtgtgtgtaagtgtttgtgaacataagtatgcatttgcgtgtgaggtcaacaacaatgtagtattttgtctccctcgc

SEQ ID NO: 23159 - DNA, 1281 bp, Mus musculus
aaggagaggactgccacctgcacggtgctctctcacctccaaacgcacacatgtacatacgtcatatatgtgtgtatacacattcacacatatatacataaatcacacacatacatatatacacacacaaaaacattttaaacattttattgggaactattaatatttaaaagtattagactacgttaaccatcatatgaactatctcagcattaatagaatgattgccatttttaaagcttttagatactctgctaggcaccttagtaaaagaactccaaaacaagtacacacccggacgccgggaagaagcaattgccgtgacaatgaggtttctacgatctgtggcaagagtgtttgtcattcttagtgtggaaatggcttcgtccaaaaagaaaaagtaaggcatttcaaaaccttttgcacacatttgtagtgtgataatgttagtatgtgtatgagaagaatcattagaggtttttatttttttcctgctatagcaactttattccacagccaattggaaaatgcaaacgtgtgtttcaagcactgcttccttatgctgtagaagaattgtgtaatgtggcagagtctctgattgttcctgtcagaatggggattgcccggccgacagcaccgtttactctggccagtactagcatagatgccatgcagggcagtgaagaattattttcagtagaaccattaccaccacggccgtcatcagatcaggcaagcaggtatgttaatgttttgtatggaaatggtttatctggcttattaaagctgtgctttggagtagcagttgaaatgattttcacaattctaattttgtcacctaatgtaagtataatattttagtacttatctgcccaccatggattaaaactaaatattaacaacagaaagcttacaaacttttggaattggaacacctctctactaaatgaaaaaatagccacgtagccaaatgtgttgcaagtcgttttatgttccacttcctttgctccaggaagtggctagtgctttcagctcccgcccggcttcccttgagtcctccgacagaaggcacacacacagttaattccttcactacttgccttcttggcacaattgctgggtgctgatatctcctgcctgaaaaagcccacccttaccgatttattattttcctgtctctacctgccctaacctagccctgacctcttgcctgtagtagtggccacaggccccagctccccctgagagctcacatggttgctgcgttcttcttccaaagca

SEQ ID NO: 23160 - DNA, 1226 bp, Mus musculus
gtctcctgacttacacacatactctgccacaagtgcacctctgtccttcactcgccctgcttcataggaagggtaaggccgtcttctcagcttcctcctggatgctgagtttcccttgtatttattaggtgtagtcaatactcgctgccagggcagggtgagccaggcatttcattttctgacagcatttacaggcctgtcagatatgacacatacaggaaacatgtgcttaccgtggttagagttggctcagtgcccatgtgaggaccatgtagggtatgttggagaccgggaaggacaacagaagtaactgtcccaggacattacagttaggttttataggaatttttctattgctttctgaactttgcaccattaaataatatttttttgtatgtagctgatagcagttaccctttcatttaaatatcaataagagttctctttagttttatcaagttataagtcttcattgcaatgtagatctgtaatttaaagtttttttgaacttttctgtgatttttttttttttttttaacagactcaagaggacttcaccaacagcttattgtgattgttgggagaaatgtaaatgtaaaacattgattgctggacagaagtctgctcgtcttgatctactttatcgcctgcttactgctacaaatctggtcaccctaccaaacagtaggcaagtagaatggttaggatagaaagaggtcagcacatgctggtgccaccccctttccttccctccctccccctccccctctccctctccccctctctccttccctcccttcctccccctccccatccccctctctcctcccctccctccctcacaacctgccctgtgttctaggggagagcaccttttgctgttcttagtacagaccgtggccaggcagacagtggagcactgtcagtataggcctccacgaatcagggaggatcgcaacaggaaaacagccagtcctgaaggtgagtgaagtatacaattctgctgatgtacaaagcattgaattctatttttgtctgacccattcttcctttttagattcagatatgcctgaccatgacttagagcccccaaggtttgcccagcttgccctagagcgcgtccttcaggactggaatgctttgagatctatgattatgtttgggtcacaagagaacaaagatccgtatgtatttgttaaaacatttaaaaatttttctcagtttct

SEQ ID NO: 23161 - DNA, 1093 bp, Mus musculus
tttcaggattccctttcccctcctttgacgtgagctgaaagtatgtaaacgtgtctgctggtttgttttgttgttgttgttttttttttttgtttgttttgtttttttacttttaacctttaaaattatccaaagaattaattttgatttgagccctacataaggatggaaaaacaaaaacaaaacaaaacaaaaaacaaatggccattcattcctcgattcagcttagcagctatgagaatgtggtctgcacagatggcaggctctgacccaggctgtctaactagtcctagtctgcctatgagtgaggtgaggttactttacatgtacttggtctatttggttttcgtccttttacattgtcaactgtgtgagcaccacacccacttcccaagcaccttggtattgatgagttatacacgtgattactctttctcaaaagtgaccttttcaattccaggacatttttgaatgtcggacttgtggtttactggagtcgctttgttgttgtacagaatgtgcaagggtttgtcataaagggcacgattgcaagtaagtcccacactgttctgaatttcataaactctcaggttttcattgcagtacaaagtacttatgccttgatttaggcataattcagaaagtgaagttttctacatttcagttcctacatatagaaatatgactggtttaaagagtattgttaagtacttgtagtgtgtgactagaatcgggttaatcttgttaaattagtctgattaatgctttaaagtatgtttacagagtagtttcatttgtattctactgccaaagttttaagtgcctccatccctctccctctgggcctcttttaatgtgttaagatgaataactggactctgccttacttattttttagattcagtaatctcatataataaggtcattctagctggctttgttagtttccacagacctaagcagtaaaactcaagcttaacatttgtagagtctcagtgttaccaacaggaacaccgggttataaatgtacatgtgtagatgctgtaggttatagaaaaatgggccatcagaatcctccacttggggtttttga

SEQ ID NO: 23162 - DNA, 1190 bp, Mus musculus
ttttcctcaccatgtgggttttggggattgatctcaggtggtctggcttggtagcaagtactttacccctgaaccttctcgtgggccctgaaatgtaactcttaaaacaacgaggtgctgaaaaatcagtctggaataaaatatacatcctttgcttaattggctgacagtattgctagagttgtaatttgaaagctggagtgcaccccagggcgtcaccaggcacggttgtgtatcacatgcaggcattctcgttcagctactcagcgtgttgactgcttttctactggctacaggttgaggtggtttggaatactgaaggcatttccctcgtgttctttactttgttctcgcttgcatactctcttcacagagtatagatgagttcatttgccaggccacttatgatcaatttctatttccttgaagataccattatattatagtggccatgaggcagttctcatgtatgtaatttttgacatatttggtgtttagtttcattgaagtgtttgccctcttttgcccgagaacagaagcaaaccttaatgcagcacattctcagatgtgactacgaggcctgccgacagtatctcgtgaatctggagcaagccgtggttttagagcagaacctgcagatgttacagacgttcatcagccacagatgtgatgggaaccggaacattttacatgcttgtgtatcagtttgctttccaaccagcaataaggaaactaaagaagaagagggtaagattcggaaccataacaaagcctttgcaagaactctaggaaaagaagactcttgtagagaaagaacttgtatcctttttactttatgtggtcttggaaggtctgacttttattatgtggtaaaaatatttctaagggttagatgtggaagcagataataagtttgatctgtgttgatcctaaatgtacttcactaattttataagtacaaataactttaaaaaccttcatattttacattacatgtacgtgtgtatgtctgtgggtggttatgtgtacattggtgagtgctaggtgtcggagaagtcccgattgatccctggatggagctggactttagagcaggcagctgtgagccacattgtgttgagaaccttactttagtcccctggaagagtagtgtgtattcttaattgctgggccatctctccaccccctta

SEQ ID NO: 23163 - DNA, 1691 bp, Mus musculus
tggcttcctaggctgctgacatatatggatgcagaaagtgttgggatggatcagtggtgtatttctgtaatgccatccctttggaggtggaggcagaaggacccagaattattcaaggctattattattcagctgcatggtgaagacctgtgtaggacacatgaaacctgaaaaagacctgtttatcagatattgctgcttaggcaatgaggacagaagataagaggtttatatgggtgaacctagttttgggtcagtaaatggcttaacacttgttgtgattagtggctgtgtgagttgtttctttcagttgtgatttgttgatataaacagcaaagttctgtgtcccgtgtccgccccccccccccccccccgttgacattacaatgtggtattcattgatatgtttacaaggatttaagtgtctttagtattgtcagttggaaaagcagaatttgcatgcttttatagaagccttttaaaatatttactaaaactgtatctatctcttatttctaggtgctgaaggtagatggtgcctatgtcgctgtaaagtttccaggaacatctactaacaccacctgtcagaacagctctggtccagacgccgacccttcctcgctcctgcaggactgcaggctgcttcgaattgatgagctgcaggtatgtacgcgagttgagagaatgtggtgatggactcattgaaagtgttacagcgagagcaaaattatgtgtgttgttttgcaggttgtcaaaacgggcggcaccccaaaagttcccgactgttttcagaggactcccaaaaagctttgtatacccgagaagactgaaatactagcagtaaatgtggattccaaaggtaagccttttatagttgtgtacagtttagatcttttgaaacatacgggactagggtacaattgtttgagatttgacagtgaaatgtggctggatgtttttacaactggtgtgggagaggttaaagtttgttaaatgcttgaactgtggaagactttgttatttttcttttcatttctgtgcctttgaaaggtgtccatgctgttctgaagactggaagctgggttcggtactgtgtctttgatcttgccacagggaaggctgaacaagagaataatttcccaacaagcagtgttgcttttcttggtcaggatgagaggagtgtcgctatcttcactgctgggcaggtaagaagctcagcttatctttttgttttttgttgttcattttttaaagagcagatacaaactggcacttttgtgcccgttagggtttgcctactagagaatcaatgaaggctttataatacttagcaccttctgaaagcttgttatttctaacatagcattaggtaattttaaaataagtacactttttgtaaaatccatcttggtttactctcacccctttgtctccccctactccccctcccctttttggggaggggggatgataagggtcccaagcttaggcagaacttgaactgttctatcttgtccttccaagtactggaatcggggcattcttgctcacactaggcttgtgtaaccatctgtgacttggaacaagcattatttattatctttcacctattgtaggaatctcctattgttcttcgagatggaaatggtactatctacccaatggccaaggattgcatgggaggaatacgg

SEQ ID NO: 23164 - DNA, 1135 bp, Mus musculus
ctttactgaggcatttcttctatcttatccttgtgaatgctgggatacaggctgagctgcatgccagactcctttaaaagattacattgtccattgaaggctaagggaaacatccctagagatgcctatggagcatcagaattaaggagaaaaagttacagatgacgtggagcagagaaaagtgtagttgttttcttctcttgtgcttaatttccctttggtagaatgactgacactgtctctgtgaattcagtgattcattcctagcagacaggctgacggcactgctcgttagttataggaatattggatggagaagggtacagtacatccttgttgcttttgagtttgtgttagaaaacacagcaagtctactttcctgcacgtttgaactgattctcgttctatctgtcatcctgaccgattttctttgtttgctaggtgtgcttgagaaataaccctctctaccatgctggagcggttgccttttcaattagtgctggcattcctaaagttggtgtcttgatggagtcagtatggaatatgaatgatagctgtagatttcaacttcggtctccagagagcctgaagagcatggaaaaagccagcaaaactcttgagacaaagtgagtactgggacctctgttagcacctcagctctttatatggtggacatgatcatcaaaaatttgataaagaattggggaacttgctgaaatattttttgtttattgtacgttacagtttctttaaaacatttgattttatgtatatgtgtgttttgcttgctgtgtgtgctggaagccaaccctagtcctttggaagagcagtaagtgctcttaacggccgagcctcttctgaaggcattgttacagttcctgatggtggtcagaatggttctcttttgatgtcttactctattttgtttgtttgttttcattagcctgtgagttttgcagtgttaatctagttcctgagactgttcatcctctgcaggaaagttgttagtgtaacctgataaaagtgtgctaccaccatcgtaagatggaagagtgtgttctttttgctaaattatgagtacattataccattttacacatggaaactcgtgtttccaccatatatatatatatat

SEQ ID NO: 23165 - DNA, 1059 bp, Mus musculus
ttcatggtatggctgtagcctggaatcacacgtcaggtgatcagtgtgactttaaggcgattgattggattctgttaagtattcttagaggagcacatggttggagccttcggaatggttgggaataaagtgtggtagctttttgtctttgatgtacatgagtatatgagtgcctgcatatgtgtcagtggtgatcacaggagggtgttggatctcttagaactggatttaaggacgttgtgaggctccatggggtgctgggagctgaacctgggtcctctgtaagagaaggaagtgcttttaatcactgagcagtctctccaacccccaggtaaagtgtctgaaggattttatttttgttgtattgaactccaagcattttagacctggagtcgttagaatatacattattccttgctctagtgttgaccacagctcttacttaagcctctcctatcatcttccttaggttgctacatgggtggatgaaacattaagttctgtggcttctaagttagaacacacagcacagacttactctgaacttcaaggagaacggatagtttctttacattgctgtgccctttatacctgtgcccagctggagaataatttgtattggtggtaagtgtctttcacaaaatattgttgctacatagaaagcagctttgaagaaaaaatgccatcgtgaggtcattgaagacagtgctgtgtagacacaggaaggagtttccctttaaagccgttgcattgaaaaactaagaatacatttatgcaaacactgtatgcttagcaatcatgttattaagtttcatgacagcacagagtagaataaattatacagactcctatctacagataactatggctagtatttgcaggtagtttttatccttttcttcaacatatacatatgtagtatgttattacataattgtaaattatgggatatgtaatttacaatttcattgcatgaattttcctcaatagtgttgtatgtatgtatgtatgtatgtatgtatgtatgtatgtatgttagttaaataaggctctaaagtt

SEQ ID NO: 23166 - DNA, 1857 bp, Mus musculus
tattatttcaagtgaattcatatttattacaaaatttagacagcttttttaaaggtttatagctaatgtacaagaatgagactcaaaatgactttaaagaataaatggtttaaaatttttaattttaaaaattattaaatatttagaagccgctggagttctggcgtggggggaagtggaggaggctcctctggtcggtcgtctgctggagctcgtgattcccggcgacagactcgagtcattcggactggccgggatcgggggtctggactcctgggcagtcagccccagccagttattccagcatctgtcattcctgaggagctgatatcacaggtgtgtgctttgagaaccttagggtggatggagggggaggccgggctgagccaagggctcgctcatctagtgactcctaagggttgaaaatgtggtttgtttaccaacttagaagacttcaggaaataagagaaaattagcatagcactatcctctgtttattttaggcacaagttgttctacaaggcaaatcgagaagtgtcattattcgagaacttcagagaacaaatcttgatgtcaaccttgctgtaaataacttactgagccgggatgatgaggatggagatgacggtgatgacacagccagtgaatcttacctgccgggaggtcagtgctttgctctccctgctcctgcttgggtgatccttcgactgagcttgggagtttatagttgatgataattgtcatttggaagctatacaggttgcttatagtgtcccatttgaggggaaatatttttactcagtggatttggtgtgatcctaattaagatatgacggcattgcatagatttatccctggctggcatgtaggatgttgttttttgataatatcattgctgaacattggtacttactgaattgcatttgttttcatctgtattttgtttcaatgacgtcattaagtatcatatcttaaaagaggttttgaatttaggaagtagtgcctgcagcagttatgcagactgttcgtccttaaggtctgtgtttctaatgctcagtttatttcttagatcttgggggacactcctccccctgccccaggtctgtggttttaatgtattttaatttccagagatcttttagcggtttatgattgcattatctgtagatgcttcatttattcatatatttatttgtttttctttgtagaagatcttatgtctcttcttgacgctgacattcactctgcccacccaagtgtcattattgatgctgatgccatgttttctgaggacattagctattttggttatccttcttttcgtcgttcatcactctctaggctaggctcatcacgaggtaattttgcatttatttcttcttgattgtgggctgactgtgtggagagctagtgataaacccacctgtatctgagcttagatcttacagtagggcgaagtcattacatagccgtgctttgggggcgcgggggggggggggactttggctttaaaactaggctttaaccttgtgtaacgcatagcaaaggcggtgatttaggaagtatgcttttacctatgagatagatattgaactaaaagtagaatgctagtttcagcaacatgcagcattcagaaaaatatacttcttaatttgattaaaacaatctaatcatgttcattttaagtagtgcgtagatagtggagtatgaaaacttaggagagagctgggcgtggtggcacacacctttaattcctgcactctggagacagaggcaggcggatttctgagttcgaggacagcctggtctacaaagtgagttccaggacagccagggctatacagagaaaccctgtct

SEQ ID NO: 23167 - DNA, 1186 bp, Mus musculus
tagggttcaggatgactggttttctagtagctgagttagcgatggcttggctgagcaagtgtgctggagagaagaactgggacaagatgaaggaggcttggattagaggttccccctgaggagacaggattaggaacgttgtatgcgagcaacaatcatgcaaacaaagcccactcactctccatgagcccaggactcaggcatagggatggagggctactgagtagctgcggctttctgtcgccaaggagtctggctgtttcagcgtcctcagagtcctaccagatttcagggtctaaattgggccatatttggcttggcaaccagtttaagctagtgtgagcagatttgaagttcagtagagcatgcaatataaggatgaaaagttgaagtttacaatattgatatagtagctactattgaacatttaaatgactgactctttccaagatacattacaagaatcacctctaatcgttctgtaagcacctctaccagacaggtggttctattcccactgaccaggagaagaagctttctaaggtctgtaaggctataaagccagccaaagtcacagtgggcttggggcctggcgcaggcttgctttgtactgcagaatactcacttgtgctgtctgtctctcataagagcttggaacatttcaaagacaaaaagctgctacttgcctaaataaggaagccagcctgcagttctgagaagctgatagagtgagccttggtcaggtgaatggatggccttaatcccctgaacagtcagatttcattacaagtattttattgtggcttacggtttatgtcaaggataaaagtttttctatattataaagttgtctgttatgagactttatttctaagtagaattaaaactgggtctagaataattagaacacattatcttcagttggtggagactttgctgtgaatgaggctgcagggatgtagactggatcaggatatgggaaccttgcctgggagcaaggttcccatatcttttgaactagagctgtgacgtggtcttgtcctgttgacagggtttggttcccatgtagtttagtttattgtttaaaaataaagttaacttgagagtagtggcacaccttcagtgccagccagcactcatggggcagaagcacacggatctctgaatttgaggcctgtctggtcta

SEQ ID NO: 23168 - DNA, 1147 bp, Mus musculus
tttttagaggtatgcctgtacttgtaagtttttgttgacctttgtttcctctggaaatcctcttcctaaggtaccttcccacctcctgctggctgacagccaggccctcttctccatttgcatttgaaggaatctgagtgtctcccttcttctccgtttgcattttaaggattctaaatgttgtatttgtgtagtgtcttctggatgctttcctttctcttaaagctgccgggatttagatttggttagaaaggactttggggccctggatggttgtctgtcctctggaagagtagccagctgctgagccgtctttatctctacagcctcaattcagactttttttttttttttttttttttttaatatagaggctagtttaaataaacaatttacatgtaaggttatatgaattctgtgagaatttcataggtctcacaattagggctttaaagacaatcaatcccctgataatttctcttaatgtttaataacattttaagaaaagattgtgtgtgtgtgtgtgtgtgtgtctgtctgtctgtctgtctgtctgaatgtgatatcaaatcttagaattctcccctccatgtgatctaaaagtgttttttgtgaatcttaactgtctttggtgtgttaagaaatagttattttctttatgtgctctatgtaccagaattatactaaaggaagtctttcagcattagaagttcattgttaagaactctagtaggtaaagatttcaaagagcgtttggtataagtttcagacccattctgagtatataatataagtcttggggatttgagtaaagtttgcctgagtccagggaaaacctgtggcaatcctgctgtcttcttaaaggcaggttgattttgattgataaagatctgcctgagagctgtttgctgccatattatttcagtttaaagaatgcagtttgagctgcacatacggcacatactcctaaccccagcacttgggaatggaaggagtgcagagaatccaggaggtcagcgatctccttgacagctgagacactgcttttcaaaatgatcttgcaatacagatacttcacatttttaaataatttaactttaggtcaggtgggattgttcttgttgattactttaaaaaagatctgttt

SEQ ID NO: 23169 - DNA, 1099 bp, Mus musculus
tcgtcagaattattccacctaagtggaagctgccttgaaccgcctggtcaacctgcacctgcgggcctcctccacctacagatctctgggcttcatttttgatctggatgacgtggctctggagggcgtaggccacttctgtgaattggctgagaagagtgagggtacctagcggcttctcaagttgcagaaagatcgcgggatgggaggaggggcgtgcactcttcaggaagtgcagaagccggctcaaggtgaatggggtaaaacccaggaggcatggaagctgccttggccctggagaagaacctgaaccaggccttcttggatctgcatgccctgggctctgcccgcacagaccctcatctctgctacttcttggaaagccacttcctggatatgggggtgaagcgcatcaagaagatgggtaaccacctgaccaacctccgtaggctggcaggaccacaaccagcgcagactggcgcgccccagggatctctgagtgagtatctctctgagcgcctcactctcaagcacgactaggaggcctctgtgccttccaaggggctccccactctgctctgcaccagcccgccttgggacctccacctgaatgaatctctcaagccactagacagctttgtaaccgctctggagcctctctcaagtcttggaccaagttaaaataaagctttttgagacagaaaagaaaaaaaaataaataaaagacagggctaccggggatgattcgagtagagctactcccttaaaggaagggagatgaagggtcacatttagaggcagggatgtgacaacaagcagagattgaagcaataccagccaaagtttcgccaaccagaggtggagtctagcatccggtaaaagcaagaaaatgcaccccaccaccaagaatctgcaaaggaacccaggcctgtgggcttattgatttagaactcctaatgtctggaaatagaagaaaatgattagtgtcattttaagctaagtttgtggcattttgtaacagtaacaacagaaaatgaatacaaggcatcatttaagacacagtcacagtaaagcaaatacattcaaaactgaaaagaga

SEQ ID NO: 23170 - DNA, 1917 bp, Mus musculus
cagacaccggcggacacacacaggtgagaagaagtttgcctgtcccatgtgtgaccgtcggtttatgaggagcgaccatttaaccaagcatgcccgacgccacctatcagccaagaagctgccaaactggcaaatggaagttagcaagttaaatgacattgctctgcctccgacccctgcttccgcacagtgacggccagaagatggagacgcagaataaactttggtcagagtcaggagccagtgatggtgtcaagtgcttctgcaaggctgtggccctccaaaagggcctaaagtagaagccctggcctgggggaggccccgcctgggtgaaatgacaagaagtgcttcagccacaggcaggtcacagaggacagggctcagttcttaccacagagagagaggagaacccttttattcctcccttattttagtctggaaagtttcggctgaggtgagcgcagcacaggttttgaatcacatacacattggggactttgtttttgccatttatacttgagaccagctttgcagtgtgattctttcaaaggattggtttcaagaatatagaggctggaaattacggtacagaaatggagctagaaaatgagtttgtgttacacagagatgtcatcttctcctagagttatcttgtttcttattcctagtctttccagtcaaatccgtggatgtagctaagtatatctaaaactcatttttccactattgttggtatttgaagttgaacagctgtacattgctgtgggggagccaaaggattggaaccctcattaatttaattgcttggaaatgcagctaaaattcttctttggcattttgttttgaaagtttaggcattttactctactttagattttagtttgcttgcagttttttgtgtagatttgaaaattgtataccaatgtgttttctgtaggcttaaaatacactgcactttgtttagaaaaaaatctggagatgaaaatatgtattataaagaagagatgtcaagaatttgagataactccttgagaaagttggctttatgtcatcagcaaaggacacttaacgtcaagcatacactgtggtttttttgtttttttgtttttttttttcaaattagaaagtttaatgaccgttacagatggacagtgtctttttatttataggagtttttcaggatgtcagagtagataggtaggaaaattgttattagaacattcgcttctaccttgaaaaggatgttaatgtggtcatgttcttagcaccacagtgtctgggcatctgggaaactccgagacttttttaaagtgtcatgatgtgatcacacctgcagtttggggcatcgaatccagggccttgcatgtcttctgtaagagctctcatcgctgacctgtatcccccgcaagagcaatgacttttgctaacagtatttcttttctgttgtaaagtggacagatgatacacttggtcgcaaaggtaaattattcaaaatccacagtgaaaacctcaccacactttcccatttaaactatttccatatctcagaggtttctgacatgcaaacttgaacccttgaaagaagagttttcttaaaaattataaaaaatcacgagttacaatttgcacaatattttttgttgaactttataccttgtttacaataaagacttttctttggtatacacagtgagtctgttgtatgtgttaaaacccattctccatctcaccttcatactgacctcattcagatcagaacctgaggccagattgctttaagatgatgtaactgctatgaccaacaagagaaggctgacctgtcatctggagggacttgttcaagttgtactcactcagaccaggaagagatactctagatataacagataaactggtccttaagcagtgtgagaggcc

SEQ ID NO: 23171 - DNA, 1335 bp, Mus musculus
gagacaacttacaggggtcacttttcctaacttactctatgttcacaagtggaattcctgtcctccaagaggaaatgtgacttcactttggtgccaatggacagaagattctgcttgtgctacatagaagtgtgggatgcacttgaatagctggatcttacaccttgatttcaaggtggaaagaaattgatcatgaatctctaatttcaaatcaaaccagtaggtgcttaatatttttgatttgaatattgcccacttgaatatcatgggttctattaataataactaaggaccccagtccattgtcatctagttgtccttggacttttttccaaggtataatatggggttttatgcaaaattccaagctaccatatgcattgttgtggtccagaaatgccaaaacttaaagggtggcacaacttgagtccttggcttgactgtactggcttggtctttgtggcatatcagttgccatctgcataggagagtggttgtatgtaacacagcccaaaattgctaatctcacatgtgaatgataggtaaacttaagaatgtctgtattgtatttgaagactgtttgccataaatctaaagtcaaacctatgtatttcaatttggtatgcttaagaataattaatgtaaaatctttttatatgatattgtaatctcagttcaaatttaattgcaaatataaaacccaaatgatttctatatatagtgaattgaactgtaaaggtaacttgtgtgtgactctgaatacacagataaaatgtttttattcctcatgctttactttgatggcttctatcatgaaatagacgtgaaattttatgaattgattttgtgtatattgcccacgttctttcagaatctgttaaaagtaaagtgatctggggattgcctagcacaatgaagcttttaatgaatggatattcatgggaccgccttttaaaacctgggtgatgttgagtctattagttgtattagatgttgatgctatttagtttttttgttgttgtttttttttttttttttttttaaagaacataattactaaacagtttggcctgttgaaatgaaactccatcctcagttgttggttagtgggtggcacgataggaattccattcctagggttttcttcccagaatacggtaggtttaaacaatattgtttagagtagtttataggctaggatttaaaattagaggtagacgttcttcatcatgtctgcttctaaccttgcttctggcactgaactattctagcagaggccagacatctaacccttctagactgataatactatgcataggaactaatgggatctaa

SEQ ID NO: 23172 - DNA, 1184 bp, Mus musculus
caaatacaggtatgagatgcaagatgctggaattacttcagatgcaatgatgaaaaacttcttctttgcaccctcttgtattcagctgagccaagaagacagcttttccactgaagcttaaacaggcattaacgcttccttagatctgaagtcgcaggttaagcttgtctggtctacattccagtgtggggggaaaaaaaatcaatctttattctgttaatttcttggaaacaaattcatagtaatagctatttgggaccagacaaaatcagctttcatctataattcattgggggtaataggggatttagataatgtatccagagttaaacataccagtttgacccaccccttaagcgtttaaaataaaatatgcaacaaaatggatgacttagtggagatggaagcccattaactgggttccccatcaaatcgtttacatacaagtacacagtttttataaggattcctgttaaaagtcttgtaaagttgatgtctttcacccagatatatcacatgtgagtggaagaccagtgtgacttcattagatacgtttagtgtatttaggatgtgtaaatttgtgcttttgaactgtagtttaataaatgtaaaattgcatcatagtatttgttgtatttgacctaatgtaacccttgtatgattgcaataaaactttgtgtagatcttactgttttttcaggctaaaactttgggaatggggctagctagcaaaggtagttatgaactagttgtgtgtggtctgttttgagggttagtttctttataacccgtttaagtttggtttgcctcaatatactttttagttatttaattagtaatttaagtaaatgtgtttggtaatcattgtgaagttcagatttattatggagagttgatgtgcagtaagcatgatgtttaacaattttaacaccaaaaatatgttaatcctgcataaaccaattgtaataataataggtgtttctgtatagataggatgcatagattaccttagtaaatctttgaatcacaaatcttttgactgatagaaaagattttattaaacactgaaaacttggtgggaagggggtaagagactgcagaggactgcagaaccctaaccttaaagaagggctatgtctgtctgtttccagcatcctgatgccccttccttcgcacagacattt

SEQ ID NO: 23173 - DNA, 1261 bp, Mus musculus
accaggtatccgtaaaagaccttgtaagcagctgactgctgtttgtggtttttctgcaggctcccatggatatccctggcctaaacctgagtcagcaggaatactacccctatgtgtattacaagattgattgcaacttgctggaattcaagtaaactgagctcctcccagtcaatcctggccttgtgttggtgttgctcacacaagtaactctcataactctcacgccctctgcttgctccttccccttcccctagatgaatttctcatgtggtccatatctcaacatttgctttttaaagaaaaatatatatattgtttctttttattgatcaggtctgtaaatgtgtactgaaaaaaatcagagtttatttataaatagaatagtttatttaaagaggtattttcctccttgatatcatggtatgcataattctgtgtgttactgttgtgcacagccttgtttacagggaatggtctaagcataccatttcattcactgtattagtagacataactgttgagtagttactaagttgtgatgtagtgctatgtgacaacgttcaggtgtgtgcttttggaatgctctgactatcttgtcagcactgttgaccccacaggacagaataaaagaacctgtgcccactgtgctgtgtgtgacttgagaggctccaggggccgccgcctcctgggctgcttcaggggctgctgctgccgagctctgagcactcctgtctgactcgcataggatttagttgtgccaaatttgggtcagagcgcaaatcagaaggttatttttccaacacatggtgatatttatatttggacactgggcgtttagctctcttaaataagaagtgggaccagttttgaataaagtgtagcaaaactatgcagtgctagtcatttattttgtctaagtctttacgtttgtttttttgatgttgataatcataaaggcctcacttttactttgcctttctggtacagtccctgaagtgaacaacttgacgtaaaatttaggaagaactcagggtggagttgaggtaacactgtactcctgtaagtcacacagctttgtgagtggagaactagtctgcactgccttatccgttagaaaatcagccgtcagcagctttgctatttgggattttgcattttgtttcataagtaattatctactagtaacatacaaatgtctacaaagcagaacatgtgagagatacccctgccttgctaatttctaccctcaggaggtttg

SEQ ID NO: 23174 - DNA, 1233 bp, Mus musculus
tcagtgtgagacagttgcgagacagttgctaccaagattgttttgttattttgcagtttaactctgctgcctgcctctctgctatgttcttcataaacttgagctatcatgaatgtccttatagatcatctaggcatcttgagtttaactctgaagataccccgagatccagagacagaaagtcacctatggaaggtgacacaggtggttaacgagtatttaggattcagttagaattaacgtactggcagcacattggctaagagtgtgtaaagcagccctgtgttctgtgttcttggcctcattagccatctttcctagtttcactgctttcatttttgttcatcagaacagaatagaggtgtaaatccctcatccaggtttctgccagtcctaacagtggcagctctgtctagggtggctgaggagggctgacccttgaaggaacctacttttcatttctctgaggactaacacagcagttagcagggttgttttagtcgtcattaaacgccagaccctcaaaagtgttgttgatccttctctgttactgtgtgagtttctctgagaattcaatagaaaaatgaaaggtgtgtgagtgcatcctgaagccgggcctgcggagggagcagactcatttcactgagcaggagaaacaaaaagactagagcgaggagtgtatttcctctgctcagaggtttacatggtgtgttctatgaaaatactcagttgtagcgtggacttcagagtatcaaactgaagaaataccacaggtcaggtttgtagtctttgcctctaaaggtttggtttccagatgtggaatttgaacattctgtgggaagattcctaacaagattgtactcaaaaggttgggacaacattgacatcctgttggtgctgtcatgtgactgctacgttttttcaacagtggctgccccatggcctgaagtcgttcttgtttctgaagtatttgttcccaggttgtctgtgcttctgcacactgttagaatagtaaacacagctgaggctttgatgtatgacctgtgaatttctgttgtttacaacttgaagagcaatttcatgtagttcccaatcctcttctgagatgtccctcctccatccttgttggatgcggcttttttgcttgtcttctggtttgagggattggttgtttgagggagttattttcagcaagaactgggtaaggagtcaagaggatagaccgaggtcaca

SEQ ID NO: 23175 - DNA, 1147 bp, Mus musculus
ccccaatatgtattttaaaagtgatgaactagactttgccaaaagtttcataggaatagtttcaatattttgtctttgtgcaactctgttcacgttccttacatttttaattgacgttagacgattcagatacccagagagaccaattatctattactctgtctgctacagcattgtctctctcatgtacttcgtggggtttttgctgggcaatagcacggcttgtaataaggcagacgagaagctggagctcggggacaccgttgtcctagggtcaaagaataaggcttgcagtgtggtatttatgtttctgtatttttttacaatggctggcaccgtgtggtgggtgattctcaccattacgtggttcttagctgccgggagaaaatggagttgcgaagctattgaacaaaaagcagtgtggttccatgccgttgcctggggggcgcccgggttcctgaccgtcatgctgctcgctatgaataaggttgaaggagacaacattagcggcgtttgcttcgttggcctgtatgacctggacgcctctcgctacttcgtccttctgcctctgtgcctctgcgtatttgttgggctgtctctcctcttagccggcatcatctccttgaatcatgtccgacaagtcatacagcatgatggccggaaccaagagaagctaaagaaattcatgattcgcatcggagtcttcagtggcctgtatcttgtgcccttagtgacacttctcggttgctatgtctatgagctagtgaacaggatcacctgggagatgacatggttctctgatcattgtcaccagtaccgcatcccgtgcccttaccaggtaggtgctagcattggaatatgccactctttaccttcatgttcctagaagtgcacttgtcatggtcataaaagtagactttagttaaggagagctatcagacacagggagtaagccccggtgtcgtagccaggctggggactggcccaggagtgctttcttcaagcagtagctctgttacaatacagcaagtctcctgtaaatatttcaaacattaaagtgaaaacaacaattaagtcggtgtatgaaaagcagactatgaagaataggcctcatcataagaaaagaaaaagtatctactgaattgga

SEQ ID NO: 23176 - DNA, 1366 bp, Mus musculus
attcattaaagtattttaagatatgctctttcactctttatataaatccaagatttttctttgctgaagtatttaaaacttttgtacctttatatgtagatatgaatttgaaaatatgcttatgtgtatttgaacttttgaaaatcctagagaattgaatcaaatatttttatgatgtttttctactattttagctactttgcgactgtgatagctgttacactggatttttaaaaaacttgtacagcagcctctttacagtaaaaagagtgggtgtcacactgaaaggtctgtaagaagtggtcacagccacccctaccttccccaaaaggaggaacttggtggcaggtccctccctgattggactgtccctttctttctgcatgttataaatcagcaggtaagatggtaggtttttacaagttaggccgagctgtcgattccccttttaagtgttgaattaggattgaattatggccatttgtagttgctcgtgcctgtctttattttagtattttatttcccgagacaggaactcactgtgtggtgctccttggctgtctggtgttcagtctgtcccaggcaggtcacagagatctccccctctgcagcccactcatctctcccaagccaccacactcagcttttatctgttttaaaaatttaaacttaaaaaaatgtttttggaatagtacaaacacattgtgttgtaaatttctttgatgctatgcaaaattcctatctgcatctaagcctgcaaaagaaaatgtgcgaagggcagagtcagagttgggcaggaagagtgtagtgcagcagatgcagcgtgaagacactgaaggtgctaagacagcgtctcagtgctggtcctccttaaggattatctcgccagcgaggttttcttagatactttgatcccattggagctctgttaaagtttaaaatgaaaattatcatgtactgtatgggaaatgtaaatactaacttttccacatatgtaaacttcagacacaaatttttttgtgtgttcttttcatcaataaaattttctttgtataaaagattgtattgtgtgctaggtatatagtactgacccagaaacagtgtagccgttttagattgataaaggcagaagtcagaagcttcctttcagcggaggtaggagaagacagtgaagaacttgcatattgtcagtttcttccccaagtgtagttttatagccatattgcctacagtgtgttggagcccatgggaggcctgctagattaggcgaagcaagccggagtccttggatctgctcccaacagtggatcagatcatttaaccaaacctcctcagtgaagcagtcttgctttccacatactaaaca

SEQ ID NO: 23177 - DNA, 1209 bp, Mus musculus
ataataaggtattatctaactctagcccattttgaatggggatatttttgttagaaagaagtctgttatagacgtgctttagttttaatccaactggaacatactaagtacagaaattggagaagtcatggatttctctgagaaatatctagcaccttttgccattccattgcttaattatttacagtgagattctggacgcagaccttgtattttggccataaacacttagtgtgtggttagggtgtataaaacctgaacttgcaggatccggtgaagcctttatttagcatgtgtggctacaaatcactcatcagaaatgctggctcatgtttcacagagatggaatgtttgatgtaagcttgttgaaaaactgaatagaaacaagcattctagtttcccttcatttttagatttatggttccagattccaaataattatttgtctgcattggttgctcaaattcaggttgaaatacaaattacatttgtctgtggccattactggtttgatttctaagtcattgtagatctccaggtaaaaggcctgctcccgaaggatgctagactaatactaactcttctgatgagcaactgtcagtactgttgcactagcctctattttttgtaaataaatcattataatcaaagctgtatttaaagggttctttgaaaataagcctatttttttatattttgcaaatggaattgtttttaaaataaaaaatgaaaagataatttatatttacaaaaatggtgtttgctataatatcctttacctttattttttaagtatgtttgtttattcagcaaaattgatacattttaaaatcacgatacactgtaacaaaaagcaagtttttcagcatttacaaattcctggcatataactctttgaaatttggggacaatgaatcaatatttccaggaattcttagaaatttcaaaattactattttaaacacagtcatgactatatctacactttatttgggtatctcaaatttttgttacagaataaaatacactgaatttagtgtaagttagttacttatatagtaagtaaatacaaagaactacagcctacaggaatatttaaacaatgagaaatataatttgcaattcagatctcccaggtaaataacttcagaatgttttataaattatgcatttcgtagttgcatggggttcaccttgatacttatgtct

SEQ ID NO: 23178 - DNA, 1146 bp, Mus musculus
ctctctctctctttctttctttttttctttctctttttttctttttttggctaataccattttgagtaataacacctttgttttgttgccttgactgttttaatttttctatatttgtctaatataaattttcttaaaaaattgttttgttttgtttttgttttttttgagggaaggtttcactgtgtaaccctggctggcctggaatgaatttgaagactagtctgtctttgaactcatagagatccagcagcctctgcagtttctcaagtgctgggattaaaggcatgtaccaccttacccaactaactttttgtttttaactttgaaaagctttgcatttcataactgtgcagtagttatcagaagcacttccatgttactaacacacacacacacacacacacacacacacacacacacacacacacacacatacacacacacacacacacatgcatgtatacatttgtttgcttatttatttatttattgaagggtctcatgtatcctgttgcaaaggttgcctgagggtaaccttgaacttctaatcctcctgcctctccttcctgagttcttgcacctagtgcatacagagttgggaatcaggctcagagctttttgcatcctagtccagaacttttcacaaatgagcttcttcactggtctcatgataccacgtttgttttttcctgtaggctgatagctttttactgagtgtctctgagtcttaactcgagccataaaattattgaacagaattcataaggaagggcctattccacttccctggtaacaactgagctataccctgcctttatttggcttggtataattgtaataatttgggtggcttaaaaccaacagaaatacatgaaaaataattacatttcagtctatttatttgcagatttctgcactgtagaaggttcaaaatcaaggcatgatacgttcattgtatggcctcagtcttactttctggttgtatgtgtgaggtattcttgatataatctcacatggcaccgatcttggtataggttctacccatatattccagtcatcaaatgctccaccttctattgtcaatgtgaaatactggcaggttacaatgatggaagagagtgaggtcatattatttgttgatag

SEQ ID NO: 23179 - DNA, 1624 bp, Mus musculus
gaccttagctgcccagttgtaccccctaaccaaagaaggggaggtgtctgtgtggaccccagatcaccaaaaagcctttaaagagattaaaaaggccctactgatggccagcctatgcctgacctaaccaagcctttcactctttatgtgaaagagagagcaggggtcaccagaggagtccttactcagactttgggactttaaaaaaggccagtgacttacctatccaagaagttacaccctgttgccagcgggtggttttcttgcctgaaagctattgctgccataatctgcttgtcaaggatgctgataagctcactatgggacagcaaataactgtagtgacatcccacattcttgaaagcattaccaacgctcctgtgacacatcagagctttttgttgtctaaatgagtgaccttcgcttcattccacctgctgtcccactgtgtgagactgcacctactcatcactgcgctgacattctggcagaagaaatgatctgaattatcagatcagccttggcctgagggtacgagctggtacactgatgacagtagccttgaggttaaaggtaagcagaaggcggggacagcagtatggtggtgaacagaaagcaagtgatctaggccagcagccttcctgagggacgtctgcccagaaagctgaacttgtgactttaagacaagctctataaatggcaaaagaaaagtctacactgacaacaggtatgcttttgccactgtacgggacaatatacaaagagggctgttgacgtctgcaaaaaaagacctaagatgctgtggctaaagaaaatcagatgacagatctaaccgccaagcaggtggctcaaggaacaatgatcctgagagtcaaggagtctaaagattattatgacatcagagagaccagctttagatacaccgctgagcactatcaagctatggacagtatttggcttggcctgggggccaagaaattcaaaggtgtggttaggtcctttgactactatgttacaggactctctgacttggcagaagaagtagtcaaaagcttcaaggcctgtgctataatgaggtagaatttctaaaagaaatcttcccaaggtaatggacctgcctttgttgcccaggtaaaccagagactggccaagatattagagatcggttaagagttacattgtacatgcaggccccaaagctcaggacaggtaaaaaaaaaaaattaatagaaccattaagggatccttaccaaattgacagcggagactggcgctatgattagatagctctcctaccctttatgctcttcagggatagaaacacccctggacagtttagactgacccccctataaattactctacagggggcccccctccactggtaaaaatagcctttgtacgtagtgctgacatgctgctttcccagcctttgttctctaggctcaaggtgctccagtgagtgagacagcgagcaaaaagcagctccagaaggcctactcacgagaagaagacctgctacattagatgtctccacgcagaaaaccttaagactccggtggaaaggcccttatcttgtactcttgacagccctactttctacctttatgggaccccttttgat

SEQ ID NO: 23180 - DNA, 1322 bp, Mus musculus
agcttctcaagttctatggtaagggaacagatggctgcttttcctacaaaaatctctgtgcttgtgattattagattcatcaggtgacaaggtgctcctctcttgaaattacagctagaaaaattaagaattttgtttggtttaaatgagcaaatgtatacggccatttcatttttgtttctaaatagtttcaaaagtataaatatgttttatatgtcttggttatagattagtggctcataagttattggttatgattaaaaatttgtaacattggtaacaaaaagttgacttaaaactggtaactctgggttagagtaattcagaacatgtggcatgagccaacccatgggaacaggtctctaaagatacgcctgaattgggtaatattctgtgtaattcttatcctagaaatctgatttataaaagataagatttagggtagtgtctttgagatatattggcggctacaccttcttgtgtttgtgtgcaggaacagacagccaaactttgtagcaagtaatgtttttagagttcatttttaaagaaaatagattgttttcactgttaaaattgggttttgcttctcaaaattgtagttgtactctcatgttacaagaaaaattaaaagcttctcccgaaccggagccaccagctaaatcggctcctccaaaatctataaagcctcctgagtggcctagtccacaacctttccccttatccacagcctcaacccccgccgatgggaaccctgaacccctcagggtgacaagaggaggaccgctgcgggtacatgaaactgcaaaacacagagtcctggcggtctctggtagacccgcccaaacttttaacccttcagtactggtcattttcctctgctggtatttataactggaaaattaaccaccccctttctcaggatccccaacgcctcacagggttggtggagttccttatgttctctcatcagcctacttgagacgactgtgaacagcggttacagatgctcttaacaaccgaagagcgagagaaaattctgttagaggctagaaaaatagcccggaagccaacggcggtctacacaactacaaaatgagatcgacatgggattccctttgactcgccccagttgaaactgcaacattgctaaaggtagggagagcttaaatctatcgccaggctccgatctccaaggtgtctcaaaacaggcccactaatttggctaaggtaagaggtaatgcaggggccaattgaacctccctcaatgttccttgaaaggcttatggaagccttcaggcggttcactccctttgatcttacct

SEQ ID NO: 23181 - DNA, 1176 bp, Mus musculus
gggccaagtttaaaagaagaatattactatatagagcagaggcatctaaccttttggcttttctgggtcaatctagaaaaagaagaatcatcttagaactggagcaatggatcagaagctaagagcatgagctactttcgcaagttatatgcagataaaatactcatgtgcataaaataaaatgcaaataaaatttttggtaaaaataaagattaaatagttgttttcagtcactcactaaatacacaaacgcttatgaagcagatgaacaaaaataatgtctgtgtatatttttcataatattttctagcacagaaaaaagcaagagttctcacaaaatgatactaattatgtattgctctattcagagtgtatgaaatacagtagccaggtatgatagtgcatgcctataatcccagcattctggaagcagaggctggtggatctctgtgagtttgaggtcagcctggtctacatatagtgtgtttcaggatagccatggctatttagaaataccctgtctcaaaaggcaaaatcaaacaagaatgtaagacaaggtctaatgtaaccctgcctcccctggaacccattatgtaggatgaccctggacttctcccgctgcttcctcctgagtgctggggttataaatgtccactatcatacttggtttatgcagtgcacatcaaaccttgggttgtaacttactatgttagacaggactttaccagctgaactctatggcatgttcagagtgtgtatatgtgttcatatgtgtaaggctgtgtgcaggcctggaatcctccttgagtcttgacttcaagtccatcaaacttaatttttgaggcaggatctctcattgagacctgggacttgatatctgggctagactgtccagtgagtcctggggatcctcttgttttttctacctctcaagtgttgggagtataaataaataggcttcagtgcttgactttatatacgcactggagatggagctcagtagctcatggttacactacgccagctgagatctctccgcagctcatttggagagctgtttagaatcaagtcggtcctaattttagccatataatgaccacatttgagtaacagagaactgacttttttagctcttaactataaaactaagagatacaaggatgaggtaaaactagt

SEQ ID NO: 23182 - DNA, 1177 bp, Mus musculus
ctgcagtcctaagcttgtccctttgaaacactgcacccgagtgacagcagacagcagctctcaagtctgagagacgctgtgagcctccactccctaggaaggggaacttgagctggcttccattttgggttgataatgaattccaactagtttaaaggactgcttatatttggggaatgggattctgggaattgaactcaggacctcacacttcctgagcatatgctataccactattctacaaccccaggccaaaactgttaagttttcatgaagaataaaaggttatttctgaaaagaggagcaccctcttaaaaactacaaagaaataagagagagaactgattcgtgtggcttctataaatgtgttatcaaatcataaataaaaactgaatagtatattggggtaacacatttgctatagcttagagaatgtattgagagctttgagacataacttacttataaaactttaactgaaaaatgagtgaaacttatatagagatatttctcttttttaaataattaatttttttgcacttcatatattattccttccaacccgtccaccctccgactgttccacatcccatgtctcctccccatccccctgtctccacatggatgtccccacccccaaccccacctaaactccatggggcctccagtctcttgatcgttaggtgcatcatctatgaataaacacagacccagcagtcctctaatgtatgtgttgggggcctcatatcagctggtgtgtgctgcctgtttggtggcccagtgtttgagagatctcgggggtccagattgagactgctggtcaccctcagggtcaccctcctcctcagcttcttccagctttaggggtcagcagcttctgtccattggttgggtgcaaatatctgactctgactttcagctgcttgttgagtttttcagaggacagttatgataaacccctttttgtgagtgttccatagccttcaaaatagtgtcaggtcttggggtctccccttgagctggatctcactttgggcctgtcactggaccttcttttcctcaggctcctctccatttccatccctgtaattctttcagacaggaacaaatataggtgagagttttgactgtgggatggctatcccatccctcacttgatgtcctgtcttcctgctgg

SEQ ID NO: 23183 - DNA, 1132 bp, Mus musculus
agacagtaattccaaaattaagtaaagagaaacatttttttaatgcttaaaactaataaaaatagccctcttagaaaattaaccgttattaaataccttaaagcatcccacctccagggtgctaggactaaaagtgggcgccacaatgcctgacaagtctgctttttggatagctgccttatgtattatagttgtttggatagtgaataaaacatatttgagattatactacttgaaaaactttaaatcctaaaaatgcattccaaaaaatgataaaatttgattgttgtattcctgatgcttcatctaaaatacctcttctgtcttttcccttgccactctcatcttcatttataatgatccaccggctgacagtgtctttacatccaaaatgcaaaacagacagatgggcgtgtcggggaagaacttgaccaaaagcaccagcatcagtggagacatgtgctcactggagaagaatgacggcagccagtccgacactgcagtgggcgccctgggtaccagtggcaagaagcggcgatctagcattggggccaaaatggtagctattgttggtctctcacggaaaagtcgcagtgcctctcaactcagccaaaccggtaggaatttttatgttactcttgacttcttatttgagttgttgttacaatacgcatttttttttcatgtcattttatcacagtagtgtgtggatgctgacatcgtcaagaggaaaggaacagttttagactagttcatccctttgaaatgaaacagtgatttttttttttccagcgatcaaatgaaatgaaacagtgatttttctttttccagtgatcaaacagcctgcttcaaagtgaactttggccactgtaggaaatgtgtctttgctccccaggggagaagccctgtcattaatggctgcctctgatgcctgggaggcacctttgatctgtgggctttcgctttctcctaggctcctcactgtgaagcttaccacattaattttcatccccagcaatttgcaatggagatgacacctcatattttgtttattgctgacgacctaactttcttttcagcttgtaagcaccattcaccagtactatcaatttcctcactaagtcttcatttc

SEQ ID NO: 23184 - DNA, 1206 bp, Mus musculus
tgtcattctaactcataagataataaccagtttctagttcttacatgtcaatcaagaagaaatgctacctaaaaattttcttaagaaattatttttaaaaatatgtaaatggttaaacatgatcttttcaaagttactcatgtgggaaaacataaaaactgtacattgggtacttagataaagagttgtctgttacttccaaataataatgtgagaaaactgccagtgcaatttttatgcactactgtgaattcaggtcgctgtgttcactgtggatggttgtaagttcctgaagataaggaagtgtgcttataatcttctttttttccactgaggaaagtaatccaagtatttttttaatgtagttatatgatttagatgcagaataagcaagtgtgtttttgatcataataacaaattagatttaatgtattatagttgattaactcatagaaataatctatattcatatatcttcaggctttgtatatcatttctttttactgtaaaaactaattatataactcaccaactgaacacaaatggttttctaaaataatgtctctacagtgcattctctttggacttgtttccagtctgaagacagataaggaaccctaacaatgcctataaaagcaggcttaaggttagaaggggcttctaggactgagagattgcataagctttcgttactgctgtaactgattgccaaagacaaaaacaaaaatcatgtattacattcattttccactattccataataggttgctgtgacttcaaagggaggggagaaaaaatttttttaatttctcaaacccaaatcgtcattatgtaagtcataatgccaaataagaaagcaaaatcatacttttatatctatgctatattatctgtggatttttttagttttaaaaccagtggtttattactttttaaggttattttagtctttaatatattaatataacattgggtcttttagccaatctaagacctatttttggctatcagtattttcaaaggcatgagaagggaaaatgtcaatgtgttaacaaagtgacaggagcaagggcaatgctaatcaaaagcaaggtgtggcatttcagtcctccctctccagtgggtacctgggaagagaggcgtgtggggcatggtgaacacagaaagccggcctttgaactagagcaggtctcttgatgcttgtct

SEQ ID NO: 23185 - DNA, 1107 bp, Mus musculus
cttcagcagtgtgattctgaagtctggggatgttgaccccactgacctaggatgacatcatgttaactacccatgctcaccctcccttacactattacacttgaacccaactcctgatcacttttatctcctaatgagaagtaaatgctgtgtagcatccacagatacgaaggataacggtacgctgcaggagttaaggcatcctgtggactggatgctgggcccttccatggagctgcataaaagaaggaccatcctacctaggaaagcatccaggagacagtgacatttccagtgaacagtaaatgctgtgtgaggattgacttctgggtaagaaagcagcttacttactcactggtaaaggagtctgtgttctaatgtagagctgcctttgtcaaacaaagtgtatggataaggggctggagagatggctcagcagttaagagcactgactgctcttccagaggacctgagttcaattcccagcaaccatgtggtggctcacaaccatcggtaaatgggacctgatgccctcttctggtgtgtctgaagagagtgatggtgtactcatatacataaaataaataaatagataaataagtctttttaaaaagtgtagggataaaaaaataataaaacgttttgcagtatcttttaacctgagggaaaaaagaattggagtttaattgagctgaagatttctcttcaggtgcagcttaccatcctttcttctgggcgctgagatcaaatgacgctgagctccgcccatccttccttaaaggaaccacacatcctctcctgggctcttactccagagtgtgggtacatccaaagagaagcccagctttgccgcacagagggaccaaggcacaagaaaggacttgggaggaacagatcaacatgatatcctcatgcgatgccagttccatcgaatcccctcaaatcctgaatctatccatatgattggatattttgcttcggactcatttaatggtggagtactggatctggtttctttagacccatcatgggacttgacttacaggtgacactgatacacaagaaatcacgttctctcgtcatgaccaatccagggtcctagtccca

SEQ ID NO: 23186 - DNA, 1111 bp, Mus musculus
tcatcatcattgtaaaggtgctcctgtctgttcaagtctgggtgggctttacttgtgttcttctttccttgccacactctgcagggaaatctgagcagccagactgtgcctgtgatcagttccgctgtggaaatggaaagtgtattccagaagcctggaagtgcaacagcatggacgagtgtggagacagttctgacgaggaggtctgtgccagcgatgctcaccccccaaccacgactgctttccaaccctgtgcctacaaccagttccagtgtctgtcccgcttcaccaaagtttacacgtgtctccctgagtccttaaagtgtgatgggaacattgactgcctggacctaggagacgagatagactgtgacatgccgacatgcggacaatggttaaaatacttctatggcaccttcaattctcccaactaccccgacttttatcctcctggaagtaactgcacctggctgatagacactggtgatcatcggaaagtcatcttacggttcactgactttaaacttgatggtaccgggtatggtgattatgtcaaaatatatgacggactggaggagaatcctcgcaagctcttgcgggtgctaactgctttcgattctcacgctcctctgacggtcgtttcttcctccggacagataagagtacatttctgtgctgataaagtgaatgctgcaagagggttcaacgctacttaccaagtcgatggcttctgtttgccatgggaaataccctgtgggggcaactgggggtgctacacagagcagcagcgctgtgacgggtactggcattgcccaaacggaagggatgaaatcaattgtaccatgtgccaaaaggaagaatttccatgttctcgaaatggtgtctgctaccctcgttctgatcgctgcaactaccaaaaccattgtccgaacggctctgatgaaaaaaactgcttcttttgccagccagggaatttccactgtaagaacaaccgctgtgtgtttgaaagctgggtgtgtgattcccaggatgactgcggtgacggcagtgacgaggagaactgcccagtcattgtgcctaccagagtcataacagcagcagtcatcgggag

SEQ ID NO: 23187 - DNA, 1163 bp, Mus musculus
tgatatactactgattagccacacagtagagcttagtgtattgctacttgctaatgttaacactgcaatagtaaacatttgtatgtttctattttatttatttatttatatatatatatatatatatatatatatatatatatacacatatatacacatacatattccacagcataaattctatatataaaattgttgggtcaaggaaatatgtacaactaatttttctagttactgccaagttgcctttgagatgaggagtaattgagttctgtaatatagtaatacaataattgagaggtgtttttctgtactatgtcaacagcttattttagtagccatttctaaattaatttgtttaatcaacttaaagtgtttttcatgattgttatgatatataatatcataactgccctactcttatgattttttttctttttattgctgaagtcagtattaaataatgtttgcttatagaacattatttggtccctagtatttgctttgttgaagctgtatgtgaacattttcttccaggttttatacgttcctgatcctgaatatgtctctagtgttgagagttccccatccctcagccctgtaagccctctgtcgccaacgtcatccgaggctgaatttgataaaaccacggtgagtactctaccttcatatgaaatttaatttttcatgaagttatacttaacaaagaaacatgagataaaatcactttgaatatttattttctggaatttgcgcgcgtgcgcacacatacacacacacacacacacacacacacacacacaaaacacttgcacaggaatgcatgcttatatgaagaagtggtggaagggagacaagaatgggtaaagggagagagatggaaaccttgggactagaagcagtcctgaattcaaacttacatttcctccaccttggacatgtacactggcgtgcccgattatgagagcggcctgtagtaacccaaggtcaggtgtggcctgtgccacttgtgctttcactaatgaggaccttgtggatttctgagcacctgggattttcagactgagagtcaatctgcattatatttattgtcattgataacagtggaagtcagagttttatgatggatattgctgactagtaacacaataacaactgaaaaa

SEQ ID NO: 23188 - DNA, 1428 bp, Mus musculus
gaatttaagttatcagactttgtggtagttttcttacgaggagcgcttacattgatgtttcccagatggtaaacagttgatgaaaaacctcgatgtaatgatgtggtatatatgaaatgcatggtgtttgtatattctgttgatagcgctactttgctgtttttgaaaagcctcttctgtgatactattttattatttgcttgtagaaggtaaattgatacagtttttaatgtctaatacttttttattttccttaataacagagaactagatcagttgtcaggaagggggtcctgccattcaaagaaagcgacaggagtctctgctgaggacgcagacccgagagcgcgtgaccagggtaacgacagtgccagcactgctcccaggagcaccgaggagtctctctcggaagacgctttcacagagtcagaactctctcctatccgcgaggagctgctctcctcggagccgagacaggagaagtcatctgatgcctcgtcagaatctgtgcagactgtcagtcagatggaagtccagtccttgacagccacgtcagaggctgctaacgttcctgaccgcactagctctaaccctggggctctatctcatgaaactggcttaagtggtctggaaacagccactaaaggaggagataaagctacagaaagccttcaagaagtctcaggcccaaaggaacaaagcacagaagtaaaaggtcaggataaccaggattcttcccaccaggaaagttcactgcagcaagaggcaggtgaagacagtgtatcttctggagaaacagtagaactgaaagaaaaaccagctgttcttaaggatcaacaagggcaggagctaaaacgggactcagagacagaagtagaggagctgcgcaaactctggaaaactcactctatgcagcaagccaagcagcaaagggacacgattcagcaggtgtcacagagagaaagtaaacacagcagcgcagcagcagacgcacatggagagggtaagtgctagggagatgcaaggctggttagtctgtttgattgcatgttgctttctgctttctctctgagcagagactgctgacttaaggcagtgtgaaggagaagcaaaccactcttgactggctttattccgggaacatgtctgcagtgcctggtctctgaacttcttttctgccatgtttaagcactcctaatgcaaagcactttccataaagtctgtcttatgaacatgttgtacccacactgtataatacagtgattgctccattttcttttcaattatatcattacatatttaatgtccgaatttcaatttatagttaccaaagttttaattccataatttttgtaaaaagaactgtcgacagtaaaaatctacttctgcagttcttttacgtacgtaaaaatccgatgctcatctgat

SEQ ID NO: 23189 - DNA, 1133 bp, Mus musculus
ttgacattagcctttagaggaaaccaccttgaccttcacaactaccaagttttaaaaatgataatggcaaaagtagatgctttgaaaatgttagttagaaataatagtggttgaataaacgttatcagtagcaaagatcagtaatttaaaaccattgggtatttaataaaaaatctgagtaagggccagcaatatggcttagtaggttaaggcactggccaccggccctgacagtctgaactttgtcccaggactcagctgaaggccagcggtgagtttagctacactgtgctttggctcccagcaccttcccaggacctatctggattctcgaatgaaagacagacagacagacagacagacagacacacacacacacacacacacacacacatacacacacaccagttaattttaaaatgcctttgctagctcaaagactgggcagttctaatcctccctgcggctagcgcacatctccctcctgtaatcctggcttaacaccctctaattttatattttatctctgttgccctggctccttcggggcggctccctagtctttgctgcccgagacgcttttgggcagcccttccagggactgcattccttctcacctacatttgggatgattttccttctgcagctctaagtctgacccacctccctcggaatcatggtgattctcttcccttctcccagttcctcgcccacacaatctaaaagttccatccctctctgtccacacagccactggccatttattgattgatcaaaaaccaatagggggcaaggacctttagtgtttgggcacgcagattcctgattaattcaaagtattagaaccagtccccaccaagaaatgacacaatgtgttccacacatagctacacactaacattccatgtgtgcagattatacataaatgcagtaaaacctttgaaaaagaattgtttgctaccaacctttttgtttccgtaagtgttaagaatctaagtttcacaaggccctattgactcctctgtacattcacattcgtttgccaaagaacaaaggaatctgaagtaccttgagtgacgagtgacatgtctatattccttgagaactgccttcttgctgtgagcgtacaaaca

SEQ ID NO: 23190 - DNA, 1207 bp, Mus musculus
tggtggagttggcacaggtgacatttgggcctacttacatttagttctaaataagaaaccacatgccaaaataatacatgcttcatagacctcttctagttctaattcactacagcattctctttattcattttgtaaacattctctatttcattttaagaatgaaattggaggggcagtctgattggcatagaccacagcgcacacagtctgcaggtttgggcgcatgttttcatcactgaatagaggagaattgacagaggagaatgggaattcaatgattctattggatttaatatattaagcaagtaatactatttacatatttgtagcttaatagggcattatcataagtacaaaactaaaacgtgcatatttcttcaacattgtgtcagatacactgttttacagttctcttgttcagccttgttgcataccaactaccccaagacatttttgttttgttttgttttgtttcttctcaaaaggaaaaaaaattgttttgaaataaaaacgtgtttttttctaagtggtatatgttattagttaccattagcatctgctcttataaaagggcagtgactgtagtagacaatactgtaattcagtagacttggtgaatgtgcaagcttactgtcaagtggcctcaaaaacgaaaaggtagaataaactagcaattgtattctttcttgtaggaaaccaacaataagccatgtggcaacaattcgtcagttaaatttcagagcttcatgttatgcaaaaaaataaatcctgctgttatacgtgacagtgacattgtgctgaaaattcagctgttccacacaaatgttgtatatcttgtaaattgatgtctaaagatagttttgttcttatagaaagtgttgactgccaggttgcttatagcactttaaattattctgaagatgaaattaccagccaagtatgttggcttaagtagttttagttatataactcttaaaaatacctagttcttttgggaacagtttagataattatctaaagaaaacatactattaatcagaatctctggtgttgtatgacacgctgttgctaaagatgaatagaaacggcatcgtttcctcgtctgtgtaaagctctcattacaagttaggtaatagtgtctaggttagaggtttataatataatataaggaactgtaaataaatgtacccttcctattagtctt

SEQ ID NO: 23191 - DNA, 1099 bp, Mus musculus
cagagcaagacccaggatagccaagcttaggcagtgaaggatttggaaaacagaaagccagtgacaatgtaatagcacaagcgggtcatgttctaattcctgcaagcagcagaactcggcagcttcagtcatatggctctggctctagagttaagagtggaaggaactactgggacaattgatgctggttagctggagctaagaaattagcagtgattatgaagagaccagcatcactgaggtgaaatcttctgggaagtgttttctgggaacacaaagaagctgtgttcaagagatagccaaggtgctgcagctggacttgataatgtgtaagaatcacccaggtggtactggttttgaaggcatgaaagtgtcatgaagaacagctgaggctctgcactgtgagaggtcatggaaggccattggagaaggtatagcctcagctgtagttgatggcccaggactgaaggggtcatgcaaaggatttgaggtttggcaccatgaagataacctatgaaaggctattggtgaagcctagttggcgtggaacaccccagtgtattggagatgtcagtaccatgggatgatcaccaagaatagcagccacagtggagtgaattaacctgagcttagagtgctacagagggcagagctggagaagtgataccagccctcaggaggagtccaaatgatcaagtggaatcccagacactgaaataagaagctgtaacattgaaattgccttggagactcaaagatgttaaagatgccaaagccatggggtacatgctgaggaaagctgctaacagggagtggaaccagcccaggagaaagaagtttgttgcagtcaacaaagatgaaaaaggagtggagatctgaagactgctttgacatcggccatggagatgcagagtttggagtttgctcagctggtttcctgccttgctttggggattacagttaattagttagatgaatctcagaaaagaccttgaactttggacttttaacattgttgagactgctatagactatgaggactttgaaagttggactaaatgcattttgcattatgctatgtttaagcatgacccccata

SEQ ID NO: 23192 - DNA, 1168 bp, Mus musculus
tggtatgtggtgtatggtccctgtgcttccctaagactctataggcacttgccaccatgagactctggtacaattccactaagcatcagcccaggggccaatggactgttcctgtcgatgctatctagtgtttaaacagcattgtgcagtacaagacctaattcacctgaggtagaacatggtgttaagtgtaatattttattctggaatttaatgaagggtcagtgaaagtaaattttaaggagagcataatgatagacattgttaggcctgcctattaacagcatctctgaatagttctggggtcagagggcacgtggctctagcatatcagatttcatttcagcttccatcatctgtagctagtttcattatccttaggtcttggcatttactgtaacattatgcccttcatggtcatataggctgaagtcctgtcccagtgtgcttttggtcttgaacagctatgtgttcagggtatgaaacagcttggcagcactagtgatccagaatatgatgtacgaacctagaagtattctatccatggtgactctgtctgggggtggatcgaattttgcagtacctgagaatacaccagaaattgtggatgagacatgcaaatgctactggttctttctgaacatcacactgatggtgtacttggaacaaatgtgggcttaggttcccttttagtagtctattaatgatcattctgcaagcaattcctggctatttttgacccacactctatctaatgctgtgccaggcagcactgaaaccatagaacgtgtctccaggcttggaagaagtgaattcacaactttcatgatttgagaaaacaagcaaaaataaagactaggaagattacaacatgtgcctgccccatcagtgcctgatcagctatgcatgcgaacagagaattaaagtttccaggaaactatcacctcacttgataacacatgagaaaccaaatggagagtaatgtatgtgggagatggcccagatagagcatttaaagccaccatcttaataaaatgcaacgggctggggaaaatacagaccaatgcttcaatactccaatgaacagagttagcagagaggtctaaagcaatgaaaatgaaggcaaaaatatttaaaggataaactcagtgaaaaaaaaatctgatag

SEQ ID NO: 23193 - DNA, 1163 bp, Mus musculus
aagtcccatgcctctaaattcattcaacccagttccattgaaagtgatgctgtaatgtcgtcacatgcaatctaaagaccatttaactgaattgtgtaagcaataaagtgctcccatatgcttgtcaattgatgacaatatttagttaaaagaatctatgcaagaaaactgagtttaagaaactgattataaagaccttccaacatctatggagcaatgataagtgacttcctaggctcctgacgtgagttttctagctcactcctaattggcaatagtgatggtactgttgttgagtttcttgtcatcggattctgctgattttacaggttgttattctctcgtactacttaaatgtaattcttaaatgcttacactcttaggctaaacgatgttagatgttttctttagttcacactgaactatatacatgaaaaattgtgggaatttagtgaatattaagtaactgttgtatttttaccttaggtatcttaatgcaattcagacaatgtgtccacatattctacgctatttgactactgccgtcataaccaacaaagatgtgcggaaacgccggcaggtgctgaaagatctggtgaaagtgattcaacaggtaaaaataaacttaaagcagtcagacagtaggtgtgatctctaaatgctggggtaggtcttaggggaaaataagtaaggtgagagggaagtctacatgaaactagagagaaattagcaagccctgagcttacttttgcaaaatcataggtgtccttatgaccaatatggtatgagtgattagtgcttggtggagctgcttgttgatgggttgtggagttgctgcctgttccagatggtgaccattatcttaatgtggcaaaagcccctgaagtttggcttatggagcttctcacttgtaaataaaacaaaacaccgaaaaagcccaagaaatcagatgtaatctaagaatgcatttataatttggacatgtgacaaacttaatgtgttatctgaggtaagggttcgattgggtgctttgagaagatgatattggattagctgtgagttggcattatgttaaacagtgcttaacaagatctaactggacatttggattacttttttaggagtcttacacatataaagacccaattacagaatttgttgaa

SEQ ID NO: 23194 - DNA, 1930 bp, Mus musculus
ttttttttttctcttgtattttggcaggttacgtccaagcctcaaagagagacaagaaattttttgcatgtgctccaaactactcgtatgcagccctttgtgagtgccttcgccgagtattcatctatcggcagcccacccccatgtccactgtgctgtacaacaggaaggaaggcaggcatgtggggcaagttgctaagcagcaggtagcaagcctagaaaccaatgatcctattttaggctttcaggcaacaaatgagagattatttgttctcactaccaaaaacctctttttaataagagtaaatacggagaattaatcctccaacatttgtctaaaaagtatccagtggtacctggagggctgaacagttgtactataacttgataagttttagcatgataaatgagaataccttttatgaagttttatttttaaaggatactggaaatgtattcagtagattatgaatctgtaaaagctgtggatagacgaagctacaggattagagaacaccggcttctgtaaaaatatggagatattagcaaatatagttattttttaaaacctgagatcgaatctcatcttttatatgaaacatacaattcagtgtttacaaataaaaatatttatcatgtacttagctcattgtttagattggtacagtcattatgtagaatgtttgggtagtagtaaaatactgagtattataaaagtattttaatgggctgaagtctatatacagaattgctttaagtctgtatagatttgtaagaatacagcagttttgacaatatttgctttcaacccttgttttacagcaagcagaaatttatttatgtctttcctgtaccacattggaaaaggttatacattttccattattgcataacaaagttcaacaaaactcaggtctaagagtttattccagtacatgggaaactaaagctggagagttagcagttcaaggctagccagggccacatagcaagaccttatctcaaaacaaaagcaatttaaggtttatggtttttcacgcttctctgagatgtctcttgtcctctagtagtctaagctctgcttcctgacatcatacagaaacacattctagagcaaactagggtacaagaggttggagagcctggtttctcattttttgctaagaatatggacaaaatgagtcgcatggctacgtctaaacagacagtaggtctgtgacacattagagcccttgttgggacagtcacacagaatagattttaacgcatttgtctaagttccccttacttttctgacagtttatcctatttacacatgagtttttttcccacaaatatttgtggttcagacttcctctccaaacttccttcaatttgtatccagtatggattgttgtgtttttattttcatactaccagaagctcatgttttagaatgttctcaagagcttaagaggcagcaaataaagattatgtcgtggacaatacctgtagtgatgtttgttttgcctatctggaacaaatacctgcctggattagattaaacaagtatttggtctggggagattgctctgttggtaaagtgtttgccacataagcataaggaccagagtttagatccctgtcacccacattaaatatgaacacatagaaaagaaaaggaaagaaaaccaggtaggcatagctatagtcacagcataaggtacagacacaggagcatcattgccgtccacacagttgatccgaacccgtgagctccaggatctgagagaccccatctcatcagagaaggcacagaatgagcaaagcacttgatgtcaatatttggtcctcatatgcatgcatacaaacatgcacatagtctcataaacatacatataatatagatatgtatataagtatatatatatatacatatgtgtatctatac

SEQ ID NO: 23195 - DNA, 1190 bp, Mus musculus
tgctctggctaggacttcaagtacaatgttgaataggtagggagagagtggacagccttgtctagtccctgattttagtgggattgcttccagcttctcaccatttactttgatgttggctactggtttgctgtagattgcttttataatgtttaggtatgggccttgaattcctgacctttccaagacttttatcatgaatgggtgttggattttgtcaaatgctttctcagcatctaatgagatgatcacgtggtttttgtctttgagttcatttatatactgaattacgttgatagatttccatatattaaacaattcttgcatccttgggatgaagcttacttgatcatgatggatgattgttttgatgtgttcttggattcagttagggagaattttattgagtatttttgtattgatactcataagggaaattggtctgaagttctctttctttattgggtctttatgtggtttaggtatcagagtaattgtgacttcatagaatgaattggttagagtaccttctgtttctattgtttctatttattggaatagtttgagaattgaaattaggttttctttaaatgtctgaaagaactctgcactaaacccatctagtcctggacttttttttttttttttttttttggttgggagactattaatgactgcttctatttctttaggggaaatgggactgtttagatctttaatcttatcctgattttactttggtacctggtatctgtctacaaaattgtccatttcacccaggtgttccagttttattgagtatagcctttttgtagtaggatctgatgatgctttggatttcctcaggttctgttgttatgtctcctgtttcatttctgattttgttaattaggaaattgtacctgtgccctgtagttagtctggctaatggtttatctatcttgttgattttctcaaagaaccagctcctggtttggttggttctttgtatagttttttttgtttccacttggttgatttcagctctgagtttgattatttccggcattcaactcctcttgggtgaatttgctttcttttgttctagagtttttaggtgtgctgtcaggcagctagtgtttgctttctctagtttctttttggaggcactcagagctatgagttttcctcttaggaacgctttcattgtg

SEQ ID NO: 23196 - DNA, 1102 bp, Mus musculus
gtaaagcagctagcagggttccacaaatgttgattgtattccctcatcatttcctttggtccaggctagagaagagaaatgaacacagtagctctacatcctaattttggccataaagttataaagtagactcaaatagtacattttgtttccttggtacatttaagggtaatgttatcacagtaagctctgttcagttccagctttttagaaaagatggatttggcactatccagttctaatataccctagtattacagctctttgtttgcttaagttatttacctgaagtataaacagacttctataatctggagattaatacatttatgaggctataaattttcattaaaaaagaaaaaagtttcctctttttatttaaagaccagtgtatactctaaaaacatgattttaacccttcctctatgaaaatctttcttacagataatgattttaaatgatatgatttgttttttgcttttgcataagaggtaattaaagaaaaaggactagaacacgttactgttgatgacttggtggctgaaatcactccaaaaggcagaggtaaggagcacaaactgtcaggaaaccggcttttagtagggaaaaaaatcctatccaaaagcctttccaaggagttgttgttcctgtgagggaagttgaagagcagttgcctggaggactggtgtagcagtcctgactaagagctgaggtgataggtataagtcggcacttgtggtgtacagtcttagattgatgactggtaaggcagatcagttttaacatgagatcttagggacgtgccacctaaagctagcacttatacaatttattaaatatggcctgattccacctaaatattaataattcaacatttattccagtcctgagtcattgtcctactatctctttccttattaaaaataaatgaaactgtcttcttgattgtctaattaagaatttggtaattcacggtgatgcatatttaagacttagaagtgaaagcatctaaactagatgaatttataggatatctttacacatagccacaatcaaaatcatttcaatataaaataaatgtgtggagatgactacagcatat

SEQ ID NO: 23197 - DNA, 1324 bp, Mus musculus
ttgaagtttttagggaaatgagaaaattaagacattaaatatttattccttgatttttaagaaggcagctttcctataatttatctgtagtattttataaaagtaaagatatgaatatctttctttttaggcagcagaaaattgcagacagagagaagagagcagcagaacaacagaggaagaaaatggagaaggaagcgcagcgcctgatgaagaaggagcagaacaaaatcggtgtgaagctttcctaacacaggctatgctgtgagcgtgccaggaggaggagtctgggcccacagcctacacgcaagcatttgtatgcactggacagtattctcagaatacaaacactctgcttgatcgtaatgtgtttattgagctgttcaggacaccaggattctcccatgatactttgaactattagtaatcaagactcaaaacacaaaaataatgagacaattattttcttcaatgtgttccaaatagaagacaattgtttgctgtagagaagttatttcaggaggaatatacctgacaagtacctctcaagctagtgtttctagctgaataaatggctgtaaataattttatggtgggaaactactctgctatctattatgcttttgttcattgtgcataattataaaataattttaatcttttgtttccatgatcacttgatgtaaattaggtaaactgtaggtagggctttatacccttcttaattttgttttcaggtactgttgacatacattttctataatttgaactggcattgtttggtacaacattaaggaatatgataatttgggtttttaagaaaataacattaaatgcaataattttatttatcaaatattttgtatatccttattttcttttaaacagtattataatgttatacagagctgtaatttatatattgcatgtataaatgttgaaaatcagctgcaatgacaactttgtgtgacaagaactaggatcagtagcttttctctttcattacagatgtcaagatggtaacagtgtccatccttaaaagccattttcaaatgtggaaagccttcagttttcattgattttttttttttaagtgattcttgaagagttctctattttgttttgttttgttttgggtttgttttgtttttaatcttacataatataatgcagggtacctattcttttagctagataacattactgatttcattacaaaccaagatataaatatttttgtttgtgatattggttgatttaaagaaataattgcatattgtgttttatggaaaacaaagcacatctcacagtttaaaatacatta

SEQ ID NO: 23198 - DNA, 1177 bp, Mus musculus
atatttgcctcgtcatctgctgtgtgtatgcacccactggaaagtcactggagatactctgacaaagcactagaaacgatttgcttattgaaagttgtgactggaagggtgatggaaaataagaaacttgtgtcacccccatctgcagaccttttgtccctgactagactcattattggccacctgcattggtggccatgggcaacaacaagggggatgactgtggtgaccttcatgaccacaaattcctggagacagagccaggaatgcaaaccaattttcaggcaacaaaaatctatatccaaaagttctggtgagtattttgtatgcctcttcatttggtaccattgctgtgttctatagagaagttttgttcttccttgtaatgctagagttaaaagtacttggtgcagaggttttaaggccatggacttaaagaagaaaaaagaaacaaatttcagatcaagctgaaaactaaacttacttttaaatcaatgcttgtgtttgagtcttgaggacactacttttaggcctccttttgggacactatcgggttcttagacatttgagcagatggcaatcctactatctagtaagcattgataagtccttctaaaccacccatgccagtatctgcacgtcttctgctatcctttgtcattacaattatctaattacctcaggttagttttctatatcctcagttcaaatcaaggctgctttctgctcccattctcatctgcttcacccccacaaatacacagttattctctttaactgactctaggtaggatagatgagtcgctttcactgcaatcaagcacagcatcatggaacagctggaatagtgcacacacagttactccagacactatagaaggccctagtgctcatttggcgaggctgactcttagctgggatggctttggggctcagccacagagagcatctgagaagtaaacattcaacagtcaaacagaatcttctgactctttagccatctaaggctgctacaagctacaagtgctgttcagaaaaggaacttgttttaaatctgttgaaggcaaaggcttacttatattttgaaacagaaatgttcttaaaaagctagaaataggattttcatttttattattataagttcagaactgatttacttctattttgattgacactc

SEQ ID NO: 23199 - DNA, 1123 bp, Mus musculus
acacacatatttttacacatatatacccaaaaactttaggagggaaaaacaataaaagtctataagtctgactactcaaagttaaaaattaataatttttcatataaataagcatcatctatgcaaatatgtgtgtttattgagaatatatactctatttttatagcaagaaagttgtcccctaatttatataagaatttgtgttctctgaacaaaccatggatttctcaccctatctctaaatttcaggcatatcttgacaaagaaaggaggccttaagacttttagatagcagcaaaagaaggcaatcacatggtgagaaaaacaaaggagcaacaagttttctggcctccaagtcactgggaagcttggccagaataaatgggtgtgattaagaggtactgttgtggagtccctgaagttgctaactactgaatcttcgccctgagaccaatgaggaaaacaatcttgacatatatataatgagactgtttttctgaattcaaagagaaagatagagtccactctcttcttttcttttgactctagctctattgttttcaatctatgtgaagaatggaaccaccaacaactaccaaattgaactctctagttctttgaaaaatataaacttgagattaatgtaataagtagccatgttacctgttacagatttgatctcctcggaagaactcaggaacagtatacagtacagtaatccaggacaggattgataactttaaaatcttccctgttgggttagtctatcagcaagctctaggccaaatgagagactatttcagtaaagcaagatagttgcctttgacagtacttcaatgtatttcttgactatgcaagcacatgcacacatgcacgcacatgtgtatacacagacacacacacacacacacacacacacgttcatttccagaactccacaggtagggatttattgcaaatgtgatccaaagtccttaatgcacattaagatttttttttttatcttaggcttgcacaggttctgtgcctgctgtcaaaattactgtaaggtctactgtgtagattgattgttttgttccagagatgtttcattttattcacctaccaaatccagctcttagac

SEQ ID NO: 23200 - DNA, 1156 bp, Mus musculus
acaagagagatgacagttacttgatctagtgacagaggcagaggagatgtattacgagaaagagagagagagagagagagagagagagagagagagagagagagagagagagagagaaatttgactagaatttccacagtggttggaaagacaaaaaaaaaaaaaagacaagacctagaaacctgggcaacagaagatcaatgtgcttaacagaattaagtgagttggagtaccgagcctcagctaaaaaaggttcagatgtgtcagactaaagttacttatttgggataaacccttcgagatgggaagcactggctaaaggaagccagaaaaagactaactcagatccctaccccaactacaccaaggcaagtaagagaattcttgggcactgctggcttctgcagcctctggatacctgggttggcgaccttagctgccctgttatatcgcctagccaaggaaggagaggtgtttgtgtggaccccagatcaccagaaagcctttgaagaaattaaaaaggccctactgatggccagcctttgcctgacctaaccaagcctttcactctttatgtggaagagagagcaggggtcgagagaggatttcttacctagactttgggaccttgaaaaaggccagtggcttacctatcgaagaagttagaacctgttgccaggggtggttttcttgcctgaaagctattgctacaatacctctgcttgtcaaggatgttgataagctcactctgggacagcaaataactgtagtggcaccccatgcttttgaaatcactatccaacaatccccctgaccaatggatgaccaatgctcttgtgacacattatcagagctttttgttgactgaatgagtgaccttcgctccccctgctgtcctcaatccagctaccctactgtccaagactgacttaatcactgcgctgacattctgaacacgaatggcagtagcttcccggttgaaggtaagcgggaggcgggggcagcagtgcagtggtggacagaaagcaagtgatctaggccagcagccaccctgaaaggacttcagcccagaacttgtggctttgacacaagctctacgaatggcaaaagggaagtctatcaacatttacactgacagcaggtatgcttttgccac

SEQ ID NO: 23201 - DNA, 1253 bp, Mus musculus
tcccttcccttcccttcccttcccttcccttcccttcccttctcccttcccttcccttcccttcccttcccttcccttcccttcccttcctttcctttcctttcctttcctttccttcccctttcctttccttaactatttcctttcctttatcactgattccttttattttacctcccttttcttttcctttttcttaaaaaacataaccctctttaacccggggatcaatttgggagacttaccagtaccaccgttcctcagctgaagagttctgaatccacgcagttggatccttttcagcagtctgttttgcaggaacactttattaccaccgttccccatctgaagagttctgaatccacgcagtcggatacttctcagcagtctattttacgggaacactttattaaccgctccttcccgaagatgcagttctgaatcctccctgtagcaggggatcttcactcatgcctgaagatatttcttttttcccctgggatgcagtttcacgggtttcggcaccatttctatttctatacgcattaggacccgaaagatggtgaactatgcctgggcagggcgaagccagaggaaactctggtggaggtccgtagcggtcctgacgtgcaaatcggtcgtccgacctgggtataggggcgaaagactaatcgaaccatctagtagtgggagagctactgcatgtaagatgttggttttgttctcatcatatgtgctttctttctaactaaatgcaaatatttcttgaaatgaaattcagctcttgtgggaagccaaaaacgccattacaagatggtgctggctaccactggccaccgcccatgaatatggctaaacaaccaatgtgggcatgtgcataagagttttttaccgagtcactgcctgacctgacgcatattaaagaggtactggtagcataaccaatcaggtatggacatgtcactcctaggcctatacaagcagcaccatttctgggctcagggtctttcgcctatgcagtcaatgctctcccaataaacgtgtgcagaaggatcctattgtggtgtcgttcttgctggtgagtccggtgcgcgctattatagatgatgttagaagacatcaagaagaactttagtaactcacttaaagaaatacagaacactgctaaagagttacaagtccttaaagaaaatcaagaaaacacatccaaacaggtgatggaagtgaacaaaaccatactagacctaaaaagg

SEQ ID NO: 23202 - DNA, 1134 bp, Mus musculus
ctctcaaaagaaatgttagcatggtgagcttatgctgtcctgcacccgagcaaagcaaggataacaaccataaaaaacaatgcttaacctttctcagacccacaagtcccaaacctggatcccagttttatcccataatttcttcaatacaacaactgcaaagtagaactctttctttctgcgcctcaggttcctcagctgtaaaatggaaagtatattaataataataataatattaaaaataataatggtaatgtagtacttgtttgtaacgcactttgagatccttggttggagggcaccataagagtgtcaagtattattatgtggccaagggggttatttaaaactctggttcccacgggccgagaaagtttggcatcatttttattaaagatgagctgtaaatatcttttctaagcagcctatagtgttggctatgaagaggcaagactataaccaggctgataagaccatagttttttaatggctaccaaaaaggcacgtgtcacaataacaaatgctgaattctttagggtgtaatatttgacaacatgattgatctgggggaggggatgggtggaaaaaaacatctcaaaatgccaatgtaaaactaacagcaatattcaccagcagaaaatgtctttcatatggaatgatttcatgttgataagaaaaagcattcaatttgtagtcctgatttgaacaccagactgtggggtataatagttctgtttttacaacacatggaatttttttttcattttatttcattttgttttcatagtgcatgttcatttcgactcacaacatgttcttggtgtatttcttatgcaaacaatcttcaggcagcaaagatgtctgttacatctaaacttgaataataaagttttaccaccagttatccatgacggctttggtatggtttatatggatctacgttcatccaggcagcaacagaagctacggatccttaacatatcaatgagctctgaacttaaataataaaactgaaaccaggtcacctattaaaaaaaaagtcactaagatgtactaagctggattcttttcaacttgatttttcattaaccaatctgttacaggtagatttttctgctaaaaaaaaattatact

SEQ ID NO: 23203 - DNA, 1178 bp, Mus musculus
gctgattttctgataagttgtttatggagaagggctaaggtactggaattgcatcacttttatgcgtggataatattaaagcagtgcatgcgagtgagcctttggagttaaaaccagtttccttccattggtataacatgttttattcagagtatgtcttatcaataattgagaacgaaggagagaaaggagtcataatgaatcaagaggaattagtaatagcaacaatttataattgtctagtgattgttagttgctgtgtatgttctaatcaccgtattacacattgttaacaggcctctgaaacagtcactatttctaatcattgtgtacctgtgtgaacaatatgcacattatttgctgctaacctccctagttactacttttaatgactttctctctgtgtatggacagatgtgcatcgtgtattgctaacagcattgtgaagcacctactatttctaattgctctctgtgtgtgtgtgtgtgtgtgttgttctctctacaggtctttccttatggcatgacttttgtcctatatattcatactctctgtctttggtatttctaatgcctgatacatacagaaactcttgttccatgaatgaattgcaaatactccacgcccttgaaaaatagaaatgcacatatatgtgtgatgaaaagataattttataagatttccctgcaaatgtatcatgcctaagtctttttccacaccccataatctgttgaagtctcttgccttctctactgatcctcttgcaaccaggctagtgcctgttcttctttcctgtgcatcccaaagccatgataagcttgcctatgaaaatgatgtcctagttcaagtcatctaattattcaagatggagttttcattgagctgattcacattcgtgtgcgtagccacacctttatcataaaacatagtggaatttggcaaagtgtttttctgtttctcatggacagatgatatgtacttttgacagattttaatgatggtatataataaatatactgagaagtcattaagctattaaaaacttgaacagattcagactttaaaagacacagtttctagtgctgtgtaaaaagccactgtaaacttagccctataaaaatactatatttacttacgtgcatatatatatgtgtgtgtgtgtgtgtgtgtgtgtatat

SEQ ID NO: 23204 - DNA, 1179 bp, Mus musculus
gacctaagtcaaagcaaaagaattagaggtgattggatacaccctgtaagaagcaacagtgaatctattttgctgccagctaccacagtgtagaaaaactggagcgttttcaaagagcgagaaataaggaattgatttaattttttctataagtgtttatgggactcagcttagctatgatggatttttaaatgaaacttcaaatgttactttttgagatccacgctttagaactgaaatcaggtgaagttattattccaggaagacattttatgttgctgaaagatttggatttagtagttttcagtcattggttgaaaatcaaccatgaatgagatttcctaccgctcacagctcccaagacagcatgagatttgtaggtttcagtgttacactacataacattttattagcatattttcctacaaatgttctgccttttgactaccaagtcacctttcaattcctcaccatctagctacacctagagcagtgtccacacatctgcgtgtttggggactgaataaacagttgggattaaatgaaagaaacgtggagtgaaacaaataaaatcctgggactgatgtgatttaaaatcctcatttctagtgagtattcaaaggactttgatgagaaccagaagagacaggtgggtactgactaggccgaggaaaggaggagacagttataaattggaggttgctaactctgagagtcagttggctcccaaatccaaatatgtgactgtgggacaatgcacagtaggagaaatcactccttaccaatatatgtgctcacactcgggtgatgtgtggtttggacacttggcttgacatttgaagtttcttatactgtcaagaatatgtaccaggctttatctgtcttctaaaatgtacacatctgttttcaactcaggaaaatgactgagaggcaacctcttgttcttcttcacatcgagttatacacggggaatgattttaaaaagtaccatttcaatgggattttattatgtagtatatcatatagactttatattataatagagactaaatgtacagttttacagtcattagaaatcactcaaaggtgcagttctgcatgaataagttcttcttatggaattcaggaaggtgtacgatagcagggtggacaaggagttggttacgttttaagtgatga

SEQ ID NO: 23205 - DNA, 1177 bp, Mus musculus
aacctgtgcatttcctgttagtactttattaagtcattatgtatcaatcacagtcaccaatgaggcagttactctgaattttagctgttttgtccatagtaattacagaaccgaaatgtccttatatgttctgtggactgagcaatcctttctcaccaaacatggcctttgagagttttctttttttcttttctcatcaaaactataaaacaaaataatagagcattcagtatgtaatttctgataatcacaatatttttaaaaatatattatcagtatgaaacattgacctacttaagaaattccatcatattggtaaatttattctagccaaatttatgctgattaccttaaaatatgttgatctacttttataaatattatatttcattaattacatttaaatccacacaaagggcattacatttactatatacttgcatatggcagaaatatgcaagtttgagtaatcacacattcttacaacgtccccacattaaatagcaagggaaatttaattctttgactgtgcttgttaatgcatttatattaagtttctgatatttggatactgactcccaaagaggactttagttctggagaagtatcagatctcctttgcctcagtggggccctggcaacatttaatgaggtgagtttggaaagtgagtatgtgtctttgtcttccaactttgaatttccccttcttaccacggccctgggaaactcgctgtactctcttgcgttcctaacatatattccatgtagactgtgttaattttctcaaatctgtacatgatcatctctagaggcacccttctagtcttagttggtaataatttttgtcatataggaagtgcatagaaaaacaaccatcatgcatattccatttttcctacattgatactgacaagtaatgctataaagatcatgagacagtagaagacgtacacttgagcatgcaattggagcctcagccctttcttgttcattccaggaaggatttgtagtcattaaactagttacttgttgctgatgctttgtttggggtttgactttcatttttttattaaagtgtaaaagtttgcaatcctgtcctatagtaatttacggcaacagtaaattaacttctactaagtaatgaatggcaaatgtatggtaaaaatgaatcatttct

SEQ ID NO: 23206 - DNA, 1101 bp, Mus musculus
tcccaatcctactgttttgtaatggagtctacccacttgacaacatctactacagaacaatttttagcttgatatttactcctaataaaaacaagttgaataataggtaatattctcagcctttacatagctcatacacacttagctttgaactttttcctttttttttcacactatgaagcattttaaaagcttttctttgctaaaaattccccttgttcaacagcacacattgtataatgtgtttaaacagtgaacattcctgcaactttttcacatacaaaattttaatcatatttgaaaaggtcaaagctagctatttagcctaagtctattatacataattcatgtatcacatatgcaaaaacagcactcagtacccgatatccactcactatcttatgtatatgtgatatgcttgatttaatatttacatcatggtgacttcaaaaacaggcatatcatacatttgatagcttggtggccatttgttaatgccctatttaactcagaatttcagcagctatgtagtgactattaacatttaaatgttgtgtaacttgacaaactatacatgaattttgctgtagaatcaataggatgagcatctcatttattgtttcttaaatcctacatactaaccaaattatttttaatatatactattattttagggggccacaaagtaaaatcttttaaaacaaaagaaaatacttcttaggattgtacataacagtaataaatttaggtatataattgtagtgttttcaaaccaatattatcaaagcagctataatagtacaaagatataccttagttatataagctcaaatgtacactcttatctagataattttatattttttattgtaaaagaattgctgtacatataaatttttaatgtaaatttactctcttggaaatctgggatccttagaactgatatgattgattattcatataacaaatcatatcaaggtgaatttcaaatgttaccatacaattttgtaatgcactatacacacaaaatcactatgaactcatagtaaaacatgaagttctttctaaattttagaaaaccatattttgagaagtctcttc

SEQ ID NO: 23207 - DNA, 1135 bp, Mus musculus
tgttgctcttacatcttttttttttttttcacacagaaatgtatttgggctgaggcaagggtgcttctgacaagatagatcacccgcctttggtttctcagtgccacatggttaaggagagaactcaccaagttcccattgttatcctctgcccatcccagtatactaagtcaagtgtaacaccagacctcaataaaaaatgttccataaatctttaactaaaatttcaattctaatctctctccctcatttctaaggtgtgccaaataatagcaatatttctagctggagagatggctcagggtgatgagtcgttgctgcttttgcaggggatccaagtgtgattccaggcatccatacaggctaactcataattgcacttaagcgaaacccagggaatgcagtgatctcttctagcctccaaagacacctctgcaaatgtgcaaatgtgcacgtgctcatgtgtatacacacatatccattaaaaaaataacttttttgaaaataaaaagctgaaaagctgtcgcttttgttttgttttgggttttgtttgttttaagtaccaccttttaacgagatcaagatgtgtgcaccattaggacgactaagccacaatggatgcattcattgttcttctttgctcctcctccactatcaccaccactttttaacacagaatgtcatttaccagtggctgataatagtcagtgcttatgaatgtaactgtgtgatagaatataccttcttttcgtcctggcattataatgatgtgcacagttccttcctgagtatctgttgggaagttccttaaagttattttcaaatgaaaagtgtggggcactgagtcaataatatgtcttctcatagaacttctttataagaaggtttacaacatagtcgtgagaattattatccattttaacaaaaaaatccagggcatgctaaaacacccatcatgctcaatttttagtgtctgtaaatgatttgttgcttagataaatatgtaccaggtatttcaatagaagtattaatccttttaatctttatatactgattataataatctatgatcagtagaactgatagaacttatgactccttatttaaccagctacagtaacctttctaaaaagag

SEQ ID NO: 23208 - DNA, 2173 bp, Mus musculus
ctgtatcctcaaggaacatgctcacctcaggccactcccattgtagaaccgtaggtagatgagcctgtatgatgtacagtatagctttttttaattacatcatgacttttggggggtctcagaggccttctatagtttctatttaagagggaggatggtgttatgtggtattggtgtccattgacacttaacaataaatagtgtacacttgggtggtctccttcagatcacctgagcctcctcctggcttccttttccacatcactgacatttccgcttggctccgagttgttctaatttttttttttttaactatttccagtgtgtcacccttcctgcctccttccaaggacttggaatgataagtagttgattaagcagcagactgaaagccctagcagtgttgcgatcaggccaaggaggataaaacttcgcaaaacaactcctccttctcagttcctttacttcccgtaaattccctgactgcaagtttctattgcaccatttcaactgccctttcacttcctctgcattatctgccaacgtaggagaacctcagcacaactaagtctttaatgaatgcctcaatgccttatcttctgatttagaagttttaaagtcggccatttacttcatttcagagaataggtgcgcacacaccttttacaagacaggctcatgcttctgcgatgttaatcaaatgtgaatctttaagagttatactttgtgttataatgattcttggggggggggaatctctaattctgttaaatatttggaatggaaagagtgggtcagcttggttcattgtgcaatctttggcttgatttcttaactgaatttcaaatttttgatctgtaatatcttcacgagctttgaaagaaacctggtcacagtgacaagcggagaaaattttggttgagaaactgaggagatttgtattcttggtggtggagtaggggatgctttattgccatagcaaatacactgtccgtccattctggaaggaagtgccctgcagagcatcatggccacgtttactaaaggcagaaataatgcagttctttgtataaaaccacaaactagtatcatgcttataagtgcacagtagaagtatagaactgatgggagtgagatgccgtgttctacctatggcatagggaagaacattaactttggagtttctgaagcagagtggatggaacctgggaagtgagcttctctccagcctgtgtgtttacttagagtaaccatagtaacatacttaggccatggaagtcctttttctttttctttttttcattagtttgatcagtacagcagcatgcagcatagtaagctagtaaatgcttttatagaaattgctattgccgagagggaaaaaaaaaaaaaaaaaaaaaaaaaacaaagacaaactttaaatcattctggcaagatgtacagactggtagaaaaagtcaagtgcagaaaggttgtcctagattttaggatctagaatgtgttggcttaaagtacttcaggactgttaggagatgaaaacattttcgatgactaggccagatgtatttaggcttctttaataaagcatgcgactgtaatgctgctttcaggatattcgttctctgaggacacattttattttattttaattaattaatttatttttgactgggtctgctggtaaagtttgctctcttcctacaagtacagaaggaagcagtccagaggcgcctcctgttcatatttctttcaacagcaccagccactatttcctggtcatgtatttgcttgtttttattttttcccttttgttgtgtctgcgtctagagcagtgctcgcccttttttggggggctctcaggccatttgcttatgtgtgttctcatttagtgaatgcccttctgtttctgctttgttatgaatggtaaagacatgtaaagagctctaaattatttatgccacctgtgcggatcgctgagctcagatggtgacaaaggatacattggcttaagttttcccttgtaaatcacttttgaaaaagtcagactttttattgcaatcagtatgacttataatgtctttgagtattttgtgagtttgaaggaatagtagagatttttggttaagtaaaacgttggctatatttttgataaaaggtgttacaattgtctaca

SEQ ID NO: 23209 - DNA, 1172 bp, Mus musculus
tggccaagagccatcttccagcggtaagaaggacttgcaaatctcaggcctgagtgagaaggctggcttcaattatgaaagccccagtaagggagggagccttgtctccttcccacatgatgaggtaacagacagaaatatgttggctttctcatctccagctgctgggggagtctgcgagcccttgaagtctcctcaaagagcagaggcagatgaccctcaagatatggcctgcaccccatcaggggattcattggagacaaaggaagagcataaaatgtcaccaaaggccactgaggaaacagggccagtgcagagtggtcaagccaattgtcaaggtttgagtccagtttccgtggcctcaaaaaacccacaagtgccttcagatgggggtgtcagactgagtaaacccaaaggtgacttactggtgaatgacaacccagacccggcacctctgtctccagagcttcaggactttaaatgcaatatctgtggatacggttactatggcaatgaccccacagatctgattaagcacttccgaaagtatcacttaggactgcataatcgcaccaggcaggatgctgagctggacagcaaaatcttggcccttcataacatggtgcagttcagccattccaaagacttccagaaggtcaaccgttctgtgctttctggcgtgctgcaggatatcagctcttcacggcctgctttactaaacggaacctatgatgtacaggtttgtgttttctcttgtgatttccaggaggagaaaaaaagtgattcgtgatgaaatgtgaattcatattttcatgttcagtgtcagctcccaaggccagacacatagcttttaggccctatagaaaagatggatgtatctcattgctactccactctaatgtgcattcagagtttaatttcccattggcagggagcagtacaaaatttccactagatttggaaaagtctgttcgtggaataagctaagattcctatttcttgatctacttcatgatagatattttcagccctccagcgatggcagcgatctctgactgcacatgataattcattgccttgttctagtttctgactattaggcttctcctatattctttctcctgggtcaatcagttttctatcttaaattagtatttgattttatacttagt

SEQ ID NO: 23210 - DNA, 1161 bp, Mus musculus
agaagtttcaggccggtgccccctccccctcccagccccactccccctcgctgtctcttgctggctgattttaattctctcctaccgggagcagcagaggatctggaggtggctggacccgaggggccgccgccgccgctgctgcaagttttctgggggctcctggcaaacggggagcagactaggcaccggcatgcagagtagtaagttgggtgaacttgggagggtagggagggtttctgcgaggggtcttggagtggcccacaaagtggtaaaacagcatagactgcctttgggtttgaagagtttagtttgtaaagccaggcttcaaacttttttcccttaaaggcccagcagggctggagggagagagtgtggcatcctctcctggtatacccgtctctgggcagctcagggcagcctgggcccaggggtctgtgccctgtcggtaccatgaggcagggccttgtagccagggcgcttccgtaggggctgagcaaggggcagacttcctctgcggtgcggttgatgcgccatgtgtcgagcgggtcaggggacacgggctggtgattaaacgcctgacagcggtgggacatgcaggcagacaggctctttgctttctgtctagttcctgtttgggctgtagagtctgaaacgcatctttgaaaggccaaggcaaacacctctatccctccaaataactccaggattataggaccccatgaataatttgagggtgaagcagaagtgggagctgtttgaagtgcaaactgtttttgaggctgggaaagctttttctgtgagtacctgtctgagatgatggtgtttcccctttcaccagggaagtcactaactgttttatggctctaggatcctaaagccattgaagtgagaggacccgaggacttacttatgggggcttcagagagaaccttgattggactcactacattttaagacctggctgacttccccatatctttttaggcctcagatttgatcttttgaaagtttttgagtcagagctatggatttaatgatgaatccaaattaggatagaatatccatcctttatccggtttggggaaatcaccgctagcattttaaacaaggtaagtgaagagagactggccgcgagaagaagcaaaatcagacacaagt

SEQ ID NO: 23211 - DNA, 1187 bp, Mus musculus
gaggcttggtcctcacattcgaggagtgagcacatgggttcagaaagcaggagatggatgaaaatgtagagggccaagggacagaaagtaccctatagaacagagttggcaagagaaagtgaaatgcatcccatcacaagtgcagaggggtaggtctctttcagagatgagcttgtcaataggaggagattatcagaacaaaagaaaaacaagaagactaaagagaagaaggggaaggggaagaataggaagaagaggaaaaagaagaggaagaactaaaagagatgagagagaggaagagaagaggaaaagaaaagagaggagactgatttgtataagatagaacccattgatgtcaggtaagaaaaaaaatcatctactgactttctcactttgaggctatatactgagatgaaggacagtgatctgtactctactgcctctggtctgtcttctgcccaacttggcactacctaaagctgtaaaatatttagaaaccggtcattaagtaggctttgaaagctcttttgtgccagtctgcttgccttttatctgatctcggccctcagttctgcgttacaacatgcactagtcaaaatgtccattattatcagaaataatgaagtagatgactcatgaaatctgtgtcttcaaagccagacttctaggagaaaaataaaaatttctatcatccgaatgtctggtgttatgtgaagcaggctccacctcaagaaatgaatggctaatgatgggattcgggcacttggcaggaagcacaggaggagattttcaagatatttgtgaaatgaacacatagggtaatgtcctatagtggttttaacctggataaacatccagagttttcaataattatggactatagcaaagatgaggacagtggcatagtatcacgtgaacagaattcagtaagttaaaacatgcaggtctttggaagtcaccagtgaaccagacaagcattcaacttactgtcaaccttattacttcccattgtaagaaaatggtagggacagctgtgtagcccaggctaacctagaatttccaattctcctcccccagcgtgccattttcggtactcctctgcagttccttcctcactccactatttcccaaggacagttcctgtttcgggaattttttttaatatataaaaaaaaaatctaagttgt

SEQ ID NO: 23212 - DNA, 1249 bp, Mus musculus
gagagggtgaaactcaggttcctaacaccgctgaaatacattgagacttgatggagatactgtggacacggtggtgaaggtgtctgtgtggggagggctcctcatgcttcctcttaattcatggtcttcctcgaggacctgtaacctgtactgcaccctgtgctgtcccctccgctgtcttagcatgctgtggctctgatctcactagtcagccagctggtggcagagagctaagaggcagggtgtgtggctgacgatgactaagtgggtgctggtttcttcattcttagctcctgtagactggaagatagattcttagcaaaagacatagtctttatctcttgtggaaaacaatacccccctgggttgctttttctttagtgtattcttggtttaaaacaaaatacaagtgattttggttttgacattcattctaggtcatttttcagtttgctgaacattaattatgctttctctttctcaaatatgcaggccagattaacacttactgccagaacatcaaggagttcactgcccaaaacttaggcaaactcttcatggcccaggctcttcaagaatacaataattaagaaaaggagcctcctgagaaggcgttgagtagacagactgttgagaggccacagagtgcacttggaaaaactcatttctgtgctgcaaagcaatggtggggaggcgcagtgccgcgactgctgtagtggtttctagccaataataaaactttaattggttgttcagttgcctttgtgtgtatttatggtgtttcaattcttcatttccaaaaagatgaaagaagtcttgaccagactcagctcgctctcagtgcgtgcgcctgtggcagtctctgctgcctctcccttcccaccctgtctgggctgctgggccgttttcatctgctctggaggcctgtgagtgcgttctgtccttgcagaggtgtccttcattcccaggcttggaagaatttgcctttattggactcttccctttcttcaagtgatagacacccgtgtccatattcatagactactgagcgtacgaattttaaaggtcattttattagattattttgtatatttgtttaggacttgatatttatcttcctgtattacaaaatattgggttaccactaactgttgtacatgcaggaagaaaactgaggagaatacatttaggatacaaaatagatttgaataattttatataccaagcatggtggcatccacttataaat

SEQ ID NO: 23213 - DNA, 1194 bp, Mus musculus
accagcggctgttggagtgtgtgtgtctatcagttgtccaggcttccttgaagctgcagatgattgcaggcagcagtggtgtagatgcggtttttctgtcagttttttatcacccctttgtaagatgttagtacctgaactgataggcgtacaagagcccacgtactggaaatctaggaatggggagaggcaaagagatcatctgctctgcagagcaaaggctctcgttgtgtttagagcctgctgggtaagaagtgcagttgggggagctttaattgtttatgtgttcttcctggtctcattataaattctcactagatatgctaaacagtgcttggccttcacccctgtgctttgagaagaggtggagctcgtgcaggcactcctgggttatgcttgaggctgactaggaggctgactagcaaggtctccctgctggccacccttacatgtgtgtgggctcctcacgctaacaaaaggcgagttcagctgccatctggaaccgtgcgagcgcctgccgggcagcaagcagaatgacatggggatgtgcttgcctttcagcaatcatctggggaagagcctccagctgctgatggaccgggtggacgaaatgagccaggacataatcaaatacaacacgtacatgcgcaacaccagtaagcagcagcagcagaaacatcaggttggtatggggaactcggcagtctcccgagtttaggtgcagcatttctggagtctccttcagaattgttgggaaaccaactgttgactgctagctaacctagtgactgtcatgttttaagaggatattcttcatgtcatatgagttatttacaccttctacttaaaaatacctggcttacagagagctgacctgttaagcccagagtgcaatgccaaggttatgcaaataggtgatacattattgagaaaatcagaggcagaagagatccacagtgccacagctcatttcttcactaactgtaattggtttggtagtggctcattgcagcatacttagcgatcttcagttcatttaaaaatgagcaattgtgattaagagcaagcagttttgataggaaagaatagaccaactgctgtgaaatagatagtatagtacagataaaaatcctaagattacctagagattctcatatgcacacgcagagtcgtacttttcttttttgcctttaa

SEQ ID NO: 23214 - DNA, 1173 bp, Mus musculus
ggttcgtatgtaagtgacgtggtcattgtttccccttcattgttttcttgatggatttagttcttagttccaaacactatgtgtgaaggagacaataactaacttaattcagaccaaacgatcacagtctaatagttgtacaccttttccttacacatttactgttctttggagttttaggatagagaagtagggacaacagttgataattccttatttagaacaagtcattaaaattgtgtttttaataccttttaaaaacaaaatggaattttgttaaagagaaaatggaaaagaccaattatttgaagtgatttgaaaactttgttgttgttattggtggtggtgtgtatatgtgtgtgtgggtatgtgtgtgtgtaaaatggatataattaaccaatagctaatgttggtggcatcattacatgcttgggtttttggttttttttttaattcctttctaatctatcctccagtacagtatcagatggagatgatgcgcagccttcgccatgtcaacattgatcacctccacgtgggctggtatcagtccacatattacggctccttcgttacccgggcgcttctggattctcagttcagctaccagcacgccattgaagagtctgtcgtcctcatttatggttagtaggaggctcctttattattcttttcctcccttaatattattactactatttttgctttctgtctttctgcctcttggagcagcctggcaggccttctcaagtaaacatcagccccgcgctgcagcagcctcagcagcagctaagtctagacagggtttccttctttctgtttatttttcttgctatcagagccctgatgtgtacgttttggaatgctggagtagctgcttcgttttttcccccctctccctccctccttgcaggagctggtggaatgagaccagatgtctaacaaactctcccattgctggagtgtctggttctatacatgactgaccaatcataataccgcatgccaagttctctctctctctctctctctctcttccccttttcttctttttcttcttttttttaacctctgacagcagcgtacaaaacctggactgtttcttcgcacaaagatttttttcttttcggcctatttaatggtgtttcctcaagctctccagaccagatgttc

SEQ ID NO: 23215 - DNA, 1202 bp, Mus musculus
cccttactctactctactaaccatggtcatctggttgcctccctaggacgtagcagagccttgaatggatgctaatagtacaaagccactgtggtttctgaggcttgccaatcatggctccagttctgaaacattcaaaataaaacccactctttctttttactttgactttttactttttttattttctttttgaaaaaagagttgtcttatcagaaaacatggtaatttcagcagatcattaatgggaaggaattaataacagaaagtggttgttgaccccaggaagtaggttaaatagtgcagcgtggtaataaggaccacatatgataaggcgaaggcacctgggttttattaggctgcttgatactttgatcacaatattatttcaaggcttgtctatttaaattgctaaggtttcttgtcatcatgatttagatcacaatttctttcattgcaaagagattttcttttctttttctttaaaagaaagattctggccaagccaaaatttggaggaggtgcaagttcaacagctagaataatcttagaacaagaaaaccattgcatagagacttgaaagccaccggataccaggtccatctgacttctccatagcttttgcctagaccataattacacttcatatggtagggaatgctataaggatgactggaataattcaattaattattgtttgatataaatatacacatttgaaacatatttcatgtttcgagacggcactgaggttctcagctttccctcccaactgctaagtggtttgatgaacatcttcaagaacgtatggaattatttttaactgcttcagccataatgactgaattatactaatcacagaagttaacttgcttgataaattgtcttgcctttgaacctgaaatctttaaacttcagttagcttaatgccagtaaatgaaatttttactcatcaggaccatcagcgtttccttccactgattttctttatcatagaagtagtctttcactgctatttaatggttgtttgttatgtgttacagcaaatgccttagcttgaaaaaacatttattttcagtagtgaagaaaggaacgggaagggttaataatttaagatactattattagcttagtagtaacgatggtcattcagcagtgtttaacatttatatgtgatatgctttgtacatttattcacattc

SEQ ID NO: 23216 - DNA, 1145 bp, Mus musculus
ttggtctttataagaaaacaaattggggctgttcaggaatgctaaagagaatgtgagatagactttccatgtttcacctgcaactgcttgtttcaatactttaatagctttcttcagcctcactcattctatgaaaggaaatagggttatcctcacctggctttttggtgaaaatacactggttctgggcattaacacaccttttgcatttgtagatcctggtttttaaggaatctcttgtaacttttaaaaaaatctacattaatttcacatgtctcctgatatctgcttcctttattttaacaaatgtctggtgatctcattaatagggttaagtatccaagagcctcctgtgagctttatttaataaggctaaaggaaatgatttgcaagacaagtatgtatttctgtggttatgcaaactcactagtggtttttatttttcccttagaagtaagtaaaacataaagtagaatggtttttaagttctcttttgtattctcttttaggtagtattaaagataatcaaacattatcaagaagaaggacaaggcactgaggttgttcagggcgtgctcctgggtctggttgtggaagaccggctagagattaccaactgcttcccgttcccccagcacacggaggatgatgctgactttgatgagggtaaggctatgggctgctgtcaagtgtgtctttgcagtgaacacaaatagtgttagctcatttctcactggaaccttcctctcgtactgggtttgcttaagtttttatagtttctggaaaaaaatgacatgtctgtgcaatgagaatttgtataaaaaagttttatttgtcctgtttggcatccattgtcttctgttttaaagtgtttaagaagaggtaagttttgctagctgttttagaaagattatccttgtagtttaaagattataccagccacaaacacttaggaggcagaggcaggtagatctttgtgagtttgaggccagcctggtctataaagcgagagcaagggctttgttatagaaagaaaccctgtctcaaaaccccaaaccaaaacaaatccaagttgaaaataatttcttttcactttcttgagctcttaggacacaatttatatgtaatttctttaactttttaac

SEQ ID NO: 23217 - DNA, 1110 bp, Mus musculus
gtgtttgtgagcctctctctctctctctctctctctctctctctctgtgtgtgtaggtgcagtagtgtttgtgagcttgttgggcggtggggggggggggtgagcgtgtgtatgaagcagctagaggtcagcatgaagtgtctttctctatcactctctaccattattttttgagagagtttctcactgaatcaataacttgccagttaagtggtcctggatggccgttaagccccagagatcctcctgtctcctttctggtgctgggattgacagcattcactgttgaatgtggctttctgtatgagtctgaggatctgaacccaactcctcacagtagtacggcaggtaaggtcctgactgaggcatcaccccagcaccacataattttaaaagtcagtcctaaggccagtgagatgactcagtgggtgtcttagtcagggtttctattcctgcacaaacatcatgaccaagaagcaagttggggaggaaagggtttattctgcttacacttccacattgctgttcatcaccaaaggaaatcaggactggaactcaagcaggtcaggaagcaggagctgatgcagaggccatggagggatgttctttactgacttgcctcccctggcttgctcaacttgctctcttatagaacccaagactaccagcccagggatggcacaacccacaaggggcctttcccccttgatcactaattgagaaaatgccttgcagttggatctcttggaggcatttcctcaactgaagctcctttctctgtgataactccagcctgtgtcaagttgacacacaaaaccagccggtacagtgggtaaagacgcctgctgcctaccttgataactgaacctcgtccctgagacctagagaccagacctgactcccaaaattgtcttcttacctccacacctccacgcaaaacaaattaatgtcatttgtaaaagtcagttctaagggaggaaagggggatagcttacccattattttgtatatggcaataaaatctgtaagagcttaagataaaagttgtatctttgacagttggagaaacctccacattcaactaactgttgaatacaatgctaccgtctg

SEQ ID NO: 23218 - DNA, 1219 bp, Mus musculus
caattctttagtctggaccaacaaactagaagtctatttgagtcatataaaaccctgcaggtgagtggttcagggctgttatgggacttgtagttttcaagaactcgggctacttccagttcactgatcctctatgtgtagccccccacctccacccccgtcaaggttcactcattaaccaaggtgatcttttcagttctatctatgaggtaagaaaaaggacaaagttaagaaaaaatctcagaacagatggggtctgagactggatcttctatcattccaataccaaatccaacttgaacatgcccggacttacaaaatgccaaggggtgattggaagtttgtggatatcagggtatacattaaatcagtgagcttgggggcagggaagaccaggattcccttgaattatgtttcaatgatgcaatacacacgtaaagatcaccttgtatgctctttgccttcttaaaaaaaaaaagccattattgtgtcagaggaagaggaagcgattcaggtacagaacatgttctaacagcctaaatgatggtgcttggtgaatcgtggtcctaaaggtaccaaacgggggagccaaagttctccaactgctgcatacttttgacaaggaaaatctagttttgtcttccgatctacattgatgacctaagccaagtaaataagcctggtttatttctgtaacatctttatgcagacagtctgttatgcactgtgggttcagatgtgcaataatttgtacaatggtttattcccaagtatgcctttaagcagaacaaatgtgtttttctatatagttccttgccttagtaaatatgtaatatgcatttaagtacacttctattttgtatatttgtaaactacaaagcaaaaaaaaaaaatgaacattttgtggaatttgtattttgcatactcaaggtgagaaataagttttaaataaacctataatattttatctgaaaaaaaaaaaagaaaaaggacaaagttgaaagggggcaaaagtcacataccatctgtctcttacagagggatcctaaaagtcgccacatcacatttactcaagacgcagacagagtttcttgcaaggagaagtgatggtttgctctccagccaggcagccttgcacttgggtaaatcagggccactgttactaagaataatgaaccatgattcctacatagtcttcctccggctgtgaagtcaatgc

SEQ ID NO: 23219 - DNA, 2058 bp, Mus musculus
tctatttcagcgagctcttgctaaaactggagcagagtctatcagtttgcttgagctgtgtcgaaacacaaaccgaaagcaggcagcagcaaagttctacagctttttggttcttaagaagcagcaagccatcgagctcacacaggaagagccgtacagtgacatcattgcaacccctggaccacggttccatattatctgaggagctagatgtgttcgagctagtgataactcactagtacatacaaattgcccccgtgtgcagggcaccaaaaccctttaagaaagtttttagatttctgtttgtacaaaaatctttgccttttctttcttctttttccccccagtgtttctaattttgtcaaccatatttttaagggaaactgcttatttgggttgggtttgtattcctggagaaaacagtagcccaagaacccagaagacttttaacagttcagaacagatgtgtgcaatattggtgcatgtaagaatatggagtaacagtcaaaaggcaccatttttaatgttagttttccattactatgttgaaaggaaaacctgcctaggaaaatgcctgacactttaagaactgtggtttgagtcccttgacaggaagagaaaaatgtcttcccatcagtgaaaccaacggtctggttaaccactgtagtagggatagtgtgtgaagcatcgtgcttgtcttcttgatcatgtttaaagtaaatccacactgagcaagaatttgtgaggttgtgctgactgatcttcttcggctattatgttctgaaatcattccgtgagtcttaggacctctgatgctatgcaccgcagctcagaacgatcagacgtctacagtggcgtgactcctcaggggctgcagatcactctcagaggtgtttggatgtttgcttgaataatgagatcatggaagcagacattcccctgcctgctgaagggcagaccaatgagagactaccccagattgacttcctttaagcaaacagtgctgtaaaaactaatggcttctctgatatttattataaatgttagtactcatctttttccaaggctgcacactcctgtatttgcaacttatttttaataactttgcaactataatcctgtatcagtttcctataatttaagtggagaaaaacatcctaataaaggctttattattaacagaccagatagcaccagaaattatgtgactatataaatatcaaaacatgttcactttgtaggacaaaattatgttgaaaagttctagcttaagtgttggcacttttatgggggggaaatcagttttaaaactaagacttccatgtatacccagtaatttaaaattatgtgaaatattttaaatttgtgaactcgtaattactactttaatgattcagtttctcgagaatggtaattgtataaaattgctcttgcagttttcttttcaatacgacgtgcctgtaaccatggatgtcccctttgtaaaaagacactgtagataattgaatgtttgattatagaaaggtcgttagtttcttgttaaacattttgttagtccagtttttgtcgcttattgggtttaatattgttcttgaaaatagtcgatgctatgttatgtataacttttctaataaaagttgtgtttcaagctgtacattttggaacatactcagttgatgatatgtcacaagagaaatgttgactgaaaaagttaacatggccaaatatttcatttgctttacctaggaatattttgtgctaattaagtgaattttttttttaaagttcagtagttccacgaacactactgaccattgtctgacagcttgttgaaaggcagcactgtcttaaggtaattctaaatctaagcagagtgcttagtgtccatgttctgacagggaaacaagtcacagtaactgaagtcataggtgcagatagttggttggctgcagtattagtgtagggtagtcagaatatacctcttcgagaaggtgagtttctgagcaataaaagatttgaaaatttagacccgggaagagggtgattaataaatgggtc

SEQ ID NO: 23220 - DNA, 1326 bp, Mus musculus
gatggtgcctagaagttcattcatcctcacaaacaacctctatggaaatggaaagtgagctctgatgggaaaagagttgagagtgtcttctggtcaccatcatattggaaggcaatgatggcgtccaaagaagaaggagggctataactccaggaaccctctgaacctgaaggatcccttcaaatgatgccatcaaagctccgtgtttgtcttttcaggaggttgtaacatgaatctgttgtgtaccttccctaagggcattgtgctgatcccaagatactgggggcattttatgaacaacagaaactcagtctgcttttttcactccctatgtagtccttttccactccactgcatttccctttcccaaatttttcctgcctttctcctttcttttccttccttccttaaaattttttaaaaatttatttatgagtacactgaagctgtcttcaggcacaccagaagagggtatcagattctattatagatggctttgagccaccatatggttgctgggaattgaacttaggacctctggaagtctcttaatcgctaagccacctctctaggacctgaaagatggtgaactatgcctgggcagggcaactccagagaaaactctggtgaaggtccatagtggtcccaatgtgcaaatccatccttctacctggatataggggcaaaagactaattgaaccatctagtaactagtttcctctgaagtttccctcaggataactggtgctctcgcaggaatgaatcaaagccctcagttttatccggtaaagtgaaatgattagaggtcttcggggtcaaagctacagtcattaaggagtttgtaagaaagagagtcaatacagcaaagtttaattaaagtatagttggtttcactattaaccatgataaccttgtatgacttcagaaacaagtcataccaacctttgagtcacagaaatatcacctgtagagtaaggagaacacttgtcttggtccatttacatgaggataacacaatgccatatgtttggtgaggtttagataacaaatttatttctgatgggattagaggaaaagaaatccaagatcaagggattaacacatttggtgtctagacgttttctggttcacagatggtgaattctcaatgcatcctcatagagtgggctgtgcttttgaaagttttctttctaaaaaaatgaattgacaaggattgtatattttgaagggattcataatggctaagactgcaggtgtggatactaccgtaatagttacgggagtaaagatagtattttacattctaatttaaatccctttggatgt

SEQ ID NO: 23221 - DNA, 1136 bp, Mus musculus
accctatcttccgttaatttttctcaatgaactttggtggtttatgttttaggttttagtttgttcatcttactctctgtcatagttaagatatttttaaaatgctgttggaaatatgagagtatatagttttatttatacaaaataaaactatgcttttagatatatgtatgtaatataatataatatgtatattatatatataatatgtataatatatatatatagttagttcctgggcaagttcagcaactttctgcttttatgtaatagtagtattaagattatatatttattgacattaatggactgaggcattttagctgtgagcagtcttttctcaaagccttttctaaggctcttttatggcagtgaaacattgagctaagttgctaataagttgatgtgggttattgttaaaacttcaatatttttgttgttttctttaacctgccaagctgccaaatggtgtcacttaccatactggaacttaccaagaccggctaacaaagctgcaggaccaccttcggcaactttctattctcttcaggaagctgcgactggtctatgacaaatgtaatgagaactgtggtgggatggaccccattcctgttgaggtgagtttctctggtaggagcatgcatgccagtggtgaagtatggtcagcacatctcctttagcaatattactcagttttaatactatgggttttactttggggaagagatatagatgtgtattttttcattagtgatatttgtagcgtttgttttctaggcttaaagtgatattttgtgtttgcttatgaattttttgtggttttaatgacagtgatttcttttattattcttagaagaaatacttaattgttattggcaactttttaaccattgctgggacaagctgtagttgagtagaacttcatcagctaaaagtcagaacacttgattaaagatgaaacagagtattgagctgaagccagcagttggagatcagtctttgaagaaatatatattattagtgagaggaaagcagtgactgggaggggagatggaataagggttgagacatgccttctgcaagagaccagcacgcatgaaaatgataaaggaggaagcctgcgtggagaggttgga

SEQ ID NO: 23222 - DNA, 1097 bp, Mus musculus
ccctgaaagcccatgaaactgtaggctaactttggtgtaagtacatactgatttctcagggcatctgtccttaggtgggagcctctagtttgtagtaaggtctcaaagacaatcaggagccactgaggttactttaaactgttttaaacggttgtcaccgtgcaaggaggcagaggaccttatacaacctgtctattctctctacttgttcgttatgattgtggtacttagtctgactgtcagttgatagtgttttgagttaagagagacatctagatctgtcaggggggaatttccagaggagtttatctgaggaggggaaaccccatcctgagtgtgagtggcaccatccgataggctgggctcccggactgaacaaaaaggagagagccattgttcttctttctctgcttcctgactgggcacaatgtgaccaactgcctctcctgccctcccagccaaggctgccccctgcaccacacctttccagctgtgatggacagtaccaagaacctgcgatcccaagggcacccttccttaagttctttttgtcagatctcatgttataataagaaggaaatgaatgctttaatcaccaactgtttaaatcattgacccccccccccccgccccccagcatgatataaaactctggattctgtgcttggaaggctaggcagcccttggttgcatttttacctggagatactcttgcagagctaagtgtcctctcaaggtgcttgtgttctctagttttcccaggtccttttaatggaaatcccagaatgctgtggtctaaatgacatttactaactagcttgggtagataaggagtaggttctagtctgttttcgttcaaaagcaacttctgcatgtgcgtagtgtttgacagataatatgagactcggagattagatattggcctaagacgttagttcgttgcaggatgttagaacaatgggaactttagactcaggactatctggctcagctctcacattgcttccacagagcttcagttgtctcccattattgtgtcagtagaccctcacagtgttgttagcagtaggaaagtatcatttccagttcacaaatga

SEQ ID NO: 23223 - DNA, 1192 bp, Mus musculus
ttctattaaaaccgtctttgggtagactttttagaaggagtcctactgaagccccgaatacagaatttatattcactcccttttttaaaagacctggcaacttgcttcagagacactggaggagcctttgaaacgagggctgcctgacatttttgggtgtcttttcaacaatggggtagtcagaggtctgcaacatgagaacataaaagaaccatttcccgtgtgttgaatttactgcttttggttattagccactgctggcttcaaggctgtgctgttggtgcttctgtgggccggacgtgagtacctcatctctgccactttccattgttaactttgggaagactcgtttaacctttgccttaatccaactataaaagcaggatgcagacacatgtttaacagtacatcaagtacttaaaatagtgtctggcacccagaaaagatgtcttttcctcttaacttgttagaatgggacataatgatagggaaggaaatagtccgccaccctacagccttgaaggcatggttgaaggtcattctgaggagccttaagcattccttttcccagtgcagacgatgagagatgcaggatcacaggacacgactctccctgttctacagtttgtacccattattgattgtgtggtggcttctaacagtgtaatgctggcttctgcactttaacgattattcttctcgtaagcatgtctctgcctcacattctgttttctatacacaggcatcctgtgcacagtggttcccagcactgtctagagataaatgctcgtgacttcagtctccctctacggaagacgccattctgtctttctaccacctctttcctttcctgtcccattgtcctgcttaccacatgaaaaggaccaagggtggaaatcaaacgtaggaaactaacggtttcagaaacgaagggctggatttctaaagccttcataatatattattattttgatatttttgtgtttggatctttaaggtttttttgtttgtttacgtgtttgttttcatttttattttttcctcctctgcttccaaagtctccagaagcacgttggtcatggttttacagctttgcagtgatgggtgcgatagttgctttttttttattgaaccatagattgcagcattgtaaagcttactcattcggaggaggaatgaaggccatttttaa

SEQ ID NO: 23224 - DNA, 1177 bp, Mus musculus
accaaggaagaaagcccaggctagatcaaacctgactagggtggtgtaaagacatctttctccttcccttcctattctcccctcccttccttccttcctcccttccttccttccttccttccttccttccttccttccttccttccttccatatatgtatctatctatctatctatctatctatctatctatctatctatctatctagtatgtatgtatgtatccatctagtacgctttctaatttttaattttgctcttcagttaagactcatcttttgtgaatgtcacctataagggtcatttctacttctgcttttccaatggccagtaatgagttttgtttgctgtgtgctgatagaaagacaattgctatggcactttgtccattggtttgataagctcttttctctccatgtcctgtattaagggttaatcagaatggttccaagccatagcccccacatgcttttgaattcagtcaccaggattgttgagcagtctcgaataatggaaatagcaaatttggacacttgtcagtagccacagtccatcccaagatgctgcagatatcaagagctctgtgacttctggtgggggaatgaggctcatctgttgtccgtccatgtctgtgtggtcccctaatgtcaatgtgtgccttcatcagtgtcagcctgctgttgtttctgctttttctaaagttgtagactccagcaagccacccacactgcagaaccctggaaggtgttatcacatttatcagtgttctctccaagaagacatagactccacacagcttaagataccccatcttaagagatctggaaggaagtgtttgaaatggcatacatgtttgtggttctggtaaccaaggaaacgtgtctctagatacaaagcctcctttttaaaaatgatggcactgtactgggattgtctcagaatcaccctcagcaagattccaaaggggtttgaagttaaactaggtcatcttcagaacctgaatccagagttagccgacacgtgggcaacatctcttaaaacatgcagtgtttagaaggggggccagtgctctgtggacacggggagccgccgtctgcatagtcagaggcttgtttggatagatgtgtaatgaatccctcctggattcaacttcccttgactcttgtttttttgtttac

SEQ ID NO: 23225 - DNA, 1186 bp, Mus musculus
tttgtaagtccaattcatggaagctcttagaaaatcatgaaagctcttagaaaacccctcgtgtgtacatgtactttcccagaagttcacagcaccacagttcccctctcccagggccagtagccaggctgtttctgacttcacagtgcggttggttacatcttatgcatggatgtatagcgagtcatagagcagcctcgtggagaatgaagccagaagagacagtatattttcaggagcaatttagagcatgattgatctttctgatgctgttagtgtattgtttctagctgactggctttacccgcagctcctgggcaacactgtgcttaggaagaattgtgggagaaactgcatcgattacttggtaagttagctctacactctgaaatgaggaaatcagattgtcgtttacccgcatagaaactctgtgatactgtcacatgtgtcaccagtcttagagatttctatgcccaattgcatgttcctctttatttatttttaagctgtctttattcagtttttgtttctcattggagtagcagttcttcacagaatagtaaccgaatctctaagatgaatcaaagatataaaaaaaagggggaaattgtggggctggaaagcgactcagaggatgaaatcctttgctgccaagactgataacttgaacttgagcccctgagctcagtgtgtagcacaaaaggagagagctaactgcagaaagctgtcctctgactacgtgctgtagcatgctcacaagcactggtatacacacacatgcacatacgcaaatacacacaggcacacattcctgcatgtacacgcacatagctgcatcacacacatagctgcataacgcacatgagtacatatgtgtgtgcacaaagagtatttgaaattgtatactaacatgaactgagtttgctttaattaaatcatcactttgtgtatataaattctgtcattgctaatatgctgatagatagccgtgttcttctgtttttttgtttgtttgtttgttttaagatttatttattttatatgactacactgtcactgtcttcaaacacaccagaagagggcatcggatcccatgacagatggttgtgagccaccatgtggttgctgggaattgaactcgggtcctctaggaagagcagtcagtgctcttaactgctgagccatc

SEQ ID NO: 23226 - DNA, 1143 bp, Mus musculus
tgcatttaatgcctttaattcaagcacttgggaggcaaaggcaggaggatctctgtgacttagaggctagcctagtttacatggtgaattccaggacagccagggctatgtagaaagactgtctcaaattttatgtgtgtgtgtgtgtgtgtgtgtgtgtgtgtgtgttgcattacatttatctaatacatttgttatcacttgcttgatattcattaccagagccaccctgttaataaatccggcctgattgctcttcagaacaggtagccccttggcttggtcctgtgaagctgcttcttgttactgatgtcgctggtgcttctcagtcctggtctcaggtttagatgaaaactacagcagggtcactcagctttaaaagagccccccgggtatggtctggcacaccagtgagggctccttgcttttgctgtgaagtttatggagagctgtctgtgctgcagttactgggggatgcaggctttttttttttctcctttggttcaaatatgtatgtatgtatgttcctctggggtgagaattaggcatggcagtcacagcgggcttctccactatggctgcctccccaacccccccccccccccccagggctcctggcattccttgaatactaccttgaagagatagtttagtgcttcctaggaactctggtctctgtaggagttgtttgtttatatatagtctaaaatgcctcccctcccccaaagaaaaatgtacctatttatttaactacaacagtttgtacttttctgtatgttgtttctttaattgaaaatcctatctggagacagatctctttttttttttaaaagaggaaattggaacattgttttccaaatacttaaaaaaaaaaccctaaaaagtttgagaccttattattattgctctgtgcttattttacattaataattcttgatttttctgtttatatgacatcaagcaaaaattgcttcttaatttcaatttgggtacacagtcagttctatattccaaatatgaggtaagttgggtgtggcttaacaccaaaactgcagcacacaggagagacctaggaagatgttcaagtagtgtgttcaaggctggccttggttacatagtaaggccctatctcagaaaacccaa

SEQ ID NO: 23227 - DNA, 1890 bp, Mus musculus
tccgtgtttttatcccgaaggtaaagagcagcctttggagatgggtgtgcattccatggtggcagccccgctctccatgtttgctaaggaggctctgtcatcgcgacacagcgagcaccatcaccaccatcaccatgagcacaagaagaagaagaagaagcacaagcacaaacacaagcacaagcacaagcacgacagcaaggacaaggacagggagcccttcgccttctccagccctgccagcggcaggtctgtgcgctccccctcactctcagactgaagcctggtcctctgtggagacacaagcagggagtgtggagagactgcagaggatgtctatttgtatgcctgaggtttatataggaatgagtgtattggctctggatgaatgttccccccaccccagtcccccccattcttcctgaaaacagaggatgacttttataaaagccttcctgtccactgcaggcccattcagatgctggtctcctgtggacccacaaagtcaggtatgcttgaaagcctttgatggatgtcagaggcagaaggaccttttcaacagaaacaactgccagatctgtgggacccagcggttccatgaagtgctgaataccgccacttggaattgctggagaggctgttgtgtaggactcaatccctcgactgctttttgtgttagccattgaaactgaacaccgtcatttatgagcaaagagtcttatatttctttttaccctaaagtacaaaaagttttgaaagaaattattttttaaaaaatttaaagtaactatcttttggtagtacatttggtgattatgatgttgcaatgtagcagatgcaacattattctccagtcaagatgtttaaattatgttttgttttgtcttccattaagtgcaagtgaatgtgttcatatgtaaaatatctcttgctgaatgtggacagtttacacacttaacacatattctttctaaaattactctgtacataataagccaggcatggttgtgcatgcctgtaattccagcagttgggaagtcggaggatcattcaaggccagcccgagatacatgagaatctgtgtcaaaaaagcaaagtgacaaacgttactctgtctaacaaaacatgatactctgaaagggtgtctttatttgctgtttgcgagcttggatatagataatttggcccacactggagtataccagcaacagtttaaaatacatgtgccatgctttggtttcgtattttaaaagtttgtatggttttatgttttggttttgattttaggtttttggttttctgaatttaccaggttctgtgttaaaaaatattttcatatctattcagttttattatttcttttgttactaaatatttgactcatttcttgatctcagaataaatatttcaaaggggatccaaaaatgctggacttttaaatatacttttagttatatttaacttgtttaataaataactttttaagttggacagtctgcctttgtttttctttatcatcttgttagcttcctgagcatgtagatataatatgccaggttgcatttgcagagggctttgaaatgagtgggatttgaactgtcccagtaacagggcagttcagcagatggagatgaggttaaggtctctgcagaagaaacaatccttcaaagctagactgcgtgagtgaccttgacctggactgtgagcacaaaggaagtgtgctcgggtgctgcgtgcaggagttgggatctcactgcagtttgggctcccttggaactcactgtgtagatcaggctaggcttgaactcccagaccatctggcctgctaagtgctgggactaaagccgtgggccaccacacttagggctgattcaaacttatgaaatggtg

SEQ ID NO: 23228 - DNA, 1205 bp, Mus musculus
gcagggtgggggggaagtgcagtagccataggaaatatattggaatagctattttgaagaaatacagtaaaatgaaagtgggtggcctctgtctttatgtaagccagtctgaactaagatactgttagttggtgttggctagctttccctactcacaagtgattactgtgcacagttttaatatttttttctcctgttaccttgaggcatcattgcctcttttacttagatctaagggacaaacacaaacttcagagacttacaaagaatgcagcagtgaatcttctgcacaacattgccatgtcaaatattaataagaatatgtgcctggccataatagctcacaaaattgaggaagacataacaaattataaagaattctcttattaccttttggatagaagaattaagattgcaagatggttttggaaaaaactgaatccgatcaggaagctggacctctggatagaatgaaccttacataagaagttgcttgatgtttaattttcaaagacttgtcagaatcagaatcatatacgttacaaaataatgtacagttatcttctgtcagcagcctgctagtttacgtttgccctttacaatgcacgtgagtgaaagaaagaatgacttttgcacgctgtcctctggcttccacactcaaagcacagcatctgagcacaagcgcagtgttcaacacacacatgcacactcactcaatatttttttaatttctgaagtagattttgtaagaatagtggtgtgagcacgcctttaatcccagcacttgggaggcagaggcaggtggatttctgagtttgaggccagcctggtctacagagtgagttccaggacagccagggctatacagagaaaccctgtctaaaagaatagtggtgtgtggtaattaatgatgttggttttgtctgcctcttaggcactgcacatgactggaggttacggtgtggtgctgtggacttgtacttcacgctgtttggcctcagcagaccgtcttgcttacccttgccagagctcgggcttgttcttaacctaaaagagaagaaagctgtcttgaatcctaccattattccagaagctggagtaggcaaccaggagtctgcgagtaacccaggctgccacgctcagctagctggattccagaaccctgtgagtgtccccagcacaaaagacaaagcctcactttgtgc

SEQ ID NO: 23229 - DNA, 1152 bp, Mus musculus
ttgggagtgaaaaaggaaatataaaagaggagcgaaaggctcaacctcctgcaaaaactcagggctcagagctccgccccgatgtttttatttttctccttgtccccgccccccgaccatgagagagcccaggccacgcccccaagccgaagttccagacccggactcgccgacttctcctgcttacccgcagggattccctcaccagccaatcgcgtctgagccacggcaccgcccggaacaaagatggccggggcggcctcggggagggcacattgatccaaacgccaggcgcacccgccgggacagcaaaggcagagtggcaaccgcgcggtcaggaacatggaagagggcagcagcggcggcagtggtagcagcgacagcaacgccggcgggagcggcggggtgcagcagagagagctggaacgcatggctgaagtcctagttacgggagagcagctccggtaaggaaaggcactcagtagatgggctctcgattgccctatgcccgccgcggtccggagcgcacacgccatctggctcgtggcaggcgtgtcgcgcggggcgtagggacagttgcgagcgagtgggatggttgggtcgcgctgcacgggtgcctggctactgcagcccggaggctagcagcttcagccaggctgcggggaccgatgccgggaacgcgcggtgcaggctgcgccctagctggactgctgcagccatgcgtccctccgactcgccaccactcagtgcgtgcaaacccccttgccaggtgttcctgatgactgtctagtctgctcgctccaaaaagaagagatttcggatgggaccccagtccctgcgcttccagatagaaggctccagcacccatgagtgccttcggttcagctttcctttttttctagcaagacatgcttccctcattggagcttcaggttacttttatgtaaaacctggagcatatctgcgagtgctttgacgggttgcttctcttccaaaacctttcccagttctttacctatcccttgattggcacacttggtttcaggtgtcacttgggtccgcaagggggcgtgaaagtaccttgttcagtgcccacgtttgggaccccggagttggcccaccgccgcgcacttttcctagaattaccacttt

SEQ ID NO: 23230 - DNA, 1120 bp, Mus musculus
ttttacaagccttctcgtgtcatgggatgtgatgccaatttagggatctgcttgccactacaagctccatcttggtttagatttcttcatctcacgaatattttcttgatctagaaaagacttcctttgaaccagatatcgtagcatgttcctgtaatcccagcacccaggaagtggaggcagaaagatcaggtgttcaaaggggaccctgtgtgaaaacaaaacaaaacaaaaatggagacaaggaagtgcattggggtattggtatgtagaggatattcctcagagtgccaaatgagagccattttacatagtgaattttgacagagatgcaactttctagttatgcattaacaagatggtaatgccatagagttatgcctaagtgatttcttaatgagatgtgataatcatgtattggtattagtagagtggattttattaacacgttaatccaacttttctagctttagtaagaaaacaagattttgaagtgccatggggatggctgatattactattgtcagtcttttgtttatgttgctgtagcatttattgacggcgttctcctttgctcctcctcacacccttttaagatagatattattaccttcatttttcaagtggggagactaggtctgagcaaattcagtggtcttcaagttggagcacctgctgtaactaccatgtactacagtgcatttctccagtgctccaaccccttgcctttctgcccagacttcctctttagaggccttgcgtttagccttcgctccggtgtgctaagaccttatggttactttgctgttgttcttgttttattgatcttatggttactttgctgttgttcttgttttattggtctaagaggtgagggccatcatcatcatccatcttgtgaatgacgaacgctgttcctaagtgggttggttcgtcatatgctcaaaacagcccggctactaaataggaggccttaccacatggcttgaatttctgtctgtctgtttggttggttggttttaagacagtgtcaagctcctgattctgtacttcctaagtaagattacatactcacagccccacactccccacactccccacactcgggctaacacaggct

SEQ ID NO: 23231 - DNA, 1068 bp, Mus musculus
cctttgccttgaaccctagatcctatcatttccctttagccaaactcagaacctcagaagcccctgtctgtcagagagggagtgaagaacagtttggctgacctcttagggttcttcttatccccagtttaaagaccaagtgccagagaatatttttttttcttctgtttttcgagacagggtttctctgtatatccctggctgtcctggaactcactcagtagaccaagttggcatcaaactcagaattccacctgcctctgcctcccaagtgctgggattgaaggtgtgcaccaccactgcctggctgagaactttttttttttttttaaagatttcttatttgtttttcattacaggtggttgtgagccatcatgtggttggtgggatttgaactcatgacctcccgaagagaagtggatgctctttaaccactgagccatctcaccagcgagaacatttttttttaaagatagggtattggtgacagttggcgggtctccctacaggatgtgatatagtcacagtgagtctccctttctttctttcttttttattttttgtttgtttgtttttcgagacatggtttctctgtaaccctggctgtcctggaactcactttgtagaccagctggcctcgaactcagaaatccgccagcctctgcctcccgagtgctgggattaaaggtgtgtaccaacacacccggcgagtctccctttcttaaccccatgaggataatccttcgccaccatgatgtgctctcctaactcattttgggcactgttacctacacacgtcctcttttcatagacaaggaaactgagaacaaacaaggtacaaaaaaaaaaaaaaaaaaaaaaaaaaaagatagggtgttggtggtcatagtgcacacctttaaccctagccctctggaggcagagacaggtagaggcagatctctgtgagttagaggccagcctggtctacagagcttgttctaggacacccagggctacacagagaaatcttatctcaaaaaaccaaaaaataaaaaaaaaaaaattaaaaagctattgctgtgtag

SEQ ID NO: 23232 - DNA, 3466 bp, Mus musculus
attttaaattctccaaattcctacagaccaataaatcccatccaaacctctattagagcacagtcacttttagaatgtccttgcttggtcacatgcctgtctccctcagtagacgctcagcatctgcagatcgaggactgtttggtacccaaagtctagccttcacctgttccttgcccaaaatagtacattagctacttactgttgtctgatgggcaacccccaaactatatcacacaatagctccttttatttgctcacgactctgagggttgtcagcatttggctgatgtgaccaaccactgctccaaaggtgccaggaggtctacacacacgtttgtattcggtgagctagttgtcggaggccttttgttcttggaagctgctgtcatttgattcttgaatgtctgtctcccaaagtcccatgtgttaataagttcttttcactagggtggcaacactgggacaaggtagaaccagccacacatttcagcactcggtgggtggaggaggcaggaggatcaggaattcactgacatccttggtaacaaagcaagtctgagaccacataaaatattgcctcaaagatgcaaacgaagaagtggtaggacctgatgagagaactgcagggacctggggagtttgcccctggtgggactgtgggaccccagctttttttcatcatttatttcttggccctgagacaagtcatttggtttgaccatttgctcctacacagtgtcctgacttatcacatgcctcactggtgagttagtaccgaatggggccaatcagttatggactaaaatctcaaaaactgtgagccaaaaataacccttttctctttatcaggtaattaccacaggtatcttgttatagtgagagaaatccgtctaacacagatggcctcatgcaaaccactccaagccacagttccaggtcgtgtagttccagacaatctagagacaacctgcaaccttctcttctgtagctcagaaacgaaacactttgactttcttcaattcaaacagctagctggagagagagcacagtggcaaagagcctagattgctcttccagaggacttgagtttgcttcctaaaattacataatggctcacaacagtccattgctctagtggcacaagatctgacaccctcttctgatcttcttgggtaccaggggcgcacatggtacacaaatatagatataatgcaaaacatccatatacatataattaaagtgaataaatacttgaaaatgggttaataaataaaaccagcccagagtccaggaacagagaaataagcagtaccttttatgagaagacctgcatagaatctgtggccaattttaattctctaaaaataaatacagaggagccattattagtttaatgcagttattgaacgctttagactctcgaatcaaattcttacccagccattggatgggagtgagatgtacctgaaggctggtttataacaaaaccttccaagtccatgggtcctaaaatgtcagtgctgcttgggctgggtagaacacagtttaatcatctcattgattagtgaatgaggcataaaacaatcttggactatacccagacttgtgcagcttggccgaattccttgagtctcttgccttccatccctgtcacagtagattcttctgtgggataaagtcattcagctgaaacaggtttatggcactgtggactcaaaagtggcatcagggatctttgaagagaagggggaggatcatctgctattgttatttgtttcaaataccaaggtcttattctgtatgtattccaagttggccaggaacttctagtatagcacaggctagtcttaaattcatagccatcctcctgcttcagcctcctgaggacttgaattataggcccgagctaccatgcctgtttaaatgagtttggtcttcatgtggatttgtgtctgtgatcttcaaagaggaaacggtatttacttattcactgcctgagataacatttaactgcgcatcttggacatattcttccttgttcccttataaaatgtattttcaaagccaggcaagaaggctcacacctataatcccagtattcaggaagtggagacaggagagttgtggtgagaggccagcctggactacagagactttgtctcaaaaacaaaactagataagaaattctagactcttttttttgtttgtgtgtggtgtttatgttttgatgatagaaagacagattttgttttttgtttcttcattaacacagtatatgaattagaagggctttttttttattaaaatgaaaactgcattatcttttttactgtttctgccttctgaagtttaattacaactgggcagggtggctcacagcacaaagattcgtgctggagaatggaatttgaggctatcctggctatacacagagaccctatctaaaaactaatttattaggtctagtatctcacacctctaatcgaagcactgcagagacagaaggatcaccacatctaaggctagcctgggctacatgtgatacccaaaagacataataaggaaattcattgagaaatggaagggaatgtgaggaagatcagccatctttgcctagatgaggtgtggctgactttatagatcacgtgacaggtgcctctgctttggaaggacagacaccaggttaagaatatcactgctttctattcaaatggatttcctgagtttccaaatctttcctttcaaatgtattgtggagatagtcaacttcaaggccaattttgaacccttggtactgactctggctgctatgaattctgttttactttgactataaatgatcagaataactccagagcactgtggtgtttctgactggttgaaattgatgattgacattaataatgatttcctgccacctgaacttcaggtatgatgcatatttcttcactgcagaaccaaaaggacaaatgagctgtatgccaaaatgaagtttgccgtcaaagatcgcatatagtattgttaaataagtttaaaagtacttaatatatggctttattttaaaatttcttgagtgtgatttgctatctttaataaaactgtaccataatacttaagatgattgtatgaaaacacagtagcatgaaataaatgttacatttttaaaaattaccaagtgctgactttttctctctttgaaaacaaactggccattttttattcacatcaacgtgatcttgtttttttggttttttttttttgttttgttttgttttggtttttcgagacagggtttctctgtatagccctggctgtcctggaactcactttgtagaccagactggcctcgaactcagaaatccgcctgcctctgcctcccgagtgctgggattaaaggcgtgtgcgccaccacgcccggctcaaagtgatcttctgactgaatagagaaaacgcatgggattct

SEQ ID NO: 23233 - DNA, 1187 bp, Mus musculus
gtctaattaaatgcctttggttatcaaatttttgtttggttttcattttattttctggtctttcaataagtttgtaatttcatgtcatttaaactggtgtgaagtaaaacctcctttctcagagtctaatggtgctaatttaatttgttacactgaatgctttattgtcctttaagagacatgatttatttgagcactgcaattttatattcattcccttttggataacaaaattaaatgtaggaggatataatgaaattgcaggggtttttccccctatcttgagtcccgtagcattggtgacctccagagcgatacatatataactagctatgctggagaattagcaagcaattatgatatagtttattgttctccagcacgatggcatgatctcaaatgatgaagtattataatgtgtaaactcctgaggatgtgtactgttgtaaaatagtgctttgtttgctaaatatgcttaagattcatttgtttagagcactgttgaaacctgctttagttgtagcatgctttaaaaactatggtattttttgttttgttttgtttttctaggtagagcaatgatagacataatactgttgccttctgacaaagaccctcctaagctaaaagagtgcttgcccattgtaggggccttgaaacatctgaaggaatggcattcagcaaaagttatcatagcaggaagttactgtgagatgtaagctcctttggtcaatatgtcattgttctgctactggggtttcgatagattgagcctttgaaaattaccttaatgtgacgaggtagtcttctgttgtactgtgactagagacttgaatctttaccagaacctaggtttttctcctctcctcttgctgagatgtttaaggttttgatagatgctgtcagtgatgccgtgagtcaccattgagcaccgtgtctccaaatgcactgtgcacttttataaaggctttcagtacctctgcgcactagggtggcagctccacaggacttaccatgtcctgtctgttttctgtggtacatgccaaggtacacacagttgtatttgtgacacattagtagaggtcagttgtgcattccacatttgattccaaacttagtacttaaaggatgctaagccagacctagcattggatgctggtgagccccctgtatggaaaggaattcca

SEQ ID NO: 23234 - DNA, 1102 bp, Mus musculus
actgaatttatagatctataggccatgtgttagatttagccctgggcataaaatatgctgtaagttctgactacacttaagcctttaaaataactataaaatgtgtagaaataaaccttcgaagatctttggaataggtgaaaatacgaatatgctgtttcctgctatgaaatagctaaatgatttttatgacaactttgttagttcatggcatttttttatgtctgattaagttgcaaagcaaaggcgttaaaaagatttatatttggacaaagtatactgtatactacagtgtacagtagcctgagaggaacagaaggatgcttctaatgtctgctttgaaaaaggaaaacatttctttttttttttggtttttcgagacagggtttctctgtgtagccctggctgtcctggcactcactttgtagaccaggctggcctcgaactcagaaatctgcttgcctctgcctcctgagtgctgggattaaaggcatgtgccaccacgtccggcttaaggaaaacatttctgcgtcattgtagaagcaatataaatgatttaggaaagctgaaataagaatcattttttttgttttacttgtatttgcttttaggtacttattttgcacagatcgttgcacaggtatagcacaaaggcttgtggtttctttcgtaacattctttagtgaagggtatgagtgcttcctctagggttctaagtgtataagtagaggaatcctaatattgctcattacattccttgttagcttgaattctagttatcacttgccttctcttttagcactgcccttgctacttttctgataaaatactctgacagaagcagtgtcaaaaagaaaaggcttatccacctcacagttgaggtctgcggtccttcatggcagggaggtcactgtggtaagatggagaagcagtgcacttaccccgcccacactcacaagcagggagcaatccatgcaaagtgctgctcagctcccagacagtctagcatgccatggagacggagagggaggggcccactcacggtaagatgggtctttccacagcgattagtgcggtcatgataacccaccacaggcacact

SEQ ID NO: 23235 - DNA, 1099 bp, Mus musculus
ttcaaacctgtaggaaagtgttgatgcatttgtaaattgtattgtaccctttcacactatatattttcagagatcactggaatgttgttatacaagagaattatacttatgtattgtaaataacatgatacatatattaattccaatagttttattcaacaatgtgtaatctaaggtgctcggtactacatgaagtttgagttaattactcaagttgcaaagattctattatatatttatagacaaattaaattgaccatagtcacagatactgtttctttatcgcttacgttttagcctgatcgatatctggataagagtcaacataaactgtcttttccatttttaaaattttaatttaaatatttatattttaggaaaagtatatttgaataaaatcgatgcattttctgaagtaaattgaaaggtgttattagcaagaaatagaaagattttactaagggagttatgtatatgaatgatttttttcctcctaattaaagtatatcatatcagagtggctatgatgagtcaatttcactgttgtttctcagcttgaattttaaacatcattttaaataatgactttagagtgtatttttttttattttgtcttaggcgttagtggatgatacaaagtaagtcaggttcatgtcctggtcagtgcatcaacctagtcatttgggagagattgtttgtttgggtttttttttttttttctgatttgctttgttcttatttctgtgacgtatggaacccataatacttgttcctaaatgaaaaccaggacagatgaactatctttacttggtagattcttcctcagttgcccgagcctggattcattagtctggtaatttgcccatgcttctcatcttatggccatttcaagaaggcaagagggatagagattatgtcatctctttctaacataagctaaataatacaaaatcaaactatataattattatgaactacccagaccaaggtatttaatgaatggcatcaatgaagtatggaaataatttttgggtgtatcttgagtgttttttttttctaaatctgcctgtgttatagcccctatgaatgtcatgtacaa

SEQ ID NO: 23236 - DNA, 1212 bp, Mus musculus
aagccaaggttaaaagcccactcatctacggatgagaaaatcatttgatcacctcagttaagcgttgccttatttaacttaattaataggggggagagagattggagacgtactattgaaagggcaagcccttcactgcctcccacccaaataaaaaggccaattggccttgtactacaagagccggtcactccttctccctgtttcccacctatcttccaaaaatgctaaggaattcaacttagtgttattttcacatcgttcagtcaaacttagccagagttccaaacgccctacttaaaattcaactagaaagttacctaccaagtactaattagcattataaagtcagagtctgcagctccaggcctttcagttgtttactagaaaggacagtcttaagccagatacagtttaccataagaaaagttaaagattcccagtgaagcaagttttttctttagccctagattccaggcagaactattgagcatagataattttcccccctcaggccagctttttctttttttttttattttgttaataacagggaggagatgtagtctcccctcccctagcctgaaacctgcttgctcggggtggagcttcctgctcattcgttctgccacgcccactgctggaacctgaggagccacacacgtgcacctttctactggaccagagattattcggcgggaatcgggtcccctcccccttccttcataactggtgtcgcaacaataaaatttgagccttgatcagagtaactgtcttggctacatttcttcttttgccccgtctagattcctctcttacagctcgagcggccttctcagtcgaaccgttcacgttgcgagctgctggcggccgcaacagacagtaaataggcaaagatggtgccagagaggcctcctagccaggtgacattattcattcaagggaccttcaccaatgtcagatgttggtggtaccacgatcgttcaggaaacaaagaggaaaacaggccctgtcaatcagacatctaacaagtcaccaaggtcacttgtatgaaacaataacttaaaaaaaaatcaactgaacactgttctctgagatctaagacagagatctgaatgtctatggggagtctcatggaaagcttccttgagaagtctggaacgggtcttggaatgagttgtgtggatgtgagcaacaggaagcctgatggga

SEQ ID NO: 23237 - DNA, 2369 bp, Mus musculus
cgaggggtgaactgactgtgtgcccagagcatttgtgctgcgctgtgttgtggtaggaggttccagatcacactggccagacacacgtccctggaggcaagcttcgggacactgattccgttccatcctcgttgcggatgtgtgttcaccgagtcggtggagaaaagagtgtcaggctctaaattttttgttcattgttttttgtcccaggccttttctggtcgagtgtttgtgttaatggcaagggaagtacaactcctcagatgtgtgtcgatcagtttttaaggctaatagaggcacatctgaatgagtcactcataattagaggttccaatagctttaggatcatttgcgtttggaggtcattattatcttgagtcatgcatgtatactctttgtgaatcagacctgctcccttttcataggtgggcttttgccagcagagctcagcttatcactaaataaagttttctgaaggctacagtgctttatatagttactttatgttgtcattctgaaatcaggctgctggccgcagtgtggtgtagctggtatgctctgaatgatgtctgaaggtttttgctacttgggtttttcctttgaggcaatgtgctctaacagtgtgacttgtctttctctgcgcattaaaactgtgatgtatgttatattaggaagggggagtttgaaaaagagctctccctttctccatatttaatttatgtgattaaactgtcgggtggagagaggctgaccctgagccgcctggttctcctgccgacccgaggctgtgataaaatgtgtttgtctaagatccacaagccgatctccctgtgccggtgcctgtgcacttctgtgcaaggaaggtggagactcaccttcggaaaggactgccacttgagcgagcgagagattattctaatgtcctggtacccggctggcttctgggaggactggcttttcgaagggtctgcaagaatgcagaacttttctgtacaaggcagatgttcataacagtttttcccctggacctgattaggaagctgataactttattatccttccaggatagttttaccaaagtgagccggttttgagtgttgacttcacaaggtaagaattcatagtgggttctcttcatgaatgtgaaaaaacaaacaaacaaaccttattttgtacagacagctttcctttttgtaactaatcctttttactggtaaatattgtaaattaaaatgtgcaacttgaaggctgtctgtgttaagtttccgtacctttgcggtggtgtgttatatgatggaatctatgtcactgccttcaccgggtcggttttatgtgatctccagtagtttatgactagcaggacagcaagcctttttgtatgtgattggtgctcacgtattagagaatgtctgaattcctggaagaaatcagtactgaggtttcctctgtgtgtgtgcacgcgcctgaacctgcctgagggtgtgggtgttggtgtggggagagagtgtgtgagggagaaaaagatggtatgtgagtgcctgtgtgtgtgtgtgtgtgtgtgtgagagagagagagaggggggggggagggagggagttttggtatatagcctatattgtctgcaaacttggaatcttattgcctcaagcctttcaagttctggaattagacatataccatcacatttggcttggtttttatttaatgaggcaggatgcttccaaattttaggagtcacagctgtgactgtgcatttctatagctttcacccatgagtgtgagtttcggaactctgaagtcagataaacccttccataggtaagaacaccagactaggacacacatgccaaggttttctcttaaaggtgagcagtttgagtgtggcttcctggccttgtgatgcgtttatcccaagataggtcaacaacaggaagcagggctgtgcacctaaatcttaagagagaaataatgagccaataagaaggaaagaccctgttgatttagaaagacaggacattgccagtctcgtggtagttgagctgtcttttgaatagctaataataggcaatgttgcggctgtcatcgtctccgttgccaattgtgtgtgaggtcccttgccattatacccttccagtagtaacaatcctggataatgaaacgtgctaacccttgggaaggtacaggtctttctggccttctcacaggtagtgtcttagaagcctggcctgggcaagcatgcttgctggcagtttatttgctttctagagtggctctggattgggattggggaggtaacagggcactggcctgggtatttcccttttcccaagtcagttgtcctgtttgctcctatctgtcctgacacacta

SEQ ID NO: 23238 - DNA, 1105 bp, Mus musculus
ttgcaggtgttcgtttgctccggcaagaatcacgtgggtaaagatggaagaaggatatgtaaatagcagccgtggctgctgcaggtgcctgtgtgagcctgggagacctgaagagtcagtactgactttaggatgcagggcaaggctcagcagtcctaagtgatctctgtgtgtctcatctcactgacagcgatgcaagagagatgcaaaccacagctccagaaatgtgggagcagtggttgctgtccatcttcctccctcccatgctcttctcttggtagtctgcgtatttgtctgttttacaaacatcgtgtgtgtaggcaagagctcagaaactcactcgcgttgcgcctgccccacctcctgagacatactggaataaaactaatgttttgaggatggactggggtcttggaagagatgtatgtcagaggtgctttgggcctggaagctgtgggcctcattcgttcttcagccctgatttccctctccctcagaatacgtttgtccctcactataaaagggcccattgtagagctgtcgccgactcccggggacggtaatggacgacagtgaacacgactctttcccatgctcttggctccagcttgctgcagctcactgtgttgcctgggtgtctttgcactgacttgcctctctttgcagggtgatcaatgagctcattggaaaccttgtcggccatctttatttcttcctgatgttcagatacccaatggacttgggaggaaggaattttctgtccacacctcagtttttgtaagttttctcttctcttgttgaacattgtgttgtcctgtggtttcaggtatcccaacaggagacattttcatgaggagacacttcactgccctctctaagcgagaaagaaattcgagccaataaagttcttactgtggtcacagtcaggaaaccagggattcatgccacagcttagtccctttcataacatctgggtaaagatcactgactgggttaagccgttacaaagatcacctatgctgagcaggtcgagttatttggtgctactttagagtgccaacagtaggctgggggacaagtgtcataaaggataacactgcttttt

SEQ ID NO: 23239 - DNA, 1182 bp, Mus musculus
atttccaataacttcactgtggttgaaaccgtgtgcttttatttattttttaaatctgtcattgacatgtatagacatgtgatcattacaacttttattttttaaaaccacgttcatttatttgtgtgtgggtgagagagccatggcactgtgtggcggtcaggggacaaactgcagttgttgattctttccttccaccacatggggcccatagatcaaatcaggttgtccgacctagtgacaagtgcctttacccgccgaggcatctcacaggccgtcttatcattttaataaaaattgggctgtcagagagatggctcagcaggtaaagtcacctgcagccgagtttgatgaactgtgttctatcaccagagctggaagagtagaaggagagaaccaaccagcagttatgctctgacttccgtatgtgctcagtagcgtggatgggcccacatacgtataacatgtattaaaaatattttttttaaaatctgggccatcatgaagattgtcattggtggctcagtgagtgacgtgtttggcgtctagcatgaggattcatgattcctagcactcacataaactgggcgtgccaaccagcacaggaaggcggagacaggagtaccttggggcttgctggcagccgatctagctgactggtccagtgagagaccctgtcttgaggtaacaagattgagactgattgagacaactaatgttgatctctggcccgcacaccacatggggatgcacacatttactgcgcatgtaaacgtatcatttagtctgatgtggtcatccgggtctgtaatctcagcacttggagggcgtacgatgagatgctgttttaaaaagcagaatatagccatcccttgtccattgctttgccttgtgtcatcctgaagaagtgtggccttgacgtttagatggttgtgtcatgggaaagtgcttttgactgtgaagtggaaaagcatacttcagccgccatcgtaaactttatcttcttggttcctagtggttttatgaagagacagaatgtagtgacgatattgaagttctcactctcaagaaattcagaggggacctggcctacagacgacaggaatacgaggtgggggtcaacacgagtgggactttggcatttcagctgggctctggttttatcatcagtagcacatgcag

SEQ ID NO: 23240 - DNA, 1667 bp, Mus musculus
agtagttcctcttttacaacccagaactcattgtttaatatgaactttgatgaatatacaaaggaatatgataaaaagatactgcagaacacaaaacaaatataacttttgtacaagttagccttgtgtacaagcagaaatactataaattgttagacttcatgttacaaataccgacaatgaaatatcttcctcctaataattttatacatgcttacagaaaggcgtatgtctaaaagcaaatgtggcacatgaggaacacacacatggtttacacaaactgcactgtgagtgattgcaatgttaaagagaacgcagaatgcactaatgctagctggttatttattctaaaagcagaaattaaaatgtggttgtctttaaaattttagggttttgtttgtttttcttttatagctacttaaaattctgaaggagaataagttcttcaactcaagatctctgaattactgtgaatgggcccaactaatcctgatgacactgaaaatgctttggggcatacatactctcaaaacagaatccaatgtccaaaagaaatggaacttgatgttgtgccaaagtcaaactgctgcagtcgggggaagttccgcaatgtatatagagcgctaattaaaacacacctgtaaaaaatgaaattttaatacagtccatttttattctgacaggatggaaaccttgtgaatctttgactttctaaggggttaatgaccactagagcttgtcctcacatctagtccagcttactgctgtgtaagatgggctgtattacctgtattctttgacgtgattaagcttacagctttgagtgaccaaacattttacagagtaaaagttgttagaaatgaaagaggagaaccaaaccctactttacttctgtgtcttatttatcaggtcctacaccaaaattccacagtttgcagtgtgcctgtgcctgttatgttaggacaggaagacctgtggtcttgctggccttcatgactagaccctccactgaacactgtctccatttgtagcactgtgtgactcctctgtcagatccgacttgctttttactaaactgaagatactaccccaaagggagaaagaacttagcagagagactcttaatactgttccaagtgtaaaacagtccacagtaaaatacatgtggtgcgctttctcacgggcgccagacaggctcagggcagagtttgcaggaatacttttcatgaaattctaccttgtagtaacaatttcagtgaacagagaaaaagaattcggaacctaacatgttaaaaattaccttttcgtgtaagaatcggggctttttaacggtaagtatgtcgcagcagaagacagagttcctactgacttgtcactagcctggtgctgatgtcgtgttgggaaggaccctttctgttgtgatcataggaccacttttcaatctgtgctttcctcacaggacaaattgtcagttttattagatttggacttaaaaatttttttttggatggtcacacatagtgggtttggccagttcatgttttgtctaacttaatgaatactaaatactaagctcttggttaaatgtttgtcagctaatgagaaatgttatgataaagccttgactatgcatgctgctttcattttgataaactttttatttttta

SEQ ID NO: 23241 - DNA, 1500 bp, Mus musculus
ttttttttgttgttcttgttagctaaagcacttttagttttatccttccctagtaggttattgtatcagactagaattatatctgttatattttgctgtctttgttttcctttgtctttctcctgtttgccaaaattcaattcaagttgtgattttcaagaggacctcaaaacaattctgtacttaatataaaaatcaatgtctttagataaatactttcatagttctaatttgggttaatatttttaaatgtattgtttacttttgtaattatatacacaacaaatattagtgactagtttttgtatttgacaactgtttaccattgtgtttaggttatattctataaatactctttatatgcatatatatggctataaatataaattttgtattactggtaccaaaaacacttttttttttttttccagcagggtttctctgtgtagccctggctgtcctggaactcactttgtagaccaggctggcctcgaactcagaaatctgcctgcctctgcctcccaagtgctgggattaaaggcgtgggccaccacgcccggctcaaaaatacatttcttaaagttgaaatcatttgcttcttccataatgggacgttgaaacttctgctttcggaacagcgtgtgttggaaagcttgtttgagaatggctactagagtttaagaggctatgtatggagtttgttggggatgtagtgatggtggtaaggatcagacctagggcccagtgtacacttaagcacatgcctaactcaagagtttagattttagtatagtttaaagttgagctgccttttcttatgtagctatttaaaatatttctgaagttcagtaatttggatgccttcattagtagatgctgtcctatatacctattaaaaatgccaaacactgataacattgaacatgttcatattgatagagataatattgtataggtctagtgtgtatggatctgggatctccgcccttgaggcagagacgggaagatcaggagttcaaggtcttagctacatagtaagtttgaagccagcctggctacttgagactctgtctcacaaaagcaaataaacaaaggattatgcttaatagttttcattgaagtttattataacttatttcagatgtgtccttttattgtacattttgtataataaatgttgaagttgaaaactgttactcgtttctagttcttgtgtgagttcatacgtgccataacttttgtgtgggagcagaggacagctctgtgacgtctttctttgcttccatgcttatatgatgtgaatctagggaatcaaactagattactggggttgtatgtgtacatgtgtgtatgcgttcatgtgtgtgtctgtgtgcatatgcaaatatattctcttattttgttacaacattttacattttcaagataaaacacaattccaaaatacaactaacccagtttcagttcctgtctttaagttttaacccagggtcatgtctg

SEQ ID NO: 23242 - DNA, 1217 bp, Mus musculus
cctcttttcacttactgagatgggtctctcattttatcctggtgctcaaccagtctggctaattaattgccaactttgggggtcccatgtcttaactttatgaggtggaaactacaggcaagtttgccacactaacttggcaattaaatgaattctgaggattggaatgtcagtccttctgcttgcaaagcaagcacttgaactgctgagccatctctcacccccacattaattctctcactgaacctgaagttccctgtttgactaggctgactagggccagtgagctttggtgactcacctgtccctgttcacaaagtttaggtgataagcatactcagtaatacctggcttctgtgggagagctggggggttgccgtcctcttctcagcatgggttcttaatccctgagccatctctagtttccctgtgttttccattgaacaatagctaagtgccataaaaaatttcatttgcacgtttttacattgaaataaacctttaccaaaagaaatgctactgtgtgattctttgtccataatactaatttgttttcttattttttatgtttagttctattgtttcaaccctgttagctcttatggatggtttggacagcagaggagaaattgtggtcattggagctaccaaccggctagattccatagaccctgctttacggaggcccggtcggtttgacagagaattcctttttagtctacctgataaaaatgtaagaaaagtttacatgctttttattattaataatttttgtaaaatgcattcctttatgtggcgggggtgggggaaatagacaggaagtgtttgtgctgcagagcagatgtggaggtcaggtgtgggaataagtttccctttgtactgtgtggtcctgtggctagaactcagctcatcaagcttggatgtaagttcttcaacctgctgagctgttttccactccagtaacaagttctgatgcaataaaaagttgtagactttagtttggatcatgatcttatgatcattcaaaaggcctcaatagaggtaatttattttcgttaagcatatctccttccccaactgcttttaaaattgttttcggttaagcataccccagatgttgtcagtttcgttagcttcatgagtccttagccagctcattagctttgccttcttccagaatactattggactgcaataattagttaggctgaaaccac

SEQ ID NO: 23243 - DNA, 3082 bp, Mus musculus
ggaatgtgctcgtgttttctgaagcccgaggcctgtcgttacacatcttactgcaaccaagtactgctcagcagccagcactgcactggagacaatctgcatttcttttataaaactgaggacacactttataggctgtagatgactgttacgtttataagcagtcactatgaatattgcagtggtagttttatatgtaagtttctcagacataaacctggtttaattttatattttgttacctacactgagggaatcatgggaggagatggactcttcttcctccaaaaggcttcttggttcttgaggcagtcacgctagaagtggcaagcatccagcagtgaggggtacagaccagggcattaaggattactgtggacgtcagtaaattatgtacgccgagtgaacatgattgagggtatgtcggtcagcatagttacataaacctcaccttgatttctacggtcttaactgatgatcctttgacatctcatgagcgctatggagaacattctatttttaaatgatgtttgtatgtggactcccgttgtcactcacctttggctttatattttcatagagtctttatggaaaaatagaatttattttccacgtgtagttgaggctgttgcacgtctcatcttgtagctttacctaggaactgttagggtaattgaccttgatttcaactaaggattgtggtggaagttggaatcgcacagcagcagcctcagggccgtgtcttggactcagctccatgatgaaacgattcctcagacacaacatctggacctgaaactggcacacagctctggggagtgaagaggcactgactggcttcgtgtgctgtgggcattgggtcttttagtgtctcaaatgtcagaatctttggatttgccacttaggctgtccaggtcaccttccctggggtgtttgtgtgcttagttgagctcccctaactgaattgggcaagcgacagacctgaaacacgcaagcattacactgattgagaacattggagcctaacagctttgctgatggcttttgttatttatacaagtgatatttgtgtaattaacagacttctgcaagtatatgcctttcttgaaaccgttaaagtggccatgcatttaataccatggcctatctgtagaattgactattttggaccaggttacctgtggcacagttagtgctgtgtttgggtaaatgaagtaatgtttagttttctactttgtcttgtataaggtagaactgtatgtatgtcatgtttgtctgtaaaaggaaaagtacatagtaatattaaaataatttctatgactgtgaattactcatttatttttccaattactgagactgtacattcctagtgctattagttatatgtgtatgtaacttttacagtttcaactgaaagttgtccgtatttcttttgatcagggctcttaatctcatttgctttgattgagttaactgtaggtatttatctttgtattagtagtcgaataccaactctaatgacatgtacactaataaagaattgaacagttgtagttacgacagtccagttattgctgagtttaaagcttaaaatatgggagtgatttgctgctataattcctttgagaaacactgaagaagagatgagacctaaccgtgatcatgaacttcagggacagtactttaaattagaacaacactttacacctctctgatttttgtttagtaggaagattgaaaccatcagaatcccagccgaagtccctgtcttctgaggaaccctgttcattttagagaggatgacgtgtgtttgtgctttgctttatgactgtctggttccttccactcacgttagctctcgcagaggcctctattaagttgataaaaaataaataaaaaaataactatagactttgttctttgccaaagaagattgataaaagttgtgcccagttattttgcaaatgtttaatttcatctggcttagcaccactctctctcaccacttattataacttgaaccatgacatttagaagccaagaaaaaaagagctactaaatatcaaaaagggcgtacagtttagtaaaggtctagtttcgactcacaaatgtgtctaaagaaatgcaactttgtatcacttaagaagttaggctcagccattcctttcagtagccgttctcaccctgtgggttgcaacccctttgggggctcagatccatcctttcacagggtcatatatcagatatcctgcatatcagatatttattattattcataacagcaaaacaacagttacaaagtagtaaaaaacaattgtggttggggatcgctgtgccatgaggaactgtgttgaagggtcacagcatcaggaaggctgagaaccactgccttagccctctcttgtgtaacatgtgtaaccagatgcttttgcatttgtttgagggatgtgatttccctttctgggtcgtttgctttctctgccattctcattttttatgttcagtgtttcaagtacactttgtattaaaggattttaaagtaccaaaactgtaactcagtacaatggattgtgttctgttatgatgttaatattatccaaggaaattgtataaagtgttgtcaatttgattattgacacaaataacatgtttacaaataaactggtgttgatcaagttactgtggagagtgtctaattttctgggacttgttttaatattaaatacctgtgcttttcaaaaacctggctttcctgtgttttttcaacaacttttaaaatttggtcctaataccagatttgcaggaaaattaccaggttaggcaagggatgttcattgtctctgccctggctagttttaagtaagcttgatacaagctagaggaaaggagaacctcagttgagaaaatgcccctatgagattggcctgtggtgtgggcagctctgtggggcattttcttagtgactgagactgctgtatcataactcaggccatcactgagagaaatcaggggaggaactaggaactaggaaggcaggaacctggaggcaagaactgatgcacaggctagacgtgcagcttac

SEQ ID NO: 23244 - DNA, 2537 bp, Mus musculus
gtgaacatttacaatcatataaattcattcaatttttaacctttcacatctatccaaaatgaagcagtgttttaagtatgtctgattcactttaattttgagccatgctgtgttaagagccagaggttaatcggatggaacaattctctggcctcccttttacacaaaccatacatgctaacaagtgtacttatctctgattggctctttacctttaatttcccaactttgaacaatcacacagtgaattctggtttgtgagagaaaggcagtgcttggatatgtccggtctcttaaaatagggattaagagagtagggaaaactaagaaatttataatgacatttggaaattaggctaaaataattttttttttatagaaaatggaaattttcaaggaggttgtgtggggtggatgataaagttccagtgctgccgggaaggttcaggaagcatcagttctatggctttggaaagagtttcccctgatgtgttgtcattgtctcatggaacggaaggagccaaaatatcccatgcttaatcctaatctcattagatcttgctttgtgacttttttctggatgaatattttagaaacaacatgtattttctagtttgctacctagtctgtaacacaaggagaggtcctttctccctttggtggatggttttcttctttcgtggtggttatgcacacagttggtgaaagctgtgtgtgtgtgtgtgtgtgtgtgtgtgtgtgtgtgacagctgtgtcctgtgtctgacctgaacaccgtcctgagaatcccgagctttaattgctgaactgccccccccctttatctcatttgctctacatgttaaaaagttatatgtagcagaataattggacatgtggaagagagaaactgaagttagaatttaatccttggggaattaaaattattcatgtttcctaagtagatggaaaagatgaacttcacgtgactatgctttctaaatcttattttggagttttgtttgcacataattactttgggctccttttaaagaaaatttcttttccataagaaagcatgtcatatattgttttctttgcactttgtcctgtccatttatcatagaatttaaggaaagatagcataaaagtaaaaaacatcaaattctcatatacacaagtaatattctcctttggtcaggctagcatcacatgacttgaggtggcagacagattcatctttgctcacatgtcccacgacagcaagcacaaggttccaggtgaaaggctagaatgcacattttactttctgtgtagacatgtgagtgctctttccttcccttgtgtatcggtggcatgtcctgtctttgtttgtcagtgctgtattgtggtgcttaactcttctttgtattaaataccatctccagaaacttgtcttggagtttagaaagcactttggattgttgattttttttttctttctcttgaaaaagctcctcgtccttattaccagaatttctgttaacagaattatgccagttttgttgaaaacttcacttatgggaggtgtaactttcacacgaaagacatgctaattttcagtcaaaatttttgaatcatatttaatcaataaaatgctttcaatcattatgatacttcgttttcaaaagcagacaaacaaaattaaagtctcgttctctcgagctctggctctgacctaacatggtactttgcacagtgtgatttctgaaggtggcccctttaagttaaggactccataccacccgtgttgagcgtttttcaccacagagactctgatgccagctgaaactggactgccctctttctcatagcagctgttctctatcagcgttagagctgcagcggacggcatcgtgcgctgctgtagtcctgtctgttcagaatccatggtgtttgtgtattatgatttatggacttgttgatgcatgtaaactgggtgcattctgttgcctctgtatgttaaatagtgaccaatgtttttacgaaagaattgaacaaaaaaatatcttttaagacgtttggaatgtggtttttgattttaaaatttggttttcttattaatctcagaggcgctgggttattctatgacagaaggaaacaggatcaatgaataaatgcaggtttgtaatgacgcggcttctgtatctgccctcttagagctcccactgatgtgaaccccatggagtgtgagagaaggatgattccatgaaacagctgcgaacgagcgctaggccttccagccccagaggctgctcaggctgctcagttcacttcaggctttgtctccatgcagggcactgtgaaagcagtggaagggttaaaatttacactgctccttggtctgatctcactcctcccctaactcctcccaggctcctttcacacctgactttgagcccctacctcaccccaccccactcaccctcaccctccatcccaccaaggccaagttgtgctgccaaatagtcctggctgagtggccttcctctggagtgtggctggcttgtcagggctgc

SEQ ID NO: 23245 - DNA, 1190 bp, Mus musculus
ttatgcccctagttactactcctctttgcgacattcaggtagtgtccttccaaaagctaccagtatataacaaagacagataacacaattgagtctttgggaatgcagagattgaaatctctcatatgtgcaccaagaaaatgtgttcaggattcggcatctattccttgtcagagcaggcatttgcatcaggccctgtggaattttagttcagagcaatttcaggacaatgtgtttgttcagggttagagacagagattggccccaaactggaggccacatagttctgaaaccagcagaaatctgatgtgtgcatgccccaaccccattcccgtagtgttttatctggtaaccgtgatgagccataaggagttttattttcctttcatcatgaatggaggtgagatgtatcagatttctttcttctaaatgactgttgtttgaaaattatgtctgagagaaattatattctaggagagagagagaaaacaactttaaaaagatattggtagtttatttaattgaggttttttcctgtttcaaatgttaacacatgaccattgtcttgatagtattatatatgtgaatgttggtatttttgattgttctttattttctgttggaggtttattaaatcaaagagaatttgaacctagaatctaggcacatcatgattgaatcactgtctctgtgcctacatcttcatatcttcaaagcagagaatttcctgatggccatgctccctacatttagactgaatagttcttagttgtgatggactctgtatcgctaagaagtttagaatccctggtgctaggagcagttcatattttttatcatatgcaaagcagccgtgcatttgcttctagagggaggcagcatcccaccaagaatgctgtgctttcggacccttacatctagtcttctgtgagacttcttctttgaggaatgataggaagagaaaagagaggcaacccactgagaaatctgttctttccttgatgttaggcaattttatcttaaaatgaatgtccttatgtaaccacattcacagacagatgtactatttatgatatttatactaggtagatttttttctagctcagtttaagtttttcatctgtaatattataaatgactatataattctttttcaaggaaaatgctaatacatacaataagtaaaagta

SEQ ID NO: 23246 - DNA, 1193 bp, Mus musculus
atggaggacacatggaagaggattcgtttcccagacatacttcgggtcttctggctaacaagaattacagctcaggctacagtgttaatgtacattttaaggatggcaaatgaaactgagtccttctttatttcttgggatgatttctgggacgtcatttgcaatctaataattagtgggtgtgattctacactaactgtactaggcatgagtgctgtaatttcttcaatagcccattatttgggccttggaatattggcctttattggatcaactgaagaagatgacaggcggcttggctttgtagctcctgttttatttttcattttggctcttcagactggtttaagtgggctaagacctgaagagagacttattcgcttaagtagaaacatgtgccttttattaactgcagtcctgcatttcatccatgggatgacagaccctgtattaatgtcgctcagtgcctcccatgtgtcatctttccatagacactttcctgtgctgtttgtctctgcttgcctgttcattctccctgtcttactcagttatgtcctttggcatcactatgcactaaatacatggctgtttgcagttacagccttttgtgtggaactctgcttgaaggtaatcgtctccctcactgtctacacgctgttcatgattgatggctactataacgtcctctgggaaaagcttgatgactatgtctactttgttcgctccacgggcaatattatcgaatttatatttggagtagtaatgtttgggaatggggcctataccatgatgtttgagtcaggaagtaaaattcgggcttgtatgatgtgcctacatgcatattttaacatctacttacaagtaaaaaatggctggaagacattcatgaatcgtagaactgctgttaagaaaattaattcacttcctgagataaaagggagccacttgcaagaaatagatgatgtctgtgcaatctgctatcatgagttcacaacatctgctcgtataacaccgtgtaaccattatttccatgcactctgccttcggaaatggctgtacattcaagatacttgtccaatgtgccatcagaaagtgtacatcgaagatgagatcaaggataactcaaatgcatctaacaacaacggatttattgcacccaatgaaaatccaaacccagaggaggctttaagaga

SEQ ID NO: 23247 - DNA, 1180 bp, Mus musculus
aagaacacacttacatatttgcaccctcactgcccatggacactttagtctttgaatgtggccttggccccaggccgtgctctgggataatgagatggcacagccataagcagtgaacattttgtggttagaacaggatgctgctgtgcctgtgcagcatcactggtggttacctggcatccatgattgctaccttttcagctaggtgctcagaaaacatggccagacctagctcacccaagacacaagtgggaatgtaaatgctttagattgccagcatgttttagaatgaatcagtattcaaagtaatgagaagtactgtccttgtatttaaaaaaaaatcacaaattcactgtagacattttagaacaattttaggtctagcgagactgaacaaagcagagaccacacacaccctcataccgcaccccccagtaaagcacagcctcccacacactaaatcacagcacagcggttacacgtgttagaatctgtaaacccactctgacacatcgctgcctccgaagcccatgttgtaaaggtggtcaccgcgacggcgcatctcttagacagtaacttcactgcctcccggtcctacgtgctgtgtgtattcatcctccctactttcttatcctgcagccctggtcttttcactgctccttgataatcactgccccatgcctgttaccccgacccatcgtaataaagcaaaacatgaaaggagaaatgattaatagcttttaagtactaagtgacataaatgttaaaggcccagaaagagattagcaaacagattcacccaagaaatatcccagaagtaggtgcctagaaagcagatctaggacagggaatgggaactggaatggtttagacagagaaatgatgaggtacacagataaccaacctgtgacttggatgggtgaagaaaacacaaggtagggaacgggggacacccagcacagcaggaacatgggattaaagatgtagactgaactgacagtcccctctcttacctcactctgctccaggacacttccatgtacatttacaaatccctaccctactcctagcaaagatcacagggtacccttctagaaaaagatccacccccaaaaaggtctctacagaagcttgtgtgagagcccactgtggaaaggtccagctgtgatctaacctgcca

SEQ ID NO: 23248 - DNA, 1116 bp, Mus musculus
gcaggattgctgagccttgctgagaacaacaaaggaaaagttgttgcaataggagaatgtggacttggtaagtgccaacctcatcacttaacattatcttgaaaaaactacttgttatgttcaaatcctgagtaatttttattctttatcttttaaagattttgaccgacttcagttttgtcccaaagatactcaactcaagtaaggaaatttgttgactttgatttttattttttcaaagtaatattgattgaacatgtagggttagataccaaggtgtttttgttttccctggaagatatcaaaagttaagtgaaagaaagttcacacatgtttgcatgtaacgataatccccaactgattagccgctggatatgatttgaatggtgaaacagcattttatgttatatagacttgggcgggggggtggcaacaggtgtatctatgcacaaactacccttggtccactgtagtttcttatgggaactacataagaatccagatcaaattatctcttaataaatcttgtcattttgggggtgggggttgacatctgtgccacctgagggacttcccatatcatactttttagagatgttatgaactctgcctcttgaacaccaggtatcagttcacctaacctggaaaaatcagatttgcactgggacagaaacccattgtctttaccggcttctcaggccatctttgcactgccatgtctgcctggaccagagtgagccctctgagccacagacgggcaagcctcggtacatgacaggtgctgttacagagctccacagcatgtcttcccatgtggcttttcttctagaataagttaaaagtgattctccaatacagcctgaatattgcagactcagcttttggatccatgaaagtactgatagtgtgagttctatctactgctttgaagataacttccatcgtcagtcagtgttagaactcagtatgtatagcagagtatagattatgctgggtcacacatcagatgtccaagggccagtttctaatagaggtgacctcagtttatcctctaagtggttgctgagtgcctcttcagtggtaagagataggcttcattctttggcctttattgac

SEQ ID NO: 23249 - DNA, 1173 bp, Mus musculus
tatgaagggatgactgagtgaaccggtaccttggagggactgtcaggccggccatgtagaagagttcacgaaagacagaagaaaagtgattggcttggggggcggtgctttttgagagatgggaggactcggggactagcccatgctaggcgatcagtctacggctgaagcacaccccacacctattcctctctttccagttgaattaaacacacacaaaaaaagcacaagtcacaatgattcattgcccgggaatgctcataaatgaacatgcactagggaaaccatcctccagcaagaaccagatcagtcattgccagcacgcgaggcctccgggcatcttccgtgccctggaaaggccatgccgcgaaaaggggacccgggactgtcagcgaggctcacgaccaagacaaacctgcccttacccacgaacttgaagagactcatgacggcgcggcaggctcctcccagggaaaagcggaagtggctcagagcacgctcgtccttccggttccgcctcacaaccgcccgcttccgggttcccggcagcccccgcggcggccgctgaaggtgagccggacgctatggcgttctgcgctcccccggcctacctgacccaccagcagaaggtgctgcggctgtataagcgcgcgctgcgccacctcgagtcatggtgtatccacaggtggggagaggggacccggggctcggggacggaagccgaggggccccgtgggccaggctgatcaaggacttgggggacacagtgaagggagcccgcccttgaacccgggtcccgatgcagtcctctctgcttgatctggcggagatgattgtgtggggcgcaaccaggacccagcgtagaaagttgcatgaagaaataaaaagtacctaggactgtcattgtcatggatctaaagctaacgtttttatgactctgtcgtccctaaccttaacagtaatttgtccattatctttagtttgcagagtaactcagatattagtgattattttagcctgattttacagataagcaggctcattctattccacctcctacgtcattttatttctttaaccattgttactagtcttctcgttaagtctcatacggtggcatatgttgggggagacagatattctccattacattatgagtttgaggctaggcca

SEQ ID NO: 23250 - DNA, 1380 bp, Mus musculus
acccggtcctgcgcatgctgctgccatgggtagacatagtcccttctttactttctcgtctcttatactcacttccactgaatccaaatacatccaaaggggtaaggcaattcagaaaacgtgcaaacattttaaaatgatagcagggaattcttagatatagaaaatgccttttacttaactgtgcccagcaggctgggtgcgttgaaaagcccagatattttgaagaaaaaaaaaattcaaacagatttatcaagggtaaccagcttggagtctagcaattttgccaatgtgcttaccaatttgggggcttgtttttcttcccttccttacataaggacagttgattggcttctaaacaccggagcaaagtggatttatttactgtcaactgggagtctgacttcaattcaggcaatgttttttcttctttttctttttttctttaaaagtgaatttgtcctttctttctttaagtggaagttaaatttgttaaaatgcccatccctaaagtcaacagagaactgtagatttcaagagctcacatttaaagacagctgttcaaagggcaaggccctcggcagcacagcagctgacagtacacgcctgacattttgggcaggagacttggtgggtcccatgtgctccgcagatctcccgttggctctagcctctgatgacgtaatcttctactttaacacctcaccacctcggatgtgagagtaccgttcctctagtcattgctctatagattaacatttaacactgctgtgactgattgctcaaaggacattttatgttatggctttaaagcagaggcatgattattagaaatgacttaagctcttttctttgaaaaacaagctccttttgcagacgaagcaaacagtagtgcctgtggtttagcccgccaatcttgacgactcaaagtagctgatgcattgtgcatatgatgcttgagatggttttgcagatgcagacatcgctgcaaggtcattctaatagagacaagcggtattttaaacctttgaaaggaatggatgtaactgtacgttggtacagcttttcacttgtttagtttttaaacgttagtataatctgaataaagttaatataaactgttgccaaattcaatgtagaaagaatgtgacaaacaccttgggtagttctgtttgtgtttttgcatattgtaaaagcagtgtcacagctgaaaatgaaccctttctaaaggtaaattattgtgatttagttgctagtttgtattgagagttgacctctccctgtgcagtttttgtttggaacttgtatagataacagcgtgtaatgtgtccccttctacactgtaacagttgcttctgcctaccttataaataaagaatc

SEQ ID NO: 23251 - DNA, 1099 bp, Mus musculus
accaagggaccctgagcagctggaggggtgactctccatccttcttacccagctccacaatgtgtaagacaggaggagaaccctcgtgtagtagtaagggacatagaactctagttcctgcatgagaactatgcaggtctaagtagccactacagacactgatgatgctcacaggactgacctggggtcccacctaaagctgtgggtatggtggctctggtctcttgagtttacattccctggtgtgtctgtcctccatcctgcagcctggtgaggagatggcggcctgtgaggaactgacactcgccctgtcccggggcctccagctggacgtgcagaggagcagccgggactcactacagtgctccagcggctacagcacccagaccaccaccccgtgctgctctgaggataccatcccctcccaaggtacgaggcgcccagcttgccgtccggctttccgggcgggtccaggtgaggaggcagcgagccggcggctgttctaaccatagcctaacccctggctacacatgggatttggaatctgtcgtctctgggtgctttggggatattttgctcatttctcgccatccatgcgcaatactccccaccctgaaatgaggcccatgctcatgtgtgcttggcactgtgtgaggtgcctcttcttcgttttaatcttcacaatcatacacaggagagatattctatccccgttttacagatgcggacaccgaggctcagtaacttgaccaagtccacataactccatggaatccagcccctaagttcttaatctagtcggaggtgggcacctcacctctctccctcatcaccatacatatgggccaggcagagcagacatctgacacgagagtagatgtgggatggttggctaaaggctctctgtaacacgttattaaagatcaagtaaatctcaagtaaaggtcccaccccctcagggacagtcagtagtctggacctatctttagtagtcagaaccgcaagggtactactggtgtctagaagccaagaggctgggggttttctaacccccctctgaaacactagccctccagacctcacccaaacaaagaattac

SEQ ID NO: 23252 - DNA, 1312 bp, Mus musculus
cccgagttctgggattaaaggcgtgatccatctccacctactgacttctctcattttctttagtcctcgtccactaattatggcaggttcgccggcgtgtcacgtcctcctcgcctttctagcccgtgatcatccagtccgcccggatgactcctgtagctctcttgcgtttgagccaccaggagccaccaagagttcctccagagcgagctccaccctccgcaggtggggcctgaggaccccgcggcggccaggccgagcgggcaccgccccattcacccaccggccccgcgcccaccccacgcacccgccccgcaccacgcaacatcgccctagcgcctctgcgactggcgccgcgcggagtgcgccgcccgccattggacaaacgctctatagcgccatctcagcctaccgcgcggtgcgcgctctcattggttcggacggcgtgggaggcggggtccgctcaaggggcggtgccgggccggagccccgcctcccggtccctgggctgggccgagcccgccgggcggctgaagcgcgtggggccgggttgcgagcggggcgcgcagcggttactctggttactgtccgcgagggatgctggggacccggcgggcaggagccttcgcctcgctctgaaggacgctcatccgagacagccattcactctcgaggaaggcaagtgtcggtcggacaggttcccggccgtgacttcggggcttgcttgaggaggaatctccaagggagggctgagctgccaggctgccgccgcgcttcgggacgccgtggccatcttttgttggagaaggctgccggggcagtgttgctaagggcagctttcccagcacccagatccttctacgctcccgactccttcctaccgagcacctgctgctggtgacaaaagaccgtttacagccaggcgagcggacatcgaagtatacagccacattcgcacccctcagcccaatagagaggcccgtgtccatcagttggctgaatgaagaagtgtgtaatcaggagccgttggggtaggcaggctttaaatgctgccttttaagatctggacaacttaagatacatttgcactctcaatgatttcaaaaattgatcacatctgactcgtgatcctgaaactatttattggaagaagttcgaccggttgccccgaacccctttgagaactacattttggggacattttaatcactgaagaccttccgaggaaaaaagacccccccaagagacccccaaaacacaaaatcctcagccttggctggtgccaccaaagaagccttttgagccatgtgga

SEQ ID NO: 23253 - DNA, 1149 bp, Mus musculus
cctgcacctgtagctgctcagtgtagagttgagtagttcagttataggattggtcctggttctgtattcgaatctcactgtagatatgcacagggttaggcctcatgtggatttccaaatatgtccatataacattttctaactactgtgtccagaaaaaggaatatgtatattttattgggctatatacatttttttttagtcagtattttgatcctgattatatatggtttggacttaaaaatataccatggatatgatttactcatgtttgtggggggaggggagtctagcttttgctcaaggtgtaaaagtcgggtgtgtttatgtgcgagttaatggtttatgtcgacagatttggaagaatgataatcatttttgttaaacagtgcagaaaagaaatcggtctttcagaaacgacattaacaggagcagctacctcagtgtcgacctcgttcgtgacggacccggaagtgatcatcgtgggatctggtgtgcttggatctgccttggcagcagttctctccagagatggaagaaaggtgacggtcatcgagagagatttaaaagagcccgacaggatagttggggagctgctgcagccaggaggctaccgtgttctccaggagctgggccttggaggtaggctcatttggtgttgaggagttgtgtaaatactcgctcttcactctggactgttctggcctcccacccaccctctctccctcccttccttataataagctttacatgaactaaaaactttctgtgacaatgagagcggaggaggaaagagccgtatcattgtgtgagaagaggctacccagacagagtgagatagtgaaatgccctaaaccgtcacggcagcaatgaagacgctcagctcagtaaccagaactgtcatttacatggtgtggaacacactcctgggggatgctgttcccgccggtcttaagtacgtcttccattcatttaggaaatacttatttactgctgtctttgagcgaggtgttctgctgagtaagtaccaagatggactagtgattaagacaggcatccttgagaagtagcacagaaggtccttagctgtaaggtgagccccatctggaggaggtcagaagaggttggtgggtgccctggaatgtactg

SEQ ID NO: 23254 - DNA, 1192 bp, Mus musculus
ttcctgttttcctctggcctctgggtttctcctttgtctctcgttggcatactcccagatcctagtgccattgggagcaaagcctgcttgtagaggcagtgggcctcccccctcaggtgttgtcatgtgcacagtaaggaaacattaaaaccagctaccagcaatgaaagggttgtctcgtttccctatgcgcctcagctccttccagtgcttcaccttcctccaacagacattttcacctcttgaattccctctgtaaaactgaatttcctgagcgccaatgatgtggtttcacttctgcttactattccaggtggctgaagcccatgtgcctaacttcatttttgatgaattccgaacagtcctgtgacttctttctcctgctccagtgacaggatgttctatgactagaatgaacttggacgtgagaaagatacttgactcctcatgcaacgtgcattttcctcctctgtgggaaccagccattctaaggaaagtggctctcaactgtctaaatcatggcatcgtaaggaatttttatcatgtagatgcagaactgttttgtacttgcctcttttaaatgctcagtataactgatggatgaagccattccatcttatgttctaaggatctgtttgtgcaactccagaccttcagtaaaacagcattgctagtactgagttgccctgcttgtgatgaaaacggataccctgtaagaaaccctgcgacagactggggtgggggtgatgcttcatccactgtaggtctgtatggtccattgagagcccagcagtaaactcgtgtcctacatgctctgctcttctagctgcttctgcccaagccagacaacaaagctgttagccataggaggcagtagggaccaggggtggggctgtaaaggtttagtgataaacttttaaaactcaaactctgccaggcgtggtggtgcacgcctttaatcccagcacttgggaggcagaggcaggcagatctctgagtacaaggccagcctggtctacaaagtgagttccaggacagccagggctacacagagaaaccctgtctcgaaaaacaaacaaaaaacccctcaaactcataacttggttctacatggaaattcctgctcaagggagctgtcatctgctaggatgagacatggcaggagtctgcctgaacctgtagctagtagggc

SEQ ID NO: 23255 - DNA, 1228 bp, Mus musculus
ctcagtgctgctcggtcctctgctgactcaaacatggatgatatctgtaagctgctacgaagcacaggatattccagccagccaggagccaaaagaccacccaactatcctgagagctatttccagagagtgcctatcaacgagacgttcatcagcatggtcatcggacgcctgaggtctgatgacatttacaaccaggtaggaaccagaggccctttagaacttaaaagatggaatttacctttttccttagttactcttttcttttttcttccttccagtgagtcaaacagcatgttgaaactattttttaaagcttttgaatagagctacagggtcaaggacaggaactattaagtgtgggagaatcggaggtttcagagaggagctaggatgtgagcagttgcaaagaagatccgttctttcaagtcatctgttcaagaaacagttactgagaatgtgcctggtgtggtcacttatgggctagatgctggggattcatcaccaaggaaggtaggctctttctgtacccgcacctagggtggacttgtagcttaggaaggagacacccaaggatgggtgatgtacaagaacctgcacattagcttggggaagccagtggggcatgcagccgtggtaccaggatgacagctgatgacagagtggagcataaggccaggctagaccactggcagcctgaacagacctggaaagaccctgcagcatcttaaaattaactcacgttcctcaccagtgtagacattgcttagaatagcccaaatcacatttctgtgttgtggcttctcgcaggttgtggaactcttgctcctgtactgaaaggacttaccgtttgacttcattctgggggcagaggtggggggggatatgatttcatatatatatatatgttactataaggtaggatgtcattgtcatagaacaaacctgccctgggacagctctttagtgaccaatcccctttttgtacaattatattaagtataaataagactatttgattcttagggttttttcttaaaacattgaaaatcagacactatgtgcagacataaggacttaataatacttgttgctgcttgctgaggattcagtctaagtcagcctcgaaggaggtttgtttgcacatcaccttctctgttgcgcatgacagtcctgcagagtggccatcattctctccacgttgctgtggaggaagctaagacttgga

SEQ ID NO: 23256 - DNA, 1236 bp, Mus musculus
cttggcagatctgagcagcagtcaccttttagtacagtgtgggctgccaaatggctggacatgccagactttctggtacactcctcatccaatttgactaagtccctcttggtagaaggttcttcatccttttcttaggtatcactaaactttgatgtaatttcaattgtataaaatagaaaacttataacttaaggttcaagaacttttgtttcttccttcagcatcacccttgattgacagtgtccactgtttctgttgtgttgtggcattgatctctcctccagaacatcaagctggctgtggtggttcctacattttgtagaattacagccaagaaactgtagtagctattcatttatattttccttctgttttaaacacagtggttttgttttacatgtacttgggggggggagaagagaagaagagaagaagaaacccctcctgcaaaagataggtaaaaggactggaaagatggcttatcagttaagagtgttagtggacttgagtttagttcccagcacccatgtggagcagctcacaactgcctataacttcagctctgtagaatttaacactctcttctgacctccacgggcattgatacacacacacacacacacacacacacacacacacacacacaccacaaaaatcaacaactccaaaacccaaaatgtctctttaaagaggttataagccacttaaagtcttcaatctagttttgttcctggaacgttctctttcctgttcatcctgttccttttgctactaaccatatataccctcagctcagcttacagtcttacagtctgccaggatgactgatggttgcacagtatacctggcattgcttgcattggggattggttctaacgctttgtcttaattgggctcccagaatcacgcgggaatatgcatgctcagatgctaaagaaagcctgcctctagttgactttgggaagtaaagttgccagcggccagtggctgggcaagatgaaaggggcgggacttttagattgcacacataaggagagaaagaggagaagaggagaagcaccatgactcagagggagaagggtcagacttaagagctacaggagagaagccatccaggtggaaagggaatgtggatgggggagggggcgggggaaggaggctccccagaaggtaatggggtagcagagatgattgagagtttagaaggtattaagccaggagtactggagggaa

SEQ ID NO: 23257 - DNA, 1202 bp, Mus musculus
gtgtatcctgtgttgctaagttttcaaagttacccatttcaaccacacccaaaccctttcagaggcttgaaatctctttactcagatgtcttcccagtaaagattggggatctctgtgagttccaggagatgcgtgaggactgtgtaagagctaatgcttggtgatggagctgctgctgagtcttggatacaacacacagttccttattctgcagtcagagatcccttacagctttctgactccggccttgtggctgctgggaatatccctgaggtgttttgtctcaaaaggatccatgccttggagctagagaagggagaatgggtttttaccatagcattctcctggcccacggttgtgcatattctgctgatagctgtgttttggaggcaggtgaatttttggcatgtccttaaagtaagtactacagggtttaggtaaatcagccctttcagattgtaaactaaaaggttattagcctagctgagtctcagcataacccgatagtactctgttactgcagatcagacacacccctgtccctctgcccccaagtacccaccgcgtgtgtgtgtgtgtgtgtgtgtgtgtgtgtgtgtgtgtgtgtgtgtgtgtgtgtgtggtgtagaaaaggtcttaggtgtaagagttcaggcaagatccctataagaaagaacttgtatactcattaaatctgggttttacagactgggtaactgttaaatttatttggtcagtgcagtttcatttttctgcttctgttcatttgtgtagtagccatttattgaaccttactatgccagaaattaggatattttttaaaagtcggtgcattaacttagaggcagtcaagcaaattattaaattatctatgttttaaagggccggtgacaaccatgtcataattttgttctagtaactattttcaaatgtttctaattttcaaaaaaaaatatgcaggcatatagtaactttttggataggattttagattctacaatgtgggatgactaagtcaatctaattgacatgcttagcacttcatctactttctaatggtgaaaacatccaaaatctacttataaacttggattatgcgtccttatcccattctgccatcactcttggacaatgcacacacttttggtaaattgtagtcttgactaccttgaagtcagcttttttagatcttacacagaag

SEQ ID NO: 23258 - DNA, 1194 bp, Mus musculus
tgacagggttttatttgtttcacagttaggaattattccactgttgtttcctggtactaagaagtgaacccagggctttacccatgcattgtaagtgttctccactgagctatgccctcagcctcccttttacaattttattttatttttcattctactaacttacttaattacttacagacagggtctctctacatgattcctggctgtcctggaattcacaatgtatgtagaccaggctggtcttgaactcacagagttctgcctgcctctccctccctggtgctgggattaaagggaagtaaaacagagtagctccatccagagaggtagtgtggttcacctcacaggcagcatgtctttagcaggctgtatctgttgatcctgtggtgagtctgagaatttgatattcttacattttttcctccaaacctgaagtcaggctttattacacattgggctttgtcacttgaagaggctcagaggccagtttcaggaagcaaattagccaaaagaaaggtttgcttccatgaacagcaatggtcttctgtccactgtttcattattttaagttctctaagaacttctttccgtcctgagcctctcacctccatcccagccactctggtagtgagcaccactgaccagctattgagagtcttccttagcctggctcactgtcagctgtcaggattcccagagctacagaagaggggagaagggaagtcagtgctgagaagaaggacaaggcatcccctagggcagtccatccccagcaacatgttactgggtcacctttcagagtatgtttgttttatttagcaagggattcacttatcatttctcagtttgatttccaagaaaaattttacgtggtagcaagttaaacttatttactgagcaaaactgtctccaaagacattttcttttctctctcggggagtgtagtagagtttttgacagttgtagacagatcatcatagtgcttggtgtggtgtaaaataacacactttacctgaaggcgtttccagatcattactaggctttttatttttcaagtaataattttcaaaagatgagttttgatagacttttaattaactgtggttttggtgttgtctctatatagcatgccccagtgtatttgggctccattcagtttttatgtctacaaataaatgaatataattcaga

SEQ ID NO: 23259 - DNA, 1238 bp, Mus musculus
gagctttgcctccgccccctccctgggctacgggcccgcgggcctgcggtggggcgcgcgcagcctgctgcccagcccaacccggggggcgtgtgcgcgcgcccaaggcgtcccaggacgttcccacctgcgcctcggcgcgcgcggtcaggagcatccccaggcctccagccaccccttacagttccagcctccaactccacctcccctcccccctagtctcctccctccgctccggtgactgcaagccgggcgacggggccggagtcgtcgcagccacctcattgcacaacccggcttcccaactgtttacacagcccgggctgtgagtgtgtgtgtgtatacagcgtgagtcaccgggaggcggaggaggtggaggaaaaggagaaggagtgcactggccgggatcagtgcggcacacacactcatagtcggtcactctctctctctctcctggagcgcgtctcgctcgctcacacgcctggagcccaggagcgcgcaggattccgagcggcgcggaaaagttgtaccggcttttacgccagactaattgctttgggaagtgcgtttgctcggagaagccgaggagcctgtggaatcctgtcctcgaggctcaacacccgggaactcgggccgtctccacgtcccggactatccacagcctcggcaacaatagcggcggccaccgccaacgaggcgcccagacctggtgcctgtgggggtctggagaccttagccggcctcccacccttggacgcgtggccaacgtggttctggtggacaacgccagcgtcctggaacggctcctcttggggaccgatccaagctctatctgcaaactccatcccgccgactggaagaagtcacagcgcagatccagggatttacaaagccggggccgctccggccagggccgcgatgcgggtcggtcccgtgcgttttgccctgagcggcgcctcgcagccccgcggtccgggtctactgtttccggctgcccggggaaccccggccaaacgcctgctggacacggacgacgcgggggcagtggcggccaagtgtccgcgcctctctgagtgctcgagtccccccgactacctcagtccccctggctcgccctgcagccctcagcctccgccctccacgcaggggaccggcggcagctgtgtgagctcacccgggcccagccgaatcgccgactacctgctgctacccctagctgagcgcgagcatgtgtcccg

SEQ ID NO: 23260 - DNA, 2320 bp, Mus musculus
gtttaatgattcattactttgcagttttctacaaatgcattatctgcactgtgccatgttaggatactgtttgctttctgttcatgaaaagtagaaagaattgtttgttcatcacacacatgatgaccaaaagacatactgatttaaataatgtatttattgcccatattatttgatccaaacctgaaatccatgtttttggctttctatgtgtctccagattagactctatatcttcattcaggaaacttcagacatacttaagtcagtttcttatcctcttcccagatcttggtggaagtatataataaaaactcttttagaaaaaaaaaatgtgctttttagcaacgggtttgccctcagaacgcaggtgttgtgaaagtcactgctaattcaaagcaaaaatgagaaaggaaaagactcacatcaacatcatcgtaattggacacgtagattcccacaagtccaccacaaccggccacctgatctacaaatgtggtgaaatcaacaagcaaaccattgaaaagtttgagaaggaggctgctgagatgggaaagtgctccttcaagtatgcctgggtcttagacaaactgaaagctgagtgtgagcgtggtatcactattgacatctccctgtggaaattcgagaccagcaaatactatgtgaccatcattgatgccccggacacagagacttcatcaaaaaacatgattacaggcacatcccaggctgactgtgatgccctgattgttgctgctggtgttggtgaacttgaagctggtatctccaagaacgggcagacccgagatcatgctcttctggattacaccctgggtgtgaaacagctgattgttggtgtcaccaaaatggattccactgagccaccatacagtcagaagagatacgaggaaatcattaaggaagtcagcacctacattaagaaaattggctacaaccctgacacagtagcatttgtgtcaatttctggttggagtggtgacaacatgctggagccaagtgctaaaatgctttggttcaagggatggaaagtcacctgcaaggatagcagtgccagtggcaccacgctgctggaagctttcgattgtatcctaccaccaactcgtccaactgacaagcctctgagactacccctccaagatgtctataaaattggggacattgagactgtccccgtgggttgagtggagactggtgttctcaaacctgccattgtggttacctttgctccagtcaatgtaacaactgttgaaatgcaccatgaagctgtgagtgaagctcttcctggggacaatgtgggcttcaatgtaaagaacctgtccgtcaaagatgttagatgaggcaatgttgctggtgacagcaaaaaacgacccaccagtgaaagcatctggcttcactgctcaggtgattatcctgaaccatccaggccaaatcagtgcttgttacacagcccacatagcatgcaagtttgttgagcttaaagaaaagatcgattatcattctggtaagaaactggaagatggccccaaattcctgaagtctggtgatgctgccattgttgatatggtccctggcaagcccatgtgtgttgagagcttctctgactatcctccacttggtcgttttgctgtttgtggcatgaggcagacagttgctgtgggtgtcagcaaagctgtggacaagaaggctgctggagctggcaaagtcaccaagtctgcccagaaagctcagaaagctaaatgaatattacccctaacacctgccaccccagtcttaatcagtggtggaagaacggtctcgaaactgtttgtctcaattagccatttaagtttaatagtaaaagactggttaatgataacaatgcatcgtgaaaccttcagaaggaaagaatgttttgtggaccttttgtgtgtgtgtgtgtgtgtgtgtgtgtgtgtgtgtgtgtgtgtggcagttttaagttattagttttcaaaatcagtactttttaatggaaacaacttgaccaagaatctgtcacagaattttgagaccattaaaacaagtttaatgagaaagaaaaaaaatgcattacatcataaacttgaaaaccaccctaatctaaaatctagaaactacaattttagggatagagaaaagagtaattcccccagtttaataaatcagaaatcttttgtatgattaccagtaaacattttcaggaatatttttaataaaaatattatatcacagagacaataaaataatctcagctacatgaagcaaaatagatgaattttaaaacagaaaaataataacctca

SEQ ID NO: 23261 - DNA, 1113 bp, Mus musculus
ccacgacgatgcccctcaacgtgaacttcaccaacaggaactatgacctcgactacgactccgtacagccctatttcatctgcgacgaggaagagaatttctatcaccagcaacagcagagcgagctgcagccgcccgcgcccagtgaggatatctggaagaaattcgagctgcttcccaccccgcccctgtccccgagccgccgctccgggctctgctctccatcctatgttgcggtcgctacgtccttctccccaagggaagacgatgacggcggcggtggcaacttctccaccgccgatcagctggagatgatgaccgagttacttggaggagacatggtgaaccagagcttcatctgcgatcctgacgacgagaccttcatcaagaacatcatcatccaggactgtatgtggagcggtttctcagccgctgccaagctggtctcggagaagctggcctcctaccaggctgcgcgcaaagacagcaccagcctgagccccgcccgcgggcacagcgtctgctccacctccagcctgtacctgcaggacctcaccgccgccgcgtccgagtgcattgacccctcagtggtctttccctacccgctcaacgacagcagctcgcccaaatcctgtacctcgtccgattccacggccttctctccttcctcggactcgctgctgtcctccgagtcctccccacgggccagccctgagcccctagtgctgcatgaggagacaccgcccaccaccagcagcgactctggtaagctaccccattcacagcagggtaggaagcgagaggttggatggacctccttctccaccactcattggcattaattcaattggcctccggggctccccctttctttcccttctgtctaagagctcttcatccctggattcccgtgcttcagctatccctccctcccctcccccccccccccccagaccgccctggttgtcacccccaccccccacccttcccacccctcaggaatttcatttgggtttttaaatcttctggcttatctttcagctccatccactccctttacccctcctaagcattttaattaccctgggaagggtgtgaatgaggataaaggaa

SEQ ID NO: 23262 - DNA, 1116 bp, Mus musculus
atgttgcaggcctgttttgcatatgggcagtgacaagtttgggcttgttcacttgcacagtcctatggtcatagctagtccttcttaaagctctagccagtgggaaagcgtttgtgtttctatccttggagctccaagtgggacttcttaaaagatttagaaggagcaaagctgtcaggaaatcagaaacgtcacatggactccatgactgggaaaaacctcgtggtggcctgctctcagtgcttggatgtgtgctagttacatctcggaggtgaggatgtgccttacggttatttgaactcaactaggttcatgatggatctggtgagacattaaggctggtttaagacattgtgggctattgtgctgggacccccaccccactctgttagggagtgactgtatgggactgccttgttgttttgcctggttaagggtggctgtttcttgctgctttacctattgagtgcaggattttgcataaaccagcttcccttgaaaagtagaagaaattgattttttttttttgattgattctcctctgactcatcctgttttgcttctgtgacagcagtttacagaactggaaaggtgtctcttttctgttgtttctggtaatttgtattatttgctccttgaaagtctgtctgctgagttcttaccatctccacggatccgattcttgtcttctttgaccgtggaaggctggcaggcagcctgcctggttgctgaggcctctgtcttccatgtccgggaccttctgtctgcctgcccaatctagctgctatccttaggcacctcagctgttgactctcttggatcataggttacctttgattccattttgtgcaagatgccctgaatttgttcatattaagggcagaccagcattttcctggggactctgaggaccttggatatttgttgaactctactacacacacacacacacacacacacacacacatttgaaaataccatgagtatggtctatgcatcattttcacctcctctcttccctgcaactcctgatgtgaccccaagccctctcaaatctctaacttctttttaaatcacacataaacataatatataaatatatagtttgcttagttc

SEQ ID NO: 23263 - DNA, 1122 bp, Mus musculus
tgctcagacctgcctgactcagtttagcacccctcccccaaacccccacccaatctggttgcctcgagtcttcctcttaaggcagctgtcctgtagtgcaggaagccaactcccaaggtaaaatgtctttagacaaataaaaatgtctttagaaggcctaggctctctatggggtgagactgaatgctgaggcccgatctggcctctgatagaggagggctttcaactgttgggggcagggaacagctaggagcttggcagggaggactctgtatatactgtatctgtccggtagcactggagatagagccctagctgaccctgagtggaaagatggttggttgcatagttgtgctagcacaggacatactgcaagggtttgggctctagaacttttcctctgctcatgtggctttggtggagtcacctctgccggctagtgctagttctaaagcctaacccatcctttgggaaggagtctgttttatggcttcctaggtaaggctgatgacccatgtgttagtgctgatgtgagccacttgtggaagtggtccagtgttcagccaccacttatccactggggccagatgggctagacctcaaagatctgtagggcaagatggaaaacagtcatcctttgaattcaccaggaacctcatgactagagagatgattaggaggccattgttaccttctatggaaggtgatgagtgagctggaaagagctttgggtatggacacgcttcgaaggcgggcattttgaatagtagcataaaggcagatggtgatggggaaatttctaatagagtgttgctgtagaacaaggttgttcccaaccttctgatccccccttccctgtcttcctagtgcagttataggctatgccaccagatttctggttttgatagaagctttcagaactctcttgtgtccaggaatgattcattttctaaggacatcatccagcattggggcctttcaaaaaggatggccatgtgagtagtttttcacaaactgatgtacaacagttgcctctgtgatctggacctacctttttgatcctttccttttttctacctcgggattcatttttagtgacactataaaaatatatcctattat

SEQ ID NO: 23264 - DNA, 1373 bp, Mus musculus
cagaacttggagccaggccagccttttgtggttgcttttaaaaagaaacaaaacaaagcctgacttccgaccagctgacccctaagcctctaagcctagtagctccctgctgggacctttcagacctgcaggggagcttggctgggtgccaggcctggccttctgtcagccaaagcaagccagagactgacgctctctctccctcatccatactgttggttcaggcaggccctattctcctcccagccaactctgaggctctcctgcctggagggttagcgactgggacccagtgtccgtcgatgaaggctttccccacaccatacccttcctttacccctaggccttccactcacccatatatatatatatatatatatttttttttttttaagcacattcctctgtggacaggtcagggtcagatataaggaagaattgttgattgctactgtagtctgtgattgtgccaaagtggttttcttctcccttgtctcaggtctgattttcttaactctactacggtaagaagatgccctccatcagcaggccgtgtctgctgggacctctctggagacttcctgaaccctgtggatttacagtaagatgcagtttcctggggagtaattctggtggatacaaattccggagtattacacctggcttgcctggagatgttacaagtagctggatggattcttcagcctggatgcccactgaaaacaaggaccgaaactaagaggattgtatctctacccttgactcaatgagaatgtttgttgtcatctctcgggctacctggagctccctctaaaatgtaagcccctaagacccatctcctttcaatgcagtgtttctggtatgttcctgtctttacaccaagctgtcctggatgctggttgagggctgtctgttgatgtggctgctaggaagagatctgctgtcttccgtgtctgtctatgtgtctggtatgacgctgggcgcctgtgggagaaagacaaaaaatagaagttgttcgagttaatgtttctttctttttctttttttcttaaagatttatttatttatttgtttatctatctatttatttattatatggatgtacactgtagctgtcttcagacagctccagaagagggcgtcagatctcgttacagatggttgtgagctaccatgtggttgctgggatttgaactcaggaccttcagaagagtagtcggggtgctcttacccactgagccatctcaccagcccctctaagttaaaataataataaaaagaaaatcccctctggagctacccttgcctatgttgatgggtacttactgattgaagggtcttatttctgtctagaccctaaatacctcgaaggc

SEQ ID NO: 23265 - DNA, 1196 bp, Mus musculus
ggttagcacgaagataaatcctccaaatggctgggagggtttcggctgacagtgcattgtgaattcacatagcatttgcatcttcctggggatgataaatgtttagataacgacaaacaacggggagggggaaagagaaaactgggggaattcaggtggggctgatcagattggcccccctccgtggtgtgatgaaccagcgataaacggcttaactgacatatctgatgccctctgcttcccatgtaagactgaggaaagtggcttagttttgttgtctgatgaagccaatgccttcctgatgcttctgtgggctgatgtgaacccggttctcacatatatatcaaatggcatggtgtctgggtggacaccaacgtccaggattttacatgttctactttattggacattcccaatgtgccagtgttcgatttaattttcctagcagttccaaaggtgaaaaagctgtataatcgtcatcctgcaagtgttgaaatggaagatgggaggggtccagtccccagctagcacgcactctaagatgggatcccttccctggggcttctggacacacctttctccatcatctgcttgctacccaacaagtgtccacgtttagtccgtaggtggcaggttgctgcttcctgcagattcagacatcaagggccctcagaagacactctgactaccagcaagaggctggatacctgaagcctgtggaagtgacagggccttttctgtttatagtcactgctctcccgcagtctctggaagtcataaacctaagccagccagtgctcaggaggatgactggaggctgtgcctttttgtctgctaggggacagtgaatgcaggtgtgacaggcagggctggtggaagaggaagcttgctccttgctctctagttcagaccgtttttcctggattcctagctgattacatggcgcctccaatgatcagattgaggagaggaagccagaaagttctggcattttcctactaaatcctcaccagtttaaatcagcaccctgtctagtccccccccccccccaccaacccatcccacttgagacagggtctcaggtaccacaggctagcctcaaacttaatggacagcagagaatgactctaagcttcagcctctatctcctggttgctgtgatcacaagtttgcaccacatagtctggttttattag

SEQ ID NO: 23266 - DNA, 1192 bp, Mus musculus
ttccaaggataaagcctgctctgccagggccctaggataggtttgtcttcctgtcttctacctcaagaggcccttttgagccactggaatctgtgctgcagtgttcccagttgctggctttgctgcagaaaaaagtgagaaggaaagaaagagagaaacagaaaggcgggtcagccttgctgtgcatttagtttgtggttccagacctccgtttcctggatctgatttgtgtgggacgcacgcaatggcagctagctactgtgtttgctgccacgctgactctgtgtggtgatgaggtctgtccccaaacagacctcctttctatcccactggtcagcatttggtggccaagggcagagtggagcccatgtttccaacagctagccacctcacacagtgaagcacttcagtgattctgaaggtatgttgggttaggctcctcacccctctcccctacaagagagagcacagacaaaacgggatatcttttatttatttatttatttatttatttatttatttggtattttcttcatttacatttccagtgctatcccaaaagtcccccatacccacccacccccactctcccaaaatgggatttctaatgagcagctctgcttggcccgtggaagctgggagtggaaagctggaagactgtcccagagtgggcagtcagagatctgactgatggacgcattggcatttgtgttcagccctcatgggcactgctgccttttgcctctgctctcaaagccatccaggattcacccatctgtgttgatcggcctgggacagcaagagccattgggagtcaaccagagccaatggtagacagaagtgtgcggatgaacttggaggctgtttatggagtagggtggcaaagccaagtcatggcttgcttggtgctggggttttggttggtgtgggagcatccggaagagccacagagaacggtgatgccagtttctctggcaacttgctgagtaagcagatactcgctcatcctctctgatccgcttcgttactcatcagtgggaatagcagactcagaatgccatcagtatttatggcctttacaatttgcttcatgtgctgccggaaggtccctgggtccccaagaattatctattgctattaataatggaataatggagtatgacactagaggataagacatgagttctttacc

SEQ ID NO: 23267 - DNA, 1160 bp, Mus musculus
tttagatgcttcctgaaattatggggactcccttcttgggagggagaatctattcttgagggatgtggggaaagttaaagtgattttcaattcattttatgtttcagagaccctatctcgtgtcacctaggctggcctcaaactcactgtgtagtcgagggataactgtgaaatgatcctccctgcttcgtatcctgagagctgggatttgtgggcctgcaacatacagactgctggcttcgtgatggtggcttgccagctgctccctggagaagcagtgctggggtaggactgactgacagtcacttctggggcaggcagggctggagttttgttctgtttgtgctgctgttgcttctgcatatgctgcatatgctgggatccaactgtccctatttaaattttcttttcttcatttaagtctcccccaccccctccccaataagaaggaagtaagcaggggtgcctattagctcgttgattgcatggacagcagcacattcacctgtcttcactgttcttctacaggttaatttgatgcctattcagagaggccagctaggtgtatctctgtctgtctgtctctgtgtctgtctgtctgtctgtctgtgtatgcatgtgtacacatgtcagtcttttctattctagatattctattctctattctagttattctatatttcaatttttctattctagatatttctagacagtatctgttgtgtgctgaaccccaaggtaggcattttcattcatttctcagtatgaattcagcctgcgagtgacagatcctgtatttcttgttgtaaaggagtaaatgaagtttcaaagagacaaaatgccttgtctccagtcaatatagccgggagctatcagaatcatacacaagtccatcgtctggcctatgtagaacatacaaggtgaagcaatgatggcctagtgacacagagcctccggccgtgtgacctgggaggtactgtatcttgctaagcctcagtttcttacctggcaagtgtgatgatcacaatacttacttcctaggattaatgagaacaaccatcacagccaggtccttcacatggaggagggagtgaccaaccagcatgtgtgcttacaatgccctagtttggataagcttgacccagagctcaactcaccag

SEQ ID NO: 23268 - DNA, 1443 bp, Mus musculus
tcttgctaccctacttggtctcctctcctctcctctcctctcctctcctctcctctcctctcctctcctctcctctcctctcctctcctctcctctcctctcctctcctctcctcccctcccctcccctcccctcccctcccctcccctcccctcccctcccctcccctcccttccctcccccctctttttttttcttaaagaaactttgtttatttgatcaatcaacctattttgtgtgtgtatatatctgttttgatacttgtaggcatagacatggaagtcagagaataacgcattagagttagctcttttcttctaccatgtggtttgtgtgactgcactcaagttgtctggcttggcaacaagtgtctttaccactgaggcattttgccatctgtttgtttttagtttttaaatgaataaaatatccccttccccaagccattctgtactgatactaataagcctctctctttttcttgcattttctagtataccctttaagcgttccagaaggattttgagatcctttcctaaatcaaaggtggaatatttggggatttggaaaattgaggtaagtaagggctggtctcatttcgagccttttggaaacaaaatttagctttgagaatgaaaatttagctttagtctttgtagcaggatttggggtacgttttagtgtgtgtgtgtgtgtgtgtgtgtgtgtgtgtgtgtgtgtgtgtttaataggctttcttgtgtttaggaatctgatttcctagtcatctatatcttggctttctttctcagcatttttttccccacttgcttgactgtaatgctaacatgctctctctgctccaacctggagaagccagtctctcagaagaaccagttgtgttactttgctgtgagatgcctgccctaagagaggagcagaaggtcggaacgggtcctctaatgtgataattaggtgagaacacatttgggacacatgggctgtgagatgttcctttatgcctagtacagtctgtgttttctcctcaccctccattacatgttggaagcatgctaagaccatggctcctctggtgggggtaagaagtgaagcccaaggtctttcttcaaacctaggctttcctgttgtacctgtctttcctccagtgagtcttgctgaacctagagtgtgacctggtggagctaggtttctttctccttgggtgcgggtgggtattgaatgaaagagcagagatagaaagaggagttgtccatctgatttgctgctgaacagggctttctcttgattactgccttacaatagatcaatgggagtctgtagggtgccttttatatggcaggctattcaaaagatttggtctgatcttggctaggccttttccctagcagcaagtcccttggggaaatagtttgtgaatctccaatcttgagcagaactgactgc

SEQ ID NO: 23269 - DNA, 1228 bp, Mus musculus
acaacaaaacatttgaatgatgagactacctccaagcaaattaggtccatgctgcagtaagagctgtggagcaagcccctactgcagatggagcacacagtgttcttcagtgaccgagaatgcacagtcttagtgaatgccatcaaatctccttattcttgctttggtttctttcctctgttcctcttcccactttttaaatcatgttcttgttcttaagacttcttttctgtgccaaaatcagtaaagttatactttgaaagggattttgtcctttcaaaacaggccatctaaggcagctaattacgcattgcattgaggtctctactgagaaaagttctgtgacttgaactaaatatttttaaatgtggattttttttgaaaactaatatttaatattgcttctcctgcatggcgaaactgcctattctgctatttaaaaccctcataaatttattttctactgccgctttttcatgtgcagccaaaatggaaatgtttaaattaactgtgttgtacaaatggtacccaacacaaaaccttttttaaattagtaagactttgtttaaagttttaagtttgcaggttgactttttttttaaggttgtatgttgtgtgtttaacatttattaactaacgttaaaaactgtgatgtgtgcgtagaatattacgtatgcatgttcatgtttaagaatggctgttgataaaataaaaatcagctttcctttttctaagtgtggcttggtttactgaggtttctggaagttttccctgtatatatttctatggaatgcatatacacattacataatttttctttctcttaggcaatagctatgtctttttcagttgttttgctttactttttgtctatgtacataagttagactgcttttaaaactgttgtgtataagatgaccagtgattgtgtcgacattaacttgacttctgttctgatttaatctttgtgagcgtagtcatagaaggaaacccgtactttctcagctctcggtttcaggaatgaaagggcggtgacaggaagcacatggtgtctcgaaggcacgaggagcccttgacattggaggagagtgagcaataagagtacttccagaggaaataaatgaaagtccgagatctcactggtcgtaggaagtgacatgagttacaatttaaaatcataaagcccaaggcaaagaaatgtgtctcagttgagagaagctgcttgaaa

SEQ ID NO: 23270 - DNA, 1251 bp, Mus musculus
attcagactgagatctagctgctttcaaagtttaggttaaatattttccacctttatgttggtgctgttcaatataagtatgtattgaatagggtacaaaaagttgaagataaaaaggctctttctgtcatttgaggcctgtggattcctgctagcaacaagacttttgaaggcaactatgtctagaaagctgtggtataaagccagttttgcttgaataaggggtctctgaagctcagtggtgcacacaacttttcccaactaaacaggagtaatcctggaacctgtagtctgggctcatggaagtagtggcataaatgatgcccagttcccaagcatcctctctactgccatgggacacaatccatgtgatgctgagccctgcaaggatttaaattaatagagagtaaaccaattaaagtagatttgtgctgttttgaaaatcaaatttagataattttcatgaatttgtcttccttcaataatgtgactgttatgctttgaatgtaaaatgtcttccacagactgaacactggtcccaagctagtggtggtctttgaagagattgtggaatttcaggaagtggagccagtctggtgggggtgggtcactgtagggttgaggattgagggttatcaaccgaggtttgtcacccaagtcctgcctaccttgagcaccaatgccagacaagccactgctgccaccatgcacttcctgccattgagggtttcaccatttaaaatagtgacaataaaaagtttctgcctttagttgtttctgtcagatatttgtgatgatgaggagtcagtgagttctcacttagttcttggggtttgcctactcaagtaaagagcactgacaagaaaaataacagatgcaagaataactgtacagccaggtaagactgcttgggaattgcagagatttcagttctctggtggttggagtccaagagcaaggcctactgaaaatgggagctgctttaagttgaactttaagggcaaaaatgttttagaaggaaggtgctgctttccatgaggaggagacgaatgtgcagacttgaagaagcgtggctgttagagagggtcatatcagcctttagaatgaggtgttctagaaccagaggttcttaaccttcctagttctgcaaccccttaatacagttcctcatgttgtagtattcccccaccataacattgtttttgttgctatttcataactgtaatcttgctaccctaatgcattgaaatg

SEQ ID NO: 23271 - DNA, 1146 bp, Mus musculus
cctcagaccttcccatgaatcctgggatatagtagaagggatagcacaaaacgttgattgaacccaacagtttatcttaatgttataaagatttattcattttcatttgtgtgtatgtgtacatacacataggtgtaagcatgtggatacaggtgcctgtgaaaagcctgagagtgtcagatttcttaggagtggaaaatggaaggcagttgtgagtggcctgatgtgagtgatggatcctgatacacaaacacacacacacacacacacacacacacacacacacacacacacacatacacattaacacatgcacgcacacaaacgtgcacacacacatgcacacacacaaacaggcacacacacacacacacatgcacacagacatacacgcacactcacacacgcatgcacacacacacacatcctctgtaagaacagttaagtgttcctaactgccgagcgtccctttagctctgtcatcatcgtcgtcgtgctttgaaatttgagaagtagacagagtgtagtatatatatgtggagaatcagacagatctcggagctgacagattgcgttcgaatcctggaactgtcacatactgaaccccgcattcctcatttacaaagcggacatgaaaacagtaccagatgggtgtctatgaaaagcaaaggaggaaatgcaagtcaaaggctgcgtacaatgcttggcaccgtgtaagtagtgagaggattccagagatctgaggtagtggccctgactgcagcgtctctgactggccaggcctcttttgccaacgtcttcccggtgtccttctgcttgcttttgtaatctaaaacttctaaacctttggcctcagctgaatgaaatgtgattgtggtgaggcagaaggggggagaaagaactgtggaagaagaaatttagcctttcttgtagggggcttgtttcctgagccagctttctgcacatgggcaatggtggagcttgcttgtgtttctcgctatgtccagaaaatgggtcctgggtcgatgagggggaagctgctcagaaaggagccttttgtgctctcagcagacctgtctcattgtttttagtcaccagccaactcttttcagagtataagcacctcagggccaatgtccacttctg

SEQ ID NO: 23272 - DNA, 1175 bp, Mus musculus
gtcagactaggactttaaataactaatttggaagtgaggtgatacttctaccttcctgccccaggtaacagtagcagcaaagagttctgagccatagactcatagtgtgtagacattacccaagtcacagtagccctaccaagctcaaattcacgggaaggaaggaccttgcccccagtcgttctgtgatgaaaggcagagtcaatattcacacctggcttgcaagccggttaaccagcgtaatttttgccctctgagggcgcctgtcgtgggggaaaaccattctccttgagctcaggtgccccctggctggcagggcacgggcattttctgtcttcttttcctgtgcctcttggttgcctcaccacattccacgtggctggccagctttgtggtgatgcgtcagcatggtaaggggccctcagcacagtggcccatggcaacctctgctctggcgtgctctaatggttttaatgttttgttttgtttttttaatggagttatgtgtgcagttaaacacaaatcttattctttacagctggataaatgtttactatcctacccaagttaactgccccgaatcaggaggctcagtattcccaccatgctaggatgctccctagaactgcctgatgagtcagcactttatcatgtctgtgttttcagcttatacagatgcaggcatagttgttcaacaaagcaaactgaaggcaaaaccaccttaaatagcataggtggtcatatcatttcacccggcaggcctctgtctcggagtgagtatgataggaggcctggatctgctattccttctgttagtctttgttctcagtgccttttaaaatttgagcatctcatgccatcaagtgtctcctgtatttatagactgtaattatcacacagcatgccccctacatccaaaccatctcttccatatggtgcttagcttaagacagtcagtccagtgctaaaagaaagacgatgttgtatgtcataaaagacagtcggccagtcttcagtgtgaggccatatgggattttcaaaccattttggagttttcagtttttatattacattctgatgttagaggctaaacctggagtgagatgcattttatagaaatcttacatttattattgagtggggaggggacagtgtcacggggacaaagtttggag

SEQ ID NO: 23273 - DNA, 1616 bp, Mus musculus
gatgtggggtgggctctcatccagtacacccatcactgggtgctacctgccgtctcctgtctaactactcctttctccctacagatcgggcatatcgaaggacagcctgaaaggaagggtgtctttccagtgtcctttgtccacatcctgtctgactagcaaaaaagcagaaccttctgtccgtccgtccacacccttcatgccagaccgctgtctccatgtaatcctgtgtacaacatgtatatagctgctgttacagaccaagaactcatggaagggccactcaggaggggaatatagtatgtattgtaaatatcctgtggtcttctgccttcaccagtattagggtaacctcgggacctggtgcgccttaccggtttgccaaagccatccttggcatctagcacttacatctctctgtgctgttttatgagcaaacaaaaaccaggagtataggaactgctggctttccaggtgaggagtctccagcagccgtcgaagggtgcagtaccgactcctaacaatgcagtattctcaatggcgttactgaacgtgcgacatgagcagaggtgggttctgcgctcccggtggaacgtaaagttagtccctggccagccagcctgtagttatctgtgtacacagtttacagctacaaaaacctactttggtatttattacagagaagtgttcagttactcgtgttattccttcagcaaatactcactgacacaaaaccctctgcagcattttccagcatatgcagccttgtgcaagtttagatgagtgggtttgtacatcttatggcgagtggccacccctgagatattacctcattatgcagaagtaacatatccttcatgactattttgacaaaagcttaaaaccatgtctgatgaagtccaactttcaggaaccaaggactgccagaaactctctgcctctacgttatgcatgcatctagacgcttacccgaattctgccttttataaaggaacaaacaggatgaagaagtgaactgtacagttttaaacttgattgccattaaagcagaagttacaagattgcaacaatgcttgtttctggtcactcatttggccttttccacagtgtttgcacatggtgtggacgcagcacccccagcggtgttgaaaagcgtctaaggggtcagttcgacatgattttcttcactttgttcttgattaagccttgactattcaagttggaaaacttgtaaagtcggtctttccgttttctcgtgcagaccaggtgctgatctcacgcttttctccctcctcttctcttccttaaactccaatgctggagtaatttcataccctcaacttagccagtaaacacgtgcccttcaggtcagtttataaccgagctgtgggacgctgctatgaattgcactgtgataaagctctctgcaagccatctctgtctgtctgtctgtctctgttgttgcttgtgttttgattcttttccctctgcccattcagcacattgcatctccacctttggcttcagagtgagtttggggaaaggatgcagtagctgttttactcctgggtccaggactgttgtgattctgaggtgtgctgtcatgccatgtcaca

SEQ ID NO: 23274 - DNA, 1241 bp, Mus musculus
aaggaccagatcggtagccactggatatcagcaggttcctatgatcttagaaacctaccaggggcagactgctcaccctcgtccttaggtagcagtagaagtgtcagtccagacactgttgtggtttttgttttaacacaggaagtacatgctactctgacagagatcttgtgatgctttctggaaccttcaggaggccagtttgttttccagtgtctctcatgtccatgactgaagatataacctctgactttccttgtaggtaatgatgtgggcccattatcttcaagtaagacggccaacaagtttgaggggctgtctcagcaagcaaggtgagccgccacccctgccttcctctcctgttgtgactcatggttgctatgagtagacttacagacttggctcttaccagtcttcccaacactacccagtgcagtacctggcagcatcagttaggaagggaaattgggcatccttgctcagtctacatggtagctccctgctgggtcccagtggggacccttgcctgaatgcacagccgcctatctccctgcagtaacaccaggagttacccaatccctgatggtcacacagttatagaatgatctagacactatcagaatgagacttctcttcttgttttgttttgtgagacacagtgtcacactctagcctgtgttggcctagacttgtgtactcctccacccccgcttctcagaaacacggggttataagcacaagccagcataaccagctcattttttcttttctcttttctcttcttttcttttgggaaaaaaagtggggggggggggtcttacaatgtagccctggctgtcctagaacttgctgtgtgtaccaggctgacctcaaacacacagagatccacctacctctctgccttcccagtgcttagattaaatgtgtgcaccaccatgcctggcctacttctcaccttttaactgagcaaatcttttaagtctaaagatttcttttaacataaaaatgagacctcgtgtgtatacgtgtgtgtgtgtgtgtgtgtgtgtgtgtgtgtgtgtgtgtgtgtgttaaggagagaagggcttatttgtttgtttttaaacttttaaaccaaaagtagtgttttttctcccctccatgccctgaaccgtaggccctttgggaacttcctgaggacacggttttccacctctctttcctctagaacttcagtcaggttgcagagctacctccacacc

SEQ ID NO: 23275 - DNA, 1178 bp, Mus musculus
gtatggcttttgtttttcatcttaatgaactgagtatagtttacagcacaaaccagaactgcgtaagacctattcccaaactctgtgctctgtggttagctggttaaaagacctttattggctgtgactgctcagttgcatccctttgtctctgcctgctttatagtgtgcccataggtctgtgtatgatctgctaggtgacggaaaaaaagcatagaaaacacagagtgtagaaactgcgtttaagcatctgaagaacttcttaagacatatacctcatagatgagagaggacctgtggtcacagtctttctaataatgctgcaatctttcagtgggaacctggataagcaaacgtctgtggggaatacagttctgcactattgcagcatgtacggcaagccggagtgtctgaagctgctgcttaggagcaagcccaccgtggacatcggtaagtgtggccgctctcagacatcccagagggccgagactacacacacatgcaacttagtcactgtgcctcgcctcttgaaatagtatcctagataattatttgcatttattctactgtttcagttaaccagaatggagaaactgccttggatatagcaaagagactcaaagctacccagtgtgaagatctggtaagcaaaaccaggatcagaggtgtgtcagacatcagcggccatgaagtgttcttctttctcagagggtggaattggggaaggatgaagcattttgtttctacgtagctaaagaaatacagataagtgctaaagtgcatttgaaagagtgctgaggtcatggctttgccttctgagtgcacttgtcacactggagacccacgcctttgtgggagtgaggattaggatcatgctgcgtgtttgccaggacaccaggctgctttgcagctaaggggagaggataggattccttaggcagtcagttcaagagctgagaagagtgtagtggttttctgcaagcttagcaccctccctcctgcctccctcctgtgcacactcacctttctctccctacttcgctaatctcctgctggaccttcacgtgagcggggttctcttaaccacagcgcctggtgtctgccctctgttgcagacagcatgtaatatacagactgagcgagttgtaaagaaaacaggtgtgtgttgactcgtggtt

SEQ ID NO: 23276 - DNA, 1188 bp, Mus musculus
tctctctttctttctttcttggacatttttttatttacatttcaaatgctatcccctttcctggttccccctccgaaaaacaccctccctcatcccctcccctccccctgctcattaacccacccactcccgctttctggccctagcattcctccacactttgtcctatgaaggcatagagccttcataggacaaagggcctctccttccattgatgtccgactaggccatcctctgctgcatgtgcagctggagtcatgagtcccaccatgtgtgctctttgattggtggtttagatacaattcacaaatcacatgaaactcaagaagaagaaagatcatagtgtggatacttctatccatcttagaagggaggaacaaaacacccatggaaggagttacagagacaaagttgtgaagtagaaactgaagaaatgaccatccagcgactgactctcctgaggatccatcgcatttacaatcaccaaacccagacactattgtggatgccaacaagtgcttgctgacaggagcctgacatagctgtctcctgagaggctctaccagtgcctcacacatacagaggtggatgctcacagccatccattggactgagcataggatccccaatgaaggagccagagaaaggacccaaggagctgaaggggtttacagtcccataggaggaacaacaatatgaactagccagtacccccagagctcccagggactaaaccaccaaccaaagagtgatccattttctgtgtggtcatagaaataaatttctgaggttctttctcaaaataaactgaaggtgagcgccacctagagtcaagtttgtgcctggcaaacacatcacccgcagcctggtttggcttttacatctcttgctgcagcatttaactacataggttttctgggtagtactttgcttcgtattctgccatccaatatttcatccaaacaacaggctcaggcctgaacctctgtgttattcaaagagcaaacgtagctgtctgttctcggggtaaaaaagcaatgatttggctatggatttgtttttatgttttgtttttggaaagcttttctctcattagtgaaaataatacaagcttattttatctttgggaaattgcatgtcccccccccccatgagttttctccataaaggggggaaaacattcaaaag

SEQ ID NO: 23277 - DNA, 1814 bp, Mus musculus
tgtgcttatagatgtttctcactgaccctcacctgcccttgcctcaccaaggagcccagaagtcatgtggagtatatgtatgtggtctacaggttacctttaggggacatcatgtccgcagcacaggctgctgtatcttctatccacatcaaccacgagaggcaaagccaggcccagaaccttccttcaaattacttcatttctccttgtcctaccagagaggttttacactctgcagacatagttgatttctggtttagactagcctttctatagtctgatatacgtgagtgcaatgatgttttgctagtacaggtgggtggggatggagacagtgagctggtgtattattgagtgatagaatgaaatggattaatatatttaaatgcctaactagggtcctgtgtaccgtagttgtctagttgacggccatccatctggcggtgaaaatgaccagtattcttgaaggaacaggaatggagcatgatttaaaatcgtagtttgaggaagatagtgcttaaggtggaagacggcgtaggacaggagctgtgtgccagctctctggaccccaggtagttctgggtggacagtagcgcatcattttgctgctcatatctgtggcatcagtgagcacaaagcaaaggaaactagtgaagaaagaaagggactctgggtcttgtggaagggaagtttgatggatagatatgtattgggataatctggggtggaggttgcttacttgtgacaaaggcactccattagtgagatgatgctgttaattccatttctctttcacattgtaacagagctgttgggattggagtgatgtcaaaacttcccagtttccaaatgattttaatgttgatattatggcacgaaaagtagcctgtgatccatggctgaagaagtgtgaaagaaaccagatatttctgcacactcgaaatataacagatcctttcattaattttggtctttgattcctctgcactatcaaataaatgtttgtttttgtatcacattacagtgagagtaatctttgagcccttagagcagctgtgaggaactgaagaataagtattgagataactttatagcttgacatcctttgtgcgtatggttattggtatcctgtcatttaaaaagtcaagagtagactatacgtcttggcttttgaactctggctggatttgagtgcgacgggtcaggtttctgtgaggctgggaactggtagatgactttagtaacaaacaagaagctgctttggtgacagcgtttcatgtgttccctttccgctacccagaaacatactcaatgccttagatttttttaatttggaaatgagtgtgttccttcttttgtgtgagccttggcagccttctgtgggcggtggaatcgcgtccattcctcttaacagctgtactgagggccccgtgccttcccatttcctccactctgtgaaggagtctcagtgcaaaccttaggcactcgcttctcctgtgtccctgcatcctctgcagcaggaaaacacagatcccttttctctaccaaggtttgacagcaccttgaaggaaccgtttttttgtttgtttgtttgtttgtttgttttgttttgttttgctgttgtttttgtttttttgtttttgctgttgtcccttgtccctgcatcttgctgctctagctatgctgactacacaccctgctcctgtgcctaggatgctgagcactagtgtctgcagggaaggtatggcatcctactcagtactgtgcatggtgggcctcccagaagtctccaggaatgtataaatatatctcat

SEQ ID NO: 23278 - DNA, 1153 bp, Mus musculus
ttgttcgtttgtttacaagaacaactgtatggtgtcctcctgaaagaggtctttggtgcatggatattttctgcaaattaataactcaagcagtgacatcacttccagaatcaaaatgtgcgtgctaagctgaaatcgagagggaccgttttggccaagccacagaacttttgaaaagggaggtttacggtttacaaaggaactgcagacaggtcattaacacggctggctgcagcgagctgggctacagctcatcgcttctccttttcattagcagcgagataattaaccgttaggctctggaactggggctcctggctgaggtgagctggcctggagctgtattagaaacttccagacagtgggaatggagttttttcttcagggcagtgatgagaggatactgtgtgactaccaggttccaggcaatggtcttagttagctcagtgttcgaaggatgtcggccacgttgctgtctgagttctcgtgagtcccactcagttcttgggatggaatgaccaagttgaggttgagagagctgcagtcttacttgtgagagaacctattacctgtgtgtgtgaacagttttggatttgggggacagaagtccaaatgcattattacttttcgccttaatttgacaaaatatcagataaaagttatggaaggaaggaagggttgatttttgccttgtggcctggaaggcatggtagcaagagtgtgaggcagctggtaacactgtgtccactggcaggaagcttcctccattttgttcagtctgagaaccgagccccaggtggagccactcatattcagggttggtcttccttcctcagccaagtctgtctggaagtctcacagacatgtccagaggtttgtctgctagctgataccaaatccagttgattaacattcaccgcatctcgggtccgcttaagcaatttagttgttcacgtgagcgttcagggtggaacagccctggtagccattggattccaaagtttgttctcacttccttttctgtctgctcctttcctgcctgtgttagttacttttgtatcactgtgcccatggtacctgggagaaaccggttggtttctggtttctggagtttaggtctactgtggcagggagggtatgtatgctggagcag

SEQ ID NO: 23279 - DNA, 1231 bp, Mus musculus
taggtatctagggccagaattgaatttgtagcttctctgcctgttcctgtgttcttacagttgtagaggtattttagaattcagcactaacctatagtaggaaagaaacgatcttctctggaagcattaaacgctgtagtctggtaaattctctggtaggcttttacttctcattttgctgctgtcttctgcatgtttgtgtccctggagagcaatggcaatgattgtttaagcttttgtaagctcccaaatactttaaatgtgttgctttactcttcaaattagaccccctcttccccaggctatctcaggatatcagtagagtagacagccataatcaagagcacaggttaactaatctaccacatctatgcatgactttgcacagtgtaccattctgtctccatatttgtgaaggttcctatcttagggttattctgaagattaagtagggagaacccagatgtagtggacactcagacatttgttgaatgcagtctgaaagaatgaggctgggggatgagggatagataggagctgggatgtctgggtggattaggttctggagtcagttagaacccctgagactttacttctgtggaacactggctgtactgatgctgtgttagtgtgtcatggctgctgtaaccaagtaccacaacctgaagagttcaaacaacagcctttttggctagcaactcatggactagaaatctgaaataaaggtgcaggcaagattggtaattgtgagccctatgagggaagtagctgccgaaggcctgtctctggtttgtaggtggttatacacttgtaattctcctgtgcctttaaatttaccgttttcatgagagtgaacactaatcaactggactacagaccaccttgatggcttcgtctaattagatgacctttgcaaagacctaatctactaatttgggtacattgagaaggaccagaagttaggggctcaacatagagattttagaggaagacttatcccatatcaagtgtatttcagatgcttagtgaagcaaatttgtttgctcaacagtgcttttatttattaaactttggtatgaactgatggtatagtatttttttctttttctaaggtagtatatatttatttatctaagttaataaactatatctaacacttatttgctagaattgagcagagtcctattttcttgcctattgctttgtttgctcctaatggaatgggaaagga

SEQ ID NO: 23280 - DNA, 1211 bp, Mus musculus
ctcttttcatttgtcccagctatggttacgtagggagtgggcctgtactcactcagatctgtactggtgtggatgttgatactgtctatgaaagtgagcagataggagctgctacattctgctgctttatttttgagacagggtctcacttactctgtagctctggcaggcctgacattccttatggagaccaagttggccttgaactcagagaacttcctgctggggttaaaggtgaatgccaccacacccagcctctgagtgttttactggcataaaggacatcctattagaaacaagttcctacctactggaaagattgtatgcttagctctgagcatgctaagttcatgaattaactttgagttaaggtttaattttatttagggataaaacaaaaacaaatatttttcacatttctgagaagtaaagtttattgtttaccctttaaaactaaaatagactttttttgcattggccttttttatttctttttcagtcgcctaggcccaccttcttccccctctgcagctgacaaagaagagaaccctgcagtgctggcagagagctgtttcagagaactgctgggccgagcaacttttgggaatatgaataatgctgttaggccagtttttgcgtgagtacttgctatttttctagttatccatgaaggtcacattgggcatccattatgtgtttatttgtttcctttaagtatgaataccatgtactacatcacttgccatgcatatctccttacatcccttgaaatacttatgtggagtgagaaattagacagtgtcaccaacatgtgatgcacattgctgccctcccttccctctctatttctttcttttttcttcaaattgaacctagcaccctcccatagagctaaatcttacattttctttctgcctttaatgggagcttaagattctgttgacttttctgaataaactcctattttactcagagtctaatcaagataagactattgaagacctcactgatccttacttacatggtgtcttccaggctcttatgcagtaagtttctctgcacaatcagtatcctgcaggcaggccttccaggtcttgtgctcctaatcccatcatagcatgatagatcagtgcactctgagagcctgtataagtactgggtggttttgctgaactcttctttgttacaattcagcaccatcccctcttcac

SEQ ID NO: 23281 - DNA, 1133 bp, Mus musculus
cattaggtactgctcagtatatagtgtctggggaattgaggttttctggtatttaccagatttaacagcacaggaatttaggttcacaatcagcagatctgctaaaaactactaacaagttatctaaatatttatattatatttggtgttagatagaggaaattataatttatttagcattatatgtagcttgaacatagtcattgttttaatctacttagctctgtttaaaagttcaactttgtgggctgaagagatgttcaggagagatggctcaggggttaagaaaactgttcttccagagggcctaggtttgattcccagcactcacatgaaggctaactaccatgtgtaacttcctcctgtgacctcctggattccaagcatgcaagtggtacctagacatttgtgtagacaaaatgcctatgtacacaaaatacaataaaataatttttaaaataattttgggttatgtgggaaaattatcactttttaatttattaaatttgtctttttttataggattttttggaagtaacttaccagactatcagaggtcagagatcatgatgttcatcatggggaaagtgcctgtgtttggaacatccactcatactttggatatcagtcaactagggtaagttctcagactgcaaatgaagtcagtgttagattacattttcttttaactcaagaaattgttagtgttttgaaattttggtaataaaagcagcagtgttttctttggtagtagatcattaagctattaaagcaatggttaacatactttttggatcattttaaacataaattcttgggatttttttctcttttattgaagaaatggaagattatttggcctgtgcattgtgtgtctgcatgtatgcatgataaaactgaaagttttctgaaatcttaaaacattgatagtgaatcaagaattcagacttaggatgttaatgatccctctttatagatttgatctggtaatatacttaaaccttagttaatgtgttaaaatgatctcattatgacttataagtgtacataattattcgattgtcataaaaaattcttaaaacttttaaggagatggaaatccacatgtacagcacactgtagcccattggtcc

SEQ ID NO: 23282 - DNA, 1139 bp, Mus musculus
ttcataacattccactgaagaaaagttctttttagtgaaataaatatcacttataggaaagtatgattatttatgaacctgatttttgattagcaaggtttttggttatagattcaattacagtgaatataagctgtgtactaaagtcatttaaaacctttcagcacttgatgaaaaagtctttgtacttaacttccggtctactggaaaggatagtttttaataattgttatgtatttgtaatttttaaattatctcttaatttattttatgtatatgagtgttctatctgcatgtacaccctcatgtcagaagaggacatcagatcccattacagatggttgtgagccaccatgtggttgctgggaattgaactcccgacctctggaagagcagccagtgctcttaaccattgaaccatctctccagcccagcaagtggcactgtttagttggatttgagtcttacgtaataaaggggcagcatgtagtgcatttgcacagccaccatgtgttaatgtcagctatctagactatcttcagtgtcccagtggaatcactgaggggatgatgcagtgtgagaacttgatctttcaaatgtgtttgttttctacttaaggacagtgcaattatcaatgaagataacctgtcaatgtttcatcgttgtgggatcatggccctggttgcagcttatctcaactttgtgagtcagatgatagccgttccagcattttgccagcatgttagcaaggtgagagatttagaaaagttcttaaacctagttttgtatataaacagctaatttctgagtagttaaatagataaatggacagacatatgggtggacagatacatggatggatacatacatacataaatggatgaatggatggattgattctgtgaaaatatgaggttctaaatcaaaagtatggttaatgttgtcatatttgggttgcaacagcttttaagttgttgttgtatagaatagagtattttcctgtttcacgttgagccattgtgaatcttgacatcttcagttctacttctttgttgcgttagagctagaggtggatggttaatatgcctctgaattatgtcatctttcagcaccgtttaactttcttcagtggccattac

SEQ ID NO: 23283 - DNA, 2981 bp, Mus musculus
tgcaccttctgatgacaccatgttcttattttacagccctcctcccagtccatctggaacattgaccgttacttctgggcatacccaataccagtccgtcccagtctatgagatgaagtttccagatctgtgtgtatattgactggctcatgaagactacagcattttaaaaggaccttaaagcctgcaaaacagggccaagatgagtttcaggatttgcatagtgtttaccggaatgtcctgaagtgttatggggcttgtctctaccaacacttgtcatgctgtattagaagtttcgggaccctgatttagagtacctctggagataggcttataccacgttaatttgtttgaggttcctgttatcttttaagattgaacaggtattgctttcacattatgctcttgttaaatagtatattttaaactttgcacaaacatgatttttaaaaaaatattgaaaatgtatgaagtgtctgcataactgcttagaaatgggttgcttttattttctttttttcaaaagtaaatatattccgaattttagggttgcaaattctctcctgctttctaaatccgtgcttcagatggactgtgcacacgtcccttcagtcctccatagtaacatgtggcaggcattcctagggtgtcagtgttagggaatatctactggacagtagtcccacctaggttcccctctggaaactggccagatcatgctggtcttgtgatactatgttttctgcttcaggttaagctcttgagccccttcgagctcactcttagagtgggaaaaggtgcagtgtttctcatatgtgatgtgttagtttacagatacgctttgaaactatagttgtattttgctgtgattccattaagtaaatgaaatatatatttaccatagaaaagaaagacatttaaaagagctaccagttcacctatgcagagtctatgcatttcagttttttagtgaattaatttacattttatattgtacgttgtgtgaagtctttattgtacaaaaattctcccagtgaatcttttaatttgtaagagttgaaccaaaacttgtatgcatctctatgaagattagttacatacttcaaaacagtctgtgtgttcttgctaaggtgtatgagtgagttgcctttcactagtgagacttgtaagactacaagagcgatatgtactgcacatgctagggacaccaccacacgctaaacagaagcattctgcaattagaaaattctctttgaaccattttgtggaaccactttgtataactctacctgttcaaattcagtttctttttatataaaacagtactcctatcaaaaattgtagctcaaaaaataattaagttttagttttgtgttaaaaaaatgagataaagtataggatgttttatctgtgtgtttttggttatttgggcaccattagttcaaaaagaaaaaaaaaaaaaaaaaaaaaaaaaggaaggaagagagagaaagagaccaggcatgcccaaagctttgactatttacagcagagtagaacatcttgcagagggggtctatttgctatcacctctgacaggacaacccaggctgctgattaagtgcagatacaccagaccttgttctcaagaaggacaacgcagctgccactggaagaccagtgccctgtgcgagctcgcactgtagcttccctcacaccagggatatgtcgccagctaaggaaaacctcatgcactttcggttccctttttcttcttcattttaaaagaaggatattattttttgactgcttttaaaatcttaacagggggacatgcaaaaacaatcatcatccacttggatgtcattttataaattaacactgtgtgcttttgtatggaaaaatatataatttaatagtataagaaaagatatatattcacttgcattcatgcagaacacaagctttgctgtacaaaatgttgtgtttcttagtgattttaaaaggcatgctttgcatgcaaaggaaaaccattgcagttagtcttttctcatacctgtatcttgggttttataaactgctggtttgagttttattactcttaagccacagtacatgtctgaatatcttaggcccattagacccaactggttttattgacaagggttcccaaacaatggatgtttgtctgattcttccacatttgcagggatcacatttggatgcgtgtgcaagctgtgctgtagctagttcaggtactgaatctttaggacttgctggagttcattgcattggtctattttggcaggtacgggttactcaacgcatttactgttctcctcacggtatccaattggttctattcttttgtatgactccaagaggttaagttacacgttcctccgatgcttgtgatcctgtgcgttctgctgcttccgtagtgtcactgaatcttccctgagctctcatactcagtctctctcacttctctttcctcctcctggtcctcttgcttccctccagcctcctttagaactcattttcctttagagtaataccacccttaaccagcagtttaactccccgctccctcaaacgggactcatttgtctcactaatgcttatacatgtattactgtaataaagtaagtttttttaatgtaaatttttcattgtgcaatcatatgtaagcaataaaacaaaaatagcatcgcctatgtataagtgcatttttattatagcattatgtatgtagaattaagcttttgcagcaatcaggttactcaggtggattcttttccacgtatatgagaatcagaaccataacttaggagcatgaagagagcctagattaaggggtgcctcatctagaaaaggctaaagtcatgcaagcaagttttctggagatggcccactgtttttgcatggctgcaatgggtaagctctgaattgcagatcgttcaaagatttcatcccatgattgcttcttactactgatatgc

SEQ ID NO: 23284 - DNA, 1178 bp, Mus musculus
tatgtttattccaccctttcctcccctctctccccccaacccccaacagtttataacataagctactccatttgattctgacatctgcctccagggaattttccatccacgagaaaaatcttcattattttattctaccacttctggctcttttaactttataggggcctggaagtaaagaaccctgatattctctataggacatgatgctacttataaccactccacttaaagcaggctgtcattcttagtggtgtagctgagaaacctggcctattaacgaccactggctcttattcctcttaaatgtagtggacaaatcactcagccatggttatgagagtgggagatggtgaagggagcagggtgggtgcaggatgggctctgcaccttctactgcttggatgcagaggagtgggctgagttgtgtgaacaccagtgtctctttacccagattctggtgtttagctcaatccactcatgtttggaaaaattccatcgtgtctgtgaaggtaaatatgtcaatgaaatgggatttaaggagttcacctcaatctcatgtgtatgttttgatgttgggagggctcaccattttttttcacagccttaaagcatgtatttaggtctcaccttagtttaaaacccacacgatgttatatagactttgagtatagttcttggttgtttgatgtccatcagtcaaagcaatagtgatagtctctgctcaatgagattttgcacaagatgagagaatgaactgaattttctcatgctcagccatattacctgggtgagtactgaataagtactgttttaacactgctcctgcttacactgtagaaccatagatctgacacatctacatatctgtcttaatcattttatcatcaccagtaaggatacaactaggatttgttggcctctgtataatcatagctgggttgagccaaaaaaaaaaatagttttaaaaaataaatgccaagatttcctcaggagataccagaaagaaaagcaggggaaagctgggtcctaactgcagcaacaactaacagctccttaatttggtgtgatatgttccatgtctttgtctccagaacaattagctggatgaataaatatctgtctgccctcagaaagggaacataatatgcaattaaaattaaggactttctattgag

SEQ ID NO: 23285 - DNA, 2247 bp, Mus musculus
tcctctttgtgagtgacacagaaggtagatggctcacaggatgaagacaatagagaagtggtgttcagctgggctcttacgattaactgtcatggctggcagccaggggtagagtcccacacctgtagaggcttcctgtatcctaaccatatttgtcttctgtgttcccagtgccttctgccagcatgactcgcctgatgcggtcccgcacagcctctggctccagtgtcacatccctggagggcacccgtagccgctcccataccagcgagggcccccgaagccgctcgcacaccagtgaggggtcccgtagccgctcccataccagtgaggatgcccgtctcaacatcacccccaactcgggtgccaccggaaacaatgccgggcccaagtccatggaggtgtcctgctaagcaatctgtgcatcagtcaccctggactggtggcctctcccttagcccccaacccttgcctgccaccctacgctaatgcggtattaatctaaagctgcttttgtaagaatgaactctggcggtggcagacccaggctgttctgactgcctcctgggaccagggtgggtggtggtggaccaaaggcaagaagcagttcagcgtactgttctgctaacaagtggcctggtggaccctctctctaccctcagacaccaaactgccaaaactaagaaatagatagctgtaacactgcctggctccaagcccaggctgatccagcattctggttcataggcgttttgccaacctgcctacttcctgtttcctccccactaaactcattcctggaaacaaacttctgttttgaaaggagagagagaggcaggaaagttgggcgccttattttaagtagagaaaccaagaaaggaagagaaaaaaaggcagggtctagggcaggtagaggaaaaacacaacaagtctactaggctcacttgaaggaattgattttaaagttctggacactgaaacccacaacctgtttttctggcaaccttttaacgtgcaagaaaaactggtaacaaaccccaggctttatagagaaagtgatccagcaaatgtggggcatcagtgatttaagactcttgctatgcagtctactgtaccccgctcccattccacagtgaatgagtggatgacacctctgtccctcgggaagatggttttgatttgttgttgcattctttgaggcagagggagaacccagcaggtgacaggggtccttgtctgggatgagtctttaggatgggaagggtggggatagaatggccctgggattttgaggactcatggtagggccaagtgctagaacctggtgggtgtgatttcattgatctggaatcttgtgtgactgagtcacaccttgtctcccataattgatgtctggcattgatttgaaacttgatagctgaatgtctcttaactggcccatcgctggttcttcagagagaaccgtatgttctagtgggggaaggactggttttgggttctgtacattccacgggaacttgcttccctctcctgcccctcctgctgactgggtttgtagcattggcctcttaagcaatgccagcctaatgcccatgctccatactactgccttttgattcttactgtggctaaccttgaacctttcctataggaaatgtgatcagatcagagacacttgatcgttgggagtcagccctcaaggcctggcgacttccaggatcttggagttgctagaggaaaagtagttatgccctataggcggcatgagagacaagggatcagtttacctgccaactcctaccgtggaggaggagttccactgaccttgtgtagaaagatcaggaatccaggccagggtgattgaatgctgacaagaaatcactgtatatgtctctccagggcagtttcttaataagatgtttgtatttatttccagaccaataaatttgtaactttgcagtggcttgtgtcttttcctctccctatgagggtgggtgtggcattgtggagcaggaaggggtggaactttatccttgacaccagagcccctgctgcgtgccccttacttttggagttctttgccacagaatgacactgaccagtagaaatggcactgtctgtcatataggtttctaaactttctggtagtgatattgaaggaagaagaatcaggcgaaaataagttaggcatccctgtagcctaatatatcaactaacatcatttctatgcaagcagtcaggcacatc

SEQ ID NO: 23286 - DNA, 1169 bp, Mus musculus
gtatatagcccaggctgtcctcaaactctccatcttgctgctgtcttactttcctcggtgctaggattataaatgtgcacaaccacaaacacctagggtaaggtcttggtgagatgccacactggggactaggcatgtagcacagtggtagaacatttgtctagttagtaggtgtgaggccctgggttccaaccccagtatatgcacacagcagaaaagaaaatatagcattcagagactatactttaaaggtgggaccctggaaggagggttcatcccttgtgttttgtactagtgaatctatgtgcgttcttttatccgggtgtgctatactagtacatccatgtgcacttctgtgcacatacagacatttgtgggtactattcactaggacatcagtgtgtactgttctatttaagactagtatatccatgtccatgtgcatgcagtgttgtggtattctatttatgtgtatcatgttaccagtattatctatgagcactgctattccaggagatctgttattcgtacatccatgtttactgctgtgcttgtacatccatgtgcattgctgtaattaattcccacctgctcgactgctacaaacatgtgttctgccatttttgttacacgcatgaggactggtatgcaagtacacccatgtgcactgttgtatgtgtacgaatggctgtctgtgctgcagttgtgccccagttggggaatccctgtcctcatgggctttacagccttattctgaccaccccaagtcttgtaggatggaggctgttcatgtgacaggttagggtgacttttccagaacacagctcctgagtgggtggccctccctatctattcttctctcacattagactatgggtgctgcctctcctacctcatgagacacatgggtcctagattctggaaggatgtttttggcacctgaaattttctgtgcctgtgtcacctgcatgattctgaccaccagttgtagcttggaggtgtcacacagccctttagggcttttgcaagagatgaaggatctggagagaaatggcccagctacacggaagtcctcagtgtccccagcagacctcgggagggcagccaagagccaaccacagcagaggaggaagctgttgctttcagacgaggaaattgctcctgggaca

SEQ ID NO: 23287 - DNA, 1193 bp, Mus musculus
taggccaggaagagaaagaaagaatggggttgggtctgaggatagagggacggaggcatctcctttgctatcacctctggtaagaggcatatttcctttccagctggtatgaatggaaagcttatacattttggcatttgcttcctaggtaacgagtcagaccttgatctagaaaagacatacaaagaagatgatcgagaaaaggcttcaaaaagaccccgggctcagaaaacagagaaagtccagaagatctcaggaaaggaggcagggcagctttctggagcgaagaaacccatcatcagcgtggtcttaactgctcatgaagcaattccaggtgaccgaggacaggctgggaatgatatgatgagagtgtgtagcacagctgcccttggggtagcctgaggaaggaggcccaggtcagagtgtacgtgttaggtattttagtggagtttcatttagtcacctgagtaagaccacagacctctttatcctctggagctgtcctctatctcctcgacctactctgttgtcacccaggtatgcaagaacagtcccttctgtgcctctccccatcttctcaactggtagtgccccatcagctacagtgactgcctccttggtgggtgctgcccactcagcaaatgtaagagaagcagctgttctccaggcccaggcagacactgcctggcttcttcacattttagtggtattcattaaaatattttcttagtactataagtttctatctatttttccttttccttgtagatctgttatattttcttttataaaaggtctcttgtaggaaagactattttaggaaaacgaacaaacaaacagtgccttaagagtttctattgctgtgctaaagtgtagacataagtaacttgaggaagaaagggtctatttcagcttgtcactctcaggtcataggccatcacagagggaactcagagcaggtactgtaggcaggaacccagagtcagggactgaagtggaagccagggagggatgctgcttactggtttcctcactcctggtctgctttctttttgttttttgtttttcaagacagggtttttctgtgtaaccctggctgtcctggaactcactctgtagaccaggctggcctcgaactcagaaatctgcctgcctctgcctcccaagtgctgggattaaaggcgtgcgccacc

SEQ ID NO: 23288 - DNA, 1177 bp, Mus musculus
acaaaaacaaaacaaaaacaaaaaaccaattcctgtaggaaaagggcatcaggaaccttcatgtgagttctgaatattgaagatatcaatgggctccaggtagggattctgggaagacttcttgaagcatgaggtagtggaattggatcttgcagagtgaatagatacccaacaaaaatggaagggtgggtgctaagacatatgtcgcacgaaaaccccagctcacatctttaagggaataaggcattgttgattctggaatcattttgagtgaccttggcccagaagcagagatttaggtcactccaaattccatgttccattgtagaagcagtttcacaaagttcctatagttttacggaattgggaaagtcataaatcaaggcaaggttaaagtacgttggtgggtacatcaaggggggaggtgcatcaggatggggacggcttcctgtcgctcagattctgattgcatgccaagcttttggactggtaaaagctacttacctgctaagtcaatagattctaaaaggtttttatctgttgccaacagatgttagttccgccacacgtgtgtgtgtgtgtgtgtgtgtgtatgtgtgtctgtctgtctgtctgtctgtctgtctgtctgtctgtgtgtgtctgtgtgtgtgtatgcatatgtgtgtagggaacccaggaatggttattctggagaggatggccagaacttatcccatgagaagggaattagtttctggaccttcagcattccaatctcttcacagtgctgaaattctaagcggccgattggtcatagccagctgcggcttcttttcaggagttttccttctcatgtacctgcaggtgtgtactgagcattgagaccagggggccttcgacagggagtctgagggctgggaagctgttgggaatttagcttgaaagccaggagaacagtgcctgctgacttgcctttaggagagagctctctggtgcctgccaggaggcagttttgtagttgtgatttaatacacagaagcacttggatcttttttatagacagtactcaggtaagccacatccctaatgatacataggctttttttttttttaaattttaaattacccaagaaaatcttctcctgcccctccacacccaatccttatcccttaggccaaacaacctccagtcttg

SEQ ID NO: 23289 - DNA, 1232 bp, Mus musculus
atttaggataaatgataacacagtcacttgtctgtcttgttttcatttagataataaatgaagaagctcaggagcaagcagacaattactgcccggtgtgataaatactcaacagcaatttgctctgaaagagtagagcacagccttactatggtctgtggtcaagcaagctttctagaaaaagtaacatctgagcaatatctgaagaaataatactacttcggagaggaggatggctgttttaaaaatgaagtgatggcggcggccgagcgggcatggggagcagcggtcggtgtagcccggctgtgcaggtggttctgtcatgtagcgactccacacacctttaagaaacaacctctgcaccaatatgtacggagaccacttttcccgctgcgcgcatccttgtgtaacatgtttattcaaacacaagacaccccaaatcccaacagcttaaagtttataccaggaaagcgggttcttgagacgaggaccatggatttctccacccctgctgcagctttccgctcccctctggccaggcagttattcagaattgaaggtgtgaagagcgtcttcttcggcccagatttcatcacagtcacaaaggagaatggagagttagactggaatttactgaaaccagacattcatgccacaattatggacttctttgcatctggcttacccctagtgaccgaggagacgcctccgcctccgggagaagcaggctctgaggaagatgacggagtcgtggcaatgattaaagaactgttagatactagaatacggccaactgtgcaggaggatgggggcgacgtgatctacagggcctttgaagatggcattgtgcggctgaagctccagggctcctgccccagctgccccagctccatcatcaccctgaagagcgggattcgaacatgctgcagttttatattccagaagtggaaggtgtagagcaggtgatggatgatgacgaatcagatgaaaaagaagcaaattcatcttaaataatctgcattttctttggccacaaccattggacttatctttactgatcctgtaattatagtctctgctatggaagtttattaataaaaggtttccaaaaaaaagtgatgtgctatgtagcataatggtatgccttatgccatggtctgtccttagtaccagatgtcgtgtctcatcttaattttccagggatttttttcttcagtctagcttccacctta

SEQ ID NO: 23290 - DNA, 1164 bp, Mus musculus
agacacaccagaagagggcatcagatccccattacagatggttgtgagccaccatgtggttgctcggaattgaactcaggacctctggaagagcagtcagtgctcttaaccactgagccatctctccagcccatctgcaaagtttatacagttactgtaactatttcttttttcatttaaaaattattggagctaaagagatggttcagcagctatgaacatttacttcatttgtaatggactggaattacattcccccaaagttatgtcaggctgcctgcaactgcctgtaactccagctccaagggattttgatgccctcttctggcctccatgggcacctacattcatacacacacgcgcgcgcgcgcgcacacccacacacacacacacacaagccaaaatacatatatacataaataaaaataaaatatcttaacagacatgtacagaatggactctgtgctgagatttctttgaccacatggtatgtatccctgttccaggagttggacacatagttaaaatctctgaataactgatcctgatatcacaagacattgctcacagactatctaaatatttttaaaatatttcaatttgatgaatccaaagccactgggtaattacactgtgaacatagaaccagttgtaagacaagatacattgcttttgtggcctaatttaccagtggggaacatgtctgattccacttatttagaaaattgtttttcttgtctgttttgaagttcagagtcttatagaaacaatagtgagaggcagaggcaagaggatctcttatgagttggagaccaagctggtctacatagcaccatgtctcaaaattaattaatctacatggagtgtgtatcccacagaatgacaaaagtggatctctcttgtaatcactgtcttttcctcattgagttatgagttctttatacattctggagagtagaccaaatcacatgtatcatctgtaaatattttctctcatgcagtggattacctctttgtctcttttaagtagcatccttgaaagttaaaagctttgactatttctgaacttccattttctgtattcctgtgcttttggtagcctaccaaaggaatcagtgatccgaggtcaggagaacgtgtagttatccgtgcttactctgttct

SEQ ID NO: 23291 - DNA, 1221 bp, Mus musculus
aaacaaaaagataggtttactaaatatgttaatccattctttaacataagtctcacctttcatcttaaaggtttccatagaatttagttattttatctttcagccatatgctagtttttttttttctttctttctttcttgccaacttgcgtaaaaagggagccgattacaagtgcagacaatgtggtattcttttgtaactgagtcctgaaatgttctgtagtgttaggcaaagtctcctcttgcttgatactaaataaacttttgaaagaaattttgtgtgtgtgagctaacgatttcatgtttttttttttttctatttaaaaagttcttcataaatagctgtaaacagggaaagggctcctctaacagcgcttgtcataaaagggtcacactaaatattgtacagcttcctttaaaagtggtataaaattaaacgtgccatggtatactcaccataggttcagatgcggtctaaagagtccacacggtatcaagctactcactcaggtggcacgttaaacccatgcaaaccaaatctgactttaaaaactggttctaaaataactactggcttttctgaaaaggatgtgatcagatttcatcttgtcgagcgttttttcactagtgcaactttggattttttatgagacttttggtaccttaatgaacacctcgctccatgctggaagcataaacagagagcttttaaagacattctgacttgcctaattgaggtcgcactcgccaaggctgaggatgtgtaagccttaaacggtcttcattttcaaaggtaaataaacgaaataagattttaatctcacttaatttatcttaatatataactaataaagccagggagattacaacttagccggtttcattatccattctagaaaggttttaagatcacctaaattctcattttaaaaagtttaatttgttttagtcatctaaaaagccttagtctagccagtttaattggggccaattcttccctgttaaacaactgtaaaacctcataactagtcgtgtgtaatacatcttttggttaataattgagggcattcttaaaagtgacaagggtttaataaagttatttgttaatcatttggcttaagttttaatggtagattatgtaaaatgtttatctttagtttcggaggggggctccttatatttattttgagtaaacagatttcttcttttgttaggaaatgt

SEQ ID NO: 23292 - DNA, 1165 bp, Mus musculus
gtcaatggaagcaggcagggttgaagctgaaatgggattgtgaaagtcagtcatgcatgtctatagggatgagagacacactagagttgacaggctgacgtaggtgtgaggtgctgaaggcactggctgcatggtcttcttgtgtggttggggacttagtagctatcgctggaacataccaggttgccaggagacatgtggagcaagatgcaatagaaagaccagaaggtgctaggtctctgcaagctatgagcctgtcactttgtcccctagcacaggtgtgtgcagttggagcatgacacagggaccccacatgctggggctgctgtattccttctgagtgtcacctgggtgtggtgtttattactaaaggggttattcaaacgtgcagtctccttattagacaagaatgaaaggcaagtgcccaggacagacccacgagaagtttaccgtctatttcccatagttggggtgacacaagcatggcctttctgaattcagccctgaacacagtgcaccaccaatgttttctgccctcacttcagccagtctctgctgcactgcctctgccactgtgtgtcctgtgtgtgtgccgaatccccgcctgggtgctctggccagaaacccaccatttggcccagatgttatcattgttgctttgtcgatgtgtacaaacgatcttcatctttctcttttccaggacctgcttctggggaggccgcttaaggacactcacctcaccatcatgcctactcggcaaatgaaccactggctcgccaacgtgacagtcatcaatcgattattgttgttttgtcccagatttgtgtttttggaatgcttttatgaaacagtgtggtttttttattttaatttagaaggtttttatttctttttaaagaaaattctattttgttgtgtgagaaacaaaaaaaaaaaatgctttgtattgtagctaataaaggctccccatcaaaatctcttctattttaatatagatgaagaccaaaaatctagttatttctacacagctctataaagcttgcatactggagagccttgtagaactcttggtcctcacaagacttcaaggacctacacagattgcatatgcatgaataacatccatctctcttatgggccagtcaatgggctaggcaagagagac

SEQ ID NO: 23293 - DNA, 1195 bp, Mus musculus
tttgttatttcagtctccatttgctataggaaactctgacttttatccactaatcatatatctcggagagttttaactattactgacagttcccagggggaacatctttgttgccttcctcctcttcatcttccccttcttccccttctcctcctcctcctccttcttcttccccctcttcctcttctccttcttacttttttctttcttctttttcctccttccttttccttcttctttcttcttttccttcttttcttctttatcctcctttttcatcttccttcttctccttctttcttctttctcctctcttccttctcctcttttcttctttcttatttttcctcctcttctctcctcttcctctcttttccatcttcctcctttcttcttctttctcttcttccttttctttttcctcatcctcctctttctctccctcctcttcctgcttctcctcttccttttcctcttcttcctccttcttctgtcttcaggggattgttgaagggattgactcttttagattttctaagtaggtaatcatgttgtgttcttcagggttctctaaaggcacagaactgctagaatgatagccttattagattagcttatgggatggtctgggtagctgagtaatagctttctcatgtcataaagatggagaatcctgtagttgttcagtccatgatactggatatttcagtagtcccaatatggtgctggaagcctggaggatttttggggagttgctggtcttcagtctactttggaattccaaagaaatggtttctaatccaggcaaaggaattctgtagcaacagcataggtggactttcagtgagagtaaggacaagtaggcaaaaagcaaagcttccttcgtctatgtccctttctgttgctgccaccagaaaatactgcccagatttaagatggatcttcctgattcaattaatctgatcgagaaaagtcttcacaggagtgtctagaagcttgaattttagttgattcagtcaagtggacacccataattagccatcagcgatgtcacctctgaacaaagacagtctcttctgttgacataatagtgataattgtttggctcttgctagtgaacacttagaaattaaaacatatctataacttatcacagactgtcttaaaatggcatcatataaatgtacacacacta

SEQ ID NO: 23294 - DNA, 1182 bp, Mus musculus
aaagggtctcttctagcccaggctggtctccaactcactgtgtaaccaaggataactttaaactcctggtcctcctgcctctatttcccaaatagtaaaataacaagaagagcaaccatacttagattatgagattatttagctcaaaccaaaggctttgtacatgccaggcacaaactctgccactgagttacattctaaaccccagatagttttttttatatatagaattaataattgcctgtttcttcttgtttgttttttctatgagttttgcataatttttccttgaaattcccaaaagagccatgatgcccctctcaataccaccacacccattagctaagctatgacgagtgcctgtttcatttgtagatctctctcaggttcccccaggtctcaatcctgggtagctgctgtccttcaggtctgccagagggatgctgcccactaccaccgccacatgccccctctctcattctttctctttgtctttccttgtgccagtctccagtggttcactctgtctctctcctaggcttacttgttctgtctcgctggagcgcatcctttgatgcatgaaaaaagtatacttctgaaatgttggctatctgggaaaaaagtactctcatcatctcccagacttaatgaatcatttggctgagtctagaatctggaattctttctcacttaggattttgaaagtgttgcccatgccttccaaaaattacatctcttaattttcaaaataaatagcttatataaagatcgtctaacactgttgtggcgatgtctcatacacccctcccctttctgatgactgaggctctataaatgacctgctctctttcctgggggagtatgtgttaccacctcctcactgtccagtattctatttcacagaaagtgtcctgatgatagccttttgaaattcacctttcagcccacagtgggttattctacaaaagaatattttctttcatgatatctttattttcctccctcttcctctttctccagtgtctatgatttgcagttggatcttcttgactataccttaaatttcttttgcttttccttctctgtctttcagaaagtttattttgccttccacatttaacttctagtgtattaaattcccacaaagtttattcttgttctctgttccccttttctagtggt

SEQ ID NO: 23295 - DNA, 1206 bp, Mus musculus
gtatggaaggccagacagagtggatggaggtctgctcaggccaacaggctggcaagaacccagtctactaatgttccactctcctgagatgacccatctctgcagaaaaggagctcccgaaggggagctactcaaggcagatgagcgtctctggtcatttctggagccttgcctactgaagcagtacctggacaagatggtagtattggatagatacagctccccaactcagcccagacgagggcctcaaagtgtaagcgtgcattttagctgacatggtgtgcctagagtaggctaggagccccagttactaaagctaactacatggtgggatttgctgagcttagagtcatcttgccactgcttgagtctcacctctttcctgggactgaagcctaaactccttagcatggcgttctagatctttctcattttctctctgagctcctcacccacttctggctataggttcccctactcaccctgagtttttacaagtactctggcccttaaccaggactcaccccagactccctctggatccctgatttcctgtctccatctgccccttccctctcttctccatgtcaggccacttctcgaacctagtactgtctttttttttttaatgagaaatgaagtcctgtcattatatctttgagttgaccatgcacaggagagcgtggctatggactaaaggtttccatcccccctaaaaattttatattgaaactctacccaccacagttgtatttggagaacaggcctccaagaaagtgtctgaacttaactgaggtcctaggataggtctgtcaaccaaaagaattagtggccttgcaagataaggcattcagagctatacaagcctcaaggagaggcccagcataaagtgagcatagggtgagctaaccttatgcaaaccgagggggaggggctcaccagggacacttgccctgtatcactttgtttgaacttcagccttgggaaccacagaggcccatctgtgccatccagaccttagtctatggtgtgctgtgatggctgtccaaggtaagcaagacaggcagcataagatgagtcctctgcagcacatggccccgtgtctgaggatttagtcctgctggtgaagaaggtaggtgcccatgagaggacaccagtacaggtagtttcatgttcatgcgcagtgggctgccttggcacatgaca

SEQ ID NO: 23296 - DNA, 1191 bp, Mus musculus
actgtgccatcttagcagaggatatacccctcaccttgaaaagtgtttccaggccttctcaaggggaacactgtgtagatcctggggggtgccaaagatgccaagcactttcatttctgccacaacagatgcccaagaagagctgtgactccagcttatatctttttttgcacccttaaccttgaaaagcctcagttttctgaatctgtaaagtggacatgatcttacttcatgccactgaaaagaaatgatgtaatccatgtaagattcagtcctggtacctggtacctggtgaatgctatactcagacagagaggtatgaagtccagcttagatcagaggctcctggggacctagcttctttttctttcccagaaccaactttgcccagtcagtggaagtgctgagtgtctctgggacagtgggaagttggaattgctgcttctacaagtcagagggctttcacagcacctagtcacttctgacccttgctgagctgggtcaggtataaaactgggatagagacaacacctgcgagagaaagaagtgaggggataaataccaccggggctctggagtgggtgggtggatatttgggtgaacgactggaatattctctgtccaccctcaccatttcgcccatgctttctttttctctgctgtctgctgtccgtggcagattttgttgtgggttagaatgagccccaagcctgttcccatacacaagggctattctagctatagctgctcttgagttgggaagcccaggactttgtttgcccacagaaagctgggtgctttgctgctgctctgtgttccaggagaacccagggccgtgatatgtggaggagggtgactgtggggtatttccaagggcacctggtgtttagtggataggctgcctgatcctggcactggcgctttcactagtctggatgtcaattggtcccttttgtgtcttgcacatgagttgggacaaaagcctagcaggagcgtgagaccttgcaccctgtgctagtaggctgggagcatcaggtaacgttagttcttgaccttatgctccgtgtctgtggggcttgagctgtgctagagaacagggaggaggactggatgaggtcagtccccaaggccatctcatccctcctgatcctagaagttctctgaggcccctctttcaggatagacaaatgt

SEQ ID NO: 23297 - DNA, 1767 bp, Mus musculus
cttgtgtgccagggacactgctgctgcccaccttggttcaagtttttaataaataagtaatgtttcaccttatgaggttttaatctcatgtcattgactataaaccttggaatgagttatgaaggaaagctgaaagaaacaaatacaaaagtgagcattaaaaaaaaaaagcaaaaccacaaatgtttaaaagttttgcagtcaaggttccctcctttcagactgggatgggacactatgggacccacctttgcccacacaccagctttcattcttaatgcggcccactaacaaaactactaccttggtttaaataggtgcacatagttagaaacttctgggaagtagttggtttacccacatgccctgtccccgcccctcctcccacagggatctccttagtctactccctaagtaaactttgagaactgctctcagacatgagcaatagccagccttattttctaatgtagcagttttgatatatatggtggcaccacgagacatatacccatgctttgcctggacagaaagcatacttctcagcttcagctttggccagtgcacacacctgtgctcccaagcaagccatttccctttctgtagatgccatatggcgacagctcagatgacagagcagaatggctcatcgtggccactgtgccatcattaagcagcctagaactgaattcctgaactccctggcttctggtttttccagtataagcacctcatacatctgattagaaggaatgggtagcacccttactgtagccctaaccagtgtccttccccattggtgctcactgggtcaccattgcagcatctcccactacttcttcctcgaggacttgaggcatgagcccaacccaaaagctgtagttatgctctttctgccagccatcaactgcacacaacatcaactcctgtctttgtttagagtagaccacagcacatccagcagggatttggtcaggagcttagaaactggagaactctttttgctgttgttgttttgctctttgtttactcatttgtttgtctgtttggttggttttggttttcttgagacagggtctcgctgtgtagcccaggcaggcatggaagaattcttgaccttcctgcctcagattctcaagtgctgacattacagacagccatgtgccaccatgcctgatgtgttggtgagtggtcacaggaatgcttctgacttctatagtcacgttgtatggctggggaatcccacatgggtacctgctagggactgcgcaaggggttcactacagaggtggcaccctcagccaaactgttggttagggcattgtggtagctagggaaaataaatttggcagtgggctactccaggaaaaacaacgacccctcagagccgttgagttgtgtgtgcagtgaccttagtgtccttggaccaagcaatgaccagcagcacagcttcccaagtggtctctgaacctctcccaagaaggggagcttcagtttttactgtctggcggggagttctctcttccattgctttttgggctcatgcctctgcttctggagccctccctctccccgtttccctcccgttccttccagcgacttggctcagatgtcccttccgctgggcaagttcccagtctctgcacctggcttcagcccctcatattccctagctccttctcttaattgcagagtcccttccttccgtcagcatgtttttatttatctttaatttaccatcttaaccgtggtgaagcctacagcagc

SEQ ID NO: 23298 - DNA, 1104 bp, Mus musculus
attccttgggcaaactgataatgagcacctgcttgccttccacttatttcactgtctcttcttcatagagctcagttgcaggtgcctctggacatctccctggacagggtgttttcagtccagtcggccatgggagctttgccaagatgccaggccacttaccaagatgagaaaaatggaacagattttaagaaattagtgatgtaagttagaaagtcaagcaagaggtttgcttatcacttgtaggagtctctccattagtataatttccctctatgataatttgctagctttcttgagtgctagtagggctgggctgcatccttgcacctgtggcacttcacgcctgagctgctacatgagatagggcccatgctctgagtcatggtggttaggtacaagggaggatgacacatacttatgtgtgctgttcagataatgtgttgcttcctgccctcgctctcacttcctgctgcctgaagcactttgtacctcattttcctggtgaacactccacccatcttctagaggtatgggatctgagacaacttctgggtctaccacactccaggaaatcaacccttcctcttctggctgtcccaacatagtaactataaccaccttgcccaatataaaatccatttgagcttgccatagtctgtggatggcttgtatgttactggagagagccacctggctcatgaagcatactcctgttccggaaggttgacagggaagtctaacaccccggccggggcttggagaaagcctctgtaagtaggcatggggatttgtgttccacagcaaatcaggcatgcttcagcaccacggagagctctctgctgggctttccccagtgagggtgctgacccagctgtttgcaggctctgatcataccccacctgtgggcagcagtgcccttgcagcagagcagaggctttgattcctgggttccaggttaacagcgaagcattcacatgatgtgtctaggagtgtgtaaagcactgtgcagactgaaggcgcagggttaccctgcttacactaaagcctttctgtttcctccacaggcctgaggatttgggggtggtgggggtggtgagcctt

SEQ ID NO: 23299 - DNA, 2005 bp, Mus musculus
agcatgctctatggatgttcagaaaggagctctagtcatgacccagagtgctgtatgagcagtgtgtttcccctaatgtgccacaccccattgtgaaatggaaaccttcacctggggcgatgcaagacttctcagaggtctaaatctgtggatgtagctccttcggagctgtgtgttgagccagctctgcagtcagggccaccttgggagtcattatttcattttctgggcatgaatctgttaggaataactagcgataatggttcatcagactgtctcatgctggcatgtgctgactctccaacagctccgggaagaaattgccctgctgattaattctccactgttttctctctcctctcagaatggctattcaagtggacaagttcaactttgaaagtgtcccagaatcccccggagagaagggacactttgcaaatctgaagcagctggaagaagagagacaggaggcacgaggcctggagatcagcagcaagctggacatccgctggagaattctatccttttcagtgtcttccccataggcccagggcacaccctgatcctgactcgggcttctgacccccacacagggagccaagaggggcttaataagtactgagcttcaactacagacagcttcaaatggcatggcaggatatggaccatagggctggcattttcttagcgtattcacacttcagagggcctacttaatgaagtattgatcctgagtgggtaaaggtcttgttggggccagtggtattcctgactttggatctcatgtttctgttgagggctggtattcatactagtgacaggtcctaatggctgcttatcagtgcaggacttgagccatcctctgactgacagtaggcaatgtgtatccagtcatctgggcaccaacatggtgttgtacaacctagcagatgtaaagaagctctgtagaaggggtgagaggcttttctgtggactatgctgtggagagggaccatggtatgaaatgcttgtgcccacgtgggccatgtggtcagaggtcagctgagtgggtggaagaaccccgagtgcttctgtgtgtcggttgtcttggcagcctctttagagcacccactcagttcgtcagacatttgaggggactgttagcagtgggtggaagtttatcaaaggaccagaggtaatgcccaaaaagtaccacagcatgagagtgaggcttattcagactgtcaggaaaagaaattctaatgtacatgtcttcccatcatctccttcatgtgtagactctgtgactgtcattatggtcagactgtgcatctagactagaatattctagaagatgtagtcatcatgctgtgcttgtgccaaagattgtgctgagtcctaggaacagtgtgaggagcactttcagacccaggccccagtatagactgtgatccctagcacacaggtatggaaactatgaaactatgaggtggagctttcacttcagtgatgcagtcagccaaaaaactgctgcttattgtcccactctggctaccatgatggtcaaatgaagtgatttatagcagcacatttagtctgaacggaaaccaacctccttcagagctagtctacagagactatctatggctgaagcaggcaggggacaagcctggagcacccatgccatcatcccttgtccccactgctgtgcgtttgttgaaagtgtcccatcatgggtggggtctctcatcttagaggattcccttccaccgagcagggtgtttgggggtagcaagcacctcacctgcatgccactgtgagtgtctgtgttgttctggcaaacactagacaccctctgcacattggcagggtcaccagatacttgtggtttcactgccccgcacggcttttaggcacagagccctgggcttgattaactccaggcaggacaacccacctgaggctgtgctgggtcttgttatatttaccctttggggttgctgcttcccatagggagaaggacctg

SEQ ID NO: 23300 - DNA, 1174 bp, Mus musculus
atgacctgatgtcactgccttatagatggctgtgaggatcaccgatccccttggcagatgtccttgccccaaagacggtgaaagtgcagagctatagtgagattccacttgggtgcctcatgctctcatggctgtggctgtgtggaagagaccaggcagacgtccttgccacgctgctgaggcacagtggagctatctgcagacaaggcatcctcgtttgggcagcagtggctgtgcaccgagttcctgggttgatgtctgcataggatggtgacatagagaacctgcagactcattaaccagttggctttctttatgctgtggcttttaggatggatgcttcagctccaaggaaatggttgggtatccttacccagcgaagaatgctgtactttggggtgtttactgaagaccgggcaggtgtttttgtaactctgccaactgcatatattggattatggctgtgtgtgtgtgtatcggggggatgcaccaaggacccaggtgtttagccttcctctttggattgcagcaggactcccagcgtaccccaaggaccacagcagtcttgatcacatcgcttggggaggatctgggagtcgtcttgttggcttgggtttgcagcgatagctgctgcttgtgagcagtgagggactctctgggctcccacccatcggggctgcccgatcctctctgccaggccacacttgcaaggatcttgtggcacactcagctttcagtactgactggaggagaaggcttccgcacggccggagctccaagggggctcagacaggcctactttccagcgtgcagatcctctcctgtacccagtcccttcagaactcaaccaggttccactccagtcttctcaggatccgttaaagaaaacaccagtctcggatatctccgagtcgtgtctaactcttctctttcctctctgtgcttagcactctagtaccttctgtcctctctgtgtttttaatgttcccagtgtttagcagccttggatttacccctaccccacccctgtgcctttaccccccccttccctccctttggcactatccttaccccatcttagctgaacagggttgtagagtagatgggaacatgcccaccttactgtctttgtgaaagcttttccttctgaactgcttttccttagctagctaca

SEQ ID NO: 23301 - DNA, 1099 bp, Mus musculus
agtgtttctacacccattctagccggtttggctcctgaataaatgacatggacacccaataaatttattaacaagctgcaggcactatgctggacaagtttggagctattctaacccaaccatgctagcctggtctactttccagccagtccacagccacgtggcattccctgccatcttggtcttgccctggatgttcctgctccatccatcctctcctcgtggagacctcatggccaatgctcctggttctcctcttcttttctcctcttcttgctcgggacttcctcactgggatctgaagtccctccctattctcttctcctgagctagaggctgaatcagctctttattaaccaatcagaggtaatggaaaataatttttacatatcactgagacaggagatgctccaaatatcatgacagtgccagttcattgggcacagcaatcagcatctgaatacccagtgcacaaaaccatcctccaatattttgatatttaaattgtttcagctctggccagtgggggtgcccccccctccaggctgcctgttcctctccctgtgttgtatttgtgcatgcacaggcacactcgctggcttttggtttattgtttgtctgtgttttgagtcagttatctcactggcctgcaaattgccaattaggcaatctggccagggagctgtaggaacctgcctgtctctggcttgccagatctaggattctaagcattcaccaccactcctggttttcacatgggttctggggactaaactcaggtcctggtgcctgaagcacttctgtgatggagtggagtcacttccctaaccccattgctttccttgtgacgggtatcttttttaaaaaatttatttacttatttaatttattgtatgaatagtttatattcatataacttatttatatgagttattttatgtttatgagtacactgtagctgtcttcagacacacagatgatggcatcagatcccatagtggttgtaaaccactatgtagttactgggaattgaactcaggacctttggaagaacagtcattgctcttaaccactgagccatctttctaccctgtgatgg

SEQ ID NO: 23302 - DNA, 1209 bp, Mus musculus
gataggagttcagttcccagcaaccgtatctcgtgggttacagccaccctgtaattccaattccagaggatcttaggcttccttctgacctccgtggggcacccgtattcatgattcatgtgcacacgcacacacacctctcacatgtcttcagtgacagtcaaatgccctgttgttttgaacacctactgagaactgtagacctttcctaaatgtccacattacttcattttagcctttccagccaccaaaaacattagactatgccctctttctccaagaggcaaaatggcagagctggctacttgatggactatggctcagtgtgctaactgcactgtgctgccctctgctctgccctgccagactgttccaacaacgccaccaccttccttctgatgttggaacgaagcgggtctccgcttactttgcatttggaactggactggtgagctgataccaatgactaaggcctctcagcttgagtgtcttcgagatgcttctgctagaaatttgcataaacatctgggccctggactcagaggttgtgactactcagcctgctgaaaaatcaggacaaggatgtgctgattaatgcccccccccctcccgccgcaggccaggggttcaggcatgagtgtggggatttgattgcatctcaagattttgcctgggaccattttgtactctctcagatcctctcaaggttgctgcccacgttagcccggcacagctttgtccccaggcttccaggacttgtgtcatctggaagtccatggcacacagtgctagaaaccagctgtgcccaggctttctcccgggggaacctttctagggtctgaagtcatttcagttccatctgtagggaaggctcaccatttgccaccatgttacattcatatggcaggaagaaggagagtctagattacaggactgttccagtcttccatctgtgataggtcccatgagaaccatggagcacggtgaccaaggtttgggccctcagtttcctgtctcttggatttagccacaagggccccagctgaggccaccatcacaagtatctgttgtcatgttcaggaggcaggctgtcaggtgaggggctgggggtctcccagtacctgatggaggcagtcaacatgtttgcctctcttttatctctctctttgtcccctgtcacggctgacactagcacacaggagtccttct

SEQ ID NO: 23303 - DNA, 1211 bp, Mus musculus
tagctccgctttgtgtgaaaatgttggaacttttcattgttgaggacagcctgtactcaggtgacagccgaaaggccaggaggtcaaagagactgactaccgtagaagcggagtggccttctgctcattgcaggctgaatccgggggacagatgcaccatcctccttcagattctaatctctagagcagctagtgtgtagtgtcagccctgccttgcggcagacaagccaagcatttagcaccctcccttacctttcagctctcctttttagccacagaagagcagaatcccggatgcatgtagcattttgttacatgtgattgggaccaagtcatttaatctcaaggggctgagtcaggaggattcccatgagtccgaggcctgcttgagctacatagtgagttctaagccagcctgggctatacagcaagaaagtatttcaaaagacactgaagggctaggagtatggcccagtgggtaaaagcattggccactcagtctgatggcctgactttgatccatgtggtgggagaggagagaactgactgtcacaagttgtcctctgaccataactaccacacacacacacacacacacacacacacactcacacactcgcacatgcgaaaagggtctgggaagatggcttagtgggtaagaacatgtgttttctttttctctctttcttttttttttttttaaagatttatttattgttatatgtaagtacactgtagttgtcttcagacacaccagaagagggcatcagatctcattacggatggttgtgagccaccatgtggttgtgggatttgaactcaggacctttggaagagcagtcagtgcttttaaccgctgagccaactcttcagccccgaacatgtgttttctaaacacgagaaacacagcactgggtggcagagacaagttctcttatttattttccctacttgctgcgacaatatactcttgacaaaagcagtgtagggagaagctctatttaactcctaattgcaggtggcagtccatatggggatggagtcacagtcatgtgatgctcataatcaggaagcagagagaaaggactgccagcggtcagttcactttccctgtttgtatagcccaaggcccgcctcagttaacataatgaagacagcgtgcccaggtgtgcccggccagcagcctgtctcctgggaggttctaggttcta

SEQ ID NO: 23304 - DNA, 1113 bp, Mus musculus
gcatgtctctgtgtgctacaagctctcactctggcctggaacttactatgtaacccaggccggctttgaacttacagaggcctacttgcctcttcctctgcttcctcagggctggcattaaaggcatgtaccaccatgcctagctagtgatttttaactgtaaactttgtttttgggaaattggcattttcagataagctgactgtttaagtcatcctgtgccccttcagggtgactttactaatcatctttgcatctcttcaccacccagctgccctggaggggttgtgctcggcttcagtcatttatcattatcccggaggaactggtggcaagactggggctcggagactccaaggcagctcacttccctcagaagcagccaacagacaccggccaggtgagcctgcctctctccagcctgcacccaccgcagtctctaaggagaggagctgtgctgtctttcccttttcactaggcccgatgagtgtttctaggtaggaggattctgtgcattcgcgaaggagacattgtcttctggcttatcggcctgactgctacagtgaaggtttacatgcagtgtctatcactgaattctaggcctgtgttgaaatcccctggcagaatggacttgggtacccatgtaatgggtaacattggtccctggtgtcagttttaactgcagatgcagggaccagggatacttcctgtttcatttaaaaattcctagctattttatcttttttttttcccccagttattgcttccagtgaagagcgaaagacttttctagatgcggagatccacaagtgctcagtgagcttttgatcttagtgtgttactagtcacattgtggaggccgggcaatgatgagcaatgcctaactcaaagccaaagacacttgtgggtctgtgagacctttagaaaacctcagtgaagagaaagccacattttcttctcagtggggacagcacaacgtcattgccagacactctttcttgacagagaagggtatttagtattcattccatttatttatttaacttgttgttagtgttatattatgttttgagacaggttttctctgtatagtcacggttgtcctgggactca

SEQ ID NO: 23305 - DNA, 1055 bp, Mus musculus
ttaacctaatgtgtactttgggcaggtgatgaaatttacacaggtacctcaagtcaagacctgcgcgtgctgcatttggatttttggttttgttttgttttgcttttctatgtatcattatgttttacttaattttgttctggtgttatgctttttggaccccaatagtctgttgaaagaaaaacctaaaaagttagtatccttgttttctcccccctgcagtatgtggttctaaaggtcaccccccccccccattaggaatctcccccaagcacacccgaggaaaagggtacgacgggcgcttctcagcgggccgtgccattgagatcttttatattcatgctgcttctagtcccttctccacatcacctaagggtgggtacctccattgcgatgttgtggcatcttaacttttacacacagacctcatgggtgtccactgaggaagtagtatgagcctaaagacactggcagcgtgcagcctggcctgggagtggcggccttcgcatctctctctctctcagcactcagccacgctgacctggccgggtggtccgcgtggacaggacagctggtgaagcaagccggatgctcagaacactgcgcgtctcctgtcctgttttaagcttagctgggtcctttgttttcacagcttcctaggttaaatagtttgcactatttttgcaataaattcatgggaaacctaatggctacttatgttgttgttcttactgtgtgtataaactaacactaaaggtttgctatagtgttttcttttcacctccttatgtagccccataacatgcacagaatgctgtaaacctgattaagatatgatgtggatattttataaagttattttgtatggtgtcgattttgttttgccgcatagtgtgtcagcaaaaaataaaataaaataaaattcctcgtatttacagctgcctattccgaaggtgtccagttactcactgtctgtctccctggagagtgctgttaaatgcacgggctgagtccagtttccctgatagagtgcacctttcccccggggctgggtc

SEQ ID NO: 23306 - DNA, 3130 bp, Mus musculus
ggccctccatcctgcacagcaggtggcctctgtcctacctccaggcactggctttactatctggacacctagttgagagccttgaaagtctgttcttggtgtccttttagaatcatgctggggctggtcgttagttgaccctgcccagaagctgtcagccctcagctctttcttgcaaactgtgatgccaccttgtagcctacggctgtggagccccgtcctgggttctttgtgccctgaaatgcaggtgcacctctgctgggggttggtggggcactggcaaaggctacttgctggccttgtgttctctgcccctcagcaagactgtctgttgtagtggaagtaggtttagagggatttggaatcatgtctttgtgaatcgagtgtgacgtcatcaggggtacggtgctacttggtcctaatgttttggaatgcttttccgtcgttgttactccattgttactctctgttctatgacactgagggagactgctcacttaggtgtggtgtcacataggactccagctttgatgtgctgtgcgggtggtgtgattatcatctctgaccttctgaagccaggggtggtacccatccctagctcagtctaattaaatctttcctccctgtcaagtgattgctttgggtggttttaacaggagtagtccagtctggatattctattttcttaattacatagaaaaggcccgtgcagcactagctgcagacagataacacatttaacaattttggttcctcttcaaagccaaatagacctatgttgattaaactccaagagggtacaattcagcattaaattaaaatttgagttgtgaatttgagagggaatttcagtatagttgataaagttaagtggcaagtgagtatttataaaagttataagagaataattgtaagtttctgtacaacaatttggctactgcctcataaatacaggaagagaccgtagccctgaatccgactctctcacctcccacataccttggactacctgcctaatatgtatttgagggggtttaacccttggttttatcaaattttctagttttattttatttttataaaataattgaaaaagaaccaaaaaggaatccagaagttccccagtggctcctcccccagtcttaatcccctcccccccacacacacacacacactcaaatgttttagaagacattttgaatcaaaatgtattccacccatttaacgtttgctactttctgagaagtggagtggctacgagggcctgtttcagatggtactctgtatgtcatggacatgtttgtacctgtacagtggatctgtgtgacgacgtcttgtgcttgcggtttagaaaccacgcagtgctgttttgtaaattgacagtttctgtgtaaactattatttatatcccttggcccctctgtataatttttcatttgctacatggattgtataattaattataaaattatagtacctgctaaacccaattctgaggcttcatgtcattgtctttggtttgataccagtctgatcgggaggctgcccaggccttgcgcaataccagtagtgatgttacttaaagttaagccttaatcagacagtgaatttgtgcatttcagagtatgcaaaaaaaaaaaaaaaaaaaaaagcagagtgagtttcaactgcccaggtcaagatgttcaaccctaactaacaggttccttctggagtgaaaaagtctaatgggttccctctggggtgaaaaaagggccgttacccgggttacactcttccctcccacctgcgctctcccatgtggcgtgatgaaactgatcgtgtgcatttctgtggcagtctatctagagacctttgcagggttgtcttcaaatgtctggtttctctcctctggtctgtgacgagcgagcgtctactgccgggagcacagctggggcgtaggtttcaccaacctgctcagcggccaagctctccgctgttactgccacctgctattgcttctgcatagattataacagatttgtgtcgggtaaaagcatcttcaatcttgaggtaaattagaggggacccagctttcttttacaatgtggatctacctcagttaaacagttgggtgctattaactaagtctgtcaaattaaattggaaagtaaccaaacagtgggacataactaactccacgtgaaacttgaagacatcatttccgtttctttaataatactttttatttattttgtgccttttatgttaaccctaatgcgttttttaaaattcagaatagtcatttttctcttgcgtgtggggagcccaactgaccatacaagcagccatctaactgctagagtatactgggatcctaacctaccctcttgggaaacggagggggaaaatgtgtccaagagcaaatttcacacatcacataccccagctcttacatgcttaccttcatagctttcgcttcatttctgtgccatctgaaggggcaacccccaaaactgacactcgagtgctttgtctctgctttttcagctgtccgtgtctctcttctctggcatgttttctataagactttctttcataaacagcaagtggactgttgtcgatcccatctcctggcttgcacagtgaaggtgctaaacgccaggagcagaggcgggggcaagctcacggttgtctggaggccaggccggaggcggggaggatgtgcacgatgcggcagcccgcggtttatgaagtcaggaacactctggtaagaaaataagatcggagatcgataactttccatgcctttatatttggcagtttacaacttttcctactacggcaacctttttgccataattctttggaggtaacacaatattttgaagtcttatgaatttgattttataccagtgagaagtcaaagttttagcggtctttcctgtagtgtatggttttactcttttaaagtcatctctggattttagaagagaacctattgtacttggtggctccaaaaggtgatttggggagccctgtcccttcccttcttgctctgctcccccccccccctttccctttgcagggtctcaaaaaaggaaaacaagaaaaaaaaatgatggttctagttagatttgtgggggttttt

SEQ ID NO: 23307 - DNA, 1094 bp, Mus musculus
ctacacagacagtggacaatcccggtggccccagacaagccataagcaacctttctgtgacctccccctgactcatctctcacacccatgagaaaaggaatgtgccctgagtagaagctacacttccttggtgttcatctgcctcacttgtgaatgcagatattttgtttgttttaagcccttccctgcagtaaccatgctggctggctctcacataggcagagcacacgtgactcttgtcacaagcgccccgttgcaggcatgccgactcctgtaagttgcactgatctctcaacagtttcctttattgcgtccaactccccatctgctgtactcatttgaagtgattgtaaacagattcacagtggcaagagtgggacattgcctcacgtctgccatcccaacacacatttcagtattacatgctcgagtgtgcgggctgggctcttactctctcgagcattgtgggctagccttgtctcaacactctgacaagaagttctccctctctatacaggacagcatgctctttgagacctgaaggcttgaatgtaacagattagttaggagtctttgtggcgctttggtctgtttagttttcttgtgatctgcaaggccccccaaaagtatgtccttctagttccgtgtggcctttgtcagcatggacagcatatgaatagcccagtcagtgttaacaggccattgctacattctttggtcagcccctcaacttaaagttgtgaggtcactgctgtgtcagactgtcatttgtggtccatccatgggagacctaaagcctggtgcagccctttatgccatgtgaccttgctgggacctaagtacatggtctgtttagccccacgtggactgtctgtagtcagggtgcccagagtctgaaacaaaaggaattattacactcaaaccgcgggggaggggggtactggggacggacggacagacagacagacagacagacagacagacagacagtgccattgcagacattgcagagccctccctcaccttgtgtctttggatttgttcagccattttatttgtctcaagttgaatgtaccggcttagccaaatcacta

SEQ ID NO: 23308 - DNA, 1146 bp, Mus musculus
gcaacagggtttgaggtcacgtaagtacattgtggaagctgtcaacacagctcttgcagaacacagcactagagactcggccagaaagaactgaaccagacagggcagtgtactcctagggcaatgaatatctgttctaaagaggagaaagttgcagcttctgccctaaataggaagcaaatgtactttattgcatgtcttcagcctgtggtcaaggcaagtaagtcgattctccagcacttcagatcttagaaaggcccagggcaggtaaaaattcccagtctgccttcatatcccctggcctgactgaggctctatcctcacccaggtctccactgcccaggcctatattcaaaacttccctcctgccttcccccatcctgagacctgacacctcctaagacacagaccacaccaccaccatccgccttcccactctgagcagccgactgacagaggcagagaggatggcagagcggcccacctgctggaactggccctcggagacgccatcgcggtagaagatgatgcgggtgggcttgaagcgggtggacttgtagaactgaatgagcaactctcgtaccatggcagccaggtcctggatgatctcctgtcggtgctgctgcacgcgcacggtggcacagtagcggttggggtgtgcgtccatgctgcccacgacctgtggacagacacggtcagcaggggacaagggctccaggtgtccctcttttgggtccagctggagattggcctataagaagcatctcccagtgtccctcacagcagatagtactgctagctcccttctcaagatgggatacttgccccatggtacacgggaaaaaggcaaccttgagccttactgtgtcagggggttgggttacctgtaaaaagcaactggggggggggggtgcctctagattttttaggagcaaacacgtctccaaattgccttatgcccatcaaagagttagcatccccagtcttagatccctaggaaggtcacagccccgtgaagcaacttggctgttttagggctcatctgaaggagcaaccagagagtcagagccccacaatgctgccaggattctgaggttaggggaccaaaagtaaacggatcagctacagctagggcctgcccacttc

SEQ ID NO: 23309 - DNA, 1236 bp, Mus musculus
ggtgtttaggtgagatgagtgttgtccctagagtccgcgtttctagaacagtcctaagagcagtgaccagctgcttcaggaatgaatgtggggatggacaagtgtggatccccacggcactttgatgttctgtgtttgccaagggttttgacaagaccggtggttttatttttagccacgtaggcatttgcttaacatgaggtgtcatttctgctgaggaatgctgaagccttagttatagctggcttctgcttgccacgccctggcccaggatcacaaatggctggtatgagatgtgcttcccggttcctgtcctgagggagacaggcacaggtgcctggcagtgctaaagcaggattccgccaggagccctgcccctctgtctgccagcatcttccctaggctgactgcaggcgcctaacgcagctgctgtggctgaacactgcaccggtgcagtccaaaagggtgcagaagacagctgcttctatttgggagttgtgacatgtgcgcctctgctccacagcggaagtcaagcgtgtgggagacacagtgctggggatggccacacagtgcgtccagatgaagaacgtgcagaggaccacgccacagaccctatccaatctctgcttaaagatcaatgtcaaactgggaggcgtcaacaacatcctgctgccacagggcaggtgaggtggccacaccccatgcatacaccagctggcttaaatggtcagtggagaggtgctcactggtagtttatgtgggcataagtcctgggctcctcagaaccaggggcatcagggatgagtgactgttagggctggagtccctaacagttgaaggctggtatggggctgttgtcaccctgctccttgtgccagggccagcagtctccactgaagagttgggagagtgagtggcctcgggacaggtcaggaatgggcttccacagacttggcagcgggtccctggagctttactgcagtgtagactccagtgttttctactctgcttacttggggctgggagcttactgctaggatcaaagctaaagcacttggggctggaaagtccttccctgtaggacctgctgttgatgggccaggaactgaggccaagtgctggcccacacgccccatagggctaagggttgggaatgtggaactgtgccttcctcgggtgcctcccacagtcagtgtgctaccctaggtgttagaggacaaggtccaagttaatgtt

SEQ ID NO: 23310 - DNA, 1101 bp, Mus musculus
agcatgcatattatatctgccattttatcccatcgatgacccctgtgccttccatggttgtatggtgtactcaccccattcatgggctgatatgcctttgactttatctgagattagattctagcataccatggtacctaaccctaggccccagagggcgaggcagtagaattctgagtttgaggccagcctgggctaccgaaagcaaataaaaaacttaattcttttttgttgttgttgttttcttttgtttagacagaatcttatgtgtcccaggctagcctcaaactcaatgtgtagtcatgaatgaccttaactgtagaccctcctgcctctcccaaatgctgagattgcgtgcatgctaggcaagatctttgaccttgttaaactgtactcggagaccctggttgatatgacctccttaccatgtattatacatcttagcaaagtggccttttccctcaggtccttcacagagcaactgaggaagatctcgagagatgctgggatgccgatccagggtcagccctgcttctgtaaatacgcacagggtgcagacagtgtggagcccatgttccgacacctgaagaacacatacgctggcctccagctggtggtggtcatcctgcctggcaaaactcctgtgtatggtaggtgttggccccctgcaggcttcagggggcgaggaggtcccagtggccctgagtggcctggaacagtcccctttgtgctgactgagctgaatggttggttcttgcccattcctgaacctgagaaggggagagggaggtgggttactctcatatacgtttggtccatcatcatcttcttgagtgaggccacaaccccatgtatcaagcaactcccagtgacccatagttgcagatagtctctgcaattgtgcaatgtttggaattttaggaacttttcagagggtgtatacatgactggtcccctctgtgttgacaccaacacccccaagagagggtgttagtagttgttagtcattcagggaggttggttgcattttattagtaatcatggacaataaagaaaaggaaataaatgggattcagggatctctcccacctctatcttcct

SEQ ID NO: 23311 - DNA, 1093 bp, Mus musculus
tgtgtaagcctgccaatctgaggtcagtccctgggaccacgtggtagaaagagaagcaacttcctcagctaatcctccaacagtgcatgatggggtggacagaagcatatccaccctgccgcacacacaaacaaatacatgccactaaaatttcttagccagggatagggcacacgcctttaatcccagcattagcagaggcagaggcaggtagatctctgagttcaaggccagcctgggtctacatagttgagttctaggacagccagtgagggctacatagacagtgaagtttctacagtctcaggagctgttttctctcacacctaatctggccttgtcacatctcataaatggcagtcaccctgggtgagtgctctctgttagagaaaggctgccaaccgctggtattggaaccccggtgacccgtctgaccaacagaaacgaggctaggcacatggaagcctcaagcaggcttacttgagatggacttctgtacactggcgctggggagcgaagcaggcgatggcccacaccttgatctcgatgcccgtgtggaactgcttgtttcgcatgtcccacacaccctggacaggggtggcaattgctttgttctgcaaagaccaagtcgttcagtggagaacaaatgaaaatattcttgctgctggttccctgaccaacaatgactcctaaggcaccagatcaccacaggtgtggcacctccatggctctagcattccttagcactgtaagtaacccccctgcacacaggcagaatggtgagttctggatggatggtggtgagaaatgacaggatggctgggccaatggtgaacctcaatgggtgggagtgaaggccaggtgaatggatggacggggtgaggaaatgagtggatgggaaggatatatgaatagagacagataaaggtaccatgggatgggtgagtggatgaggctgagtcatgcacgggcacagttcacacagccacccacatccacacagcacaagagcacttggccctgtctgcacctaccctgcccccgtagaggatggagggcggctgcagaacccgcccagtcacatctgtcatct

SEQ ID NO: 23312 - DNA, 1102 bp, Mus musculus
caggccgccgggtcacattgcagacacggtacttcctcttcatctgaccacagtgcgttatctccacctttagacctggtgacagacagcaggcatcagagctactcttgctatgcacttacagttccaggcacacacggacggcagctttggccgcggatgaagctgtgaggttctagagctgagaagtaaggaatgtggaccaaccacagaatacgttggctggatacacctcatccagggaagccctctgccagaataactcagcacttaagacttgggtgcccttcttgaaacctaacatttgtggaccaaacaggagacccagctcttcccacctgtgcagctgtactcattagagtcatgggccctcggtgcctgggtcccaatcgactcagagtcagtgtgtcttgtgttcactcttcccacagcccacacctgcaccaggagaggcggtcccaccccctagcctgacgtgctgggtacatctttacctttgatttctttggtaaactttaccctttgggaatctgtcagaggtttttgttgttcttcaatacttttaaaatccaaaacttcacaaacaaactcgatcactggctgtgccttgtaaaacgctgttgccgatactatgcgcaggaaaaggaagagacggacaggtttaacagaggtatctgaagtgatacacacgactaattagtagctgcttaggaggcccggtcctgtttctcctctgtggagtgccccttgatgttttgtggtgagaaaagcagtccactatgcccgtggctccgtactccaaaggaggcaccaaccccaggagactgcatgcttcctccagccaaggacaatggttagggactggctgaatctgaagaagtcactaaaagaattagagatcttgattgaacaagtctagcatggtcagggcattcaggaccttggatcgtgtcaggttttctaaataggaatttctaaagtgttccattcatataattcttttgcaatcaaggtgcatcctaccaagatgtggcctgcggggcattgttggggggatgctcctggctgtcagtctctggcagaaggaagacgactcagcaga

SEQ ID NO: 23313 - DNA, 1099 bp, Mus musculus
atacccagctatgtgcactgcacagtggaaataagaatgaggggggagaatggaaacaccagctagatcttgcatggcccataggccccagttagaggtagagcctgctcccagatgaactctgtcctttcaagaggcaaggaaggctcgatcgatgcaagtgtggaacggtgaggttgtgagctagaagcacagcgaggcttgtctaacactgacaccaagccttgaaacaggccccctgcattctgtcagttcctatgtttaaacatctgatagtcttaagtccacggggttactgcttccacagggaatgcaggctagaactacatgtaatgagcatctacagaagaaacctagagcagtctctgagtgtagctatgcctgctatgatgatgggctgattccatctgattaaaagaggccttatccctgttgcaggtacacccctgttggccgttccttcttcactgcatctgaaggctgttccaaccctctgggtgggggcagagaagtgtggtttggcttccatcagtccgtccgaccttctctttggaaaatgatgctgaatattgatggtaagagaagcccatgggtgtcgctgcagggtggatgagggcccatgcagctgccattgaagtgggtggagatttgaaagcatgcagaggagcccagattctcttagccacctttagcacagctctgatgtgataccagcctgtttcactgggcaccaaagcccttagagtactccactcccagggacctttagccagcctgaagagctacccttgccagaccctttgcattcctagagcaccccaggtgtggggcgggggccacacccttcatcctctccccatgtttcctgattacttgtgttgctgcttgaactaaggaaaagacatcattaggtgccagtggctggccactgcccagtagtcttccagctttggagtatattagacctattattgctgtgacaagtccgtaggagaaaccatttaaagctgtaaagattaacttgggttcagaggtctcggctcaccgtaagctcataccatcatgctgaagccaagcactgtggcaaagaggctgtgat

SEQ ID NO: 23314 - DNA, 1169 bp, Mus musculus
cttaccatcctagcattaggaggccagggcagaagacccactccagctaggaggcctgggctctgtagagttgtatctttatgtggggttcagggttcacattccggttgttgggtggtaggctattttgccaacccagcttttaaatttaaagtttttattatatttatttatcatgtgtgtctgtctgtgagggaaagagcccacatcctgcactgtgcatgcaggacaacccaggagagtccgttctctcttggcaccatgtgggtccctgcagttgaacaccctttgtttctgaggtcaagctgggtgttgtatgcctttaacctcaacatttaggcacatctctaagttgaaggccagaccagtctacatagaaggttccagaccagccagggttgaacaatgactttctttcaaacatatacacaaaagaaaaaaaaagttggcaagttaattttatttatgtgtatgagtgtttggtctgtgtgtttgtgtaccacctgtgtgcatggaaccagcaggggccagaagtggctcccctgggactggagttacagacagttataaactgccgcgtgagtgttgggaattgaactggatgttatacaagaacagccaattttaactgctgagctagttctttagtaatattaataatattcttatttttaatattacttttccattatatgactacagtgtgcccatgtgtaaatcttttgggattcatgtttcttggcctttcgaaatgcatggacaatgctggcctcagaattgtggctctatacatgctaggccagggatagtttatgtcaagggggctgtgagctaagaagcaaaatactctgtgaattgggataacttttattgctttcccttaaatgtggtgtgtgcgtgtgtgtgtgtgagtgaatatgtgtgtggaaatcaggggtcaactttctgtgtcgttcctcaagcgttgttgtccttgtttctgtgtcagggtctgtcacatggacctgaagcttacaggttacaccaggctggctggcgtttgagctcgtagaatccagctctctttgtttctccagcacagtgatcaaaactcaggccctcagcctgtggcaagcacttccctgactgagccacctcctagaccccttgaagattccttttggtttgtg

SEQ ID NO: 23315 - DNA, 1198 bp, Mus musculus
gagctgtagacaaggtgttagagtcagaggtgttaaaacccctgggcctacccaaggttcctgtgctgtgcatgatcacatgggagcgcagaggggtggtgccagaggggatgagcaggggaagtgaggtgcaccattgagcttggggaagggaggctagctgtgaccacagtgtgaaagctctgagtctgggtgagagagaggtgaaagtccccagcagaggaatcctctcttggtgatctggaagaacaagaagtgtgggtggggggttggcagagtcacgggccagcaagctgcctgtccctgtcccttgttggcccctggtaggtaggggtccctgtgatgaggtggagctgcacagggatgccatgaggtggtaagaaggtatgaacagaggggaaacggaggtggtggagcccatggagaggcttgggcctcgggatccaaagggcgtgggaaggttagggtgcaccatgactctcaggagcaagtctgagcttgcacgccctgatgcctgctgtctccctactgttttccagttcttgcttctcctgctccgacaacatcacccatcccaggatatgccttcaaacctccacctcggccggacttcggcaccaccgggagaacaatcaaactacaggccaatttctttgaaatggacatccccaaaattgacatctatcactatgaattggacatcaaacctgagaaatgccctcggagagtgaacaggtatcttctgaccctgtcccaggaagttgttaggatgtattttttcattggttttggcattgagatgtaatttgagtatagtagaaccccaactttgtaaatgtcctgccccagagttttagtaggtgtgtgtatccatcacttctgagttagcctgaccataagtcacatagttccaccttttgtccgcttttactatgtcctgcctacagaagccatgcaatctcatttctttggtccagaattgtcttttgggatttatctatattgttttgtatattatagtagttacttttaggggatattacattgaatgtgtgtgtgtgtgtatgtgtgtgtgtgtgtgtaggcaggcaggtccatgtccatgtgtggagtcctgggtttgacgttgggcatcttctccatcactttccacctcgtgggggtaaggtctgtcatttaaatccagagctctgctggg

SEQ ID NO: 23316 - DNA, 1202 bp, Mus musculus
gagaagatgcccaacgtcaaacccaggactccacacatggacatggacctgcctgcctacacacacacacacacatacacacacacacacattcaatgtaatatcccctaaaagtaactactataatatacaaaacaatatagataaatcccaaaagacaattctggaccaaagaaatgagattgcatggcttctgtaggcaggacatagtaaaagcggacaaaaggtggaactatgtgacttatggtcaggctaactcagaagtgatggatacacacacctactaaaactctggggcaggacatttacaaagttggggttctactatactcaaattacatctcaatgccaaaaccaatgaaaaaatacatcctaacaacttcctgggacagggtcagaagatacctgttcactctccgagggcatttctcaggtttgatgtccaattcatagtgatagatgtcaattttggggatgtccatttcaaagaaattggcctgtagtttgattgttctcccggtggtgccgaagtccggccgaggtggaggtttgaaggcatatcctgggatgggtgatgttgtcggagcaggagaagcaagaactggaaaacagtagggagacagcaggcatcagggcgtgcaagctcagacttgctcctgagagtcatggtgcaccctaaccttcccacgccctttggatcccgaggcccaagcctctccatgggctccaccacctccgtttcccctctgttcataccttcttaccacctcatggcatccctgtgcagctccacctcatcacagggacccctacctaccaggggccaacaagggacagggacaggcagcttgctggcccgtgactctgccaaccccccacccacacttcttgttcttccagatcaccaagagaggattcctctgctggggactttcacctctctctcacccagactcagagctttcacactgtggtcacagctagcctcccttccccaagctcaatggtgcacctcacttcccctgctcatcccctctggcaccacccctctgcgctcccatgtgatcatgcacagcacaggaaccttgggtaggcccaggggttttaacacctctgactctaacaccttgtctacagctcaggtatgtgccagtgccgggtaactcagcctttcacatctcagccctccctacttggccatt

SEQ ID NO: 23317 - DNA, 1136 bp, Mus musculus
gcaatatgtaaatagacataaacactaagaagaaggaagtctagccagctcgggggcagccagcatgtggctctttcctccctacctgctgtggttggggtgggttgatttataaatgtctagttacatgttgtgtgtctattttcatgtatgtatgtgccaagaggcagactcctttctggaaccatagtggaaccatagtgctatgacctgtggcaggtcatcaactgtgcattggggactcgggtgtcccatatcgttgaaagtgtcctttcacttgggtttgtttaagtccgcattgtacacacaagaaacctccccagctctccagcaatcgaagctgggaactgaactcaggtcctggaagtgcagctaatgttctaactgctgagccatccctcagacactgattccagttcttagagataaccttccagctgggagagagctgccccatgcagataccacgttgcctaaaagtttcccatttcccagtgtaccttgaccacagcttaaagccatcccattcttcactgtgcctgtgtttctcgggcatctgggcattggcctgccaagtgactcggctttagttctctctctgtctaggtggctccgcctgtctatgcagtcggtgctctgcttcccccgcccccaagcaggtttctttcacgtgtccctaagggctgtcattcgagggacatcacccgaatttggaaggagtgatgatgtccagggctatagccctcaagcccgaagctccagcataggtacagcatgggtgtgcctctcaagcgcatcaatgagaggccaggaaatggtttgcccgtgtgctcccctttactgagagaggcccgagcaagcagagccttgggagcagatggagtgggatgagagtggaatgcaggagctacccagtgggtctgtggtgtgtagagtcaaggagagaagtgatgaacacacagaatctaaacgtgttaggacacattgcacactctgcagtggctaaggtggtacatttctatgactaacaggaaagaggccaccctgaccaacctgccttcaaacggcccatctcttccacagtgtggacgcttttcactgtgagatgtgtttgtagccagctggttccttggtga

SEQ ID NO: 23318 - DNA, 1162 bp, Mus musculus
ggagccaggagcagcacagcacggcacggcacagcacagcagagcagccagcggggtccagagcagccggatagcacataaaattagtgagtagtaactcaagattatcatcaggagataatggagggtaggcagtggcccagctattgtgttgtttaaggcatatcaaaacataaggctagctgtctttcatttgggaactaaagttttactgttgaggcggagagtgaactcatcgccaaaaatgtattaatgtgtgtttcaacaggtcaccctggcatataaaccaaggcctcctgaaggggagagtggtgctgggcctgcatctttgacttctgtcaggtccacagcataggacccatcttaggaactattttggggcctccaaggtctttgttaaagagcaaatggattttgtgttttcttttttgtttttgtttttgttttttgagacaaaaaagtgctgggactaaaggcgtatgccaccaccgcccggcgattttgtgttttttaaaacagtcttatcatgtagttctggctgacgtgaaattcactaaatagatcaggctggtttggaactcacggagatccgtctgcctctgcctcccaggtgctgagaataaagaaaggcctataccaccaccacacacttgaatttttgttttgttttatttttctgagacaaggtttctctgtatatccctggctgtcctggaactcactctgtagaccaggctggcctcaaactcagaaatctgcctgcctctgcctcccaggtcctgggattaaaggtgtgcaccaccactacttagtttaatttttttttttataaggttcgtattttgaattctaagcgctggtttggctcatgactgtgacctcatgagtgcaagtgtcttttcttggcctgtattcccataggtctttgctgctgctgccaggctcacgggcacactgtcacactgtcacactgtggagggttaaagtgtctgatgcttaccatttcttgcctttctgtgagaatggaggctctcgtgggagtgggctgggagcctgcttctgtaggttgctttggaacgtcccctgattttggaccctttaggtggtaggatggtggcccaccagggccatttgcatctagtccagttgtgtgttctggcct

SEQ ID NO: 23319 - DNA, 1127 bp, Mus musculus
ccacttttaaaaaattttatgaactgttatcacacaatttaaaaaaaagtttctaccgtggactaattttacaaacctgaaagcaaggtgtcaaaggattttgtttctcctgcgcttgtcaatgtcccggtcttgtcagctgtccctttcccctttacatccttcgactcattccagaggacatgtttgtgtgcgtagaatacagggaatcgcgccgcccctccctccctgggctataaacaggctggtctcaaactcatcttcctgtctctgcttcctgagtcctgggatcacaggtcactgtggtgggctagcgaaggtacgttgtgggcaccacccactgccattggtatactagttctcttggcttcagaaacatgattgcaattggcttgctttttagatctatttgtatttatgtatgttagtgtttgcatgtatgtatgtatgtatgtatgtatgtatgtatgtgtaccacatgtgtacattgccctaaaggtcagaagaaggcatcaaatcttctggaagtggagtcacagacaggtgtgagtttccgagggtgctgggacttgaacctgggtcctccctggaagagcagccagtgctcttaactgctgacccacctgtccagcccctaaaattgatgttagaatatgaagttagtagactatgtacattagctttcctgtcttctaaatctttcttgttgtttttttttgtttgtttggtttggtttggtttggtttggttttttggaagcagcatcttattatatatcctgggctggctctcaacttgctttggttcttttttgggagatccgaatgtatgccatcttaccagctttacccatctgccgggccttcagagtcctcctgcctgctttcctgttctgtgaggggctgatggagacccacccgctcatgtccattctgactccctcgtccagagggtgggttttttgttttttttttaaagatttatttactatttatttatatgagtacactgcagctgtcttcagacacacactagaagagggcattggatccctttacagatggttgtgagccaccacgtggttgctgggatttgaactcaggacatggcagagagagcagtcagtg

SEQ ID NO: 23320 - DNA, 1289 bp, Mus musculus
accagcctgcagcaggagtataagaagcagatgctgacagctgctcacgccctggctgtggatgccaagaacctacttgatgttattgatcaagcaagactgaaaatgctagggcagacacggccacactgagcccctggccattgaacgtggctttctgccctttgggagatcttctctagcattccaccagcagcgaggaagtaaccttagcctctgtagcccgtgctcacggctccaactgaatgacagctagctgaaagtctctcttgtataagtttcatcacttatacatggttttgattttgttatttttctaaatagtgttcagaaaactctggatccaaaatgtggcatttttctgagaatgaagattatacattaagaagcttttaaaatatacttggtgttcaaattgggatgtgtgttcctagaagtggtaattcatactgaccatgacttcaagttggaagagaaatgtctgaggagggagggttccctgagaccatggagactggttatccttcctgccagaattcctatccagactgtgttgcaatatgctaatctcatttatagagaaagtgcataaaagctatattttgaagaatgagtggtttcaaaagaaaacttctgccctccctgtctccgccttctctcctgtggatactgaagcattgggttgcgaactatctgtagaactgacaaaaacttgcctttcctcatcagaattctgtgccagttttgtaccagagcactcccaactgcatcaagaaattccaggaccagccctgttctccatttttatataatttataagaataattaaagccatgttgactcttacagccactggagctaactgaccttcattgcgtctgtcttcccagggaggaccccgcaggacaaacagggatgtggttttctttagatgtccagttggtataccatgcattctgttaggtgattttgagagcataccttccctttagtttgttgggggatataaattattctcaggaagaatataataaattgtacagttcctctgacctattaaaaaggtggcgccgggaaaggttgcattgccttttttttttttttttttctttaatgggggaggaaattcttttctttcaaatcatttaaaattgttcaggggatctgtaagaaatggtcacttacaggagtgctcacaactcaccagtctcttcctttttcttgtataaagtggaggactccaccagagataatcgctctgcataccctgactttccattctgtcaggg

SEQ ID NO: 23321 - DNA, 1103 bp, Mus musculus
cagcccttggggaaaaaaatgtggctagaaagaatcaggcttcctgctgcttccataaattctttcttagtcattttatctggagaatacaaacctgactcctcatgctttgactgagtcgttactcatcaatgtcatttggattgattggttttatatcaacttgacacaggctagagttatttggaaagaaggactctcagttgagaaaacatctccataaaatttgcctgtagacaactctgtggtgcattttcttaataataattgatgtgggtggacccagcttacttggagcagcgccatccctgagcaggtggtcttgggtggtataaggaagcaggctgagcagttcatagggaacagatagcattcctccatgtctcaggtcctgtttccaccgttcctgtcctaattccctcagttctagagcctgacccaaaagttacaatctttcttcaccaagttgcttttggtcatggtgttttatcatataaatagaaaccctaagacaccaccttagtgttacattttgtgctaagagacaaaatacagagaagacaggaaccaattcgggtcctattttctttgaagtctgtggcaggaagcatttcagtcaacctgtgatggtattgtaaggcaatgttttcaaactgtactctgcagacttcatcagggtttgattctagctttattcattataaataaatagctttcttttttgagaaggggtgtgtctgcactatcttgacaattgaacccagagccttgttcatcctagctaattgttctaacactgacctgtacaggttaaagcacactccacaagtttgagtgcaaaggctgttctctttcaactgaagtgaaaacattgaaagtttttgctttcaggatgatggagcatgctttaacaggcagaacattcagttgtactcccgggtaagttctggggtcaactctgagaatagccaacagtgcattcatgggagccaggaagtagatcacattggagaggctctgtttctcagtgtttgctttattattattattattacatttatttgtgagaaagggactccagtgtgccctggcatgcatgtgga

SEQ ID NO: 23322 - DNA, 1442 bp, Mus musculus
tttttttttcacttttaaaaattctgttcagattagtctttgcccttcagggcttggttaatatcttcattccttttggaatggatatgtgtagttttgtgcagacaggatggtacatgcctttaatcacagaatttgggaggctaaggcaggaggattgctctgtgtttatgaccagcctgggctacctagtaactttctggctaaccaggatttcatagcaagaccctacatcagtataaacaagaaaaagtaatggaaagtgaatgtgttgtgggaccctacataagcttctttttatgctatcccaatactgtttgcatttgtctgcttggaaataacatgttaatgtattcaactagtttttgtttttctgaaacatcctacccgattctgcatttcagattgtaatgtcttcattgataattcatgttgggatatgtgtttttcttacatttctcttgtcactaacatgatctagaaggaaataccacagtgccagtttagtgttctaagtctgcccatactgtgtctgactgatacttctggagaacaccatctaggttgtgttgtgttttgttttgttttgttttgctttgttttttgagtttgtctacttttttgtcatgattatattaaggttatttgtcttttaaaacttgtatagtcaagatgtcctggggactggtgagatggctcagtgagtaagagcactgactgctctttctaaggtcctgagttcaaatccctgcaaccacatggtggctcacaaccatctgtaatgagatctgactccctctctggtgtgtctgaagacagctacatgtacttatatatataataataaataaacaaatctttaaaaaaaagatgtctttttgttttgtttgttttggttatttgggacagaatctttctgtgtatcccttgctgacatagataggctctgtcagataggctggccttgaactcaaagaaacccacctgcctcggcttgagtgctgggattaaaggtgtgtgccaccactactggccgatcaagatgttctttactccattgtattagtcagggttctttagagtcacagaacttatggaatgtctttatattgaggggatttattgtaatgacttatagtctgtagtccaactaccccaacaatggccagctgtgcatgggaagtccaagaatctagtagttgctcagctggtcttctggagctgggacctgcttaggttccaacagatgtgctggcaaatgagtgcaagccagtgaagagaggatcttccttcttctaatgtccttatgtagagctccagcagaaggtagttgtagactgtaaatcgagaaaattatttatttctaatcattgtattttgtgatttgttctttagatatgagttgagaattcgttacttgccaaaaggatttctaaaccagt

SEQ ID NO: 23323 - DNA, 1245 bp, Mus musculus
cacctagttaaacgtgtttctctttccattccttgtcttctctcatggtctttgttgatctcagttgttctcagtgcttctgctatgcttgcacttctgctctaagtgatattgctgctttatgagccagtgttgacttgtccaggagagcaaagccaatggccttatcagtgggctatctaatagcatacttttccagtaatctacattcatctgaaaaaaatggtacacatttgttcatacataggatggctgtgggagtgagctctagtgatccctgctcacagggatgtaactgaagttattttaaggggattcaaaagatttcccagcagtgcaatagtggtacatgcctataatcctatagcactagggaggcaggtagatctctgtgtgagtttgaggctagcctggtctacagagtgagtttcagtatagcctgagctatactgagaaactgtcttagaaaaacccaaaataaaatagtaaaatataaaaacaaattaatgttttatagaccctgggaaaagaattttcagcaaagtacaaaaatttaaagcattcctttctttaattttgtaatcctttactgtggaatagcttgggacatcagctctgttttaaggagcagaactgatgactgagcaaagaaacgtaatttggattataaaattcttgctttaataaaaattccttaaacagtaaaaaaaaagaaaaacccaaaataaacaaataataaataaattaataaatagaatattttcagtcttttgtcctttcctggttaatgtttattaatttttatgagtaagtgaatcctttttagctggaaaatcttaaatctaaaatactaagttttgagaggaatctatctttcaaaggtgaactttccatgttgtactctgaggcatgcactcatgaaggtcagtagctgaaacaaaggccctggtcaacactggaagctagcttggttagataaagcttgaatacatacagttttgtgtcagttgggtagttcatcagagaatatagttgtattttcaaatttgtcaaatcactggggtgaacaagctatttctggagagtataattagattggttcatagcatctggtagggaacagaaatttgaggttctaaacacttaatcagaccatttaatgtttaaaaattaaatatctaaatgtcaaataagaataactgcaggtttctgcttgctgcagttaggttccattcttcttcttct

SEQ ID NO: 23324 - DNA, 1139 bp, Mus musculus
agagcctactttctggtagatctggtaataatccaaggacaaagatggtgataagagatccaaactcttctcgggttggcatcagtgaatatttgtttttattttttaatagaaaatttacatttatctcttttgtgtgtatatgtgtatgggggtacatgtggagatcagaggacaacttgttgaagttggttctctccttttcatgtaggtcttaaggaatgaactcaggttatcagacttggtaacaagtgcctttacccagtgagccatcttgcctctgaaaacatttgttttagcaaacttaaacttcatggagttcaaatgattgacagtttattaagtgtgatactggcaagggtttctagagtagaggttcttcctctgtctcttccatttccatatgagggttagttcactttactcctcagttatttcttgtctcctgaaatcagttttctttctttgtattaaagaaaatttcccatgcatgcagtttcagctttctagtctaggtgtagaggtctctaatctcaattctgttttttccagttcctcttgctcctgtgagtaaggggaggaatctgttctatgtctgcctgtgccagatgtgagagctctgtgtcatctgtggtatcatgcctgtttgacccaaggttagttttcattcctgctgaatgaagagttctttgtttattatggtgtgtgtgtgtgagtgtggactcaagagcaggcgcgcatgcatacatgtgtgcacatgtccactcattcggtgtaggtcaggacaacattggtagccagttctttccttatacatgtggtttctggggatcagacttaggtcatgagctttaatgacaagtactcttatatgctgagccatctcattggctccaggcatattggtggggttttttcctcttttattttaagatttatttattttatgtatgtatgcggtcttcagacacaccagaagagggctttggatcccattacagatggttgtgagccacaatgtggttgctggaaattgaactcaggacctctggaagaggagcagtcttacttgctgagccatctctccagcccctgttttttgttttttgtttttttcagacaaggtctcactatgaagc

SEQ ID NO: 23325 - DNA, 2165 bp, Mus musculus
cttgcagtatgtccaccacagtccggggaattccaagcgtggatttggcattgactgcgccatcctctcctgtcaggtctacatctcccagatcctggttgcatctgcccttgggggcgtggtcgacgctgtgaatagtatcgttgtcatccccatagtggcctctgtaggctctttcctgggcttcttgacagccacattcctggtcatctaccctgaggtgtcagaggaacctaaggaggaacagaaaggcctgtcctcagggcccgctggcgaaggcgagggtggagcgggcagtgagaagcccactgtactgaagctgtctcggaaagggggccttcgggggctggtggagacggagtccatggtgtgagcccccgctggtacattccacactggagggcagggcgcactgggggctaggcttgcccataccatgcgagctggagttccttcccagagcacagtccaagttcagtaggtgttaggtgtagggtaggtttgagctattagacaaaaatatcacactaatttacctttcccacgattaaaaaaaaatcatttgaaatctttttttattgaaaaagaacttaatttcagctgtcttttattctgcaggtatatcattctgcatgttttaaattgtgaaatattcacagcatagtcaataagcaatttagaaaacataagggtctgcatttctaaaccagtaattggaagtgcagaaactgactcccttggcagatatcatctgaaggcagcagacagcagcgtagtttccagattgcccagcaggtgtctgttggagacaccttcagcatcagtctggtattgcagcgcctcagagtatttttctgtttattttagaaacagtattttctttttcacaactgtggttttcttagaagaacatcatctctggcgagttaggctcgcaatcctgtgcacagctgagaccacacaccaaagctggggaaaggtcccagaggtgtttgagcagaaggcagccattccccagggcagcctccagacatcccacccagggacagcaccaaccagtagggctgaatgtgaactctcagtgtgcctcctgcgtgcttgtgtgcaagtttgtctgtccagtccctaccctcgtgctcttccccagaagccaccacagggcagttgttggctccgtgggacacttcagcttgtctctacacgtttggctggaaatcaggcacagagctcctccaggtgagcatcggctcccgagtcctgctgcacggctacctcgagagtgggagacagtggcatcagagcagggcgcgggaaggggccgagcctacctcctaccacattgctgacattgatcctcgctggaacctaactgaagtcttgcaagctcatcacctgcttctgctgatggtcactggagtgggatgaaggcaaagaacagcaagcatccgcctgagcaggctgctgacccaagatcctgcctgagcaggcgggctgctgacccaagatccgtgcagtgtccgctttctgcacacgagcagaacttgggcttcagggaagcaggctcagcaagtgcggctgtgggtaaagactttccaacgacgtctctgtttaacaactccagtctctcggtctgcactcaggagagggagaacctccctggatggtacccagatgaagtcagagccgtgctcttgttgcctcggttggtgtttttacataaagtactttaaagtgcatgagaatcatgctgcaatatgagcattctaaagcaaatatatatacatatatatttcaagatgaaagtaagcagtttttaaataaattacttgaattttctgtgtcttcaaaggaacgctgtgtttatgtccttggcctgggctctcttgccacattccccacacaggtggcactttgtcgtctttagtgttttatatctgggaagcagaggcaagctcaggatacaagggtaccttccccttgcctgggtcttccctcgagcctatgcctgcagagaactgtctccaccttccagtgttttctgtgttccccgttgagaatggaattgcaggtctctttcttgggtaggggaagttggactcccaaacacagtcccagtgctaagcccccagccagctcagccccatcagcggggtgctctgtctctt

SEQ ID NO: 23326 - DNA, 1098 bp, Mus musculus
ccagggttaaaagctgtgcagtgcagtcccctgagttgttctgttttgttgtctcagctgtcctttcgttctccatctcactgattggccacataaccctgtgtaagggacagccctgtgctggggctgaggcttactgtcccctctctatctacaggccttggtggggccattggctacgtgctgggtgggctggactggacgcagaccttcctaggtgactggttccagacgcagaaccaggtgctgttcttcttcgctgccgtcatcttctccgtgtcggtggctctgcatctcttcagcatcgaggaggagcagtacagcccacagcaggaccgcgggcctgaggatcccaccctgcccggcaccagcgttcagcctggcgccccagcccctgcctcccgcctcagctcccttggtgggggcatgcaggacggcagccccccattcccagatgaggtacagtcagagcacgagctgtccttggactacctcgatgtggacatcgtgcgcagcaagagtgactcggtgctgcacatggccgacgccacactggacatggagccccagctgctcttcctgcatgacatcgaaccctccatcttccaagacgcttcctaccccagcaccccccagagcaccagccaagagcttctgagggccaagctgccccgcctgtccacgttcctcagggagtccaccaaggaggacgacaccttgcttgataatcacttgaatgaagctaaagtcccaaatgggagaggctccccaccaatcaactccctcagccgctccaaggtagacttgaagccctcagtcacatctggttccatgaggcggcgtaggcacatgtttcacaggcaggcttctagcaccttctcctactacggcaagattggatcccactgctaccgataccgccgggccaacgcagtggtcctcatcaagccgtcccgaagcatgagcgacctgtatgacctgcagcagcggcagcgctcccggcaccgcaaccagagtggggccactgcctccagcggggacacggagagtgaggagggtgagacagagaccaccgtgcgcctgctgtggctgtccatg

SEQ ID NO: 23327 - DNA, 1211 bp, Mus musculus
aggtgtcagtcagtgtgttagtgttagctagagagtgagcattctttttcctgtctacttcccttctgactgcactttgtaacgctacatcaggtataattctcaggagcttgagtgccgttgatgatgagcaggctcctgggggtcgagtggcagctgtggtgggcagcgagaccacccctgactgcagcttgtctttgctctcttgcagatcgtctagccgctcgatggggagtcacagaagaccgcctgtgtgtgtcagatccccacctctctgtagcaagagaagtaactacagcgccttcacagtcatgatgatgaaactggtattaactgagtggcccttatggatttttaactctaactcacagtgagccagcaagccatatgtttacagttcaaccaaaaacccttcgtgttgctgcacttcttgtgagaggttgagacgcctgttggtacagagtggaatacaagagttacttgccgtggaacgcacctgcagcagagcgagaagacgtcttaatttatcattggagagagatgatagtattatttatataggtagaataaatatatatataaatatatatattttggtggtaatgaaaatggctccgcagaatgccgactcggaatctatgcaagtacaagagctgcctgtgcccctgccagaccctcagaaacccagagacccagaggcggagacccaagaggagaccacaagcgaggggtccatagacagaatccccacacgcctatgggtcatgcatggggcagtgatgtttggcagggaattttgttacgcgatggagacagcactggttacacctatactgttacagataggtaagtcagcacggagggcctggcaaccgccgagcgtgcagctttagtcacagctgccgaaactcagggtcctggggagcactgccatgggcccttgtcctctgtgacagttttctcctgttaacctggttcagggtttgttccttcctgtggtttggacattgcattgcaggtcctcatggcagggcacttgagaaaagctgggcctggccatggtgggcacactgactgtggaggtctctggctggacccccatggcaagccatcctgtgtcacacttgaatttcacacctatagaatgaggctgaatgtaattccaccccaaaggttctgcaacctccccggttgccactagagtggggttg

SEQ ID NO: 23328 - DNA, 1192 bp, Mus musculus
caacttaaatagactatacaacagaggctatctgtgactttacaagaaagttggccatacttgggttggagttgattcagatttctcatgctgtgagtggatatcaggtgacggcttctccttctaccttttgggtcccaaggatatcaggttgtgctctctgagccaactagctggcccaggctcaaccatcttatagaaacccttggaccagcattactcagccttggggctgatggctgggtgctgcagactgccacagagtgtgggagtgtccctggccagtagataccctggtacattgtgactagaacgggctgcctagaatgatttgcacatctgtatattggaggttaatttttgtcttatttgatttttgttttgttgaggtaaggccttatgtagcccaagcttgctatgtaaccaaggacaaccttgagctccaccctgtaaagagctgatactataagcatgcaccaccgcttggtttcagagttactgcctcattttactgttgctgcggagccaagtcttagcactgcatttcaggcacaccttctctgaggactgagcagcagtgggtcaaaggccactgagcttagctgaatgctttggtgtttgtagttatgtatctagggctgcttgcaaaataatcactgttgttctgtccaacaccagctgatctgtttctgcttcacaaacttcatggacacatgtcctgaaaatgtccctgtcacgaagagccctgtttgacataagactggcaggttgacatgaataaagccatgatggtttctcttgacagtgacgggacaaaagtcgagatcaagagtagcaagctgggggttaggatcagtttccccactgcttttaagcatgtgttggaagtggctcctgataaaattttggaaatgttataaagtgggtaaataggtttttgttgttttatttttaattatgtgtattaatatccatgtaaggttatgtgcatatgagtgctagtgtcctaggaggtaagaggtgttgaatcccctgaagtgttacaggaagttgtaatctgcccaacagttgctgggaactgaacttgggtcctctggcaggaaggcctctcgactgttgagtggtctggctatctctacagtccttgactgaggtttatatggaagaggggataggtaagggtgagattgca

SEQ ID NO: 23329 - DNA, 1229 bp, Mus musculus
gctgaaagggaattactgccttaaactgaggcagttgtgcttgacttctgattaaacagttgttaacagatggaattgttttggtctcacttgtaaaggcttctttttcatgtggatattgtctgttgtggcgggctctggctgtatgctcagggctcagacctggatttagaccaggaacactgggagcttttgtgatgcatatatccaggcatgcttttttttttttaaataagatttatttatttttattttgtgtacattggtgttttgctgcatgtatgtctgtgaggtagtttggtccctggaactggagttacagacagttgcaagctgccatatgggtgttgggtattgaactcaggtcttctggaagaacagccagaattcttaaccaccgagccatctttccagcccccaggcatgctcttttatgattggcaggcttttcagaaatgcagacttttatactagaagcccccaactttatatgagtttaaaacctgggaggatctccttccctctgagtgtggtggaagtgaccacagatctgaaggctggggttggttttgaactcctttattctgtagtaaagctagccacagctggcttccctctagtgcacacccttcacgtggcaattccctggactttccgaatgggtgggtgtgaggctgtgaaatgcctcctggaaggcaggaaggagccaggagcttggcatccagggcacttccactttgagtagctcctgctttctctaggcactcggaaggtgagtgagggtgggctggtatggtctgagattgagagatgggttctgtcctcaagagcacgaagggggttgccagtgatagtacacgtggagctgagagcggtggtaaggaagtcagtggtgaggcccagaggccaggaagttaaggacagaggtgactgtcctggaggctcgagccattcccccacatcttctcagtctctccagttcttgatgtgacaggttctgggctaagctctgtctggactctcctgaccttgttaagaccctagtacttcctctttggtcagctgattccattttcttgcaagcctcttgctcttttcccttgcccttgccctggcctggcctgtggccaacactctgagctctttctgtaacttgaggcagcatacacagctggccactgtctatccccttgggcatcaatctgggtataaaactcctgctgggttgt

SEQ ID NO: 23330 - DNA, 1127 bp, Mus musculus
atgtatggctctcttgtcaccacaggggcctggggtagcccaggcaggagttgtctgtctgtttctgggtttcacgtggagaatctgaggacctcccatttctttctcccctcccatagattgtgccttctgaagaccagggtgggattgatggagaagccccaggagggcagctctgactactgccgttcccaacaccgtgggtgctgccgctgaggagacctgtacacctctggccctcaccattgtccttgcctcccaatggcctctgctgccaggccggaggccagcactgctgcctgagcccgctgcccctcttcaggacttgccgttccctgatggggtaacgtgacagaccggatcagaggctgcctgcccaccacggcccagggccgctagagtttggttgagttcaagttcattttccctttggtcctgacttctggggcccaactctgaccaaaggggacactcctccgtccacccatgcagagagggtgtctccagcgacggccccatagaggacactgctctgcggccggagtcaccaacccgaagttctctctgctcagttttttttggttgttgttatttttattttgactccttgtaacttctccactctgagggacaggactttggcgctgcccgtcttgctgcggggtggggggagaagtgtgcttgtttcttttcttttttagaattggtttttttggaattatccgccacgaggcagcttcctctccctctcccaggtatttgcacaatatttgtgcggggcgtaggggcgaggttttaagaagtcttttctttgtggacaagcacggggatctcactggacttggtgtggggggctgggggaccccccgtgcagcccttgctggctagtcccctctgggtccccggaggaggcatggcccgcatgaaccggcctgcgcctgtggaggtgagctaccggcacatgcgcttcctcatcacccacaaccccagcaatgccaccctcagcacgttcatcgaggtgagtgggccttcagggccgggtgggtgtcctgcacagctcagggtgcgatgggtgctcacgatccgatggctttcctggagggctgtcagcatccgtgcttcgggga

SEQ ID NO: 23331 - DNA, 1111 bp, Mus musculus
atttccctcattaagaggagggaggaagtatgtgttcaagctgagtgggccagggggaaattcaagagctgagctggggctgtagaggccatgacctttcccaggagggaactggatcatggtggtgataatcaccacgaaggatgacaaggtgaagttgacactgccctggaaacgcaacatagtatccaacagtcagcttcccctgcccatgggtgtgatgcaggcaggacctactgagctgtagtctggtggggcaggtatattcttggcttttgaggccagaagccaagattagggacaaggcagaagtatgcaggtgtgtgtcttctcatcatgtcttctgctagtggaaggagcaagagccaatgcaggctctggtctcatcttaaaagggcaccagtactagtgaaggtcctacttcaacacctcccaatacctttgcttgggagggcttactactggtgagtttcgtggtagaatatagtgagaagaataactaggtgcagagttgaagagtgttgtgccccatcagtaccactggcaggagcaatggatgtttcagaagttaaagactttacctttgacccccatgtaggtgaacagtggaatgaggagctggaagccagtgtatctagccccaagtcctttactgtggccctttaggacaggctgagggactcaaacaccacaggtcacaaagctttgtgtttgagagtgctcattgcctcattacattcagtgaaactggcctggaggttcaccccaggaaggtgctgagatgatgtgagggtgtgacatgcatggggatggatgatgaattggagtcaggaggaatgccatgaagaagtagagaggaagggaaagactttccagtgacccacgacacatacacaggcaatatccgctctgtgaccatcacccgtttttcctctgcagacatcatggctgtcttctcatgcagccaggtgggcgccatgaactagagtccaggccaatagaggtgggtagatgtgatggtaaacactggtaggtgtgactaaacatatctgtcatgatggggtagcctatggtcacccaggtgcctgaaaccctagccccagaacacaga

SEQ ID NO: 23332 - DNA, 1210 bp, Mus musculus
aaggctgaaaagagcaagaaaaagaaggaagaggaagatgatgaggaggatgaagaggatgaggaagaggaggaagaagaggaagacgaagatgaagaagaagatgatgatgatgaataagttggttctagcgcagtttttttttcttgtctataaagcatttaacccccctgtacacaactcactccttttaaagaaaaaaattgaaatgtaaggctgtgtaagatttgtttttaaactgtacagtgtcttttttgtatagttaacacactaccgaatgtgtctttagatagccctgtcctggtggtattttcaatagccactaaccttgcctggtacagcctgggggttgtaaattggcatggaaatttaaagcaggttcttgttggtgcacagcacaaattagttatatatggggacagtagtttggttttttgtttttttttttcttttggttttctttttgggttttatttttttcatcttcagttgtctctgatgcagcttatacgaagataattgttgttctgttaactgaataccactctgtaattgcaaaaaaaaaattgcggctgttttgttgacattctgaatgcttctaagtaaatacaattttttttattaaaaaaaaaaaaaaaaaaaaaaaagaaaacaggctgagaaaaaaaaagaaatggaagttttattggtggctgactgcctgttaatggaaaaggagcaggaagaggtgatgaggtggctcagtggatagacacttgcccctaagcctggtgactcgattttgttcctcaggactcagctggtaaaaggatctaactcccacaggttgttctctgaccttcacatgtgtgtcatggtatattggcattcacacacacaactatgcacgcacgtgcacacacatacacacacacacacacacaaccatgcacgtacgcacacacacacaaacacacatacattcacacatacacattcactcacacacaatcacgcacacagacatcaaatcaaagcagtcttgaaaacttcaaaagagacagaagaactcatcgaaaagctttggaaacctgtgagtgggcagcaagacccaggatacaggccactacacagaactctgtttcattttttgtgttttcaaccacctttgtgaactctacatacattctcagaatgtactgaccactcagagcagccagggagaacaacg

SEQ ID NO: 23333 - DNA, 1180 bp, Mus musculus
gcatgataggagcaagctcctgaggctaccaggtcctagatactttgtaaactatcagcagagcttcagtgttgcagcctggtgggtctcagcctatataacaggatggcacaggtaggagcctagagacaacatctccagttgcctctgtacctatcccagaagaggagagctattcccagttggaggtgggcagaagggtaatggccaggcttccttttatagtcctcgtacattggttttcaggacacagaatcccacagggacttccccatctctgtgagcattagggaagggtgcctccccatttccattcttcatccagagtggcccagacagctgagattttcctctgtgtgatttctgcaaggagtccacttaccgaggctgggaacccagtgctcgtagcggctcgacttgttttcttctggtggtgtcatgcataaacatgctgaatctccttggttatgcatgagtgtgtcccagggaagcaaatactagacatgatgggggctaagctgctggcttcacaccgctccagagtttcaaatcgctttcacggttggcagtggctgttgttcccacaactgtgctcagcaagcccctcccaagcagagtggcctgcagttctagctctgagaagaagcccaagtgtccctgataccagccccgaggccttggctttgaatgccctgcctcaagaatacaaggcaataactgtggttgtgaggttgcctctcctatttggtgaccaatgtaccagtgtccagctctttgttggcatactgtgtgctgttcacacctccatgtccctgggtcctagagagtgatgtcaggtttttccctgtctgtctgctgcgaataggcagtgtgatttgcacctccccaatgaaggggcatatgagctgagcccttctagatgtagggagcttctaataagcagatttgtgtatcagatcaccctagggatgggtcatttgctccaaggccagcctgtctcaagtcctcctgtggaagagtttagcatggtcaccaccaccactgctgctgctgctgctgtgtatgttggaaaacaggctcagcttgttttctgaatttaccctcaaggggagtagctgggcttaggtgcaaatgcaccgacattccagagtgctggatgcgatgatgatgatgacaatga

SEQ ID NO: 23334 - DNA, 1144 bp, Mus musculus
aacccggaccctcgtcgttacacgctctacatgaaggtggccaaggcacctgcaccctgcagcggccccggccgagttcgtacctaccagttcgactctttcttggagtctacacgcacctacctgggtgtggagagctttgacgaagttctgcggctctgcgattcctctgcacccctcgcctttctacaggccagcaaacagtttctacagatgcaacgccaacagccaccccaagacggtgacctcggaccccagggcgagttccccagctctagtgacgacttctccgtggagtacctggtggtgggcaatcgcaaccccagccatgctgcctgtcagatgctgtgtcgctggctggatgcctgtctagccggcagccgcagctcacacccctgtggcatcatgcagactccctgcgcctgcctgggtggagatgttggagaccctgcttccagccccttggtcccccgtggggacgtctgcttgagggacggcgtagctggtggccctgagaactgcctcaccagcctgacccaggaccggggtgggcacggctcagcaggtgagtggaatccagagaaccttgtacagttctgcagcagatgaaatgagagcgtgagggagagtgcagtccccgaggctggggtctgttcggggcaactcttttgtcatccgggttgagagaccatgtgtagaattcaaattgccaatggctcttcgttcccaggatagaaagcccagcccacatagggcgtggcatgtgagtgagggagggaagaaaggatccgtagccagtttcctcaagccacttcctcggtttaaatcttccacatgggagcacactaatcttcaacaacgacattttccagcatccctagggtacagtacctggtgtctggggactaaagtggaggtcagcacctccccagggtggcgcatgggagcacgcatagacagagtactcacagggctgttgccaggaggtaaggttttggggctcagtgtagcatgtctatagcagctgccactgaggtgtgatagtgagagcagggacacaatgccatccttggccagtgaccacaggaagaagacacactacccaacagtatgtagccatcccaggcagaaccagggtatcaag

SEQ ID NO: 23335 - DNA, 1161 bp, Mus musculus
ccccactctttggacactctttggattgggggctgtaggaacctccatgcattggaggtccctggccctgacctggctgtgacagcatgaagctcttttctacttccccagacccgagaacacctggcaaaggctcagcgggggctgccaggggagggggtctcagaggtcatccagacactgctggagatctcacaggatggcaccagctacagcggcgacctgctctccaccattgatgtcctgaggaacatgacagagattttccgcagggcttactacagccccacgccaggggatgtgcaggtggctcggggtgggggaggaagggacagctccagcaggggacacttggggaactgtcaaaggaaccaacctagacctcagccagagattaagtccccaatgctgagtgtgaactgggctgtgaccacataccataataataagctttaaacatggtcacacactgaatcccggcctggtcataggatggtttctgttccaggtcatgtactgagtcctgattctggtcacaaactctgaccttaatgaaagtctgggtcctgtccttcgtcaaaggttaagccttgacccatgtcatactggccgtagattaaatcaatcatgctggaatctgctcacacactgagccctggccttggtcatatatacaccctcactctaatcgcataccgagctttgatctgtttctgtctacactctgtgctctaatcctggtcactaactgagtcctgatcttggtcattggttgagtaatggtcctagtataaactgagcctttaccctagccataggctcaactgtgatcttcctcatgcactgatatcttgttccatttctctggttctaattccagaactttgtccagatcatcagcaacctgctggcagaagagaaccgggacaagtgggaggaggcgcagctggtatgtgtagaggtctggcgccctcagtgctagccacaggatcaggataggaacaggcagctcctggccctctacaccccaggccagccgtggtggggccttgctgggtcttctcaaccctgcttcctgttggctgcatgaccttgaaaaacaccctttaaccttgtgggtcttgtttctctatccctgaaaaggcacagtggctattccct

SEQ ID NO: 23336 - DNA, 1099 bp, Mus musculus
gataccccgcatatcagatatctgcattacaattcgtcacactagcaaaattatacttatgaagcagcaacaaagtaatttgtggctggggtcaccgtaacatgaggaactgtattaaagggtcgcagcatcaggaagattgagaagccccgctctagggtttgatctgctggtatcatggatggtgtccaggggctttggagagctaggcaagtgagcctagggctagggacctaggacaggaacctcatgtcattcagggtctgccagagactctgagaggagagccagaagtggccccactcccagagggcagaggggagccccagggcttctgccttgctctgggacatacctccatttgtaagtggaggtagcagtgtctgcaaagggactactgaggatccaaaacaaaacaaaaaaagaggtgtatgcaaatttccctatatctgtcatggctgccgggctcatacacttctccctgacacacttgttgcctgctctctgttgggcatggtgctgctggtttctgacagcttgtttctttcccagttgctggctctccctggaggggggacttctgtatgccttcgtgggaccggcagctgcagttgtgctggtactggcccacccccacccctcctctacctcctgggctggacccctgggtccttacctgtcccttaaggtggcctgtggggatggatctctggttaccagcagtggcagctctgccaccctgccccagtcactcagtgtggtaccctgtcaccctcttatctccatgagcatggcttgcctggatattgggcattgaatacgtacctgccgggaggtctttgtgagtttgatgagtaacagggaggtggggacagacagacagatggatagctgaagctacagggattgagtagacttggctcaggtcatgcatgttcacaactgtcagcaagcacccagagtgccaagagctgaggctgcttgcttcctggtgtcagagggaccttgctttttcctggtccttcagttgacacgcccatttggagaggagtccagaactctagctaggggctggcccagagccaggactggcctggct

SEQ ID NO: 23337 - DNA, 1319 bp, Mus musculus
cccaggggtaccagctgggagcagggtaacctggtgtccctcctggatctagtggtgagcagttctctcaccatcttgctgcttcctgtgtccttcaggtctcaaggctgctgagaagtctttgctgccatgtctggaaagggcatcaccacaccaccagcaccagcaccatcctctcttctcctgaagctgcctacatgggttccaagacactttcaaggcagagaaaacaagattacagagaggaggtgcctggcagggggcagcaccccagctcagcccaagagctgaaggtgaagacaagccagcatgaaaccacgggtctgccatgatgcccgccccgctggccgctcactagctgcctgccattagcctctgcagcttgagcagggtctgtacccttggtcctcttggcacagagcccagctcgctgcatggcctttggctccccgaccagacccttgcaggagccttaaggcttgggcccctgcccagcctgatctttcctgctgtgccctgcctgccaggtcaagcccagtcccaggagaccccaggccttggctcctaggctgttccatgaacctccctgacctgcctggtgattgcccagctgaaacctcagccaagccccagctccaattaccttgtgctggtagctgcttgtgtctgcagtctgagtaggccttgttgcggttcctccatctgcctggtctattggtgttctgagaccaattccactgatgttctgacagatcctccaccctgtgcccctgccagcccccacaagtttatttttgcacaaaagccatgacccatactcatttggctggcatagggtgtgtaggtaggccctggggactagggagaccctggagatctcaagagagtgtggctatcccctattttcaccaagccttgaatatccagccaggctgtctgcccataccatcttacctcaaagacagatatatatctatatatgattttgttaataaaactatgaaacttattggagtatgtgccatttctcgagggtgtgggatgggctgaagcaggacctcagaggacactgctcaaggaggtacaggaacacccaccgcctatgtaccccagaaaaacttctaagtctagaatcctcggccttaaaggcctcagggacctccaaagaccaagcccatggcctctaggcctggacaggcccttgaatccccgagctgtggtggcaggtgtgctgcaggggatctcgtctgcagaactgggctcgcccagcctggaatctggagacagggtcaatgtcctatctaaaagatggtgcacgc

SEQ ID NO: 23338 - DNA, 1160 bp, Mus musculus
gctgtgccaaagagcacagttattgggaactgggaagtgagaaacacaagtgcagacaggaatttcttccctccctttctactttgtgtgatttctcactcccatgggtgactctggctcctctttgacccctgcaggcttcctgatattctggggctcctagtggccccagcctgttccctgaagcttcctgtcccatttccagactccagagtgaacacttcctccttgggtctagctggttaggccacatataccatgaggcaccattccagccatcactgtatttacagttgtttggtcatcattacacatttccaaaacagaacttctggcttcattaaacagcagcttcccacctgccaagccccatcagcctccactcctctttatgccctgggaagcatgtctttctgagatgcctcatagtcagtgaccctccacagcttcctgtcaggtccttcaggattcaagatggaaatgacccacaaccttactgcagcaacatcagtgccagccccattcagccttatagggaatggggtgagaaagcctcagacgaggtctggaaaatatggttgttgtcaggtcactgagagaggaggtcagagaggacactggaggtcttcagaggttaacacaggattagatgctgagcatggtaatgggcagaactagcctttcataaagcttttaaagtctcacaatgacattctgattccatttatcaagtaagaagttaagcatgtcagcccacagtgccacttaatgtcagcacataaaatccaattagtaagaaaggctcagaagcccttgaccaggacagcagctgagggcctggctttcccaccacaagagaaactgcttagcagagtgtgaccttgtggatggatggcacagtggccaagctacagtgtggagcctgacacagagctgatacagtatatagggaccaggcagccaaagcagggcctgtagaaaactgtagaaaatgggcactgaagagctgtgggtcccttcagccacaaatactaaatacccaccagggtaggatttcctaggaagggggacaggtaggtggctggctgcagaattttcagccttcaaggagtctcagcatgctcaggtttgcttgtatagttgctactaaaacagagatg

SEQ ID NO: 23339 - DNA, 1196 bp, Mus musculus
gagaccagcagccagctgctccgtgctgagagcggcctcagtgacagaaaggaccagtgactgccacatctgcatcctccctgccccgcctgtcagccagtccgttccatgggaatgggctgcctggggtgggtgcactcctaaccagaatggcctcagacaagcctggcttcttttacccgcttgacactcccctgtgcttgcctcatttttgggcagctggtggggtggatgttgttgtcctggcccggctctgcctcctgggtccccatagcgagactgttctagtgtgcccagatgcacagggtcctggagcacaagggccagcagaacccaaagtcagggctgcttgtggccaagcaggccagagtagtcatgggtgtggctggggcctgcagcttactcagggacagtgggccatctggagggtcacctcatagcagggaagcaagaccagaaccaacccaagggcccccgagaacacagaagggcaagtgggtgctggtcattggctaagattctggtgatacccaccactcttaagaggatataccctgttctaggctggtcgccatgacgtctggggctccatgactatgcctagcacctgtcctgtcagctcagggagaggccagctgcttgaagctaggaacggcctccttgctccctctctgggaaccacacctggagccagagcccaaagcttcagtgatgccctgcaccccccccccccgcaccctcctcacccccatccccacccccacctccacctccacgctgctatgcttgccttagtgctgtcaaggggaaagctgcaacccgttttatttaaagaaagcacaagattaaaagagttctcaaggcgcgtgtgccggggaggttctccttttcgcagccctgccaccccggcacagaccgaccagctccctggatgtgtcttctggaggaacatggattgacatagtgtgcccaggcttgtgggcgcctctgcacttagggctaagcctgatgagtcatgggattgaggccaagagtgagcagctggctagagccccagctggccttcctaccatggtccccctccttgtccacccgccacctggagcctatgaaccttgccacccaagtcacgtgcacctggcctgtcttttctgttgccttccttagagtcccaggagggccctaggaaagtgggg

SEQ ID NO: 23340 - DNA, 1334 bp, Mus musculus
atcctcactttccatgcagggaatgtcaaccttggctacaccctgaacaagggctgctccccgatctgccccagtgaaaatgtcaatctcaatctcggtgtggcgtccgtgaacagctactgctgccaaagctccttctgcaacttcagcgcagctggcctcggacttcgtgccagtatcccactactgggccttggactcctgcttagcttgttggctctgctgcagctgagcccctgaccatcccccatgtgttctccatatccccccagctcaggaaaagcccagctccttttaggtcccaggggaccctaggaaccttcagctcctcctgggtgtgtctagttccccctccacactctctcaacgtcagggctaagtaccaaactcacccatacctgctctgttgaagtggtactggctacccttgcttccagagccaatcctataacctcccttggggaaccagcgaaggggtgaagatctccttggagtctcaagagtaccagagtcagcgccgaatcttgtggacacactgacaaggatgtctaatccaaatagatgtatatctgtgtgctcagtgtatccctgtgtgaatgaagccacttggattctggggtgggcaaagaagacctgaaaagattctacagcagaaggcctgtgtcgccaccaaaacccctccccctggtatcattgtacccaccttgtactctgttcaggaggctgcccatggaggactgccacccctccagatgaaggctcccactacccgatgcagttgagtcccatcctgccctctctgcccacactggcttcctgctgctattctagtgcctcaaataaaccgttcacaccctttcctgctatgtcctggttgtccttaacccgtcttccccctccggtccaaagggacctggggatcctgcaggcccacagccctgcttaagcgattctgaaagaccaaccccgatacagtgatacattcctatgatgccatcatagcagaagcagaggtctctgggaggccagcctggtgcatagcaaatcccaggaatctaggcccatttagtgagacaggcctgagagaaaagagagagagcaaaggcagagagaacttgaaagtgtgctgtctcaggctgaaagctgagaagtacagctacccataaaggcaggcccatcaggctggtcacacattcccaagctttgtctgccccagagacttcagaggcctgctgttgccacttgtccttcataaactaccctgtagtctaagccatgggagtctggcccaggcaagtgatacttgtccaccctataactggctttgctttgct

SEQ ID NO: 23341 - DNA, 1152 bp, Mus musculus
tttctttctttctttctttctttctttctttcttcctttctttctttgtctttctgactttctgtctttctgtctttctattttttttttttcgtttttttctgagatatggtttctctagccctagctgacttgtaagccagggtgaccttgaacgcagaaatctgcctgaggttaaaggtgtgttccacaagtgccccagctctactctaattctcttttaaaaaatgtgtgtgtgtatgtatgtatatatgtatatatagtagtaatattaatccattaatatctctttttcctaaaattcatgtctgtctgtctctgtctctttctctctctctctttccttctttattaaatttattcttttcatacatagtttcttagtgtaagcatccctgactgtcttgaagacactttgtaggcctcaatcctgtaagagccttcctctgcttttcaaatgctggcatgaatgttgtacctcactatgaccggctgagattctcaccttttcttttctccccccccccctttctttttatgattctagctttggccaggcagtggtggtggttgtggtggcagagggaggtggatcactgtaactttgcagctagcttagtcttcagtctgagttacaggaaaggagttccaagaatactggttatatttttcatttattatgcattttaattaaaatttaattacaccaaaagaatttagactgaccaattcagagtctgctatttcaaagcataaggaaaaagtaggagaaaaacgtgaggctgtttgtggatggtcgaggctgctttagggagcctcctcaccattctgcacttgcaaaccgggccactagaacccggtgaagggagaaaccaaagcgacctgaaacaataggtcacatgaaggccagccacctccatcttgttgtgcaggagttcagttagcagacaagatggctgccatccacatgtcacctttcatcttggtgaggtcaatgtgcagccgagtgacaggacaaggaagtagacatgcagacaacagacatgcaggcgaaccacctcccttctgtgtttggataaaagacatacaacaatttttattttttacagtaagccttaaaaagcactctgacagccactcagatatctacct

SEQ ID NO: 23342 - DNA, 1306 bp, Mus musculus
ccttctgtttctgaaagtctgtagctccagagcacgtgcagactcctttcctcctgaccttggatctgtcatcaagacactgacttcctgtgccaatgagttgggacatcaggatgccctaaaaaggaaggcagaactggggctcaaggaagaaaggctgtgtaccctgactcaagggacagatgctctgtgccttctaggggaggctcaggggaatggggtcacctctggtgtggaccccagctacagtgcagacaagaaaactggcctatgtgccacatttacctttaggccaagcaatggtgcccaccttcagcttaccctttccagtccctagtgcctgtggagttgggtgtttgctttctcctggttccttctcaaggaagacaagtggattgacctcctgactcagatcctgtaggactaatgcttgcactgggcagctcccagaaacacctaagtgtgtctgtttccctgcatctgggcctgcagtcacttggctttggacctgcagagggtccccagcacccgcatactggtagcactcagctggcttgtccacatctcacctcagccacctcatgatctggtggaacctcctctttcttgtttctggctggtgcagacacccgtgtgtcctaatacccatctgtacactgcagtgtgtggtgcattcctcttaaacagctgcagccatggcttgttgtattgtagacgctgtccccagtctggtgtttctgtttgacatttgtgaatgcttacgtccgtgtaatacccttggtgctgtgtcagtgttgtgcacattggactagacattctgctttgttgtgcacttggtggcttccttcctatgtgactcctctgctccatggacagtggcactgatgctccacgttgccttccagttgctgccatggtgctgtgagcagatgctgttggtgctgctcccggacatctattttctcataaaagtaaatgtgtttccaactcgcttcctgtgctctgttgggttccctacagtgtggacaaatgtcctcaaggaagccaccagctttctttactggagacagctgcaagaccagggtcccagctggtcactgctacttgggaatgtctaggatacttccagtgaccaagctcatgagaatataactcgtaattgaaaaaaagtcatcactgctgtaccatgggtgagggtggaggtttataaaagcaagacatcgcctgcctttgtgaccccagataatgggatgccaggttacggtttagttagttgttcagtacctgtagtggggaccgtgaggga

SEQ ID NO: 23343 - DNA, 1220 bp, Mus musculus
gtccccgtgcgccctcggaggtcggcgagtgcccgcatgtgccctcctcgctcattcgctctgaggggtccggccctgcctgccttccagcccgcttgtccccaccctgttcgctgctccctgtagaggaagccgaggaacttacctgcgtgttggtcccactgtcctgctatactcgactgggggaggggggtggggggtggccgtgctcagccgggttggggctggcccggactcccgcgctgctatttctctatgcaccagatcgtatttatgactcttggggaaatatatcttattttaaccttccagagaagcgaaagaatttaaaaagtaatgcacagttctagaagaaaaaatttttaaagaggaggcttaggcctgaacctcctggcatgggcgggtggaaaagtgtttttatttaatttaaattgtgtttcgtttgtggaatcttgtttaaagcttggtcgcttttttggactagccggaagagaggcccggtggagggtgttataagctgggcgtatctgcgccggctgagatctggttttctgaggcttggccccggtgctctgaggctccgaggctccttccccttccgtcctctgctgctcccaggtggctctcactgagtcttctgaacaggacgctagacaaatcgttgggaaagaaattttgtgttgttggtttttgttgtgttctctctctctctctctcactcactcactcatttgttacgaaactgaggaaagaaaaaacattaaaaaaaaataaatgtttagatccaaaagtcattggaacctggctgttgtgtctgtggctttcgttcttgtattcgtttctcttggaatagaaaaatatgaaagtctctggattgggttttacgggaactggtatgtccagataggcaagagcaggaaggaactgaccaggaggcagtgtctgtcagttaaccaagacagcattctgtggctggccttggagcaccaacgaggcagggcagggcagaggctccaggcagccttggtggtgactccaagtgcattgcagttgtatcctggtggcccaaacagtcccagccattcttggcagctgtgcctccccgaggggtggcccagctcctgttctccaaaggatgcaaacccaacgtgggtagtaagagatctctgaaaaatctcaccctgctctctgggccgctgcaaacttttaaatgacagttc

SEQ ID NO: 23344 - DNA, 1170 bp, Mus musculus
tgtcttccttagcatctctgtcggcatcttcccaagcttatccacctgctggcttacatcgtccgtctttctgtggctgtctcagagctctctctagtctcttctttattctgtcctgagttcagctactgtgtctttcttatactctcactatttcccagaatcctctctcttccagcgagtgtcccacctcctattccctgcctcagctcattgcccatcggcttttttattggcaggtgttgcttataagaggttttctctacatatatctattatataatacatattatatgtaatatgtaatatataatatgtatacacatattcacataccatatacattgggacaacagtcttattatgtaatcctggctggcttgtagtgggctggttttgagttcacaaaaattcacttgtttctgcctcttaagtgctaggattaaaagtgtgtaccaccatacccagcttgtatatttttattttcaacttatatctattcattgcattttaagtgattttttttgtagacaggcgataactaagtcatgttctaaaatgcattctgacaatatcttttttttttaattaatgagcctgtaccatttatatttagcatttaacatgaagtctcagcactcaggaggctgaagcaggaggctcacttttgactacacagtggagctctgccctgagacaagtaaataacagtgaaaagcgcacacagtcagcactcgagctttcatttcaagcacaattaagaaagctcaaaaagggacagaaagctgggcatagtaggacacacatttgattccaaacactcaggaggcaaagtcaaggctgatctctgagtttgaggccagcctggtctacaaagcaagttgcaagacaagcagagctacatggtgagaccctgtttcaggaaacagacagacagattccagcttagctctgttttctttttgtcatgaaggttatactgtttctctttggttctttctttgtctttaacttttatgagtctgatcatctgtattctaggaggagttcttagtctgtccggtttggagttcactctgcttcctggattgagagttggttgtttgttcccttctgtgtcttctactacagtacagttaggtcctggcttacagactccagggtcctggt

SEQ ID NO: 23345 - DNA, 1646 bp, Mus musculus
gcagctgcttcttcctccctaacagagctcaggccctggagcctccagtggacctggtggagaccacagtgagctcattgtgaggattaccagtctggaagtggagaaccagaaccttcgaggcggtgagggcttgcacctgacaggtggggctccagctccaccccctactatctgactggtgtgtttctcttgtgcccacagtggtgcaagatttgcagcaggccatttccaagttggaggcccggctgagctctctagagaagagttcacctactccccgagccacggccccacagacccaagtgagtcttcccgcttgggaaggagccttgaacatgtcctggcttctgtccctaccttctgactgtcccaggcagtctgagatctgaggctgtctcctgagggctggctttccggcagttagctggaatttagaggccggatgagtctcagccttcctccctccctctgtggcagcatgtctctcctatgcgtcaagtggagcccccaaccaagaaaggagccacaccagcagaggacgatgaggacaaggacattgacctgttcggcagtgacgaggaggaagaagataaggaggctgcccgactacgggaggagaggctacgccagtacgcagagaagaaggccaagaagcccacactggtggccaaatcctccatccttttggatgttaaacctgtgagtggcgtgtaggcctctgggaggctaggaatggaaccttacagctggagatggaaggtggagtgttgagtggccggcccataggctcagcctctgacacaccctcctgggtcttggtggatgtttaaagatcttgaatgagaacagaaatgtggagtgaggcatgtaaacctgggactgtttctaagggctctataaagaaacaaaagtgtgtcctgtagtttagagggtcatgggttacttcccctagtgttctagaggtttctgagatggctcactcagacccccacccccaccccacattctctcacagtgggatgatgagactgacatggcccagctagagacttgtgtgcgttccatccaattggacgggctggtttggggggcctccaagcttgtgcctgttggctatggcatccggaagctgcagatccagtgtgtggtggaggatgacaaagtgggcaccgacttgctcgaggaggagatcaccaaatttgaggagcatgtaagtgggcatgggcacaggggtaggggagaccggatgggcccgggacactggctcctgccaccccacatccactgtggaacatgaacttgccctaggcggcagcctgcagcagcagcgccctttgtctccatccacaggtgcagagtgtcgacatcgcagctttcaacaagatctgaatgtccgagagagtgtggtttcatgtgtgtgaggacctgctgagattaaagactgagactctgcactccgcctcttgtgttacttggtgtacagcgctctgtgggctctggctcatacttgtcccagaaacaatctattaggtccacatttgtccaccgtgtctctcctgtccctgctgttgtcaccgtgtacacctagacccagtctaacactcctcttcacactccttacctctggagggatacatcctctt

SEQ ID NO: 23346 - DNA, 1234 bp, Mus musculus
tttttcttttaaccatctttatcaaaacagtactaaaagtacttaaaacagaaagagaatgacaaactgctgcgtactgggataacatttttatggaaaatgactttagggaacaaagtgggcttgctcatttacaaatctgattggctaaagggtgggtatggctggttcccgctgagctgcttttgtgcttcagctgctgattggatggttagaaaactcagggcctggaggacgggatcacccttcacccaggccctgggatgggagcccactttgttgacagaagggctgttgactctgtgtgtggaaggggctcggtgttgaattgagaactgtttgtggtcattggcagcagcaaggtagttgatggaccgagctgacccagtatgtgatagcctctgagttgcctgattcttgacgtctgacctgttaagagtgttcgggctggggaggcctggagcctgtggggaaggtgaagccagaggttgaccctagccatgctgacctagccactctttcccatctcagcagaaaaatggctacaaactttctagcgcatgagaagatctggtttgacaagtttaaatatgatgatgcagaaaggagattctatgagcagatgaacgggcctgtgacctccggctcccgccaggtaaggactatactcggaacggggtgggctagagacatgttagggccaagtggctcctggggcgcttctgctgctagctcctgatctaacacctgtgccacctgggggcagcaagcaacaggttgtctcagggtggtgtgtggccctggcctccatcaccttgtgcttgtcactgtcttgggagctttcgttctgtgtaatacactcctcttctttatattgcgatcttgctttttgagttgagggttcttggggcttttgtttttctgtgtggggcttttttttttttttttggtgtatgtgtttaaaaaaaaatttttttttaaaaaccaaaacaaaaaagcctggttctttctgcactgtctgcaggagaatggtgccagcgtgatcctccgagacattgcaagagccagagagaacatccagaaatccttggctggagtgagtacccgcggcccacgtactcatgggctcgtgctcggccaaacagcatgtctgattggttttttgaggttttttttttccccctttaaaaaagcaacaacaaaaacctttagtactgctgactattttggcctt

SEQ ID NO: 23347 - DNA, 1148 bp, Mus musculus
gtggcatgccaccatgtaacctgggggatctgggtcaacaagtcttgctttgatcaagccgagcgggcttttgtggagtggtctcagtccttgctgctggctgcagaggggagccataggcaggggactcctgacacaggccagcaggctgtcactcctgacctggccttggcctgccagccttgcccaccagccaatggccagcctcctctgggcagcctgcaggcactggtgcgggaggtatggctggagaagccccggtacgatgccgctgagaggggcttctatgaggccctgtttgatggtcatcccccagggaaagtgcgcctgcaggagcgagccagtcaggcagagggtacccggaggggccgcagagaccatcggagctgcaataacgtaggaaacaagagagctgggtcaaaacgggccaacggggaggctcctcctgcttttccctactggtacttcctacacaaggacgcagaggccccctggctcagcaagcctacctacgacagcgctgagtgccgccaccatgccgttgaggccctgcgcatagcctggcgcctagaagctgcctccctggctcaccgacccacaccccgttctggcccatccatgtccagcctgagacccaagtaggaaaaatacggctgcaggtgttgggtttgacttaggctacaaaatagagacagctgtctctagactggggtccctcatactcctctgtgtagggttagcgtgggtatcattagtgctctgtccttgaaagttatggagttctgaattgtgttggtggggaaaggggacaaagggcacagaagacattaactgcagggcaagtaggaaatcctgtagctgggtctctggtccctgataggtcttgatactcatagccaaggtatatatgcccattgaggtaaggtgggcgttagatccaagagctcatgtctgatctggcagcctctgaagggtgcttgtcctttgggcctccctatggggaaagaaccctgcctagctaccggcctccaagggctcttggctccaacacaggtggaatcctaagattagtttctgaaggccaaggagtgactaactatatggccatgggaggtggtctcttaggcagataggtataatgaataaac

SEQ ID NO: 23348 - DNA, 1141 bp, Mus musculus
gatggatcacaggacccccaatggaggagctagagaaagtacccaaggaacctaggatgggcctctggacttgcctttggggaactattatagttgctcttgagacttttttttggtttttcgagacagggtttttctgtagccctggctgtcctggaactcactctgtagaccaggctggcctcgaactcagaaatccgcctgcctctgtctcccgagtgctgggattaaaggcgtgcaccaccacgcccagctaatcttaagacttctagtttatttctctttgtgtccatgacaggcctttggctcaccaagatccacccacccatccctcagccaccacacccaactgggagattttcttaattggttagatgaagaaagttccgccttgaatgtgggtagcaccacttcactaactgggccctgcatcaaatgaaaaggagagggaacagcctaggcagccttgagggcttggtgggtcagttctagcagtgtggtgccctccctcctgttggcaatcaatcccattatcactgcagtacacctgcttgttactgtgctgtttgcttactttgtagtcctgactacagaatcaagattatctctctcttggtagcagtgggatgatctgaaaggaggatcatgccacgcagaagccgaaccacaacagtagctagtgatggttccttttttatttcttaccatctgtctgtcttctgtccttattaattatttatttttttattttttatttttcatttttttattattattatttttttttcaagataggggttctctgtagccccgggctgtcctgcaactgtctcattagatcaggctggctctgaactcagatccacctgtctctgcctctcaagtttgggattaaaagtatgtgctactccatcagactaaactggggtgtgacgcgctcagcacagtagggatgttttctttatcagtaatttttctcattgctgtgacaggcagcttaagggttttgttaggcttgcagtctgaagggatacagcccaccccgctggcaggcatgtgagctgaagctgggcggatcacatccttgttcatgagacagagagggtttctctgtgaaaccctggctgacctggaactcact

SEQ ID NO: 23349 - DNA, 1235 bp, Mus musculus
ctcctcccagcccatccttgcctgtcccctgcctgtccagtcctttctgtgcttcctactgtttcctgtatgtggggcctccctacccaccttgttttcagcccagtgtactctgaccaatgacctaggctctgtgagcctagccccagacagccacgcctgcatgggtaagttcaggcaggtctgggacctgccctgaccagcctgtctccccatcagtcaccagatttcgtggaggagctgaggactttggaagcatctcccagtcctggtgagtaggcgcctgtctgggttgagtgccctccacccagagttctggccgcccttggctcacagcctaccctgctcaaccaggctcccaggaagaagatggagaagtggccttggtgctccttggcaggccctcacctggcgctgtgggccctgaagacatgacgctgtgcagcagccgtcggtctgtgcggccgggacgccggggcctgggccctgtgccctcctagggccaggtgcctccccagacttagggtgggagcctgccagcttcatcacctcccttatcccaagtctgttagccttggtgttagcattttaaagagacccctcaggagttctggcttctgattaactgccccgtagccgggatctcgtggcgagactgtaactagtgatgtttgtacaaccaaagactctattttgtggtttaagaagaataaagttacctacgttttaccttctcttgtccttttgtcctgcctgctcataccgatcctcctgccctgtgagccccggtggtcaaggctgcctttccatatcatcccttacactggcaccagttccctagggcatttaaaagccactgtcctctagcttgggtccagactggcgggggctgtggaattgtgcacataaatgccgtgggcacacgctttattggggtgtgactagaaccttccactgggcatctgcacacgcactgggagcagggtctgcagctggtcagctgggggccacttaacttgggtgacaaagaagaggcggaagttctctaggcgagcctcttggaactgggaggggtcatactcaggtccatctgttggccgaagcagtgacagatacccttcctttgccagcagcccacgattcaacagggcctgtgccaggccagtctgcacgacctccagctgttgctgtactactgggaacaggttcacttgacgcaggtcaaacaccagtgg

SEQ ID NO: 23350 - DNA, 1208 bp, Mus musculus
tggcctgcgccttcccctgctccagcctgagactcctgtatccctccgtcagcgtcatgctgcctgtctcgtgcgcagtgaaaaggggctgggcttcagcattgctggtggaaagggctccacaccttaccgggctggtgatggggtgagatagtggtgtgtggggtatagagggggctatccctgatgggcagaggcatgtcaggtctccagtatcatggctttagtgtggcttctccatccttacagggcatctttatatcccgcattgcagagggaggggctgctcaccgggcaggcactctacaggttggcgaccgtgtcctctcggtgagtggggccgggtgtggcctgactaatgctgtttgtttgtcctgcttcctatctctgatgtgagtgtccctgcagatcaatggagtggacatgactgaggccaggcacgaccatgctgtctccctgctgactgctgcttcccctaccatctccctgcttctggagagggagactggagggacttacccacctagccctcccccccattcctccccaacccctgctgctactgttgctgctaccgtgagcactgctgtccccggagaacctctgctacctaggctgtcccctagcctcttggccactgccttggaaggaccataccctgtggaggtaagacacccacccatgtccttctcagtcccagggccctctgtcagaagtggtgtggtcactctaggcagaacgaagtacacagcctttctttttaatttcagggttttttcttatttattcttttcatatattacatcccaagtgtagttccctctcctcccagtccctcccctgcctcttcctatctcccctccttccactcctcttcctcttcccttccgaaaagagcaggcctcccatggttcgcatctgagtatacatggcatatcaagttgcagtgaaactagattcatcccttcaattaaggcttgaggaggcaattcaggagaggatggggtcccaaaagcaggcaagagtcaaactcagcccccactcctattgtcaggagtcctacaaaaacactaagatacacaactacagcatccgcagaggtcctagctcaggcccacagaggctccctgggagcccttctgagccctggttggtagattctgggggctgtttgcttgtggtgtccttgacccctcagtacacagcct

SEQ ID NO: 23351 - DNA, 1190 bp, Mus musculus
gaggaggagctgtttcctgagtcagaacggccagagatgttgagtgagcaggagcacatgagcatctcgggcagcagtgctcgccacatggtcatgcaaaagctactcagaaaacaggaggtaagtaggtgggctcgtgccaggcccgctctcggcggtatgaatgtgaagtagtgggtgataggtcgcagcattcaggtgtctttcccacagtcacagcagtcaattgtctttcctacagtctacagtgatggttctccgaaacatggtggaccccaaggacatcgatgacgacctggagggagaggtgacagaggagtgtggcaaatttggtgctgtgaaccgggtcattatctatcaagaaaaacagggcgaagaggaagatgcagaaatcatcgtcaagatttttgtggaattctccatggcctcagagactcacaaggccatccaggccctcaatgggcgctggtttggtggtcgcaaggtggtggctgaagtgtatgaccaggagcgttttgataacagcgacctctccgcgtgactttggcctcatttcctggacttgcacttgccccttccttcctttgggttttgtaaagtgttaaccgtggtgtgtccctgggaccaggcactctgcccaacccaccctgtagtgtacataaagatgcagataccactggccctgaagtccctgtgtctgaaattggtcctgtgacccaagctggttgtgtgtggaatgtcttatcagggttccaaggcaccagggacaaggagggcgttcagcctgctgtgcaggggtgaacaggagggaccggggtggacaggccttgctttatcttcctttgtggggagtgctggcttgcagccttgctcacgtggatagctctgagagctgtctggccctgagatctgtaggatccaggaccaagagagcattttgtgggcgggcgggcatctgagttgttacacctgctagtatgggttacgccagagcgaggccggaaatcccgacatgccccgcgcgagaccgctacgggtcgtcggagacgccacgccgcgtggccctttgggagctgtagttttgagcagagagggcgggcctaggcttcccggcgggctgcgcggctgggcggttgtcgcgggcagcggcggcggttccggctgcggtgctgcgggcggatgagctgcta

SEQ ID NO: 23352 - DNA, 1190 bp, Mus musculus; identical to SEQ ID NO: 23351

SEQ ID NO: 23353 - DNA, 1183 bp, Mus musculus
agtacgaggtcccagaagctgcgcagctcgctttggagcagatgaactctgtgatgcttgggggcaggaacatcaaggtaaggacaagaaagtttggtcttagccgggcagtggtggcacacgcctttaatctcagcacttgggaggcagaggcaggcggatttctgagtttgaggccagcctggtctacaagtgagttccaggacagccagggctagacagagaaaccctgtcttgaaaaaccaaaaaaagaaaaaaagtttggtcttggacctagaataattgttccgtgaagttacatacatacaagcagtcaccacaggcctaggctgatgtttcttcttgaccttcttcaggtgggaagacccagcaacattggacaagcccaacccatcatagatcagctggctgaggaagctagggctttcaaccgaatatatgtggcctctgtacatcaagacctgtctgatgatgacatcaagagtgtatttgaagcctttggcaagatcaagtcttgtacgctggcccgggaccccacaactggcaagcacaagggctatggttttatcggtgagtttgggaagggccaaggagaagagggagcccgcctcttactggggctggcttttctcactgctcatcctgccctgcagaatatgagaaggcccagtcgtcccaggatgctgtgtcctccatgaacctctttgatctgggtggccagtacttgagggtgggcaaggccgtcacaccccccatgcccctgctaacacctgccacgcctggaggtctcccgcctgctgctgctgtggccgcagctgcagccacggccaagattacagctcaggtgagagctggtgcagtgatgagtgtggacagtgggtggacagacccactcagcctttgggaactggctcttagatggtttgggtgggaacaaagaactgactgtgagaacagactagaaactgactctgcttgtcttttggttgcaggaagcagtggctggagcagcagtgctgggtactttagccacaccaggactagtgtccccagcactgacactggcccagcccttaggggccctaccccaggctgtcatggctgcccaggcccctggagtcatcacaggtgagtctgagttgatcaggttctcttccattcctttcccctctcctctagggtc

SEQ ID NO: 23354 - DNA, 1984 bp, Mus musculus
caagtacctcacgtgccccaagaccaagctcaagatctcctacaaggacgctctggaccgtagcatggtggaggagggcacggggctgaggctgctggaggctgcggcacagtccagcaagggctactacagcccgtacagcgtcagtggctctggctcgaccgccggctcacgcactggttcacgcaccggctccagggccggctcccggcgtggcagctttgatgccactggctctggcttctccatgaccttttcttcttcctcctactcttcctcaggctatggccgccgctatgcctcagggccttcagcctctcttgggggccctgagtctgcagtggcctgatcccctcagcctgcatcctgccttcccgctctgcatgtggccgggctccctgtggaggcactggggtcttctttttttttttctttttttttcctttttaacatttaaaggtgtcttcctcccaagcggtgcctaaaatctaaccaaaaagaccagactaacacattaatatatgtatgcgatgtccagacagcctgtgtcttggggaacagggctggcccaggcccagtgaccacttcaatctcctgggttctccctaaatcctttctacctgccactcaccacagccaggtgccttggagaatccagagctgggcattcagcctataccactcctgtctctcctgggaggattctatctgggaaaggcccccagacctctaagccaaccccactggatgtctacctgctggtcctagctgctgaggggaactggggacagtcgtgtgagcagacagctcttgaggcctctgtcctgagccagctgcttctccccagtctatctctgaatgtcctgtatattcagtgggttttgctggccaagggaagatcccaggccaaccatctcttccagcctacccagagaagccccttccccatgggaagataaggcctggtcctggccccagcctcccgcctggctcctgcagctgccattggagctatgctttgtagctcaacaccccatacttattcccctgagacctgagcctctgcttcagccttccagcctcagctccccttgtaagtgccttctgtgtccttgtacccaggccctaaagacccagacccagggtaggagatggacattctggctgggcggggctggagggttctgcagatctgagacttctcctgctccagaggcccagggactcttcaagcctgtggaacccctctctgggtgctgctgcccacctcactcccagggagccctggcccctccatggcccagagacaccggctggcccatctatgctaacagaagcatttggccagtgacactctcccttccttcctgtccagccagtcccgggccttggtggctcctcccctgcctccaccctctgagtgagctttgcatgttccactaaccttgagctggtggcaggtggagatgccaggcagaacactaacctgaccatgggcggggccctgcggtgtccgcccctcaataaaagcaattccaaccttcacctgggtcttgccttgtgctttgttcctagatcatctgtgtatccgtgagagggtagaagctgtggttcccggctccgggccctggctcaccagatgggtactggccagagtagatacatgaggccttgcaaagatgttaggccaaggctgggcatcacaaccaggaaaacccaaggggtggctagagagctagcaggcagagaaggcagagtggagaagggagcaggctgcactgaggtgggcctgctgtgcccagcctctcatctgggtgatgtcctgtcacttggcacatccctatgacagccacagggttgggacttctctggagtgagtgtccacacactccctgggggttgggggaggggagggtgggttgattcctcttggttaagggcagctattttaggaaggtggctttagtactggctgctgccgggg

SEQ ID NO: 23355 - DNA, 1185 bp, Mus musculus
tgtgcctgtggacgtggcctacaaacgtggctacttcgatgaagagatgaaccgcatcttgtctgacccaagcgatgacaccaagggcttcttcgaccccaacacccacgagaacctcacttacctgcagctgctggagcgctgtgtggaggaccccgagaccggcctgcgcctcctgccactcacagataaggctgccaagggtggcgagctggtgtacaccgatacggaggcccgtgacgtcttcgaaaaggccaccgtgtctgcaccgtttggcaagttccagggcaggaccgtgaccatctgggagatcatcaactcggagtacttcacggcggaacagcgacgggacctgctgcagcagttccgcacgggccacatcacggtggagaaaatcatcaaaatcgtcatcacagtggtggaggaacacgagcggaagggccagctctgctttgagggcctccgtgccctcgtgcccgccgcagagctgctggacagtggggtcatcagccacgaactctaccagcagctgcagcggggtgagcgttctgtgcgggaagtggccgaggcggacagcgtgaggcaggccctgcggggtaccaatgtcatcgccggtgtgtggctggaagaagcagggcagaagctgagcatctatgaggccctgaagaaagacttgctgcagccagaggtggctgtggccttgctggaggcccaggctggcactgggcatatcatcgaccctgccaccagcgccaggctgactgtggacgaggcggtgcgtgctggcctggtggggcctgagctgcacgagaagctgctgtcagccgagaaggccgtgacaggctacagggatccctactcaggacagagtgtctcactgttccaggccttgaagaagggtctcatcccccgagaacagggcctgcgcctgctggatgcccagttatccactggtggcattgtagaccccagcaaaagccaccgtgtgcccctggatgttgcctatgcccggggctacctggacaaagagactaacagggccctgacgtcacccagagatgatgccagagtctaccatgaccccagcacccaggagccagtcacctacagccagctccaacagcggtgccggtctgaccagctgaccggcttgagcctactgccactctcagagaaggccgtccg

SEQ ID NO: 23356 - DNA, 1139 bp, Mus musculus
caagagctgatccgcctgcgggccgagacagagcaaggtgagcagcagcggcagctgctggaggaagagctggcccggctacagcacgaggccaccgcagccacgcagaagcgccaggagctggaggctgaactggctaaggtccgggcagagatggaggtacttctggccagcaaggcgcgagccgaggaagagtctcgctctaccagcgaaaagtctaagcagaggctagaggctgaggcaggccgctttcgggaactggccgaggaggctgcccggctgcgtgctctggcggaggaggccaagaggcagaggcagttggcagaggaggatgccgcccgccagcgggccgaggcagagcgggtgcttactgagaagctggctgccatcagtgaggccacacggctcaagacggaggcagagattgcactcaaagagaaggaggccgagaatgagcgcctgaggcgcctggcagaagacgaggccttccagcggcggcgtctggaggagcaggcggcactgcacaaggctgacatcgaggagcgcctggcccagctgcgcaaggcatcagagagcgagctggagcggcagaagggcttggtggaggacaccctgcgacagcggcggcaggtggaggaggagatcatggcgctgaaggtgagctttgagaaagccgccgcgggcaaggcagagctggagctggagctggggcgcattcgcagcaacgcggaggacacaatgcgcagcaaggagcaggcggaactggaggcggcccggcagcggcagttggcggcagaggaggagcagaggcgccgggaggccgaggagcgcgtgcagaggagcctggcagcggaggaggaagccgctcggcagcgcaaggtggcactggaggaggtcgagcgactcaaggccaaggttgaagaagcacggcgcctgcgagagcgggcagagcaggagtcggccaggcagctgcagctggcccaggaggccgcccagaaacggctgcaggcggaggagaaggcacacgcctttgtggtgcagcagcgagaggaggagctgcagcagacgcttcagcaagagcagaacatgctggatcggctgcggagtgaggcagaggcagcgaggcgagccgccgagga

SEQ ID NO: 23357 - DNA, 1603 bp, Mus musculus
tcccgggagaactgatacagattagtctagaagcgtgctaggaagatgtgtgggctcactgggagggaaaggagtgaatgagaatccaaggctgtgagccacacgggaccttgatttttaggctgggggaaggggtgaaggggcagcgttggttgagaaccctaggcagtgagtaggagagttagccaggccaagtcactcaggacggtcttgcaggatattcggctgctggcctcaggcaaggtggctcagcgagctggggaagtcgagagagacctggacaaggctgatggtatgatccggctgttgttcaatgatgtgcagacccttaaagatgggcggcatccacagggtgaacagatgtaccggaggtatgtaccttacctgggaaggctgggttaggaggtctgagacccgcctgacctcccaactcctgtgcttcctcagggtgtatcgtctgcatgagcgcctggtagccatccgcactgagtacaacctccggctgaaggcaggagtgggtgcccctgtgacccaggtgaccctgcagagtacacagaggcgcccagagctagaggactccacactgcgctacctgcaagacctgctggcctgggtagaggagaaccagcgtcgaatagacagtgctgagtggggcgtggacttgcccagtgtggaggcccagctgggcagccaccgaggcatgcatcagtctatagaggaatttcgggccaagatcgagcgggctcggaatgatgaggtaagcggtatgcctgagggaggcagtggctgtgcgctaggcccaggccactgcagacctgactacccactgatctctcctgcagagccagctctcccctgccacccggggtgcctaccgggactgcctaggtcgcctagacctgcagtatgcaaagctgctggtgagtggggactgcaagcggctaggaggggctgggaggggtaggcagccgcagtcactgactaattctttcctccttaaagaactcctccaaggcccgcctccggtccctggagagcttgcacgggtttgtggcggcagctaccaaggagctgatgtggctgaatgagaaagaagaggaggaagtgggctttgattggagtgaccgcaataccaacatggcagccaagaaagaaagttactcggtaaggcagcgtttcctccttaggatgtcctccctctcccttcccactcacacccacccatactgttccccaaggctgggagtcccttgagttcagccccagggctctgagaagatgggcctgggacttggacggcatgggcagtgtccctgagactgtccctgagactctcctcccttctgtcaggccctgatgcgagaactggaaatgaaggaaaagaaaatcaaggagatccagaacacaggggacaggctgctgcgggaagaccatcctgcccggcccacggtggaggtgggggcacagcggcagggagccctaggagcacctgtgggggtagggctatgggactgatggctgggagtgggttctaaggcccgtgctgtccacagtccttccaggctgccttgcagacacagtggagctggatgctgcagctgtg

SEQ ID NO: 23358 - DNA, 1171 bp, Mus musculus
tgaatgccagcagcttcctctgggaggtgcctagagcagggccctgcctgtctcctgcaaggcccttcagaagcacctctgtccttccggcctggtcatgcccacacagatcctcagaagaagcctgatgggcagggagactataggagcccaagctgatgctgtctaacctgtgccctgctcctgtgctgatgcccaccataggctctgtgggcccccgttgctgggtgtggtagtgcgtgcctttaaccctagtgctccagaggcagacacagaggcaggtggttcagtgagtctagtctacacaggagttatagtcagccagggttacaaagaagaccctgcctcaaaaccacaacaaccccccaacccaaaacaaaaatcaactccctcagggcaggattggagatgttagggaagtaagagggtatgggctctgtttgctaggatgtacgaaggaacgtttatgtagccctgctcagtgggtgtctctgttatcatcccaacttgtccacaggcccatgctcatagatatgaataaagtgtatcgacagaccaacctggagaacctagaccaggcattctcggtggcagagcgggacctgggagttacacggctcctggacccagaaggtacgatccgctggctttccccatcttcacccttgctgcctggaccccactgagccaacctctccctgcagatgtggacgtccctcagcctgatgaaaagtccatcatcacctatgtttcatccctgtacgatgctatgccccgcgtgcctggtgcacaggacggagtgagggccaatgtaagtgggtggacgggtgcccttgacgggtgtccctgactgacggtgcatagtgtactagatcccgagaccctgaaggttgctcactcaggcctttgctcctaggagctgcagcttcgttggcaggagtaccgggagcttgtgttgctgctgctgcaatggatccggcaccacaccgctgcttttgaggagcgcaagttcccctccagctttgaagagattgaggtaggcctgcctacttgggctggcatccttggattgtcttggtgtagctgctgacaccccttgcctctacagatcctatggtgccagtttttgaagttcaaggagacagaacttcctgccaaggaggcagacaaa

SEQ ID NO: 23359 - DNA, 1113 bp, Mus musculus
tatgtctcctacgccatcttcttcatctccctcattgttctcagctgttgtggggacttccggcgaaagcatccctggaaccttgttgctctggtaactctcaatccctgagcccagttcacctaggcctgtgggacaggacagggaggttggacagggttggaccaagagcagctccccacacccaaggccccccctgtgatcctcttccgcagtcgatcctgaccgtcagcttgtcctacatggtgggcatgatagccagcttttacaacacggaggcagtcatcatggccgtgggcatcaccacagctgtctgcttcacggtggtcatcttctccatgcaggtgagggggacctaagacaggacggttgccccagagccctcaacacccacagtctcacctctctccttccctcccagacccgctatgacttcacctcgtgcatgggcgtgctcctggtgagtgttgtggtgctcttcatcttcgccatcctctgcatcttcatccggaaccgcatcctggagattgtatacgcctcgctgggcgctctgctcttcacctgcgtgagtgagggtgttgggaaggcctttcctgggatgccggccgggatgagtgaataagctgtcgaataccgaccaactgtgtctttacccgctagttcctggcagtggacacccagctactcctggggaacaagcagctgtccctgagcccagaagaatatgtgtttgcggccctgaacctgtacacggacatcatcaacatcttcctatatattctcaccatcattggccgtgccaaggagtagaacaagccccagctcaggtggcatggttggctcagacccatgcccctggcatgacaatgccatctgtgcttccctctctctggtccccaggcctggcctggtgcagagggagtccctctcgccctcttgtatgtacactgcaaatacttaacgtctggaccctctatggccacagcatggccccctttatcccttttgcccttgccaaggggcgacagggctgcatttctgtgccaccttctgtccactcactgttgcatgagccctgtctgccagccccatcccagggtcagggaccaacac

SEQ ID NO: 23360 - DNA, 1106 bp, Mus musculus
tccaacaacccgggagaagcacaaaaacccgttcgcctcgggccttccgtttcccggaactgaaaggcttaagtcgaacattcagaaagccggggatgccacaagccgcagttccctttgaccggaaagcgactaggctaccggaagctatagttcaccgagactgaaaaggaaacgtaccgacggaagtcgtagtcctgaaggtccaggtcgagctgtcggaggcggagtcaggactgtacatcatggccgggctggagctcctgtccgatcagggttaccggatagacggtcgccgcgcgggggagctgcgcaagatccaggcgcggatgggcgtgtttgcgcaggccgatggctcggcttacatcgagcagggcaacaccaaggcactggcggtggtctacgggccgcacgaggcgagtaagcggcggggaccgggggctcctggccgcacatcaagggaggagacctaagtcgtacggcttaactcctgagcccatgcagcagtatactacaatcccatctgagtccctgtgggcctcccggcagaaagcatctcacacaggttgtcccaacgtgttgtagcggggatgatgtgagaacctggcttcttttgacttcatcttacgagctctttctcttggccgacttccatttcagtcctctttgtgttgcatcctctaagcagtgaatataattatgccctgagttctcaggaaaattgcgtccctaacatggccctcaaatttgtgtgttaggccccgtgaggtactgagaatatcggtttctttaagaacccagttatgttatgtgattatgtttttgttttgatcccacgtgtggggtatggagctgcttcagattgccctcagccactatgatttgtctcatgcagggaccgggggcttgtgatcccacctcgagggaatatacctgtgtcttacagcttaagtcctccgtctcagtgggccctctgcttagccttttttttttttttttttttttctcacgggctgcccgcttcatctctgaggtgcctcagccagcctggcgaagctccactcactccctgttccttcagctcattcttcccacatcttgtcagg

SEQ ID NO: 23361 - DNA, 1103 bp, Mus musculus
ccgctggaccctctgggtcatggtggaagccacgagctagcgttccaggtcgggctaattccgagcccactctgtactctctcgcagtgtgctgagctacgtggccgggatcgcctggtttctggcgctggcttttccgccgttaacccagcgcacttacatgtctgagaatgccatgggctccaccatggtggaggaacagtttgtaggtggagaccgcgctcggagctttgcccgggacttcgctgcccaccgcaagaagccggggtgagtgcctagcagcgggctggggatttcaggggcggccgagaccagggagctctacttagaggctatcttttgtgtctccagggctctgccagtagcctggctggaacggtccatgcgatccgtagggctggaggtctacacccagagcttctcccgcaaactacccttcccggatgagacccacgagcgctatgtattgagggaaaggggtgtgcctgggagaaaagcacattggaagggtggcctgggttgggtgtcttgttgaagtgccctgaaaccaagaaactctgggagggatggtctgaagaactttagtggtgggcattgaagtgccaggaaaaaagacaggcttcaggctgtccgctggagggtctgctgaggctttcccatcaactctttgtgcagatggtgtcaggtaccaacgtgtatggcatcctgcgggccccacgttctgccagtaccgagtccctggtgcttactgtaccctgtggtccagatgccaccaatagccaggctgtggggttgttgttggcacttgctgcccatttccgaggtgaggctctggggctctggtccgggaggatttgaccaatgccccaggccctttgctgaccctgcctttggcttccagggcagatttactgggccaaagatatcattttcctggtaacagaccatgatcttctgggcaccgaggcttggctcgaagcctaccatgacattaatgttacaggtaggtgtagccctagtcttgctccccatctctttcaaagtaaaccgcggtcccttgtgccccctctagtgctcactgcttgctcctacaggcatacagt

SEQ ID NO: 23362 - DNA, 1108 bp, Mus musculus
cttgtctgggtccttgacttgctctatgctctggagctgtggatgcagttacaccaggctggagtcaacccggaggaggctgggaaggcccctagtcccgggactccactcttgccaacacaggtgatgctatactctactgctcttaggatgggggttttaacatacccagcagtgctttggtatgcgtccttgggggttctcctattcctctggcctaactccaagtacccatgtgtcctgcagggtgtgggcctggcctcacttacggcacccctgctgatctctcaggccatgggtctggccctctatttcctgcctgtgctgggccaacatttagctactcagcatttcccagtggccgaagccgaggctgttgtgttgacgctgctcgcgatttatgtagccggcctggcccttccacacaacacccaccggtgagcagctgggccggacagctggagctgggtccctgaatactcaaacggattcccaactacccttgagtttctttccttgtagagtggtcaactcacaggtcccagacaggggctggatggcactgaaactagtggccctcatctacctggcactgcagctgggttgcattgctctcctcaatttctccctgggcttcctgctggctgccaccatggtccctgctgctgcactcgccaagccccatgggccccggtacgtgctggtcagcctcttctccaccggtacctttgccccttaccggatggctagccctcatttattcacttgctggcatcctccatggtgcgtacttaaatgttgcccttctccccaggacactgtatgctgccctgctggtagtgaccagcccagcagtcacactcttcggtagcctgttcctgtggcgggagctgctggaggtaccgctgtctctggcagagggttggcagctcttcctcacagcattggcccagggtgtgctggaacactacacctatggcgccctcctcttcccaatactggccttgggtctgtatccttgctggctgcttttctggaatgtcctcttctggaagtgaggtgtctgggaaggggtcccccaagcctccgttctacctcctccctggga

SEQ ID NO: 23363 - DNA, 1152 bp, Mus musculus
cggctgtcagaagctcatcgaggtggatgacgagcgcaagctccgcaccttctatgagaagcgcatggccacggaagtagctgctgatgctcttggtgaagagtggaagggttatgtggtccggatcagtggtgggaatgacaagcaaggttttcccatgaagcaaggtgttctgacccgtggcagagtgcacctgctgttgagtaaggggcattcctgttacaggccaaggagaactggagacaggaagcgcaagtctgttcacgggtgcattgtggacgctaatctcagtgttctcaacttggccattgtaaagaaaggagagaaggatattcctggactgacagatactactgtgcctcgtcggttgggacctaaaagggctagtagaatccgaaagctttttaatctctctaaagaagatgatgtccgccagtatgttgtcaggaagcccttaaacaaagaaggtaagaagcccaggaccaaagcacccaagattcagcgacttgttactcctcgtgtcctgcaacacaaatgccgacgtattgctctgaagaagcaacgcactaagaagaacaaggaggaggctgcagaatacgctaaacttttggccaagagaatgaaggaagccaaagaaaagcgccaggaacagattgccaagagacgtaggctgtcctcactgagagcttctacctctaagtctgagtccagtcaaaaatgagtctttaagagcaacaaataaataatgaccttgaatctttaaaaaaaaaaaaaaaaaaagaagcagattggggaggaaagggtttcctcagctttacacttccatacagttgttcatcaccaaggaagtcaggactggaactcaagcaggtcaggaagcaggagctgatgcagagaccatggagggatgttccttactggcttgcttcccctggcttgctcagcctgatctcttatagaaccaagactaccagcccagagatggtcccacccacaaggggcctttcccccttgatcactaattgagaaaatgccttacagttggatctcatggaggcattttctcaactgaagctcctttctctgtaataactccagctgtgtcaagttgacacacaaaaccagccagtacacttgacctacccatgttca

SEQ ID NO: 23364 - DNA, 3277 bp, Mus musculus
aaagggcagcaccaagtgccacagtgatcagtcccttacatccagagggagctgcagcttatctttgtaatggacgggtacccccacttagatatgctctcattaagaaaattgaattatggactttatatgagggtttaaaagaaagttagtcaggggaagtttctatgctgggtcgcctgtggagcaggggagagctgctgttaatcccacacaggccatggatgagcaagctctcagaagactatccagtggctcaactggagggcgtgattcgcggggccgaggtgaaggaactggggatatagtagagaagccagaaaaacaaacaaacaaacaaagcagatgttgtcattgtaattagagttgcggccaggctcaacccggactagaggagccgggcaagggacagtcctggtccactgatggacagctccctacccagctccgcctaggtccgcccactgtgttgctctcgcgtggtctgagctctcgtcggcccgcaggggccgacgggaacggcggccgcactaaagggggccgacatggcggcggcggcggcttcgcttcgccggacggtactgggcccgcggggcgtggggcttccaggtgcaagtgctccgggtctgctgggcggcgcgcggtcccggcagcttccattgcggacaccgcaggtgagtcctggcgcgggccccgaccatcgcgcgcccctcagccctgaaggtcacggcggggaggctccgggcgcgcgccggcatcggtctcctgcgttcctcctacaactcgacggggtccccgccgccgggccggcacacccagaaagccggtctgggtgcccacgccttggagtggcagggcattgttgctctgagcccagggtcccactgtgatggggtcgggacgggagattgcagcgaagggctcgcccggagcgactgccgaagccggctgtccggacctggcggataccctgcagtgaccccagcctgacctcagcggcctgcaggtgaccttggtccgctgcagtactctgggtcacttaggcttgtctcctgggttaagttccacgagcattctccatttgccctccagagccgagccgtggccgaggagttggctgcagtaagggatccagcaggcattgggcacggtgtgtgccttgggcgctctgcgtgcggtggtggccagtgcggggtggaggtggagcggaagacatgggcgttcattcagatccccaggtgggctgctggggtcttggcaggtgctgagcggggctcttgcaggcagtgtccttgtcctcgaagtctggcccttctcgaggccgaaaggtgatgctgtcagcgttgggcatgctggccgcggggggtgcagggctagctgtggcccttcattctgccgtgagtgccagtgacctggagctgcacccccccagctacccatggtctcatcgtggcctcctctcctccttggaccacaccaggtgggtgtgttgcggcggggctgggggtggaagttcccgggtgaattcgaatcttcagttcctctaattctttatctctttagcattcggaggggtttccaggtatacaagcaggtgtgctcttcctgccacagcatggattatgtggcgtaccgccacctggtgggagtgtgctacacggaggaagaagccaaggcgctggctgaggaggttcggagggtgggggggtgggcacgaaagaaggtggaggatacagggattgtggtttcaactgtgagggactaaaaggttgtgatggggttcttggtggcaggtggaggtccaggatggccctaatgatgatggggagatgttcatgcggccagggaagttgtctgactattttccaaaaccataccctaaccctgaggctgcaagagctgctaacaatggagctttaccccctgacctcagctacatcgttcgagctaggtacttgggctgcccagagtatggggctagaaagggagggaagccagcttctgttagagactaagccctgggtctggttctaggcatggtggtgaggactacgtattttccctgctcactggctactgtgagccccccactggggtgtcattgcgagaaggcctctatttcaacccttactttcccggccaggccattggcatggctcctcccatctacacagaagtcttggagtatgatgatggtgagtgtcctttgccatgggttctctcctactcctagcatgcttccctgatatttctgagtctggaggtccatctcccttctcacctggagtgcttattgactgcatacttaaagaggctttggggatagctttcttagtcctgtaaggttcctatccatgtgaagtcatggatatggctaatccctgcctctgtgcaccgagggttacccttgattggcccaagcccccaacagtagcctcgctatttgttcttggcccaggcaccccagctaccatgtcacaagtagctaaggatgtcgccaccttccttcgctgggcatcagaaccagagcatgaccatcgaaaacgcatgggtctcaaggtaaacggttgggcaagggtcacagtgggcagttgggggtctttcctgtgtcttttctgagctctctttgttcccagatgttgttgatgatgggcctgctgctgcccctgacctatgccatgaagcggcataagtggtcagtcctgaagagtcgaaagctggcttatcggccacccaagtgaccctgttcagtatctgcttgtcatcttgccagaacaagctctcagcagcccaggaacagtccatggccttctcaggcctggcccttttcatcagatacaagggccaggagaccagactcttgcttctgatcttccttcagccctcagtgtgggaataaattaagtttctcaacatacacattttagctggtcaatgactaaaacattttttcagtggaaccctggaacccatatttctccacattattgtttcctgtactgcccagtatctgggagttattgatatgcaccagaatgcaaaacctggcagcactgtttgcatgggagagatggctcagtggttaagagcactggctgcttttccagaggacctgggttcagttcccagcactcaacatggtggctcaaaaccatctgtctccagtcgcaagggctctaacaccctcttttggccttcaaggcactgcatgaatgtaatacaaagctgtccgtgtaggtaaagcacccatggtgtgttttttttaaatctcaaaagg

SEQ ID NO: 23365 - DNA, 1154 bp, Mus musculus
acttgctctcggcccccagagaagtttcaggttagtacttaatggggtaagaaaggtggggtgtagtcttgagatggccctgagccttctctattataggacaaagccttcaaaactccaagatggaccggaaattaggcttgtttcctcagtcactggggctgcctcatgacctccagccgtccagttccagtctcccaagtccctctcaggtgggcaaataaccagtctgggtgtgggccagatatgggcagctgtgggcattggaagaactagaaagcatcaacagtcttcccatcctcctagcctggctggtcttgcccttcctgcactttcatcaatgcctcaaaccgccctggctgtgagatgtgtagcacccaaaggccctgtgcttgggatcctcttgctgcagcttccacctagaagccaccaaaggtacaagagtctgggggggggggtgagggggtacagtgtagaataaacaggagtaacctatctttttcctcaggttacagagaatatggccctcctgtcacaggcccaaccaccaccacttgaactttgcaggggactgatgcttgttggggacagagatgccagtgttaaacaacaggggctacatacaagctagtaattaaagacacatacgagccagcctgtgttctgttcttggatgtggagttgtactagccccgctccctgagagcaaggaaaccaggttctgcccaacagtagctggcgggattccccaagccacaaccaggagtctactgaagagtgagtgcacttagaatcaagtcccagtggtcatagaacataatactgggatcactttacaggcctctagcctcctgctaggagttcctgtcactatccctggccccattgttgcccttctcaaatcctcctatattgcaatcaccattatttttagctgcttcagccagtatcccaacagtaggattgagtaattttccttccccacttagggtgtttgagcactgggagtcttgagtcgcctgcctttgtgatcctcctgacaatcagctatcacactgccctaggcaccaagatccttcatggatctagtgactgtcaatttgtcctacatgtactatgtagctgcactgtagactactaggtattgttccctg

SEQ ID NO: 23366 - DNA, 1174 bp, Mus musculus
gtccgctgtctctcccatccagtggctccacgtacacaccctcagaggcaggcaatgcactggacttggaactgggggcagaggaggctgatgaagagagtggaggtggaggcggtgagggcagggcagaggagaccagcaccatggaggaagacaggtgtggtggtggctgtggccatggactatcctcgggagcctggaatgggtgggacagatcagggttccttctgtctggtctgggtgctatctcctaaaggcctactgtgtgccaacttctgcctagggttccagtgatctgtatgtgatgagaagaagcagaggtctcagcgtcatccagctctgaccaatccctggacctgtctacctgaggagctccagagcttccccagatgctggctatgccttggcactgacaccgtcctggcgctgcccaaggctatacctgtgtagccctttggattcagcctgtggatgtccactcatccctgcaggctcctactgcccatgctgtggctggattaaacagcacggggtctgatagaaaacgggactgctctgcaccaacagcctgtcacagacaggacagctggaccacagagtttatttttgtatttcttattgggcctgtacactccagctctaagggccagtagtttgaagccctataagtggtgcccagtgttcatggggtctggtctttgaccggcctctggtgcccacttttgtctcccactttaccaggtgggccacatgcactgagtgtcactttgctgcagctcatttgtttccaataaaagtttctgtgacttagatggaacctgggagtttgtgggggcggggcctgcgtcgtggggcggggcctgcgtcgtggggcggggctggtagctttggtatcttagcaacagctgctggctgcttttcagttacttaagtctcagagctgttactatctctcacctctgggactgtctgtggtagacatggaggacaggctaatagaaacaggcaacctctattcatcagagggtgaccacttacctctggatgtagacatttatgatcatgacatctatgatatcccagatcctggggtgctcatagaaaaaaatggtgagggcacctagcattattcgggcacccctctagaaaacagatgttcctcaggctttatcca

SEQ ID NO: 23367 - DNA, 1198 bp, Mus musculus
cagacattatgggcacgctctcagatagtagatctgtttcatatggatatgcttaatctcttctgtgagaagcggcgggtacagcagcagagatcatcgatgggagaggagaaggaggaggaggggaaggaggaggaggaagaggaggaggaggaggaggaggaggaggaggaggaggaggaagaggagcatttacctgtctcactcctacgacgccaccagctaaggcccaatgctgtgctgcggccgcgccgggaacgctggtgcgcatgacagtgggtctgttgggctgaccctgcatgggttgcaccgaaggaaggtctgaactaaatcctctcccttcttcaggctctatccaatcctccgtcttcaggaggccaaggcaccagactttggtgtgtttctcaggagtaagtagacgcaggcgtaagagctggaccctaatgctcccctgtctcccccacccccacccccaacctcagcctatagctttgtttgcctggcttcccacatccaggtcacaagatgcagagcagggagctgactactgatggttctctccgagtgctgaagctgccactgccaagagtggacttgcagcccttccccccaggctggcccacacccccacgggcactgcccccgctcctccttcagccttcacttcaacgctactttctgctccaagatacataccctggtgccttcagttgacctgggggacagatagccaaggctccatggccaaaacctagtcctacccccttggcaaatcgcaataccatactttgtctaaattaagaaatatataaacacacacatatatatttatttacttattgtgtatctatatatgttcatttgtgtgcaagtacatgtgtgggcatgcttgtggaggccaaaaattgctgtcaaagtgtttattgttctgcaccctatttttattagtccttggttttataaaacatctctctacatagtcattgctggggctcgctatgtagaccaggctagtctctaactcacagggatccacttgtccctgcctcctaggagctgggattaaaggcatgtgccaccgtcccagggcctattttgatgcttcagttgtttgagtgttttcctttatgtatgtaccaagtgggtctcagcagaatattctctgcagttggtataccaatgattgaaacaggtggca

SEQ ID NO: 23368 - DNA, 1173 bp, Mus musculus
cctgcaggcggccgcggcgcagcacgtgctggcgctgactggtgcgggctcgggccgcacgctgttggccggacagccagagttgttgcgggccttggtcgaccttgcggtggccccggccccagctccttcccgcgatgcctcccgcgcgctcgtgaacttggctgctgatcccaatgtgcactggcagctgctggcggctgacccggagctgcccgcccgcctgctgcgctgcgtgttggaccctcagtggccctgggctgaagaggcggctgcagtgctggccaacctgagtcgcgagccggctccgtgtgctgcgttaatggagaagctgatggccgctgagccggagcggttgggtctggagcgacttgtcaacgcgctgtgcacgccgagctacaacgcggccgcacccctgcattacctggggccgctgctctccaaccttagccagcaggcggaggtgcgtgcttttctcctggacccagacaggtgaaacccagtcgcctgcgcgggcgggaaggtggggaagtggaagtgaacaaggacagcagtgaatatcttctttcaacaggtgcgtggtccaacggctgctgcctcttacccagtacacagattcttcggtgcgcaggggcggggtggtgggaacacttcggaattgctgttttgagcatcgtgagtgacaaggagggggtggtgccattgccaaggtggggattggaccctagggaacccaacggaccattattctgatctccttccttgtccgcacctccaggacatcacaagtggttacttggggcccaagtcgacattctcccctttttgctactgcccttggctgggcctgaagagttttccgaggaagaaatggaccgtgagtgacttgggtggttgcctcagggctgtctggtgctagagggaagactacaagagggagatggagaggtgtgcaggtctggagtccctcagtccggcagcctttaaggagggggtcgttacagacacacacaaggctcacccaggcagagcagggcttgggtgttcagcacagggaccaatagtctcccaccctcactcctagagctgcctgttgacctgcagtacttgtcaccagacaagcaacgggagccggacgctgacatccggaagatgctcatcgaagccgtcatg

SEQ ID NO: 23369 - DNA, 1135 bp, Mus musculus
ctggctggggctagggagcactcagatgaggtcagactggcgccctgagttttgtggccgggctgaacctgtattgtccagcactgtaaccgtgatggatgttcacagctcaggacaggagctgctaacatgccctgcatctcttgctatccagggctgagttcttactgtctgctaagtcctggctcattagggcacttgaggcagggtacttgcttatgactagggagccctggtacaccatggtatctgactcccgcatgctggtgctggcctggttctgtgcagcaccctgggccacagtctaagcagaagttgagacctccaagagagatgcagcagtgccatctaaaccataggataaggccaccatcttcccattccgactgccctaggtctttcctgttcaggttatctggctttggtaccttagccagggacacttggggttggacagcctcagtttaccccactgctgtcatcactcctgcccagatacacagtaaagtatgaacaagacagcagacctgagccttgtgtgctcagaaacagctctcctacctgtgaagactcctgggctgagatctctttgcagcacgtagttgacaggggtcaccaaccatgaccatccttcaaagttctatgcagataggtaccaattgctcatatgtccctaagcctgccttcatagatgtggcagtggcctgggaaaaactgagcagttctcagttgggctataggccccagtccactcatcctgtgaccagcggtgggtggctttcaggtctgggctaggcccacactcagtcctcatctggcctgtggttggccctgcccacacagaggatgttccttgcaggtatactgttggcatctacccagtcaccacagcagctgttgtgccattttctcggtctgcagtcagagtagactaccctgaagcaactagatcttcccctggagcccaggattcccaggagttgccttctagctcttttcttgggggatgagcctatgcaggatagaacctgtagatgcccattaagggctgttaatagcatgtcaccaaaagatattcacaggaggtaaaaccattccatatctcccacctgtccctccaggctgcagccctcta

SEQ ID NO: 23370 - DNA, 1177 bp, Mus musculus
gccgggtgaggcgggcacatgtgttcggactggagtggggccgccagccgagcagtgcctttatagcagtcagctcctcccccgcgcctggcctccgcctccctttctggcctggaggagtttactcagagctcgtgcgtgcaccttttcccttttaatagccgtgcctagagggcccccgagcatctttctggttggagcgtttctggggtgctactagtgccccaagacaatggtgcccatcccacccattctacagggcagaagagaataaatcaagaatcaagaggctttctctcctggcatgcctaagttcacccagctgccctggccctgagtgcctggccacaccctgtctgactctccttccatgtgcacttgggtcttttgtgccaggccgtgtgtgtgtgtgtgtgtgtgtgtgtgtgtgtgtgtgtgtgtgtgtgtatgtgagagagagagagagagagagagagtgtgtgtgtgtgtgcactcatgggggtgactccagcagtagcagtctagaaatgggtgtgtgtggttggcatgacttgactccatggcctgtgccttgtgccagatcttacccctttgacccatcctgcttgggggccccacccccatccttgctgtatgcttcatggggcttctcaaagccagtgcacacgtggataagagctaagatcggcacctctccatccctccagttcggaagtggccctcaaggtggagagcgtacagcaagagcatggggcatttctgggctggtgtggacaggtgcagtgggacgaggcccaaggggtcttgctgaggggctgctggcactcatctgtgctagttatgtctgggcccctcctccctgtggctactgttgcaggaagtggccgcctgggcagcagtccccaggctgggaggagtgagggtggtggtggctggcaggggctgaaaccaggaatgtgtgtccaggaatgtggctgctctgcccactgaaatgggagggggaggatcagtggtgctggaagggggtccttgaccacctgccgagcagaacaggtttgtctccctgaggttggggtggggtcttcccatggttcctgccttgtaaactacccacttgtacctaaggcttttgccaggggagggagcccataggcgatgaggtcatccctgtctgtgg

SEQ ID NO: 23371 - DNA, 1051 bp, Mus musculus
tttggaggagcagtcagtgctcttaacgtctaagcaacctctctagcccttgtcaagctttttatttgctttgttttattttgcttagacagagtctttctacataaccctggcatccttgaaattcacaatatagactaggctggccttgaactgacagacatccacctgcctctgcctcccacccaagtactgggattaaaagtatgtgccaccatgcctagcagtgggtttgtcctccttatcctttcaaagaccccctcttttttttttttttttttcattctatatattcaacttttttggttttgtttggcctttcagatttttttctccatttcactaatttctaaactaagattaaataaacatttgaggtttggctttttttttttctggggctctaaaatgtatcattaagttacttatttgaggtgtatactaatgcctgacattttgttggttttgtggtatttgggttttttcctttctgtcttaactgctcttctagtctgctgtggggtattccttcctttggcctcacggatggcctcctttcccttgagggactccttgaagtgtgttctgtagctgtcactgactgtgagctcctttgcacagttttgtttcttcttcctctgtgccacatagggttgctggatagagcagtctggactgacttgaaaacttgaaatacatccttctagctgggttgtggtatacacctttaatcccagcataggtgggtctctatgaggtcaggtctagcctggtctacagagagttccaggacagccagggctacacagagaaaccctgtcttaaacccttctgctccccaccccctggccaacaaaacaaaacaaaaataactccttttatagttgctcaagtgaattaaatactaaatacagcctccattggtattctagagtagtgttttcatggaagctacacacatctccccatgtagtttacactattcctggatggtttatagtaactactgtgacataaatgctatgtggatactttgtgatgatttggatag

SEQ ID NO: 23372 - DNA, 1051 bp, Mus musculus
catggtgcctcacaaccatctgtaatggggggtctggtgccttcttctggtgtgtctgaagagagcaatggtgatgtgctcatatgcataaaatgaataaataaatctttaaaaagagaggaaaaaacatttcattgggggcttgcttacagttttagagagttagtctgtcatcatcaaggcagggagcatggtggcatgcatggtactagagtaattgaaagctgtgtcctggtgcagaaacagacagacagactgagtgtctgggtctggaataggctttttaaacttgaaagcctactcccaatggctatcttcagtctataacctcagtcggctcttctgtttttaccctcttgagtccccaggtgaattttttacctgatttgtgctttacaaatccagaatatcaacttggtgtttccttttcgcttcttattgctttactgagactctccattagtaggacatcatccttatacctcgtccttcaagtacagttcttcagatctttggccatactaaaagttagaatctgtattctcatgagtccaacatacggagtttattggttgctcttttctttcctattataagctgtagcttttctttttaattaaatttatctaaaataaatgggattcataatggttaattcataatccaactgtaaactcaagaccagggaaggcccttgcaggcagcaaagtcatatccatatcagtttaagtgtgcacatacatgtgtatagaagttagaggacaacttgtgaagtcgggtccctccttctcctgtgtgggtaccagggattgaacccaggctgtcgggcttggcagtggttgcctgctgagccatcacaccagtcccagccgaagctttgcttaaatgccttgttgtttttgactcagtgggaaagcgcattgtcccctcatctctcacttttgtcattgtgtcattgttggttcttgtgacttccctagactaattatgtcctaattgtgttcttggtggccattgcactttgtccttctgacttaataaagtcgagcgg

SEQ ID NO: 23373 - DNA, 1188 bp, Mus musculus
cctgatttcattattaacagaagatttcctccattctaaacgaaaaagataaaccattatatttaggacatttggaattttgttatatatatacacacacacacacacacacacacacacacacacacattatataaatgttcaatcttcatgtacacctcatgtcagaagagggcatcggatcccattactgatagttgtgagccaccatgtgttgatgggaattgaactcgggacctctgggaaagcagcagtgctcttaaccgctgagccatctctccagccccgattggtatatttctaattaataaatactatactaaggggctggtgagatggctcagtgggtaagagcacccgactgctcttccgaaggtccgaagttcaaatcccagcaaccacatggtggctcacaaccacccgtaatgagatctgatgccctcttctggtgcatctgaagacagctacagtgtacttacatataataaataaataaataaataaatctttggggggtgggtatgggggacctttgggatagcattgaaaatgtaaacgaggaaaatacctaattaaaaaaaatactatactaatcatccaggaagtgcacacctttaatctcagcactcagaaaggagtgacagacagatctccgtgaattccaggacaacttggtctacatagtaacttccagtctagctatgatacaaaaatcagaccacatctcaaacaaatacaaagtgaggggctggagagatggctcagcatttaagagcacttgttgctcctgcggtgtaactgggtttgattcccaactacatgatggctcacaatcacctgaaactccagttccaggggatctgacatcctcttctggcctcttcaagtcatgcatgcgcataatgcatggcatacatgcaggcaaactcttgcacataaataaaacaatcaataagacctattaaaaagatgctgatgggctggccagatggctcagccagtgagaacactgactgctcttccgaaggtcctgagttcaaatcccaacaaccacatggtggctcacaaccatccataatgagatctgatgccctcttctggagtgtctgaagacagctacagtgtacttacatataataaataaatctttaaaaaaaatcaagtgttttgtcctagatagggtcacta

SEQ ID NO: 23374 - DNA, 1212 bp, Mus musculus
tcctcgacgagatggaccagagccaccgcaaggagatgcagctctacaacagcatcttcagcctgctcagctttgagaagatcggctacacaggtgaggcatcccacagtcctctgcatgccacacggatgctgtttgggatgaaagggctggcagccaagggcaggggaggcagtaggctctgggcagtgggcacaggctgcgccgatgggcagggaggtacctcgggaaagaagataggttggagattttgcagaaggagggatgtacctgcatggctcctataaatgtccttcccacctgtcccatccccccaccccctctgcccaccaccctagcaagatgacccccccttcgctgtatggggctccacatatttggggtggtcaggtctaattaggaaattgggtatgttttgggcagtctgggtgtttgggccttacctttggagcacggagcaagaagagcattccatcaagtcagatcctgtctacagatgttcactgaaggctacagagcctcccgaggctggcaagaagctgtttggagacagggttccagaacaagctgagggtctgagctcaaactgtagaactgggaatggatgcccacaaatgagtaagctggaccaggccaggcccactggatctcatggctcccgggcatctgtcaccagctctgaacatgtcgggagcaagagccaggccacaccttgggccagagaacacgaagcacctgctgatactggggccactcagggaaactccattccctctactgctcagcctgcggcaggtggccagctcagagcgcccagggcaggcttggacagccagtcatgccatgctgcctagactagcccaaacaggcctgagatgcaaagggcccaggggcctgcagcagcagaaaactatggctcttggttaagagtagccttggttgagatctcacggcctgcggggtctgggtaggccaggccatgtggctacagcagaggctgggtgggaagccccgtccctgaaagaaggactggctgcctaagaacccacacatccacggcaggacatgccagccacaggactgcagaggcaggtctgcctgctaagcgacagccctacaaacagccgggcagaatccacatcacagtgcaacattgaggacttggcactccccttgggcaggaccagataccatatacccacctgctggctt

SEQ ID NO: 23375 - DNA, 1183 bp, Mus musculus
cacatgaatagccttttgaaagccaagaaaaaaatgcctacttcatcagtaaccatgatcccataaacagctgctggctgggtgcctctatcatgtcaagccaagagcctgttagtcttctctgataggtgaaaaagccaggttccaagcccagatgtggtcaggtcagttgccagacaggcctgctttagatgtacccagggccccatgacctgataagaccccgctcttcacaacaccagagctagcatgacatctgaagcagctctcagtgtatgctggataccagcaaggcttgggaaccatcaggtactcctcacctagcatccctctggacaactggtctggctggagccatcacgagtgggagggcacatgtgcgtgcaagcatcccacaggtctgtgagcttcacctccctttccttcttcgcagtgtactaacggtcacttgatgtgcgctggctgttttatccacctactagcagatgcccggctgaaggaggagcaggccacatgtcccaactgtcgttgtgagatcagtaagagcctctgctgccggaacctggctgtggagaaagctgtgagcgagctgccttcagagtgtggcttctgtctgcgtcagttccctcgctccctcctagagaggcaccagaaagaggaatgccaggacaggtaaccatggtgaaggtgtggccttgggatctggtcagccctcaccgtctgggccctggagagcacatatgcagcccagtgataaccgtgtaggccccaggtggtaagagcatacctttctacagaagacaattagttacagtttccactagttgctttctggatatgatgctagccctgtaggattctctgtggctattgagtaggcccttggaaggtccactacaccaggatcagttcaaaagctgtagaaagcttgtgtgagactcttgtttggcaacccagtcccaacatatagaaacagccacttgccgggcaaggttctggcaccacaagctgtcctggaatgaggctctgtgaagtctggtactatggtcagcaaccagctaacccccaggcagaacaccatgagtactgggcccaggaggcatattgactaccaactatagtgcttctctctcctcagtctcttatgtgctgctgacatgtgctctaagtggctggcctcaca

SEQ ID NO: 23376 - DNA, 1232 bp, Mus musculus
ggtgggtgggctctctggcgtcctcgctcgtccattggaggtggccgccgcgtcgtcttggccctcgcggcgcttccattggcttgcgcgaggcccacgtgatcaggagggcgagggggcggtggcgtggggggggggtccgcagcgaaaacaaagatggcggccgcgccggggttggtggccggggcggctgcgggccgacgggcgggccaggcccactgaggcagctgcacggtgggcaggctgcggggtcgccgcggcagtgagaagccggcaagggcgcgcggcgaccctaacttccagccggcgagcgcgccggcacccgcccgccgggccggccggccgtgatgtccggcgccgaggaggccggcgggggtggcccggctgcagggcccgcgggtgccgtgccggccggggtcggggtaggggccgggcctggggctgccgcggggccggctgcggcggctctgggcgaggcggcggggcccgggatcccggacgaggcggccctggccggcgctcggcagctgcaagaggcggccggcgaccccgacgcgccgcccaagaagcggctgcgggcggccgaggcagccgaggcggcggcggcggcagtggcagcgggcagtggaaagctggaggagcgtctctactcggtgctgtgctgcaccgtgtgcctggacctgcccaaggcttccgtgtaccaggtagggccgccggcccggcccggcgccgcgttgcctggaggcctgtggccggtggccgggaatccttcctatccaaacatccaccttccaggtctacgaaaccccgctcctgtctctcgaggctccttatcctttcttgctctgaatctcattttctgtgttcgatggtaccctttactccccagtctgaatttccattctcctccgtagatctcttcaccttctggttcctccagggtgcctccttgatagattccacattcttttcagctgaccatgtagagatctgtgaacaggtacccacccttttctactgctcatcaatactgtccctcacttctagacccctgggtgaagaaacttctttcctggagacagggctccaattctggcagccacacccccaaaagtgtccttccatatctgaacaactaagtaaatcttcttttgtgccctggggagtcagtcctgtgtccttctgaagacctggaagaaaggagggcctctcatcccttctcagttctgatc

SEQ ID NO: 23377 - DNA, 1378 bp, Mus musculus
ggtaatcaggccttctcccgtcaccccagatcaaggctcctggcccctccacttacttgaggattccgcagattccaggggagtgcccaggagggggagcagagcctccttgtggggacagctacccacttcttacttgcccatctatacgcccaatgtagtaatgcccttggccacactaccgaccacctcttgtccccagtgcccatcttctgccagcccagcttactggagcgtaggcactgaatcccaagggtcccaggacctgctctgtgatctagactccctcttccagggagtaccacccaacaagagtatctatgatgtgtgggtcagccatcctagggacctggcagctcctgccccaggctggctcctttcctggtacagcatgtaatattctagggcagaaagggctgcttctctcttccacccatgaatatcattttgatgaaccagagctaggagcatgtccgcagcgacagctttaaaacaccaggcacagccttgctgaaaacccacagctttaattaggttactccagaaagggttgtctctgctagatagggaggtctggccaatcgtgccaggagcggagctcagcctgtagagtgcctcctcttgatcctaccttttcaggccctcaagccatccatctatccatccctctgtcaccatgccttcctggctccaggctggggggagggagagccaaaagtgggtccgatctgaagtcttgccctctctcaaatgcctgggtagagggtagcacctttcagggaaagggttaagaaatgaaagactggaacggacataattttggtgtaatggaagtaggggagcgattaatagtaaaggaatttacaacattttaattccaagtctggtattgggggcagggtggcgacttgggaaaccacttggtctggggtctggttcctgcagctctggccccctgctgtgtgctgtgataagggcaaatggcgataaggaaggggggagaactaagggcctgtggctcagctgggggtggaagggtggaggcgatcctttctcaaagcataacattctctggccagatctagaagaggaagggggacactgtagggctctgttgggggcagttagggccccagagtttttgttttttaaaggttgacctgggaagtggggtataggattcacagctgcctctgccagcagaggtacattctcaagcccagtaccaggggcgttgacccagatctagggaggcgggtcccctggaggttcaagagtcaagccagaacagctgttagggctggtactgggagggcttccgggagatggtgtaggggtgcaggaagttccagtgagtggggtgtcagtactgagagaa

SEQ ID NO: 23378 - DNA, 1159 bp, Mus musculus
tcttaaatctctttgttctccttcccaatgtagccatattgaatacatcatttttttgctttttactttttttttttttttttttggtttctctgtgtagccctggctgtcctggatctcactctgtagaccaggatggccttgaactcagaaatccgcctgcctctgcctcccaagtgctgtcattaaaggcctgcgccaccaccacccagctgctttttactcttaatttggctcttttagttgctttattgagtgcagagtgcaggcaagatggcttagaagatgaaggtgcttgctgcccagcctgatgacctgagtggtatctctgagacctatgtaagctatactcttacttccatgtgtgcctattatatagcgctggctggcccagacctcactatggctgtgtagactagccttgccttgagctcacagagatccacctgcctagagaggagactcttgataatgcacagcatacaagtaagatgcagttcaccccagtaattgactgtttgccagtgggaaacaatggagtctggaatggactcaccatggctgtgggagcatcacaacaccctgagtggccaaggtcggggtgcagagatggacagagtgctttgaagtctattgtcaacattgagccaggtggcagctcaagcctgtaattctgtcactgagcagggtcagacaggaagattcctgtaaacttgagctcagctgggttccatagttagaggcctgagccttagtgtagaggccctgtctcaaaatattgggggtggggtggaagctgggctaggggtgcatgcctttaattccaggactctggaggcagaggcaggcagacctttgtgaatttgaggccagtctgggctacaaagtgagaccttgtctcaaacaagaacaaacaaacaaaaatctgattattctgaagcctttgtgtcagggatgtgagaaatgctcagttgtctggctctggctctgttccatgactgtggtcacactgccagccagggctgtgtcatctggaggctcagctgcggttgaggactagcttcccagagggtttgttcttatgtctgtgaggtgggggctttgtgcctccactgggtctcccctaggtctagaggtgtctgtaggtcagttgacccct

SEQ ID NO: 23379 - DNA, 1224 bp, Mus musculus
agggattcagggctgagtggtctgcctgcagctgcacatcgccgctgctaatgggttcagtgaggtggctaccctgctgctggagcaaggcgccagcctgagcgctaaggaccatgatggctgggagcctctgcatgctgcggcttactggggccaggtgagtgtgcacaggagcagggagagggtaggttccgggctctcactagagcccgcagccaagcagctactgctggctgcctgcaggtacacctggtagaattgcttgtggcacatggggctgatctgaatggaaaatctctggtggacgagacacccctcggtgagtgtggggttgcctacatctggtggaagggagtggccatgaacgtgcccatgacacctctgtccatctctcctcagatgtatgtggtgatgaggaggtgagagccaaactgctggagctcaagcacaagcaagatgcactcctgcgggcccagggccgccagcgctccctgctgcgccgccgtacctctagtgcaggcagccgtgggtaagcctcctgctgtggtcactgtccgcttgttgagacctaggctttgcccctagggacatcagctggcggtgatatcccagtaggatttgtgggcattggttgtaagatgggtaatgacgtctcaactttctctctcccaggaaggtggtgagacgagtgagcctgacacatcgcaccaacctgtaccgcaaggagcatgcccaagaggccattgtgtggcagcagccgccacccaccagtccagaacctctagaggatgaggacaggcagacagacgctgagctccggctgcagcccccggaggtgagcacgcagcctctgtactgtcccaggtgtggagcagtcctggtgtgtgatctgattatttagtgcctagtcctctatccgcactagccctctatggaggcagtaggcccagtgatcccgtgggcaggtatctgctgctgacatggccccccactcttatgtctgtctgtctactaccacttcacacaaacttgaagcccaaggctggtgtaggcggaaacaagcacctcctgatggcttctgggttcctggctctgttcacaggacgatggccctgaggtggccagaccacacaatggccaagtaggggccccccccgggagacacctgtactccaagcgtctagatcggagtgtctcctatcatctgagtcctgaggagaacag

SEQ ID NO: 23380 - DNA, 1197 bp, Mus musculus
gcggcatacagacgcgcacgctcggatccttggagaaaacaaaaagcccggaacatcaactgacccgggcgagcctggagccacaggccgagaccggcctcgcccgcccctaggtctcccttcgcttgcggcccatccccgcgcgccggcggcacctcccgagaatccgcctcagccgtggtcttcaagcgccagtccccgtcgaacctgccgtccaagtgccctgaccactaacggctgcttgactctcagctcgactcgaatcccagccccgcggcccccgctcatccgcctccccgactaccaaggcctgcaacccttcctcgcccagcaagcctcgcccagctccgcgcagcgccggggcgcgctgtgatgacgcaacaactcataggcccgccccctccccggggggctcagagcatctgcagcaccgcccggcggccgctctcattggctaaggacaggactttacggtggcggcgggagatttcccctaaactcacgttcgggctgccatggagcggctcgcgaccgttcgcgcgcggctacaggagtgggaacgcgcttttgcacggctgcacgggcgacggccagcgaaggtgaggtggagttagggtccggacaggggcggcaagtgggggatcctggcgcagcctgttgctgacaagcttctctcctagggggatgtggaggcggcacctgaagagacccgcggtgagcactgggctggtggaccagggacagggcgaatgttagtgggtatgcccctgaccgccgacttctgccttcccagcgctctaccgtgagtaccgtaacctaaagcaggcggtgcgtcaggctgacgacagacatcgtgtcctagagcaatcacttgccgaggcagctgaggaggtatcagtgaatcccactctcagcggtctgtggtccaaatggcaggaaccgagagcattttgcagccgtgcctccatggagcacagaagttgggtggccaggtcctcccatgggggttaggggaagctttagaggcacttctgtgcccatgccatcttttaaactggtctaggttgctactatctactgcaggcacaggagccaagctgctggggtccccacctgagtcgagctgcaacgcagaatacgcagtctatgccaaaacagagcctactgagttctgtacaagactatgggaagaggctc

SEQ ID NO: 23381 - DNA, 1241 bp, Mus musculus
aattaagactccccctcctgcaggtggctgtctgcccagtccagcaccatgcacacacttgtgttcctcagcacgcgtcaggtccttcagtgccagccagctgcatgccaggccctgcccctgctgccccgggaactcttccctctgctcttcaaggtggccttcatggacaaaaagacgcttgtgctgcgtgagctggtgcacacgtggccctttcccctgctcagcttccagcagctgctgcaggagtgtgcccactgcagtcgagccctgctgcaggagcggctcagcacagaaagcatgcaggctgtgatcctggggctgacagctcggattcacactcaagaaacagaggctggcacgcagcccttgtgcaggtatgcatttatctagggggcccataggctaggggtacaaggaagatcccctgagttgtggttctgagatcagaaagagctccctccatatggggatatctgttgcttctgtacaaagtagctgggagggatgctggcctttctccttcactccctccctctgcccatccctgctcccaggaagcatgcattgcgggttctggacatgacgggtctcctggatgatggtgtggagcaggatcctgaaaccatgagcatgtgggactgtacagccgctgtagccagaacgtgcattgcccagcagcagggtgggactgccgagccagggctgtcaccagtccccgtggaaatccgagtagaccttcgggtaaaccgggcctcgtacacattccttcgtgaggccctccaaagcagtgtggccagcccgctgcggctgtgctgccgggacctgcgggctgaggatctacccatgcgtaacactgtggccctgctacagcttttagatgcaggctgtctgcgccggatagacctgcgcttcaataacctgggcttgcgtggcctgtctgtcattatcccacatgtggcccgctttcagcacttagctagcctgaggctgcactacgtgcatggggactcaagacagccttccgtggacggggaggacaactttcgctactttctggcccagatgggccggtttatgtgtcttcgggagctcagcatggggtcttctctcctttcaggcaggctggatcaactgctcaggtgagtgggctctcccgctgctctccctcttttatgtgaggccattcttggcctacctgcccgtgacccttgtgtaacctctttgtccctgcagcaccc

SEQ ID NO: 23382 - DNA, 3016 bp, Mus musculus
agcctcctctctcccgcccttcctccgtaagactcttgagtcggtttcttcagagtctgcctctccccaggacgacaagtttcagcaattgccttggttcagcaatttggtagacacacaggacacctgcatgtgactacaagacccgacaggcattgcgctggggaaggggcggagttatggccccgccccggaagataaggctgcgttgacccgtctatttcctctttcggccttgcttgccggcaggtaagttgtgctctgtccgctgcgggttttgaaattatccaccgccatccgccgccgttaactacttggcggtctgtcatgcggcctggcccactcgtccaggatcagaagggagggatggcgttgctttcggccttgggggctggcaggaggctggggatttttttggacgctgaactcgaaccatttccagactcgccgccatgggccgtgtgatccgagggcagaggaaaggcgcgggttctgttttccgtgcgcacgtgaagcaccgtaagggcgccgcgcgcctacgtgctgtggacttcgcggagcgacacggctacattaaaggcatcgtaaaggtaggagggcaccggcgggagttaagcaggcggggaaccgggcgtctcgagcaggccttagaatacaatacaccaccctgacccgtaggacatcattcatgaccctggccgcggcgctcccctcgccaaagtcgtctttcgggatccctaccgattcaagaagcggacagagctgttcatcgcagcggaggggatccacactggacagttcgtgtactgcggcaagaagggtgagcctccaggcggggaaggaaggaagggttgggcccgggactttgggtgctgagctgagcttcgtgggttgggatcggtgtgggtttggcatggcttttagcgttaacagtcgttttgccccctctctccacagcccagctgaatatcggcaatgttttgcccgtgggcaccatgcctgagggtacgatcgtgtgttgtctggaggagaaacctggggacaggggcaagctggcccgagcctccgggaactacgccacagtcatctcccacaacccagagaccaagaagactcgagtgaagctgccttcggggtccaagaaggtcatttcctctgccaacagagccgttgttggtgagtgcgggagggcagtggggccttgaagacgcgggtggtcggcatatgaactgccagctgctgggcctaggccatagaaccacattgcttattttcttggtcatgggagaagactaacagaatgcaactggggatttagttgtagagtgctagaatacctacttcgtaaacaactaactgattcctgtcctggggatttgattcttttctggtctctgggcactgtataaatgtgtatggatacagacatgtaggtaaagatgcctgtgtatacataaaattaggttaaaaaaagattacaccgcttgacacttttgtgcactgtgacctaggaattctgatcctgcacttgagtttagttggttcattttagaaaagataggaccagtagtggctgttaaaagatgttcaagtcagtgaaaaggggccatgacttatctcttgtttagttacttggaaacatcttaggatctgctaacctcatccttgcataggataagttctgagggcacgtggtcaaagcatgctgtgtttggtaggtgggtttgcccatttgtgggaggtgttttcagaggttgaaggacctgtcttgaatatcaggcactgaatattgaggtgcaccccatggaaacttgggctgagtcaacagtttgctttaatacaggcatggtccttgcctcacctgtcaaagtgtcagtttgcagagggtaaggggtttcctaggtagagcttgctggacttctgtggggttgtagatttctgccatagactaatggtgaatggtgcatgtctcagaggtgttgtgtcacttttcaggtgttgtggctggtgggggcagaattgacaagcctatcttaaaggctggccgtgcctaccacaagtacaaggcaaagaggaactgctggccacgtgtgcggggtgtggccatgaatgtaagtaaccaagaactgagtgagtgggcttttcttgttgctgtgctgggaggatctgcagcagggaggtcctgggctgtcggctcttcccgtgttccctacgtaggtgagatgacccttacactaacctaacttcattctctttttagcctgtggagcatccctttggaggtggtaaccaccagcacattggcaaaccctccaccatccgaagagatgcccctgctgggcgcaaagtgggtctcattgctgcccgccggactggacggctgcgtggaaccaaaactgtacaggagaaggagaactagagttcaggagctaataaagtacgtcctttggctaatccggcgtgtgtgagcctcttttgtgagggatccctggaagtgaaagatgcttccaccctacaagggagcatggcatgctgcgcctgggatttgggtagatgacttgagaccaggtctctacataatccttgactgtctggaactcactgaagatcaggctggggttgtcatcctgcccagctgggaagctcagtttacaatatgcggtactgacgtaaattatgtggaccacagttgctggggttagtggtgacagtacagtgagccttggtctccactcagcccatacaaatgggtctgtgtaattgatacagaattttccccccattccttctcaacgtgcagtagaagctagtctccaactcctaattacaggctgtcttgggcactagtgtgtgagtgtagaaacttctttttggaatgtccaagtactttttagttggttgtatcttttgcctagagaatattagacatccaatgtggcccccaccccctgggagtgatgacgactgcagctgttacacattaagatttgttccatgcagaatagaggtgcttctg

SEQ ID NO: 23383 - DNA, 3640 bp, Mus musculus
caagccaaagtttggtttgttgttgctattaggacagttttcattgtatgtacataaatattttagtaaggggaagggatgggctggggccttttggagttctagagaatgggggcagaggggtttttctttctcttgtttctttttgagaaaatttactggctaaaggaacagacattttgggtctttgtttaataagggccattctcacagaaaggcaagcccttcacctagtggagacgaggccagtctctcaacagttgtatccacagatggtaggaagggagagagagttgaagaaggcttcttctttcctagacaggaaagggtggccacgcagggtgaagaggacagtcccatggcccatgctgcagggcctgaggggccttcatgcacttcagttcagctggttctggctgaggcctccaaggccagtctgtttgccagtgcatctctgctgcgtggacaaggacactctccgatgccacttcctcaggcccttttccaaggaagactagatggagttggctttttatgcaaaggtcgttggatttcagggtgagcactgagagctggctcccccaagtgtctggatttcactatgttggcctcatggttgatcctcaaggccactgtgctggcttgttggactgatttaggaagcaggctagaggagacgggcattttatgactctgttagaggattctgggtgatgatttcaaaaagatggctgacgctgaatcgcagtgtgagaagggtgtttgcagttttgcaggcctctgtggcctgggctttctatgctgcgaatattactagaagctggattcctttaaggagacttgtagtgaaaatgtttgtctggatgttcctctttcagcccggagagctgccttaggtcttttctagaatttctgtgttacttagttcaacctcagcccagaagcaccatgctccttgtcattttaaggctctcaggtttccaggaacctccaccaccgccaccctgcagcagccgctgtctgaactgagccgtgtttccttcccttggaaactgcctggcgcttggctcttagtttaaggagagcttgtggcttttcctcaagcatggactcctcggggctgaactgtttggtttaggctgtgctttctttgaggcacagcgggcaggtccgcgaccacctccgtcctgtacctagtcatgtagcttccagacactgagatgagaaggatgtgagcctatgcaagaagagcatagtgcgcccctccctgcgccaggcgaacaaggccaatcaagggcagtctggaactcgggtgtgccaggaagggggggagggggcgggaagctgcctggccaaccttcccctctggcccagccagttctccactactcaaacctctagcatggcaatgtttgcaaaattgcagacttttctcccagatattaggaggaaagggactttggggggtggggaaggggtcttggtgtttaaagcataagttacctgtttgcactgttttcaaataggaaacaatagtgggcacggtgaacatctaatgtaaacgtgtgttttcttttgtcatgctcttgagaatgtctgatcatttgtagtatacaccagtgacacttgattctctgtttcataaaacactatatttttggaaatgttgctgtccggaagcctcttcccacccatcccctctcctgtgtacctcctttctccttgcttcctcatcagccaggcagttgccatccctgggctagagcgggaaacagggccccatcccaagcaggctctgggtgtcctaagccagcatgtgccctctagattactgagtgcaggacagtcccttggcaactttcctttcgaaaggctcaccaactaccacagattgccaaactcttcagcgaggcaatagaagtgagtcagggggcgcgggtccctgaagtattgtggttggctgtggaagccatgttcttatgcaagttaccgaaactgtagccagttacagtgtactcaggaaaaaacggtagatgagttcagccatggcggtgctggctggcagggattggtaactgagaactgcccatcagccaaaactcacccttgcctttgcagagacctcccacctcgggggcagccctctgtacttgccagcgctgggtggggctgctttcaccctggcaggcaaaaagggaacagcgatgctctttccttccctccctcttccggttaccaatgccagattcccaggggcacgcgagtttttgagtttttcagaaaatgcttttggtttgtcttttccggggactgacgcgctttagtcgctgtctgtccccatcaggactcctagcttaggtggtttcttgtattttctgttaacagtatttcttgtgtgcgtgcttgttgggcagcccgtttggctgcgttatatagcgagtgatgagctgatcctttcccctaagagacatgacttccctccgtcagcattcagcctgtgaatagctagagccaccctggggcggacacgtgcaagttagagctgcagagtgaactgaggctctcaggttttgagtctctctcttttcaaggctcaaaagtaccacagaacctcgctcttctccacacccctgtggcagggagtggcctgcctggcacatgtggcttccccatgcaggacaggcaccactgggacatggggggcacatgcggatgcttgtccagctgaccaccccgctgtgtctccttccctcccaccatcctctcccagaatcacctcctagggcacccgagctgcttgcccagggtcctgtttccctgctaactccagagaagcacccagggcgttgtgacagtctctaactccctccctccctccctccctcttcctccttaagaatcatattgtatagtagctttcagaccatacagtattcattgggttactcctattatcaagtagctggaattgtgaaggttgagtagttagatctttagcttttattcattattttttgtattactctccatgtgtataaattattgatcatgttgctggcttttataaactcttagcaaaggaggggccctgcctcagcctttgcaaatggtaatgaagcactgtttttaaataaaagagagaaacaccacccctggcgttttggctccttctttcttgcctgaactccaggctctaacctggaaagaggaagagaacccatagcacttcttcctgaaaggcttctgggtggccaggagctaggagtgaggtggctcctccagctgctctgctggcagcaggctgccatccgtctgaggtgagcttcaccctccagctgcagcgccactttcagggcccctggcaccatttgccagctccactgaaccgctgaacactcctgaggtaagtgcctgcttccctggcttctgctgcctgtctcctgatccccatcaccgtggggaatgcctctgctgttagactggccgtcaaccaccactccctggtcgtttctctgccgatatcccagatacctaaagtttccccgatcactgcctttctaagtcacaggaagcatggagatcctcccagactcccaagtggatttctgctgccagatatgtaaccttggcgtcttccttc

SEQ ID NO: 23384 - DNA, 1098 bp, Mus musculus
aaaactgtggttaaaaaaaaaaaaagatagtgcatttccacgtctgtatgtccacacttagcttattctgttggtcacagaggagacagtcgaggaggaaggagctgatacatgtatttgatcagaagccagcagacagaattaccaaagtggatctggtgctgatggctggggggataagcagagtggaggccagctctgcagcagtgtgccctcctggcctggctgtggctggaggctctgactggctgtggctggaatccacatgcctttaggtaggagtttgtgcttgcaaaacaggagaatttaaaagattcttttctctcctcttccctcctgccttcatattctttttacaatcatttacaggcacagcctgagagtgtttggcatggtttttggagttacagtgctggtatttccaagcacgctctcagactgtggatgagaaacacctcagtacaacagtgatcttggagtgagctccagaataggaaaacacttgtttcttttcttttcagaaacctcagcattcctgctgggctgctgcccctttaattgagccactgtgcaactcctctgttcttttattaacatgctgctcccatgtcctcaagattcagggatttgggatccaggaaccgaagaatgaatagtcagtggccagatttccccccaggtatctgggcacagtatgaggattaaaagtacaaattgttcagagccattaaagagtgtgtagaagagaaaaggggggtgttcaatcgatatcccttcgttttcttgcagcacgaagtcagtacagagtaagaaaggcatcagaaagcctctgctggggcagggtaaggaaccaagcccctaggctggctgtcctaccagtgtactgatgaggaccagtaagggcaggcagaggcagtttgtcctcactccaaagccataggaatttccatcttccagagcctctgtgagtctccagcccttgtggtcactgcatccagcttcacagtgtcctctagagtcacagccaagcacctggacccctcggggaacgttaagaagacaggccgtggactttaagccttttaaccttggaaggag

SEQ ID NO: 23385 - DNA, 1188 bp, Mus musculus
aaagatggtgagcagtgctctctgcaccctcggctcatcctccctagaacttcctgtggagttcactgtactccacaaagcactgatggcctcctgtttgactgttgccttttgctttgcctgtcctttgaattatgcaaaggataataggctgtgacatagtatttcttaaattactccgtgtgagttgattgtccttttattcttttctctataaaaacagctgtgtctaaaaattctgagcagctgaaacaaagatagtctttgccttttaaaaatgtgtaaatcaaatatatgagaatactcctgtccctaaaaaagagctcatttccccaacggggatctagacaagtgagtgtgaggtacacatagctttctggagtctcaggtttcactgggagcagcaggatgttaacataatcatgaggtaacctagatagatgatgatttattttagattagcccaagtttattcctgttatcttacagctatctgtaatacccatcttccttaagatgtttcattgaaataataaactacagtattactctccttgtaggttctttaaagtatctttttagaggaaaagcaggttcttaatgagaagtagaagtcaaaagcaaacgtaccagagggtgcccacccgtgagtctgatttttattcccaccctggcgtctcacagactcttcagaactcttgagtgatggctgccctttaggcccaggatccttgtgctctagttgtttgtgctagcagcatcccatgcccgaggaccttctcctgagttcgtcccattgttgagcgtggggcttcccactctcttcactcactgtcaccagctaccaagccgtctctgtggtggctgccgtatgtgttgacttgtgcccgagctgttctccttccctctctcaggtggatccctcaggacaggcccgagtgtggaagacgcacactcttctcctcagacacaagagccattgccttggcttttgattgcacatgaagagaaattattacttccaaacatggtcaaaagattctctttgaagaatgctaagtgggcctatatgattgtcagtaaaactgatagataatgatggcatgaaatgttttctactgtacttaaaactgaattaataatgtgtatgtccagaaggcttcatttatttttcttgttaccacttta

SEQ ID NO: 23386 - DNA, 1867 bp, Mus musculus
tagactgtcatcagtatgttttcctacattaataagtaatatcattgcagtacttttttttggcagcagcataataaactctaaaaccaataagagtagaatagagtgttaaaagttctgccttactggtttccttgacagtctgaggtgataaagctgaagagtcagtgacctctactaccaaccacaaaggatgctttgttttcaaaacagagaggtctcaaaatagaaggctctcctcagagcctgagacaagaagagctatttttacatctccatgtgggcttcagcaaacgagagggccactgcctgcgccccattttgctaatatactaaaaataaacagaaaacccaaattttgtttgtagactagaagcattttgaacatcaatgacacctcgggccttttctcctttaaaaggacagttaccagtgtttgcttgcagtcttctgtttgacagttactacagtgaagcagaaatacactaagatcatcttaggagatcactgtaggttttcattgttccttgtatttacttatttctttagcagacagaaggtggagcacagacagacggacaacagtcacagacacaaagtagtgaaaattcagagagtaaatctacgcccaagcgactacatgtctctaatattcccttccgcttccgagaccctgacctccggcagatgtttggggtaagtctcatttttttttttatggatttaattaaaacaatttaacccatcagaggtattactagtcattagtaaaaccgtagggaagttaagagagagccttgagtcactgttgttgtttgtctggaaacctttcctggtccccttacctgccgcagacatttgcatttctgattgtcacatggacacacaagctgcttgcggttgttgtctaggactgaggtggttcttgtaagatgtgacatccactgaggtggccaccttcttcacacaccaaccttaataaacatgtcggtaatagtcttggtttcactagaagagcaaacatccagtcttttatagtgtgattcctaaacctgtgggtaccttggaaatcctctgtggcgcctaaagaatactgcacagcccaggtgtgctgtggccaggtgtgctgtggccaggtgtgctgtggccaggtgtgctgtggccaggtgtgctgtggccaggtgtgctgtggctggcccagagtgcagtgtgaacctgctcactgtacgccatcctcacatgattctgtgtggctctcagtagagtgacatgctcattctcctgacgtcagcacctcccaccctcactgtcctccttatgtctctggttcaggatgactagtgccactctctacctctgtactgtctcccagcacgtgaagcgtgggtaattcaggtctgcaggaggctcgtttaaatgaagcagatatggaatgggattttaaagagcccgggatcaaatcctggctgcttaggaccttaggagattcatgtcatctctttttaaaccttgatttgaagtttatatgagattaaatttatatttaaaaatctctaacttgagtgtttagaagaaaatgaagtagcacctgtagaggcaggtgattctcagggctttgttttccattccttcccctcagtagtgtcaaggccagcatgtaagatatgctgtggaacactggttccctacccatcagctccttcagctgttagcaccctcccaaatcaccagcaaacacaaaactctaatagcacgaattcatgctgttgaaggtgagtagctgctaattttttctaagtctgtttgttgctgtcttttattttagcgaataacttgacctgggacaagaaatagtcaatagttccct

SEQ ID NO: 23387 - DNA, 1196 bp, Mus musculus
tgtctagttgcatcactcatgtttgaactgattgtgtccaacactagaatcaggtgctggttgttcattaccagccctgcccggccctgcctcttgcagcaatctttgtgagtggtgatcttgcttctaggagaatgacagagagattccctgaaggcaaatacagagagtgtatgctgtacactccagtttagacacttgggctgggaactccctgagggggggggaggagggagggtgagagggaggagagaacaacagaacagtctgcggagaggagggaggaggggggaaaactggtagggatttttttaggggatttttttaaactcaagtgatttgaggggttcgccccacttgatcccttgcccctcattctactgtcccttttcctctggctcactgaagtgcctttttgtagtccaggctcaacgccagctgaatctgcagcggctctgccatgatgtacctctgggtgagtagagtgctgtggtgaggctcgcacttgcacatataaggagtggaaagctggggctctgctcctgcacagaggctcgagcacaggccccggcccttccttacacaggtgagggccttccagcctagcacatcactgtgtcggtgtttgctttctgaatgttgtttatcttgttagacttcatgcaagggctgagctcccagagcagtgctgtcccctgggcttagtaggtttggagaaggcaagtgggcaggtgacatgagctagaggcttcaggagtagcagtccctcttgagggtcgggatgggcttgtggtatgtatttcgaacactgaccttgataatatggccacatctgtagagagcaccagtagatggcacagtccttaattaggaataagcttttgtaagtttttgtccaatagctaatgtccttcacagttgtcttgtgaagtaggtcattgttgttattaaacctatatgagggaagtaattaagccacaacgtgacttgctcatagttagaaataaggcctatggcaactgggataataattaataaccagccattataaagcattttatatttgtaaatcaagaacttaatatgtaccttactttactttaatttactggtaattgtggcattgtaatttatgggtaaggagaatgttctatagttagagaagtttataaatggtgaaatataaaatctttgag

SEQ ID NO: 23388 - DNA, 1191 bp, Mus musculus
atgcagggtaactcaagggaaatcccactgagctgtcagtcttccagttttcagcaagtaagggtgttgtagagacggtcagatcccctttcttatctaaaaagctttccttgatgatgatgtgggtgttggtcgtgggtagcatgggtattctgtcagaactgctattttaagctgagaggaaataaggtaagaagagactcattactttgagcttttattaaaagtcaaattcagctggaccttcaatccagtatctctagcttacttttttttcttttttctttttgaaggtaggatctccttttttgtagccctggctggcctcaacctcttatctgtgaacccggcctctgcctctaaattgctaggattgaaagtgtacatgccatcgtgcccagccatctagctttctctgttgtagtgaggtttattgtctccaggtgaaaatgaatacacacacacacacacacacacacacacatagatatttgcctcaggtacttcttaaatctcagtacctgattttttaggtatgttcttgacaagttatgttgcctctccagatgtagacactttaactcagattttcgcagtcacaggaagcttacaaaaactagtagtttcttacaaattttgaaaatccaaaatgtgacccatcagacttcctggtactgttggaaggaagcagcagtcacgatacaggcccatggtagtgtcgtagacgacatccacaagccattttggatacctttctttcccagagtcaagcctgcgagagatttcttgagaccttccctggatcaataaagagactgataacatttggagtacagacacacagtctgtgtggatttttaggtagccacatagtgtggaatcattatgtccttgtgtggtggtacctagggtcccacacatgttacccaagcagttttactgtgctgtgtccccaagtccttaacgagagtcttccgtggctgtaaccacaggcttccttatttgactctggtgattgggaagactttgccctgctctttgtttcttttgttttcaggcagagaatgtgagcatgcatgggcatgagcacaggcgcttccctcagttcgcttggctgtggccttcctgtttgtgaagagcgacacagaagagtttgccttgttactgtccacctaattggaaagttacaat

SEQ ID NO: 23389 - DNA, 1176 bp, Mus musculus
ctccatgggacagttagacagtttatagtgccagcctgcatatttcatggtgaaagatttcaggtttgttaaaccctcataacagaatgtagatttaaaaaaacactctgaaaagtactccttaaagaaggctttggggagcatgagtcacaggactgcaataagtattgatcattgtacacaacacagatgtctcatggtactcaggggctcctttccctgcctcatacacaggtcccagattcccttatttaaatgcacagtggttaatgttaacctgggtatcttctatatctcttcagtggtctctagatcacttaatgatttctagtacattgtcatgcagtataaatagtgactacactatattgtttaggaaataataacagaaaatctatatatcttaatagtagatctttttttattgttgttttggttttgtttccctcagatatttccagttgatgcaggtgtggaacctgtgactatggaagactaacttaactaatgaacagtgtgaactaaaattgccttccaacacctgtgtcactcctgtagcctgcagcctcctggggtgtagggctgtttcttagtcggctttcttctgagtctagtcttggtctattcaacccttaagtgattctgttatataagaggcttttaaactgtgaacaaaggatggagttctttctgcagcttacttgtaaacttagctcttctggtcttggtgctgtatgtctctgatagttgctgggtccagggagtttagacagcacctcttcctttcacactacccacctgccttgtttgctggtctctaaccatgatggcgactggtacagctttactgacaggcaggcagcgtctgttctcccacaatacactaactctctatgatttggaggggataagagacggccttgaagtgaaggtttccacctgtgcttctgttttattaagtatgtggaattggagggtttcagtgggtgctgggagaaatgcctatgcacattttaaagggttaaagatagtgaagagaaagttaagtatcagctaatgaacggcttccaaatgtcaagacacacatttcccaagctgagtcccaggtttgcacactctaccaggattcccgttttttagtagaaaacgtcaataaaaatggacctactggagaaa

SEQ ID NO: 23390 - DNA, 1207 bp, Mus musculus
tgtgttcagaaatacagaggctttctttgcttcttgttcttggcagcagattgtctgttcctttgaacttatgtgggctggaagagaatggaatggaattggcccacctgcatggagggagagggtagcattagggatgtgggtgtttaaaagctcttggcatgcttggctctaagtgcgatggctatttgtgttgccattattgtagctgctatgcctacattccctttggtgtacctctcacagggataattgtagggccctaacttatatctcttcctgctgccagataaaatggatgctgaagtgttatgtgctgcacaatatacagtgaactctgtgggctgtctgctgctgctccctaatcttctgggactcctgaacagaagagaaaaatgttgcatttttacagcccacattgttgaaaacataaaaacaaatatattagattttactgatggatctgcctccaaatggagccaaattaactttggtgaatgtttgggatttaaaagtgttaaataggaaggaattgaatattgaggggagagatttgttagtggaatccaagcagcctgtcaggtctgagaataactctgaggaggatagagcaagaggatggatattccagtcaggctgtctctgtctctgtctgtctgtctttctttctgtctgtctgtctctgtcactgtttctccctccctctccttccctcttcctctctctctcttcctctctctctctctctctctctctctctcctctctctctctcctctctctctctcctctctcctctctcctctctcctctcctctctctcctctcctctctctcctcctctcctctctcctctctctcctctctcctcctctcctctctctcctctctctctctctgtgtaggtgggtgtatgtgtgtgcatgcatatggaggatcgaggtcagccttgagtattgtttctcaggggctgtccacattgccttttttagccgtagattctcattggcctggaggctaggctgactggccagtaagctccaggctccacctgccacagtacaagtgtggaggtcagatgataaattgcaggggttggtccctcctgctaaatgaatcttgaggattaaactccggtccgttaggcttggtagcaggtctctcacccactgagccatccttgatatttttgaagaatctggatttga

SEQ ID NO: 23391 - DNA, 1139 bp, Mus musculus
cctgcctgtcctagaattcactctgtagaccaggctgacctcgaactcagaaatccggctgcctctgcctcccaagtgctgggattaaaggtgtgcgcaaccaccgcacagtcaaatgtccataggtatgtggggttatttctgggtcttcgattcaattctgttgatcaatgtatctgtttctataccaatatgggtgcggttttaaacttcagttcataccttccatgtagcagaatcttagtggttgttgaatgaatcacttaaaggtagtgtttgaagggtttttgaaagacagatagtttggggacaaggtaaagctattccagagaggagttagcatgcacaggagaacacatgaaaatgcatggtgtattcttgtgccttgttggggttcggtttgtacatgtaccacaagaagctatttttgatacagaaagaccatctgggttcttggtttaaaaaaaagaaaaagaaaaactagatgtttgagtaaaaaaacctcccttgcagccctttctccttctgtgttctgttagtttggtgaaatgctggccgtttgttgtccccgagctttggaactctacagacagacttgtctgagtgcagcaaggcagtgtgtccagtgggcctcccttctgtctggagctgcactgccttagtgcagtagtctagcagtgtacacgtgcagaacaagtagtgatgtgacgagtatgtgatgaccaaatgatgggcttctgaggtgtcagggaagggattctgtctttgctggctgtgcattagaacctccttaggaccttaaaaactccaggccttaggctagctatacctcaccagaccaatacaaccaggacggtttgcgtgggcttaggaatatgcattttcaaaacttggctgggttttattgtgccattagcttatgaggccccaaacaaggggaagggaaggctcaggcttcgggatggttttcttagttactctgaggaggaattccagaagagaagattggttaatttaagagaactattggaagggacttgaatggacaaagagagatgttttaatttaaaattaaaatttcaatgctgtttttaaaggatttcataagaggactgtatttacctcagccccttcctctc

SEQ ID NO: 23392 - DNA, 1158 bp, Mus musculus
taatgaaatggctaatggttgtatagacaagaattcctattgtatagaacacatccattccacattttgggggcaagtgatatgttgtttttggttcctgtgctagagataatcagttcagagtcaaaggcccaacactgcctattaatgctcgcctctggcaccttgtttctatcgatgactaatttgctttaaggtttgttttttgaccaaaatttctcaaaatgggagggcttattagtgttgtataaggagctttaaaacaggtactgctgggctgggtgacacaacagaggcaggctgatctttatgactttgaggccaacctggtctacaaattgagttccaggacagccagggttacatttgaggctaccctggcctacatgatatctttgttttctttaaaaaacaaaaacaaacttttgtctcaatgtcaccacatgaatggcagaatcagttttattttgttttaggaaggctgccacccacttttttgtgtattagaagtcgtcaccagtagttttgtttttgtttttgtttccctgaaagagcaggcaagactgctttatctcatttttaggtgcagtagccaataagcatctggaaatttggggctcttttctgtgtgtggctcttggatctttgctttgtatatcttggatgttgatctgaacaagtttccatcttttgtcttctctaaaggggctctgagggttgagtcgctgctgttgtgttacatacagcataatgtataatgtataatgtataatggactggcagattcattccctagaggctggctggatgcaaataggacgacttgttatcatcagaagaagcaggttttatttaatttcttttccattttaatgctcttctttgcttttagggctgaaatatttcccagtcagtctttgaattttgagaagttctttatggccattgataactttggggaatctgatttattttcacaatggtttctaaaaggatgagctcacactaagtatgtttatttgtgacattaattgcttgacaaaatacatttcttgtctcttggctagtgtggtagttaggatctgccctttgctatagaactctgtctctttagagtctcaggatttgaagtgcacccaggttcatccttgattgttg

SEQ ID NO: 23393 - DNA, 1196 bp, Mus musculus
gcgaggattaaaatagaaaataatgctagaaaattgaatgtgcatgcaagtgagtcatttaacagttataaaaggccaagtgcagatcaggaagtgggtagagaagaaaccaggtaagtcagaaccaatgcataaacctctgcaggcacctgtattttcattggttggttttcttgttggcatttatgagcagatggacttgggagcagccttttgttcctgaagctgagctgatggtagatagaggagcttctgtgacctgacaggagagagcgatcacagtgcctacaggagtgggatggagagttctcaagagcgttctgctggagctgttactgagcattgccagggagagcaaggagcagtccatcccaggcagaagcaatggcatgtttatggacagggctcgcaaggctggggctgggactgagagtgggtttttctcacaatgtcctaggcatgctcaagacagtcttcctctgaccacattgtgccagtgttcacaaagctaactgcatgtggttgtcctatcctatccctcaaggagtgtgttctgtagtggggctatttgtaggttattaatacaaagctagggctggctgtggagctcagtagtaagacacctgcctagcacttccaaggccctggattttgccccctgcactgtatctggtgctgatggtgggtgttcttgtgaggcctccagcagactcacccattttcatttttctcagctgtcgttgtcatagaagaaaatttccatcagtttggaatcagtttgctatgtagaaacagcttggactttgccatgttttacttaattcatgtgaagcccttgctcccatgcaggtataagttttgcacttcatatccctggatgctacagctgggtttatcctgagaaactttgagatgctcctgagagctgagtgcttcatcgatgtagaaccgagtaggtgcccgctaggcgagtggtgtgtccgtgagccctgggcaatacatcgtgcaatatatctcagtgactgtctgccccttttagggaaatctgttcctttggagctgaacgttccatgctttgaatccactctgagacagactattctggacaacaaagcttgagctgaacctggtcagagcctctgagttatgagagagggattgaaatcaacttttccagctaaaaataattttgctca

SEQ ID NO: 23394 - DNA, 1192 bp, Mus musculus
aacacataaaaaatgctggcttactctggttcccagcaaacagccagccacccagaccaccctgtggtaaagctctaagtggacagcccatgtgtgctcagagctgccagaaggcctctaggcattgccctgaggagagaatcagggaacacctcacagcctggggaaacatgagagccaaagagagaccagaacaaaaaacaataggcaacctggaagaaacggatgaggtactgggaggggtgtgtgtgtgtgtgtgtgtgtgtgtgtgtgagagagagagagagagagagacagagagagagagagagagtatgtgtgtatatatgtgtgtgtgtaagaaagtatgtgtgtgtgtaagaaagtatgtgtgtgtgtgagagagagcatgtatgtgtatatattgtgtgagaaagtgtgtaggggaaagagagtatgtgtgtgtatgtatgtgagacaaagtgtgtgtgtgtgtgaaagtgtgtgtatgtgaaagagattgtgtgtgtgagtgagtgtgaggctaagtgtgtgtgcctgtgtgtttgtgtgtgtgtgcacaaagcttttgtctttagtcccagcacacagaaggcggaggtgggcagatctctatatgttcaaagccagtctgagccacatgttgaattcctggctaaccagggctacacagtgaaacctgctgtgttcccctgcctctgaaaaaagtaaagatctgagcagggtgtggggtacagctctgtaattccaaaagtacaggatatgagcaggaagatcaagaattcaaggtcaagaccctacttccaaaaaaaaaaatagagagagagagagagagcaaaggagggaggcaggcctgatcactttaaaggaagatcaaactgagtgggaaaggagtgaaaaagccagagactgcaagtaggggaggagaggaagtggagtccagctgaagtgacatgatagtaggtcatcggcattctagaagtgagcagaagacctgagaggaccattggttaaacaaacaaacaaacaaacaaacaaacaaacagaaaaatagaacaatacaaaaccctgcaaactggagtccaatgagggctgagcatgatgggtaaaaactagttcacatgaaggcctgaggaatgaagagggagggagatgaggagtgaggaggaggggagaaggcacagaaggaaaa

SEQ ID NO: 23395 - DNA, 1959 bp, Mus musculus
tctgctggtgctctgtagtaaaggcacccggcagttaaggctggcaattgctctggtggtccacttcctcgggcagggttgctccttggcctccttccctctaaagaccactttgaagtcttcatactgggctgcccatttctctttagctgggccccactgaccctctgcctctgcccacaggcgtggggacctgccatttgtcgtgactcgccgaattgttcggaaaggcactggcgactgctcagacgaggaggtcgacggtaaagcagatggggccgatgccaaggcagctgaataggagcttctcctgcagcccaggcggatggacaaacggctctgcctccctcccccaaccctccacacccctgccttgagactgctctgaccatgtccccctcctcccaaggccttcccgagggcattggcttcctctgctgcagcccttccagtcctccataccctttgagaatctgataccaaagagtccaggctggctcaggccggatgacccacagggtcttgtcctccttgcctgaaagcacgggtggtgggcaagaagggcggccattggagtaggcacaagagttttctatgaatctattttgtcttcagataaagattttgatagctcaggcctctagtagtgttaccctccccgacctcggctgtccccgtcccccgtcccccctgctgttggcaatcacacacggtaacctcatacctgccctatggcccccttccctgggccctattggtccagaaggagcctctgtgctgggtgcagaacatggggcactctgggaatccccccactcccttctgggcagcactggtgcctctgctcctccgactgtaaaccgtctcaagtgcaatgcccctcccctcccttgccaaggacagaccgtcctggcaccggggcaaaccagacagggcatcagggccactctagaaaggccaacagccttccggtggcttctcccagcactctaggggaccaaatatatttaatggttaagggacttgcagggcctggcagccagaatatccaagggctggagcccactgtgcgctctggtgcctctcctaggactggggccaagggtggtcgagctgtgccacccactctatagcttcaagtctgccttccacaaggatgcttttgaaagaaaaaaaaaggttttatttttcccttcttgtagtaagtgctctagttctgggtgtcttcactgccttgccctggaactgtgtttagaagagagtagcttgccctacaatgtctacactggtcgctgagttccctgcgcactgcacctcactgtttgtaaatgctgtgattaggttcccttatggcaggaaggctttttttttctttttttttttcttttcttttttttttttttaaaggaaaaccagtcaaatcatgaagccacatacgctagagaagctgaatccaggtcccaaaggcgctgtcataaaggagcaagtgggacccgcacccctttttttatataatacaagtgccttagcatgtgtcgcagctgtcaccactacagtaagctggtttacagatgtttccactgagcgtcacaataaagagtaccatgtcctactctttggtgtctgggtgtttggctacagcgggagaaggccgggaagggctgggccagcggtcacaggagagcacacttgactctgcttagttagcagtttgagagggggtgttccaagacatcctgggcagcagcagggacctcctccctccctgcaggccaagaggctggacagcaatgggcccagggctggttcaggaattctcctctccttccacatgctgggctcgcctttctcctctaggaggaaggaggctctggaggagatgctgcggttccagaggcagaaagtgggaggagtgggtggtgagcagaagctggggaggcgcgcagtgtgcaccgcaaa

SEQ ID NO: 23396 - DNA, 1015 bp, Mus musculus
agagggaggaagcacagggtgttgggagaacctcctcagttgtacgagcactcacttctcccggtcctccccagggccctagcattagaggagaagcggcgactggaggcccgcattgcccagctggaggaggagctggaggaggaacagggcaacacggagctgatcaacgatcggctgaagaaggccaacctgcaggtgagtgccagcaccatagcaggccttgcacactgggctccagactctgtctgagctcctcgtggtgaagcaggccgtggcgggcagaagtaggatgctctctgattgcttctgatcctgtgaaggcttgcgcctctgagactaggttccaggaagtttctggggcctagtcgtggacagatcccttcccaagagagctggggtgcttgttggtcctggtgtgtgaggaggagagggtcctgcatagccctgcagctgggaaccaaccttccttgaggtaccgtactcccttcctacagatcgaccaaataaacaccgacctgaacctggaacgcagccacgcacagaagaatgagaatgcgcgacagcagctggaacgccagaacaaggagctcaaggccaagctgcaggaaatggagagtgctgtcaagtccaaatacaaggcctccatcgcggccttggaggccaaaattgcacagctggaggaacagctggacaacgagaccaagtaggtgccctacccagactgaggacacagtgttggcactaggtcacctcaggttgggtcaggaaccagttctgtctccaggccccacagccattctcacttgctctgagaagtacgtgggtttggatggaaacgcataggccacttccagaaccagggctctgtgggctgtttgtttctagcgagagactgagatttggttcagcaaaactgagacttggaggtaatgcgatcatcctgcgccccaagcctcagtttctccgtagacgagcttcgccactgacctcatgggtcagcccaggtgtcagc

SEQ ID NO: 23397 - DNA, 1158 bp, Mus musculus
tgcagtctcaggtaggtgtcagtctccacccatcaatcccagctgcgctcagtgctgccccctgctggtcaccgtcaggccggctagcttactgcttagaaaacctttgcagtcaagtccagtgggagagcagttgtcagccgggagcctgagccataagcacccaccctggagctacttgaggggtacacaccagctctgttgctgtgacagtgtgcctaagataagtcacttaaaagggctgaagagactcagcctgtggtcaggcccctgctgaggccgagtgccacgacagagagtggcggagcagagcggctcacttctttgtgctaaggaagcagagggaaagaaggggccaggactccaatattccctgcaatgatgtgtgccagtggcctctgctctacagctctcagcagctaacagtgccagccactggcaaacaagcctttcgtgccagcctcgggggacatttcttatctggactacaaggaggccgcagggaacttagcctttgcacgtgttctttgcagctcatggcagagaagctgcagcttcaggagcagctgcaggcggagacagagctgtgtgccgaggctgaggagctccgggcccgtctgacagcgaagaagcaggagctggaggagatctgccatgacctggaggccagggtggaggaggaggaggagcgctgccagtacctgcaggccgagaagaagaagatgcagcagaacatccaggtacccctgctcctgccgggcagggcgggcacagtgtgggcagccaggggcacaagataggcacacaggttcagttaccacatcagccttctttgtccacctgtttgcgacaatcactcagtgtccacggctcacatctccgtgagcgctacccattgaacgttgaggccactgagtttctctctctggtccttcctccatcagccttggcacaggcctctttgtggcaccctgggaacactgttgagactatgtcagtcatgtgccccagttcacatgctggtttcctgaagagggatcagacgtgtgtgtgtgtgtgtgtgtgtgtgtgtgtgtgtgtgtgtgtcctccgtccttctcacgtctcctctccctttaggaacttgaggagcagttggaggaggaggagagcgcccgg

SEQ ID NO: 23398 - DNA, 1167 bp, Mus musculus
ggcagccgctgccctgtgggctagagggagggaggccaaggtgcctgctgctctgcctgtatgaggctcggggatcctctacaatggaagtaggacttgtgttgttgagaatgtacttggaaaggttagagcaatgcatgcagttctaggaaacgtgggtgttccgaaaagacaagagaaagcagaaataacgttagttaacaggagtgtagtctgtgatggacatcaaaaggacttttgcttgtgttcttactactttaaagacaacagcattctgtggctagctgtgacatcattccctcagctgtaccatgtcagcttgtgttgttcttaatggccggcttccatttgcagcccctctgagagtgtcttgttgcctctgtcccttgtcacttgattcttggggatggctgtaccaggtcagaggttgttcacaccagggctctccgtgtccctttagcagttttgagagtctgtgtccccagagcaactcatggccggtctctgcctcttgcaggtggactataaagctgacgagtggctgatgaagaacatggaccccttgaacgacaacatcgccacgctgcttcaccagtcctcagacaagtttgtctctgagctgtggaaggatggtacgcctgccctttgccctccagccctgcctcacactgggcctgtcctcctcccagtctgcacaggacccagccaccatacaaaggaccatgacactggtcaggtgtcttttgtcctttgtgacgctcacaaggaagacctgtctgaattgaaagggacagtttgccccaagcggcaccctaggcatctcctcctggctagaggctccgtaggcttggctggctctctggccaggtggccaggccccttccgcaggtagccccagccataaccacgcgggcctgcagcccccaagcgtccctgcacttctgcctctctctcctcctcaggaggctggctgccttgaagctgttctttttctgcctctcattttcccctctcctccgcctgggtcttgctttaacctctctgttgcagagatgcagagcactcagagagcctatttctatcgccgctttcccattctccacctagaatcaggtgactggctgcctgcctgcactggggtgtcgtgtgtggcgtacccagggctgt

SEQ ID NO: 23399 - DNA, 1201 bp, Mus musculus
ccccccccaataaaaatgctaaaaacacttcagaaaatacaacaaagtcagaacaagcaacagtgtttatttattgtcttacccatgaggattattatttcctgcagactctttttccctttaacttcgtttcaattctggctttttattatggagctttagaaacatgaaaaacaatagaatggcccttttgtgcctgtcccaaggaacttgagcagatctccagtcttggtcagtctttcccctcctcatctgtgtcatttcgaagcaagccttgggatgttacctctttttactttatgcaactgttgttttaacaaaggtctttgcagatatctgggttcactgtgctgtggggcatggggcattccagctgttgtcatcgtacagaacgtcagtgaggatctagaatgccttccccatcttccatgcctaggctgtctctggggaaagcttcacagtgaagtcactggggcagaggcacacagatttcagactttgtatctaaccttcatgtccccggatgtcgttcctaggctgactttgccattgaggccttggccaaggctacctatgagcggatgttccgctggctggtgcttcgcatcaacaaagctctggacaagaccaagaggcagggcgcctcatttatcgggatcctggacatcgctggctttgagatctttgatgtaagctgtggccttcacactcccaggcttccccctcggcttcttggttggcatctccttgagtcccgagtcttgttttggtcagggtcccgtggctgctcacactggcaatcttgtttgcatcggaaccctgttggtgtgcgttaaaccccccaggcgcgtgcccacggccagccgacaggtttagaggggctggcctttgaggtcaagctcctggagatttcatgggcagatgctgcctgactgctagttttcccagccagagtttgcactttgaggctacacattgttcctgttcgtgaaggctttgaggtgcagtaggaagagctggcgagagcctacatctgcagctcacaggaggacctcagagaacccaggagctcactgaagagttgtaacttttccccttgtggcttgagtatagcacgctgccatggtggtatcagcagagtcacagagatctgttgctgtcactctcattcatctgtgtgtctttggagaggaagcccgca

SEQ ID NO: 23400 - DNA, 1152 bp, Mus musculus
ctctgggagagcagtaagtgctgagccaattgctccggaaccccttccccataactgttttgaagaaaagattagaagtaaggcaagctagatgtggcacacaccggtgtcctagcattagggtggccagggcaggagaactgaggtttaaagctagcctgggctacatggagagtcccagtatgggcaacttaaaaagatcctctctcaaagaaactttaaaaggacaaaaataactgggcatggtggtatatgccttaaatcttagcatgcccaaagcatggggtggagaatctcttgtgaattcaagaccagcctggttgactcagtaaatttcaggccagctagagttatatgagaccttctctcaatcaatcaatcaatcaatcaatcttctctcaatcagtcagtcagtaagcaggaataattatggtgaagaaatggttgaaataagtgagagacacaaaaaggagttatgtaacttctcatgatcatcccttgagggtgtagggaagggctgaggagttttccccacaacactgcatacgatgtggcaccggtgagggggcagcagctgcttgaagctgtgatgataggaaaccacggtggctctgctgggactgtgggacaaggttctttattcctctttggatcaaatttgtgtttatttttcgaatgtgattatatgctactgaaataaaaaatacatttatttttaaacaatttctgctctggcattttgggatggctgggaaagagtagacatgggagtcttgcaagaggctgtgctctactgtgctggtccttgtggtggccagagtagaggcgccctagaaggaatcactaaaaggaaaggagcaccctgcattatgcattgggtgcaagcgtgcccagagacagagtagggagagacacttgtaatcctagcacttgggaggtagggggtagaggcaggggggtcagaagttcaagatcacgctgggatacaaaagacatctttttttgttttttgtttttgtttttggagacagggtttctctgtgtagccctggctgtcctggaactcactctgtagaccaggctgtcctcaaactcagaaatctgcctgcctctgcctcccaagtgctgggattaaaggcatgcgccaccacg

SEQ ID NO: 23401 - DNA, 1217 bp, Mus musculus
ataggaagccctggggccccatgggaggtgccaccctcacccagtaaccagctttcttctgcagcattgtaatggcgttgactggcgtcagaagctggactctcagcgtggggctgtcatcgccactgaattgaagaacaacagctacaagttggcacggtggacctgctgtgctttgctggctggatctgagtacctgaagctcgggtgagactcctgtgcgggtctggggtgggcccggatgagaggccgctgctccggctctactctggggaaagagcagcccaggcgtaaccatggtactaaccccaggctttgccgtctctgtatggcctagtatgaccacccatcgtcctccccaacaggtatgtgtcccggtaccacgtaaaggactcctcacgccatgtcatcctgggcacccagcagtttaagcccaatgagtttgccagtcagatcaacctgagcgtggagaatgcctggggcatcctgcgctgcgtcatcgacatctgcatgaagctggaggagggcaagtacctcatcctcaaggaccccaacaagcaggtcatccgggtctacagcctgcctgatggcaccttcagctctgaggaggacgaagaggacgaggaggaggaagaggaggaagaggaaggtgggcagagcaggcctctaagcctggggtggtttgagagatgctgaggaagccaggctagctctggtcaccttcaccagagaactggtgaacacgcagcacatggagaactccctggaacttgatgtggggtggcactccagatcagcagaggggctaaggagcgcatcaagggaaggcgtgggcagctttgagaggaaccgaggccatatggtcagttagactcctgaaagcctccctggtagctacagaaagttactgagccctgcaggggttaggagggctcagcaaagcggacatcttcagcactcaggtctcttcagggtccagaaggagagggtacattgcatcatggggtgaactcatttctcttcattgttttctttcagaggaagaaacttaaatgagttggcctggcgcctgcgtgtgttgcacccagctgtgcttgggcagcgtgtgtccagctcctgttctctagcagaggaaataaaatttcattccctttggtttcttccttcgtcctgtgctcccgttgtgatccacagccccgggagagggagaccaaagg

SEQ ID NO: 23402 - DNA, 1109 bp, Mus musculus
gctctgagtctcacaccagcgctgtggctgtgtgttatacgcataggactcttcctcctcctacttctcctcttctccttcctcttcctcctccttttcccatttatgaactataaagaaaatgcatatgcatacacacagtcagtaaaccacagaattacagcttgaaaacaaagcagtctaattctgtttgagttgcaagcctgatttgttaaagtatcaagagagacacattctcttgaggatccagaaagaatgagaaggaatggctggctttattactatatggccagtgttgttgggtcacacctaatgttttctgtgagccacccacttcctgtgcatgccatgccctgggggagtcctctgtcagcagaaggcagttatttgcagatgggcccctatgatgtaggtctatacatctccccgtgccgctgtgcacactgccagtggctcggctgcatgagcaggtgacatccatgcttgggtttttccagacctcctgactgtgagtgagacagccaatgagccgcctcaagatgaaggcaactccttcaactcaccccggaacctggccatggaagccacctacatcaaccacaacttctctcagcagtgcctgagaatggtgagttcacaggagcggatgcgctggcctgctgggttaggtccctgctgctgagcctctgctctgcactagatggtggtgcgaggttggccaggctcgcccacctggtagcagggatccgagccacaaaaaggtctaaaggcatatttcctctctgtggagttattgataacgcctgtgtcacagatgggctgtggaatgcctgtggataaaaccattcgttaccttgaggatacagcactgaacaatagtcccaccttttactgtgatggaggagggagaaaaggcattgcttgctgtcctgttagctacagtctgcctgtagtgaggaaggaagcagggagtggcatggtggctcttactcagtgattgtgttgggcttggtccttaatacacaatgagcctacatccttaaggacagaagtaccagccagggcagtcaaaagcaatgctgggtctgccgacttgaagtcaaccccag

SEQ ID NO: 23403 - DNA, 1374 bp, Mus musculus
agcactgtgtgccggtgcctttgtgtaactgagtggtaattgtgcagggtgacaatcaccaagactttgaccgaggccctctgatggagactgggtttagagacatttgctgttgggtgctttggtgaaggtgtttcggggaattcactactcttacctccttgaataattgaagacacctttatcatatgttctactgagaaagacgggacaccccatcaaggaaaggcacagcttcattgcaaagatgttcaccaaagaacctgtcctagaatcagtgagacataggaaaatgtcgctggtgttggcagggttctgcgttttgagtgttctttgaacagtttacaggaaaaccctgtccacagtgctcgagagccagggtgcacctctgcagtgcagcttcagtggagggtggagtgtttggaacttggcggccttccttctgaaacttctcacactgcttgtgttcacaggttttagaagatggcgaagttcatgacacctgtgatccaggacaacccctcaggctggggtccctgtgccgttcctgagcaatttcgggatatgccctaccagccattcagcaaaggagatcggctgggaaaggtattgggtcccttcagctggggcagctactccacagttccccactgcctttctagtctcttgatggatatccttcctttggggctaccacctaaggaaggccctgacctccagaatgagtcagagccagggtagccacgtgcagagcatcagaggcgacactgatgccttttgtcgctgtcgatgtcagcagaagtctactcgcctgacctgttgtcttccttgtccctcacaggttgcagactggacaggggccacataccaggacaagaggtacacaagtaagtggtcctcggcggcccgtccacatctgggtcttgggaagctcattacttttttcagtaagccccacatgaaaggtttttagaaaggaaaggaaatggtaatggtagttattggaagtatattctggaatagagtgtacacaaaccatgatttttagtcccaggatggccagagattcctgaaagctactttgcattctgttgcttgggacttctggagccatcaatccatggactctcggctctgagccttagttttaaggttctggtaagggaggccgctttccctggtgccagttagatgtttggaagtggctgcctagagtaccaagttaaagtggatgaggtccaaaagaggctgtcggggtggaaggctgtgtccgcagctctgggtgatggctggggtggtggtacagctcagattcttacatgaccacgcagaggtacagcggggtagtggcatccttgggctcttggtaagttg

SEQ ID NO: 23404 - DNA, 1176 bp, Mus musculus
gggccttctgcaaaccaagcagtctggccacacggagagaccagatgatagatcaccaagaaaggcaatgtggggcgggacgtgctgtccgagcaacaccaggacaagcgcagagcatcccagccctggctccagactacagctcccggcatgccctgcacctggtactcgcccgcggcgtgcggagggaaggatgcagacaacgcggccggcgatgaggatggaggccggggaggcagcgccaccggtgggggcgggcggccgccccgggggcggctggggcaagtgggtgcggctgaacgtggggggcacggtgttcctgaccacccgccagacgctgtgtcgggagcagaagtccttcctcagccgcctgtgtcagggcgaagagcttcaatcggacagggtgagccctgagcccgctgacaggggggtcctggccccgcgctcccgggctgtcccgcctgcgcgtccctcggcctctggctttcctaggattctgaggcggggagccgaggcaggaggagggggaggaagaggagccgagaggaatagctatacccattgccgtggcaacgggacagcacaggccgcagccatttagagctttggagagctgccccagatccgggacgcttccttactgtggagcgctggggagggaccaacaaaccgggcctgccttactgccctggctgactcttaaaggagttgatgcggctgcttctccccgcccttagggtgtgggcagctgaagggtacaaggaactagatggaggaggcctgggtgtcttggagctgggcttaatgtagggaagagcactggctttggagctatcacttgtgggctcaccctgctctcctgccaaattcccaaatgaccagggaggaatcgggaggagaggggaacttccctgctctctgactttggcctcctagtgtgcaaggcctctggagttggcttgtcaaagtcccctgtcccccattctgtggccctcttacactgtgcccttgggtgagtcccctgtcccttgatgtctccgtcttctgtgctgggttgtccagatcccagtcctccctgcaggctgcacttgtccaatcagagtgcagcttctttggaaacttgcaaacatctagtgaatagtggggttggctgggggtgggggtgggcgcggtaca

SEQ ID NO: 23405 - DNA, 1454 bp, Mus musculus
ttggattctaagatgggggcggacagctgtttccagtgacccctttttgcctgggacagcagagatctgcctctcccattcctgccctgccaccaggctgccaccaccagcccaagacctcagcttctccccccctcggttctgactccaccttctttgggcctcagccccacccctcctccagagccagcctgggactcacttgcctttctctctccctccctcccccactctccccaactttcctgtcccggcattaccctgtcctcaccacccccccaaccctggatctctgaccccctttcctcttcctctgtcccccccccctcttattttctagctattacaagccagaggcacccggatgtgagcccccagatcacctccagggacttggggttccgatctgaaatcctttatttttgtaccacggggtgggcccctggcccgaggaggaagacaagccctctaccttgtcagtgctgcctgcatctgccgggctgagactcactcctgccttggggcccaggcctggggccctctgggaccttggaaggcctgacatgggtcctggggtctccaggcagagacgccaaggccaaactgtggcactacctacccatatcttccaggcccttttgtcccctcacctgggcgcccttgctgcatggcggatacactccctcccagtcccatcatagcacctcttagagcctcagtctctatggcaccatagggtcatcctctcctcccacctacctcacagggttgttgtgagaatcagggaggatcatggggttcctgggagccctgagtgtgttggggctacaatcattaccttcttaggggaagggctctagccccgcccctgtatgggacactatggcctcagatactggtgggggacaatgtgaggactttgccaggcaggaaggaagttacaggcttaacagcaccttggccaccacttctctgtgccaccgtgtgtttggcagcagagtacagtgtccagggacttgggatggggaaggggacaggtgtaacgggttgagctgtcccgcccgtgtcttgaccaccccgggatgggcacatgtctgtcagttgtgtcccacccgccatgaaataaagctgaacaaacaggcttggcctggctgccaccctttttctctgggccacttcttcgaacagggcttaaactcaggtgaggtagcacgcaaaggaatgggggctctctcttgaagccccgcccccttgctgtttgccccgcccccttgctcttgtctctttttcccagaggaggctgggatgtgactaagtcctgggctcaggagtcagagttgagggtatcctgtgtcccatgcccggggacacccctccacttcttgcttggatacctggccactgcactctcctgctccccttatttgtgaagctgggctgccagcttctgagta

SEQ ID NO: 23406 - DNA, 1187 bp, Mus musculus
tgtgcctcaggagaaggttcgcctccgctacaagctcatcttcactatgggcgaccagacctacaatgagatgggagatgtggatcagttccccccaccagagacctgggggagcctctaggacagaggggctggagagaggaggggcagcaggacctggacctgttcatcctgtgcttctctccctcctgtggcccccagtgactcttccccctccctcttcccctgctgagccaaacccagcaggaggctgcgcctgggtctgccatagctgctgggacctccatcaccagtgggagcctggagcagggaggggccgtatgccctggaaggactctggggtgagggaaggaggggggctgtgaggcccagccctgaaccccagcctgaggtggggtcgtcctcacctgtcttttatgccttatggaaaggcccagccataacttggaggccatgctggaaactgggaccagcccaggcctcctctgcggggacccagtgactgggtgggggtgacgcccgcgccctagctgtgtgcacttggtgtgtggtctggctcgttgcttttcttttggaatggccctgtggtcacagagctgaaggagctctccactcagcccccggggcctccagaggcctccctttgctctcaggctcccacgggccatggaaacttgaaagcagagccagaggacatgccccctggagggccatggaactcccagagttccatgctccattatcaccttctgctggggcctcccgggagcacctcacatctgcccaccctcctgtggtcaagtagggtcaggatgggtggcagtgggagtatttatgaaaataaagtgacttttttcctggattagctgctcttgtcacccttgtgggttaagggaggtagggaaggttcgggaggtgggggcctagggactgccctatagatccatgcccagctcccacccatcccagcccctcagccctgggccagaagaggccctactgggggcctgtggctgctactgagtcactcaggaaacactggtctgtggtgcccagagctgttttcgctgaggatgaaggggccaccaggaggtctggctgctgcagaagtcaaggggaaggtcccagctgctcgcttcctcctgcactctgcagccggtcttgtgtttctccctgcccgacacacg

SEQ ID NO: 23407 - DNA, 1193 bp, Mus musculus
gttgttccctgatcccacagatggaggcgacgggccatgagtcacattcgggaccatgagctttctggagtgggtgtctgtaccccagtgaagggaggctgggatccaggaaggtttgtgggctttcacacccccctcctagccgtggctggacactctgctcttcagaagctgtccccccacatcttgaaggttcaccctggcctgaccccaccaggtggccttatttcctgccctgtcacctcccttccttgggccccgaagccaaatgaagatttttttttttccaaccttttaagttcctcccactctctgggatctctagtgctctgtccctagagattgttggccaatcagagatctagggaactccagcccgttcctggcctgaccaggcctctgggaagagctgctggcactgccggcctatgtctcagagtgggcctttagtggagcaagtaggagcttaaagaatgccttgcatatcctggaaccccagagcaccagtcagaggctatgcgtccatcaggacaattaacgatcccactggcctcttagatgccaattagaacaatttccaagtccaagagacttgtgaacttttgacaatcctagcctgactggatcctgggaccagatgctggtagcacagggtgatgaatgccggtatgtatagcactcgggaggttgaagcaagaggattgctgagtctggtgaccgggatggcagagtcagacctcatctcagacagagggtcatccttcaagtcaccccactccacagactgctcagtggggcacctctgtggccctggggtagtgtggagaggttcccactcataccttagcaccgtccagtgttgatggctttttcggcttggagggggccctccttttgtccccacctgcagtcagtgtttgcagtgccaccctcacctgcccattcccagctatttatttatttattgtgtgccagtgaaggtgggggtagggaccttcccaccccctccacctgttgtaaccggtccttgaacttaataaaatgtgaattgaagtgtctctctttgtgtgtgtgtgcctaagcctgtctccctgaagcaccgcctcctatacccatagcccacaagaaaggatgcctcccatctctgtgtcctcagcctcagcgcagatacattttgcccattgagcttttag

SEQ ID NO: 23408 - DNA, 1209 bp, Mus musculus
caagcacacacaggctccttccttccctaaacctttccctcactgtctcctcttccacagtggaaaaagcattggtttgtgctgacggattcaagcctcaaatattacagagactccacggctgaggaggtaaggtgcctgggtgggcaggcccggggaagggcggggagccgtggctgtggctggggttcgtggagtggggacccacggtggatcttgttgctccaggcagatgagctggacggtgagatcgacctgcggtcctgtactgacgtcacagagtatgcggtccagcgcaactatggcttccagatccacgtgagactgcgggtagacccgggaggcagggggtgtaactcgaggccctgggcaggtggcggcctgactcactcactcatttagtctcagactgccctctgccagtcagcagttctgatgcccatacttaacatacctagagagtcctggagtgaggcactttccacgcccactcgaccctataccccttcctgggagggggagggaacacagggctggccgtgtggcgagctacacataggatgtccctgcagaccaaggacgccgtttataccctgtcggccatgacctcgggcatccggcggaactggattgaggctctcaggaaaactgtgcggccaacttcagccccagatgtcaccaagtatgtgtcgggctgggctgggaccctcgtgggggggatgaggatgttgtgtccctgagtggggttctgtgcactcgcctgagggcctggtggctgtaccttctggggctcagttaatctagtgacacattgcagaaagagcagcacgtgtccttggccatccagagatgagagctgagggtttgacccgctgtctcattccgtcctcctacattctaagagctggaaggggtcctggggatgtagagaggaggcttgagagctcttctgtctgctagctcggcaccgaccccggccccggtcccggccccggcccacggctgcctctagctgcctcagttaaagggataagtccccaaacctgactagaccctgatcacgcagccggaggctggtggcttttccattgtctcagattcctcacttgttgtgttcgccattgtgtctgcacccacgaaggcatgtgtccagggcccttggtgaattctgcagacctgcactgtcaggctgctgcccagttgcagact

SEQ ID NO: 23409 - DNA, 1213 bp, Mus musculus
gggcctgtatgtctatcttttttttccttcctctaaccagtgggcatagaccctgagcctcttcctcaggctctatggccttcagctccctgtgacactcagctgtgtccccaggttccgcagtaagatggaagctgctggttttactgtctcaggagccgatcaccccatctgccctgtgatgctgggagatgcacggttgtcttctcaaatggcagatgacatgttaaagaaaggtaagaggattgggggcagagttgtcctcagagaaaagaacacctgtaaactgtagctcctccctacatccacgccctgctccttgctgcccacatctccttagatcagccatcatccagacttaacaaaccacaggctatgaggtggtctcatgcctgtcagcttaggcatcccttgttcttgcgggtggaccatgggacagcaggcccttatatgtcatagccccaaagcctgtctgcctctggtgtacccctgctgttttcccaggtatctttgtcatcggatttagctaccctgtggtccctaagggcaaggcccggatccgggtgcagatctcagctgtacacagtgaggaagacattgaccgctgtgtggaagccttcgtggaggtggggcggctgcatggagctctgccctaagctcttggtagggacctgcagagccaaagttcctccactgccgctgacatagggctcctctggtcagcccagatcagaggctgtgactcaacccagacttctagagcctggttgaaaatgggcctgtacttgtcatcagagagacaacaatgtggaatttggctatgacacttcagtctgctttattctgggtaggcgtacctctggctacctgaagaaccaggcaggggctggatctcgcatgaggtgcatcttcccccaaactaagtcgggatgctgtgtctgggagccaccgtttcgtacataaagcattctgtgctgctgtgcagggcagtggagaaccagccctgtggaccctttctgcagcctaagctgggtgggcaccttgtctcctgtgccctagcagaaggataaaatgtaactgccaaatgagaattgttcctagacctgtgttccctaggagagggcagaggttcaggccccagaaagaagaaagcagatcacccctgaaggacatcgaatccttgttttccagagctctttgtccttaaccccgt

SEQ ID NO: 23410 - DNA, 1193 bp, Mus musculus
cttctgcgtgcacaccatactccacaataatgtcctttgaaaagcccgttttgcagggaggaaggaactctgatagtttaggaactccgtccttccaatcagagctacttcgcttccccggcgaccccggaaaggctttcgggcaggttgggctgggcgggacttccggtccggccaagcaggcgcggagttcttcttccgctctctcccacgggcttctggagcgccgtagccatgtcttaccccgctgatgactacgagtctgaggtaatgaagcggtgagcgcgtggcggggtccgcggtgggcacccggttcggtgggatctgtccccgaggtgaggcggcgtccagatcgggccggaacaagcggacctcgatcattccggccctcccggccccgggtctcctccccgggtccctcctctgccggccgtatgtccccgcgtgtagtcgcagtcagtcggaggcgggctgaagggtgtttaatgctgagttcttggctctcatggcgtctgcttcagacggggctattactgtgtttttcttgtcttgttgcacctgtaagcgtgttttgtgcttgcccggggtcccttttctctcacacatgtgaagccctccgaggtagcgactgtcagtcttatctgagtagtatgttttgcctcctgcttgacatggaggcccgaggacgagcatttttggagtccccatttggcgtgtctccctaactttgtctctttccttgcaggctgcttatgatccctacgcctacccgggcgactatgatatgcacacaggtgaggctctcagtttgcccggctgtctcttgccttccaaggattggcacttttttctttgaccatctcagcgttgactcccaacagggacctgttaaaaactgcgtcctaatggagtggtggagtcggccattaggtctgattggtagggttgtgaagagtctaattaaaccaggccttttttgtggtctacctgcccacgtcagaagaggaccatcactgacccggctaggtttttcttacttggggcagattttatttgttatactggggtggaacccagagccccatgcttgtggacggtctctgaaccacacccacagccctcctccctgagctgtctggccaaggtcaaaaagctttgtggctttgttgtttgggtgccggagatgagattaa

SEQ ID NO: 23411 - DNA, 1223 bp, Mus musculus
acaagatctaaaataacatcattactaataatgacagaagtaccaatttgtacatgttaccatgtggatgaagcagggttggcatgtgtgtttattgctttgctcttaacagtaatcccatgatgggagttgtgtgattttttttttttcttcttttctcctgttgtaatagaactgaattgcatagctagcactgtgcgtatgccgagttctgaacctgtgtactcttgacaccggagtctaattttgaactatgtaaccatccaatacataccagtgtgaaccaagctccggagtagtattgagggatgccctgaaggcaatgaatgctagctatagacaggccagctagggatgggataggagatatttcaagcaaggatggatgtgtgtgtgcaaataaccagccgcctattggatcagtgaacaggagttgaccgacctctgctcccacattgctgagggtcaggagaggagagctgggttgaggcaaggcttatggaagccttaggctctgtttctgtctctgtgctgtctcccatgtctctggatcgagggttgggtcttgagtccttcttgttctgcagttgtgaattgtttacatttggctttcagctggaccaagctaactgaaaggttcttcaagaatacaccgtggcctgaggcagaagcaattgcaccccaagttggcaatggtaggtgtaacactgtgtctcgcgtgctggataacagatgtcaggactggactcatcagagaggtcaagagggcttgcgaggttttctttggttttttttttgttttttttttcccaagactaggcttctctgtacctggcggctgtcctggaacttgctctatagtccaggctggcctcaaattcagatatcctcctgcctctgtctcctgagaggtaaagataaaggcctgtgccacctcgcctggcttgcctgtgtttcacttagcattttgtttccccggagcttggggaattacccagtgagagagagctgtgtaatgtgagcttccccagatctggagtcttgtcttccatgcgggtgggctgatccttgagtccctttgccttcagcttctttgcctctcaccgctcactttcatggtctgtgtggatgaggtctgcagatgtggcttctctttggcgtgtggtgtgaccaggaccttaggcatgcaagacaggctcccgttgagctgtggtctgtgtttg

SEQ ID NO: 23412 - DNA, 1099 bp, Mus musculus
cctgaggttctgcgcgcgcagtcacagaacagctcctgagtgcccttatgtgctcagtatggcatgctccttttagcttttttccaatcatcttagaagcagactacaccaccggccatggaggcacagaagggggaagcaggatcataccacgttccaggccagctaggtctacataatgagatcctgtctttgaaaaagtttagaatttagaaaaatccaggggaatcggtgtctttgttttaatttgctttgatacagtggcttctataactctggctgtcttcgaacctctaatcctcctgcctcggctcccgtgtcctggggttactggcaaacagccaacagaaaggttagaaatcagtagtgaatgatgttgtttgaacgaagtcacaaagcggggagcctcagtacagagtgttggtgagtagtggcggctggaagcaccttcaccatgccctaaaggaggcaccagtacctctctcatggtgcaaatctcaggccagggtcaccttgctctgtccccctggccctggcttctcagatgtcagcctgtgggcatgatgtgagaatgttgtctgacctgttgactcgggagagaggaggagactcctctggccaagctgcatccctcttaagataagcataattcctcagcttagctgctgttctttagttaagggctttctaattccatagagcccaggatcagtgagagactgggagccttcaggccagcacgctagacacagtgggagtggctcccttcctcagcacgctctttttttttttaaattgagatagggttttactatgtggaattcactttgtgaaccagactggccttgaacccacagacatctgccttctaccgcttaaggcatttgccaccattttgcggagggttaagtgttttcaatcctcagataacatgaaagtgcctatttgtatcagttaatttcaggggacattggtgcataagtgtttctttgaatctgttcctatagcgctgtcacttaatatcatgctttttctcaaaggtttgtttattgaatgtacaagtgctctgtctgcatttagacctttgtgccagaagagg

SEQ ID NO: 23413 - DNA, 1099 bp, Mus musculus
caccatgtgattgctgggatttgaacttcggaaaagcagtcgggtgctcttacccactgagccatctcaccagccccaggaaactttaacaacaaaaagtttaacaaaagtaagatactgggttatctgaagtaataaacccagcctattccctatacctgggaggagcacagaggctcatctcaagaacaaacccaggtttagaaggagcaggaatgtgaggatagaaacagaaacaaataacaaatgagctgccactctcaaagctgttagtcagcaggtgagaacaggtccggatgcttgagactcctgggtaggggtaaagtgtgttccggtagctgtggcagcaggtgggagagactcttactgagcagcattcagtggtcaggccgggcctgtttatcttcccctgtggaagcatcatagcgtccgtccttcacaggtgacccggaaagtgtagctggggagtatggacgacactccctctacaagatgctcggctacttcagcctggtggggcttctgcgcctgcattctctactgggggattactaccaggctatcaaggtgctggagaatatcgagctgaacaagaaagtaagtacacctgtctgctctgctctgacttccaagaacacagacctcctgggacgagtggccaggaagcagacagggtcgagcttgaggagtctgcacaggatggctgacaatactgaagtgtgaactctcagagtctgtgtcctgtctgcagaacacaagagtgagagctctttactcgtgtagagttaaaagctgggcatgggggctggagaggtggctcagcagttgagagcactgactgctcttccagaggtcctgagttcaattcccagcagccacatggtgccccacaaccatctgtaataagacctgataccctcttccggtgtgtctgaagccagcaacagtgtacccacatacatgaaatacatagattaaaaaaatctgggcatgggtgatgcatgcactgtggggagacaaggacagcagaaaaaccacaaattcaaggccagccagggttctatatcattaagaccctgtctccaaaagcaaaaacaaa

SEQ ID NO: 23414 - DNA, 1569 bp, Mus musculus
ttactaatagttttgtgatacgggccatttagaggggtttggggcttagcttgatggtagagctttgtctggcattggcatgatcaaagtcttggattcagtcctcagcactgaaaataaacatctgaagcagtgagttaggcaggatgggctccaggcctgtggcgttgatggggggggggggcattcctaggcagcgtgggtgacctaagaacaccggcccggtagatctgaagaccagtgtaggccatgggtgctaacttaaatcttagcaagtgtttaggaattggctttccagtactgtgaggccaactgggaaggtcctggggagggttctagagaagaatcaaagaacccaagaagactaagcactgagtgggagcttgggggttggtgttgtagactgtctaggagaatacacttactagttggtgtgtgcgaggcaacacgagacacagtgctgtgtgccagtggggctcacagagtatgtgttaccttctcccagattaacaagcagaacgagcagatgcatgctctgctggccattgctctcaccatgtacccgatgcggatcgacgagagcatacacctccagctgcgggagaaatacggggacaagatgctgcgcatgcagaagggggacccccaggtctatgaggaacttttcagctatgcctgccccaagttcctgtcgcctgtggtgccaaactacgacaatgtccatcctaactaccacaaagagcccttcctgcagcagctgaaggtgttttccgatgaggtgcagcagcaggcccagctctccaccatccgcagcttcctcaagctctacaccaccatgcctgtggccaagctggccggcttcctggacctcaccgagcaggagttccgcatccagctgctcgtcttcaagcacaagatgaagaatctggtgtggaccagtggcatttctgccctagatggcgaattccagtcggcctcggaggtggacttctatattgataaggtatggtatacccggaaccagtcactccgcttatcctctcaaaggtgtgaacaatagatgatagccttgcatcagatgcgtagtaggttagaagtgtgagtagtgggaacaggggaagggtggtggagacaagcacacgcaggagaagtgggggataaaatgctgtgcatgcagaagtgggacgtccatgtctactaggaactattcagctatgcctgccccaagttcttgttgccgtggtggtttcaaactgcaacagtgtacatcctactggttacaggcataggatggtacaacggatggtacaacactttgtttagaaagtgacctgtaagctgaaacagagcttagcgttagctgtgagagaatgggcaacactctcactgtgtatactcagtttacccatgcctgccctgaggtgtgtgacacatcaccgcccctcgcctcctgccaagattgttgtgcagttcacctgctctcctgttgctgggtttgtgcctgactttggattgttaagtaaggacacatgatgggcttttttttttttttttttttttttgattttt

SEQ ID NO: 23415 - DNA, 1097 bp, Mus musculus
ttgaaactcatgtcacctcactcaggagctgtatttatgagggttgcaagtccagcccctcagagcgctctgtgctgtgtcagaagggaatgggctgaagacagttccgtttcctctccctcatctcctttgctctgtgggaacccaggattaccacacagggagctgctggctgagctggggcactgactcaggtcagcctggaagggatgctttgggtgggtgttctctcagtcaggctttctgtcttccccacgtccggggatgatgggcccattcctttttgtggtctgggcagtctgtcactggggactgtgccaggcagcttatggtctaagcactgttcttacactcggggacttcagagtccctccctttgtgcatcctgggaaggaactcactgtatctcagttgccagtgccccttggtagtctctccagattcacttgctgtcctggaaccagggccaccacctcagaggtctttcagaggagccctatgacccagttgctgtaacccaggagagggctctaccaggctgtctctgtgtcaaggaaagtttgtatctcagtgaacaggacaacctttctcatagtcacctgtgtcctgtcaacatgggcccatcagaagacatccagaatccagttctcctacaggcacaagttgtaaatgctgacatcaaagttgagtttgtcacagtgggctacacttgtcctgggttttccattgtgctaggcctgcacattagagggcttgccccgactgattgaacccttatctgctggctgctgcagagtagtcatgtttattctattaggacaagaacacaggtcatatgttctaatagagttatgggaaacttccagcaggtgcaggaaatatttatggggacagggaaatgaaaatattggtgaaggtcaggctgcttagtgtcaacagcccaaagaaaggacactgatgtgcagtgtaccaggtggggtaccaggtggggtccaagttagattctcatctgtgctggacaagttctgattccgaacacataagtgttatccctggggaaacaaggtggcacatgtcaggggcaagtgaaatgtgtt

SEQ ID NO: 23416 - DNA, 1121 bp, Mus musculus
cgtgttctctgtgattggggtgcgggagccgcagccagcagcaagtgaagcatttgtgaagtttgcagacgcacaccgcagcattgagaagttcggcattcggctactgaaaaccatcaaaccggtgggtctctcagagtacagcgtgccccactggccaaggcaggagcgatagctagcacaggagggattctgggctggagtcaggtgccagatgcagacactagctttgtcacctctgtggccatccatccatcagtcactgctgccctgggtccctgttcaactcaagactggtttgaacactgttctgttgctaggtcacatttcttgacgtagtcttctaaccctgacacatgtcctttgcccaagtccccaggaagggataacacattagtgacatttgtcccaacctcccagatgctgacggacctgaacacgtacctcaataaagccatccctgatacacgcctcaccatcaagaagtacctggatgtgaagtttgagtacctggtaagtggactgcagtgtctggctagctgaggtgagctcaccctggaggccagccctgaggccagcaggcaggctgggcccagacctcagctgcgtcaggcctgtgggactaaagtcctgattagacaattaggaggagcctagactctgcattcccacaccaaggagctcctagctgccctcccattctgtatcatttctagcagcagctcagactaggtttaggaaaaaggtgttttgagtcctagatgataatctgatgctaaaggagctaagaaaatggcctgttgagtattcaggctttttgctgcagctcttagagtcctgacttagtaagcctatacccagcttgtcttcaaggagctgccaggatctattgtgcagccagtgccaccacacacagtatcgttgggttttggttttggttttagccatttcctattcttgagatagagccctaggccttattcatgctaggcaagtgctgtccccagagtctcctgagacttggatatgactgctttgggatttctcaagccttcaggcctttgtaaccttccagaggggagcctcatacccctggttcccctttcctgggtctccgtcca

SEQ ID NO: 23417 - DNA, 1192 bp, Mus musculus
cttgcttcaaacacctttacctgctgagcccaccagccagccctctcttgaattttctaccattttttccccttttctctcaccttttttttttttccaagacagggtttctctgtgtagccctggctgtcctggaactcactctgtagaccaggctggccttgtactcaaaaatctgcctgcctctgcctcccgagtgctgggattaaaggtgtgcaccactgtggctggctttctaccatctggtctctttgtgttgcagtctgaataatttcttacctgttttccagactagtaattcactctgttgctttgttatttaacctgtgttaatttaacaaacaaactcatatatgtgtacatatggttatgtatatttactccccaagaaacactctttggtccttgaggtccttccatataaactcctgtcccctggaaaatatcacgaggctggcactctagtcactgctcagagggagagcacttttgtagtacgctcccagcatcgtaaacacacacacacacaagtgcgagcacgcacaccctgtacacgtgctctggcttgtgtcactgaactccagtcccagcccttgcggtgactgctcctgtaagcctcttcctttttatatgtgaattgcatctgctgcctgtcatagtggaatctttgacactcagattggctgcccttcctgcagagggctctgtgcctccatccccagcactttctccctaaatagttgccaggaaaacttcaggactttctccagatgatgtggacacggtgggccatccagcagggctgcacatcttcagggtcctttcctttcttgttctaccccagggctctgctccctgtaacctccaggggtgaggaaggtgccggttgggcctgggaagatggctcaggagttaagagcatttcctggccttgtggaggacccagatttgattcccagaacccacagcagctcacaaccatgtataacagcagtccctgcaatctgatgccctcttattctctgcagacactgccaagtttttaaacaaaggggcatgtttgtgtctggcctgtttctatcctgagagtgttagcccttggagccccagtatggaaagagcctcccattggatcctcatctttggttgatatcctgtcctgtcaggtggcccatgctcttaaacaatattt

SEQ ID NO: 23418 - DNA, 1247 bp, Mus musculus
gtaaaacatgaacacaccaaccaaggtgaccctgaacttctttctctcccaggtctccagcccagaggtcatcttctgcgaaaatggctgtggatcccttatctagcaaagccctgaaggtgaggctgctagctccttgtagtctctctctgctgctgctcctggtagagcaccgacatcccaattcccctttccttcctggaagccccaaaggcgactcagcagcagaggcaggttacttcctgttgagcgcgcttcccccattgcaaggggctttccaggctgggtttctcagctgggtccaggacttgacgcgtggttagtttgagccttgggtgacctcctgtaggctgatgctggtcctgctaactttcaaggtcttggctcaagtccagtaaccgccgaaacggggagagtgggggcgcaatgagaaggggggcgccatgggaagtggggcggcatcctcaagcacgggccccgtgcctctgtttccccatggccctcaggtcaagcgcgagttgagcgagaacacgccgcacctgtcggatgaagcgctgatggggctgtcggtgcgcgagctgaaccgcaacctgcgcgggctgtcggcggaggaggtgacgcggctgaagcagcggcgccgcacactcaagaaccgcggctacgcggccagctgccgcgtgaagcgcgtgtgccagaaggaggagctgcagaagcagaagtccgagctggagcgcgaggtggacaagctggcgcgcgagaacgccgccatgcgcctggagctcgacgcgctgcgcggcaagtgtgaagcgctgcagggcttcgcgcgctccgtggccgccgcccgcgggcccgccgcactggtggcgcccgccagcgtcatcaccatcgtcaagtcggcgccgggcccagcccctgctgctgaccccgccccctgctcctagtacccgcccccaccccaccacacccctcggaggccactcccttcttcaagtgcctgagttccttctgcttcccattcctttcctctgccactcgttgtagtgacttcacattcctttcctgggctctgactcttgcaggcccccaaactgggacctgatggccctggggaggggcaactttgctaagttgggggtggggggaggcgttagggttctaagtttccctgggctgaaagtccggctcaaattgaaaatgaggtcgtgtggccagaaggagagctggtggaagaggctttggattgtgcc

SEQ ID NO: 23419 - DNA, 1147 bp, Mus musculus
ggcctcttccctcactcccggacttgccacatacaagattcctctagcatctcttgtgcttttaggttttgcagcccttctggcttttctagactagtcctctatagcaccgttatagtaaagtgacccctccgggggtcggccaatcctttcataggggttgtatatcagatatttacattgtgattcataacagcagcaaggtgacagttatgaactagcaacagattatggttaggggtcactacaacatgaactgtattaaaagatcccaccattaggaaggttgagaaccagtgtttcaaagtaaactggagctataagaaaccaggcagtaccacccagaaaaaccctactgccctggctgaagaccagaggagtccacccctcaccaggatggcagagtcagtgagtatgcatacaaacccatcccctgactgagactgaagcctagctcccagaactcagtagttctctctccctggctcaaaaacactgggatgtagttcccacagggctgtagaaaatcagacttggggctggagagatggctcagtggttaagagcaccaactgctcttccaaaggtcctgagttcaaatcccagcaaccacatggtgcctcacaaccatctgttatgagatctgacgccctcttctggtgtgtctgaagacagctacagtgtacttacataaaataataaatcttttttaaaaaaaatcagacttatgtgaaagtagaaggaagacagttttcaaagcttaggacctgtctctccctggctctgtacagtctgagctcatttcttgcctatctccatccacacctgcttgtgagagctagcaatgggatatagcctcccctcacccataagtcccttcccacccatccgaggccactcatttagagcacacacaaaatagtccaagacatacacttctcttgtggaaaaagagaacttgactttattcagaaagtctacaaaatactcaaggcagataactggctcacttgaagtcagaaaataaataaactctgggagctgcgcaaatttttttttttttttaaaaaaaaaacctattgttgccacccagctctccctaaatataagattaaatgtgatttatttgtagatataaaatataagt

SEQ ID NO: 23420 - DNA, 2308 bp, Mus musculus
ctgcactagctggggcaggggcagaggacagcggctgtagctgtcacatctctgcgactcatcctgtaccgtgtgttggccagaagctgcatcctaagccccctccccaacaagatatctgccgagctgtcaggcccagcccaccctacaccgtgcaatacccagacccagcctggtctttccccaggcctttgcccgcttctccctggtcacccttgtccagtgtgagttttgtcacattctgggcaggtagagacgtgaatgctctgtggaccctccccctctcccaacctaggcctgtctggcatgctgcaaggaccagagccagcccccaggagcctcagggcccacttaggaaggatgccttgtgcctatgggccctttggtgacatgtggggctctggatccttgggtgtcctcactgtggccactctgcctgctgaggacagccagaagcccacactgccctctcacttgggtccagttcttgatagttgggggcagagcccccacactcccttatacttcctgactgtgccagggcttgggttccccaccacctcctcaatggagcaaagactcctgctaggccctggtctccctggggtttatccctcctgggtcatgggaaaagtcagtctccacattacagatcacttccagagggaggctggagggatggtcatacagcggggccaaggtaggggtggtctcagaccctcctgggtcccctgaccatacagggcctggtggtctgctccatctggcccctggcccatctcttctgtgccttagtcacatatgaaagcccctccccagttcccgtctgctccaggcactcctcgttgagctgctggcactcagggttccgcagcgctgggttgggcatccttgggaccacccaccctctccctggctccctctacacgcacatcccagagctgcctcccagggctgggatctcagaggtagggtggcaggggcctggtaagcagaattcaagcagcacttggtcttggctccagtagcctcttgaggtggagagtggtggggagccctaccttgtagccttcagtggatgctctccccttggtcacctctggaacaaacaggttccttccctggggtccatagggagggacctcatggggctgtcacatcctagcaaccttcttagcctccttccttccttccacacggcccagaggccagctcggccccacccagagggcctggccagctgctcccaagccacccagggaggcagcagacaggtgggagctcctggggcacggccgtgggattgcttccaccagtgtgtttctgagacttctccttatcttccaggccaaagtatgttgctgcttcctgtctccactggtccccacctaccctggcacttgccctgtgacatgatgggtgaggctgtgggggaactcagtggcaggaagctagtggtccctgggaacaggggacaggaatccgtacccaactgccccgttctttcttcccattctttcttcctaggatgcataaactatcttgtctcatttattttttaattttttttcagatagagtagctctttgtacataaaaaaaatacttgaaaattgtatgatgtatgagaagacagagccccctagttttgtattttgtcctgtgactgccatgcgttccaccagaaagccgctctattttggtctctgtgatattttaaatgcgtgacagaagcaagcaaataaagtcaggaagaaatatatatatgagataatatagattgtattgaaatctcttctgcctgccagcgaggttttttttttcttttcccctcttgtctgggagaagtgtagtggccgtgggcagagacgtccaccctctctcttcctgtgtgtgaagtggatgtaggtcatgggggcgtttacaccgtctgggtctaaaatcaggtcccacatccctatttgacagtttcttctctcttcccagacagcctaacacggggaatttcctctccccatccctgagagggctgggcctcagtccttgtttttttccagaggcaggtggtcacctcttctgtaaggcatctcccagaagacttgcacacctgcctcatcttccctgagccaaccctccatccttagggaccaggagcctagggcaggagctcctggtcatgggtaccttccctgcatgcaccatgcctttccaagagcctggcctatgggtgacaggcatgactggaatgcacgtgggggagggaacttcctaagcagcctataacccgaaggtaaacggcctacctacat

SEQ ID NO: 23421 - DNA, 1179 bp, Mus musculus
tctgtcctgccagggggaggtcctgtgagagccagtgtgagcgtaggcctgtggcctgccctggcctttgccataggtgataatgctggagagccagaggccacatccagcccctgaccttcatccctgcagtgctggctgcaggtcccaggccttcagcttgtactggggtaggactcagcaactccctgcagggtgctctggagtgagcgtcacaccactcactgagcgcacgggagcatgtccagggaattcagctgtcagcagggcctcatatagttgctgctcttcgccccacagcaggctgaggaggccattgtccccagttcacagctgaggaaacaggcacagagagcttgagaacccggcctaaagccacacagctcctaatcggtagagccatggtccacagctggacagtctggcccaggggcatgtggttcttcaccccagctctatgctgccctgtatcctgaaaggtcagaggtcatcagacgactgcagggctaagtgtcactgcagctcagcccttggcttgccgctctgttctgagtgaccgctctgctgacttttcgcagcctttgtcatctataacttcctgagcttgtgctatgagtacctcgggggagagagtgccatcatgtctgagatcagagggaaggccattgagtgagtatgacagcttcctgagccccatgtgggcaactcccagcctcacccacaccctgggtagacacatagaccatacccacgcaccccctgggtgggcacacagaccaccccagcccctggccccagccctctctacttgtcattcccaggtccagctgtatgtacggcacgtgctgcctctggggaaagacctactccatcggattcctgcggttctgtaaacaggtgtgtggccagcgacagccccagcttgggagcaggcaaggggccctggttcagacctttgtcctggagggtgattcgtgttgcatgctgacctgtgccatacctgtggaggtctccaggcccttgagctgtccccaagctattctggagacaccatgttaatgtcatctgctgagactggcagtgaacatcctggaagtctcaggggcagcctggggccggagaagctggcccagagtcttactgtgttcaagaaccaggaagcacacagttctggaccat

SEQ ID NO: 23422 - DNA, 2165 bp, Mus musculus
aaagaccctctggccaaagctagttcggggtggactgcctgcggctgtctgtggcttggggggcagtacctagaagcctggtttgggaaaggggccacaggctcttctggtagtattggctggggacccaagctccctgcagaacatggatattagcaggcagtgtcccacccattgagacgtgcagcttcacaccgtggtttcttaagcagacttcacactgcagaaattctcccaacaaatggctaatcagttcagatagacatggggctgggatggccgctcagcccaccagagcagaggagcgcattggctgggtaaaccgaggcagccaggcacctgaccgttgtcttttcttccctcctagtgtcttcactgcattttctttaaaaaaaaaaaaattaaatacaaataagagaaaggacagaaagaaagaacagttcacatgaacaaaaaagagaaaaacaaacaaaccacaaaacccacaacccagcacaaagtcgacaatggattttgtttctttgatttattttgccaatggcaaaaagacaagacctcgttagcactgaggattcttgttcccttgccttgcccactgctcccgacctgaaggctgccaacactcctctaaggacactgggtcacatgccagccacctgttctcgccaccggccaccacgtgccgggccgccatcggaggtgcctgaagagcttgtgtcagggagcggtttggccagtcagagacaagtcccaagagatttcatggagccttggatgacacacacgccatcagcccttgggtgatgacagtgaccagtgttgtatggggctttcccagaatccccttccctgagcatcctggtctcccccacacacacctgtcacctctctacagagaccctgagggtgcggtgagatggaggccatgatgccttgtgtgactgtgagtgtgtgtgtgtatgcatgagagagagagagagagagagagagagagagagagagagactgagagagagagagagactgagagactgactgagagactgactgagagactgctgacttgtatttttcagagctgcaggtggcctgccacgcctgcctggccaagtttctgttcccctcctcctaaagtcaaggtggggtggacaatgacttccacatccctcagggcatagagtccttgccaccacctgtccccagatgccagtgtgtggcacccctccccccccaacttccattcctgatcttaggcaagttcttggagtctgctcccagatggcatcggctctgagataccggttacttccctggtcctgagagtcacctgtggtcacccctcttcccaggcctgacttctgagtaggaccctgggtcagggctaagtgttgaatttacccttcctggttaacacctgttttgttggtttttttattattattattattattatttttgtttgttttctcagtgtgtgtatttcctaatttatttacctctttttttcccctttctttcttttttttaattaaagagcaaaactttttattactttgtaatttaaaaaactgaaaaaaaaattactgaagaactttggggggaattttgtacttttttcctgtgtaaatattggacttttttgagctttattgtggttgttaatttgaagtaataaagtagaaaaggacaaagtgatatagataccctctgtctgcctctttgctcttggggtttctcatcgctgacttaccagggactgtacatcacaaagaagccatcagcctcaggcagctgtggctggggccattaggacctgtcctgtggtatatcaagccttcagagctcaaggtacacagtgtagcctctggcctccgggtgaggagagcgctctttaggtggtgcggggcctaggtctacacagtgaaagatgaggcttcccccaagacatcatgttatttatagaagagttctgagggtttgggacacttgcttccctgccagaaactggccttgggttacagcctgggtcaagccatcagacacctctcctctggttgaccatgcagttctgtgaggtgatctctgctcaccctggtgagcaggaccctggtcccttggccagatcctgatgtggtagtctccactctcacccactttgtctcact

SEQ ID NO: 23423 - DNA, 1164 bp, Mus musculus
atggagtagacatactcatctaaaatgatgtaagaacaccagtaaccaaagtggggggaaacagcataaaccccacgggtgacccgcaacaagtaacaagggaggcaaaggcaggcgatctccagttcaaggccagctaaagtggagggaggggggcaggaattcttctttaagtacaacacatagtaaaattttatctttttttccttagtccttaaaggaaagaaattaagcctcccggtgccagtttgaagagaagggccacccctatggcagctaaagcaaaccatccggatcactgcttcatgacttcaagccaagacttgggacttcatgttagagtgactggtgtgaatttgagcaaagcaccatcttgggataaacggcagcacctccctaatccaccatggatagaatgggatacctagcccatctgcccaaggatggtgccctacaagtgccaagtgaagagaagcagtagatacctccgtgagtggctcaactccttgcttccttaggactatacaactcatgcccagggctgggaagatccattcagagaacctccctaggtcagcgtgctgaactcgagccacatgtccacctggcctgcaagctgtaagcagtccaaataaccagctctgccaagtgcttaggactgcttagctcacttgttagctgagatggacaccatggccactgtgtaaatccattctgtgctaagaaccaccaatgtagccttcccctcccagcctgaggtgctaaatagaatgcctaatacactcaccctgcttaatgttttcactgcttggaggaaaacattaagagtacacttaaactctttttaagttttaatgtaataaaaaattcacacctttattgtcaagtatttatttatacctacaaaagaaaacaagatggtatcaaaaggacaatttacaaactaagaatagtagtaacatagctctgagcatcctgtgcataacatcacacctacaattcaagtctcaatgacaggaatgtgtggagagaccagcaagggcgttagcagagcactgatcccaagcaaaagccaccaacctttttagatgagaagtctgcacaatggatggttagggagaagcagcccacagcctaacacctaagccctttccctaagtgagt

SEQ ID NO: 23424 - DNA, 3184 bp, Mus musculus
tcacatactcggcattttcttcccactaggaggccgctcacgataccggactacttcttcagccaacaatcccaatctgatgtatcaggacgagtgtgaccggaggcttcgaggggtcaaggatggtggccggagagattctacaagctacagggatcgtagtgaaaccgatagagccagttatgctaatggcagtggctatggaagcccaaattctgcctttggggcacaagcaggccaatacacctatgctcaaggcacctatggggcagctgcctatggcaccagtggctacacggcgcaggagtatgctgctggcacttacggggcgagcagcactgcctcagcagggaggagctctcagagctccagccagcagtttagtgggataggccgatctgggcagcagccacagccactgatgtcacagcagtttgcacagcctccaggagctaccaatatgataggctacatggggcagactgcttaccagtaccctccccctccccctccccctcctccatctcgcaaatgaaactgcatggcaggagtgactcgtgcagatgaattacacatctaaaggaacactgtcttttacccttctagaccttttcatttttattttttcttttctcaaccattacggtttatctttttttaatgcagatagttaaaatttcactgccaggtttcttctgcccacccaaaagatccagtctataattacagattttgtaagaaaaaatatatatacacataactgactggaaagaattaatttctttcccccagcttaatgcatgttgaggatattgagctatttttcatcttaaaggtattaggcacttttgttggagcctgtttatccatgggagggtgggtagggaaggagggactgctctgcaggaagtggtatctgttctttagactgctctccttagggaggagccaagagggatttccatgcacactgcccatggtgggtttaagttactgaagttcgattactcaggcctgatgaatttttaagactgctttgttggtcatttggctgatggcttcttatgtgcattcaacagttaaaaattcctaatcgattctgtcatcatgccccctccccacttgttcctgcagttattaaatattaaccaggttagtgttgagttagaaattacatttctgagttcaagcgttgtctttttaagtttaaaaaactataaagggttgtttttactaggtagactggcatctgggtagaggctgcctgggatttttatccccacataaccaggggccatctgaaagtcattttctagccagatcagccactgagcggtaagcatcagcgctcagcagagccttccgagcagcatttagaaagcacctttgggaatgatggactgcaagggagtgggcggatcttcctcttaaacagtattcttagagtaggattgacctcatgggctgctctgcccacttggtcaggctctcctgagcaggactgctaaagagcttgcctcctcaaagcctggtctctgaggtgctttctaacagctggaggcacttgttctgggctttcctttgccctcagtttttcacaggtaggtagtagccatggagggctgaagcccaggctctccttactctctggagtgtgaaggtaggggtgagctcgtctcacccctttattaaatgctcctggaacttggaagagcagcagatgaagttggaaagaaaattctgctcttatcacctaaacaggacaggagagcagatgccccagcgcctctagtagatggtagtggtggggctagtgtgtggctgttacctgggccgctcaaattcattccagggaggaggctccactgcattctttggctgtgccctgagggtgcctgctcctttgtacggtaacagtcaattttgaggtttctttcaggaagagaaagggatggttttgaggggctcagaaaataggattcagtgtgtaacataacaggtaggttgtcagcatgcttggcattcttctgttttccttaccgttttacagactatgaagctgaggggggatggtaggcacagatgtgtggcaaccctgctctgtgctctgaaaccaaagtgtgtcctgtcttgtctgtctctcaccctgccaaaagcaagtgtctaatcactgatgctgaccagcctgttacagatactttctacaaccaaattcagatttattttttattaagcattataccatgggctgtcctgtgctcctgtcactcttcaaaaacaccccttctattactgcctccggggatgaagcagtagctaggttgcttaacctcccctctccagcagaggcataatccagataagtagcagatgtcatatttcataagctcttttggcctgggtacagcagaaaactagcagttttcctacttggcgcaagtgacttgtgcctccttgtctgtcctttgtcagcacaggtgcaggcaaacccttccagctgggttaattgccgtttatggtttactcacttagggaaagggcttaggtgttaggctgtgggctgcttctccctaaccatccattgtgcagacttctcatctaaaaaggttggtggcttttgcttgggatcagtgctctgctaacgcccttgctggtctctccacacattcctgtcattgagacttgaattgtaggtgtgatgttatgcacaggatgctcagagctatgttactactattcttagtttgtaaattgtccttttgataccatcttgttttcttttgtaggtataaataaatacttgacaataaaggtgtgaattttttattacattaaaacttaaaaagagtttaagtgtactcttaatgttttcctccaagcagtgaaaacattaagcagggtgagtgtattaggcattctatttagcacctcaggctgggaggggaaggctacattggtggttcttagcacagaatggatttacacagtggccatggtgtccatctcagctaacaagtgagctaagcagtcctaagcacttggcagagctggttatttggactgcttacagcttgcaggccaggtggacatgtggctcgagttcagcacgctgacctagggaggttctctgaatggatcttcccagccctgggcatgagttgtatagtcctaaggaagcaaggag

SEQ ID NO: 23425 - DNA, 1190 bp, Mus musculus
ttggttgtattgttggtagactgtgccaggcttctcccaacagagtaaaagtgatttggccctgcactttaatggtggttactaagttcttctacattctagcttcgaaagggggtggcactagattttgtcattctgaactctggtctcagtgtagctcctgtcagcatatcattacagaagaggcaggagtttggggtattggagggagctcccatagggtaatcacaaaccaagatgcagggcctgcctgtgtcctgagtggcactgatcctcttttactctgttgggatgagtcttttttttgtacctactcagggcagttactaacttcatcttctcccctcttgctgtcatctgcattcgtgctctccacctcttggcatgtctttaccttctctttctctgccacatcaacctacacaatgtctcctcattgacgtggaagatgtggaagatgtcaagtttgtcatcaactacgattatccaaacagctcagaggattatgttcaccgtattggccgaacggcccgcagcaccaacaagggcactgcctatactttctttaccccgggcaacctgaagcaggctagagagctgatcaaagtattggaagaggccaatcaagccatcaatccaaaattgatgcagcttgtggaccacagaggtggcggcggaggagggggtaagggtaagtcctggaattttccaggtactgccaaggacttgtaacactaattgtgccatttttttctgctggtttttctttgttggtgagtttttagttttcctttttgtttgttttgtttggatgacaaggctcttgtttggagttggaaagaaatttgtggctttgaataatctcattttaagtgaaaaagtaagtctggtcattgtgttactgttagaacccagtgttcttgtagttgaggatttaagacccattatttatttaaatttggggttacatggtacatgtccaaaattaaactagtagtacatgcctgtgaatcttttagtttggtttttattctttaagacagggtttctctgtgtagccctggctgttctggagctcactttgtagaccaggctgttctcaaactcagaaatcaacctaacaaagctgtcgctgtccagccaagcttgggttttgttttttcaagacagggtttttctgtatagccctg

SEQ ID NO: 23426 - DNA, 1189 bp, Mus musculus
atttgaccctggtgtggtgactcacatttataatcccagtgtttaggaggctgaggcaggaggatttcataaagaaggctggagaggaaaggattacaactcttttattctggctctttctttagagtaaactaaacacactagaccctgatgtcccaatagtttgctttatagagtagcagagaagtttttgcccccagcataagtggggaaattggctaagaagctgttgtaaatttgaaggacttgcttgaagtacatttttttcgatgtccacagtcttggtcttgcagtttaaaagagtaccacttctctgcaagagcagagaccgttagtttttattgtatccagaatctctagtgccaattaaaactatacttagtataaagtcggtatcactaactttgtcagagagctaaaataggtgggaaactgaggtgggaggaatgctgttcctttcctgtcacatgagatggatattaacaaatctacattttctggtgtctctaggtttggagcaagaggtggtagtgggcttccccctaagaagtttggtaatcctggggagcggttacgaaaaaagaagtgggatttgagtgaactccctaaatttgagaagaatttttatgttgagcatccagaagtagcaagactgactccggtaagaaaggggggaggggggagtgtttaaatatagggtaatatttcaagtattgttttatatttgattttatattatggcagatctttttaatgtgttgtgggtttgcttgttttgtttttttgtgggggtatttctttgtttgttttctgagacagggtttctcttgtgtgttcctttgatgtcctggaactcgctttgtagaccaggctggcctccagctcagagatcactctgcatctgtctcctgagtactaggactaaagaattgcatcaccatgccttgcctctgtgtcttttgtaggatggaattattgtatttgtagaatagtccactgtagatccaggctggtcttgaacttgctgtcctgctactttagctccaggctgcaggggtctttgggcagccacacttggtcaaaccctgagctttgtccatgaagacaggtgctcagccacatgacgcaggttttcttttagcagctctgctctccagcctagcaccacatgcatgtaaagtttacactg

SEQ ID NO: 23427 - DNA, 1409 bp, Mus musculus
agtgccggctttccttttcatgacgcctcatccactctttccctctgcagattttccagggcagctttgtggattgggaccacttccttcatgatcctggttcttcccgttgtctttgagacagaaaagttgcagatggagcaacagcagcaactgcagcaacggcaggtgagcacatgttcttcttggcggtgggccaaccgcagagccccaggagattggcacttaaccccaagtgggagcaggtccctgtactttcaggtacttggcagtgtagaatttgcctgcccctcatgtgtgacagaagggaccgacgactggaactatgcagtatcttaacagtctttttttttttttttttcttttccagatacttttagggcctaacacagggctgtcaggaggaatgccaggggctctacctccacttcctggaaagatgtagattcttccttcggtatttgtccttgtgggagaactttgaaattcatttgtgtttgaactgctgattgttggaactttttattcttttttttaaccttggcacatggatctatttgaacatagtgggaactttctctgtttctcatggagagaccccaggtacacctgtgccctacataatgaagtccctcacttacttcttcctgttctcactccaatgctggagtacagccatgtggaaggttagcctactctctaataaactgctcctaaggaagttcttacatgcccattgtgggaaagaagtaagtacccctgaccataaggacttttttttaatggaaatgtctaggacatgtaagcaccgtggcactgacaaaattcattatacctgagtacagaagtcaccaggaatcccagagagaagggaggctggctgtagctttagccagagggggactgggcagagcaggcactcatttcctctgcagagtttggctcttagacctgcttatgtataaaaaagaagtcagcgctcactttttgtatttaaatattaaaagaactcgaactgaaagtgttattgctgtgtttgtggtagtatttcacacctaggttgttttagaaagccaggaacactgcctgccaaatttcctctggcttcagccagcatctgtttcaacctcatttcatagaccagtctgacctcaaaaagctttctcttcttttccttgtgtgtgtggtatgttttttgtttgttttatttttttttttttttcaagactgtttctttgtgtagccttggctatcctggaacttaatttgtagactagagctggctgagaactcagacctgcctacctctgctttccaggtgctaggattaagggcaggagtcaccaattcctgtttagtgaagtttccaaaaaggaaagagaacatttattattgaacatagtagtgat

SEQ ID NO: 23428 - DNA, 1761 bp, Mus musculus
gaacacttagggcaagccattgaaccctttgctatttcagagagggagccaagaagggcgtcctttgagggggctgggttatttctccctttccataaggtcttgatacaggctctgctggtagtgtcactgatgcttcaggcttacggaaaggccgccccttttctctcctgtggcaccatggggtctgaggacacagtacatgcagagccaagaaactgtcaagactccagcagtcacactgcatgtcacctgcagtccattaggcctcttcttggtccctttaaaccccagccagccttggggttttataagaggctctgctattccaaaataggtgaattgcacatcattctagcaagacagtggtgaaagatatgcctaataccacgtgggtaaagccagagtagggtagtcactggtggctcttcactctaatcgtgtccctatcatttcactacattgactggggaggctttgggacaagacaatgaacagggagagtactcatagttggcccatttttagcaaaatcaaacacatctacactgacctaaaattccatagtttgggacagagttgggcgaggaactgccatgaaggtaagcttcagggtttgagcccggtaggcacgtcctgagctccagagctgtggcagcaatctcaggttggctgtatgcatcaagctagagcctctgagtttggcgtctgtgtagtttctttgacaaacagggttggcttgccccacttcaactagttctagatcatttttttcttgtaattttggaaaatgaggggaaataattaccatacccccataccaatgtgtttgtggtggccttcaaggcaggtgacctggccagcccttaccgatccatggtctctgcaggtctgagagctgccccactggcctgcttcttctcccttggcagcagagctacctggggcttgcatgttaatcctgagcaagcttgttggggtgaaggggggctgtctccccactgtgactggagtgcatgtttacaccagcactttttctgcacatgtatcttcaatccaacaaggccgttttttattcaagtggcagaggcctcgagtggctactgcactgcgctcagccatggtcatctgcaccattttctacaccagatctgcttggcaccatggggaactctgcccctgcacaatgacattccaatcactaccagccagaagttacagccgaccttgctgattgtcacaagcaggaccttgggtccattggcactgtcggtgatagtaagccatttcttgggaagaggagactcttccctacagatctgcttgggcctgtgcaaatggcactgcaaacgagccacacacacgtggagtccatgagctagtgggatgtacaaagacgcttaagcatttcagggctggttctgttcatatccaattctggtgcttaggaacagggacccatgttaatgccccagggcaaagccccactcctgtgaaggaaggggcagcctgaccctgacgcccagcaaggggcagccctaggctttgtttttcttgctttattcccttttctgttggccttgtgctgggtttgtttacaaagatgtattttgtttaaccaaatattaaaaatgaaaagctgaacacaagtctacttgtctgattatgtaaaaacctttggcaggattttgtcatagaagggatgtcaccactctgagacacagtaatcagatttcctagctgaaaaaccaagagaaagta

SEQ ID NO: 23429 - DNA, 1176 bp, Mus musculus
gcatctgggctcagtgctctgaattgagctcctagaggaactgccatgaccaagcattactaggggcctcccatcattctacacagctacagctccacccacctggggaaggagcttccttacacaattgcttcttcccagaaatagcctcaactccacctggatgtttgattctagatccagtccccaattaaccctcacgctcctctgagggtgcttgggctctggacgtcctgggcaatgaaggcagcagcctgtggccagctggtagaaccctatctttttatgactcactactttttatactgtttctcaaaagccttctaatcccaggttagctcagcatttattcagggagtcttcattgctagatgcttatcgggcacttgttgtgccaggctcttcttttggatgttaatgcatctagattccagagattaccgtgaacccaggtcacagctcctcagctcaggggtccaagatcgtctttgctgctgttgttattgttgtttgtttgagacaggtgacttagggttttagtgctgctgtgaagagacaccatgaccaaggctactcttttttttcttcaatttatttatttatttattatttattggatattttcttcatttacatttcaaatgctatcgccaaagcccccataccctccccccactctgctccccaacccattcactcccacttcctggccctggcattcccctgtactggggcatatgatcttcgcaagaccaagggcctctcctcccattgatggctgactaggccactgtctgctacatacgcagctagagacacagctctgggggatactggttagttcatccaaggcaactcttataaaggaaaacagttaacagggcctggcttacagtttcagaggttcactccatcatcatcatggtgggaagcatggcagacatggtgctggaggagccaagagatgtatgtcttgatccaaaaggcagcagaagactgtcacactgggcgtagtttgagcataggagacctcaaagcccacacccacagagacacactcaaagccacacttactcaaacaaggcaacacttcctactagtgccattccctgtaggccaggcattcaaatacacaagtctatgggagccaaacttaaatcaccacatggggggttc

SEQ ID NO: 23430 - DNA, 1103 bp, Mus musculus
ccacaattagtccacgataccaagccatgggtaggtgtccaaggtcctgccagcccagaggttctgaactagcaccctcccaaaagagctccacaatccaagaccagtgtccccagcttcaggcaagacagctctctatcctgttcagccaagccattcctatagttcatgccctgagcagtactggctgttcagtcctgcagatgctctgagagccactcttgtcctcgggcacctcacgtgccagtattcatttagctggggttgttgagcatagctgtgtgcctggtggtatcaaggaacagtcctgtgggaaggcgtatgtgtccatagctctgccacgtaggcctgggaaggagtgagtgaggaagagtcaggaacagatctaaaagtaggctgccctgctgtgcccggctctcagaattcttgtcctgccctggagctagcgctcaaggcagaggccacagggtaggtctcacatgtcctgaccctggttctcttggcagtacactgtgggagcatccggcaaacagctacaattctgagcatggataaagactgtctgcgcacaggagacaaggccactgtccacttccgcttcatcaagaccccagagtatctgcacatagaccagcggttggtgttccgggaaggtcgaaccaaggctgttggcaccatcaccaaggttttttgttttgttttgttttgttttgttttgtttttcaagacagggtttctctgtatagccctggctgtcctggaactcactttgtagaccaggctggcctcgaactcagaaatctgcctgcctctgcctcccaagtgctgggattaaaggcgtgcgctaccacgcccggctatcaccaaggtattatggggtagcctcacctgcccaaggaagcttcagtttgctctagcccagtaaccatgagttgtcttcactgtgggacagaggtgttgtccctgccctgggagagctgagccagtactcagggtaagcttcagggatgactttgctggccccagatttgtccctaggcctgtcttgagctgtggaggctgtcttgaagaaggtggcactggagtgtagttcttctccatag

SEQ ID NO: 23431 - DNA, 1592 bp, Mus musculus
ctgatcaggttagggctgctgcctgctccactacccggccctgcttcagaggaccagcacgtctcaagtgcctgctttctttcttttagcccaagcccagcagtgggggccggcgacgagggggccagcgccacaaggtgaagtcgggagcctgtgtgactcctgccagcggctgctgaatgtcccccaggtccacttgaccacccatgggatcctcattgctcactggccactgctcaccaactgggcagagaatctttgaccaccaccggcccactccagtccacagccagagagtcctcgttgccacagcccgattttccatggggggttgtatttatagggtgaggagggactagatgtccgaggactgactgtcacatgccaccttccttactcacggctttcgtacatctgggcccttaatttctatctttttattatatatttgtcccatgtgtatgtgtgtatctgtgtgtctatgtgtgtctgtgtgagtgtgtgcatgcacacgcctatagcaggtgtgtgcaggagtgcagctgaccctgtcagtctccgtttcggtcctagctggacaccagcctccaagagctgactgcctgcctgtccttccatccgtctgtatttgtctcagtgagatcctcagaacctttagggaacctcagagcctaaggcacctgtcttccctggccaatggcccctcttagctagcagcccttctttggggccgacctctgggcttagcagcttctaccagagcagggatcccctagtctgtgatttggggagtttaatgggaagtggtggtggcctctcctgtctcccctttttcctccaagctcttcagtggcacctgtgatgtgtggaggtagtggggactacattgtaggaccacctactctgactcttgacccttgccatggatccaaagaactaggtgggctcatctttagagacaatcctgggcttgcctggctggccctggctgctctggcttctgtgcccgcaggaggctcttcctgtttctacttagatctctggctgagcctcagagttccgggctactagactgggtcttcctggttttgtagtacctcctttggtgggggcggggaggtgctcctgagttcagccaggactagaaatgctcctttcccaatgtcacccaacacaaccgctacagccatgccacatagcagtgaagggtctgagccctgatgccccatttggggtatacaagggcaggtggcaatgcagacccttctaggccatcaaaagccctgctactgggttagggtgcggtgggctgcccagagcagtgtgggcacagccctgcaccatcgcctcaggctagggtgctccttctcagccaggacagatcctcagctggctggagccctctacagccccacctcttctcccaagctctcttttgtcctctgctcctgactgctcttccctctctccctgtacttccagctgtttctagttaccactgccccatggccatggactgacgagaccagcattcacaataaaagtttgttttaagttgacagtgtcatgttccctgcccagccctctaggtg

SEQ ID NO: 23432 - DNA, 1156 bp, Mus musculus
acaatcctggtttggactgggatgtcaccatgggaggagacatttcctgcctgactataagggtggcccctgagaagcaggaagtaggttgagctcctggggttccaagacaacatggagtatttattagaaggttctctgtaggccccttgaacttcaaaggctatacccctctagctgcctattctccttggttgccatggatcccgtgaccaagtccttgccatctgcctctttaggccagtcccttagagccctccactctcctgagaacctgtgtctcttggtctttgtggtgcccacggggcactagatgccattctctgagatggctggtaccagtcactgctcctccaggcagggtactggcactgggcttcgaactgtgtgtgacaaagctgtccacttcccttgaagactccgaggggaccgaggtgttccctgcactacagacaatggtggagaactacaacgtaggtggatgtgccttctctgagggcagaagtagctaagcaataggtgagccaggaccatgcctggaatgtggagcccctcaggacagaggtaaacagaagcgctgagaatgagcaggagccaggaggaccctgaacctggcagcctaggcctggtcctggctggaattgcatcctggctagatcttgggctaactagtcactctctgagccttagttcctctacttgtagatgagggaaggcaattcttgactcaaaggtctactgaggattacatgacatgtcacaaaggaggaagcccaggggctgtcaaatgcaagactttcacagaggaagaaccttcccccagaaaatgctaaggcccagttgggtgtgacctcttcaggcagcctccagtcttcctccctgggcagtgatgtgtgctttcctgagccccacactgttcctggccaatgacatcctccccgctctctattccactggccagcaagcactgcgctctttgtggttatactttctctccttcagctgtcagccaccttgaagggaagttctggctggacctcagaacgcagacctcctggggtcaagaaaagagacccctccatagagcctcagtgagctggcccaaacaaacctttaagaaatagaaatagagccaggtggtggtggcacacgcctt

SEQ ID NO: 23433 - DNA, 1156 bp, Mus musculus
tttcccttggcctcagtgtgattgagaaaaagtaaagacctttttaaaagctaacaagacagcttttgtatatgtagaaaggtaactttttttaaaggctgaagttaccccctccttactgtcaacctttctctggtttacagcacatgatggctggccagcctccctgtgtctgcttgcctatccctgcctgcctatccctgcctgcctatccttgcctgcctatccctgcctatccctacctatccttgcctgcctatgtctgattgcctttgcatgcctgccctccttccatccttccttctttttactttaagaaacattttttaagacaaggtgtcatgccagatgttggtggtgtacacctttaattccagcactctggagacagaggcagatctctgtgagtctgagggcagcctggtctacagagcaagtaccagaagagtcagggctactcagagaaagcctgccttggaaaaaccaatcgggaagggtttggggaaggtaggctctcagtctgttgccttgtttggtctgagacctaccatataggccaggctggcctcggagtgctgagattacaggcttgtgccaccacacccagctagataacagaaatctgacgttcttacagtcaggttggagaatggcagcccggcagccctggctttgcgcctcactctggcctgacctgggtaacccttatcctctcctgacctgactgttggtgtccctggacccttttcctcatcttgttagctttgttctcatttgtttgtagaggcagagggtgagcatgtcagaaaaggcagttacgtgatgaccaagggacccgatgcatgtccctcgtatgggcatgtgggaggcctggagaagccagttttgcaaagagctgctgtagagtagctgttgctcaagcatagtcgccaagatttacttggagcatgcattgctttaatgtgccagattgttctcatactatcagtggctaaattaatgttctgcataaagcgataagcaacatctctcaagtgatttttgaatggccagcatggttgggatggctttccccttcccttggtcctctgtagctagccttataattaatatgcttgtctataatagactagctatgcaggcaaggcattcaaat

SEQ ID NO: 23434 - DNA, 2428 bp, Mus musculus
gagagagagagagagagagagagagagagaacccctaggttcttatgacttgctgtgtggctttcagtaagaacctaccctctctgggcctcgctttctcctagtccctaccaacttccccaagagcacagaagaatgtcagagctgagaaaaaccatccattgtaagctcttgctggtgagagatggaaaagagcacagagagggccattaacttgtctaggatcaaacagcacaacatagcaggcccaggccctctgagtccctccaaagtgctcttccctgtgaaccacactgcctgtccttgagccctgcttatacctgtgcagggaggcacttgagaggacacgtgctttcacacagggtaccaaaatatcttctggggacaccccaacaccttgacagcctgaggaggtgagaggaaaagcccagacagacagagttccaacagacagcagaggatgcaaggccctgttggtcctctcccatggattggaacagtagcaggttgggtgaatcactgggcaccggtgcctcttgccctaccccacccaccacttttgtccgtctgtgctctccatggccactcagcccgagacgtgacgcaggagaggctgcagcccatgtcagggaagcatggccgagactcgcctctgggctgcagatctgcatttccattttgagagcaactacacggcacagcaccccccatccccatcccctggagagagctgcagaggcttcacccagaacctgctgagatcccggttgcccagtaacaaccaatgacatcagccccagtgctaggtcaagtgtcttttgtgaggacaccggttgttgctgggtgacagctggattcagaacttagacctgggggactctaagctgcactgggctcctgctattgttctagaagaggcctttgctattgatttagaggaggccttgggaagacagcatcttaggaaggatgtagcagaaactgcctgctcactggagcccaccagacacaccatccccatccttttgctttgtctcagtggtgatgagaaacagcacctcagtcacatttccatgccaggtcaccctggttaaactgccacctccccaccccaaccccacccaggaggggaaaaaacagaggcacctggtcaaggctctgtgtatggattactggggaaggggctgcctctctatttcccaagtccccacctgctctcatctattgtgctgtgaacattctctgagcatgtggagcccccactcaatcttctgctgtctccccaagcacatccaacaagacagctgcggccctgagttgcccctgggtctgacaaagatggaactaggctggttaggtagtcttaggcctggagacagcacggagcacggtatccgcaccatctggtttatcctcacagcacaaagcgagactgttcttagccctgtggtgcacaagagaaggatgagaggtaaagtaacttgcccagtgttgattggccagccgggaacagcgcgatttccatttggaggcaggttagatgcctaaaggtccacgccacctccttcagagtgcagaaggagcagaggtgggggtgtggggcgtgaagccagggagggaggggtctctcacctatgcccagcctcagcctcagcctgagctgcagtctaagggcaagaaaggagtatctttagaggtcgtcagaaaaggcagggtggaagtggttcttgctcggcccctgttctgggcacgacctatgtcaggttctctaagctgttttctgccagatctcctatctgtgaggcatggagtggccactcccatgtcccaagggtcatcttaccacagttacatgtgaatggggaccacagactgaagtatgaggatctgttgggggttggggggggtgtaactcaacccttggcttgtagatgagggagctgaggtctggccaggaagctcaaatgaccctggaagttcccttgactgtccttctcttctccaggacccggtggtcactcccttcccttgcaaactgaattcctatctactagtcccagcacctttggcctgagagaaaactggagaaggttctcctcccaaattagggactagtatcctccttaccccttaactccagctgcctgccacccctgatcccgccttccacccaccctattccctgcccctgctggatggagaacagactccttccctggctgagccgccagcagcgagcatgtgaagtcatctggttggacactttggaacgaggaccctccactgccctcctcccccaccttgccctattttgtacataagtaacacgagatgctctgtatgtgtgagtgcgtgtgtgatctgtgccatggcttttgttaccatttcttgtttttttgtaaatttgaatgttcaaaataaaacgtgg

SEQ ID NO: 23435 - DNA, 2428 bp, Mus musculus; identical to SEQ ID NO: 23434

SEQ ID NO: 23436 - DNA, 1191 bp, Mus musculus
agcaggtaaggctcaagagagcccttcctccaagtcattgccccgcccactccagggcctgagagcggtgagcatcctgtctgacccaccaatttgccactgggcttagaagcaggtagaacctgggatcagaccagaaccttggggcggagctagagctttgacagtgaggctagagccctggaaggctagagccccaggaggtagtcgctgtgggggcagggcagccttgggggcggggctagaaccttgggaaccaggctttgtcaagttcaaggctgcctggcttgattactcttcccttcctccctcattcaatgtttctctcctttctttgttgctgtcttggcccaggataccttgggaggccgatttgacgccacacaggccttcgttggtgacattgcacagttcaacctgtgggaccacgctctgacaccggcccaggtgctgggcatggccaactgcaccgggccactgatgggcaatgtcctcccctgggaagataagctggtagaggcctttggaggtgcgaagaaggccgcctttgatgtgtgcaaggggagggcaaaggcatgaggggccaccttgttcagggcccctccattgcctgtcagtttcaggactttgaaggggcaatccctcctcagcctgtctacacgccggccttcccttctaccccactcctggctatacctcccacttctcctcatgggcacccactgctccagagtgccctgccctggatgggtgtcccctcagccacctggatagggaccagtatctcacatcaatgtaggggttgaggcagtcccgcctcctggcaatgtattggcttggtctctcccatcatatacactgtcctgccgatcacatcggaccccactaattccaaggacatcccctaaggagtcgtgggtagaggtagcctttgaccctcaaatcccctatgctccaggcctacctcgggctgcagaagggatgccagagatgtataaagatcagacgctccttctctatcttcctgggttactcacaggggctgcggggtcatcgctcccactgcccctgccttgccctccctcctctcaccagtttctctgtgtgttgtggtttgaatgttggtttcatgtcggttcaagcctcacctcagtttccaggatgttccttccccagcccctaccctaacag

SEQ ID NO: 23437 - DNA, 1191 bp, Mus musculus; identical to SEQ ID NO: 23436

SEQ ID NO: 23438 - DNA, 2945 bp, Mus musculus
cccaaataagggctggtatttcgcctctgtccccagaggtgatttccccctccccctcccccaggtgaaccaccacctgggtgccagttacaggtgtttgcagagaccatagaaatgtgttttcctgagagtctgtgtcatttgtgacctttttttgtaaagaagttgtgttttcagaggtgattttatgacaggaaagtgaaagttagttttgcaaaaaaaaaaagaaaaaaaaagaaaaaaatttttaaaaaggaaaaaaaaaagaaaagaaaaaatagaaaaaaaaaaaaaaaggaccattgtaggactcctaagagcatagggtggggagggagagagctatttaagaacgtattaacgcagcgattgcacaggtgagtggcaatgttggggtgagggtggaggccttagctagctggtggattccctgggatagaaggcgccacagaggtggccacagctgtcctccttccttgacagggtgagtctgttgtgacataggaacatgcttccagttgcttgaaaggaaggacaaccagccctaaggtgactagcggggaagtgcaggggacaagtggacagcggtagtgggacccaacttactgttgttgcctttcccccaggaaggcacccatcccatcacgggtctttacgcttcagctctctgggtcacgtggttcccagtggttcccagtagctccccagacaccctaacgccctgggcacctttgagcatccctgattgggaaagggatgcaggctttagaaagcggctgacgggtaaaatcgctgcatactctgcacaagcctcaaggtgcacgggcacagggaagatgcgagcctgccaatgagcagccctcttctctctcctgaatggtctggagcaggaggcccagaggctgcacagactccttacatagccctgcatcatcagcctactgaaggcccctcccctacccctgctgcttttcatttgcctaattaccaagtcaaagttgcagtccaatttgctttatttttgtaagtgaaatgacccccctacgccccctgtaggtcgtgtcctgtaagcgcacccttccctcctacttgtcaggaactaggagtgggtgagtcctgggtcttgggttttgagatggagggttggcatccatccctgctgtggttcttgccctgatctaagtcagtccctctgtgaaaggctggacagggtggcaaggcagcatgaagcactacaggtgcccagcctgagggggcaaaatgagcctccctccccaacttcagagggagctggtggatcagagggcgttgcctcgtttcaaaggaggctgagatacttcactggagtatggaggcttcagagcccaggctggcctggcatttaaagggaaatgtgggactcttgactggccatggcagaaacaaggtcagtcaaggatggactggcctctggggacctaagagggcacccccaccttttctccttacttttctggttggttcgggttttcggggtttttttgtttgtttgttttattcttgttttttgcacttaatggatggtggaacccagcctggtcagttctacccttgggttccggtgcactagaccaaggtggcctgcctggggctcctgtggttcaaggaatcactttttaaaagataggagaaaacttaagggttttagttttgctctgtctgcttctcttcttggttcaggaagcccagagagacacttgagaagcaaaaataggcacctggtcaggtgggggctcaggaccccacttcccaacctacagttcccactgtccttaaaagagtcggggctctgttccagccatgtgcagtgcaccggctgtgtgatggaccagagggtctgaaggggccgagtggcggggtcagacgttgggcatacctggctgaggggggaagcaggcatctttttgttggttttaacttaaaaacacaaaggcctaaagaaatatgtatcttataatttttttaatttttaagaagctcgtttgatgaactgcacgaatgaattctatatatatatatatataatatacgtacatagctctatatttggggacgggcactgtctcttttctctcacattttaaagatgaagtgtctttgcctttgcctgtggttcaaccatccagcccccagctggctaaactttgcctccagtggttaatggcaggaacctaatagagccggccagcggacaaaggggcgggcccccagtctgccccgcccctcggggaggacttccagtggggaagatagcttattttggacgtggattcggtagatctgggccaggggagggcgggctcgtgctgatcactctgtcttgtacgttttgttctgctgctcttcaatattgtatcgatgccaggaaagggggtgaaacctccttcacccccaaataaattgtcacattccgaagctatatcccagccccctggatggggtgtgtgcctcatttcttctggttcccgtggcggcttttcttttttttttttttttttgaagtgttatctaacccactctggtgttactctctagagttataggtgtgaatcactagcctgtgaggacttcagacctcagggcacagcagataaaggcacctgctgtgaaatttagcaacctgaggtcaagtcccagagtccacataaaagggaaagaagagtgagcagccctgcacagttgtcctctctccacacccatggcacggcacgctcacgcgtacttcatgcacaggcacggagacacagggctggagaggtggcctagagttaagagcacttactgctctcgaagaagacccaagttccagtcacagcacccacgtagggtggccgtcggtcgcctgtaattccagctttgcacgcatcagacgcctctggcctccaaggacacctgcattcgcttgc

SEQ ID NO: 23439 - DNA, 1465 bp, Mus musculus
tccctgccctcagacccgtatgcctgtgcttagcttgcctcagatggctcagtgttgacccagggatagggctggtagccctggacttggttagggccttggtagggcttagaaaggaagatctgctccctagtgtacctggcactgtccctgactgtgcaggtggggcccactagatggtttctgggggatccccagaacatggggttcacctatcctatctacatccccccaccctgcctctcctagcttgcttcttgctctgtgtgcagtgtttggtctcggtgctatctcgccatctgcagggcccccaggagatcccgcctagggtgggcacaggctctcaccaccctggcactgagtgaaggatgaggccaaaatgggtccctccctcgacaccattgagggtggcagcagctgggccagaggtccgcttccctgcttgcctacgtgtggaccaggcctatgcagatctcttgccccacacactgtctatcccaaaccccctttttgaaggtggaggggctggcagacatggcaccctgccacagcctctgggtatctgaaaaccccttccgttttctaccaaaggtgctgcaagaacctgctgtaggaacttctggctgtgcatgtgtgtttgccccttggctccttcttgtgtagatccgtgtgtgtgtgttgggtgcagggccttagttttccctgcaacaccctttacggttcctcagaacagggtcgctgaaggcgtggcctcccttgccttagccaggcctggcacagtccagtctgtgcggtttgtcgtggaagccacaggccactctgatcccaggttgctgggggacgtggagccacctcaggcccttcttgggatggtcatcttgaaggtcagatcttcactgcagatgtggtactgtggggactggtagaggaagagcccagctacagcctcctcttgcagatgtttgtggaggaaagaggaggcctagagacctccccggggtcttcagtttcccccacccttccagtttgcttttaactgctgaggtttcctaacagcctagcctgttggaagacttcgggtgccttgggcagcgtctgttgccctctgctgctagggaactgaggcatccatgccaatggcagagaccaaagccccagattcaggccaggcactgggagactagcagggagggagggaggtgccggtccccaggcggcactggcctgcccttggccactgcctgggattcacctgggcgttgaccagagtgttcctgtatgtggcctgagctggcttctggtgtacacagcccttggtagcttgctcagaagcatgggaagaggcagaagcagtgaccttaggacaagtattctggtcttagaggaagatactcttcctttcaccagcctgcctgccagggtctgcagcacagccccagccctccttgccccagggtataaaaca

SEQ ID NO: 23440 - DNA, 1166 bp, Mus musculus
aaacccagggcttcttgcctgctaggtaagtgctccactagctaagccacatccttggtcctatttttaactttttttttggtgtgtgtggggggagcactgccactctgtcttccaaggcaggtgtctgtcctcctgagcagctatgtatgtacctgtcccttgactctgtcccctcccctgttgtccatgagattgttctctttttgagacctctccgccctttttctttaattgagaaaaggatctcactgcttagtgctggctagtttgacgttcacaaggtgaaccaggctggcctcaaactcacagagctctgcccatctctgcctctggagtgtggtgcttaaggaagtgtgccaccaggcccagcttgctttttttccttcctaagacattctcttaaggatgtaaaatccctctttatcccaccatctgatcaatagatgctcaagaaggccaatgtcaccagaagacctggagctggagttacaggcagatgtgagtggcccaacgtgggcctgggaacctctggtcctttgcaaacagcatcatgagctctgaaccctaagccatcaatcgagaacctccctttgttaagccaatgagctttcaatgtgcagtgtccacaacagttttgtctttaacatacaaatgattcatgagggctgtgtgctggtttaggtaaaagcaagaatgttccaggggctggggagatggctaagatcatatattgcagagaatcagagtccagttcccattttaggcagctcacaactacccgtgatcccaactccgggggctctaacctctctggcttccatgggcacctgtattcatatctgaacatgtctgtgttcagatatgatacacacaatcacgaagagtaaaaaataaatatttttattttttttaaagatccgccggtcgggaggcagaggcaggtggatttctgagttcgaggccagcctggtctacaaagtgagttccaagacagccagagctatacagagaaaccctgtcttgaaaaaccaaaaaataaaaaaataataaaaaagagatccagggctggagagatggctcagtggttaagagcatcgactgctcttctgaaggtcctgagttcaaatcccagcaaccacatggtggctcacaaccatccgtaa

SEQ ID NO: 23441 - DNA, 1892 bp, Mus musculus
tgagaaccaccttgctgcaaggccccgcctcctagtgcagactccgccccttcaaacccagccctattacaggccctacaggttgcagcagaattctcaatcgcgggcccggctttttgctacatgtcccgcctctctccatattccttggttgcccctcccttcacccgcccctgggcccagcccctcatctttggttctcttgcaccagggcttccgggtcctgccttctctccgtcttgagttctccatacctctctgtccctgttcttacctagaacattcctgttgcccatcttcctcacatccattggcgcgcccatatttctttcccaacagtcctggggtctgcaagatttggtgaatgactttggaaacctacagcttggacccccgatgtcttgagaggcaagaagagattcaagaaggtcttttggtgacccccccacccaaccccaagtctaggagaccttttgttctcctgtttgtttccccttttgttttatcttttgttgttttgctttgttttgaagacagagtctcactgggtagcttgctactctggaactcactactagactaagctggccttaaactctaaaatccacctgccagtgccttctgagagccaggcttaaggtgtgcgctgcccactcccagccttaacccactgtggcttttccttcctctttcttttattatctttttatctcccctcaccctcccgccatcaataggtacttaattttgtacttgaaatttttaagttgggccaggcatggtggagcagcgtgcctctaatcgcaggcaggaggatttccacgagcttgaggctagcctgatctacatagtgggctccaggacagccagaactacacagagaccctgtctcaaaaataaatttagatagataaatacataaataaatggaagaagtcaaagaaagaaagacaagattaagttgtgcatgattgggtcatatgtgtttgaggcaggaggattgccacatcctgggctatacaatgagaccctgtctcaaacaaaacaaaacaaaacacaccaaaagaacagtttttaaatccccaaacctgaattcttttctaataaagtggacaaccaggcaggccccctcacccatcagagtgtgaacatcaaggaagggagccagcaaactggctcacaggtgagcaagctgactgcacctgaagatcagagttcagatcccagcacccacctcctgtagctcacaattgatctaactctagctccagggtacctggtgccctctcctggactccatggcaccccatatatatgtatgtgtgtttatgtatgtataatgtgtacattatatatgcatacatgcaatatataatttatatgtgtgtgtatatatatatataatgtatatattatatatctccctgtagttgcaacccaacccagttccctctacatagggtgtctgtctcaaaaaaaaaaaaaaaaaaggagtttgattgaggaacaatgacctggtctccacctaagtatgtataacacacacacacacacacacaccacaaaaaatggcacacacttttttggaaacgctgttagacatagccaaaagtgtgtccaaatccagtcaggctaacagtgttaactgtcctttaaaagtcttcctcaccgggcggtggtggcgcacgcctttaatcccagcacttgcgaggcagaggcaggcgcaggcggatttctgagtttgaggccagtctggtctacagagtgagttccaggacaaccagggctacacagagaaaccctgtctcgaaagaaaaaacaaacaaacaaacaaacaaacaagtcttcctctgttgctcttcaatagactattccatcttgatcctcaaaga

SEQ ID NO: 23442 - DNA, 2953 bp, Mus musculus
ctgggagcagggtaaatatttttattttttaaaaaagtagaagcacggggaagaccccagcacccgcccttgctccccgacggttgtttacaaagaggcctcagaaacagggggggaaggccagtgttgtctgggtctcatctcctgggcagatggggacaggctaccctgcccagtacgcctctgtcattatctttcagaggctgatccgtggagccggaggagcccaggaggtccagaccttgcctcaggcagtcaccccagctttctggtggtgtcccttccctgtcccttgccgtgggtctttactatgaactttccactccagccttgtggtgggacacagaggccggccttggccaccggggacaggatcaggacaaccggcacgggctggaccagggaagaggctgcccaccaagcctcctccgagtgtgctgtctccctgccattggcctgtgtagagatgcccatgaacacatccggacaccccaacatgcacacctttagaaaactgaccagttgaacatgacaccattcacagcacaaacagaacttgccgcggcacccttgctccgccttgcacgtaggtcatgtgacaggatctgtcggctgtcatctccgagccgccaattggaccaggctttggtgtgcaaggtgcagatgcttccacacaggctcacagccacctggcccacccttcctcccacaggagttcacattctttctgactcaggtgactttccagccccgccccccaatttctctgccctctcctgccaatcagccgatctgggcacccatgggtgccagtggtatgtgggcagtcagggagggagtgtcccaccactttctcagggcagtccttgtcttctttgtccccctccccacccaacctgaatggcatggctaaggatggatgacccctcccaccttgtgggggttgaacatgaatcaggttgcacacaagtgtgtggtcctgatttggcaagggggggggtgcggtttgctggtttgcacaggtgccctataggctgacagcttcctacctgaggacggctccctcccttgtcgagagcacattgctcacacacccgctgctaccatacgaacctatatggctgggtcctagcagctaccaattctgctgtgtctttaggaggccagcagagtcagtatgaacaagggcaggatgacttctaaacactaccctgccccgtgtctgtctgcgactctatcctcttccttctctagtccctggtctccccctcctttagtcttaatggtccagggttaactcagtgcttccgttggtggccgtcatctgtgggtgacctgaatctagaggatgtctgggtgggccagagagaggagagacaggaacctcagccagtaggctacaggaacctggaggtggggagaccttggtgttcttgaagccccagctcccagagaggtgagggtggctggagcttttctttgctgctgggtttgatggcccaccatattgggggacagaatcccttcggtgtcatgcttcccatccctaggggcatgggactaaatgcctgtacaatttgaattttgatcatgagaccccagggggggctttccaagcagctgccttctgtcttttgcagtaggcggtgaccttttatctcacggggccctttatgaaacccaccagtccctggagattgtggactaggctggatatccctcagggtagccatgtagctctgaactgctggaaactggccgcctagggagaatggcagaaggcttcgagtggctatacacaggcttctcctagcctgaagctacccaagtggacagtaacacgccccctctccacccacatacactaaccccatacagggccagtactccatgagccagcagtggcgaccacctgcctatctcttaacccctccccctgcatatttgaatgtagaggttgggttgaacttccccctccctgggttggggtgaagatgtgcctcaacctctggtgtggacacttgtgcagtgccacagttgagcccatttggcccacgtggttctcatctggtaagatggtgatcttattgccaagttccttccacctcctgcctaccgaggaagtagctcggtgtcagcgaggtggtatcgattttgctttataaatggcgggccagacctggccaccaggtctttgcgcaagaccgcttcctttgcacacagaatgagctacgagctttgttcagacgacctgaatgtattgggaggaattgggcataggccttcccccggggggagtgcgatgggaagagtaagcaggtgtaggctgcagttttatttttgtactgatattggtaaaagactgtatagcatctatttatttagatgatttatctgatagatgaggcaaaaattattaaaaaatacattaaaatgtctttagagacttctgtgtgtctggttgtttgttttgatggtgtgataactgtgtgataccccacccttaccctcaaaccgtagcccaggactccgtgcctcccaactatagtccatggtatgggactatagacatccagtcttctgaacccaattaaaatcagctgaggagagaaatgagcctagcgtgtcagggctgggcctgtggccgtgaaccttgcggttcctctatatcttctaagagtagctggttctagaagactgggtgtcagcagcttgagtgttcagtctcaggctggagaaccaggtcagtcatgaggctgacgcgcacttacatggactctgcacacctgacaagctcgacacaggcagtgcagaaagcatgcactgcttagttctctcgatggcctgccctgcgcggctgtacaggcaggacttgacacctgcagaggaaccttgggtatgtccgtccacagccaagatgagaggtgatgtcaggagagcctctggaggtatg

SEQ ID NO: 23443 - DNA, 1134 bp, Mus musculus
tctcggaagaagccctcggcggcttgagcctcgcggaaggtgacggtgacggagttggcggtgatgtcagtcacggtaacttcacttgaggggagcgtgggtgtccagggaggcggcccattggtcaggtctgcttctgctgcagccatggaacaaagacacgggtgaggtacaggcaccactcggcaccgagtgggcagtcagaagtcgtgaatggtagcacgctgcccatccccccacacgcttgaagcaggatgctttaggagggcgcatgtgcacctgcctagctagctatagcagaatgggcaggggccaggtccagtcagtcctgcctgctccactgttgggtttccaggccccctggacaggggtcagggaccttcccggctttgaggtctcaggatggctgacttaccctcctcctcgggggcttgctccataggctcccagtctccgggggtctgcacaacgtctggggctgctgactcctgcagggagagctcccgtcgatggctgtgactctccaggtggggcccgcgtggcgggaacttcttgcgtgagagccgcaggtacttgtgggctttgcgcgccttgcggagcgggaatggcagggtgggcaccaaggggcccttctccaccagctcagcgacccctgccttgaccacccccatggggctcccgctgcggagcgggcgcgccagagagaagcagagcttctcattgcccttggctttgtgggagctccgcaggtccatgctgtacagccgctgcaggggcaagccagggcgtggcaggtcagcccgcccccctccactgcagtaccttccctctcgctgtaattccccggatatactcagcctcattggcatctgtcccaccctcccctatccacgggccacagaccatactagacataacctaccctcaaacctgctcagctcagttatctctctgggtctcaaacgtgggccttgtctccctagggctgagggtcaaggctgcaggggcttactcctttgatccacagcagaagggcatcaagcatacacaatgaaaaccaacacaacaggggtagggccacagctcgggcctgggttcgatatcaagtgctatttaaaactaggtttctaaagt

SEQ ID NO: 23444 - DNA, 1099 bp, Mus musculus
tggtctctgtgggtccacaaggtgctgcctcagccggttgtggagtgatgttagtctcaagtccagtcacgctgttttggggctggggcaggaagcttagctgcctggttgcttctcagggtcagtgaaacagtgctagaggttgacaggtcctgctgtgtggggggacacacagcatgtctatgagtttctgtgtcaagtgggtaatcagagtaagtaaggaatctttatggctttgcccgaagtcacactgcagaaaagcccagaaggtagtgttgctggacacagcctttgatgaggtgctcaggtctcatcaagacttgggagtttgcctgggggtcacacaacaagtagaacccagctctgatctggagctgtcagggtgagggctgggcccagggaaagccttgaggtcccctgtgtcaaccttctctgcctgccagtaacccatacttgccaggtgatcagcagtcagggtggcacgtgggactgtcatgtgtcaccactgcctcagggggcaccatgacagtgtgtgctctcgaggctgcatttgatggtctcttgatggaacttttggcctctggtggcatggggcagaaaatgcagactactgtgggaccttcctcacactaggttgctgttttgttttgtttgttgttgttttttaatctgtgcaaattttacccaaagttggaaagacaagactccccattctagagctccagccccttaggtatgtcagcgtaccctcctgctctccttcaccaaggctaagctggcagaagagactcggcccctagagtgggccgaaggcagccccagagcccaggaacggcttgtctgcagtggcaggtggggtgctgtttgtgcgagctggattgcccccccccccactccagcagtgccttctcccttcactcctgcagtcttgttgaagggctactgtttcagctttccaggctccttgggaggcaagttttctctcctaaaaggcaggaaatctatagtgtgtctactttagaaacctagttttaaatagcacttgatatcgaacccaggcccgagctgtggccctacccctgttgtgttggttttcatt

SEQ ID NO: 23445 - DNA, 1098 bp, Mus musculus
ggaaaggaaagagataagtgggtagatgatgggtagacaaatgcatgatgggaagattgatgtaggatggatgaatgtgtagacgatgggcatatggatggatgatgacagatggacgaatggatagctgagtgaatggatggagtgaatggatgtctcactgctgaggctgaacctgccattcccaggaccctgcgaggacattacaccatggtcaggtctatctaaagctgaacactgtgaaggcctggctgcttcttaccagtgaagacccagaggagtgggctgagagtgtgcgaggatgcagagattctcaggatcctgtgggattcatgagttcaacaactgtacttatcggtgcctctgagttcaggacgctgcccccatcagtgacggtggctctcacagctctctacgggcttgctggagagccatggagcagaaatatggtcccctctgactggagtgggcacagcagcaatggcaggtctggggggagagataagaggaactgaacctaaatggcccactgtcctgaagcaggccaatagtctgaatagcgcatctggtgcataaatgcatcgtgacggggagggagcagaggaggcctggctgaaagtggattttgacatggacacaacctgttgagaccaactgacaaagccattatccatatgggccaggctaaagaagcttgtctcagttggaggatgagtgcttgcggttggtctggagttcaaagatgagggactgcagcttcctccaggatgtttagtctgagattgctcacctacagagacctcctacccagactaactaacccccccttctgaactgtttctaataaagaagctgaggttccaggctcagaggtagcagtagcagtagagaacaataccagatcttagcttcacggtatatgtgtctgtgcgtctgtcctttccttattacctcaaaaggattctgggtccccaaggtgttagggcttcagtaacaagatacccgaccccgtgccatgaagattgtggttgacaaggtacccagcagtctatacggacatatcttctagaaagagtttcttgttgctcagaaatctga

SEQ ID NO: 23446 - DNA, 1176 bp, Mus musculus
tgggtgataatgtgagaccctggaacgtacactggacacagcaccaagtgatgcggtggcagcgtttccttgcctgcctgccttctgggaacagcagtcagctggtcaagttgaccagcttttagagaatgagctaagaaaaggagtaacacctcaaatatgtggacccagtcagttgacctcacccttaatgccaggtggccatgaaggacaaattgggctccctagagtacatatctgcctcaaaccaataaacacatggcaacctctggccacatagtgacacatgaagctgcaaataactatttaggcagacaaccatccagtctgattttaaaataggacaggaatgtggggttgggattgaattctgatattcagatttacccattgttagataattttgtaatcagtgaactaatcacaggtattttgagtactcattgggaagggacaggaacgtgcccagccccatgaagttaacattctttccaggggtaaccagtcgttggcatacaaagaaactgccccgaaagacccatcgaggtttgcgcaaagttgcctgtattggagcctggcaccctgcccgtgttgccttctctgtggctcgagctgggcagaaaggctaccatcaccgaacagagattaacaagaaggtaaggctgattggggatcctgcaaatgagagagggtattgggttcatagaacagtcagtcctaggaatccatgacactgcctaacccaggtttaattaatgccctaaccctttcccaggaaatttttgttgttattgttggaaatttttaaaggttcaattataagtagtttaaaaaaatttgagtatactgtagctatttcctgacaccactgagggcatcagatccctgtacagatggttgagagctctaccatgtggttgctgggaattgaactcaggacctctggaagagcagttagtgctcttaatcactgagccatctatctctccatctctataagcagtttttatgcattttgagataacagcagcatagcatgcgctgccttggagttgtagcagtcctgtgtctgcctcaggattattaggattacaggcctgagttgctaccatacctagatttagtagtttaagatgcttggtaatggccgggcggtggtggcgcacgccttaatcc

SEQ ID NO: 23447 - DNA, 1176 bp, Mus musculus
agtcttaaccactgagccatctctccagcccagacttctttttctttttgaggaccccaacagccatcttctgggggcactctatacctcagtattgggaactaagagttttgtggttcaggtcccagaagccagccatggtcaccgtagagctcttgataccttcaggactaggcagaaagatcaaagtggcctcagggagctcatttaggaagaaggtaccctaaaaagtaggacttcccctattcctgcccttggctaagacggtgccgctgacaggaacatagcgattggattgagggaaaacaccgaatagcttggtgctgctgcccactgccagcccttcctgaggcagctctgcccttcggcttcctcagcgacctcacccctgctctctctggcagagcctgacagcagccctggccgtacgcagattcaaggagcttaccttccaggaggaatacaacacactgttccctgcctccgcacaaccgtagtccctgaaggacagggagtctacacctcaggagggcccagtgttggagatgtgtgatcactaggacaggaggaggctggctggggaagtcagctatggctcaccattggctagctcatgcagcatcgcttccttggtttattctttgtgtttgttccttcagtaaacatttattgagcagctattttgtgcctgtgtggattagacagggccctggccccaggagcctattggctggggaagagaacaacagccaaccttccacaaagtggggtgggctgttaaaaggtctgaagtgctgggcggtgctggcctacacctttaataccagcactcaggaggcagaggcaggcggatttctgagttcgaggccagcttggtctacagagtgagttccaggacagccagggctacataaagaaaccctgtctcaaaaaaccaacccccccccaaaaaaaaggtctgaagtgcctccaggaagggggtatgctacagacatggtgtgaaggaccagcttggtgtctccctaggctggcttcctacagagggctagcctggagtgttggaggatctgtggcctggctcaattttcccatgccatgtgactgagagcaaatccttgcaccatgctgaatcttagtcaattttcctagcctgactgataatggatcaatgacttc

SEQ ID NO: 23448 - DNA, 1154 bp, Mus musculus
acctcaccccatgccctactgggctctgccgggcagacttgctcttctggtacccgtgttagtgtgatgtcaccaagggtgactgtggtccctgtcctgtaggagcctctgaagaacatacaggcacagggtccattacggtgggaaacgttgcgtgagcacgggcctgaggaagagtcagggaggggacaagggtgtcagaggcctagaagcagccccgcagctcctcttgagcagaaggggaaaccaggaagggaaacaaacccttccgagtcctcgggaagtttccagaaccaggagcacagagagttacagttggatccagactgggggggtctccaagtttgctaggaggtcacagtgttgggagagagccccaggcggctgagtgacagctggctgttgctgacttccatttttcacacctgggaaagggctctgtgtacagccctatgcccccgaccaggtggctcaagtagggacggcttggggatggtggacagtgaccagaggagagactggctatgggaatgttgcagtgccaccctaagtcacaaaaagtctttgctactcacagccccaagccttccctgcctgtgggtactaaacacccaaggactgcccatctgtttctccctggacagcaacggacggcaggggatgtcaggcagagggcagggtgctggttaaactctgcccagctttgggcatctctcatagactcttcctagtgctcaagctggagacatttatgggaccaggaggcgggtcttgagcatctccccttgtcccatgcatgccaccatcatggtagtgatatcagatggtgggtgagtggtccgagcaggatttgagtaagatccaggcttctgactcagtagtttaggagggatcacacccccacagacataacatagcccgtggaggacccaaggccagcagcaccctggatttcctttccctctccacggaccctgctttcctcccacattctctttggagagggtcccccacagccatgccctatggaactggggttcccttttccctgtcaagcacaaaagaaggtctgggggaacatgggttccatgcgagtttagagctgcagagatcctttgagagaatcctatttcatccacggtcatgcacagagt

SEQ ID NO: 23449 - DNA, 1137 bp, Mus musculus
cccaatgagccatctcgccagccctcccttattttctcgagacagggtctcttgctgattttggagtttaccagttcagcgaagattaggcgatcaatactggaagagttccaagggtcctcctgtctacatctatccagtaccaagctctattttgcattcatgctgtgaatccaaactctggtcctcatatttaagtaataagtgctttgccagctaagccatctacctttctcatacaggctccatgtcctaagtgctagctaggatcacaagcatatgcctgcactcctggcttatactctacaggagagaggatccagggccctgggcaagccaagcaagcactgtactgactaggctatatccccagcccaaacagattttttttttaaacatttacgtatttactagggaggaggtgccatagagcccatgtggaggtcagaggacaccttttgggatctggttctttccttccactgtgtggatcgtaaagatcaaactgggttatcagtagctgatctgatactcaatacttagactaggctggctttgaactccaggaggtctgtctgcctctacctcctgactgctgggattaaaggagtgtgctgctgtgtctggctcattgtaaatattttaataattcgtttatgcaattacaaatacctattcgtttttatgtgtatgagtgttttgtctgtctgtgtgtcactccctgcaaaggttagaagagggcatttgttcccttggaactgaggtaagccatggccattaagcactatgtgggtattgggaattggacctgggtcctccgcaagagtagtaaatcttcttaactgctgagttggctcttcagcccctaatttgtttatgcaattcgatttcctcaatgacaaagagtttattgtaaaacccctttgttaacatgaagcatcttgggaacacacatgattctcttcatctagagagggttgtaaacttttagtttgatttctgggtctgatgtttgttttttgttgttaataaattcatttaagaagtctttcctgggggctggtgagatggctcagtgggtaagagcacccgactgctcttccaaaggtcaggagttcaaatcccagcaaccacatg

SEQ ID NO: 23450 - DNA, 2918 bp, Mus musculus
actcgtgtcagcccagaatggcgacttcccccgctggggtgactatgaggacaagagggacctcaattacatccgcagcttgatccgcactgggggatggttcgacggaacgcagcaggagtaccctcctgcggaccccagtgagcacatgtatgctcctaaatacctgctcaagaactatgaccagttccgctacttgctggaaaatccctaccgggagcccaagagcactgaagagggtgggcgccggaaccagggctcagatggaaggccatctgctgtcaggggcaagttggatacagtggagggctagggctgtgcactttcacagggctgggtaggctgaaataatggctaagccagtgctatcttaggcctcctccttatcccggggcacttgagagagccaggagtccttgtagatggatggtcctctgtgctcaggcctctagaattaagggtcaggcctttcaccctaaaacagaaaaaattactttctagtagagaagagcaagcccggacatctatgcagcatttttgttcccaagagtgctgtgggaaagaggtgttcctggagggcataaggtggtgttctgggactgggagtgctatggaacttcagtctagttaaagagaagccccaccgttgacacctgggactgttgtccattacaggacaaggaggtataccatgccaggggttcccagaatcttgtaaataaatgcatttgggtccaggagcaagaagagacagtagggagggactagaaactgtatttgctcttgatgtgggccaagaagctagggaagcattggaaggtaccctggagagaacacactttgtagcttcctcagacatgcgggacccaagggatgaggtcccgcatggctgagaggatgaagctcgttagtcagtcccattgcctctgtaagaaggcatgccgggggtgatgcggaatcttcctctggtcccaaatatacccttgatagctgttctcacttttcctgttgctgtcttgtgggagccacttgcaaaggactctaggagtctagtttttggggtgggacaggagctggagaccataaggacagccagtatagtaggcgagacaagagaaggagactgacagaggcctctctacgcctctctccctccctatcactctctgccggcatccagtcccatattacagcgtcccaaatgtaaccagtcctgtgccactacgcctccacccccacacccgtaagagcaggctaggggccaggaagggaccacaaggttctcctgggtccaagaaagaacattaaggtcagtggtatatcaacccatccctcttaatttgccttgtgtgtgggggggtacaggatgtatttcagaagatgctaagctgctgtagaagccccttggcaaccagcaagcaattcaaataagaccagcttgttactaagtaaatagtccaggaagagatggtccaaagcctattagacagtcagcttagcttcacatacaactcccaggtctggatagaggggctgcacctgctcacatgataagaggagaaagtgtgaactcttccctgtgaagggcaggagtcagatgtgtctgttgcttctgatagtgtcttactggtctggacttagctgcatggctataggtagttgcaaggaaaactgggaaatgtagttttgagcaggactgccatatgcctgcctccatttgagagttctgtattactagcagcacccttaaaggaagggtacaaatgattgctcattaccctgctctcttcctatctgccctggggttgaggtacagtggggacttgcaggtgtataggaagagtgggtgcctcttcctgaggcccttgacgttcccttgatgccagtatgcagggctacctgtggaatggtccgtgtttgtgcgtgtatgtatatttatgggcatgggtgcatgcttggtgtgtattgtacatgtctgtatccatgtgtccctgtacaaagatgatactcatgtgtgggcgtaggagcctaggcttggctgtcctcttccttaggacctggatcttatagtctcatctcctatggctccacgagatgcccgagacaggaagtccttgggggaaccttgaaagcaagactagaagggagtacagggtctgtctgtctgtctgtctttcagtctgagaaatggaatcttcctaggtatagggatatgcagctgagagcccaccactccctcagcccctcttggctctctacatcctccccctgccacctcagcatctcttggatgtagctctgtctggagtagtttgccaggtggtggctgctctgacaaacaggcatgaagggctctatggcttctctcctcccattgaggaacaccctccatggaacctctccttcaaagagccttcctctctagttcctctagggattgagaggtggccacagaagtcagggcatcccagggactgatgggtccatctgagccagggctctctcctgagatgtctgtggatgtttctgtgataccttcccccttgaatgaaatccttaccccacactcttggtaccctcagctgcttcattgatatcctgttccaggcatttcagggctcctgcccacaagtgaccaattcagggagggagaaggaccctgggaaagcacaggtctgctgggctggccttccttctcagatagtacaatagtttcaattaggcaggaagaggcctggccatgggctgagagaccaccctcaagaggtgggagctaaagagtttcacatataaccacagcatacactgggaagttgaggggcagggaacccaggaccattcccccaatatgaagagaaaccgaattgaatgtgaaagtgggcacattctccaggaaccactggcctgtgacctctaga

SEQ ID NO: 23451 - DNA, 1196 bp, Mus musculus
gggagtcagatctctttacagatggttgtgagccaccatgtggttgctgggatttgaactcaagaccttcggaagagcagtcagtgctcttcactgcggagccatctcgccagcccagacctttacatttgtattgaaggcaatgtcttgctgtgcagcctcctgtgtagaggtgcaagtggggggtagggaggggttgtgttcagttacaaatgtacaggccggttcttttctttttcaggagaacaccaaatggcaggtgactctggtgcaccctgggcccaggattaggaggccttgatggcttctgcggagggttcggcagaggtcttaggggccgtggccgtggtctaggcctcggggctcgtggaggtaaagctgaagacaagaagtggatccctgtcgccaagctgggccacctggtttaaggacatgaagaccaagtccttgggggagatctacctgttctccctgcccatcaaggagtctgactgagatcattgactttttcctgagtgcatccctaaaggatgaggttctgaaaatcatgccagtgcagaagcagactcgggctggccagcggaccaggttcaaggctttcgtccctataggggactacaatggtcacgttggtcttggcgttaagtgctccaaggaggttgccactgccatctgagaagccatcaccttggccaaggtttccatcatccctgtgtggagaggctattgggggaacaagattggcaagccccacactgttccatgcaaggcgacatgtcgctgtgactctgtgctggtgcgtctcatccctgctcccagaggcactggcgttgtctctgctcctgtacccaagaagttcctgatgatggccagtatagacgactgctacacttcagtcaaagactacactgccaccctgggcaacactgccaaggccacctttgatgccacctccaagacctacctgacccccgacctctgtgttcaccaagtctccttatcaggaattcactgatcatcttgtgaaaacccacaccagagtctctgttcagctcgagctgtggctaccacaaaagggtttttatacaagaaaaataaatgaattaagtctgttagaaacaaacaagcacacaaacaaaaaacaaatgtacatgtgttcatgtgtgtggagaggttagaggtcaacatcagaagtc

SEQ ID NO: 23452 - DNA, 2957 bp, Mus musculus
aaatagacgagttgggatataccctctactgctcgctgtctgagccggaggtgctgctgcagacgtagggcaggtaaaggcccagtctctccgttagaaacacttggctacgtggttggtgcctcacagggtccctaggtgcctcctgttttgctggtaattgtcctggtcacttcatgctgatgagattgacgtccctgcggtttccccacccacccctatttttgtaaccaagcactgtgctccccacttgccgccttactctaggctgagtttttttgttttttgtttttttggttttttttttttttttttttggaacaaacagagggtgtggagtgctggcctcagcctttgggtgttttgtttttggcccggttttcttgcttttctgtctgctatgtccggttctgccccttggcctcttgtttgctctcttctctatctttctctttcttggtcaccctggtggctcttgtccccagagtacatttgcctaatgaagatgttgcctgtagttgatgtcacagaagagtgattgcatgtttccaggctgagctctgcagaggaataagacagtatttaggtttccagggtgaggctggcaaagagcctctgccctggcaaatcagcctttgcccatggttcctggaaaacaagcttatctcctctccctaccctaagcaactcctctttatctgagctaaggcttttgatcgtggggacggggcattgaccaacactggaggcgccggctgcaactgttttatcagaggcttatgaggtgcttccttatggctgtcagcggaagctcagggctagcacgctgaagctgatttggagagcctgtgtctcactgtttgtttctatgtgtggtcatcagagtcacacagacaaggcaggtgtgggggcttcacaggcagcacctgtaagatgctggtttccccttaattgctggtagaaggtggccttgctttagccacggaggccatgggaaggcaaaaggagggaatgccagccgaaacccagtgaccacatttgctttcttgtcaggctttatctttcttaggtgttgccttagagcaggaacatacccagggccagaacctcccacctgacccctgtccttgccactataggtacctccacaggccagagggcacatgaccatgccagccctgctccctcacttgactcctgggaagattggtgctacctaggaagagagtacatagataagacccacagaaaagagttggggcttcccaccttgctgctaagattgctatatatggccatgtaatcatcctatgggtgggggaagggacatttggaatgtcatttctatgtgtcctttttcttccgttcatgacaagaggctgacagtaactctggttctgatttgccattctagtattgtgttctcccatcaggtctttctttatctgttcttactacctctccatcagtgtgattctggtgatgcactctgtggctgtgttgttcctaatgagggtgacacaaaatgactataaatagcactgactctgcagcaacccatttgaaattagggtagagacacacacccctctccacaggttaggaggttgagctaggctatatatttagccttttttcctgttctcccacacatgtgtaaagacttctaaaggagtttctttttgatttgtataagatagtatgagaaacgtgataaagccaagaaccttaactgaaacatgccctcctggtagttaataaaaacaaagtaggagctgaaaacatctattgctaagttggactgagtaggcatggaagggctggcatagacagtccaaggttcttgctgctgcctgttggagggagagctggtagaatgctgcaaaaccagattttagagaggagttagatttcctgtcagaagtattataagactcctcagctgccatctctgaactgattccatttaggatgccaggcagagtgcaaatgaacccccagaacttgaagatgctcaagattccaaatgtcctaaatcacagccatatgttagtgaacttaggaaaagcaatgaatttatcatttgtcactgtgaatttaggaaaagcaatgaatttattgcctgtctttatgaacagctttgactttggactatgctttgcaatccaagatcatgacttggccatcttataagcaggaacctcttagaagtcctcagaacaaggacaaatgggaccagctctaacctggtgggtttgtggattagctgggcatgccttctttgctgtcattctttgtcataaagtatgggaggcggccacatgctctgggatgcttggatggaagaaaagatgctctgccctgcttccctctttgttgaaagacccagttggctgtgccactgctctgcctttctcttcagttactcccacttttgcctgcaggaaattccactgttaggcccctacttctgtttgggaggtattttgagagtgtcaagattagcagactatatacttgatgcctaaaactgtacacattaccctggtaaccaagtaaatccaaatttatttatttatttattttttggttctttgttgccctttcccaaaaatggaattcaggatagcagtattcttctaagtatcaacagttggaatttaaaaaaataaagagaaaaactgttggagtggcccatcatctcctactccactgtaatccactgcagggctggctctgatggttaagatgaatccgcttcaggctgggagatctgagagcaggatgcactgtgtgttcagagccttctaccaaggtacatttccttggcattatgacttgataaaactgagagcatttgctacaactttagcttttttagtataaaagctcaagccaaggtaaatgaggaggcccttgggaacacagtgacccttgtaccaggctaggaggttaca

SEQ ID NO: 23453 - DNA, 1201 bp, Mus musculus
ggtctatagaaatctgtgcctgatgctgctgtagatgaagggatgctgtagacgtagggatgctgctgcctggggtctcactgtacatgatgcctgtactctgtgcttggtggggtcaccccagctcaccccagtagcagctctgcctcagaacaatcttctcatttcgtcggcagggagcaagcaccaccaggctgtcatgtgccaaggtgggctggggtcagagctggcactcgaacacaggttacagttctgagctctatgctcccaaaacaccacactgaaggttctcattccattacagtaaggtgagcccttcttgttctaatgagagcaagagcccatgattttgagattcccgaactctccttgtattccctgaatgatttttattgcttgtttgagcagtgacattgtctgctctgtggttgttgactgaagaacaaatagattacttgataaaaatgcccccccccccattggctggccaggataggcctcaggtatttactagggctggagaacccttggtgctatctggaatactccagaaggtaggcttcctactgctttgggggactgagggcctagtctggaccggctgttgtgtctccactgcctcttgagtctgcctggaggggaaacctgttttcacggcacccactaagttgttgctgcaataatttgggttttggacttgggcagacttgagccaggactcatctcttccaccactgccccgtgtcagctgggtgacattgggcactgctggactcctttgggtcctaatcttttcctccaagaaggaaaatattcatgaattgtgggattggcacagggccctttgatggttgcctgatgatgatgatgatgatggtgagggtggtgatagtggtgctgatgttgatagtgctgatgctgatgtggtaatggtgatgtgataatggtggtggtaaagtcagtgaagttattgttggtgatagtggaggtggtgatggtgatggtggtggtggtggtgatttcgatgacaatgttgatggtagtggtgatagcaatggcagaggaagggctgaggtagcagcccctacacatggtacacatggtacacatggtcacatgcatgtttagacatttttcccccatgggttccatcatgccttccatccacagcgcattgcttcttcacaggggcttgaaggaa

SEQ ID NO: 23454 - DNA, 1205 bp, Mus musculus
gagaccagaagagagagagagcacattagagtcccagaagctaggcagaggtggttgtgaaccatccgtgtgggtgctggcatctgagtactggggaggctgcaaagtgctcttaatctcttagccatctctccagccacttctctggagatttttaccattcttattgtttttattaaagatgcattctcctttgttgtccaggctggcctggaatatctgggttcaagtgattcttcatccttagtctgctgactagctaggagtacaagtaacaggacactgtatcagatttaatgtcatttcttctcatattattttatattgtaacagtttacagtcaatttgtgttgtaatcacgggtgataaggcacaagcactgactaatggttatctgatgaattagagccagtgacagtagtacatagcctccctcttcttgtcagcgtgtgcctgccgagtaacagcttggttgtcctggactgtgtgtattgacatcttcctccttggatgctctgagaacagagctttgccttcctcatttttgctcctgacctggcttgtgctaggaaatctatagatctgtatgctgatttttgtgtgttttgttgttttcaagacagggtttctctgtgtagactttcctggctgtgtttgaactcactttgtagaccatgttggcctcaaatccaaagacccacctaccactgcctcttgagtgctgtgattaaaggtgtgtaccaccgtgcctagcccacatgtactatttaaatatttctagttagatagtagttaacactctgtcctttgaagacagaggatcataaactgtgagaggcttttggttcagtgctaaggattgattgaatcaggggctttgtaaatgctgagcacggacattttgccattaggctaaatctctagctctccagcatatttttatattcctccttttttgagtgtacatttatgtttttcccctttattgaggtattaactgatgttcagaaagctaaggatatttagtgtatgtaacttgtatatttggagtagatttgcttcttaaaacaaaactgttcatactgggcatggtgacagatgcctttaatcctagcacccaggagacagaggcaaacagatctatgaatttgaagccagcctgatctatgtagtgagttctaggatatctggactatacattgaga

SEQ ID NO: 23455 - DNA, 1195 bp, Mus musculus
attcctctggcccagggtatgtcagtcaagtctggcgtgatgttttggacatgctgcaggactatagagcagtcaagctgcacaactgaggacagatcaggtaccagggtggctgggtttagggcagaagatgggttatagcttatgtgagggggactcaaaagtagagcttgaaagtgtaccaggctggcattggacagccatcagataggtggaatcttgagaactacaacctattggggggggggggcgttgataacaagttactgccccatgttttgttttgttttgtttggtcgttatccttgactaacagctatgatctggaggtaggccagccatccttggactattgggttcagcttctttttcaatggccccaaagtttaaatgagcacctcctttgctatcccctgtttctcaaccacatacaagtggaaaggtttatgaatgtccaggagctccagggccagcactaacagtaaggcttttcttaaagtcttaaaagccatctctatctcaggggttgattctattttttttcttcttggcccctggtggcctcatataatggtttggctatctcagtgaaccctggcacacagagtctgcaaaaactggcagatctcagaatttcctgtatttgccttcaggttgatggaactgggatgttaaggatggtttgcttccaggcttctgacagcatgtcttggccccccttgagtatttaccccagataggtgacctcaagttgacaaatctgggccttattagcagatactcagtagccaagttgactcagctcctatagcagagctcacgcggcctcctggcatgtttccaagtctggggctgcaatcaggatatcatctacatactggaacatatgtacttcggggggatgggtccattggtacttacccaagtcctcatgggtaaagattgtcaaagatggtggatgagttcttgaatccctgaggcaggcatgtccaagtcagttgtcctttgaaacctctctccaaatcttgccctttgaaggcaaatagaggccagcatttggatgccagaggcaagcttttccccttccttgagctaggctcttaagctctctctctcatcaggaccatcatggcttatggtagcaattaagtagcactttcaccagtcctctgctctatccatccttggggtgtct

SEQ ID NO: 23456 - DNA, 1066 bp, Mus musculus
gtgtgtgtatatatatatacatatatatatatatatgtatgtacatatatatatgcacatacacacatacatataaatatatattttagatgaagactaactctgggagcatttaacagtgtttttgttttttatttttaacattattttcctgctttaaaatttgcaagcattctcaggaattctagggtaggaagccagttttttgaagatggtttatttaattgtatcttatcctagatagacagctgtttctttcctgttagtaaacttttacaagttcctgaaacttcaaaaagtttaaacgatttttacttataaaaatgtaaaaagaaaagtctccaaacgttattatcatacaggggatcacacattttaaaatacatagaaatattttttaaaaattaccaatttagcagcaacaggtaaattcattatcttaacaactgtgggagaaggctcagccattctgagtgttgtcaccgccttgcttgacattgtgcatggcttactgggggggtgactgttgagctcgtaggagtgacaccacattgttccttctgtatgaggctggactgacgtctccccgtcatgtttctgttctccagtgcagcccttcttctccctggctctccagccccatcaacaaaagcaaggaataaagaaagaaacagtagcttaagcaaaaggatcggctctaaactgtggcagtgcggttgctggattgctgagaatctctgtaaagagttaggaaatataggttaataattttttaaacgaattttaaatatgagcattactaaaggaaaattacctatggactgttctgttggtgaaaagtgtgtgtttcgcctcccatctgttacaggaggaggaaacagaagagtctaataaggaacaagtggttttacttttcattttttatttagctcccagctactgtttgcttgttttaaatgctgttttgaagatctgctgcttactccccccatcctgggaggcagagatgtggagtgtttccttttgatttgggtgatgttgaattctgcttttgtattccctcctg

SEQ ID NO: 23457 - DNA, 1335 bp, Mus musculus
aagccagaagtgttctattttaaataagaaagaaatagtatttccctagggctctacctgcttcccttagtgcttaggtttcacagtgtgagtcagcgctggaaacaaactctccattacagttgacccttttcccagtcagtatccgaaagttgagatgacctcttctaacagggaaatcccttcttagatctctcgcccttctccctggcttcctggaccttctggtggggcatgaagtttttcttgggccactcgtggaggttgtaaaagggacttgaggcagatggagcagccttaccttctgtgcctggccttacagcaggaaaaggtggtggagtgctgaatgtgtatgccaaaaccaaaccaacccttgggggatctttgaagaggttacataccttgtaaaggtaggatggtcgctcaccaagtgatggcttttagcatgaaacttctttttgccagaagtttggggttatgttacaatgcttgtgtttaaaacactgcccccctttaattctttccaaggaatctctttaagtgtagtacttctgaatgtgcctttgtcagcccagagaccaactgtggtctgtcagaggttctcctggcagccccaggggcagctgttggatttccatgagcacccattttgcacagtgtgagttgtatggaagagattctgggtcttggaccaggaccttataagcaaggccagggcccagcggattccactgtagtcagctgtcgacatctgcattccttagtgttctctctctctctctctctctctctctctctctgtgtgtgtgtgtgtgtgtgtgtgtgtgtgttgtaagcactagagatttgggattgggaaagggtgattttttttgtgacccgttcattcttgtaaagaaggcatttctggctttgtgctgcagaaggtgcttttttttttttagtttaattttattttatttttaccctctctgccttagaaggtcatgattttcccaaatgcaagtcacatcatgttgctatttctgtgaacagggtatttattgcacataaaggaaaggttttgaaagaattgagaccggtgtttaaaaaagaagaaaacctctgaaatcacgttgtagtttttgagaactgttgtagttaaacttggaagtctatggtcttttcatgtttcatgtttgttttcaacgaccccacctccactcctatttccagtttctaaagaagcatcttagtggatgcccaggggcctgtccaccatcctcagtgctcccctcccccaggaaagtgctctctagattccttcagcttcattcaggaagacactcactcctc

SEQ ID NO: 23458 - DNA, 2141 bp, Mus musculus
aactaaatgccatctcttccaccaccaaggccccagggtgggcaatatctgaatttctctcttccatatatgatccataccctccagggacttcaagaagttctttgccgtgtgtgtgtgtgtgtgtgtgtgtgtgtgtgtgtgtgtgtgtgtgtttacatgtatgcacttcttgctctttaagtgtggtcctttaatccccagtggagtttagtccctgattttttagtctgtcccgtagcctttttagcaatgttctggaaatgtatttcttacttagaaggaaattgagcttagagctgacatccttaaaaatccttgttggcacatgctgcctgtgagggtgctgacagccgctgccctcctagaccgtgggctcccttgaacaagagtagaagattcattttatctcattttaactcaaatctatatctgttaagaagctatagtcaagagtgctttccttgatctgtttaatgacgacttcctttgagggaggaatctggttgaaagtgatggacatcccttgcctatcttctgcgtggcactgttcccttggatttgacttctgtagtttgtctggaggtccttgcttatcagtgtgctttctcctatcgacggggttctgcctgcccttgtttccctctctgatgttcccaaagggctttgctgatgtctgcacctctttcttggggcattcccctactacaccctttgcacacaccagtgaccaaagtgtatgcagtggtctcaacacatgacatcaaatggtgcacgcacctctagtgtgctcacagatgtgcacaagatctgcacccttggccttaacttcagcacgacttaaggtgcaggaacatttttaacaggtttaaaaataaccttttctgggagggaaaatcaagcagatccaaccgctccccactatctgcttgcaactcattctgcatccagcccagcccagccctgttttgcgtaaccaaaaccaacaacagaaagcaacctaaggagaggtctctggactgttttatctttctccctttcgatggagatacaaatgctgctttgggttccataatcctagggggctatgtttacatagtgaaactaattctaccaaatcaggaaacagtgagtagtgagagacccttcagtaagaaatcactgaggctgaaccagaggtttaaagacctagggatgggacagaggaggagagagatcctgtttaactcactgcaacaccagggtcactccctcctctctgctctccctggccctctttgcccctttaatcaaaaggttcagagaaagacaccagaaagaggctgaagtttttaagaggcagctttccaactttgcacacaaatggaaggtaccatgaaaatcctctcatccgaaacactcggcagaaacaacctgtcaaatcaaaaggactaaactgctgcccacgttgatgcgctctgcgagttacctataagtgttttgttttcttatacttgaaaacacttttacaatattatgttggtggctttcttttctctcttctgttgggcaattgaaactgcagatgacaaatgttaaggctgtttgaggggagaaaaggaaggctgtggcattgtcgttttaacatagaggttcagtcagactcccatagggtaacattgttcatcttactggtttaacatggacacagaaactaggcactttggtggttcacttgcacggcaggccgaccccctttctatattttattttacttttttagtatagtggtacttaaaatcactggttcacttaaaaaacaaatgttaaactctactaatgtacaaataagctgaaaagttgcattttatgtgtatttttgccatagcaggtactgtatttctcatgctggatttcaaaaaaaaattatatatatatatatatatatatcaaaaacaaacaaaactgaagggtggtgttttctcagattgtgacaggttgattggtaaggattaaagtcgtagtcatttcattaaaactgagagatgatgtaatgcatatataagagttttctgaagggttttttgggcttttaaacagcttattttgtttttttttttagtttttattttattttattttggaaagatatgattgtatta

SEQ ID NO: 23459 - DNA, 2141 bp, Mus musculus; identical to SEQ ID NO: 23458

SEQ ID NO: 23460 - DNA, 1106 bp, Mus musculus
ctcacccagtgggagtagctgagactggagactgtctgtctactaaactaggtcataacagtagctaccgttcattaggcaccacctgcttacgttggtgtcccaggaccttatgtgtgtctttactgaatcctgcagagcccaaagcccctgtacttcccacacttctgccttttgagctttgcttccaccggtctgcacaactacccatgtcacgtgactttgttagattgcaatttcttcctgttgggattcttcattatactgccccaccaccaccaacttctccacaggtgccccaggctagcctcaaactcactgtggtgatctgaccgagactgtctcccataggctcacaggcgtgaattcttggtctccagttggtggaactgtttgggaaggattaggtgtgcccttgttggagggagggagtccctggggccaggcttcaaggtttcaaaagtctccgcattttcagtatgttccctgtctcctgctcttggatcaagatgtgagctcttatctgtccctccctctgtgcctttgctctgccatggtgaactccaattccctccccatcccctccccagggctgaattaaggctaacgaaagcccttcttttccaagttgccttggtcatggtgttttgtcatggcaacagaaagtcaagaataaccttgaactttggctccgcctccctcaccctctgaagtactggagttactgttgggtcgaccatgaccacgcctacgccttgtttacatggtgctggggaacagagggcttcgggtgtgccaggcaaacgttctaactgagctgtctcaacccctctttctcacctactcatctctgatccatgtgtttggtaatgagcctgtgtagaaagatgtgtggtcacgaaggttatacatactaaggagttttacaattatgatttccgactttatagaagagcttccttttaagagggaaaactgcccgagtgctgggacttttatggtggttatggttgttttctgagcttttgttttgtttaattttactgttgtaactaaggaaaatacttcaagccaccagagggcattgtagttaacgttgggtgctg

SEQ ID NO: 23461 - DNA, 1214 bp, Mus musculus
acctcttttccttttaggcgctttggaataatgggactctacaaaggcctggaagctaagctgctgcagacagtgctcacagccgccctcatgttccttgtgtacgagaaactgacagctgctaccttcaccgtaatgggcttgaagagcacacataagcactgaggcccgcccacaggacagtgtggagacgcaggtgctgcacagggagaagaggaacagttctcctttcccgttggtcccatccacaccacagacattccagtcattggctgtaaaggcatcaaaggctaagcagggagtatagccagctaagcctgtcacctttatggggttttttggtgtttttatggtgtttggttgtatttgggggtagaggttagactgatatgaaaatattgaaaccctgaaaatgttagtttgtgggtgttcattcatttttctcaagggggtggactttccattgaaagcttttctcaactttgccacttgttttcttttgctaaattctctcccaggttctagacgattcagtaccataattctcctcagatgcttttgtcttaatcttggtaaagagttcctctgagaataacatcatgactgtgccatgggcatgactttgtttccatctgactcttttcctcctgctttaagaaagctatttattttgtgggggaaatgaaaattactaacctaaatgattttcttaaaatttgtaaatgtcaattattcattggtgtttgacataggttttttttaatacatatttatttcgaattgttttatattacaaaaaaaagccttgatgttgtatgtccattcgtgcaagctccaatcacataagcctcaataaattgtcagcacacatacagaaaacattcatgaaagttgctcttgattaaggccttaaatgtgtgtgtgtggtggtttgactgagaatggccctgtggcgtgcttagtttcagttggtggaactgtttgggaagggttaggaggtgtggcctagttagaggaggtgagtcactgggggctgcctttgaggttttaaagcccacatgatgtctctctgacacaagactgtgcctcaagatgtaagtaagctctcagccactgctccagcgcctgcctgcctacctttctgccatggcggtcactgccctctatccctctgaaaccctaagctccaaatcaagtgctttctttttgctttt

SEQ ID NO: 23462 - DNA, 1193 bp, Mus musculus
gggtttctctgtgtatccctagctgtcctagaaatcactctatagaccaactgagaaaaatttcacccgtttctaccatccaagtgctggtattaaaggcaccactgcccagctaaatttaatgtttaataaagcaatagtgttgttgctcaagagttgaggatttagctcactgatttcatattagggcctggtttcagtgccagtagcacacattgcacaagacacacacatacagagtttgttcctatcagttgcatccagacagattgcattatttttcttcttttttaaatttctttgaatttttattttgagataatttcagagttgcaaacaatttcaaaactgaaattggtacagtgcatcactgcccgctttacgcttttattgaccatttttacgtttccacttgccctccctgtgtttccgtctttagcacacacacatatcataagacttttttgagtttgtcagttatgtgcatcagagcatttaacctctatgacagtttaaaataatatattctcccctccactttcttttcaagataaggtctccttataaggccctggctggcttgggacaagctatgttgaccttgaactcataggaatccaccttcctttgcctcctgagtgctgatattaaagatgtgaattttaattcttgttttaagtttgcctgcatgccagaagaaagcaccagatctcattttagatggttatgaaccaccatgtggttgctgggaattgaactcaggacctctagaagagcagtcagtgctcttcacctctgaaccaatgtattctcaataagaataatgagtgccgaggtagtacaatggtgcgtacctgtagtgcccgctctgtaggaggctggggaagaactgcttaatgcaggtgttcagggtcaggctagacagtatgatgaaacatccccctctttcctgctggcctcctgtggtccatgtgtgctttctgtcgtatgctgtagctacttcctgcagctctaagcacctgtggggagaaccttttaaggtgctgcagatgtcctgctctttgtcataccgtgagattgtcagtagaagccagacttttcctggcttcatactacttacttctctcagttctatgtcaagcaagagaagggagggatggtttattctgacttccttcacagtccatcatgat

SEQ ID NO: 23463 - DNA, 2209 bp, Mus musculus
aaaacccagatgaagctaaaaattcaaacctctcctcttttttccgtcaggatccagaagtcatggtggctttccaggatgtggcccagaacccatcaaatatgtcaaaatatcagagcaacccgaaggttatgaatctcatcagtaaattgtcagccaagtttggaggccaatcgtaatgtcaaagcccttgctgaatgaagaacagcttagctcacttcctggatgttgcaataatacaaaccagtgtacctctgacctcaccgggagagctggggcgcttcgaagataatccctaccctctacatcaaatgcggctgaggcattttacagtggtttgccattagcgtgttcattcagataatgttttcttactaggaattacaaacttaaaacatttttcaacctttaacatattttgtaaaaacttaggggagtcaattcctccatttttctttactaacttgggcttttccttttgaattactgggcagggaggtgagtggatgacttaatgatttcatgaatgaaataaagatttgttagtgggaagcaaataaaacacattaagttgattgagttggacatacggttcctgaagtatcttgatttgtgtttttttttttttaatgttttatttcaaaatgatctatttcagtaaatctcttgggaccaccagtatttggatctgaccttggtaggactaaagtattgggcagagcagcagcagtcccaggttttgtttgacctgtgtaggctgcatttaaatctttaaaactgctttggtgtcgtttttttttttttttttttttttaagtgttacagcttcccctagattacatagctctgctgttgtccattgtttcaaataaatgttctgtagcattcccacatagagaaaaagagtgctttctgtttttgtcagaaatgacctttcctattagaaaatgccctgtctgcttgtcaccctctgaatcttcttgagctacaggtagtgttttcagtaccatcatcacttctgtcactcacagcataattgtggaagcagattcattgctagtttagtttcatatataatatatacagtaattgtagggtcatacctcaaatgctggtatcttacttggccatggggttgcttgtttaaatattaaacttacccttgtgacctctgtccacagtcatttgaaggaaggatttcctttggttttagctatgcttatgaaattgagaaacaattgcaatgttaagagtttatgtgaagtatacatctttgtacttggaagagtctaagttgtttatatttggtaaaaggttcatttgtcccttttagctcttaaatatctcgatgtatttaatgccttgttttctctcctgccgcaggataaagaaaatgataaacccacaaagtgcatatttcaaatagcatatatctgaaatcgtatgtctgtgcaggtttaactgctgcatacagcgggcacagatgcatcttgttacatgtaagaaaaagctgtatttgaacagagcatgcgtttaaagcccttaacaaattcatcacataatcttaaattggaactttgcacggttcttagtccaagtgtgctctcctttcatacagtttccatggtgtgagtgctttactgaagatctgtttcttttgtactctgactacacatgacccaattatattctaatgtgaaaatattagcataaataggtgaaattgctcttctgaaaattgtgtcctgtgcttttagactttggagttccacagatagtaaaaatatagccttcacaattttttaataatcagtatcatttctacaccaaaatattgtttttttccctcactaaagacaatataaagaaaaataatctaagaagataaaggggctttctgcttaaagatatgtagataatattcctaagtatgctgaaataaaatactgtttcaaactggatcttgaccttcccccatttgttagcctgttatttatttatttttctttgtggagtgtttatctgaagttatgtgataggtacagtaggctgttgatgttagtaatgatgtaaatgttagcagggacccctgaaggtgagcatagcagctcacatgtgtaatgagaggattctgaatttgaggccagtctgaactgcatagcaggactaaaaaaagactttttcagtagctttttagaagttctgccat

SEQ ID NO: 23464 - DNA, 1194 bp, Mus musculus
gtctttacacggtgcctaaaaccaccattctaccatcagctgtcagttacctatagcttctcaaattagagtagttagtctctctctccagtttccatgagtttggtttttatttttctgttaagatgaatctgccatttcttagagatatatattaaacaagtcgttgtttgtttgtttgaagtgggatttctctgtgtagccctggctgtcctggaactcattttgtagaccaggctggccttgaattcaagatctgcctgtctctgctgcttgagtgctaggatcaaaggcattcaccaccatgaaggccatgaagtaattctttttttttctttttttcttttctttctttcttttctttttcaagacagggtttctccgtttagccctggctgtcctggaactttgtaagaccagggtggcctccaactcagagatccacctgcctctgcctcctaaatattgggattaaaggcgtgcgccaccactgcctggcctcatgaagtaattcttaacaaaacttcagtttactttatcaaacattgcaggtaaacttacttcctttgctttttttttcaggctcaaaaaattgctgaacatcggagaaagtatgagcgaaaacgtgaagagcgagagataaaagaacggatagaaagggtgaagaaggctcgagaagagcatgagagagcccaaagggtaaattcctgtagaatcaacttgagggtgtttttctttgcctgatggctgcaggggagtcttttgttttatttacttttattttatttttatttatttcttttaacttttattttgttctttttgcttttcatcttacatgagcttatatttcactaatttaaatgtttgttcatttaaaatttgcgaatttgggctaagagtgtaatttatagactgcttccctagcagtgcagactcctcctccatccacgcccagactctggccagacttattacagcgatagtactgtgttgtgtattagaatccctgtaggattcttcttcccaacagcaaattcatgactattgaaaaagttctagctgtgcattgtggatacgtctgtaatccctacattcaggaggctgaagtgggaggacttttaccttatattaaaaagttaaaacaaaaacaaaaaccaaagcaaagcaaaactccaaaattggttacatagt

SEQ ID NO: 23465 - DNA, 2037 bp, Mus musculus
ttaagaacactgactagaggtcctgagttcagttcccagcaaccacatggtggctcacaaccatctgtaatagaatctgatgccctcttgtggtgtgtctaaagacagctgcaatgtactcattatacatcaaataaataaataaatcctttaaaaaaaaaaaaaaagcttgtgtgaactgggcatagtcccttagcacttgaagcaggcagatctctgagttcaaagtcagcctgatctacagatcaaattccagaacagctacacagaaaaaccctgtctcaaaaataaaatacgcttatgtgacagagggaagccctaagagctagtgtgtaaacttcttttaaatctgagtatgtgtagtcccatggtaaacaaaacctgctaactgctacaacataaatccaagggttttgtgggatctgcccctactttccatatttctgttagggaagtgcaagctagaagattagcaaacagtctctgcagtgcaggtagctgacacatcttaagaaatttcacagtacacctagaaaccagcaggggacaaaggtagtgtgagaactaaacattaggacacaaatggccctctgactactcatcctcaaggccttatcagtctctcctgagggctgtaacagtggcggctgcccgcccagtctgtcctttctgcccgttgtccgtcttctgggtctcagacctaacctacttttaaagaaggaagaataaatccattaccatggcttctcacccacctggctctgtgcccaaacagccttcgcttggagtgactttcctttctttctgtaagacaacgtcgtctgcagttctcacctttgtagctgaaagcctgggccgcttttatgtatagcagagttagagaggaaactgacttctgcttacattacagtcaagttctgcagatgtaactggtggttagggtggctttgatggagttgtggtgaatttggtctatggtccaacctgctacccattgagtcccagattaagccaagcatttcagttggactgttagaaccatccagaaaacagtggagatggctcagctgcctcagatgtgtggccaggctggtcttgctgggattccaggtgcaccagcacatacagtaagactcactgagcgggtgagtaacttactcacagggcaacttactacacatcgtgtttctagagttagtgttttgtgcatgtgtgccccagtctttcctcttaaaagggctttttacctgtcagcttgccatttagtgtgcttgttggtttggtttggtttggtttggtttggtttggtttggtttggtttggtttttgagacagggtctctcctggaactcattatatagactaggctaataccatactgaaagagatccacctgcctctgcctcccaagtgctgaagttaaaagcgtgcaccaccaccacaaccagcaacttttttttttatgatgctgtaattgaatacaggaatgctttagacatgctaaataagctctgcacctctgaatgaactacatcctcagctcaattctctttcctagattggagagagatggctgcatcattaatgtaagcatttaagtgaagggtaccctatctggtacccagtgtcacatggttttatgtgattagttcagaatctggtatatgtctcctgtaacaaagggactgcacccaggcattgtagctcacacctaaaaccatggcacttacaagactgaagcaggaggattgttatgagttataagactagtctgggctacagattaagaccctgattcaaaaatgaaaataataataacatagagaaagttttttataacagtgttccagtaatccctgccaactccacagttgaagctgagttggaagcggctgtcatcactgactagaagataagagatgaaagcaccacttaccaagccaggaggtgacagcacacaccttcaatcccagcgctcgctcatagggcacacctctgagtttaagctctacagcctgatctacatagcaagtacca

SEQ ID NO: 23466 - DNA, 1554 bp, Mus musculus
agcaaggaaatatgggacaaatgggtcagcttccccaggctctgggggctgaggcaggagccagtctacaggcctatcagcagcgacttcttcaacaacagatggggtctcctgctcagcccaaccctatgagcccacagcagcacatgctcccaaatcaggcacagtccccacacctacaaggtcaacaaatccctaattctctctccaatcaagtgcgctctccccagcctgtcccttctcctcgaccacagtctcagcccccccattccagcccatctccgaggatgcagcctcagccttctccacaccatgtttctccacagaccagttccccacatcctggactggtagctgcccaggctgccaaccctatggaacaagggcattttgccagcccagaccagaattcaatgctttcacagctcgctagcaatcctggcatggcaaacctccacggggcaagtgccacggacctgggactgagcagcgataatgcagacttgaattcaaacctctcacagagtacactagacatacactagagacaccttgtagtattttggaagcaaaagattattttctcttaacaagactttttgtactgaaaacaatttttttgaatctttcttagcctaaaagacccattttccttggaacatgtaagaactgtgcagtagccatttatggtttaaagtaaacaggccagatgaacctgagggataatagattacaaagaatatatttttgttatggctggttaccccagctctttttccccttgtgtgtgtggttcaagtgtgcactgggaggcaactgaggtctgaagccaaccatatgctcctgccttgccgataggttttattattttttttaaattaatgaaaatatgtaatattaatagttattatttactggtgcagatggttgacatttttccctattttcctcactttatgaaagaatttaaataaaaaaaaagaacatttctaaaaccagaggacaaaaggggttaatgttacgtaaaattacattatatatatatatatatataaatatatataaatatattaaaataccaatttttttctctgggtgcaaagatgttcattcttttaaaaacatttaaaaaataaaataaaaagcctcctctttccatccctcaagtcaacttttgtgctccagaaaattttctattctgtaagtctaagggtaaaacttcaagtattaagataatttgtacatgtagagaaaaaaatgactttttcataatatacaggggcagctgccaaattgatgtattataatattgtggtttctgtttcttgagaaaaattttttgttatttttacatctaacagaggaaaaaaaatttaaaaagagggtaagaaatgactccagtggggtgattttaacatgcaaatgtctgagatttcttcacttgctttcttccttactctgccccacacacgtacactttctgtaaaacttgaaaatagaaagcaaaaaccctcaactgttgtaaatcatgcaattaaggttgattacttataa

SEQ ID NO: 23467 - DNA, 1947 bp, Mus musculus
cagcagtaatttcaggagttgtttctccctccatagggtctcccgcaggctgtcagcttggctgcaagtgctagtttctcaccagctgtgcctgcagccttgagccttccctgtggctcccagcaacttccaaagtcctctctgaaggaagctaacttcctcagcagcctctcatcctacccccagcccgtcacaccttcacacgctcattcccacctctctgcctccctccctctccacagttatcgctgtgtgtgtgaaggaggagcaccaggacatttcctcgcttgacaggtcgcccagtccacagctgcctcttcccattgagagcatcaagcaggagaggaacaactgagacttccctggcatcagcctggaccctaactgaagccaagcatggagcagagaggaggcccggctttactgctgtgcagtgaatggacagcctggcgttccagggctgcctctgccctctggctggcactcattgcaccctcagcacactggaaaactagactggtccccatggtctacccaggcaagtggtagaagtaaggttacggagcagccgacgctgggtgaggacggagccacctccgcccaaaataaattgagggtcatgtacctcctgggggcaccctgcaccgcctgatgtcccaggggccccactgtggcagggaattgaccaagtagcgggctcgagagatttgggtttgggccttgacctcagggataacaagaacactgacttcctttctgagagggaacagctgggaagatgtacagggacctgagcccctaagggagactcgggccaggctacttgctgtcaggtacaggatcagacagtagtttggtccatgtagtcggggaactgcctgagagagaccatccttctctagagcggggcttgggctaactaacattccctctccctgcctggctagcccagccactgctcagccccttcacagcatctggcctttggttttctcacttggacacatttttgttttatttttgagacagggtctatgtagtacttgctgttctggggcttggtatgcagcccatgcagattctaaaccggtagggatccccctgcctctgccttccgaggcctgtgcacccagcccccggctagacagtttggcctggccctccaggatcatcctgaacagccctggggctcctgcagtgcccctgtgtctgactgggatttggactgaagcagtgaggccagtggctccctacggctgtggctgtgccgtgtggccatctctgggcctacgccagtcaagtcttgttcatccctgaggggagatgtgagtggccagtcatcatggactgggcaggttctgagagaagttggtcttgatctatccgctaaagatagcccaccctgtgcagaatctaggccatgaaagaggcctttgcctgcctgctctcctcaaagggaagaagatgaaagtccacagtaaaaggcaggttcaattcccagcacccactcacagcacctgcatcgtgagcgccaagggagcctgggcctctggtttccgtggatacaaatgtgcacatccttaaatgtaaataaaaataaaatctttgaagaaaacaatgtgatgatatcagatgagtgggcctcggcctctaggagcagacattgagagggaggaaggtggcccaggtgtgccttgagatagacatctgagcatgagacccctgacaaaagagggtgcagctggatgtttgccctccactccaggcctgcctggcccccagactccccgtcctttcacagatgagcggagggaggctgtgggctcattgataaaacttgagagctggggctggccaggcttaggctgactgcagattctcgttcagttagaacaacagaaacgggctctcatacagcctgagccaacctcaatctctgatctcccg

SEQ ID NO: 23468 - DNA, 1842 bp, Mus musculus
tttgccccgctctgtgggtcactgagggaggaagcagggctcccaggtgaccttggagcttcccccccttatttgcagagtgaagacaagatcaaggccatacccagcctgcatggccccctgatggtgttgaaccacgtggtgaggcaggactatttccccaaggcccttgcacccctgctcttggcatttgtgacaaagtaagtatcgaggccttgtgttcccatctgcctgagctaaggctcgtgggtggggtcagtcccaagagtcccaggccagccccctgcagaggccggaggacaccccacccccaccagaaagtggacctttctgacaacagagctttcgggatcctaaggtgtccttgcaactcactgagctgtcttcttcacaggcccaatggcgcgctggaaacctgctcctttgcccgccacaatctgctgcagacgctatacaacatctagatttaaaggcagctgcttcttgtccctcgccctgccccagtgactgagggtcttggatggactgagctcggccagcatctccattggatattttgaccagaggaagggagagggtcttgtctcctgtgtcatattggtcctttgatactgtgttggtttggtgtgtgtgtgtgggtatgtacttcctgtctggattgcagatcttcatctccctgctggactaacccaagtccactgtggggaattgatgcctaggggaagggtagaaagctgctttgttattaaacttaggccaacttagccataggccccgttggctgtcctgtctgccctgccttcctgtcccaccaaagcctggggaattctgtgtgctgtgtccaccgtgcctaaataacagaggctatcagagatgggctatcattagaaagtaaaactcagccgggcgtggtggcacatgcctttaatcccagcactcaggagacagaggcaggcagaattctgagtttgaggccagcctggtctacaaagtgagttccaggacagccaggtctatacagaggaaccctgtctcaaaaaaacaaaaacaaaaaaaaaaaaacctctgcccttaaccatgtgacttggaggagcagccaggggagtgggagctgtctggggtaacctggctctaggaccaggtggaaaaagcaccttggctggcccagccctgttcttctcctggggagggaagggcaggtcccctaatgcctgaaccacatgttgggcctactctctgagggttttctaagacaggagtgtgtaatagggatggagccgggtaagagatgctctgtgacttcccgaagtggctgcttggccacctcctacttcccgttgtgttgtgtgtctgggctgtgcctgggagcttcacaaataaacgtcatctgtgtagttgcagaggcccggaagcttctttcatcaaaagcggggacgacccagcttaggacagagcgagcaaacaggaggacctgagctcacatctcatgagccatgtgcagagtggaaggaccatgtgtgtgcacaccaagtgtgtcatagggatggagaccctagggcgggcggggtcccgcctcagtcagaggggcagccaatgtctccacctgggccctcagtgctgcctctgctctggatggtgtgggcaagcatctccctgtgagctgcagtgctaagctggttaagccaagttctatgaacgtgcacttgaactctagcctggagacttcacagtactgtcacaatgtgtggacaatggggcagtggggagggaaaccaagtactgaagactctaaaacgtcttgaggttcagatgggaagccagcaggatggcatgggacagaga

SEQ ID NO: 23469 - DNA, 1176 bp, Mus musculus
gggagacctctaacatgggagcggggaggttgcgggttagccagtgggcagtgatgagaagtgtggcgatgctgaggccaggccattgtgtgtaaggatgatcacatcacctagaccctcactccctcctcagactctgaagactctgcgacaagtggaagtgatcaattttggagactgcctggtgcgctctaagggtgccgttgccatcgcagatgctgtccgtggtggcctgcccaagctaaaggtgctagcttttccccttgtctggggggtgggggtggggggagtatgagttcataaggggtctggtgtgaaggagggtgggccaggtctcagccttctcactttggtatgaacatgtcaagtactttgcactgggttcatggtattgtttttcttcaacccccaatgccaaaggtgagagaccaagcctgttttcactgctcaaggagaagttaacgagagcaaggctagtctcctggctcaggtttgacatgcctctctactgttccacttgcttttaggagctgaatctgtcgttctgcgaaatcaagagagatgctgccctggttgttgctgaggctgtggccgacaaggctgagctggagaagctggacctcaatggtaggctgtggggtgagcctcagctcagctctgagcctggcccctcactgtcctccctgaccctcctttccttcctggatcaggcaatgccctcggagaagagggctgtgagcagcttcaggaggtgatggacagcttcaatatggccaaggtgctggcatccctcaggtaggcaactctgggaatgtggctccagagagcaaaggtcaggcctgctcttttatttgtgtttgttttggtttttggtttttggagacagggtttctctgtggagccctggctgtcctgatactcactctgtagaccaggctggcctcgaactcagaaatccacctgcctctgcctcccgagtgctgggattaaaggcgtgtgccacccactgcccggcataggcctgttcttctcttatttctctttggcttgtctcctgctacctgccagcctagtagctggcaccttgtgctgggtgttggagaaagagatggaggagagcttttgtgtgttcagtaaaggaccatcttaaagacctgtctgtggggaggccctgaa

SEQ ID NO: 23470 - DNA, 1204 bp, Mus musculus
aagccggcccggcaaaaccccgctccggcttgaacaaatcaaatcgaaggaaagaaactgccggctttcaaaaatcctcctccgccgccataatcgctggggatcgtggagcaggtggtgtgcacgagctaaacgaggagccgcggcagcaaggagaggcaagcagactggtcactgggcctggcccccacgcggactctcaagcagtgaccgacgcgcgcgttccgtccccccacgccgcggtgccgctaatttgtggtgagtcggggccctcacgctcttcctgtcacttgcctgggccaccagggtctgggtggggcgaagcgatcgccttgcttctacccttttgatcacgctgcgcccggctttgggggatgggacgctgggcgccgctgccccttgtacgtttggggaaactgaggcctagagtggccactagccacagcttcctctcggcggtggcgcctcccgttgccatccatctcacctggaggcggtaggaagccggctggcgtgccgggtggggctacgcagtccatcgttgcctacccagtcggcccacgtccgcgcgggaagcctggcatgagtcactgctgacgcttggctgggtcgatggatggccgtgcacctgaggacgtcccccacgcggccgcccaggaggagagggcgtttgtgtattgaccgtttgtgcctgctctctcccaggccgtctgctgaccttggatagctcaataccatccctgttttgctttggttagtcattctttaaagtgaattggggagggcttgtgtgtgtgtctgtgtgtcccttccacctggagccctacctaccaccaccagtttttaatctcattgtcccatcgtggaactgtaagaggtggctgaattccagatagatttttactcatcttcgtgtttgttgggtttctggcccgtgacagctggctaaggtgcctatttaacctaccaaagcggacatggcctccaggttctcccagaatccctcagtccctacttgaagtttccagtcccggggctgggcttgcttctctcccctgaagctcttcactatataatcctgacattttggtcttctcacttacccttccattcctctgtctgcatttctctcactttctgcatatgtgagctcgtttttccttctctcccccacccctctgtctccctgtttgcaaggcgactt

SEQ ID NO: 23471 - DNA, 1197 bp, Mus musculus
acagaaagggtggcaggagggctggaagccacttgttctgcagggcctaggctgcactgtccttagaagcattcactggggcctcctttgtctcctctcgccacccccacaccccaagcacgtgtagccctggctatcctggctccatccagcctgtagatcaggctgacctagaacccagagactgacctgcctctgcctcccaagtgctgggattaaaggtgtgggccatcattgcctggaccccctcgcctcctttctgtatgtaaaagcagctctgtgaccatcctggtagccttggtctatgcaacttagctgtgatatacaaacaccgcacatgttcactgtgccatctgtggacaggctcgggggtggggctgaaagagctcctggctccaaggagtggacagaacagacagggtcagggcaggcgttagacagccctactctgacctaggaattgcacttttgaccaatatttgggccgtggaacatctcgtggagtgctggccaagcagggtcggtgatgcggggctggatgggttgtgttgcaattgttgctactgctaaccttcaagcggtgactaacagtgagtgtctgggccttctcccagtctccacagagacaagaaggacacagggtcagcctgggcctcgtaaggatgataaaggcccggggtcggggggagagcacattctgggtagaggaatgacttctgtcccttgtggctggaacaaggcagaggagttcattgcaggccaacctcccggcagcacatgttattcacatggttagtgctgagcatgccaggcactctgctgaggtgcctcatctctgccagtttcaggcagtgtgactgctgaatccttactttacacccgaggaaacaagtccagataggttgccgacttggccagaccaaagagcaagctccagcatttcccatcccagacagggctctgaccccagtactgtgcggctgcagagtacaggctctctggaacaaccccccacccccgcaccccaggaggagccggccaggttgctgcctgacctgtgaattctgttctgtctttgcaatggggatggacttcccacctaagatgacgttctccttggagggagattagcttcctgtgaggctgggggctgagccggggaggggggggcacacattcctctaagaaaccatctgt

SEQ ID NO: 23472 - DNA, 1167 bp, Mus musculus
agggccaggtctcagctatggcaaagtcttggggtcgggggtgggttgggggcaggggactaccccatcaggcaggcgccagtccgctgggtccctgtccatcctttccacccccagtaccccaggtgtgtatacccaggtcatacactgcaaccccaagtggtcccaggatccttggcctgtcaaaatgggggcagaccctccccaattctagttctcctggttggagagggaggggcctggccagcttcagcctacagctttaaattctgtctgctcctaaatgggtccaaagctcagtactggggagcctggggtccccacttgaatgtgcagcaggaggtccttttccttctctaccttcctcttctccctttccctggggccagatcaggacacagcacagggcaggaggccctgcctagcttaaagtatagtcatgagatggagttgggagcactatactggtcacttaccacctggggcctcagtttcctgatctgcgaaaggggcaagggctaaggcagatgataatctgaagctagattaaacagtctaggtgctcctaacaaccaccccctgcccgggcctctcctttgtgagccacagttgtagaccgtacctcagccttggagtcaacacagcccacagcccattttacagaaaccaaaactgagttctaacaggaggagtgatttgcccagggtttttagccctctctggtacagaactgggatgtgaacattggtcagagaccccacccattagtagctggagcctctgggctcctcagtcccatgcaacatccctgggacctggggaagggatgctgagacacaagcaggtcttcttagctccatgttgggagatgttggggtaagcaatggaggctatatcctcaagagctgtcacagacaagtggcagaatacaggcaccatgagctcaggttctgacaaggtgcaaagcgtggggaggctctgaggaatatgaagagtgggaaggcggcctaggctccatgggccactatgagaaatagcctctctttcctgggaaccctctgtggtcctctctaaaagacccagatatactgttatggccatctatcccagccccttccaccctatgctcaaccctgctggctgcctaggaccccagcggacaccccc

SEQ ID NO: 23473 - DNA, 1234 bp, Mus musculus
accacatctaaggtgggggccatggccgtgaatgtggatgacacttgttctcctgacccgtggtgttgcagtctgttgtcaccagccttgttttagtgtgtatatatgtcgcccctgtgatgcatatatacacaggtattaaatatatcgctctatataatattatatatgtgtgtggtatccaaggaatctcttctattgagggctaaagataaagaatttggcacacaaaaaaaatgcagacatccttgtgaattttgagtgcttatggggtcatctggttatttagggcattgagactggagccgtggctcagatgattggggcagaaaaggcagggtggcccacacctgctctgactgctagcttcccacagatccatgtctagaataccagtgtgctcaggaaaaggaagtcatttcgtgtttgtttcccaccaaagaagaatgaatccagggtttttctactgttcgtctgtccaggggtccctgagatctgggctcccttacattctagacctatgtccccccccatggaagagaagagaagaatgatagggatgacctggggtggggggacagcaaaacatcttaaatgatgactgtagttaatcagatgtgacccctctagggcccctggttggaaggctcagggttgaagcggggcctaggagcaagaacaagattgcacagtagacatggggtgagggtagtgggagggaatgctgcatttctcagctgggcagtaatcaatctaatggtcctttaaaaatgtctgtattaaaatttaagaataccacactttaatattaaatatcataaggtctagtatcttgataataatgtagatgttttaataacaatttttgtccttcttaaaataaaatgagagaaatttgcttcttttagcctttgttctatagaatatacgtgtgcactatgactcttgtcccccaggtgtcactcctgctcctccccaactactgcatggattcaggggaccagggctcctgggacagagctagccccagctggctgtgcctggggcagacattccaggggttgaggggcaatagccctgtgtacacatggagacccagctgacccagctgagcagcacttccacagcaaggacaagttgtgctctgtacaagtggccctgcaaggcacgctctgtctggcagcttcctcacaactgcctgcctgctcacagcactttctgtgggactgcccgt

SEQ ID NO: 23474 - DNA, 2580 bp, Mus musculus
ccttgctctggctcaccaatatacccaggccagaatctagtgtccctgaaggcagaagagggcctgccacgtcacagattagaatccctccccatgggtatcagcaggccgccgtatatgagttgtatttgctgaagttacttacagtgcagctctcatgggacagcaggctctggagacatttacactggcctgcagtccctgtggagtcggagggtgcccacacagctctccccgtggggcagagtgatttcttgcagttttggctccctcacagctgcacttttctcttctatttggctggattggacatcatggaaccctctactcatgtgggtcatgagggcaccctccaggagggtgtgtttgtttgctcagggcgggcagcctgtgtgaaggagacagaggtgatgagggtgcttcattatacttaacactggctttattttaaatggtggcttagtttggggcccctatcttttaagacttttcataatgatgttaagaccagggcagactgtctactggccatggactgcagccaggagatgccctgcccctcctgggacctgcacaccacctctctggggaacttgacaaaggtccctaaggctaagggaggtctccctcctactaggtccctgactttgactctgtggttctctaggaaccgtgtgcacacttgtctctgttgtaactacaaagggcagtagcatccagcatgtcagtgtctgcccgggctgcctgcctcctacccacccagcactattctctgggctggctgttcacccagaggcagttctcattttgtttctggtggacaagccttgagctgaaaatctcttcgttttctttgactagaaaatgtaaggtttctgttttttaagttttagttttaaggaatggatacttatctctggatgccatctgtgttctgaccctagtgggtgggtgggccttaccgtctccccttagtccccgttctgccttgtggtgccctcctttccttccagaagtagggagtgggttctggctcctcctaagtgcttacagagtcactgtctgcttgtttcttggagaagcctctggaatgaaaagcggcagggaaacaaaccggaaggagcacgcctagaggttgacatcttggagaacaaagtgttcacataagcttggctcctctgttggctttaggacccaaggctgcacagaaagagttgagctctgctctttatcttgctgtggaagtctcctgactccctctaggagctgacagctgaagcctgaagctcttgcacttggatccttgaattctaaggagtaaccaggctccagaagccaacttctatttggctttccgtgggtttgtcttaggatgagaagtgtcatcacttcctaaacatcctgttctcagctatggcagcctcagaaaagacacctgaatgagttagaaccctgcaggaatgtacattcaagagatgtcttgataaagaactacgtgcttttggaaagagccaccctttggaggacctgttagtcacctttatcttcagcccaaaggctaagttatgtgggtctgactcctttggttagggacagcactagacagtgaccctaacccttggtccatactccctgctgtgatggtgctgtggtctgctttccactcaggcagctcctacagtcctccagcctggggacagatgggaagctttccaggggccccccgagaggtgtgctccctgtaagaggggcctgtaagaggagctcttggtttccagggcaaagccctacccacagcttctttaacatctgttaattaagtgcaataaaattttctagaaaaaggcaaagatgatttccaggtagagattgctgtcttttggtgttggatgccagaacaccacttggttttatttttctaagtgcatgtgattggtagagtgtgtgggctctgcatcctccctgggagctgcattccagcagcccctctccctacctttgccgtgggaaagaggccaggagaaaagccctttgtcccagctgcagaggtggaagcagacagcagccctttggccttacatgtgtgtgtgtgcctgtgcgagtgtgtccctgctggtgggccggagtgatgtgttatggagggaagttgggaatgtatccttttcaaacaaaattaaatattttgagacgagaacttggcagtggtcttttctgttattccctcctttattttctgtctatatatgcctgcatgagaacctagccagagaacctcctctcttcggaatcccaggcaacacctctgtacacaccagctagatgcccgagtctcctaactcctggcctacagaatgagttctagaacagccaaaaaaatctgatctgcaaattaaacactgagaaactcacaatcctcctgtgtactgggaataacaggtgttgcttttttttttttttctgagacagggttttttccatgtagctctggttgtcctggaactcactctgtagaccaggctggccttgaactcagaaatcctcctgcctctgcctcccaagtgctgggattaaaggcgtgcg

SEQ ID NO: 23475 - DNA, 1098 bp, Mus musculus
ctgtacttactgtccacctcacactagacctgtactcactgtccgcttcacactagacctgcacttactgactgtccacttcacactagacctgtacttactgactgtccacttcacactagacctgtacttactgactgtccacttcacagtagacctgtacttactgactgtccacttcacactagacctgtacttactgactgtccacttcacattagatctgtactcactgtccacttcacactagacctgtacttactgactgtccacttcacactagatctgtactcactgtccacttcacactagacctgtacttactgattgtccacttcacactagaccgggtcgccgactagtgcagttaagacaagtgatcacctcacagtgagctttttacttataggtgaaagacagaatcagccatgggtgctatctatccctctgagttttcccctgtgcactataagggacaggtgacacctaagcaaaaggtactaatgactgcctgtttatggactgggagagacaagaaggtcactactccgatagtccatcacagtaagctgtgagtgaggagaaagtcttgtagcagcctctgggaacctggaggtgagtaggagaagaatcctaactttgtagagtcctcccatcctttcttgttctgggggcagagatctaggataagatgtggcccacagtcactagagtaccatgctgtgtctgggaagcctgggcctttccatgtgtgtcagccgcatagtaagtgtgagcaaccagacaggttcatgagggcagatgtgtagtggggccaatgttgagctgtttgtcagtactcttgggtactcatgttcaacccagtgtaacagccaccacattgaaccgccactaaaccctgacgtttgtgttttgttgttagggacaactgactgatctatcaaatgtcctaaagaaatcacactgttcttaccaagcttcctcactaatcacagccaaaagtacctggcaagggagactttagactttggacattcactaactctgtgtcaggtttttgctgcttacgagtagtgtgtggagagtttaaactgtgtg

SEQ ID NO: 23476 - DNA, 1099 bp, Mus musculus
gcctcatttgttcatggatcaggtggtactgacaaggacttctataggccacaaggactggagatggacagaaactggtagtgaagatgttaaactaggatcatggttattaggtttttcatccaggttcaggaaatcaggtatacaagccaggcgtggtggctcacatgtcatccctgtgttgagaagaagaggatcatcttgactttgaggccagtctgggctgcacagttgtagagctgcttgagcgacagtgtgaaaccctgttttaaaaataagaaaatcaggggctggagagatggttcagcggttaagagcactgactactcttccgaaggtcctgagttcaaatcccagcaaccacatggtggctcacaaccatctgaaatgagatctgacgccctcatctggtgtgtctgaagacaactacagtgtacttacatataataataaataaatcttaaaaaaaaaataagaaaatcagccgggcatggtggtgcacaccttcaatcccagcatttgggaggcagaggcaggtggatctctgagttccaggacagccagggctacacagagaaaccctgtctcgagaaaacaaaacaaaaaaaaaaagaaaatccaggccagtgaaatggctcagagggtaaaacagtctacacagtgagactctgtctcaaaaacaaacaaggacagtcagtgctgaatgtgactgtactctgagtccctgcacgcaggaccagaggcaggtggatcttctctgagtgtgagaacagcctggtctaacactgagtctcctgccagccttgactacgtaatgagaccctgtcccagaaagaaaggaagggagcaggcagttggtcaggaaaatgtcagccaagatgttacggtgtgtggaagtctgcgtgtcctgcagtgtgtccactggctgtgttattgccttaaggctgtttggtggagctgtaaatgccagcagacttggagataagcctgttagtaggaaattgaaaaacctgatagctgtccttagagaggataacaggacagattgttgtcttctgatagctggggaagccccaccctggagactgagccatcttga

SEQ ID NO: 23477 - DNA, 2267 bp, Mus musculus
ctatttggtaagtggcaggtatctggctcaggcgtacaaataaagtcttaaaaccagtttctgcttcattctcttcccttgtggattccagacattgccaacctagcagaagaattcaaggatcacttagtgcctgatcctggctgccagtatgaccaagtgattgaaattaacctcaatgaggtgagcggagaagtagagtttgggggactgctgagggtggggcttttattttttggcactaggcaggatggtaggggagcaagtcctatcagcacatctagcaaggcagttggccctttattcctagggcctaaatcaggcaggagttggggacagacagaaggacatgacattcagccatagggaaagcaagtctgacatgagtgtccatttgccactccaaaactttagtggaggccaagctctcgccctgggggctcactttgagttcttaggacaagctgcaatgagttggcatcctgacacctgcaggacaggtattcagcgagctaaggaagggctctagagcaaacagaagccaggctgttcatgccagtcttggctctatggatctgtgctagctgacctgcctctgtaggcatccttttcctaaggggggtgtgagtggcatgggttagttcatggagtaagagtctggtgtgttggtgtttgtgtgccaggcactctgctgtgcatgtcatatttgttagtcattcctcataaaaaagcgtatgctgtggcctgtctgtcgcaagattccagtaggaacgtttatggtctctcccaacccttggtactagatttgaactctaggcaagcacatctgtgtccccagccctctttgttgttgtttggttgggtgatttttagttgttgttgtttttgagacagggtttctctgtgtagccctggctattctggaacttgctctgtagaccaggctggcctcaacccagagatggcctgcctctgcctcctgagtgttgggattaaaggcatgcgccaccaatgcccagctatgtcttctttttaagaaggtctcactaagtttcttgtgctctccttgaactttgttaactaacccaggtggactttacctggcagtcccctgcctcagcctctcaagtagctgaaattcagtcctcaccatcaggcccagttccttcaaaagcaatgtagtttcagagataatggactcgtgaggcaggtggctcagattgtttctgtacctctgtcatctccttgtgacctgaaggaggcccgtcactctacccttcagttcctgtgtgtaccatgttgaattgagacagcctgactgggggactcaagtgctgggcgaccccaacctattgcccacttgtctcccatgacaaagtttgagccctgaggacagaagacagttccttctatagatatgagaggatcttagctgggcagtggtggcggacacctttagccccagcacttgggaggcaaaagcaggcggatttcttgagttcgaggccaggctggtctacatagtgagttccaggacagccaaggctacacagagaaaccctgtctcagaaaaaaaggaaaaaaaaaagaaatgggagaatctgtgaagagcatccatccccactctacttcttgtctctctgctccttgaccctgtcttttcagctaaagccacatatcaatgggccctttacccctgacttggctcacccagtggcagatgtggggactgtggcagagaaggaaggctggcctctggacatcagagtaggtgagtgccttccactttatgggttaataggtacctggggacagtcacattcatggtacttcttgaggtctctggttattgagatattacctgtgcttgggatagaaagaatgcatgcttattgtacttcacatggagttttaaaatacctctaactctgacttttagccagaaatagcctttgagaacattcctgtgttactgtatacatgaacatgcacatctctatgtaaatgtactttttgtttgtttgttttgtttttctgtgtagccgtggctgtcttggaactcactctggagaccaggctggcctcgaactcagaaatccacctgcctctgcctcccgagtgctgggattaaaggcgtgtgccaccactgcacggcctgtaaatctactttggtacatttacacagatcatgcgccatgctgctgtctgcacacgtcacacatgcagacacactggcacactgctactgtagttcagcctgagtgtcc

SEQ ID NO: 23478 - DNA, 1137 bp, Mus musculus
atgactgggttatgagtagccttctttattgctgatatttaggttgcttccaacatgtctattagaaataatctgtcccagatcagttgatctctttgtgccaggtcagatggagatttctggttcctctcccctgacctttgaccctaccatataccaggtttgattggcagctgcaccaattcaagctatgaggacatgggacgatcagcagctgtggctaagcaggcattggcccacggactcaagtgcaagtcccagttcaccatcaccccaggctctgagcagatccgtgccactattgagcgggatggctatgtgagtgttcacgtgcccctgcccctcgcttcccatcatgcctgctgatgtgtgtttcaggatggaacaagctatggactgttgggctaaggcaatgcaggcatagcctttcatgctccaggctgctgccttacccattgccatcagcattgtacctggccctgacagttttctgtcttctttatcctctgtaggcacagatcttaagggatgtgggtggaatcgttttggccaatgcctgtggcccttgcatcggccagtgggacaggtaagcagtgcatcctgagagagcagcctctgctccttggtaaatagtggagactccagccggagccagagaaggttccagcactgctacacattagcagtccttgtcagacgtggacgggcacgcagagagccctacagaagccccgagtagccagaaactgagtcctgtctgacaggaagaagccaaaaaggctgcatcctagaagccaagctggtggctctgatggagccttttgagagcaggtagctgcctaagtgaggagactgaggcctcagtgtggcctgtgcatcttctacatactcttagatgagacctggggagcttgaggttgtaccctgtgcagtgtgcttgagtcccttggaggacacagctttttccttgtcattcccctcatcatgaattaggcatgtaccataacaaaccagacaaactggcctctgggcagcccatgtgacaaggctaggtatctaatcctatcccctctgtcctggcagaaaagacatcaagaagggggagaagaatacaatcgtcacctcttacaacaggaa

SEQ ID NO: 23479 - DNA, 2483 bp, Mus musculus
tttctgctgccggcccctggctcaagttccgtgggcatctggataacatctctaacaacctgctcatcggtgccatcaacatcgaaaatggcaaagccaactctgtacgcaatgctgtcacccaggagtttggccctgtacctgacactgctcgctactacaaggtaggccagcattgactcacacctttaataccatactaggacttgggaggcagaagctggtgggtttgagtttgaggctaggctaatctatacagtgagttccagactgggcttagtcccttaatacttggtctctgtgagacctgtggctcttctctgagcttcaatttccaacagactcctaaagcaattctgtaaggtttcttctaaccttaggtctggggccaaacacatgctgagactcatctgactcccgggcagggttctcctgggtgttgggatagcaatttcctctagtttgtttctcatgtgtacctcaccaccaccaagccctcaggcagcaccctccgctgcctcactccttgtccctgttgcctgacagaaacatggcatcaggtgggtggtgattggagatgagaactatggtgagggctcaagccgggagcatgcagcactggagcctcgccaccttgggggccgggccatcatcaccaagagcttcgccaggatccacggtgagccagtcatccccattgacaagtgctgctccttcactcaaggctccaggtcactactttgccatggctgacttggagtcggccatatttcatagcctgtcccacctacccaaggccaaggtggcactgcccaagtctgatatccataacactggtcttggttcttagtttgtcagttgaaatctaagggatgcagcatgtacatccagactaatgcagacctgcttggagtgctactgtggaaaagggtcactggcacacagcaggcttgggtgctggagccatggcctgcttgccccacagtaggactggggtttcgggtggggtctgtctcatatcccttgtgttagagaagagtgcctggggctcctgaggagccttgggtagaggaaccacactgcaacttcatatttgtctaacagaaaccaatctaaagaagcagggcttgctgcccctcaccttcgctgacccctccgactataacaagattcatccagtggacaagctgaccattcaaggcctgaaggactttgcccctggaaaggtcaggctaggaagagggaaacaaacctgggatctcttgggtgggtggggttgggcaatcgccttgtttcctgtcctgctacacccattcatacagctcttgtaaatccgtgttccagctgaaagccaacccagacatgagccctggcctggcacttagtatccaacagcttgcctgatacaatcttgggttttaagaggccccagtgaggactgtgttcctcggagcaccgtctgctccccagcccacacccattcttctattgcagcctctgaagtgcgtcatcaagcaccccaatgggacccaggagaccatcctcctgaaccacaccttcaacgagacccagatcgagtggttccgtgcaggcagtgccctcaacaggatgaaggagctgcagcagtgaggagccaggctggctgtcctgacccactctggaccctgctggatgtcacttttgtcacaggtccatgtgcatcatcagagcctaatctggtctgtgcagcatgacctcctgctctaagatggtgaccagacctgcttcctgcctagcctcagcccagtgaaccaccattgagggcgtttaagataatgttccagccccgccttcctgttcagtttggtttctctttgagcagcccatgcaactgtatttatttttgatgacagcactccctctacagaagtttttattctgcctgatcatttcactggtggctgaaggattttagagaaacttgttcttaaaagaaaaaaaaaaagatccatatctattaatgttctgcctgagtgattgatgtctactattaccagcatgagctaatggagggtttttcaagcaaagattccatcaggccttggtcacatctggaccctggtcacaagtacctgcagtagaggagagcttcagagaccaagagctacctcctctgttcccccggggctacagtactagacctggtctttaccttgagagtaggcacagcgcctaccttaaaaacaaagctgttgttgctgctgctgctgctagtggcacacactttaatcctggcagaggcagatgggtctgagttcaagtccagtgtagactacagagttaaaacagcctgagaaggaatctgccccaggacacagctaataatcaaatgctgcatgctgtctgcccctctagcctccgcagcagagatgtgaggagacaggctctctccattaggctgcatcagctaaatctcacatgtaaaggcccaggcaggccatggc

SEQ ID NO: 23480 - DNA, 1215 bp, Mus musculus
tcagctgaccatgagggcagccccaggtccacagatgactgtctagtcctactgtccctttctcactggcacttgtgtgataaatactgttttgtgacatactgccatggcctgcctgggcctttacatgtgagatttagctgatgcagcctaatggagagagcctgtctcctcacatctctgctgcggaggctagaggggcagacagcatgcagcatttgattattagctgtgtcctggggcagattccttctcaggctgttttaactctgtagtctacactggacttgaactcagacccatctgcctctgccaggattaaagtgtgtgccactagcagcagcagcagcaacaacagctttgtttttaaggtaggcgctgtgcctactctcaaggtaaagaccaggtctagtactgtagccccgggggaacagaggaggtagctcttggtctctgaagctctcctctactgcaggtacttgtgaccagggtccagatgtgaccaaggcctgatggaatctttgcttgaaaaaccctccattagctcatgctggtaatagtagacatcaatcactcaggcagaacattaatagatatggatctttttttttttcttttaagaacaagtttctctaaaatccttcagccaccagtgaaatgatcaggcagaataaaaacttctgtagagggagtgctgtcatcaaaaataaatacagttgcatgggctgctcaaagagaaaccaaactgaacaggaaggcggggctggaacattatcttaaacgccctcaatggtggttcactgggctgaggctaggcaggaagcaggtctggtcaccatcttagagcaggaggtcatgctgcacagaccagattaggctctgatgatgcacatggacctgtgacaaaagtgacatccagcagggtccagagtgggtcaggacagccagcctggctcctcactgctgcagctccttcatcctgttgagggcactgcctgcacggaaccactcgatctgggtctcgttgaaggtgtggttcaggaggatggtctcctgggtcccattggggtgcttgatgacgcacttcagaggctgcaatagaagaatgggtgtgggctggggagcagacggtgctccgaggaacacagtcctcactggggcctcttaaaacccaagattgtatcaggcaagctgttggatactaagtgccaggcc

SEQ ID NO: 23481 - DNA, 1417 bp, Mus musculus
tcaccttccacaggaggcatgataagcttcgatgtcttccccgagggctgggataagcgctactgcctggacagcctggatgaagacagctttgacatcatccacttctttggaaatgagaccagtcctgtgagtgtggccctgccccgtccccctcaacccaacacctgaggtctaggccaggacacatggcaacagaaaacagtcaccgttcccactctacagttaggaagattggggctcaaagaaggccagacacttataccgtatcatacagcaagtcaggacaggtctgacaagtcatcctggcaggtctaaggagagggtttgtaggagcccgtatggaaagggtggctcttgggccccccaggcctgggctcctgccttgtagacatcacctaagatcttccacatcttctctttttttcctctgagtgcagggcgggaatgactttgagatctatgcggacccccggactgtcggccatagcgtggtctcccctcaggacactgtacagcgatgccgtgagctcttcttcccagagacagcccacgaggcgtgactgggcccacagctgagcactgggaccttcaaagagctctgaccaggcctgaagatagaaccattgggtgccacggttcccatcccactggcccaacacgtagcatcctgtgggggcactgcagggtcacccacacaggaccaacgtctgtgtgggaactgtccccagccaggtggctcctgacgagacgcatacctgctctctaccctgatggtcctggcctctgatgctgctggttttggggacagaacaggtctcaccacagggtggcatgggagttgtgctatggagcctgctggccacagactgacaagggacagaatggcagagaaggggcattacttaaaggactctgtcacagatattaaagttcccaagacaaggtgtggtgtttgctctgtctgaagacaggatggttcctgtcacatgttaaggcccccgctttgaggcttgccccaggacatctatgattcactgaaccaccagacatggaccatatgttgtgtccttcctcagccccttccacaagaacactcaagacaggcagctcaggggcagggtgggtcacagttgagtttattgccagtgtcaggagggatggggaatccgtggctggggtctgagtggggaagtttctgacttggcgctgcagggcccaagagtagggaggaggtctgttgtccctatcattcggggagcctcaaggtgatgactgctaaggacctgctcacaacagagggctgatggccctggggttccttgtcaaaggatccgcctgtgtctttattaacacagttctgggttacaggcttgctggagatttgaactctggtcctcaaggttgctgaggactg

SEQ ID NO: 23482 - DNA, 1300 bp, Mus musculus
aggtttgattgtttagcatattaaaacaccatctacagcacacaactagattatttgtgttgaaacagggggaaatttaagagaataagcatgtgatctaattcacatgtactaatgtctcatataggggttgttattaaacacaataatcgggatgtatgcgtgcatgaaattatagaagatataaaagcatgcataaaaacaatttttaactcatctttgggatattgtcaatctatttaaaatggtgctatgggagacgacaatcagaaatggcgcctcgcaaggggaaggaaaagaaggaagagcaggtcatcagcctgggacctcaggtggctgagggagagaatgtgtttggtgtctgccacatctttgcatccttcaatgacacctttgtccatgttaccgatctttctggcaagaaaaccatctgccgagtgactggcagaatgaaggtaaaggctgacagagatgagtcctctctgtatgcagccatgttggctgcccaggatgtggcccagaggtgcaaggagctgggcatcaccgccgtgcacatcaaactccgggccacaggaggaaacaggaccaagacccctggacctggagcccagtcagccctcagagctcttgcttgctctgggatgaagattgggcggattgaggatgtcacccccattccctctgatagcactcgaagaaaggggggtcgtcgtggtcgccgtctgtgaacaggacttctcattattttctgttaataaattgctttgtgtaagctaaaaataaaaaataaaaaataaataaaatgatggtatgtaataggtcaattatcaatatttggtaataaccaaataaattgctgtattgaacaaggaacatacacttagtcaggtttttaagacacaatttttgttataggttttctaaaaatatacgaatatattttacaattctttattaataccacagtggttctaataggacattgaaactgtgttttgaggtgaaagccacctcaaccttggccgtctaccctcggcttttctctcaggtagaagaggctgaaggcagcccaatttattgtaggccagaaaacctactccgggtcttagtgagaacaatatggctactctggtcgggacatgtggaggctcatggggcaaaggtgaacgcggccctctcctgagtttgctgtaaagctgcccgccttttggtggcttcttgtaccactatagctcagggaaactgtgtgtctcaaggccccgccccacagcagccagcagctagctgggtccatgtgggc

SEQ ID NO: 23483 - DNA, 1100 bp, Mus musculus
gccctggtccttggcactacctttgtggcttatgtgccaaactataagatgatcgagtgggcccgccgggaagctgcgatgctggtgaaacaccgagaggccagtggcctccccatcatggagtccaactattttgaccccaccaagatcaacctgctggaggacgactgagtggggcttaagcagcgctaccctgctcactccccagagaatctacccaagggattgaaagaagaaaagagtgttactccagctaggcctgtcaatttttttggccaagggcccacacctcagtaacactgattgacctaaatatgctaaagagatgggaggaacaattatctccttaatgagagaatgtattttccttggccgaaactctgtgggctctagtcacctgtggggccttcaccttgtggtctgcttacttcctggagttctaagttccaaaacgcatctgtttcttttccccatcttttgaatacttgccaatgtctgggctccctccccccaccattgatgtactgggctctcttgctttatttgtatccccctcttctgcttctgccatggggctgcttgggagcctccattactaaacttcatatgtaacccaagaaggcgtggctttctccgtatttcttctggaatcggcctggattttcagattgcctgccccgctatgtttcttttaaactataataaaatggttcttaagcctccctctgagtgcattcttaaattatcttaaattatttttgtttggtttactataagttatgtatatacttgtgtctgtgtgtgggtatatgtgagtgcagatgggggtggggagaggggcagaggcctcagatcctctgcagccgagttgaaaatagaacttgggtcttctacaagagagctgtatgctcttgcattgagccatctatccagccatgctctttttttttttttttttttttttttagtaagatttattttatatgagtacactgtagacacaccagaagagggcataggatcccatcacagatggttttgagccaccatgtggttgctgggaattgaactctggacctctggaagggcagttagtactc

SEQ ID NO: 23484 - DNA, 1608 bp, Mus musculus
caccttctagcagtaactgaagcaaaggacttggagtacatggggcagctggaggctcctcactcaagctaagtgacctctttaaccacaagtttaccctcctcccgagacaaggccactcatcacagcccagccggagcagccgcagcgtcaggatcaaaggagactggcagcaggtgtgaggccagagaaaacaggagaaagccattcctcctcctcctcctatctgagtgccaaccctcgatgcccacccctaagctgctcttcctcagcgtagcttgacctgtcacctttaataaaggtctaggctgcagcagcagagacacaggccttctgtctgagaattagttatttatagtcaatagagccagccactcacacccttatgggtttgtcagctagggactagggggacatgattgttctcccaaaacaagtctctgatgtagaaaataccataatgatgtagattcatggtgggaagaaaatttggagttgtctccagtagggactttcacattatccttaatacgtctccattgtcattctgaccttatggggtgtggttggggtgtgagtgggcgttttcttaatgatatgctgctaggatttcatgggcagcaatagcctagaagtctatgatctagactccagattccagagggaccttaaggttcccttctgtggtgtcagtcttctactagctaatatgggaaactggatatggagaagggagctcagagcaggcacctgagactcagctccacacccatggggagccccccaccgtggcttcctgccacttctgaaacttgagcccacttgttccttttggggtaggcctttcctccctgaaaagcccctattggctcccttgcccctaccctgcaggctttgccactagccatagcagtggcatcatggagatctctgcctcagagctgacctgttgtctgaccagagagagctatgtccacctagggtgtcgagtggtgtttgggaacttgaaggtcacagtcagaaaggtctcaggactcaacagtgtacaggtgtatgtggctgtcacaacgtagagtggaaaccaacagagactgtttagtgttggtctctttggcagaatagggcttagaaggttcagtgtttaaagcttggtatctgggaaggcagaggttgctggaagccatcactttttcctttgcctggccccagctggtagcatctctgcccagagctctgtccttagggtgctctcacatggccattctctgtttttctcctcagcagtaaccatggtattctgagacatttgcctgaggattttagtcacttaattgcttgaattatctcctgtcatgtctagcagccatccatgccaacgtctgtggccatggctagcagagagatgggaagactggacagtctctctggtctcctttccctatgcaagttccgttgtcaccagaatcccaggccaggaaccccacatcccacctttacatttctctgtcccagtacctcaggagcatactgttcatgagcaggtgactccccctgggcatgtacaagcaagctgagaggaaaaggagtcacgtggttcatgccacatag

SEQ ID NO: 23485 - DNA, 1597 bp, Mus musculus
cttcaggcagaaaattgctgttcttaagctttttgttttttgagacagtctcactctttggctttggctgtcctggaattcactatctagaccatgttggtctcaagctgctaggattaactcaagccacctcacctggctttttatatactgccatttcagtacacctgttagcttttccttgctttgttgtgactgctttcaccaaaccccatgtcatctactggctacatgtcctatctccacagccaccaaaaccctcaacagaggcatctctgagttcattgtgatggcagcagacgctgagcccttggagatcatcctgcacctccctctgctgtgcgaagacaagaatgtcccctacgtatttgtgcgctccaagcaggctttaggacgggcgtgtggcgtctccaggccagtcatcgcctgttctgttaccatcaaagaaggctctcaactaaagcagcagatccagtccattcagcagtctattgaaaggctcttggtgtaggctgtggcctctgccctttcctgtctactgccaccctgtttgtgtatcatattgtctgttagcatgtactattttcaaccagttactattatattgtactacatctgcgttttatatttttatttttgtcttaataaggttatttttcaccatctcttcattctcttctaccataaaaaatgaaatgatagctaggacaggtgaaaggcagaatgtcaccatttaacaacaggaagaaccaggagaaacttaagccagggacagtgtatactttcatctgcaaacttattccactgcgcagggtaggatgacagtgaccctggtcccttgtgcctttgatataagagctccataaatgttactgacactgaggaacttcctttgggtagcagtctctccctccccttatcatttgaagaaatttgatgttgggcctatgtccgggagccatttattaatgtcctgtgtgtttttgatgtatgtagtctgatattctcccatatctggggcagtatcagtacaaagggattctgtggagatcgtggcaatttgctggaacttacagcagagacagtgctagcaggaaacatcctctccttggtaaatggggatgtcttattgtggaaccatttgatggccgtgttgggagcccttatcctgttcttcccacagcgtgggtcaggtgtattctccctcacatgaagaaagtgataacatgttcattattgagcatcctaataaatatgttcatatttcgttttaaatgaaatatggcagctgtgcctgattttcagttttatcagctaatattttaaatgcttagcatttctagataacacgggttggggatgaaattgagacatgttctgggtatataaaccaggttggcctgaactctgcctctctccaagactaaaaacattgtgttttgatgtgttggtgttgggaatcaagctgagggctccagaagtgctctgtccccagtccagctgttttactttgtgccccctatgtgtgctaaagtagcaagcacattcctaccacagagctctctcccacttaaactcttcactaagagtttgtaaa

SEQ ID NO: 23486 - DNA, 1943 bp, Mus musculus
ctccttccaccttgtaagtcctggggctcagactcaggtcattaagcatggtagctggcacctccactgatgaaccttctcaatggccccaaactaacctatcttaaaaaaacaaacagaaacagacaacctgagcttgccattcttccttcctacccgtgcccctggctctcccgaccctagccaaggccagctctctcagcctgaaagccttaaagccttaccgttctccttagctgtccccttcctccctccccttccacacaggatgcaagctgcacaaaatagccaactttgggaattgtctgtaagggatttccttgtttgtttgtttgtttgtttgtttccagtttcaagaaaatgttctcttatgttttcgtgattagtctacgcagcaaggaagaaacaaaaacaaaataataatcatgctcttttttgtcctcctccttctaggtcctggtgcaacctcagatcattaagacagattcccttgtgttgaccacgctgaagacagatggcagccctgtcatggctgcagtccagaacccggccctcacggccctcactgcccccatccagacagccgcccttcaagtgccagtaagggtcgggctctgcttcctctgggctcagagtttctaaagcccgctgctgagtacatgtggggagcttagtagaatgtgtccatcagattggaaacatcaccccacttttagtttgtttcttcccttgaagcagtgttgtggagttgtgctgtattaagtcttgggagcttgtaagggagtggaacagaaccctagatgagccctgctgctggacggcagctcctcacagagccgtcatctttttttaccattgttgccgtggggtttgactgctaaaggaccctagggccaccagacagggagaggtatgaagaagacagacaaggaaagcaccatccttcagttacaggatcccagccactttgagtaaaggttatttacattttggaagcattaacattattcataaaatctgagagctagagttggagaggtaggcagtggataagagcgcttgcttagcacactcaaggctctgggttcagtccccagcaactcataaacagggtgtggtggacgggactggaatccccgaactcgggagatgcaggcagaaggtgcaaaagttcaaggtcatcctcagctacataggggccagcctgggctatgtgagaccttgtcttaaaacaaaatagaaactgctaagaactagaaactattcaaatgtccgtccatgggagagaaacaactcacaatacacctgtaaaataaaagtattcccaacagtgataggaaagaaaagaagcccgacccagacggtcacactagtaatcccagtagtaagacggtcaagagttgaagcgtgggctggtgagatggctcagcgggtaagagcactgactgctcttccaaaggccctgagttcaaatcccagcaaccacatggtggctcacaaccatctgcaatgatatccgatgctccgatgccctcttctggtgtgtctgaagacagctacagtgtacctacatataacaataaataaatctttaaaaaaaaaaaaaaaagagttgaagtgtgactgtgctgtgtgacagagcagggttatagggcaggacttaagggacattctgtatggtaaggggttatagggcaggacttaagggacattctatatggcaaagtgttataggtcaggacttaggggacattctgtatggtaaggggttatggggcaggatttaagggacattctatatagcaaagggtttttgtcttggatgctacaagttgcatgcatatgcaaaacttcgaaagttctaaaaatgatacttgttatatgtaaattattcttttcttttgtttattttgtttgtttttacatagggttcctcagtatag

SEQ ID NO: 23487 - DNA, 3157 bp, Mus musculus
atctcaacgcttgtcctgagtctgaaacccagcacctggtactatcaccaccccaccaaccaaaaaaaaagaaaggaaagaaagaagaggtccagagttagggcgagctctgtgtccaccagccagccatgagccgggccctggcacctcgcagctgtgcttcccacgcgtggactgtggggctctgctctctcagctccacacgcacggccgtaactgtgtttcgtctgccttccttccagatgcacaagtctggcgttctgaggaaggccattgattacatcaaatatctgcagcaggtcaatcacaagctgcgccaggagaacatggtgctgaagctggccaatcagaaaaacagtaagtctgcctgccggagggccagcagacctcacaggggaagtcctgtggcaggcactgagaggtgggacgcacatgtgtgtgaggcccctctcatgtgggactttataaaaatggagggacttgtctttgcagagctcctgaagggcatcgacctgggcagtctggtggacagtgatgtggacttgaaaattgatgactttaaccagaatgtccttctgatgtctccgccggcctccgactccgggtcccaggccggcttctctccctattccattgactctgagccgggcagccctctgctggatgacgcaaaggtatgtgcttctgaaatgtctcaccctcagaatctctcattttctgtaaaggaatagtggccacagagcgctgacccaaccagcggtctaaatggtgtaaggtacagggggctgaatgccctgtgccgttagctgtctgtgaggtgggagctgctcagtatggtccatgcctgtaacccagcctggcagaggatcttgagttccaagcaagctgaggaagaccaccctccccccaccccacccccatccccctagaaaagggcctctggatgaagaagccacagaccctcagaccctcagacttagcaagtcagacagggaatgaggacacagagcagctgtcatgcgggtgggctctgggagcccctggacgcactccattactctccctgcctgccactaatgggcctggcaagaccactttctaggctgctctgctcgattagagcaaggccgcctcttggtgctctttccggaaacaactacaatttgcaatctaacagttagcattccaccaactgagggctcttaaatggtccctgaacaaaagagcccttggcaattgaagttttaatggaattagtttgcagaggccctgagcacagtgatttcccagaacctttggaaacactgaatcctgtcctgcgtcttgcaactggagtctttctgactccagaaacatgtggttcgttagtatctagtttgttcatgtgagggttaccatgttgctctggctggcctagaacctgctatgaaattagaatgaactctgtcggcctcctggtcttcctgtctctacctgcgaagtgccaggattgcaggcattgccagtgcctttgatgtgtgtggtactggggagccatttggccttgtccgtgctaaatacattcttttttctttcaagacaaggtctcactatacagtcctagctggtgggctggaactcgctctgatctctatgtagaccaggttggcctcaaacttacagagcagctcataactgtaatgtgagttccaggggggccaacaccctcacacaggcaaaacaccactgcgcataagataaatgattttaaacaataacaattacaaatcatggctgttctgactcggagctgcttttctgaaggtcaaggatgaaccggactctcctcctgtggcactgggcatggtggaccgctctcgaatcctcttatgtgtcctcaccttcctgggcctctcctttaaccccttgacttccttgctgcagtggggaggggcccacaacactgaccagcacccatactcaggctcgggccgcagtgtactgtcactggagtcaggtaggtgggtcccctaatgctggcttgggttgggtggcctgctgtggcaaaaggaccctgtgcaaaaatgggcttcccacctgcttgctgctgacggggcccagcctgagttagatataataagacaagcatgagtttgttgggacaagcaaaaccagtctggcacctgcttttggaagggactgggtgggagagatggggaggtgcttgtttgaggggccgtatgtcagaagtgagaccggtgtcctaatttcctcttaactgggggttttgtggcactcagcaccatggtgccagggtataaaaggactcttgtttaggctgcggaagtgtgtacaatttcctctgaaactgtcacagaaggctcacactttgatcttgcaccctggagtccgtcaggtgcctggctgtcccgcaaggctcctctggtagtctcagccgagtgcccctctctaggtgctgggggctggtttgactggatggttccaactctcctcctgtggctggtaaatggtgtgattgtcttgagcgtctttgtgaagctgttggtccacggggagccggtgattcgcccacactcacgcccctcagtcaccttctggagacaccggaagcaggcagacctagacctcgccaaagtgagttccgtcatccgcctttcttcacctttctctatgctcagggaatgttgttgagtccccagtgtgaatcaagccctgtggcaggtgctgggtgactgaggaaagagaagaaccaccccccaccccccccccgtatctagaacagccacagggcagtgaaggagggtacccctgtgtgtagatcatgctgtgcacacaaaatgatctctgcagtgggacatacgaatgctgtgagtcttgaggcgtaagcagggctaccctggacaagaggatgggcaggcagacgtggcagggcctttcaggcgaaagtgtcctgagaactgtatcagccacttgtctccttactgtaaccaaatacccagcagaagcaatttaagggatattatttgagttcatagtttcagccccacgcgggaaaggctggtggccgtgggacaggagcttgtggcgtggtatctcatgtcttggcagaccaggaggcaccagagcgacagggagagatcactcacaagacctgctg

SEQ ID NO: 23488 - DNA, 1207 bp, Mus musculus
accacacacctgacttctgtccagtgaccagcactcctagcagctaatcctaacagtaaccacaagccaagttccagtcggtaggagaggcagggagccacatagctagtaacttgctgagcctgcatcccgtccgcacctttgcacctttctgagcacaaaggccacttctcgtctcctctggcacctctttgacacaaataagaggagatgtttgctttggttctcggtttgcagagtatagtccttcgtggccaaaggcagctttcagccacagagagaatgcggagtcagcctggatctggaggtgtgcggtagtcctcaaaggcccgccccaatagctcccatctgtcacctaggcccaccttataaaggcaacacagtctgcccaggtggggagtgccaccaagtgcagaccccgtgctaaaacccctgagtctgtaggtgacggtttacaatcgctgttaatgattgtactggagaggcaatgagactgtcgtcttggagactgttgacatgagtgtctgtttctgcccgccctagggaagcttccggcgggatctgcctgttcagatgtgcacatggctctgtgtgctgtgaacctggccgagtgtgcggaggagaaaatcctaccaagcacactgattgagatccacctgacagcggccatggggctcaagacccgctgtggaggcaagctgggcttcttggctgtgagtactgttcagttcctgtattattggcttactttcccccgtccctgtggtaaagtagcttttggaaagggtatggtccatcaaggcagagagggtgtggcagcagcgacaggccatgcctaattacactgcagtagcagttaggaatcagataaaccaggaacaggggccagcctacacccctcatagtgacctctgtatccctatataattcccaattataccatggccaaaaagttccacagctccccaaattggggaccaccagctggggaccaagtattcagacacacgagcctatgggtgacattttgcagtcaggccataatgtttccctgagtgctttcccatcctgggcctaaaagcagaatgcaccctgccacttgaaggatttgggggggggggtcacttgttcttccacaaaggcaaagagtgatgaagaaaatgcagcaagatgtcccccttgctgggcttttcaggcagagagcctt

SEQ ID NO: 23489 - DNA, 1208 bp, Mus musculus
gaacaattctacgcagagcaccaacaggctgaggagtgggagggggcggcttgagctgtctgtttcattggggcaggccagatttcaagcccctatctggtaaatacccagccctacaatagcactcctacctgagtgtgtctgcctctgactcaggtgaagatgccgaggctcaacaagtaggttacctcaagttactgtgccactgagcctcagagccacaatggacggcaaagctgcctggcgggcatccctgcttgggttcttcttgctcctccgcccttcacaacccaacatcctgtccccaggccagagacttgtaacactgaatctgagtctccagtcacctccaggaccagttaaggactgaacagaaaaaggcttgactcggctcaaagccagcgtttcctgtctggggctggctcaaggagaccacagtggcagtatcgcagtgccagcagatgccacagcaaggagggtgtgacgacgctggcacagctgacctgtgctcacctgcttgccttctcctactcactgctctaggagtcccttggtgaaggccgtcttctatacctgtagagccatgcatgcctccctctctgggaaagctgacgggcagcagaactccttctgtcactgtgagagggccagtggtcacctgtggagcagtctcaacgtcagcggcactacttctgatccttcacttaaccatgtgagtgggagcccctggagggttcggtgtggtctgtatgaacagttccgcccaagcttacacagcctgctgggctctctgagacacagaggccagatgcacagatgaagcctactcgggcaatgtgccttttgtttccccgggcaaatgtgtttgcaccttttcttctcccgagctctcttactctcaggtcctgctagctggcagcttcctctaagtcccaagtgaacgggccagggctctgcgtttgctccaggtagtccgctgctcccttgggcctgggcccactgacagccctggtgcctctggccggctgcacacctcctggcgggcagctgtggtgcattgtagttgcattgcatgttctggcaatacctgtgcaatgtttccacagtgcatcacggaggcctgccctgactgcccacggtgccgtggccaaagaggatctaagggcaccgctgagggcctacctaaccatcgtggggaataaggacag

SEQ ID NO: 23490 - DNA, 1208 bp, Mus musculus; identical to SEQ ID NO: 23489

SEQ ID NO: 23491 - DNA, 1104 bp, Mus musculus
gcatcaaggaggtagcctggactcatcaggggttacacacaacgcgcagtttctgcggtgcatgcgcagagggctgccttgtaaaaggctcataacagctaagctgccattcccatttcacagatgaggaaagtaaggcttagattaagtcacatgccagggttctgtagctgccaagacaaacgtgagaataccatgtgcctctgccttcctggtggcccacctccttctcttccctcctcccactgccctctgccccaggctccgctgctgccttagtcagccccttggttcctctagaggagaaaagcctggggacctctgggtgacttaccctccaggcccatcatgggagacggaaaatgtgcacctctccccacgctgcttcctcagagaggatcttctcctgcccctcccagccaccgtgatgtgtcccttttaaagctttggttttcttacctgcagagtgatgagaacaggccacacccagcttgggggtgggcagtacagggttaatgctcccggcagatactcttctcaatccctgcccctgagttttccgcctgggttcaggccaggggctgctacctgttgggctgagggtctggcaaggggctggggtccctgaattaggtgtgggcgagtcacagtctctccctgcggtttatccctaggtgatccagctgttcacctgtgacctgctactgtcgctgaggacagcactctggcaaaagcaggccagtgccagccagctcctgggtgagacctaccatgcatccggcactgagctggccggcttccagcgggacctgggcagccttcgaaggctggcccatagcttccgcccagcctaccgcaaggtgaggcccagcagtctggtgggatgtgcaggctagcgggggtaggtctcgggtccagcactaagatgaggaccatgggttcctttgcacactgctgtgcacccggcccagagtcatgtgtcaccaaccagacctgcaagagaggtcagaggacagaggagaggctaagcagctccctccccagtcctggccacaagggcgctcaatagttgtaactactgtcagatggcagccttgcccaaga

SEQ ID NO: 23492 - DNA, 2347 bp, Mus musculus
gggaggcagcaaaaccttgttagctgaggaatcagcacacggctctaaaaacttcggatgtcctcccagtgcagcagcaaggtagaagttgcctgggtttgactatctcagcccaccaactgccaagttcatcttcttctgccctttgagaaggacagggaagagggccgaagacacctccacaggatgagggggtgtgttcaacaatcgaggccgcacaaactccttgggacagtgcttatgtaaatgtcattcccacaggagaggtagacacctggcctggccaacgagagcgagctactgccatcctgctggcctgccgccatcttcccctctctttcctgtcttccccgggccagcgggcagtgctgctggctgaagctgcccgcaccctggagaaggtgggtgaccgccgttcctgcagtgactgccagcagatgattgtcaagctgggcggtggcactgccatcgctgcctcctgaccaccgtctggggcctggtccacttctttccacctttttgtctctttctcccaggatcttccctctgtctcccagactgtctcccatctgtttctctccctcctcccagagctgtgaggatgaaggcaagactgattgttctgagctgttacctgccaaggcttttggatcatttcgggccagtaggaccatgggcagagctccttaacactgctgtggtaaatccacggtccaagcccaggcgggctgagaagagagatggcctgagcaggaacggagctctcctcagttggaagcaatgtggggcgctgcgagcccctcccagtcctctagagactgtctcctttctgcctctggttctctttgttgttgttacgtttcattccagtttttgtttttaatcaggctttctctgggaactaggtctttgcaccagagagcattttgcattctggacttgatagacgcacccctttttatacagatgtttttatatgtgtgtgctcaggcctgccgagatgcagggcaaagttgctgtggcatctttgttcctctccctgggtctgcactccctcccctgtgcctgactaagccttgttcattgttctttcatccttacaagggacagccagccaaggaggaaaggagcccagccctggggaggtgggtgggagggaggcaggggcaggtctagggatgggtgaaaaataatgtcggcattgttttttaattttttaaaaaataaatggtatcttatttaattgtcctgttccttcccactccttccccccctcccccagacggccgcctgagctcagggtgggcccatggggctggacaggatgaggtcaccattgggcctgagggccaggggtctccagcatgacttgtttgctctccctcccccaccctcactcctacctcccatagaagtgtattcttatccctagttcctgtctgagtaagccagggtggcagacgctggtcccaaacctcacccagcaaccagcctctcattttcagggcaggcagcagagacccgggtctcttgccttgagatggggggagtcctaggaagaagagtggtctggtcctgtttctgcagactgcttggctcagggcttcctgagagacttgagaggaactgtccctcctccctcatgcttctcctcatcccttcaagctggttgaagagagtaggcaggggcggggccccgaggtgcttcaaccccacctactctgccttccacctctccccaaccatcactgtaatttatggcccccgccgtggggcagcctagcccttgtgtctgtgtatatactgtgccttttctccttgtcgaggggtgggaggggttggtttttcactgaacaggggatatgcctatgtcttcatcagtgttgaaacattcaccatgtgctggacgtaggttttcaataaacacagattggtaccacctaacacaaggctgtgtgagtctgtagtatgaccattacgctgatttaaccagatggcagcatttcttggccaatactgagctagggcctttgtgggcagcctgatggctgctttccggtggccctttcttgcccacaggtgtacctgacacactctagggatgggtgagagtctgggataaaagggctttatccagattccagctccttgcctggccattcagctctctgactggctggttggtagtagtcgtttttttggaacttgaggtgttaagtcactcctccgtcaggtgagcccttgcttcatttccacttcctgtaggtgcggccctcagcaattcaccggcttctggacacataccacgtatgttgttgtatttcccagctgagtcactttggtgaac

SEQ ID NO: 23493 - DNA, 1178 bp, Mus musculus
ttctgcagatctgcgctggccatgtgccaggcgtctccgcgctgaacctgatgtccttgctgcggagccccgagaaccccccatccaaggagctgtgagcattactgccctccacacgtttgctgccagttccaaaagcagccactgttggtgaagaccagtcagggcctgacaggcccagaggcagcctgctcactgcaggactgagctccaccagggaggtctgctgggcaggagtcgggagagagcccagcgagaccccagcagcctcccgtttctcgtctcaccccacagaggtcccatctgcacctgtctaacatcataatccacctaagattttggaacaaagagccatggctttaaaaaaaaaaaaagaaaggaaggaaggaaatgtgttgtagatgcagaaactgactcagtacaattgcgggggcaaagtgtggcttccaggagcccagggaaaatgtcaggtccaggccctgcgtttcttacagcccggctgttgtattctggtgcctgtttttcctcgtgtaagtggagctggttctactcacattgagagggctgaaggaaatggcaggtggcttgctgcccaagaccacattgctccctacaacttgttggtctctcttgtagatcacacacagtgtcatgcctcacactgtaacagcaagctaccaatcacattaaaaaaaaaaaaaaaaaagcaatccaggcagtggtggcgcacgcctttaatcccagcactcgggaggcagaggcaggcggatttctgagttcgaggccagcctggtctacagagagttccaggacagccagggctacacagagagaccttgtctcgaaaaaaacaaaaacaaaacaaaacagactgagctattgggtttctctgtgtagccctggctgtcctggaactcaggctgtagactaagctggcctcgaactcagagatccaccgaccattgcctctcgagtgctgggatcacaggcatgtgccacccctgccccgcagtgactgagctgatttgtaaagccactctcacatcaggaatgacagctgcaaggtcggagtgtgagaagtgacaagctgactgtggcattgcacactggatccaaagagaaggttgtaaaagagctgggttggtcctgtcagccccgtcaaagtccccaattcttca

SEQ ID NO: 23494 - DNA, 1099 bp, Mus musculus
cataagaacccacctcatgctctcattaaagtggcctagctgctgggccgacactagtgaactggctacccgtttccttctgttttatctgtagtggaaaacctcaaccactgtgagtttgccctgctccgagacttcgtcatcaggtacgatacgcccccacactcacccagctggcacatttaattatttatgatcaaaggccatctgcccagattcacttcctgaatgtctgccctctctaacagagctctctatcccagtgcatctcagaggggttgtaaaattgacattggtcctcaagggtgggtcccagtcattgggtccagtctactgaggagatgtgttagcctctgaggtggaccaccttttcctcttctgatccctaatcatatctgcttctctttttttactctgtgtcccttcaggactcacctccaggacctcaaagaagtaacacacaacatccactatgagacttacagggccaagaggctcaatgacaatggaggcctccctccggtgagcgtggacacagaggaaagccacgacagtaacccgtgatgagcccttctctgtgttatcatacatatcccccttctccaaacacacacacatcctagataccacctccagccaccacctcctctcagctctgtcccccaggcctgtctggtatttgtgcagtattttgtctagtgtgtgtgtgtgtgtgtgtgtgtgtgtgtgtgtgtgtgtgtgtatgtatgtgtgtatgtgtgtgatggagagtgcctgcgtgtatgtgtgtgtgatggagagtgcctgtgtgtgtgtatgcatgtgtgtgtatgtatgcgtgtactcaggggtgaggtattttcattgccctctttggaaagtcctttgtaagtctgctttctccatgactctccattctgtctccttttttcttgtgctccagaacaaaaagctgtgcgcctcactcaagaggtctggggaaggttttaatttataatgctgggagcaggtgagccacaggcaactctttcttacttctgacccacccacaaactggggctgcaagtattcttcatggactggtggctgagctagcctg

SEQ ID NO: 23495 - DNA, 2277 bp, Mus musculus
cagcgtcctttgcctcctttcttcatatatattcatgcattcaccccatttcctgcctgtctctgaccttttatctccttttagagtcatctatgttagcttcctttctatatttagaaatcatgcccagactttctaaattgactttctattaccctaagatagaatcacagctaggggctgaagagatggctctgtgcttcgggggaccttttgctcttgcagaggacccaggttcagttcccagcaccttcttggtagcttacagttatctgtgactccagttccagaggacctgacaccctcttttagcctctatgagcatggtgtacatacatacacatagacaagcactcatacgcataagataaaaaaaaaaaaaacccttaaaagaataagatcctaagtaaaagcatggggcagggcatgccgagattgcaagagaattcagttatagagaagatgactaggaaagccagtttctgcagctgaccactgaaatttgctctgacttgggaatagcctggggaaatgggagaatttggtagcttgggctgctctgggtgttctgttcaagaagcacatctattgggcaaatgaggcaaactttaggtggaggaaattatattcacaaactaattctgaagaatcggaaaaaatatacagagtttcttaggcggctggacttgtgagacaaactaacacagtttcccgttttctagcagccttctgtccatgttaagctggcttctctgtggctttgtttcttacaaacccaactcactctttctctgttctcatttgtctgtctgtctttctcggcttctcccctccctgcattctctcaccatccaatcctgtagatgttcccaggaatacccacagccatacatttagccttctcttgccttctcaggagccttgtatttattaatgcatactttaactgctccttgcacattcaagttttttttttttccctacagtttctaaggctgctttaaggaaagccatttagccataggaaagggaagataccacaaaattctgtttagaactgatctatccactatgccacctcccggtccagcctgggtgtagaactggtcttcactgacttcagccctttattacccagtcactaggaaaacaaacacacagacaaacaaaaaacaaaaagagatggaagacccacaattcagtggaccaagcagaagtggtcctaatcctatggtcttagcctttcctggagactgctctgtctctagtcctcatctataacgtcactaaagagtggccagctgtcaggctagagtggtagcaacatagagctcgctgacagctctagtgagctgccctgtatggtgacatgggattgggcacctagggccagcaagggataagaatggtgggtgttggagagtctaagtaggagaatgctgcctgtctccactaagctgtggtctcactctccctggagaagctgttttatgtgtctgctgccggctgccggtctccacaccctcaaccgttctcaactccccctgcagggagaaggcctcctgggcactgtccttccacctgtaccagccaccccctgccccactgctgaatgaaggccatttcaagtgctgcttctccctcatccctcccagctgttattgctgcagggccacgccccttttagcgctgtgcttgtctagcccaccagcacagcccctctcagccctcagtaggtgggaggggctagctgcggctttaggacagttgcttcctctgtttagccaaactactcctctcctcccaatggaatggagttcctgccagcaccaccctgctccatcatctgtgtcagcagcaccccagtccttgtgtagggaggaggaactcatgggaagctgctcctgcccttgcaagcgcataccagcgacttgtaactgtctccaagggaaccggcattgctctctagccattcattctgcatgagtactttcttggctaccttaaccggtcaagaaagcaactttcctgcttgtcagagtcactgaggtcagccgtgtgagcccctgtgtgggacaagggtgtctccttcattgcttaaaggtattttataagggtgattcattatacatggtggggagccagaggctagtgtcacttaaaaaaaaaaatcaccactggtggctggcccagtgagtatgtgtgtagacaacctgtttaccccaaaatatggccatctgggaagtgggttttgctgaaaagaggttgctggagttg

SEQ ID NO: 23496 - DNA, 1109 bp, Mus musculus
atgatggaggagaggaaagggaatgcagaagataccagtaaggagatgggcaaagggtgatccaggaaggcataccacaggaactctcacttcctactttacattgttaaagctgctttgtatggtttctcctcctcccccgctgtttcttgagttacccacatccttacccatctccaagtattggcccatcctccttccaccgtgtaatcctgtcatcttcctttaccctatttggaagtgactgctgctaaagcctggtgtgggatcttgagcttttgtgatcccagcactgcagaagtagaggcacagctcaggggttaacaggagaacttatctcagaaaacagaaatgccccaggcctggtggcacacagcagtaatcccagcaccggggaggtggaggcaggaacaccagaacttcaagatcctccttggctacagtgggcttgagactactctgggctgtgcgaggctgtcttacaagtgactgatgcacgcctttcttacagggcacagggagcacaggagaaagcactgatgatgtggtggcatgctcagctccctcccgtcggcagaagggtcaaggaaagccctcagcctcacctcctcatggtttgtgacaagagcccagagtcctgtgctttgggaggctccctcacggctgtccacagagtactggaaataacaagcaagcaaattaggagtgtataataaatgagtcatgtatgatgagaggtcgtccccatttctcactcccagcaggcttggttgcactttattgtctcttccgtgtccaagaagcacctggtgtagagccaggacatccaggctattgtacaaccacagaggcaattgaggaggactgagatctttcctttaaaatgattaactatgtatctgttttcaggtgctctaggaggcagcattccccctaaagctggagttaaaggttattatgaatcccttgatgtgggtgctgggaactaactctggtcctctgcaagagcagcaagtgcccttaaccactgagccatctttccacacacaccctcctctgacttgaaatttttctactttccataagttcaggagaaacttgcttcaaag

SEQ ID NO: 23497 - DNA, 1624 bp, Mus musculus
ggaagcacccagtgcctactgtttgttttccaggtgagactgtggagatgagaaggtggaggacacacgtgacggaatggaatcctcctgctgtgcaaccacaccccactctgccctgccctgccctgcaccccccgctgcgctgcgcctgcccatgccagcacttccttcctatgttctcacatcacactcaaactggtgacaccacaggaaaagaaagatacaagatgttggaatggctgtttccatggacacaatctccatagtgacaatgtgggggaggggggaggggagggctgatggggaaacggggagttaaaagggagggataaaaaatatatatatataaatctatttttagtctggaaagactttgtttaaatgaaaggtgcgctatcccttttgattctattttaaaattatctagttaattcaaaatttgttccaatgacaatgaaatttaaatgtgaaattgaactgaacaaactcatctcataaaggatggggtgtggctttgatctttagcctgtctcacaattcagtgaacactagaccctggactgaaagagtagacaaatgacaaccacccttcccttggttagaatctgtctcacaggggaagtttgagggagggggacagaatggggatggtcattttcaaaagtgtggggaatgatgtttaaacacaaataaatttttttctttccagaaacactatttatttatttttattttttccctcctttttttttttttttgcggggggtggggtggtagtggtgaaattggcagatgccccaacatcatggctgtatcctggatcactgtggccccaccaagtatgtagagtagccccacagcagtaggtgtacccaaggaatggcttatctctggcgccctctttccttggcacattccatgtagttggtacccttgtggggacccacagcatccatggaaaccatggaggcccaggcctctgctgctgaaacaagcagagtctaggagagaactgtggcgtgagccatgtgggtgcactaagctgaccagagccagccactttaacacttctctattgcttttattttttagagtggaaaggggacttgtcagatatgttgcccatgctatgtgattctttatgttgtattgttttgatttgtaaattgtataatttttaaatatgagttttaaaaaaagaaaaaagtacaaaaaaaatcttgttaaggccttaagaagggatatgtgcatctttcaggggtcactctgccgtggggataaaatagctgttttacaaacagttttatttaaaaaaacaaaaatcaaaaaaattaaaaaaaaaacaaaaccgtaataaacttcattttaaccttgtgtcctttttcatttactcttaagtgaatgtgtctcttccttctccagaatggccctcccaggaagtctttggctctattccccagggggctaccatcagtcccaatccctttgttccttttcctctggaaggcaaggtggtccttgccagcagagcctgaaaccaaaccccagggttctttgcctcctgtggggcccattctgactttctgcagttgacttgaggacatattctgaatcagcattgatt

SEQ ID NO: 23498 - DNA, 1148 bp, Mus musculus
tgtaaatgtaaattttttttcttgggttgtctgttcagctgttacattgaggtcagtcagtatccttcaagtgccaagtatttgctgaaaccttatggtcagagacagaatcataccactgtcctgtcctcaaggaacactcatactcaggatcagatcgagagccaccattaacagggacctacacaaggcaggaaagggacagtgagtgtccatatgtgtgtcctgatctactggtaccccactttctcacacagaatggtgaggaaggggctttgaaactgaggttaaaactacttagtatctctatgcttctgtttcttttgtaaagaaagaatagtgatgaactcaatgaggatttgatgaggcctcagcaaatactaagcatgctgctgctgctgtccagctcagtgtttctgagagctacaactgctctgtctagcagaacgtgccagagctagaggacagaagatgctctctggcatgtgggggttatgcacttgtcaccaccaggctaagaggataagaaaagtaaagtctttgaacagttgcccagtagaccacctcccatttctggggatgagaaagcatcacggtagctcagtgatactaagattgttattctcgggctagattgcaggtgtggatagggaccatagcttctctgctagatcctgagatgcagtagacagggaacagaaaccattatttgaagtgatgctctgtcctggatgctaggaatagcacctacccacatgccctacacagaacagccatggaaagtaaagggatggcatcctcccagttccctctggggcagcagatggcccatccacagatgagtgtcactccaaccctaggttcatccagggggtgctactgggattactcctctgaaagttaagttgatacggagtcagaattagatctctctcggagaactcttccactttatgtagagatcacatgtgagcttcagagaggagactgcctctgaatcctggcatagttgagctgggtaatgcctgttgctgttgagagagtcaggttgagtgtttggaatagaaggatacaaagggaaccttctcaggttcaggccacagggtatgttggggacatcagaacgaaacccagcgctctatctacct

SEQ ID NO: 23499 - DNA, 1188 bp, Mus musculus
gaactcatattttctgtaaagaaatatacttgtattgggcatttaggataagtagatcaaaattaaaaataaaatcttataaatataaaaactagaaaccaagtcccacttttaattgtaaaaagtttctatatgtgttgtgtatatatataccttcactctcctcctacacaagatttctgtggcagaaatagaagcagggtctacagacaacacatgatagcagaaagaaatttcagtagagcagggagtgggtaaataggcaggtttggggtagcacactcactggtgtgtctgccacatactgtagagtgtggcttgccctagtgtgttctgcttgatgtgagttcatccataaggcctagcctagaacagtgctatatctcttccattgtgtggtcagcaagtggtagagacctaccaacctagcctaccaccacagatccctccaaccacaaaggccatgctgagaccgaactaatgaggtagggaaggcctgcaagaaaagggctggtctagagttactaacatgccttattttcctttcagaaatgctcccactgccaggaggctggcgctactttgggctgctacaacaaaggctgctccttccgataccattacccatgtgccattgacgcaggtaagttggaccacacaccctttttgagaggatctagagagctagaagatacaaattcattatctccccttctgtatatttttattgtctcccttatttttctcctatttgtaagttctaaaatgtagagaggaggctacaatgacagagcaagtttaaaaatacctgttttgttcatctagttcatttatgagttacctacttaagtgtacatacaattcagtggtttctatgtgtttgtggagttgagtagccattactccaaaatatttaacatttaggttttcatcacttgtgaaatattaacaccttccttcccctcactccagctgttggcaattagagattcactttcaatagatgtttctaattcagacatttcatataaatggaacattttgtggccgggattttcagttacactatttctaaggttcatccatagcagcatatgttagttagtacttcattcattttccctgccaaactatctgttatataggatgggctggttagactcacctttcatcagttgatggctgtgg

SEQ ID NO: 23500 - DNA, 1146 bp, Mus musculus
gggggtggacaaggccagtctgaggtctctgggcctcacggaggccagagatagcaggttctcagtcttgggtgtcctagacactgctggacactgcggaagagctaagaacaaagtggaggccccaggggtgtctcagtcatccctggggcggaagagaggagagggaagggagaaagggcgcattctggccggaggttagatgtggctctttaggggaaagcctatcccatcgttcaagtatgacaggccttgatgagcagagacagtctatggttttagacctttattgtagaaaggcagagagaaagagagaagatagagaggccagccttggccacatgggaagaaggagggaagggagggagaaaaggagagctagagatgagagtaagaaaggtgagagctagccgggcatggtggtgaacgcctttattaatcccagcacttgggaggcagaggcaggcggatttctgagttcgaggccaacctggtctacagagtgagttccaggacagccaaggctacacagagaaaccctgtctcgaagaaaaaaaaaaaaagaaaaaaaaaaaaagagcttaagagagggaaggaggggccaagcagttccttttatagtgggctgggctaccttgctgttgccaggtaactgtaggggtggagtctagccagaatgccaggagcttgggacattgtctgtatgacttatagtcacaggattatgtagttaggggctctggtgttaggtgcctgtctctgggaccacagctcactgttctgtcccttgtagagttttctactgggtctctggagcaagcctcactcaaccaaaacaggttgcctttcatggtcccatacttgtactttgcctatttcttagaaaatcaatcctcccctcccccaagaaatctagattctatttaataagacatatagaaacctgaaaatggctgtgcttggtggcacatgcacataataccaacactcagtgtcttagggttttactgttgtgaacagataccatgaccaagtcaagtcttataaaggacagcattaactggggctggcttacaggttcagaggttcagcccgttatcagtaaggcaggagcatggcagtatctaggtaggcatggtggaggag

SEQ ID NO: 23501 - DNA, 1148 bp, Mus musculus
tgggctcctgggggccattttcattcacaccaccacagaagcacacagcaccttcctgtaccgtaaaagtctccaggagaattccagtcagattcagatcttcaggagccctttgtccgaagtgcatggtgcctttagcaagaagatcttattatttccaacttgtgggaggctaccaaagataacaataggctatattgttttgggagtctcttgaacgcccctgaccaacaatttgaaaaggaatttcttgtgggtgttttttcaggggtttgttagtgttttactctcttccttttctccacctttcctttgtgtattgacttccctcaccctccccaatgaaaacctccttcctatttcctccttcaaatcacttaaagatttatttttattatttctactttgtgtctgtatgtctacaggtgctttgggaggcaaaaggggtcagatcctcttgcaggtgttgtaagccatctggcttgggtgttacgaattgaacttgggtcctgaaagaacagtacatgctcttaaccacttagccatttcttcagtccatcatacttgatcttactgtgggccattcactctgttattttctatcttgctctgtttcatttttttttcagtgttgagttcaagaccctctgatttgaatttacaacctgcttcaggtggtctcattcttgctttgaattctttgttctactgtctttaccccgtattcccacctgagagccagtcatgccagctgtctatctgacacttctctctacttggattccagtgagaatctctgagatgacgtgtcaggcaaagcatgattcattcatattgtgcttccattgttcccctgtcaacaatggtgcctggttttttggtcgcatcgtagatgttgctacacaagcccactgccaagctggtacgattgtacagattgaggtttaatctctaaaggatgtaaagcactggtattcagctaatattgctatattgtttgtgtccctcacattcactagcaattgttggctctgaattctaaatatggcctgtttcaccacatccaccaacaccacatgatctgtgcagtcaacatcccttacataaattactaaagtagcctcttaactgaatctacttcagccctg

SEQ ID NO: 23502 - DNA, 1200 bp, Mus musculus
tcaggacatcatcacatcagaggactcaccagttgaggggatgctaggttttatgctcactgctcctcagacctctggagaaagaaagctaaaacagttatcaggagtttttctttatttctttgtctactacatttacattcctcctgcctttttcccttagtaatacgagaatctaaactaggatctagaaattgcagcatttgtgcagatcttatgctgctgcatttatttgcctttttattttttaaattatattattatttgttatgtgcaatgtatttgtgtgcccgtggcaggacagtcagagaaaacttggggagttattttggggaataatttcaggtctatttcaggtcttcttgctggttccttttgtgtttcttcatgatcttataactctaaattaacctgccaattaatttttaaaagatttattttaaatggtgtatgtgcatgtgagtgccgtgcctgtgagactagagattccctggggctgaagttataggcagctataaggtcatcccttcccctacatacacccagggaacccaacctggtcctgtgcaagagttatataagcttgtaactgcttagcttgctttctccttttttgtctaggtctctgttcctctctcctcctttcctcttctccccctgttcccccccccccccccccttttctggtttttcgagacagggtttctttgtgccgtcctgactggcctccaacttagggatccacctgcctctgcttctggaatgctgggaccagcatcttgctgcttaattatctctttactctccaacttgccaattgttggtgcccttcttgaacagttcaaagagacgatttcttcttcttaatttgaagttggagttttgtatttctgatatgtttttaataattctttgaactagttctaggtgtagacttgtggatttgagagctctatgtatgtatgtatgtatgtatgtatgtatgtatgtatgtgtgtgtgtttgatatatatatatatatatatatatatatgtatatatatatatatatgtatgtatatatatatatatcaatgttttagaaatatctttagtttactgatactcaaaagaactctaatgccggctggggagcctcagtcaggaatgcacttgtgttgtaagcacaatgtctgtagttagatactcagagctcttggt

SEQ ID NO: 23503 - DNA, 1213 bp, Mus musculus
ttccctagctatgaaatgggagtggttatcatgctgagttataatggcacttaactgtaaactgggcaggcatggcccaattgcctactttaatagtctctccctgccctgagagagagctctgttagggcagcatgaaggtataggtaaggccagagctgaaagtgcaggggaagggctctagaaacttggcattttctagatgaggctgaacctacatctctggttactgtgggcaagaccagggggaagtagtttgctagggtgtgagccctggagatcagcaagggcccacccaccattgcaaatgagccactggttggacacatggcagagccactgatacactgagtagccctgaatgtggcatgacctcagcctggacctcagaccccttttttgtggagagggcttaggtctacttaggtttcctgcttccttgaagggctctgattttcctcttgctgattttcttggatggcttccatgtaggcagtgccttgggcagtatcatctgcccactggtttgtctagaaaggatgttcttccctctcattttgcctggcttgcctactattactccccactggcactgtacgaaggctaggagaggggcccaggagcgtctagcttccctccaagaaaacagagctgctcagtactttggcctgtaccatatgtgaatacatccaggtactgggtattgtggggtttgggagctggccacagatggctctgggaggtgactgactaccatggaggatcccagaggtcatgagcactacctcctcccgccagcacaagcttcagaaccagccactcagttccactgagcctgggctgggtaattgtggcacctcacttcctcagaccagccgtccagtccgtgtgaggctactgaggaagatggaggagagaagcaggttaagatgctgggaggccagagactaccgacaggagcttcaggagacacaggcgcgggatgaggttactgtgcgagtctgccattgcttgctgcggggataaactgataatcgggtgtacgagaaggtgtgcatcacatggctgtggctcttcgggaacattcgttacctcttgcccaagatgtttctgtacacattcacacacatggagttgcttaggctcagatactgtctcggccacttgctacctggcatcctcaggctatgtgctcaccactgcctgttgcctt

SEQ ID NO: 23504 - DNA, 1175 bp, Mus musculus
gctaaggtcagagtgccttcctcaggcgggatgttatgggagtgcatagcaaatgctctgtgccttctgcccaagccctctctccaaatggagcagtcaggaagagccacattcagcaatattctcagagactgagccacaccacagccatgccaagctggagccagatctgcggaaagccaggctcagcccccagcattccatctcagactcagggagagggagggctgcctttcttccccaggggtgtgacagagtactcactacaggctgaatggctgtgtgaggctgggaaggtatatcccaccctcagaacagcacccatcaggagagaagggcagggagtttgctgctctctgcaaagtctgtctgaggtgcagttgccagaagagcacaacagaggtagaggtgccatgccatctccagtctgcagggagctgggctcgtggtggcgttgtcaccagttagcttcagaagagggtgtttagaaggacaccatgaggtgaggagtggggtcaggagagccccacagccactagagctgttcagatcaagacagagtgcaacatctcaccctgtcatgactggtcactatcacagctgtccctagggacagaacctgcctgtgaaggggctctctttttaccgagagaagcccttgcaagtcttggaagcttgggttctgggtggggcatggctgctctggtatccacagccagaattagatgtgtaaaggaacaggctttaccaccttgcctcaagtccctaccaaccctgcattgcacgtgcacttggcttcacacactgcttgtcaccctcagcctcatctcctcctacacttttagaccctgggctgtactcaaactggtggagaactggaaccctccttgtttgttcctacagtgcctttggccatcccctctcagttcatagcatcaagcttcctgcacccacaggctctgctggaaacctatgcaggccagtaaaccctgtcctcccatccccgggggctctgtactcgagactgtcccagttcgaccccactctgatgtgaaatctttgaggtccaggacttggccctctttggtgtcctatccacaagggtcacctggcaggatgccaagctccaggctgctgcacgtcagatgaagtgatatctcagaccctgccctccc

SEQ ID NO: 23505 - DNA, 1324 bp, Mus musculus
agcttccgccccataaccgccctccggccacttagctggacctctgtcctccaaagccccaagctacttctgatcgttgggcctttgcacatcctgtgtgcccttccccggtcctgtctgccttcagctttcctttgagggtccttcggagcacctgctggacctttgcagaccaggcattggccctcctggtggctgttatccagctagtccgttgcctgtgtcatttgtaattaattatcagttgcttggctgttcccactagacagactccaggaggcagggtgagtgtctgccgagtgagttcacggctgagtccctagcaccaggcatccattcatgctctcagccttgcaggcatctgttcattcagggagttctgagtgcccaacccagaggccccattgtctcctgcaaatgggtggatgaatgagtgaatgtgtgaatgaatgacagtcctctgcctcaacagcccacatttcctgctatctaccattgcctctgacccccctttgctgggccttggtttccccagctgtcactagacactagatctgtcactctggcctggttctgattgtggggtaggaacatctgcctgggggccacccagctgagcaaggtgggggccgggggaaagggacttgctctcaaccgtgtcagcttgggcactggtcccactgtgttcccacatctttgtcaccagagtccccaagttgctattggggtgcagggctgaagggacttgcttgggccactcagcttaccccaacccttgaaaagcagaggggcaggtggtggggggtggggaggggtgggaacactacgatccacgagcttgggtttgagcctggcttcatgcctccctcagtatggccttgccacctaagctcagtttctggctgtaacaaaagaagaagtgggctaggaccagctgtcctgacagctctgaggctccctgggaccctgggagcgtgcagcaggactcccaggctgtctgtctccagggcccagccctcctgccacctcgtgagccgtgctactcaaagtggctccgcggcttagcggcttgtcagccaggcgggtgggtgtcctggggccgggtttgattagttcaggttgacagtcgcgctccgcagcgctgccgggaggggagcccgtgattaccctaatgaagcttgaacgcagtttgtcatccaaacagctggttcggagctgtgctgctgccagctgcccggctcagcagtgcagtcgggcgcctggtgcttctccagcctttagccacccgcagacagggtgatccacaggaccaggcagcccccag

SEQ ID NO: 23506 - DNA, 2259 bp, Mus musculus
ggcctctgtgaccacacaacccacagaattcaaaatcaaactttgaggaggggagcgaggcagccagaaacagggcagaggagggtggctctgtttcccaaggcaaagttgagaccaatgggctgtcggactgaagccccctgaacaagggatgaggtaccagggagagcttcctcgctggacgggacccacctttctgtgttgtttacaccttgcccttctgtgcgttccatttctgtagtatgtttcctctttcctccattcatcatcaaggtaggctgtgtttgtcggtgtgcctcccctgccctcggcccctagctgatttctcccctagatatggtgcactgtttccctgggtggccttcttgtggccccatgggccacagggtgcaggaacgtattggaaagactgctttttttttttttttaatttttttaaaattttttttatgttttgttttcaagagttttcttgttctgttgaagttttcacacaaaacggaatgaatgggacctcctgccattcagtgagcactaggacagctgggacctcctgccattcagtgagcactaggacagctgggacctcctgccattcagtgagcactaggacagctgggacctcctgccattcagtgagcactaggacagctgggggctgcgtcaggctactggcttcctgtgttctcaccactgtccctctagccctgactgcaagtatgcagtgctggatgacgggcagtgtgcaaggcatcccagcattcatggtcccttgttagtgttgtgccaaaggccttgggtcagttctctcagcttccatatggaagtgaggaagggacctgtgcctattagccctcttgattctcacctgatagggcaacatcaaagcttggtgtgggtgtgggtgccagctccaagttggctgagcctttttccaggttctacccgggcgcctctgtgtgttctacagcacagaggacttcggggagattgattggatcagagccattggctggctctggctctgcttttctgccttcagttatctacagaacagcaggtttgcctgaagtgcagccttcaccagggcattgtctctgctggtgtcagtgacccacattgatgagtggtctgagcagctggtgggttactttacccagtgtgttcctgcattgtttagtgtggaactgtgggcaggtgccgagtgtcagatagcatcggtccagagctcgtcagaggcccctgacagtggaaacagaagatgctaagctgtcataggtggagcaggatcctaaggacgcacaatatcagttgtgcgtgctgtaaagggacaaaccgaggaagtagaggaagctgcggcactgtgacccattcaaggctagcacagttaagagaacttcagctaattcttattttcctgagttagatcccagcccatgcccagctggaagggtctcttttgggtcaaaatcagtccttcagctctaaggttgcccagcaaaggaatctaggaatgacaactgcagtgtccactcctaaacacctccttctcttacacccttcgaaatgggtacaaacttaattcttctcagaaactggaagacattcctctgtgtttgccccttcctgacccaagagacaccctatacatgagggcccagctctttacctctggggacagctggcatgcctttggctttgtgtagagtagggtggtgagacccttcctggctcccctgctttgtgagttaggcgtgctggggcaccctcctggccaggtggtactttggggacttgggtgtttgcatcataatgtcatcttgggaaacagaaaagaaggtgggccaaccctcatgtcccccactcccttgcattatttctttgtgtcttgttcaggagaaaagagggccttgttactttccacttctcaataaatgtttgttattcctaactttgagctataatgtcttttttcatggattttattatatttattggatgtctgtacatttcatgacccatgtgtggtggtcaggggccaacctgagggagtctattctctccttctgccacatgggttctgtgattgaaactcagttttatcaggcttaagggtaaacacctttacctattgagctagcttgttggctctgggctgttcccacacacacatttctgtgtgtgtgtgtgtgcatgtgcatacatgcgcaagtgcacaagtgtatgggcatacttgatgcttgaagagaactagatggt

SEQ ID NO: 23507 - DNA, 1132 bp, Mus musculus
ggtctgcatgtccctcccaacctcacgtgtcctttgcaggagcttttctgtgtgtgtggcgctctcaagcgggctcgactggtccatcctggggtagcagaagttgtcttcgtgaagaaggatgacgccatcactgcttataagaagtacaataaccgatgtctggatggtaggttaggggaggctaccatcacgctcccctctgttttaaagcagtgagcttttggggtaaactatcctcaacattggtacaaagacgtcttggggaactcaccctactagggcttctggataccaggaagaggcagtgctgtgcactctctgagtagtgtgtctcagtggatgagtctcttaaagggtctggttgggaaagccgattgccatagctctcccttcacatgtgggcgggcttgcggtctcagaggccgggagtcttggcttctggggaagatctaccagtgaatacacagcttcttatttaatctcaagctccacagttgggagccctgggccatgctcctttttcgcttgctcattatgagtgtgctgtgggcctgctgaggaccagggctctgtactagaagcaaggaaggagagaaaagcaaagatggtttacattcccctgttggctggtggtgttgaccatgttttgtgtgcttacctgctgaatgcgtctgctagagaaatgtctattctttgctcggtctacccgttggattcttttttgtttgtctctgagttttgaggcatggtttttctgtgtagccctggcgcgcactcactcactctctctctctctctctctctctctctctctctctttctatatatatatatataggctggcctcaaattcaggtctctgtcgtccagtttctgggattaaaggcatggggcactttaatcccagattaaaggggggtgggcagcgcataggttaagtgcaaggataaggacccaggatgagacccctctaccgtgtgggaggccacatgctgccgtggtgccgtaactgttggtgcggtagcaaatggattcccctttgtgggcctcccgtcctttttttttttttttttttttttgatgggagtgggtgtatttgcacacaacagggtctccctctagcttagcc

SEQ ID NO: 23508 - DNA, 1200 bp, Mus musculus
gtacttcacagcgacattgtactcagtgatagactgtctacagaggcatataccagactagctatgcaaagctctattatcttatcatctaggtttgtgtacgtagtataagtatactttgttatctattcacaatgacttccttcctcagactatgtctctgactgaatataaaatgttgtagagtttctggatatacatttgctacttataaaaaggtatttctggccatatgcttgggaggctggggacaggaggatttagtttcaggccagctgggctacatggatgttttaccaaaaaggaatttctgagctcctgtacatagaagtagtttttagcaggtgttattggtctgtggtaggagtccccgtgaagcctttggtcacacgtctctcgacccctgtactcgtgtgtcgcactccttcctacgtccttgttcatttagcagccattgctctgctcttggttgagatgtgtgttgagggcctgcatgctgtcttagcatttatccagctgatggatttgtttatttccgggtgctagggatcactgagcaatattccctagcccagctactgtttgtttcctctcagaacttgtatgacctggatgaagatgatgacattgtggtgcctgtccctcccaagcagatgaagtttgcagccacgggcagccttgttcaccacatggtatgccgatttttttctttctcttgctgcatcagattaagtggacggatgggtgaggttgtggacaggcctctcattaatttgggctataagctttttagagctgtaactagccagctccttgatttaacattgctaatactggggtgtcaaggtcctatgcagtgacaatgaagagctgcagtcccaggggctggtttgaatcacttgaaggaaattgtgtcttagtccattttctgctactgtaacagtacagcagctaggtaaactgtaagcagtgtaagtttaccaggaagtcaagaaagttggctgcatcagttaagggtcttgtcagacatcatgcagagaagtgagaaagctgagtctgggagcctgaggaagctcctgctgcagactcagctctggccaggatcccaacggtaatgcaatctcctgggtactgaataaggcctgacagtgctcgtgacgttgaatgatgccagctcatttacttacagtaaggagacga

SEQ ID NO: 23509 - DNA, 1224 bp, Mus musculus
gctccctcctccgcccccgaaccccaagaagcagcgaggcccctacgagcctcgaggaaaagggaaagggccgctcaccgtcccttggccgccgtcccgcgcttccggatgagctcgtccagcgagagatcggccatcttgcggcgcgcagctagcggagaacggaggagaagccgactgcggcgagcccgccccgcggccggagtcaagagcggcttccggcaacccggacggccaactctcgcgacagctcaaacgaaaagctcgagacggaaggggtggagcctctctccccgtgagcctttgcggtgctcgcttctaatttgcatggaggagtccggagccttatgggctctctctcccccctcctccttttgctaatgaggaattagaattatatcgatcataaaccattaaaaagcattatcaagaggacaagtcttttagtcatacagccgatcggacactcaccatacttgtaatgagaatataatttcttacccctgaggaacgtagacacgttcctcatgccttaaacttatgagtaaggaaaataacgattcggggtgacgcccgagtcctcactgcttatgtgagaagaatttttgagcgggtataggttgcaatctgaggcgacccgcctactttgcgggatgcctgggtgacgcgatctgcccgaccccctaattctacaagaatagaaagcttagcagctcctctgaatggttgctctcaggtgctagtggttgcaagtcgtatgttgatgcctgcctttgccctacctggtgtgtgagcgtgagcgcgccccacctctccagcctctctcttactgtttttcagacaagatgggactgttgttctcctactgctatgtacctcaatttcaattgatcatgcctggacataactgcccatgttgtaaggtcgtctacgttgtaaggtcgtgctcagtttctgatgcctagactagtcacctttccgtttgcctcctgactgtgtaaatgaggcaaatgaaggtggtctcttaactgacatgttagtgtttgacctatgggatagtttctcattgttgagacagaatttctagaagctggtccgctgagcggctaagagcacttgctgatattgcaaaggatctacctgggtttggttctcagcactcacatggaagttcacatgtaactccagtgccaggagattcaatgccttcttgacctcccaggc

SEQ ID NO: 23510 - DNA, 1139 bp, Mus musculus
tgggcacgggggcaggtgggcagggggtcaggggcaggagggtcaggtgggcaggggtcaggtgggtagggggtcaggtgggcaggggtcaggtgggcaggagggtcaggtgggtcaggtgggcaggggtcaggtgggcaccaggtctcactttgactcatctggtcttgttctacagcctgggactatagccagggcttcgtgaatgaggagatgatcagggaccaccttccaactcctggggaggagccgctgatactgatgtgtggacccccaccaatgatccagtttgcctgtttgccaaacctggagcgtgtgggccatcccaaggagcgatgcttcaccttctgatggctggacgctggccaagcctgtgcctgctgctcacgcactcaccacaaccacctgtccaccccttccttccccaccactgtcgctcaccctgacatatgcccacatccatgctggggcctgggttcagcctggcctgcccagccctggtcatccagctgtactggcccctggggggcccctttgggagcaggcctgtgtatcaggtgacttctgttgaccactctctgaataggcttctgtctggtactaactggccattaccagagatgtcctgtgactacccccttacacatagacacacacacacacacacacacacacacagagacaggagagagagagagagagagagagagagaggagagagaggagagagagagaggagagagagacaggagagagagagaggagagagaagaggaagagagagagagagagagggagagagaggagagagagaggagagagagagagaagaggaagagagagggagggagagcgtgagcgtgagctgtcagtaccatgtctacccattgccatgaactgtggtctatagaaaggaagtgaaaggtaaatagtcacctacggtcctaggaaccatgcctgccacctaaccacctacctgccttaggccatagcctggcctgtgcccctaaacactacattagacagtgacacccaaaggttttcttaggagggtgtctggcagagacaggccagcccccacttgctggccaggggtcccttggggcagcacgtggacccttccaaaactatacacactg

SEQ ID NO: 23511 - DNA, 2446 bp, Mus musculus
taatcctggtagggacagtctgaatgtcaaaagctgattcttaacctgctttgtcaagagtatgttgagtattgactgccatttttccccctcacatttaggatgcaaatcaaaatacccagagaccatcctttcagctgtggactttataggcacaggcattaacactgaaggtcccctgggaaagaaaggggctctgttctcatctttttttttctttcgtggtctttaccaggttagctttttgttttgttttgccttttttttttttttaatcgttttaactgtttgcttggctaaccattgagtatttctctctgcttgttcttaatctgaagcagcagttcggagctgctaacaagaagaaagctacacgctgccatttgtgattggtatctgcatgagcaaaagaccccccccccccaagcaattgctgacatctttgatggccaccaagggaacttagagggcctgaagtagaggatcagccctggtgatggttcatgtaaatctgcttgtgtggttgcctgaatcttagctgctttgtcagccatttctagtagactggctcttgatggtttgtgctgtgcacccctgcccaccataatgcaatcttctctgcttgtctgccttggggacagttgatataatctgcctttgtagttcagccttaacttctatgttactcatatccagtaggttctcttttgacaatttgcagtgtgcacccctgcccaccataatgcaaccctctctgcttctctgccctgtattctggtctggtcactcactgactgtcatgagatatgatggcccccgctagatcttctcttgggactgtagactggttgcagcactgtaacaggctttaggctttgtctttggttcagaaatgcatttgtttgagactgctgactagttacgaaattccagtagactctgacttcagaaaatttcatttgagctggtctggtggctcgtgtctaaaatcctagcactcaggaggctgaagtattagcattgtcatgttgcagtcaacctgagctaacatagttccagaccagcttgggctacaaagcgacatcctgtctccaaaaatataatgaaaagttgggggtgtggaagaggaagagaccatggatagggcagatactcgcacctgtattgtgccttgtccatttctgaaatcctctgggatctatgttcatttctgatactcggaatttggcacagctctgctttgtgagcacctataattctagttctcacacccatggtacctatgcctggtaccattagcacttcaggaatgccataaagagcatctctgagggccctgaggttccagctgcctctcatgttaacaagttacatccttttcaggctcctagttaaagagtaggcctggaaatcaccccatgggcatctgagtgttaattaagggtcattcatattcaagaggttcaagaaaatgacttgctgcaatgcataaatatgaattagattagaagaacagttggctggacattgggatttgagttactagttaaaactatgtgtaaaaggaaaaagactcttatctaatcttttgtgaaattattccagaccctcatctgagactcccaactaagcccctgggcctacagaccctgtgatccagacagctgagggaaggactagaccctgggcagaagaaagaaaggatagataaaagccagtaccttgtggcaaccacctcagggtaattcaaaaatgcccccaaaattgatctaacaagaaccagggcacctttctcagaactagtgtatatttggccaaaaggaagggtactaggaacatgactgctttgtaaagggccagccagacagcagccccagccccagtgtggctgtggtctccagataggtagtagtagcctctggatcaaggaagcccagggacttgaatgtcatcagtggaactttgtgtgacacttccggtaggtggtcatggttatcacatttgggtatgaaatatcaccccaaagcactgataggttgaaggttcctcagcaagtgctactgttgaagaattattgtatcataagggtgatgacatcagaggtttaatccactgattatttcatagtttgacagttagctcatcgggcctatttgtaggatgtgggacactgaaagactgtatcttgccctcaacccagtctccattctatcatgagggaagcactcttctttgccaagtgtttctttctgtggtgttcagttttgcctcaggcctacagccataaggccaaagaaccacggaacaaagccatgagccaaaataaatctttattcatttcagttgtctcaaatgtttgtcacaacagtggataccacacacattacgggtaatggttttttgtatgtttgtatgtatgtatgtatggatggatggatggatggaa

SEQ ID NO: 23512 - DNA, 1192 bp, Mus musculus
atgatatgtggttaccatcaagtatttgttgtcacaccacatgttttatgtggcacaagtcaaaatgtccttttgagtcaaatcccccttttcttatcctctcatctagaaattggtgttttggtatttcagtgattgtaaaagtatctgttttaggtagattttcaaaaggtgaatttgttggatgaagtgtgtgtttatttttgtcattgctgtggaccaaatctctaacaaagacagtttaaggagaggctcacagtttcagtgggtttgatgaatagtcacttggtctacatgcttgagcagactgtcatagtggcaaggacaatgtggtagaagctttcaacccttgttgacagaggagataaaagggaatgagcactggagtgacctgtgcaggtcccctataacaggatactgtctgtgttcaggtcaacctttatatatgccttggagcctccagaaacctctctcttccttggctcaatcagaagggtcagctacaaaggccgctgtgccagggacccatttcagtttgaaacctgggggtaaatggcgtagagcagagagattttggtactgtgtggatggtgagctgtgggttgtctagggacagaatcatccctctagttcccttgatgaccacagtgacatagcagggttgagtgaggtgctttggcaccagaggtgaagcaaacacactctgaaagccagcatatctgtgccatagagtgcttttactgcttccaaattattcattagccattagaacttgcatattgtgaattatggaagagtgctgctgtttctattaagcaagggggacatatccttgcatggtgttcgtagtgttctttccagactgaaaatgatgcattattgtagtagtgcattcagaataatgagaacgactgccttgctgagccccatggtgtccaaatgacttttggtgggggatgtgacagacagcagggcaatgtgctgttaggggctttgacaggaactgcaggggtgcgttcagaggggaggaagatgcagggtgagggccagcatgaaggaaaagctcgtggagaagaagggcccagaaatcaaagcccatgccgggtgaaggtcggtggcagggaaagctgctgggtcctggcatgagactgatgcctgggcagactggctggcgtagagtgttgtctgtgag

SEQ ID NO: 23513 - DNA, 1099 bp, Mus musculus
ttcatatccacatgggatttgtatgcacagatgacttgctgtggtcagtgttgccccctgtcactaaggccaccctctttttgtcttgcaggggatgaactgaccaagatagaggatgaagatgaacagggttggtgcaagggacgtttagacagcggccaggttggcctatacccagccaactatgtcgaggctatccagtgacagcccatgggcaggctggcggagagacggaaatgggcagttcaggagctccgttagccttggcctgggcagtgacacctctagtgcccccagcagccatgtaggcatccactccacctgcaaaagacgatggctctgttgttcttggcttcctggtgtgctttgaaggcagatgagctggtgatttcattgggcacttggcccttttccaagcacatctgggcagatatagacacaggaagatagggtccaacagcgagagccaggcccctccccacccccaccagctctctctatcatggatctgcaccttctcgcccttgtctctcctgagtcatgacgggtcatactgattcttgttccactgatgattttctctgatgaggtcctatctgcaaggtcaatgagcagacttacatgccatcttctgagtaaagagtttgaggttttaatttaaaggcaatgtacagctatacttttttatatgctcttccagtcagttaaattatggcctacactgatctgagatgttctccacgtgagctgtcttcatttctctgtgctatgtccagatgtggggttgctgcagccggggttctatggcaagtgccagttgcagggctaaccttgtgcaacgttccccaacacttccacatacagaaattattttcactctatccctgcttcagtttttgcagattaacagttctattagtgatttggaaagttaacagtaagaagactaacttttcaaaacagttgcatctgtagattaagatgctttacattagaccgttgtgtctcgatgtatatctgtatatattatttgataatcagaaaatctatagagttcacccactgttgaatgagagctggtggcttctgacagcagatc

SEQ ID NO: 23514 - DNA, 1172 bp, Mus musculus
tcagtttctccggaggaattctgctaagtatcacttccggcgcaccaagatgctgcctgtaagtggaggcttccatacctgcctcatggagccagccgtggatcccctgatgaaagttctaggctcgatcaacatcaagaagccactggttgccgtccattccaatgtcagtgggcagaagtacacacatccacaacacatccgaaagctgctagggcagcaggtggtgtcgccagtgaaatgggaacagacaatgcactctatctacgagcggaagaaaggcatggagttccccagcacctacgaggtgggccccgggcagcagctgggaagcatcctcaagtgctgcaacaggcaggcgtggaagtcctacagccatgtggatgtgatgcagaacatcatggatcctgacccctgagggccttgggcttagaatggccccagtgtgagcctctgtgcctgcctcttttcctcagacttgaggacgatggacactgcagtctcagctgtggctcaggctccctcagagcatagtctttgagtgcctatcctccaactgacaggacatcgggctgctggggaaagggcgcctgtgcagacggcctgcccggccagaatgctgctctgcctctgcacccaaccatgttcctcggtgaacccagaagggctagcctgggcagtcttagactcatcctgtgggtattgtggacacactgcttggcttcaagctaggcctggtgccagaggatcgtctcagctgcctgtgacgtgctcctttggtcttgaatcttgaatcaaggtgtggtggccttgttcttcactcacttggcaggtgggagattgagtcccgtgtgccatacagacctcagaagcacttattaagtgcctgtgtatgtcctagaatgggtggtcctttgtataagaaactaggagaaccgtgtaaggtgtggagtgggaaccctgtctttcctaggccagcctgtgttcattcacacagagacaccaccaacagcaggtcatccatgggacagtgtgtctcatactgtgtttatggcttcctcagagcagtctgctccacagcaggagtggggcaatgctcctgggaagacatataataaacatgagccattctaagctgccagctggctctctctctctgtgtgaggagtctt

SEQ ID NO: 23515 - DNA, 2140 bp, Mus musculus
tagccaggtggtccaggttgggtatcctggcctgatccctgaaggaaacacctgcatcagttcagggggaaaggcagccaactagggccaagagaactcacgggactggaaagctggagccaccctgccagccctgcatgccactccctctgaccaaactagccatcgaagcctgaagcaatgtgcccttatagccccaggggtaggggtagcttcagcctttctttggggagcaggtctcaagctagggaatgtacattctaggtcacaccctgtgcgcacacactgggaattagggcctaagtctgtacccatcacagtcccagcctgtcctcccaaccctgctaccacagagccttcccaactcttgtttcattatcaggaaagcgggtgatgcagccccaaatcctggaggtgaacttcaaccccgactgcgagcgagcctgcagataccacccctcattcttcaatgatgtcttcagcactttgtttctggacgagactgacaactgccatgtcacccgcatcatctaggtgcccagagttctgcctgttctcatagccagttccagccggttccagccggtccagcctctgctcacagaactgcctttgcagtcccaggcttctccctccctccctctctcccctccttccttcctcagccagagccttggcctaagttatactcaaccctcctgagccgtgttcctgctccatatgtgggatatcaggtccatgtgtggcagagctggacagtgagtggtgtcccaaggactgggctccgaccagctgtacctggtctctgtacctcttaacgccctctcttctctgaagagtctgcagctcagctaagggcttttctcctggcatccagaaagttcgcagaccaagaaatgttctgcagaaacagggttcgacgagggaagtgtttgggaacccggtatccacaagggccagggagtactctcagaatctctgccctcctgtcccatggctgctgcaagcagggtacgggaaccctgtgttgcacccacaggccccagaacagccaaggggaaacatttgccaacccggccttatgcctcggcatcctccgccagagccttcaccagcagacttctcagccatgcctaccctgggtgtttcccttctgggaagctgggctatgcagagtcccatggtctctgcatgttggtacctcaccaagtcccactgtgctcttgtggtagacagggtgctaggttgctctagggctgtgacatttcatggcagaatccaagcaggagtggctgtggaaatgccagagcggctaagatggctctggagagaacttcatgtgggaatcaggctgcctcttgccaaagttcagagtcctagtgttaaggttttgggtttggttttccttcaacctgcaggaaagacaatgttacgtggagttcctaattttgttgctggaatttgaagtcagccaccattgcttctgtaactgctgggcgctgggatcctgcccccaggaagttaagagtgggcaggagctccttccagatgtcctactgttcgggtgggacactgtggtggctgttgtacttgtgaaggtaaaagtgaccttctcttagcatgactggacatggttcttcctgctcatctctgggcttgtaggccacctgttagggagcctgcccccgccaccatcagggtcagggtagagacacttgtggtggtcgcacccctggaaagcggctggcatctgcccttttatactgcagtaaaatacgcctcctttccacctggtcttttctctttggggccctagaggcctgggctgggctggcagggcggctgtgtccctccaaggttgcaagcagacccaacatgtcaccacgtgtgctttgagaaatgagaaggaaaagaaagacctccgagctccctaaggcagtctagcttcctagttagagtcccagttccaagctggagaagagatctgacctgaccagtccacactaccaacccaagggggcgttgggggccgcagggtctgaggcttggtcccacctggtggccttgagaaatagcattctctatgttacctccttgttctggagtggggatgagaggccataattcatgaggtagtcaa

SEQ ID NO: 23516 - DNA, 1165 bp, Mus musculus
atactaagctctccctatgcttgcctgactcctacccatccattctcatatgagaaaccagcatctacgaacatctaagccatcctgctgtcctgatggcagatgtgaggcaagctctgtggtcccagctcctatagggaacctgggaatatgaatgtcttcctacagctgggtagaggagatgggtctaggctcagactgccaacaccaagtattccttggggcttgcagacacaggagaggggtgggcagaagcacctgcccgcaattgggccgctgctcactccagtctctccacagagtccactgcgacgtgcagcaggtgctcggccaccttacccaccctcgcttcaccttcactgatagcgaggctgatgccgacatcttcttccacttctcacacttcaaggactacatgtaggtacctcgaagccctgtaccgcatacccagtgcctctgatgactgccaccctccccgggatgctaagctgacctctctggccatacctgtctccacccacaggaaactcagccaagagagcccacaggtgctactcaaccagttcccctgtgagaatctgctgactgttaaggactgtctggcctccatcgctcgccgggctgggggtcctgagggtcccccctggctaccccgaaccttcaacctgcgcactgagctgccccagtttgtcagctatttccagcaccgggagaggcggtaagtcccctaggcttcaggcagggcgaacagatactgctggtcagttccattatagtgctgcagctctgtccccatccttagcccatgcccagcctctccttagctgagcacctaccagcttctcttgttgctagttccaccctgtaaccttccttaggttctattacactcctaacccaaagacacgggctggccagtctacctctagaacctcaggacacattgtctgaaaggcaggtatggctcaactgtcttcccgtaggggtgaagacaaccactggatctgcaagccctggaacctggcccgcagcctggacactcacgtcaccaacaacctccacagtatcattcggcaccgagagagcacccccaaggtaggcacacagctccccagcctagctgctccagatacaggcagagactctaaggagagtcagctgtgac

SEQ ID NO: 23517 - DNA, 1194 bp, Mus musculus
ccaagcccacattttacagttcccggctgccctgagggttgccccagaggccacactttctgctgcacgagtgtgggaaggtacctgtgggctgcctcagctgtcctggtgtcagctgtcctgggatagctctagtaaaaaggaagtcagggtgcgccacccccaccctggaccaactaccatcctgagcccaaatccacctccaatgccatagagccaccctctgcctttgggcctcatttcccttgtaaagcaagggatgtagacatgattctcgagtggataccttttctgcctttgccaacatgtggtgtcttgagaacagtggcctaggagaccctggcatagattacgaatgaccccaagatgtgcctatcgaggcctcagttcttcagttaggtgttgctaagaggctgtttagtaactaggacttgctccttggaggtggagggctcgggagtgtggttccctatccacacccctgattgactgtgctttggctgtaggttttcgatgccggggagatgtttgggataatgcaggtggaggaggtggaggaggctgaggacgaggccgccagggaggctcagaggaagcagcccaaccctgggggcgagctgtgctacaaggtcattgtgaccagtgagagcggcgtccgggctgacgaccccaacaggtaggatcggggtctgggcattggtttttagagaggtttcacctagaccctgtttccctgtgacatgtgtggccagtggtgtccccacaggctttggggctgtttctaacctatgctgttaacaggttcatcgggaccaggaattgaacttgacgccccacaagagcgcatccctgtgacttcacagtgctgtagctcctggttttgctaagggcgaccaaacccagggaaggaaggacttgcatggggtcagtaggctaaggatatggctgctgaacccagcaagacctaacagagcctggctttgccgaggacctttgtcccctgtccctgaaccatgctgactcagtcctggagaaggttcccaggaagcaggaagacctgagacctgacacaggcctgcctagtgttaaccagagactcagccctttccatctcccagggacctgggtaggcctgtggctctctctgcaagaggctttgttgaagcctaaggaaggaacttcttgagtttccct

SEQ ID NO: 23518 - DNA, 1191 bp, Mus musculus
gcagggaagctggcccgaggctgcgggtggcatctgaaggcactggtaggtgtggaagaggccccacagatgccagactgcaccaagaattagtatctttcacagccttcacgtgctccccaaggcagcgactgacacactcctgctggcaagagatacaggacatagcatggttctaaagtccctagtcgctgtcccatctgctccacctgtgccaagcgaggctctcacccaggagacccagtctgcaggttgaccgtcctccgtgcagataggattggcaagcccacctgtgtgagtggggcaccttagacctcaagagtgtctggggggagccatgatcctgtgtgctgcccacccccacacctatgggcttgaatttgaccagatgagcggtggaccaggagatcgctgcttgtggggaccgacttgttctgttactcaccaggctgggaagaacgtggtagtgggaggctgaggctgtggaaggggcctgctctgggccgtctctgaagcgggtctggttgtcgtggcattacctctgtccagagagaagcttgtgtaggtctggtgcatggttctctggggtgggcatggcggcagcgcctttcctgtgtgtctggggaggaaggctgctttctgtgaaattttctttctatttttctatttttagtactgtacggatgttctggaaccacacatggtaatctctgcttgcctgcatctttaataaaagacacctcccctgtttgtgtgttttgtctgtgtgctgggtggagggggggagggtccctgagcgttctcctcaaaggagtgtgagccccattcctgccctgtcccctgggcgtggctacagtgggaaagcgccaggagtgggttctgatgaggcagaatttggttgttttaccccaggcaaacttcagtgagagttgaagcctatatactacttcagtgacctttgacctggaagtgaaagtaagggtgagagattccggtgttcctgtagatctcttccacctctgcagtctgggtctgcctctggctccagcccagggcatggtgggatggagactgatcaagtccttcctggctctcttccccagccttatgggagcaaatgcaaactccggatagtcatctttgtgtccccgtgctgtgcttagaagatctgtccttaagtcatttccaaac

SEQ ID NO: 23519 - DNA, 1096 bp, Mus musculus
ccacccttgatgctttcatgagagcttcctcttggcccttggtatgatattatatttgtgtgtgtatatatatatatatatattcacttttgcaaattctccagaggcaaccaataatacccaacagcagttagtcaagcactcctcagagcgtgaacttagcccacagcacttcctctctggcaggttcatggcaggaactcctgctgtggtaggttctgggagctaacctggagtaaggaggtgaagtccttctcagatcacaggtgctgatctgtgtggtgcctggggtgtagttgacaggaggagacagaaggaaagctctcccaccaacccccctccccgacttagggcagttggttccattgagtctcaccacaagcaagactggtctagctcaagtagtccatcccacctggcagaccaagttcagagttcaagtcccgaggctgccttctgttctgaaactggtggatgcagccagctctattctggtctgtgttgcaggaagagttgggctgtggaaggacatcttcaccgtctccatgaacgagaagtttgatctagtgtacaaacagaagatggggaagtgtgacctcacgtttgacttttatctataataccagaatccgagaacttgcatgctcacggtccccggacgctctactagctaaaagtcctgtttgcgttcttttattcctcgctggacacacttccggaagctgcttggaaacagcagggggcgagcctggtggagagagccgaggaggagtgagaggatgctgtctacagcagccgcctggcctggcccatagtgttttgagtctccacatggtggccaataccacacgcacgggcagtgcaaatgtctgccccacaccccgtgttattcactattttatagcgcttttcactgaaagcggaaataaatatctgtcagccaaatacaagtgcatttccaggggggagcaggagcgtgctgtgccgggatgctaggaagctctcaggggtcactgtaatttttgtagtcttttctctaggcacagccatcctaccttgttcggagatcaaagaacgggtttggggggtggggtga

SEQ ID NO: 23520 - DNA, 1130 bp, Mus musculus
ctcccaggccacccacacctggtggcagctcaggtagcaatggaggcaggtgatgacctaagctgttgctaggtctctgttgttaggtccctgggaggaaaccagaatcacctgtaagccaatagtgtccttggcttccttcccacaggctggtgacatggctccctgatatccaggatgatatccagtggctacaatgggcgacatcccaggtttgtgcccgaatgacgatgtgcctgctcccctctaccaggtaaatacttgggcccagggtgtgtgggccagataggcatccctcccggttgttcccagagctcttagggtcagagcttgggtggtgacagccttaacaagccaggctcagccgcctgtccccagcatgccattaaagaaaccggtagcagagaaagcaggtttattcgaatataaaaaggttcaagcccccacccggttaatctttaagataccaacaggaggcttaagtttaaacagagttacacataaacagtctgaatcagggcgtggtcctgcccaccattgtctgggcttcaaggttccttctttctctccctagcatgagattcctgggacaatcccaattccttggcctccattgtatcaaagggctgaaaaccaaagggaaggcacagctgtctcttcagcatgcctcttctgccagaaccactgcaaggtttggtgctcaggctgtgcaaacattctagcaatgtttgactcagtgtcaagcaggtgacaaggaacatggtgctgtgtggggggaacccatggcccaggtgagggcttattggtgggtgaagctgtgggtgttcaggtggtggagaaggccttaagggatgggactgacacctcagcactgaaggcaggaggaagctgtggctctgggttgcacccctgcctggctccaccctctctggcatctgtagaagttacagctggttcttcctctcagccccatgctcccagaaataagactcagacccaaattatagttacaaataccttggccatatagctaggctcttctcagactagctcataacttaactcattaattttaacctccatcctgccacatggctggtggcctgtgctcaggtaccatgagtccagct

SEQ ID NO: 23521 - DNA, 1238 bp, Mus musculus
gccttggctacacagggtgtgtgaggagagacccaatctcagaaaactaaagagaagtagcaaacaaggttgggagtgtagcttggtggtgtagacactgccagcatttgggttgtgtaaagtgcctgcttcctggcccactgacaagcatgtacaagggcttcctcccacgcccccagggtttctctgtatagccctggctgtcctggaactcaccttgtagaccaggctggcctcgaactcagaaatctgcctgcctctgcctctgcctctgcctcccaagtgctgggattaaaggcgtgcaccaccactgcccgatgtacaagggctttttgaaatctttgtttcacttactaattacccagtgaacatgcttattaagcacggtccccaggacctgcacctgcccactggcctacaccagcctccctatgtatcccatcctgtccccagctcctcatcctcacagggagcagctgtgctggaattcgtgacaccacctgaagcctaaaggtggaggcctggctccttttcattgtaagctcctctgtcccttgcagagtctggagcccctcccgtcgagtggaactgactttggagcactgggggaggaagccgagtttgtggaagttgagccggaagcgaaacaggaaatcctggaaaacaaagatgtgagtattctgtggaacatcttgatgcttttctggaatgttctcttggtaaggccctctggaaagtgaagcagctaacatgtcaccaggtacaaacagagaaccttgacttgaggacagtagctccttgttccttaggttctcctgggtgacagtcgatgtggctggtttaggcaaatacatttgttcctactgaaaaaaaaaaatagaacaaaaattggtttttcatggttggagagatagctcagacggcctaggtttggtttccactacccgtatggtggctcaaaaccacctgtaactctagctctagattctagagtctagaagatctgacagccttgcacacatgtacaggtacatacatgcaggtaaacactcatacatctaataacatttaaaaagtttttcaaagatagactcaaattatgcttaagtctatatacatatatatgtttagatggatgtatagatggatggatagacaggcagataatattaagggcgtgtcaccagcagaggatggcatcccagacaagtgccctaccacagagctacagccccagc

SEQ ID NO: 23522 - DNA, 1159 bp, Mus musculus
tgtgcaacctcaactatggtgagtcagccccggccacgcatccttccgattcagaacggtgccatcccttacaatgccgttatgtaaaggggaggctgcggcttactctagaaacaagcttcaagtgcttccggggcccagagctcagcacagctctgtccagaggatgctcacagggcactgagcagttgggagccctgggccctctctgaggtgtggcatgggccccgctgctctgctagaagagcctttctaggccaaggggcagggtagccaggcccagagagtcgaaaccttcagctggctgtggaagagtcgggtgcccatgatgccagccccatacctgtctccaccagctagatccagctgtaaggggccctgtcagggagggccacacctctgctcaccaccttcactgtttcaggtgagggccccaaagcccatatccggaagctagctgagtgcatccgctggtcctatggagcaggcgtcgtcctccgacttggcaacatcgctcggctggagctgaactactgcattcctatgggcgtgcaggggggcgacaggtgtgtgggccactgtcagctctgcagctcatcggagcttctgttgcaagtggttccgagatggccacttcagtataggtctgaacttaaagagagaatggagtcaactaaagaatgagagcatgcggtccgctgctgagctgctcttagttggagggggaagggaagacccaccccttccctggagcactgctgctctgcctcaggggctagccaggggaagtgttgaccctgcttgctggatgtgtaaagcaggagagagcttccctgtgccaaccctggcctggggctgcccacagctttgctctgggctggaggactccacccatggacatggagccatgtctgtgttccttgggtgggttagaccaagggccattcagggttatagagagagccttacattaccttgtaggcattgtctggaggcccagagggattgttatgagcagggagctttagtaacaaagctcggaaagtcagaggtccagacatgatggtgggaggcagttgctaggacactgtacctggcttccatgggacgggccacctgctgacaggcaggcagcctcacggggagccaatgcaagcac

SEQ ID NO: 23523 - DNA, 1168 bp, Mus musculus
ccactggggacaagtgccgagcccagcagctcactcatcaactcacacagtgtacctgggagaaaggcatgacgtgggccaagtgaatatgcaatgtaatcaggtggcaaggaggtttctccaagcctcacgcccttctgccattccctgcagagaagtcagggaggtagcatttaagcagacctggtcaggaccgaggcaaataccatagccaactgcccaacagcaggtgcaaaggtcctgtggcatacatgcttggcatgttctagtgattactgcgatgggtagagtgacaagagcctcgagcatgccggggagtgaccagagacacggtggtagatgtccaacgtgtgtaccttccacatctgcacccttctcagcctaacacccatgacgggtaactgcccttgtgggcagggactgtactacgtcactcttcatccttactgcccagcgtggcacctggtgtggacactcattcatgttttatcctcaggggagaccctggcaatgaaggctcagcagcgttcgcagctggaggtggggcaacaaatcaagcacatgctaccccgcccccgccatcttggcaacaggctgagaagattcatccttccccgacgtctgagggtttctgttgctgtgacggacaccatgaccaacagcgtctttggagaggaaaggcttacagcttgtagtcattatctaggaaagtcagggcagggactcaaagcaggaacctggaggcaggagctgatgcagaggctgtggaggggtgctgcaccctgacttgttcagctcgatttccagggctacctgcccaggcgtggcattattcataatgggcggggcccttccatgtcaatcaccaatcaagtaaacataccacaggctggtttacaggccaaatctagtggaaccattttctctcttgcggttcctcttccaggcgactctggctctgtaagttgatgtaagtccagccaccacagtaaccacggcgacctcatcacaccatcattttttttcattccttgtgaagttgagatcttaccgtttttgtgacttggaaatccttgctgtggtttgcagcccccagtgtgagaacaaaccttagacccttgagcatgaggacaagcaggcatccaggatgtgaccctttgcaacctgt

SEQ ID NO: 23524 - DNA, 2920 bp, Mus musculus
gatcctccagggacaagtgctaggccagaaaaatgggtgtatccatccacacagtccttgctttcccagaaaacacctccctggggaggcctcaggcttccctggcctctgctccctgtcccctgcctggtttggttttaacacccccccaccccacccccttccgccgtgtggttccctagctggttaggtcattgagaacttggtgcttcaaataccctctcccgtttaagtttaaggcctcacttcttctttttctctgcctcccctccccctccccccccccccccccccccggagaaagatgaaaaagagcaaaggcccagcctagccctcggctggagagggctgtccacctgtgctccagcccacagagcaattactgcaacagccctggctccagggactccgccccatttgtcctcaggaatcccctgggctggcctctccttggaagcaagggtctcagtaaaaaaagatcctctcagtttttcactcctgagtctcagaagatttagactcctgatgtgtgtctccacacaccccatccccatccgtcttgcggtttgctgcttttaacggaccttttacatgaactctcaggacccagaatgccttggggccccggggtagtgtgtacggtgcatgtctgggtctcttgctggctctgaatgtgcagcttcagagccggcttggagtaggaacctcctgtctcggaggccctgttagggaatggacacatttttagagactttacaagaaggtagggatccattacaagggctgcctgaccacaggctaccagcgagcagccagaattacagaggccgtgtgtctgactgctctggaggctgagggtagaaggtggaggtgctggcaggctgcctttctctgccttcacaccattcctcctcctcctcctcctcctcctcctcctctatttatctcctcttcattccacagtggaaccatcccctgcatgacctcgctgaccccatgatgtcagcaagccacccctccctccccccgccccccagtcgccaaatgcagcctccctccgaccagccaggaattggtttgtgggctgtgtctcagctggcagtgggacctaagagatgtccacatccctcctagacactgctggtatcccctacagcatgacctataagagaaaatcctgctgctccctcaagcccttcaccacccacttcccttgactctggaggtggtgccatggccggctggctccttgtctcaggaatcctgcttctgtggttcacccccacccccacccccttctcacgttcctcctgcctctcacctgccttacagcactgttcatggcagcttacaggaaaccttcctttcctgattcccaccttaccacaagacccagggctgtggggtgaggtgttgctaccgagctgaacgccagcaatgatgttccagaaaacattttaatatcttcccttggttccactgctgctaagctggggacgggtcttggaatagccgctccggtggaggaggcttcccagcaggggagagagataattaaaatggcattaccgtgtctccctgtgggatgcggtgacattaaagagccacactgacaaaatacccgggactggaaggttctgtgctgccttcctcgcagacacagaaccacagcagtatctgggagctgctgggaccgctttgctctgctcacaggcggtctggggcggggatcctagatgcaaagacctaccgtgctgaagggagggaaagaattggtctgggacgggcggtggcttcctggggttccctatctggagggcacaagtcctgcttggaatgtaagcaggctcctttgcctgaggcagaacttgggaagccagggttctatgaaggtgtgacctcccccattgactgagcgtggaggtgtggttctcacacaccagtgaagggctggccttaccgtcccttcactgcggagctgccattcataccatagcctggacaaaggcaccaataactaagatgtctaggccaacttcagggccacccgcgtaaggcaaggctttcttcgtagaaaaaaaagagagaacccccacccagatgacctcaggtgaccagtgcccacccccaaactttcccacagttctctgggtggggggctgggatacaaatacttctctttgagctgttaatttgagggcattctggaaccttctactgcttggatcttcattctctcctgatattgttgagaggtctggccactaaaactcttagaaatgtcatcatctgtcacttccatggggtcttgaggaaggggcaggcaggtctgcaccccctgcccccaggtctgcaggccaggactgggttcctcccttctgccctgccctgattggcacatcccctccagctctccagccttctgtggacctgcaggcagctcttgtgccaccttcacactcagttgtgcaagtcctgagctcaggccccctgcatccttcctcattggctgaccaaggggaatcttatatccaagcagccgaatccgttacgtcccctgtgcggccgcgctttattgtctttttaattgtttgaagtaatgtgtcctttggatttctggatattaaataaaaaccactaaacccccggctgtgctttgatcagaccctcctggcagacagcagggacagcgtgcttgcaacagctcaaactcgtggcttcctgtgccagacgttcaggcgggagatgaagctgggggtgtcacaatgtgctctgacttacgctagttatgagctccgatacataccagctggcctctggctccttgcggggctgcttctcacacatttcctgtccgttctccctgcccagagctggggctgcatcatttcacattgccaggctggcttgaactctcccc

SEQ ID NO: 23525 - DNA, 1182 bp, Mus musculus
ccaggacaggagtcttcgctgctcgctgggctcccggcccatagccacctgcttcttgttaactctgttagcctagcagcctcactgaacagccagggcaccctgctggcactatggtgctataagcaggtggaagactcctggggttccactgagagtactcacctatccccagcagctgagtctcatgcatgacctttcggtggaggggtccccaggtgaagctacagctgcaccagaaaaaatgggggatagggaggaggtgtatgtggaggcaggtgacaactggaaggtttctttgtggctttccacgttgttgtcgaggcccatccaccggggaggcaggtcacctgccctggctcctcggaccaatgggtgctggctgtatttgcattaggttttgcttcagagccattcaggctgcctgtctccaggtgtggcttcattaccttctgctgcatctggtctgacccacctgggccactctgcctcagtggctccgtccctacctctgctctggtggtggtggcttggcaatggttttgtttcttgatgcatgtatttaggaccgacatctcaatagctctctgtggcttggagcctggagcacacaagagagggttgaggcttgccctctgcgtcggacctggaagagacacttgggattggttgctgaggggcccatggtggctctcgtcggggccgtggtttgtccccagccaagacgatgaggtgcaaggcccatgtagctccagagggagactgtgataactggacctaaagctgagcaagagggggaggctttgtacatatcttaaggttctagttgcttgagctcagaagagaacagggagaggggaatgggggagttggtctatgaaggagttgtgtcactccacattgacagtcgcggcggtactgtgcccgctctccagactctgtgacacccatccggtaggtggggcttcactgtactcagcgtctaatggacagggggacctggcatttgggtgacttcccagcccaatgtttactgtgatcttggaattatctccatgtcccaaagcattcagtgactttgaggaaacagcaaagatccatctccttatccctggctaaatccatgacagggtgcgcatgctctgtatgacagggtgcgcatgctctgtgttagggcatctg

SEQ ID NO: 23526 - DNA, 1193 bp, Mus musculus
caccatctggttgctgggaattgaactcaggacctctggaagagcagtcagtgctcttaactgctgagccatctctgcagacccatctaccaccctctcaactcccctccccatgcccggaataaactctattctatactatacctgtgtggctgcaccagcctgggcccacagaggcaccccctccccccatacctgaccgcacctccaccatctttatctttttataaacacatcaggtgggcctaggctatataaaagaactaacagcgggagccagtgagcaagcttgtatcagcatttctccttggttcctgcttcagttcctgctttcgcggtcctaccctgctttccctcaaagatgaactctgatctggaagtgtaagatgaaacaatccctttcctcaaagttgcttctggccagagtgttttattgaagcaacggaagaacaaactgaaacggatgtctgggcttgatcattgagggtagggtttggggttcagcgtcctctggggagagtagaaggccagggccccagcccagcactgaacatgggtggtgggacctgggacagaggtaccagctatccccccagatggtgataggaggggccccagactgttagagtgagactggacaaagagaaaccttgaactggctcctgccaatcagccacatggacttcacccatctcccaccccactctacccccagtctcacctgaatctggattctggtgactccttatatctccccctggataaggaagtagtctctgtgtgccagccccagggactgtatggtgtttgtggtaatgagcggtcaatgagcagacttgtggccacaagtgagactgagacaaaaaatggtcccttggctgtggtgtgtctgaggcacatgcctctttctttctggaccttggagggctaggcatggtggcatggggcccctctcctgaattcagagagagcctggaggtgtgcacatccccggagctctttatccacgtgtcccacctcccccactacgggctgtgccgcttaaggtaaaccctgcattaatttgcccgaagtaagtaggtactcatttgtagctactacattaagataattgctataagggtctgtttgtgtaatatgcaaacacattttgacagcaacaaaccattttgctgtgaattataaatagaccc

SEQ ID NO: 23527 - DNA, 3565 bp, Mus musculus
cacaagattttactggagaaaaaggatgcctgagcactgaggctgaccaaggcatgttgccacgttgctgcttcccctccgtccctaacttagtcacattctttcctcttctactgtgacattctgagaacttctaggtaacttgaacttttgtgaggaagattaaggccaataaatcctttcagtgtgtcgaagctcttctcccttcctaagaactaagcaaaatacattggagtgaaaagtgtgggaagatggtttttaatgttgattcattgagtaaactaacctaagtgattcttaatggactataatcagggtaccagttagctctccaaaggctccctcaggcagcagtggtgccgctctctgccttccccaggagacccagtgttcctgaagacaccgcccgtttccttcctgtgggcttgtctgaccatgactagcactcctgccagacagcacaccgccacactgtgaccgaccgcgcttgcccattccttctgagctgactgggtactgggaatctgtcgtcagcctgtctcggctggtgctggcctttgacctggagctgcttgactgaaccaggaaccgcctttccatgggaaagaccatgagtggtggctcgtggggagctggcggtggacagactgggtctggagtttatccatgaggtgctcttactagctttcctccctagttagcatggacgggggctgtcaggaataatggattttattaaaagcacaaatttggtagtgtttttatatcatttctataccacaaataagcctttattttaaaagaaaaaagtgaaatcgtgctgaaaagggttgtgtgctcatggccgtttgtgccctgctgagccctggtgggcacagtctgaatggagttctctcacgagccgtgtgctcatgagaagcaagagtatgggagtggaagacggctcatttggcccgtagcttcagacagcagcatattatttggcgtctgaagaaaacatttttatctttacttttttaaggatgaggtattattgagtatgtccatttggaagagagccatggttctacacgctggtcatgttacctcagagcggtgaggttgctaatactagtattctctgaagaccagacatgggttaaattcgagatttgatgacgagctggtcatggttcctgtctaatcccggtgctggaaaagctgaggcaggaagatcatttgagttcacagcagcttgagctactgtaagacacctcccccacccccaataaaatcaaatagaatagaaagtttgactctttaaaagtccacttgcatttctcataaaaccatttgacactaggaccagatcttgtctgaaggctcagggtcagtacccaggggcgcacacttgtgtgatcaggttccgacaaaagctgggtggcacagttgctttcttaaagctgccgtgctaggtgggatgaaacctggttaacttttattttcacatgggtcttagtctcactatgtaaccctggctagccttgaactcagatccacctgcctctgcctcctgagcccagagatgttcttgaggtggggtgacagtgctctgtgcattttggcacgtatctgcagatgcatgtttgtgcttcttgggctgtggacctaaggagatgctgtgcggtttggtttggttttgccttgtagcatggagaattggttcctagcaagcaggttgctgcttctgttggccctggccctggcttcttcacattgggcttcccagctttccaaagatgaaacaaggggtgtgcatttcagaacagtactgtgtagccacgtgcctgtggggctgacacgtgtcaaactcacaggcactttcaggaacttgtctcttcatggtggcagtgctctgtgagcatctgcccatgccttgaatatttaccaaaagaataaaagcaaaaaagatcatgactggactgccttctagagctccccggccaatttcagttgtaaattagtgagggtggcttgcttttttttctaacattccagcaatttgctgctaaagactatcacttttggaaacaagaattacaggggagatgtgtggggtgtgactgtaactcggtgtcttgtctttatgctttaggagctagctcattgcatctgacctgagtatgggaatcactatgaagtctgagtgtcacagggaggcccccggagggcactctgttcttcttccactgtgtgtgtagctggttccaacccatggcttaaacttcatttatggtttaacgtgttagaaacttgcatcttgtctgtttaatgtgaactgaggtgtgtatctccagtttgaaaatctcacgttgtgtcttacatttgcctgaaggaagtgtgtgttctctgtggtcagggtgcatctggcagatgctaagcctgggccttcccacactatagctcacactatgacacattcccagccctgccatgtcctcctcagagagccacactgtacaggctgtgtctgtgtcagtgacaggtccgactgttggtgggctgatgctctgttttaccatttcagttctgaatcctgtttttttacatgctgtgtgccaaaaaccaaaacaaaccaacaacaacaacaaaaaaaatacctcctatggcatagaggggaattcaccttgctgtcagggaaagccgtttccctaccttttgaacattacgaagtctgttcttgccagtttcttcattatgttactatctctgaagatgagaaacagccccttgaggctgcagagtacccacttagaccactggagtgggattttaaggagatggcctgctctgtcacttgtaggtgaggttgggagttcttcagggcgtctttctagccacatgctctgtacacagccaccaagtgctctccagaagcaatcacaagcctgaggactgtcccttaacacagatttgtaaaagtgacgtcagacttcgtagccagcacatggagtgatccgccttctactcggaacgggaacttgttttctccagctaaaatacttgaattgtcaggcagtgtaatctcagtgtgtgttagcttttgaatgagcctttaaggaagtgtaacaatccatgaaatgtgaataaatggaaagttgaaaaaccagcgttgggtactgttctgttctgtgatattcttggcagatcagtggggaaagcagcacacagtagtgtgcacagacggatctgaagtgggggctgaccagctgactgggatgtagggtgagcagcttgaagcttggcccgggcctgcctgcactggattacagtcggctgcagagccagagccctgttctaggcaggcagtcctccagcctcagacaaattccagctgggagaggttagctttcttcttcagaagtaagttattcatactagattcttgttcattccgtgatgtacttactggagttgtgttcagattctaaagtttcctaagagacactgcattatctgagttataaggtgttttcctggttaggggaaaaaagctaaaaggctgtccccggggttccgaactgtg

SEQ ID NO: 23528 - DNA, 2449 bp, Mus musculus
ctatcagaaatggtgggggtgtgtggtagctgtggctccctcccaagagtgtcctcacccggcctgcctccctcctgtcaccctagacatcctggaagtacggcagaaacccatcttgatgacctagtgtgtgtggagcctgcacggagccccggccctgcctggccctgggaatgctgccaagtgcctacctgtcaccgccaaccggggtcttctgtgacaagccagcaccggagctacagccaggcagggccactcgactcccggggccagggccgactccatgaacaccagcccaaactgaagtgcctcgtcctccctcgctggctctgctcccaccctgtgcccgcgctcagccccctctgcctatctgagagccttctgctcccaaagagggccagagacaccaagagatcatagagagcgtgaggggctgccagcttccagaatgttcttagacctcccaacctcggctcccgtacccctgctggggctctgtgccgagcaactgtccacgcatcctacacaaagccagtggaaggttttgtaatgcagtactgacgaacttcagctcgagagtcggtcccaacttgttcccccagagttcttgtcacagtgggtcccagctgggggtcaggggacatgagctgtttgtcagctgggaatacctcgccctatgcccagctccagaatgggtctcaacccccagctgggcagacagtccccgatcccccagaatggcctttgcttccatccaaagaacaccgccaacacacacacctccgaccccgagacgtcctgcgttgatctcggctctccggagggacgcagaattcggttctgaaggaaagtgggagggtacttctgctgagggatgtctgatggggacccgggtggaaccctctcgggaaggttgtaggcagaaccaccctggggccagagcttagagcgaggctggtgctgtcccctttgccccgtgctttggtcagcatgctggtcttgtcttcagcctggctttctaggcagagaggagaccaggcttcttatgagtctgcattgtcctcagtgggtgcaagaggccatgtgggtcatcagcccatgcctcaccctggcagtgtgctctaactgaggcctcctctacccaactggaataaactggaagctgagcctcctgttgctgctgggtctagtgccccagatccagagaactcagctgtgtatgtcgagctcagcccctctgggttggagagcaggcttgggagcgtggctcctgtctggctccattccttggtctctgggagtgggcactactttggggctttctccagattttgtatgttgttattaaaagcgagctattgcatttcattctgcctcagtttgcccacctgtaaaatggggctgataccacctacctcactgaagtggccagggttcaagtgcatggctgggtcagggtttgctcacctgtcattcttcatagctcggttgggtcttagctgttaggcagtgaggtagcttgcctctcctgcctgctctgaaataactccttccaaaagcacggacgagtagtgtaagcttagacactggtactgtgctggagcctgggtcctgatgctaatctaaccatcacagcagattcacatcctgttccggaatgccagagtacctcaggtttatgggtgtggccctcctttctaggatagccattcctcctgtagggcatgtgaatgctgtccccacagttgtatctagggaggtcacagggcctgccacttcaggaacctggccattctgtggtctgaacacaggggaaatatatcttaggggaaatatagcttagtgtggcttctgtggaagactgaggcagtctagggctcattgtaattccatggcttctcttctgggtgttccctctagcagagctcagccatactctcttggctggaccaactgtgagtacaagcacttcccaggctgtcggaaggtccagggtctgtgtcacaccccttgactctgtgtggcactcaagcatactgatccccgctcaggtaccaccattccctatgtagaggagggaagcaccctagagacactgtacagcggcaggaggcaagcttggtctgcgccccagcctatggtttgaaccatacggctgtccccaagtacacaactagacatttatttggtcgcatttcctctttctccagagggcacttttgagttccaaacatgttcagaggccccttgagaactgggttaggattctgacatcagagggcatgacatggtggcacttgtgtgcaatcctagccctggtgccgaggcaggaggatagtttctggatagcctgggctacttagcaagaccctgtctcaaagtgacaaatgacagcagaagcacccagaatcctggggatgacagtttggcttctagggctgtcactgat

SEQ ID NO: 23529 - DNA, 1202 bp, Mus musculus
cacacgcacacgcacatgcacaggtccgtgcccctgcagaaggtaactgttgcctcttggagttgaatctgctggacttagttaggaccctgggcttaggacctctacaggacgggctgcttctgattccttaatgcctgtccggcctggtgtaagggtagatgggctctggtctctctctgatgtgtgtggtatgtggtttgtagcttgtttgatcctcatcagttacagaggcattagtggcatcttccttgcagataaaaggttaatcatttgtaaaacatgtggactagcctctgctgcccactgtgagcccagtagacgttactgtcattgggaacttgggaaatatggtcttaattatcacaacgttgagaggaaaacattttttctattgtacaggtcagacaactagggttccaaggaaaagagagatggtacaaaggatggggagggggagggtctttgtgtgttactaccagcctggtgcagtgattagggggcaggaggtccctagagtctcacttgtgtcctgtgccacaggctgaggctgagcctgaggtggaggtagaagtgtaccggagagactctaagaagcttccgggcctgggagatcctgacatcgactgggaggagagtgtctgcctgaacctcatcctgcagaaggtatgggtggtgatgagggatgctcttgggaccgggaggcagcagtctccctctgccccccactgactgcatttccttccagctggactacatggtgacctgtgctgtgtgcacgcgtgccgatgggggtgacatccacatccacaggaagaagtcccaggtgagcccctccctcctgccagcttcccaactcctggagagcacttccctggctggggacccattgagcatcaagagcccctggcccgtctctgtggtggctctaggcctccatccaggccagcttctcagcccttccatctgctttcttttagcaagtgtttgcctcccccagcaaacaccccatggacagcaaaggagaagagtccaagatgagctaccccaacatcttcttcatgattgacagctttgaggaggtaagtgctcaccgcgggccactctccccttcctcccctcttgggggtgccaggctgagggcctgcaaagcctcctaggagacatgggcaactgggaggggtgtgtctgggtgatggcca

SEQ ID NO: 23530 - DNA, 1174 bp, Mus musculus
atcagggcagcctggcttcctaggacagcttctttgtgctttgtgccccagggaacgagggccctcagtacccaggcacaagatgataaaaggcctattgaggccacaaaagcctattcatcctgctcaggggaccaagggctacccttggactcttgtcaaagacagtcggcctcctgacctctgctgttgggaggtatccagagcccagcagtgtccattgctgaccaggtgcactctccggaggaccttgtccttgcagcccacagttgggtccaggccaggtgctagcatgcacgtgccacagcagagagtgcccccacccttcaccagactgtttagaggtttatccttggagggtaaacaccaaccagcagccagagtgcccgtgaggtctgcccctcgtgttctgattcctcacttctctggcttcccctgccctcccttggtacaggcctctctgcagtggtcttgagtgcagctccagtcacttctgcttactctttgcctacctagcttatagttcagccctgagctgaactctcctcactgtagagctgctggcagctagaccagggtggcctgcctgtccagctcttgtcccctgcctggctacgagcgccacctgacagcagcctgtatagcaggcgcttgggatgctccacaccatgcaggggtgggtgctgggtggatgctgggtccacagtcctgcaggggccaactgtgttcctgggtaccctctccctgatgcagcatccttgcctgtacggacaacaaacttgcagacggaatgctccagaaccactgtagacacttggatttttttccccccagtcttcctatgcattacaaacaaacccaaaaagccaggttctcaatatatatatatatatatacatacatacatacatacatacatacatacatacatacatacgtgtgtgtgtgtgtgtgtgtgtgtgtgttcagtttctgtgttctggctctcctgctgtaagcaattttctagtaattatgtagcactaaattctggcatttgctaactgtagttgctagaactgtctcggtcccttgttaatttggctgtgtatgcatggtgtgtgcaggttgatgctgcatgtctttagtttttgagacagggtcccctcactgaatcccaggcttgctgatctag

SEQ ID NO: 23531 - DNA, 1177 bp, Mus musculus
tgaaagttgtcctttaaccttcacacctataccctgcaggcacacacccacacatacacaaaacaaatttttaagtaaaaaaacctgagccaagggaatagagcaacaattcaaggctttctgtttttaagctgttccactttaagctgagataaaaattaatttactgggccaggtgtggtgatgcatgcctttaatcccagcatccaagtgcctgaagtaagtacatttcaggacaaccagatccacactgtgagttccaggacagccagggctaaatagaaaaaccccgtctcaaaaaacccacacaggataatgaatccttttaaaaatgcattgttagattaactaatgacctaactttagtaaatactgttcctctgatcagaactgactaaaactgccctacctccatttcagcacaatgagtgcatgttcagccatgtgttgactctggacctttccaagtatccagacaccgaagaccaagaaggcagcaggagccaccggaagcccagagtaccacgagtatcaatgtctccaaagtctccccagtctcgttagaaatgagtatactcttgaacagccaccagctatagaagctttaccctgaccctgtggaggtcaggccagtctctgtttagacccatgtgtcatagaagaaaaatctcttaccattttagtagaaaaaaaactatagcccactcagctaaggagtgctcagtgtcattccaatggaggttcctatggcatcaatgaatgaggtatatggttttcttttgcttttaagggcttttgttttgaaacaaattggttataaaattttgaattctgcaacatctttactctggtcttgtcttgcgtttaagggaaacagctggtctgggggtctggtttttttgtggtgctggagaaggaacccagaaagaatgtctaagtgttgtaccactgagtacctcacagccttaatagtttctaaaaatgtcagtcatagtacagctaataaattgttgagcctggcttacatgggagattatttcagagagaatgtgtgtcagtactgaaaacaaagtaatttcacaagttttaaaaacagaaaacttgtgagggtgaaactgagtcatagaacttcagtataacgctaatgtttctaagtctagtttcttgtaagggtaca

SEQ ID NO: 23532 - DNA, 1149 bp, Mus musculus
gtttttttcgagacagggtttctctgtgtagccctggctgtgctggaactcactctgtagaccaggctggcctcgaactcagaaatctgcctgcctctgcctcccgagtgctgggattaaaggtgtgcgccaccactgcctggccacaaagcacttcttatttattgttttgttccaacaagctagtggcagttgaatctggaagttcttgtggcttttaatgaagtttctttatttttgaaaaatattacatgacataatgtgggaaacagtttctcatgttttaactgaaagtacattgcatagaagagcattttgttaatccttggctatactttggaaagaatataataagcatttagtttttattttagtgtagttaatataccaattttccttttaaccgttcagatcaagccaatcaatgaacgactaagggaaattaaaggctgtaagatgatgatcgatgttataaagacccagtttcctcagctgaagaaagtgattcagtttgtttgtggaaatggccttgtctgtgagactgtggaagaagcaagacatattgcattcggtggacctgaaagacggaaggtgagagacttgatcactctttcaactaagttgaagtttgttcattcatttgtttggtctctaccctctcccttttactcgtgtgttctttttagtaaggaaaaccagcatacaaaagcctaagatgctttcatttgatgattattgttttgagatggggtctcatgtagcccagacttgccttgagcttgttgtatagctgaggataactgtgataacaatgatcttcctgcctctgcctcccaagtgctgggatcagagacatgcattatcatgtccatttttgtatatactaaagattgaatgcagggcattgtatatttaggcaagcactctaccaactaagctacatcctcagctcttcagttgagtttataaaattaacttctgtagcattctctatatcacaaattctaaggcatttgagtttttccctttgtgtggaataaatgtccttgttgattcctgtattctccctgcattgttttacctttaaatagctggaaggattttgttgttgcttactttacattttttgttcttatataacttaatggg

SEQ ID NO: 23533 - DNA, 1163 bp, Mus musculus
ccctgtgcttcggagcctctgctgagcaggcctgcgtggcacaacctttgttccattcctggaacacagctgggacctgcgtgctgcctggacaaggctgtcttctagaagactatagatacagtgtgggcaaagggctgcattggggttcacctgggttcaggatctgccgtgaggccttgggtagatctttctttctgcctttcccgttgtctaagagatggggatgatgcatgcgacctcctttgtgggagtcttgtagacgccatgattctagggtctggcccttactcaaagagatctgaaacttaacagagcttgatttggtgtctgcccctctccagatgtgcccacagcaagactcagctcagtttgattgggcaacttgatgaatgcaggaagccagatccaccatggcttctgggacattccttctgctcaagcttaaggcttggttgttcttgctggttacttctgcatcgccttaatctctctagatatcaatgaatgcatcacaggcagccataactgccggctgggagaatcctgcatcaatacagtgggctctttccgctgccagcgggacagcagctgtgggactggctatgagctcacagaggataataactgcaaaggtacagctcacatccaaacctaaaactcaccccttccccagctgtgggtatggcctagagggaagggcccattgggctctgtggtgctgcccccatgtggctgcctcaggtactgcaagaaggaggagggtccacctccttgcaaagtacacaagggcaaatgaaggaaggtctgtgatgagcaggtttacttcaatatgatgctgagttagtgacactagcccatttgatttagaaagctcggagcctgatctttgacaaacaagtccagggtcctcgtttgtgtttccgtacaaacagaaccaacccagatgaagttgaagatgcttgctagcgcaggtcttgtgtaaaaatgttgatcattgaattatacggggtgacccaagagccagatgccttctcttggcagccaagcccttgagcaatcccgctgccccaccctgcactgctgcctgcctgagcctctggactccagagcctgggagccaggccagctgagtagatacacttgaacctttgacagccgtg

SEQ ID NO: 23534 - DNA, 2276 bp, Mus musculus
ggagaggcctcagcccttctacctgagacatgaagggagttaggggtagaggaccatgaactgctgccattggcagaagggtgggaccgctccagtgaacacgctctgagctgactgcccctctgttttcagatatcaacgagtgccagcgctatcccgggcgcctgtgtggccacaagtgtgagaacacgccaggctccttccactgcagctgctccgccggcttccggctgtctgtggacggccggtcttgtgaaggtgaggctggggtcacagaggaggccagccatatctctcctctgctcataaactcatttggggtttcctaggcaggcgttttaaagacgctagaatccccaccctagggatatgactgtaagtcagggccagccatgctgaaacttggccagtatccctggcagggtctggtcagtcatttgagttcatgagacttgctgtgcacagataacagagtgtcttgtattatcagctgtgattataatttctggctgtgcttaggcatctgagccttgtgcttgcataatccagaggatacggtgctgaggcccggctggccttggctctgctatggataattaagcacatgcaatgtgggtgtggcaagacgtggttccagtgtcaggggctttgtctatgataggaaaccacactgagcgtagattgagcaggtaacctggccaggcatgtgggggctacagataggaaacactgactaagaagctatccctcctagcctcggagacagtagtaaatgaatgtaagaagacaagatttttctctcccagatgcgcgggtgactgttttaaacctttctggccagtctgtagagagtaccttactttgctgtagaagcacaaaagcagccatgggtcccagccaaatgtgtttgtagctctgtgccaataaaactttatttacaaaaacaagtggtgggccaaacctgtctaggagcttgctctaggtgaagagaatgggtgatcaatagctgggttgctgagtagctcctaagtccagagatttaggagtaccagggctaccatcccacctacgtcaccgtggtcttggagatgaagtggggagggcaggaacacttttcactgaaagctagaagggactggtcctggtgggactctagatatgccatggtgctgagcctgtgccctgtggtgaccggattgaacagagccaagcctggaggctgttgctgccttcttaccaggagatagtgtggcttcacggaggcagtagcaggagtggagaaactaaagatttctcagctacagtgggctggagtggaggtcactctctctgagcatctcagtcttgcaacttcaacagggaggtgatgaagaagtattctgctcagtgtgttctcagtcaagtctgccccggaggcagggacctgaccccacctcccaggaacctcttctcttctagatgtgaacgagtgtctcaacagcccttgcagccaggagtgtgctaatgtctatggctcctaccagtgctattgccgacgaggttaccagctcagtgacgtggatggggtcacctgcgaaggtgagggcaccctgtgttctatggggtgcaccctgaccttgctaccgaacagtagcatttcagaatccatggccgggggaggtttccccacctggtgaggttcccatttgctcccacggaggctgggctggctcctggcttcccctctgagagagcttgaagagcttctacagggagagagagagagagagagagaaagagagagagagagagattagtaggagagcaaatgagtccatggatcgctcttaaatgcacatgccatggctgcaacgcctcagtgtgctgacactctgggccatggagcacagggctcagcatcacatgtggctgagaggtgaagggcaacccgagagccacccaacccctgagacccaactctgcactggccttgtgagcttcacccttactaggcctgactctcatcttctctgtcaaaggcaatgctccctccttggactgttggacaatccaaccagatgacagttcaggagtacccaggagcttcaggagcaaatgttactgatgctatcacaatgctgtgtgtgtacatgtgcgagtgcatgtgtgtgtgcctgactgcgtgtgtgtgtgcgcacatacgtgcgagtgcgtatgcacatatgcatgcatgtgtgcaggtgcttaggatccagcctagggccttgctcagcagatgccattccactgagctctga

SEQ ID NO: 23535 - DNA, 1102 bp, Mus musculus
acatttgagaagagactcacttcctggcacatctcagatgagagacttctattttacaactcccttttctcctcattagaaactgagctctctaaattccctgatctttacaaaggaggctagtagacggagtaaaccagatgccgcggcagaacgcttgtgacctcagccttggtgaggtagaggcaggaaggtcaggagttcagaatcagctggggctcaatgagaccggtctccaaagagagaaaaatgaactgggctgaggaaatggctcagcagggaaagctcttgccatacaagcctgatgactggagttcgggtcgccaacacccacatagaaatgcacagcagcccacctgtaatctcagcatggagacagaggattcatccacacaaggtggctgggtagaccaactaaattgtcatactccgagttccagtgaggtgccctgcttcataacatatgtcagagatcaaagaagacatcagacggcaacctcgggtctccacttagacgtgcataccagatgtactgaacatgtatgaatgcatatacatgcacacaaacactgcatgcatatatacacatacatacatatatatgcccatatatatatactgggcatctctcctgaggttcctgctctaggggggagcttgtttggaactttagtgggtaagatgtgagaatcagtctcttctaccctctgtgtgctagtgtgctctctctgtctctctttctctgtctgtctctgtctctgtctctgtctctctctgtctctctctctctgcctcaggccctttctttcctcatgtagcttccttctctcctgtgctgttcctggctacccaggagcctgaccaagcaagccaggaccacaagccaccaatgagtctcgtggacacactgaggtcccgacctctgagtgcttgctactcctgtgttcagggctacctctggcacccgatgggactgggtacatcctttttcctgcccacagagccactcggatggagtatggttgtaaagctgtcatgaggctgggtagctttggatactgagtcttaggaaagtagctaaagtgaaaagctatggtcacag

SEQ ID NO: 23536 - DNA, 1110 bp, Mus musculus
tccctgttctcctataacatgagggcgcacatgttaatgctaccttacctatctcagtggatgggtaagagctagaggtggggctgtcttctcacaagcaccaaaaggaatcccagacactgagtcagtgctgcgtgctgcaggcgtgcctgctgctgcttactctgctctgtgggtggtttcctagtgctagcgttcttgattctttttttttccctttttctgtcttgggctcctactatttgatttagaaatcctcttttaaatacatgaataagtcagttatctggtgtgacagtgctgtgattgtggagcgagcccttctccttaccccttggattccagcctgttgccctcccagaagatttctcctgacgttatccccagtgtcctcagcatcacaaaggctgccctgcaccgcagcatccttgtcatgtcgtgtggtctcctgctccccaccatgaaacccgctttccttgactctgcatccccttctctctctctctctctctctctgtcccaatctcctgtgcgagatttattttgtttttccaacatatgataaataattgtttcatcctttcttcattgagatggatataacctaagaaaaatagaaaaggcaagatgcctaaaaatgcttttataacatagttatgtggtgaaggaataccttgattgatgtcagaataggtccatgtaagtatgtttcgttttgttctttcccttcccttcccttcccttcccttcccttcccttcccttcccttcccttcccttcccttccctttcctctctttctcccttccctttcacttttcctccctcccctcccctctcctcttttcctttgcccttacttcccatctgtctgtctgtctgtctgtccatccgtctgtctgtctgtatgtatgtattttgagggcactgggaattgaaccttgggctgtagtacgataggaaagcctctcctgctgaactctatccgtcgccttaggctcagggtataagggctgcattaacagttggttataatttagatagcttcaatgccatcagtttagcaaattgatttttttttctggtagtgtggggtaaatttagtgccttg

SEQ ID NO: 23537 - DNA, 1180 bp, Mus musculus
ctaagtttagttccctgctcacaactgtctctaagtaagtaagtgcttttgggttctgtgagcacccgcacatacacacacacacactcccacacacatacacacatacttatatatatatatatatataattaaaaatattaaaacttactctcttgaaactagagtaaagctagggctatggagataagaactgcttgccattttgggacctgaatttgattcccagaactcaatgtgaaaaggcccagtgtggtggtgtgctcttgtaatcccagcactgaggaggcagaacacaagagctttgctgtctgtgtgctccaagaagacacataatgacatacagccctgcccctgtgatggggccgatagtggtccttcaagaccattcgagcaagtatgtttctctctgcacatagatgtgtcactcacatggcatttgttagagcattttattctctcactgctatttataatggtcaatgttgaaattctggttcctagcaaggaggttttcttgtcgttttaggaagccctggttacgattcggctcctggatgtcttgtgtgaaatgacgtccaacactgagcttctcggctacctgcaggttttccctggcctgatggaacgcgtgattggtgagtgaactggcacacacaggacttccagttaggaaatctttgacatactctgtggcataagttcaaactcaagcccttacctttggtgttttcacttgagattctttgaacttttttcttggatggaattatggtacaatgatcacagctcagattgctcaagctgaggcctcattgttccttctctgatgtggtcctgagttgtagtgtgatgactaagcaggcccttctgcagatacctccggtgtcccctcagaggaatgtttgccatgaaactgaggataggggtttgcaaatgagaaggttgagttttgtaaacttattttaccaaagttttatttattaaatctggtaatagattgtctccagttatacttttgagaacaaagaacagtgtttcatttacattatagatttactcttaagacacgaagccttttatggctaggaagacatcatttgaatcattactgactttactcaaaagctgtttacgaattaagtttactagaaccttggtttgtgtggatacccacccc

SEQ ID NO: 23538 - DNA, 1175 bp, Mus musculus
atagtatatagcaatattatttcttatgattatagctaatgtcaatccacggctgagttttattgtttggctgttgagaaagctataagtcattactgaaacctgttgtgatttacgcttacttctaagttatcacattagcttttgtgtagataattgaaataaaaaattattttgtaagaaaaaatagttgcaaaattttagctaagtttcctttgtggatagatagaaaggccaagtgaggctaattgttatgatcagactttaaaaacatgaatgtaaagggaaagaagcggtcaggttcttgttactgctgctgtatttctggcgtgaggatgaactgatgccgccaggcaagggctctcctttgtccccacacgaatcactattgaagacgggtggcacatactttattttaatccattaggtgtgtttatagagaacttagatactatgctaatttcttatggaaaatgaattatactcatttgctctagatgttttacgagtgattcatgaagttggaaaagaaagcacgaacatcttcagtccctcagactctctaaaagcagagggtgacatcgaacacatgactgaaggctttaagtctcatctcatccgtctgattggaaatctgtgctacaagaataaagaaaaccaagacaaagtaagattatttcttggtgtgccacatataattgttgaaaataggccgtttagaatttagactattttctctctgggcaagggggcatataaaattcttatgtgagttcttagaaaattgattggaaagaatatctataggttaatatgtaacataaatagaatattacatattttttctacaaagaagcacggtatgtcatacttgaaaatttttaccttattttagtgctgtgtgtgtgtgtgtgtgtgtgtgtgtgtgttacatgtatagtgtgagacgtgtaagcacacgtttgccagcacacgcatgtgaggttgctcctctcctttcatcatccgttacggaaatcaagcttaggttgagaggctgtgcacaagtgctttttatctgctgagccccgtacgtcacattttttttccttagggtctgtatttttatagtttttgcattgttgttctcatgagtgtatttggggcgttctcctttcttgtaagttagtaatgtt

SEQ ID NO: 23539 - DNA, 1161 bp, Mus musculus
catccgaacctccggtgttctttcatctgtttcttcttcacttctccatcagctgtggatgtcctcaaccttcagggcattctttggttgatgaaagtttgcctcctgggaggttccattctaggaatgttgtgagaattcctttcctggggaagcagctatcttttctctacaagctcctgagaacacaccaaagtatgatcctggggaatccacagttcacccagagaaccagggaaatttgggggcttactttgggtaagagactactagtaagagtggggggactccaaagcattagcacccagaaatcttggcttccccatggcttcatagatggagttcctaccagtttgctttcccagcctatatactctagcacctccggaagctacttgcagttagggcagaatttcatacaaatggctgggagacacagggggagaagaatctccctctctaagggtagagaagtcatcttccctctaatgatcccgtgagggctcttgcaagcaggcacagcttgtgaaaaatacagttgttttgctaaaggattgtgttctataaggaacatctggggatcttgcctctgacccaccaagctattggcaacaggaactttggtagaatctttatacaatgcatggaagccttttgaaccctactcgatttctgcttgtcacataaagtcattcattggaatggcatgtccagcagctgagtaaggcacctctgtggcctttcgagtttcctgccttttgcatctgcattgggtcactagagcttactctgaaaaaggttgacagaagaattgttaccattagtttctaatggagaaaccaaggctcagggagatttcagtgtgatttaatttaactgaaatttgaatcagtttgaatgcaagcttgatgctgtaggttctgaagatgatgttgtcagtaggggctaacatgtgcactggtactattacttaacaattgtgttacagaggcctgccagagaggatctgaaaggctgtcttgtactctagggtggccattccagaatagttctttctggcaaagctggaacacgaggacatagagttagtgggatgggagatcatctccctctgtttctgcacctttggacaacctgctcagaaatgtatggagctcagcc

SEQ ID NO: 23540 - DNA, 1199 bp, Mus musculus
taaagtacatgtacttgttgcttgtggggtgcattctgccaaaggctccctgtcaatggcggtcagttcttccttctttccctcctgctacctctccaccttgtagcaattcccagccttggtgctggtgcctggtcatctctgttgacatatgtgcacacaaagctttcgttgcctgtatcagttcatttaaagacaagtcaggccgggcgtggtggcgcacgcctttaatcccagcactcgggaggcagaggcaggcagatttctgagttcgaggacagccagggctacagagaaaccctgtctccaaaaaaaaaagaggttcagggtgtgaggaaggtgtaactcatggccttctgtccagaactgtcctttaggaaagaggttcttaaacatttgtgaccataaaagcacatttgtcaactttttgttcattgtgttatgcctttaaaacttgtacctgggaattcataagtgaaggtttatcttttgtgatctgtaatttttaaattagaagtgtaggttactctacagttgtacagtgctataggtcccaaagtatttccagacatgcatgttatctgctttgtccttcgtcacccccttccccactgtcctcttccagcctgcactcctcctgctgatcccacccccttcttccccatgatggttcctttaaatgtgtcctctccatatgtatgtaatgtcgctctcgatcagacataggctctcgtgggtggtaggcagactctacctctgagcggcatcagttgcccagtaacagtttatcgtaaaagctatttgttgtagggctggacagagatggcttgacagttaggattgcactgctcttgtagaggacccaaattctgttcccagcacccatgttaggtggctcacacctgcctgcaactccagctctagggggatttgagatctctggcctcctcagctccttcactcacacacagagaattaaaaataaagtaaatctttaaaaagttgttgtatattcactacaacaatatggagtgtgctccaggaatcatttgttaaacaaagactagataaaagaaacaactttacacctgaaaactaaaattcctttaaattctgaattttgagataacttacaagctttttatgtttgagatttatttgtttgcttagtcagtgtgtatgtatttgagggcatgtgt

SEQ ID NO: 23541 - DNA, 1150 bp, Mus musculus
aacacatgagaatctagtgtttatcatctgctttcagattcttcaccaagagggaaacaagggctgaatggcaattcaaagaatacatttcagccatgtaacagacagaacccttccgctggaggagggtcaggactggtcatgactccttggcaatagctgcagagtagtaaatgactcaaccctgaaatgttcggagaccaatgacccacccgtcctgttaaaacaagaagggattggctaccagccttttactcagtatgactaagccctgctcccttcccttagcccacattgcatcaactagcattccaattaaagtataaaggtaaagttttcagtaagcctgtttgtcagattttcttcactgtaactaatacttgaggtaatcacattatgaacagaaaaagattattttgattcacactttcagaagtttcggcctatggtataattggctctgccactttaggcttgtgttggtgaccaacaagcaaaaaataaaaaagagattgcaatccccttaaaataacatgtcccccatgatctgaaacctgtccctgtgtcccaactttaaaaggttcaatttctcagtggtgccaggctgagaatcaaccctttaacacatgggactttggagttactgatctaagctgtagtgacattgttttgctaaagcagcaattgtatggggtacagacagacagacagacagacagacacacacactgctgaaattagtccctatagccttccaagaatcatatatatgaacattcataattagtcaaaaactagaagcaaccaaaatgtctctcattgaaggaatgggttagcacgtggcacattcataatgtggagtagttaatacacaagagtgtcagaaggagttaccaggatgtcctccgtgtgtcctctgaaacaaaccagacacagaaagtctcagaagaggctgaggtaagacgaggcggtagagctttgagtggtgcttactgctctgtcagctaggaggggctccagggcctctgtgtgccactgggtttcctacctacgctgccgtgagtagaggaagagatgcatgcagagcagtacacacatgcgtacatcagtgcacgggagcaaattacagttcaagcgatggtgtatatgt

SEQ ID NO: 23542 - DNA, 1287 bp, Mus musculus
ctgtcctcagtccctcccagaaagctgcccctgcatctctgtgacttggaagtgagaggtctcagtagggaacatggaagactagagaagctgccttctgacacggttactgacagagctgaatagcactgcagataactttttgggcagactttatgatgccatttgcttaaaactacaactcatgcagagcatgacatacaaaagatgctgaagtgtattcatggcagaaacaagttcctgaccagaacgagactttcctgtaaggagcagaggtcactgcaagagtttgtgtgctgatgcatgcgtcctttaaggatcttcccagtcccccagtaccatgatacctgcagagctctgatttctcctttgtctgatggttcttgtaaatagatgtgctgtacctatgatgctgtttctgttttttttccatagtgaatgccatcttcatatgaacacattcagattccatctcacggacctctcatctctgcagtgtatgaaatcacaagtattggacatgtagggtacagatgagggagcctcctaatcctttagagtaaatgagtgtaagctacaagtggacgttttctttatttctttgcagtaagtgttactgtctgcctcacctttgtccctctgggtagaactcgctttcccgtcatatacattgtgcttactgttgtagtaataaacgtctctgtgggcacagccctcactcggcaaagactgggacccttgattggattctgcacgccctttcagatggcaagtgtgcttcatccctttgattctctgcttctcattggatttctgaactctggcgggcacttgaagtaagtttctcactgtgattaattctaccaatctcttttctccccttctgcctttccaaaacattgacatgactcatttccagttaattaatttgagaacccaccctcttcattccatgcactgcgttgtcacagagccctgtcttagaaaggccgtgagaatgggtgagagaccatgtggccacttaactgtttgcatcccaggtggacttagagttaagaattccttaaaagtgatgctgacatcttgcccatatccatgctgcctgacacagaaaggaatattgtactttttttgatgtgcagtgcctctagtgtgctgtgcctcatgtgaacggggcgtccatagcctcttctgcttaaaagtgtggctgtcacagagacaagctaatctggaggagcgaggatatattggtatcgagctttagttctatttttgtagcaggtaaaa

SEQ ID NO: 23543 - DNA, 1165 bp, Mus musculus
atgcagtgagcgggacccacacccaaccatccctaaccaagctccatgtagacagagggacagcacacacggggcatctgtgcacacacacctgcgggctcccataccgcccatgctcctgcagaaacatgcaagcacacgcatgcatacagaagcacacgttgctgagcacagcccctaagaggcgcacacgcctccgcgcagtgcctcccggagatgcgctctccgtagcggtgtttctcgccaaaggttgtggcgagggtatcccggccaaggcaacttgggcaaaccctgggggcggcacccgccgcacactctggtcaacctcccctttaaaaaaaacccgcccgcggaggaggcggatgtaggggcggcctgtccaatggcagctgcggcgctttgggagacttggagacttgagccagagtgagcgacagaaccggttcgcaccgacagacggacagaggaccagacagccactaaggagcgcttactgcccccctccgggcccctgccccgaactccagccccagcgcctgttactgccccagatacagcaagatgcgcggtcctggcagcgagacacgggcgagcactgtcccccggtccccgagccctggcccctagcgcccagcgctgctgccctgcatcagggagggccgcggagaccccagcctcagttggcgcaggagccctgcgggtggggcctgcccagcccagccaggcgcgccagcccaccatgctcctcctgtcgccgcgcagcgcgctggtctccgtctattgcccgcagatctttctccttctgtccagcggcagttacctgtgagtgccgcgggtggcgggcagggtgggagggaggagagcccctggctaccactgctgaaggagggagtggggaggtggaaagatggtccccggtggggtgctggatgccctgcgcgcaaagaaactgggggcctttgggtcactttgctggcctaagccgccgaggtagatcacctgagggacagctgtgacaacgagaaattttagcttaggggtcggagaaaaggtggccgaagagcggtctgactgcctttgcaaattaggctatgtgcactgagcgcgagtgtcagagctagccagtcgcgtctcagcgtaatcctggaccatccagagaccctct

SEQ ID NO: 23544 - DNA, 1140 bp, Mus musculus
agtattgcaatccctacctaaggtgaggaagtaataatgattatcttctagattttcatttgtttttttctattttgtatgtgcgggtgctctggctgtgtttatgcctgtgtacctcctccttcctgtgcggtactgcacaggtcagaagaaggcatttcattctctgggcctggagctacaaatggttgtgagctgggaatggaaccagtgtgttctacaagagcagcaagcgctcttcccccctgagtcatctctccagccctgacaacaatcatcttactgacttacactgttagctttctgcaaaatcttacgttgtctgagtttgaaactgtccaaggatgggactgcactgcacgtgtacttggaatcatcctaccacccagcttggcgattgggacacagtagctgctgctggctcattgatgtttaagggggactgcatagtttgtcatagaattgtcacttgactaactggaccaccttcccttgtagccttttgtcatacatgacatggagaccttgtgtatggccgagaagacgcttgtggccaagatggtggccaacggcgtcgaagacaaagaggcagaggtccgattcttccactgctgccagtgcatgtccgtggagaccgtcacggagctcacagaatttgccaaggctatcccaggctttgcaaacttggacttgaacgaccaagtcaccttgctaaagtacggtgtgtatgaagccatcttcacgatgctgtcctccttgatgaacaaagacgggatgctgatcgcgtacggcaatggctttatcacacgcgagttccttaagaacctgaggaagccgttctgtgacatcatggaacccaagtttgacttcgctatgaagttcaatgccttagaactggatgacagtgacatttccctgtttgtggctgctataatttgctgtggaggtaagtggatctgtcactcgcaggtgttcaccggcttccccttctgtaggaactcagtggttgtcaatatggtgccaatatgtatgccgatatagtgacgtgagctctggcagggttgggtgatgtcttgagtaacttcaaatttctgtggagtggaactgagtgagaacagtatagctatgatacattgtagc

SEQ ID NO: 23545 - DNA, 1154 bp, Mus musculus
ttctgtgacagggacatccctcctggaagttgatgcagttcctacttaagtagggactgatgggcaggtgggagtggggagtgggttggaggtctccaaaccagatctttgcttagcctgctcagagtccctgcagtctgctgaggactggacaggttttgggcattcattaaaacaattggtcccgttgactaccctctcctatgggaacctctgagcagctcccaagtgccaggtttgggttgcgtcctagggagatgggcttctctaatcttagctggatgaggcagcaagtcaagaaattgtgtaatcgccataggatttgaagaggtactgtctccatatcagggagcctggggacaggtgccaagggggaacctcctcattagtcctcattatgtatatgattccaaataatacatgattcagccagaagcggagtcttgctctctgtctctttcagaaagccttccaccctgcctgtgggctggtgacagtgccttctctttgccccatagcccttggcacttgcccttgctattgaaccactttgtgctgtgatctctggtattcaatggcttccattgaatgccttgtctgtaaaagctggtatgtgtaggctttcatgaaagaaggcatgcatctgccagggacaggcgactgatcttaaagggaaatgtgtatgcgtctggagagatggctccatggctgagcacttgccgttcttccagatgaccagagatcagtacctagcgcccacgtagagcctgtaaatctagcctcaagggacctgacactctcttctggcctctgtaggcacttgcatacctgtacatacgcacacgtcggcaaaaaaaataaaataaaaatatttttaaagccaagagaaaatgtaaatagcagtgagttactatgggtatgctttcctgaacatctactatgacctgatatgatacaaagagaagtgttggtgaactttactgcccagtggatagccccagggatgcagggatttcatgcacaggagctaaaggcttggaccacagatgtgactgccaccgtggtcttgcgcccccccctcccgcccccggtgtgaatcagaaaagcctggcccttaaaattccagatacacagaaccggtcaccatccccagc

SEQ ID NO: 23546 - DNA, 1183 bp, Mus musculus
caggcaccccagaagagggcatcagatctcattaggaatgattgtgagccaccatgtggttgctgggattcgaactcaggaccttcagaagagcagtcaatgctcttaactgctgagccatctcccaagccctgactcagggatcttaagcctgggcatgataggccagtggggaaaaccatcatcaattcacttcttagccagagtctgataggagcctagatgtcttctatcacaagtatctctttaattcccttctgaccctcaatggagggtaccttgaatatagccatgttcaaagatgttctagatacctaggggacagggtggagtggactaggatggaggcatcattgctgaggaacttgacactcatccaaggttacgtgggggggctgcaagcgccttgagtcctgcccatgctggagcccttctcaagaacagagcccacccaggccccctggctgccctttcaactacagtggtctgtgttgaagacctccatgtcttcaccagggtggtcagcagcactcctgtgagacgctcatcagggactactccacaaggcctgcccggcagtatgaggacccctctgagcacaagacggatgtcagtgttgcctacacctgccagtcggcgtctctccagccttccattaatggcacctcagtccatgcccagggctctggtgtccccactgtgtgtgcctgcccggcgactctcatctgagcccaggagaagatctacagttaggtaaaaataagcttgtcttgagtgttccccagacttcaggggtctccctgtgcttggaaggtacaggcagcaaataggagaaataggaaaagaaggtctgtggagcaaaaggctcagagtgcaaataggcagtgtgtgtgtgtgtgtgtgtgtgtgtgtgtgtgtgtagggtggggctgtgttgtgtcatgtgaatggtgtgtgtgtgtgtgtgtgtgtgtagggtggggctgtgttgtgtcatgtgaatggtgtgtgtgtgtgtgtgtgtgtgtgtgtgtgtgtagggtggggctgtgttgtgtcatgtgaatgttttgtgtgtgtgtgtgtgtgtgtatagggtggggctgtgttgtgtcatgtgaatggtgtgtgtgtgtgtgtagggtggggctgtgttgtgtcatgtgaatggtgtgtgtgtgtg

SEQ ID NO: 23547 - DNA, 1179 bp, Mus musculus
ggaagctagtgtggcccggcgcagcagagttacaataaggcattgcaagctgtggctcgtggtggtggaggctcatgattgttctttttaatttgttttaattgaatttgtcctcctcctcttcctcctcctcctcctcctcctcctcctccttcctcctcctcctcctcctctttcctcctcctcctcctcctcctcctcctccttcctcctcctccttctcttctcctcctccttcttttggttttttttcgagacagtgtttctctgtgtagccctggctgtcctggaactcactctagaccaggctggcctcgaactcagagatccacctgcctctgcctcccaaatgctcggactaaaggcgtgcgccaccaccgccgggctgaatttgtcttcttacgactacatttctaccaacatatcccctgcctggctgcctagtctctggcggaagctaggcttgggatgggtttgtgagctggtggccagacagacacacacatgacggtgacctgcatgaacctggaggtggggatgatccatctttgtggtccttccccacagctccatgctgaggacggccttcctcctgctgctgctcgtcactgccacctggctgctgggactgctggcggtcaacagtgacactcttagctttcactacctctttgctgccttcagctgcttgcaggtaggtgccaggacagagtcgcctgttgtgacctctgtccccaggcagtggcagtgaggtggtggtgggcaggaaagcctcagtacttacacacggagagggtttacacacggagagggtttacacacggagagggtttacacacggagagggtttacacacggagagggtttacacaccgagagggtttacacacggagagggtttacacaccgagagggtttacacacggagaggggaagcctgtgctctccacccgccccagccctgcctcaggacttgtcagtctgtcaggattttgtcactggcttaggcaggacaaagcttggtccctgctccgccactgcagggtggcccgttggtgttctcagggaataggagcatcctttatgtttcaaaccaagtgctgccagactcctctgagctgggctttcctcggtggacagccaggagcctggtggagcagcatcaggacccagagagtc

SEQ ID NO: 23548 - DNA, 1205 bp, Mus musculus
gtagctgcagccacagcaaaatggcttcctttttcctaaggggtagcagcattgagatgggaccttcaggtccacaacctggcagcttacagacttttagactcctgctctacagagacgcgcaaggcaggcctagcgcccaggcccagcaggcaccagtaacaacacactaacttttctgcagctaacacagtaacttaggaaggaagaactccttaccacccaggcatgataattacgaaggtagggagtcagaacagttttttcctaggtaggtattcatatgggtgtgtgtgtgtgtgcgtgtgtgtgtgtgtgtgtgtgtgtgtgtgtttagttactttgtataaaccgtttggtgactggctcttttcactacaagtctaccgtgaggtttcagtgactaagtctcttctgttccgtttcacatggtggaatggcatctctctgggctagttttgaactgtgcctaggatccgtgggggtttctgtctttccccttcaggaagcttcctaggagtggaccaaagtccggggcatattgatggttttccattctggctttcttttcccttccttccctctccccttttgagacagggtctcatgtagcctaggctggtgtcaaattcactggctaacctcgcggatgactttgaacttttgaccttcctgcctccacctctccaatgctgggattacaggcctgtgccgccatacctggtttatgcggtgctgtgaatggaacccagggctctgggcatgctagcaaaatatctgccaacaagccacatacttttttttttttttaagattttatttattttatatataggatgagtacactgtagctgtcttcagacacaccagaagacagcatcagatcccattacagatggtcgtgagttaccatgcggtggctgggatttgaactcaggacctctggaagagcagtcagtgctcttaaccactgagtcatttctccaaccccccgctccccccattcctgctttcttaacccattgactttgccatggaagatagttgatgctggggacctttagagtgggctgactgttctagtcagtcctgttacaagggctggtctgcccacactggctgctgtgagcctagtaattacttagataatgtttaccttgtggaggaggccccaacacgatatacaaggtgtggccagcacctat

SEQ ID NO: 23549 - DNA, 2153 bp, Mus musculus
gcagacccagcccctgccatcctgagaggctccttggtcttatgacccctgttcttcagaggctttttccaccaaagccatagctgggaatggttgtggccccttcctgcaggggtggtaagatggagagaatggtggggaggcccctctccagtgaagaaatggccagtcatctcacccagccctcagaccctccttccacgttggacctgctgtgggcactccgaggctgtgggtagggcctcttagggcttggtgttttgggggtacctgcccctccatcagtgtctgggcatgagttatcactcatctggctcgtcttggcctgacactccagctaagaggtcaggccagtggttggtgtcctgtgagggcccagactggcgtagtgtcggcaaaagcacacctttttaacacttggctctttggaaggtttcggggcgagcattctccaccctgctgttaagtgagagactccatggtcatctggctggcgtttggcctccaggctgcagtcactctggagttatgggaggaccctgtgccacagcagacagctgtgggcagagcctagaggttaggggccagagttgccttgtcctctaacatctaacagtatttattgtctcttactgcacgctctgcaggggtaaggcacatcccatcccacccatgctccctgccccgacaaaggtggagacttcacaggtgggcgatcttgcaggcctgggcctctggggggggcaaccacgacgccacctgtgaatctcccaggtggaccactcttgtctccttcagcttgtcccgagtccttcagatgtcactgagattgcttttttgaagaaacagaagattatattttttacagagagcaagctgtctttcttatttttgtaccatttttcaaatgtaatttttacctttgctccaacgctcgtttgccggcgtaggtgtgaggcccggtggcttgggctcatgacacctcattcccaggggacttcaggccacacactgggggtgggaagggcttgccaggcaaccagatcaagcacacataccactccagatgcgtagcagaggccacacagctccaggtacatagacggaggagtctggatggggaggcgggaccctcgacccagggccgtggcttgggcccctggaatatgcttgtgctatgaagagcacggaatcagagaaggagcaccccaacgtgccagagggaaggcaacatggcctctgacctgtccgtgaggatggcttcatgggtgatagccacacatggtggctaacacttcatggaccctggcggtgcctgggttgtgagtgttgccaccccggtgtgctacagagaggccttaagcagggaaggctttcagggtggaatacgtggtttagtttgagtctctttctttgggaaagagagatgaagactgaccatgggtcagggcagtaggtcagggaggtggccccaagttctaccattagccaccggcagatctttgagtagagcttagggggtcagggctgggccaggggcctatgtagcttctaggcatccttacagagacactggggtttgtactggattgtgtgatctgggcaggtgtttaattgctcactaatcactgacctagaatgttcaattttgtatgtgtgaagcttgagtctgttttggatctgtacataattgttgctggtgtaacttttgttctacaaaaggatcatattctataaagaactgataggaaaaaaaatcctctgtcacttttttttttaaaaaaagaaaaccttgtttagatacaaagtcttgtataaattataatttttatttaataaacctaaaatgctctgtgctgagtctgaggaatcctttgttcttagctgagtgtgtagatgttggttggtagatcagctgggtaactctcaggtctataccataccagagtcttcgtggccactagtgccatttgggtcgagcacaaaactgtctatgagactgaaggcttgggtatgaaatgggatggggagtgggtgctgattgctctactgcgccccctggtgtgagggaagctaggagcaggaggtagtcctggggatcccagaagacagaccggaaaagtagctggccctgggtgtgtgagggggagtct

SEQ ID NO: 23550 - DNA, 1663 bp, Mus musculus
ggccccatgtttaggttgacttggtttaaacagggctaggtcaggagttagatcctgggagactgtggaacaagaggaggccagggcaggctgaggcttctcacggtcaccttactttctgtttttaattaactggttccctgtccgggtgaggaaaagggtcaaggaacccccaggtgggcaggggtttttgtcagtcagggttccagagattgtctcatgggcccaaacttgaccgcaacagggcagaaattagtggttctaaagtcccagccatgtgtagggggcttcttcctaacaccacccagatggcaatagccaggagctgctgggctggcctctcttcatgccctactgccctttccagagccactgggttagagcctttgccccgttgctggccttctccagggccctcagactggcttctcacatgtatatcccacagatgcccccaccaggctgcctggcctctgtgatgtgggatccccaaggaccaccaggccacctgtaggacaagagcctagactcctagagcagcctcctgtcctcagttacccactgcagcccactctgacctgtcccttctttaggagcagcgcaacactgcccaggcactaggactctgcccagaggctgtggggaagacatagggaagacgtgtgcctgcttctgttcagatgatcctgggtcaggtgggatgtgacatcagcagagtgctgtgcaggcaatccgatgtcctggatcagcagagggacatgctccctcagaccagtgcctgtcctgggtgagaggcacccagttataaggaaagctacctctgtggctctggagaagcaccatcttccctgatccttccatggtgcggatcacccctcagccagaagggtaggcccataacgatctgccccatggtgtttttatgagatgacaaggacccatgaggttaacttaagccctgaatgtatttttatgtgtgcaaatgcttgactgggtgtacgagacgctggcgacagtcctgtgtctgagcccatgagctgagccgggcaggatgtgtgctttgaatgtgatgtgttggaaacacgaaataaagatgcttcatatggcctgtggtctttttattgcatttatttgatgatgggggctggggtacctgtgccatggtccaaatgtggcagtgagaatacaacttgccgaagcctattctcatctatcatgtaggtatcagagatcaaacacaagatgttaggcttggtggcaagctcctacacacactgagccatccaccttgttagccctatggtcttgactcactttctcttcaaggcttaggccctgtcccaacactgagccttgtgctctaggcctagtcttgatcacagcagtgctgtggccttgctgacaaggttgggacctcaggagaggaagagtacgtgcccatggcacgggcatgccactttcctggctctgaccctctgaagtccagacttggtattgtcaggagccagaagaataagtgtcagggcctccaaactttctgccagcctctggacaagagacaactccaagtttcctttgtaaaaagcataaactgagttggcgctgggatctgggcccctctgccatacccccaggaacccagggcatgtcaccctaccttcgg

SEQ ID NO: 23551 - DNA, 1126 bp, Mus musculus
cagagtgcccatcttcccagacatccaggtctacaatcttggtccaggagatgttaaacttgcccatggtgggcaagaaggaatgtgtgtgttgggaatgtgactctggatgacctcagtatgaggctgacagctctctgtctttgctcttcaggtctcctgacaatcgcagcccctgcggtgccccctgggagtggctgtggctccctggaaattctacacctcagccacagtcctgcatcctatgtggacaccgctcattctcccccatccacccactgtttcccagaggcctaacaaagacagcccaattcctcggagctctgagctcaagtctgtccagctgaacccaggaggctgggactcagacacacatgtcaagggtggtacctggaatcagcaatacctggtgtgtggagcctggctgcatccatcctcactagccgcttgctccctggagttggaggaccggaacaaggaaattgtggcccggccagctgggccacaacgcaaggtccggggactgtcaggtgcagaagccaccaccccctctgtcccagactgtctgaatcgcttttattttcttatactttcagtatactcaatagaccaaagagcaaatctattttaacgtggacacatccctgctgccaagagttccctgggtttgattgtggggcaggggagggcgcagtggcagacatgctggtggcccaggcagcatggagagggcatctgaggccaagacccccgccccacgaacactgcagcgtgccctaagaggatggctttgcccagaaggacaccaccgtggtgcacctgcaggacccagcaggggcatggccggcgacggcccccagcggacagcaagggccccggacacagaccctttgcccctgtgcttagaccaactctatcgtactaaaatcactttctgttttaaccagttagacatgcctcttccacagctccatttttgatagttggataatccaccatttgccaagagcatgctgggtctcctgtgactgctatctcatctgatacaccatttagctccagaaagcaaattaaagaaaactgaagtaaccctgtttgaaagagatcattaaatgtattttgcaaa

SEQ ID NO: 23552 - DNA, 1365 bp, Mus musculus
gtttccagcaaaggcggtggccaaagcctcagccagccgggagctctgtccatagtgttgataagctgtacatgtttgtatattgttcagaacttaacttattctggttttctaggcgtagttctttaattctttttcccctggggaggggaggtttcacttccaagttttctatgaaaccatctggtcttggctttgcaagtgaggagggtctgttgcgagcagtgtggtgttggggtcccactgcaggtgccgagggccgaggcctcacttattctaatctgtagggtttttttttttttttaaagacttttgaatgtttaataattttgtagatcatgctctttacacagagtaccgcttatttaataagacgggatgtaaatttacaatgacaaatgtgtattttaagaaagaaaatgacattattttgaatggtactttgtgcaaagagggaataaatttatgctgtgtgcatcacttgcaaatcaccaaaaaatgtcccgccagctgctgccggacagggcccgttctcctcgttgatctgactgccctgagtctcctgctctgccctggctcctgcaggcgtgcctcccagcgggttatttattgtagaaagtgtactcatttgctttataatgaaaaataaatttgcaaaggtatattgatatgcatttttatacaggcacataaaaattcaacttggtgtgggagcagaatgtgttgcgaggttatatacacgactggcctgtgtgtactttgattttgtaacttgtaatcttttgtttacaatgaggagctttctgtaacttgttttcatttagaacactttggtagcaatagactttggatacattttgtatggtacatgtgatgtatatagaattagtcctttatttttatttctaagaggtaaagcattatgttaggggaaaggcagggtgggtttccaaatttgcatttttatattaaaaataaagtgaagatttggacagtgtggccctctcattcctgcatcactaggaggctgggtgagctgtagcctgagggacgtgagggactcggagcaccgggcctggagtgggtggtgtgacacacttgatctaacagctgactcgggatggcattatttattattttgcctaatcatatttttattttaaagctaaatagttactaaaaattttaaatgttcttttaaatctacatgtttgtaatatctccatagaaacttgaaaataaaaagtcttcctttggtagtttttgtcccgtgtttggcagatggtcatgtacccagcatctctttccagctctgaggaagcctgaggtggactgaggcagtggaactgtgtgctgacggtgtgc

SEQ ID NO: 23553 - DNA, 1276 bp, Mus musculus
cttgcttctgaggtcatgcattgagaaggcagctattcattagttgtcatatttcagctgagaagcaaaagcaggagctaatgttggctgtgcctctgatcctctctctgggatgcttgcaggtgtttattgagggcccagccttagcctgcttctaggacatggcctaacccttctaactctccagggcaagcttgtactctgggccccaccgtgcacatgctgttgtgctcttcattaatttcttccaagtaaggagctgtttttaaagataaggtctcagtgggtagtcttgactggcctggaactcaaaatgtggatcaggctggcttggacttgacagaagtccacctgcttctgcctcctgagtgctgtggttaaagatgtgcattaccataccacatctggcctccaatcatttcttgtaagcttcttgcccctggattgtttattctgtaggtaaatgtctacagtaggtgaatggggtttggtggtcaaccttggaacttttattcacaaaacccaagatcctatgttcctgatttgacctaccttttctcctgctattgactgttcaggaaaatggtggaatcgtacggacttaggttttatccggtacgtttccttctcctggatgaccagctgcctggtcactgtggcctgactcgtgaggtcagagcccttggagactcctcacttctggcttcctgtgtatctgacccagagaaactgtctgtctcaggcatctctagggcatacaggatagggttgaattctttttttctcaagataggatgtagtgccacactcaggaagctaagacaggaggttcaccacaaatttaaggtcagtctaaactatagtgatttctaggctagtgagttacaccctgagaccctgcctaaaaaccaaaactgatcctaacagtataattagaaagaaaagcagccaggccagagtgtggcttagtagtgtttctttgcatgcacaacatttgggttcaatgtcaacacagcataaactgggttgatacaaagattagaatttaaaggtcatattggctatagagtgaattaaggctagcctgggttacatgagaccttgctttgaaaaatagatatgcatgcacccacacaggtgacaagatttctgaaaccctagataggtccagcaggaactgagcctgatagccaccaggattacagagcgactctcagatcttcacctgcatccatgttcttttctccagattgtgtgggaggcaagggtgggctcc

SEQ ID NO: 23554 - DNA, 1187 bp, Mus musculus
agatagaagacttttgcttgcttcttgttgtttttttcaagacagtttctctgtgtaatggagccatggctgtcccagaactagctttatagtcatgagctcagagttctgcctctacctcccagtgctaagattaacagtgtgcaccaccgctcccagccagatacaagatttgttaacaatttaaaagtcaaaaaaaatagtaataattagcaatttgctttaataaagcttccaacttcatactagacccacaccttccccagtgcaagaacttgggaaactgtaaatagcttgcaagttgtaaacaagatttatagaaaatacatttaatgccaggcagtggtggcatatgcctttaatcccagcacctgggaggcagaggcaggcggatttctgagttcgagggcagcctggtctacagagtaagtcccaggacagccaaggctacacagagaaaccctgtctcaaacaacaacaacaacaaaaacaaacaaacaaatttaaaatatgtcctctacaggtatgtatccaaacactacataagcagagtctgactcccccctggtgagcaattgcacactgtggagaaaggtagacaacaggcactaatactgtaggtcctcagaagcagaccagccaaaagcaagcatgtccaacaagttcatcccacactcatcaatgatcaggccaactaccaactcagaaaccacaggaagaacaggccaaactaccactgacagacaaccaacacagacagacctgagacccacgcacacaggaacctggaagtagacatgaccaaaatggatctctagaaggaaacagaggcgctactctagtctggatactctgtcccagatccctggagataggtacccagcaggaagaccaggctggccactccctgtgctctggagtcctatctcactgcagcatttctacgtcccacacacgctctcgccacgatgccactgccccactgattcagccacagaataagttgatgtgatgtccaatcttgtgctctcagctcctcaaattgtgagctaaaaaaaaaaatcctttataaactccccaatcttatctgcatagttattgcaactaaaatctgatgagtgttatgtcaaaagcacaaataaaccaagattacagagaggaaaagcccatgaagcaagccctacagg

SEQ ID NO: 23555 - DNA, 1202 bp, Mus musculus
agcgtgcgctgctgcctcagtcacatcagtctctcccttgtagggaaaactctacatactccatacagatccatatagaagatctctctgtgtagtcctggagctcactatgtagaccctgctggccttaaactcacagacattctcctgcctcagcttcctgagtgctgggattaaaggagtgcaccatcacacaaccagccttgttcacagtctttgctttccaaagttgccagtcaggggttatgagtattttagggtcttacgtgattcatagagtggcagggatgaggttgccacccagtgtctacaattctactgggtagtacaagcaggctgcaatgtcctctgtgacactggactgtgattgtagagcctgcagtctatgcttagctgttcttatttgaggtcttggttggggaaacagactgtcactggacttgaggtggctttgttcttaagttcccccatgtcagtagggtctgctttgtggtgtgatactcttgcctcaccaaagtggaagtggtctgacatcttctctctgtgtctctagactgtgattctacctgcgtgggctgtacaggaaaaggcccagccaactgtaaggagtgtattgccggctacaccaaggagagtggacagtgcacaggtcagtgagctgtctgctagggatgaactttctggaagaaatacctcacctgcccagggggcccttgtccatgggaacccctcctagacagtgtggtgccaattggagccacacttgcctgagtccctatgtcacaccagcttctaggggtcttggctgtcacctccactatcttgggcactgccaagggcactgggcttcctatcttacgatgagatgtctctgctctgccgttgaggcctggccaccaaggcccatgaagctctcagcaccttactgatctctggtgggcagtcatgatcccatcctgttgctctcattgataaaggaattgtgaatgagcaacttgcgtagtagaaggggtgtgtgtgtagtcacttactgaaatgaagaattttcatttcagatatagatgaatgctcactagaagaaaaagcctgtaagaggaaaaacgaaaactgctacaatgttccggggagcttcgtgtgcgtgtgtccggaaggctttgaggagacagaagacgcttgtgtgcagacagcagaaggcagtgagt

SEQ ID NO: 23556 - DNA, 1191 bp, Mus musculus
tttgtcccacagccaaggctgacaaggagagcttcgagaaggtgtaccaggtgggcgccgtgctgggcagcggcggcttcggcacggtctacgcgggcagccgcatcgccgacggactcccggtgagtcgtggctccgggcgcacccgcgtggacgatcgccacgctcggccgcccgtctgaccgctcgcgtgtcgccccctcttttccccgcaggtggctgtgaagcacgtggtgaaggagcgggtgaccgagtggggcagtctcgtaagtatgcgggtgcggggcgtgcgggtgcggggcatgcgggtgtgggttgccttggctttgtccgatgaccgccttgtcccccagggcggagtggccgtgcccctggaggtggtgctgctgcgcaaggtgggcgcggcgggcggcgcgcgcggcgtcatccgcttgctggactggttcgagcggcccgacggcttcttgttggtgctggagcgacccgagccggcacaggacctcttcgacttcatcactgaacgaggcgccctggacgagccgctggcgcgtcgcttcttcgcgcaggtgcttgccgctgtgcggcactgccacaattgtggggtcgtgcaccgcgacatcaaggacgagaacctgctggtggacctgcgctcgggagagctgaagctcatcgacttcggctcgggcgcggtgctcaaggacacggtctacactgactttgatggtgagcaggtggtgcggcgttccggcgactgttaggcggccacgcgccacgcctggcttacgggaggggtgggggggactggggacaccggggtagccctctgcggtgtgagggcgcagggtctggggacggtgggtggcagccagggagacccgcgatacgcgcgtgacgcagggcccccgccagccgcctcggcgccgtggcccctccctgtgccggggagggcgctcgcgggcctcccttgcgtgcgtgcgtgcgtgcggagcgcgggggcgccgcagtagaaatccccgcattgcggagcgcggggaagccggggctcccccactcctctcctccctcctcccatctctcccgcccctcctctttctaagctcctctcctcccctttccgagccttgcagagctgagcaaggcgagccggggcgggaggagctagaacaccaggcctggttcccagtggcttac

SEQ ID NO: 23557 - DNA, 2054 bp, Mus musculus
ttcctcccctgccctccatgtccctcctttcctgagtcccgcctgcagctgtgttggggtttttccagggtgatgacaagcaagattctcagaggccccatggaggctggctgagagctaatgaaggcccgttgttcagtgtgttcaccccccagtgtgtatatatcctgatgtgtacctaatcccgattcttccctcaggcacccgtgtgtacagccccccagagtggatccgatatcaccgatatcacgggcggtctgccactgtgtggtctctgggtgtactgctctacgacatggtgtgtggggacattccctttgagcaggatgaggagatcttgcgcggcaggctctttttccggaggagggtctccccaggtgtgttgtagaagctggctggggccgtgttgggggcagggcagtgttgcagcaggactctgaccccctgttctctctgcagagtgccagcagcttattgagtggtgtctctccctgaggccctcagagaggccctccctggaccaaattgctgcccacccctggatgctggggacagaggggagcgttccagagaactgtgaccttcggctttgtgccctggatactgacgacggagccagtaccacttccagcagtgagagcttgtgaggaggagaaggggcctgggctcggcctagccagcgctctcccagaattgaacactttctgcctgggatgtctgctgcaaaagcagtgacctctgacccctggtgacctttgctctcggcaccgggcctgtttcctttgctttgagtgcctttttgaacgctgctccacagggcctgggttttcttgagctcttctgtccaaagatggctgcgggctaagcaaggtcctgccctgggtggatacttgaaccagagatcccgaccctgctgctccatctcaggaggcagccttcctgaccaagtgtgtttgacatggagcgccctgtggtgcccacctccaaccctccagtctcctggtgttcatctgggcatgtctgcacaagcaatgcaacgctgggccactgctgcccgtctgcctccccggcacggcacggctccgcacgcaacctaagcgtgccaccacggtctcttatttatggtgtgatcaccctggagggcgcccccgccctgctggggctatttattgtttaatttatttgctgaggttcctccaagcaaccaccttctccaggcccctggggtgttgaaagtcaaatgtggctgttgagtccacagacccccatcctaattcctgcacctggaggagttccccaacccccgtgtttgcgggaggaagcatttgtacagtggctaatttaaggggagtgggagaccctgtcaccctgagcactctgcgctggggaggggtttaaattattgaccttgtacagtctgcttgctggctctgaaagctggggttgggggacagagtctcaagcccttaatttattttagcagctgtgtttctgtgaccctggtgtgactaagcatcaggggtggggttgtataagttcaaaagtgtgaaatgtctgaagatcatattttttatacaggtatttcaattaaatgttttggtatataatggataacttctgtttattggactggggccctgggtagtcttccaggtttctgttaaatctctgtcaagtgggtgatggggagagtggggaggggtagagataagctttcgagaggccagtgccatgaattagccagagggtgtttcttcctagtccctccttaccaccttttctttttgtttgttttttttgagacagggtttctcagtgtagccctggctgtcctggaactcactttgtagaccaggctgaccttgaactcagaaatctgcctcccaagtgctaggatttaaaggcgtgcaccaccactccccggctaccacctttttttctactcagagctagaaggctggttcattaggagtcttggggtgggggtggggcaactgcccttaggaagagtagaagtctgtttcctgtggaggtgttagaacaagtgaggtaga

SEQ ID NO: 23558 - DNA, 1152 bp, Mus musculus
catgagtctgtgtcacccacagtcagaggcgtcccatcttaataaatctctttagaaaccttcaacagtagcccagagctgtgtttcctcagtgattccagtgacatttgaccatcacagccaggaacaagtgcagaggcttgcttgtattgcaccagctttccaagcagttagaggtgaactgcatgttcctcataatggtgctgtcctcataaccaaagatatgcaggggctgttacaacagctcttactctgcctccagcactaagtcagggcttcattaaaaggcatccgtgcagagacgctcaaccgtcaggaccaagatgactcacagaagaggccttcatccctctttgatggttgagagtcatctgaaacttgtcctggcatcagatgtcaagttaagagtgagaaccaggcaggagcaggaggctgccccatggagtcagcattaaggtggtcagctttgcaaggacaacaggggcataatgtggacaggaactgtatggctttgactctgtgagcctatgcctacctcttctccacaggtcacaaagcttgtgaagaactacaggtcccactcggctctgctggcactgccctcacgcctgttctaccatagggagcttgaggtctgtgctgatcccaaagtagtgacttcactgctgggctgggagaagctgcccagaaaaggcttccctctcatcttccatggagtgagggtaagtctgccgtgtctaccgagtacttcttgcatcaggtgataaaagaaggaaaaggaagaggaggcagtttggctcaaagaccatcctgtgtacttctcaatactgtgtgccccctgtctgtactacattattagccaagcattccctaggaacctgggggtggggaagacgggtgctgatctctcaagtgtaaggggcaagaaggggagctgctgagctctcctgacaaagattccatgcagaaaggacttgagagtgggtattgttggccagcacccttgacacttatattagacaaatactggattccaacaggagacccaggccagtatctaggagctcaaagtgtggattagaaaggagatggctcggtggttagggatgtgtctcactcttgcacacttcagttaaattcccaacactcaca

SEQ ID NO: 23559 - DNA, 1200 bp, Mus musculus
gctgagtggccatgcacctccctcctgggtgtgtggggcctggcctggcctggacatgcatgtggcattgccagctgcatctctgcctgcagagagtctggttttgtggggttttgttttctgtttttgtttttgttttttaatgtcaaaaagttttttactcaggtaattttgacgtcaaagagaaaacaaactgaagcaaatatcaggaaatacaagccttaaatccagtgaggacaaagaagtcatctttttatttgtgtttgtgtgccctgagtgggcagtgtgtgtcagagtcggcttgggggtccaggccagcccctgctagacaccactacagctcagagtggcgtggggctgcctcagatatgagcctgcaaggctgcccttggtgttggtaggaccttagcctgattgctgtgcattaggtgagaggcccaaactgcactgagggcagtaggcacccactatgggccacggctggtttgtgtgcagccagccattcatgtgtacaggctgtggctcctagtatatggcacagcctggcaagacctagaccacattgattgtccttgtgttggctgccaaatcaggtgagacacggagctgggtggggacacagggctggctggctgtgtactctgtctcacacttgtggactcattccctagaaagaaataaattttaattttggaagctcccgctttgtgaagtgtatggaaatgggactcaggcgatggggcactggcttcctcttttgtcatctgtccccaggtctgcaggatgctgggggtactcctgcatgccaggggacatactacccaccttagcaaagtatagaggctggaccctggtgctcactagtgcctagcaaggttatctgtgtgccagccaagatgagccttacatgtgctcagcacctgtacaccctctggttcacactttactgcctggcagtgggagagggggaggaatgtaggagtggatcagaagatccttaaggtaggttgttcttgcctgtgttaggagcattgaggctgaaagagttgtatatcattgccaggccagagcaaggcagaccctgagggtagtcagtgacgtctgtgttagtggcagcaggaagaacacatgctctggccaaggctaagatactacaggctctgtcacagaaaacaacacctacccaccttctcaccgccc

SEQ ID NO: 23560 - DNA, 1328 bp, Mus musculus
aggcagaggcatttgtgggtgctgagcgttgcattatgaagacgctgaccgagacggacctgtactgcgagcccccagaggtgcagcctccacccaagcggcggcagaagcgagacacggcacacaacctacctgagttcattgtgcgtgagagcgggagggctgtggagggcctggggagcctctcaggagaagccgccgccgcccacacctgcctgcgctgagccctagcttccacacaggtgaagtttggctcccgagagtgggtgctaggccgagtggagtacgacacgcgtgcgagtgacgtgccgctcagtctcatcctgcctctggtcatggtacccatggtgtttatcatcgtggtctccatctactgctactggtgagtcctgcccccggtaaggctcccctcatccctcccgcatcagcatcagcgcttctgaccgtcatagctgactgataccagagagccgttcaatgccccacaggaggaagagccagcaggccgagcgcgagtacgagaagatcaaatcccagctcgagggcttggaggagagcgtgcgtgaccgctgcaagaaggaattcacaggtggggctgtccccctcccccggcaggtggagccacagagtatccctggatcttctaggccaccccttagggccagaaactgcaggagggcccgggttaagagcagcaggagtaggtggccaggggtcgcctcacccaggcttgcatccccttctcagacctgatgatcgagatggaggaccagacgaatgacgtgcatgaggcaggcatccccacgctggactacaagacctacaccgaccgcgtattcttcctgccatccaaggatggtgacaaggatgtgatgatcaccggcaagctagacatccctgagtcacggcggcccattgtggagcaagccctctaccagttctccaacctgcttaatagcaagtccttcctcatcaatgtgagcagagggggctcaggggcggggagggggatacagaggaggggggcagaaagataaggttaaggtaaggggtggggcaaggttgcagcccaggtgctcaagtgtgcactccctggctgccccgcagttcatccacaccctggagaatcagcgtgagttctcagctcgggccaaggtctactttgcatcactgctgactgtggccctgcacgggaagctggagtactacacggacatcatgcgcacgctcttcctggagctcatggagcagtatgtggtggccaagaaccccaagctaatgctgcgcaggttcgtgggaatggcgggtgggggtgggggtggggggga

SEQ ID NO: 23561 - DNA, 1177 bp, Mus musculus
agtagaaaatgctgactggactctccacaggtttcttccctgtatgtgggcagtgagctgctgaattttgaagagactgtgaccatgcatgaatcagacaccttctcttttaggaccccaaaggtaccactgcttgtcttaagggctggagggtagtgggtattacccctagcactggagcctagcctagcctcctgccctgtgccttgtggtctccaagcatctctgcctatgtccctgaacaaactcatggtcccatggtgtgtgtgtgtctgactcttccccagtccctgcctacctggcaaccatcactgactttgggcaattgagagattcccatggcttttggtgtcagagggacagaaagtacagtttgtccctgtgtgtcccatgcagctatcccatgatggtaatgagacactgcctcttcacctgtatgttaagtcctttggcaagaacattgacagcaagctacaaggtagggggtgggtggggtctggggaaggcgggagagggaacagaacaacagctaactctacgtcctcctccacagtgactctctacaactgctcctttggccgcagtgactgtagcctgtgtctggctgccgatcctgcctacaggtgtgtgtggtgccgtgggcagaaccggtgcgtgtacgaagctctgtgcagcaatgtcacttctgagtgcccaccaccagttatcactagggtgagttttgtcaccgtctgacctgtacccccatacccccttcacgttcacccacccaagccactcatgcacccggctctgctgatttcagatccagcctgagacgggcccgctgggtgggggcatcctggtcactatccatgggtccaatctgggtgtcaaagcagatgacgtcaagaagataactgtggctggccagaactgtgcctttgaaccaagagggtactccgtatccacccggtgagtgaactccgagcagcctgggctcctagcagctgaacagatgcagcagtgataatgagctgacacctgcctgtctgtcaccaggattgtgtgtgcaattgaggcttcggagatgcccttcacaggaggcattgaggtggatgttaatggaaaactcggccattcaccgccacacgtccagttcacttatcaagtaagtgcctgactgagctgtgttgtc

SEQ ID NO: 23562 - DNA, 1185 bp, Mus musculus
attctcaaagagagagtaaatggagtagttggaggtaggtcagcaccccagccccacccatccaggccgcctttaggcaggttacttcctctctgtgacgttccttcatctataactggaaagttacagagcccagggagtgtgaacctggatttgctttatgtttaaattgtaattgtttatggagaataagggatgtttgaggtgatagttaaagtagtctttttttttaatttaaatttattttatgccatgggtgttttgttggcatgaagtatctatggaccacctgtgatggaccacctgtgcccctgctctctgtggaggctaaaaaaggtgttagattcactggggctagagttacagatggttatgagatgccacgtaggtgctgggaattgaacccaggtcttcaattggactcctgacccaggcttctagacagaatattcacctacatgtcttacacacacacacacacacacacacacacacacaggctcttagtgcatgtatccacctctctctctctctctctctctctttctttctctttctcatatgcacacatgcacacacacacataactctgaactggtagacttagagctgctgaccccgccccagcaggcagcaaatggagaaggcgaaatggaggtggggccatcttgcaccaaggagctctggaggtgggcatgaatagactgtgcttacctgggtcatgcgtatgggccttcatttgcagctctggcttcaagcaggatggatctacatgtccacaagtctgcccatctgcaccctgagaccacctgtaggttcttgagaggaatacgtagggatagctgggagtctacctagagctatggataccttagctctaggaaggggattatgtccctctctgtctattgtggacactcagggcagggcctgaatgaagagaagcctcggtttatctgacccttactgtctctccccacagagttctgggggcaatggctctgccactctgggccctgacctttctaggtctcacgggcctagggttgagcctgcggtcccgaaagccggagagtttccgcagtgagacagagctgaaccacctggctgtggatgaggtcacaggtgtggtgtatgtcggggcagtgaacgcgctctaccagctgagtgccgacctgcacgtcc

SEQ ID NO: 23563 - DNA, 1177 bp, Mus musculus
aatgctgcatttggtaaagctggcagtggaaccagttggatgacccagctcctgtctctcctacctgcccttggtccttttggaagacagatggacctggccactccctgtccaggtcttggtctggcaatgaggcccctgacttgcagcttctacctgcaggacttggtgagggaacaagaccctacggtgccagcaccgtcagatgggcaggaagggggaggagcaccaggctctggtttcatctgtactttttaatgcacggaggaaaagccttttttttttttttttttttttttttttgcactttgtacccagctacaatacagggtctctcttggctcacggcagatgtaaaggcctgagttggagagacctgatccccaataataataatacatgggggtctggcactagtttggccatatgaggtcaaaccccagttctagctgccctgaggctcctgggagctggcattgaatcaggctacaaattttgactgccttaaaaacaaaagaccctctggacctgacggagttgtctctgtgctcagcaggcagacttggcagacttgggtgggtgttggcgctgcatcagacatgtaagagtgggcacagaagaccactgggaggctgagagacagggcgggcccatattgtccacgaagagtctaaaagtctatgttgtcttttttttttttttttttttaaatgttctgaccttctgacagggcatccaacccccaataaaaagtattcttattgaaaaagtgtgtcttattgttaggctgcaaatgcagagccccagcctgtgtggacacctttgctatccctaggctcattctcagtagttgggactcatgttgagacagaaatgaaaagctcttccttaacagtcaaaccaaggacacccattttgtaaaggtttgcttcactcaaccccagggcccatcctgggaagagaggtgtatccctctggaagtgagtcagccccaaggctcatatccctccctcccagcagctcctctgcttccttcattgggtcctgtggttctgcccttggcctctaccagcattcaccttatttcttaggtgcgtcagccacttccccagctcttaacacctgaaatgtggcgagcaggaccctccccagagtctattctgatgggtttcttgaa

SEQ ID NO: 23564 - DNA, 1233 bp, Mus musculus
gggcatgaggagggggaggggggtgataggcgcttgctatgtagtgtcatgttgttggggagacagctggtggcccgggccagtctgctgtgtgcagggagttaggtgtccagtgtggaatcacactggcttgtagagcagggccctctgctgctttgccctttttgcagaatggacataggttgtgtcatcggtgcccagtgaaaactagagtgctgaggggtgggactgctgccacctgaaaggcaacacttagctctctttttgagacacggtctcacagtgtagcactcgctgacctagaacttgtggcaagtctaggtactgagattacaggcaaccaccaccacacccagcaaaggacagggacttctgaatctgctttccttgtcatgggtggcctgggatgtgatgggtgggcaggctggagggacagtgcaagcaggaccagagcagagtgggtccatccagggctgtagacactactggccttcccaggattctgtggatgtgtgagcctctgagtcctgattggctgtggtgtccatgcagatccacaagctgctgcagatatcggtgctggtagtggagctgctcgactctggctcctctgtcctggtgagcctggaggacggctgggacatcaccactcaggtgtgtgcaggtgcggggaagcggggagggcagggtcctccaatgtcctcctgacatctgctggtgttggcaggtggtatccttggtgcagctgctctcagaccccttctaccgcactctggaaggcttccgactgctagtggaaaaagagtggctgtcctttggccatcgtttcagccaccgcggggcccacaccctagctgggcagagcagtggcttcacacccgtcttcctgcagttcctggactgtgtacaccaggtaggtagatttccatgtagataggcttgacctgtgctcccctacctgacctctgacccctacgtcttacaggtccatttgcagttccccatggagtttgagttcagtcagttctacctcaagttccttggttaccaccacacatcccgccgtttccggaccttcttgctggactctgattatgagcgtattgagctgggtatgtagggaagacggggatctggggtaactgtctgggccagcggggcctaagctcagggctgttcttgtgtagggctgctgtatgaggagaagggtgaacgcaggggtcagctggcctg

SEQ ID NO: 23565 - DNA, 1233 bp, Mus musculus
caggtgggggtcactgctgctctgggatagagattgcattgcctctcatggctaagctgatggtgtcacagccctacctccaagctgacctcaggcttctctagcctgggagcaaaggagctatacaaacagttaggtgtggtgacggtaccagtcagtacagtgaaccgatcaaggggctctgaacaggagctgtctgttcaacacttgtagaactcactgggctaagaagcactgttgggagaggcaaaggggggtggcagaggtgcctgggaaacctgtgtcgggctgtgagtgttttctgggacctgatactcactgcaccgacctgctctcccaggacaaggagctccgtgctgtctttctgcggctctttgctcagctcctgcaaggctaccgctggtgcctgcacatcgtgcgcatccacccagagcccgtcatccgcttccataaggtaggctgtggggctggggctagagctgtctcgtgaggctgtgaggagctaacttcctggtgttctcccaggcagcattcttaggccagcgtggactggtggaggatgatttcctgatgaaagtattggagggcatggccttcgcgggctttgtatctgagcgtggggttccctaccgtgccacagacctgtttgatgaggtacagcctgcctttgcctacctacctgtccctcccccagcccacttaactgacctcatcaccctgcctcctttccccttagctggtggctcatgaggtagcacggatgcgagcagatgagagccatccccaccgtgtcctgcgtcatgtccaggaactggcagagcaactttataagaatgtatggtgggtgacatggagggcatgctaccactttggtcctggcccactagccaatgtctgcccatgttccctcaggaaaacccgtacccagctgtggcgatgcacaaagtgcagaggccaggagaggccagtcacctgcggcggacccaccggccattcccccggctagatgagggcacaattcagtggattgtggaccaggctgcggccaagatgcagggcgcacctccagctgtcaaggctgagcggaggagcactgtgccttcagggccccccatgagtatgtaacttgaaggggaaggcaggctggtttaagatgggtatggggccaggagttaaggtgaacatgtcctttctctttagcggccatactggagcgctgtagtgggcctcata

SEQ ID NO: 23566 - DNA, 1145 bp, Mus musculus
ggctgctggcctacggcactgtctactactttggcctggaggttgactggcaacagcacatcatcctctcgaaaaccagtaagtgccaacatggggacctaagggaaagggctggctcagtccctgatcacactctcctccctggcagccttcaccttccatcagttctcccagtggctgaagacggtaaccctgccaactgtgtggctagggacagcctccctggcctgggagttgcttgttgtcctctggaggtatgtatgtacccgaagaccgcgggcagaagccgctttcagatcaggtctgaccacacccgtccctctcgtccccaggtggatccaggtacaaggatggtcacggaagttctctgcgggtatccagctctccgtcctgggcacggcaacagtggccttgttcctgatcagcctagtaggtgaccctgtgaagactgggactgggggaagatggggcagcactgagctatcgcctatttgcctgcaggtaccttactcctatgtggaacctgggacccacgggcgtctctggactggggctcatcgcctgttcggttctgtggagcacctacagctggccaactcttacggccttttccgtcggatgactggcgtgggcgggcggccggaagtggtcctagagggcagctatgacggacagcattggacagtgagccctcccaaatgatacaggggtaaagggaccaagtccagccatcccagctaaccatgtgtccctctgtcaggagatcgaattcatgtacaaacctgggaatgtgagccgaccaccccctttcctgactcctcaccagccacgccttgattggcagatgtggttcgcagcccttggcccgcatacacacagcccctggttcaccggcctggtgctgcgcctcctgcagggcaaggagccaggtgagggctgggccgggctgggctgggccgggagaggggccaggaaggtaaagacaagttcaaatccatgttaccctctcctccccggccacagtgatccgactagtccagagccatgttgccaactacccctttcatgaacggccacccacctacctgcgggcccagcgctataagtactggttctcaaagcctggagatcagaggtaaggctgc

SEQ ID NO: 23567 - DNA, 2228 bp, Mus musculus
caacgcatcagggactgggaagataccatccagcccctgctccaggagcaggtgaggcgtgctattggggactagagcctcctcccaccagcccggggtttgcccagacctgtctctccacttgaagctaacatgtcctttccctctgcaggagcagcatgtgccctttgatatccatatctacggggaccagttggcttcacggttcccccagctcaatgaatggtgtcccttttcagagcttgtagcagggcagcctgcttttgaggtgtgccgctccatgctggcctccttgcaactggtaagtggcctgggacacaagggatggggcagcggccctggactctactgacaccttgtttccacaggctaatgactacacagtggagatcactcagcagccaggactggaggcagctgtggacacaatgtctctgagactgctcacacaccagcgagcccacacccgcttccagacctatgctgcaccatccatggcccagccttgagtggacagcactgaggcaggggtggaaagtagtatatacctggaggtctttgcccctaatgtgctatggggccattcactccagtgctgcctcctggctggcctagcctaataaagtgttgctaccccacctgttcaccggacagactatttaaatgagctgctggtacagagcacatgcacagattaagtacatccatttaatgacagggcctaggcaataggtatagttcagggcaagacactgtggaaggcagctatgtgccgacgtatactctctacgatctgctctgctgacctgctgcgaccatagtaatcggtgaaaagaccatcagggttgagcagatagatggcaatggagtggtccacaatgtagtcctggtcctcatccttaggcccagcgctgtagtatacgcggtagttgcgactagcatgggccacctgttctgtagaaccggtcagacctaacagtcttgggtggaattcttgcacatagcgggccatggctgccacgtcatctcgttctgggtccacagtgatgaagacaggctgcaccaggggcaggtcaggctccgcctctagcttccgcaccacctgcactagcttttccagctcatcggggcaaatatcagggcagtgagtaaaaccgaagtacatcagcacccactggcctcggaagtcggctttgcatcgaggctggcctttgtggtctagtaggctgaagtcaccctggcccacagcagcctggcgcagggcctctgtacgctgctgttggcgccactgttccttctcagccctcgcggccagccaggcccagcctagcccagccccaaacagggctgtgatcagcagtctagttcttagcccagggccttggcgctggccctgccctgcccagtgtcgggaatttctatgcagagtttcacctcctgagatcctgaggaggggtttgaactgagagagcttgggccaagctttgggccctagagccagtagcatcgtggacctgaagctcctggaaaagaacaaaggtggcaaaagtcagaaaagaatggacaagatgtctaggcctccgctgctggacaagcatctgccccacattcaagcaggttatctagctgcctgcaccggctcgtctcaactcagaactgctctgccgtaagctgcatgcagtccaggcaacaccaaaagtccatagctggtttgctctaacctacgtctttaaccagggagtctcagcctcatgaccccaacctctggagaacccacgccacaactgccaagcctccctgtggattcttggaagcaccgcgaatatgctttgcctgggcactgggatgcatgtgtctatttacaataaattgttctttatagggaggctgttgatcctctggctgaccacctttaagaggtgatcctttctagctttagggtcacttcagggtaatctggggctcagcagaaaacaagtgcctccagcttgttttctgtaatgtaacacagctcagcccactgtgccttgaactgtctgaccttcaccttcctgggcaggcagactcctctgcacttaactggatgccgtaccctgcccctctgcagtccctcagccctgccatctcccttcatcctcccccccccccctctccccagggaaggttgttacaactagcatttagagccactggcatccagcctactgggctcccccagtatgttgccc

SEQ ID NO: 23568 - DNA, 1109 bp, Mus musculus
tcctctgcccctccttatgtaaaaagctgacaccccccccatccccaggctccgcccacagtgacaccacttcagatcctgcctgtcatgctgccaaccgtctgacggctcatgagcccccactgctctacgacttatctcaggaccctggggagaactacaatgttttggaaagtatagagggggtctccccagaagccctccaggctttgaaacacatccaactcctcaaggcccagtacgatgcagccatgacctttggccccagccagatagccaagggcgaggaccctgccctacagatctgctgtcagccgagctgcactccccaccctgtctgctgccactgcccaggctcccagtcctgaggggactggagaaatcacgggggtccttcaagggtagcccaggacccctagccctgtcctgagtgtgtgatggttcaccagagggacagggacaagtgtgtagtttgtatctggtaatgtaataacaccagctgagacttgagacgtgctaattcatctagtccttgtggtaactctgaggtcagtactattctgctgtgctacaagacaaggacattgacgcatagggaatctcgtggacctttccaagtccgatgccaccttaccagaaagagcttgagctaggatttgaacccaggcaccctgggtttaaaatttgtcccaccctggtgatctgcgtgtgtccatggacacaccgctgaagcgaagacatgtcccttcacagaaaccggtaatgagttcaagtgccaggaactgggggtggggggagtggtgagggcagaggaaccctaaagatgcaaagcacctggaagacaggctttcctcaagaagcaatgccagaggccctggaactggtcagcttggttctttaaagaaatcagctgtctggagttaggtgataaactgatcattccgggtagagttaaaggacctggggaccctgctagatcccaggaaggaccatcagcagcttctgagactgcctcatggggctcacttgtctctcaagctctgaatttctcctttgtgcatacttcaagtaattttctacaaaaaaaaataataaaaataaataaaata

SEQ ID NO: 23569 - DNA, 1189 bp, Mus musculus
agccttctcccctcggagtccagcgtggattccagtgcctgctcggagagaggcagagaagccccctcgggaagagcggaagtcaccagaggacaagaagtccatgatcctcagcgtcttggacacgtccttgcaacggccagctggcctcattgttgtgcatgccaccagcaatgggcaggagcccagcaggctgggggctgaagaggagcgccccggtactccggagctggccccagcccccatgcaggcagcagctgtggcagagcccatgccaagcccccgggcccagccccctggcagcatcccagcagatcccgggccaggtcaaggcagctcagaggaggagccagagctggtattcgctgtgaacctgccacctgctcagctgtcctccagcgatgaggagaccagagaggagctggcccgcatagggctagtgccaccccctgaagagtttgccaatgggatcctgctgaccaccccgcccccagggccgggccccttgcccaccacggtacccagcccggcctcagggaagcccagcagcgagctgccccctgcccctgagtctgcagctgactctggagtagaggaggctgacactcgaagctccagtgacccccacctggagaccacaagcaccatttccacagtgtccagcatgtccaccctgagctcggagagtggggaactcacggacacccacacctcctttgccgatggacacacttttctactcgagaagccaccagtgcctcccaagcccaagctcaagtccccgctggggaaggggccggtgaccttcagggacccgctgctgaagcaatcctcggacagtgagctcatggcccagcagcaccatgctgcctctactgggttggcttctgctgctgggcccgcccgccctcgctacctcttccagagaaggtccaagctgtggggggaccccgtggagagtcgggggctccctgggcctgaagatgacaaaccaactgtgatcagtgagctcagctcccgtctgcagcagctgaataaagacacacgctccttgggggaggaaccagttggtggcctgggcagcctgctggaccctgctaagaagtcacccattgcagcagctcggtgagcagggtgatgtggggaggggcctgtccccctgtcttctattccttttgttcattacagg

SEQ ID NO: 23570 - DNA, 2190 bp, Mus musculus
aactttttttttccgtgttgtggcacctcctagggcccttcaacacagaatcctggatttgcgttataaagcttcatcaagaagagctggaaatcacaccgtctctctcacctactttttccttcttgtcatgtttgccccatccccacgcccgcggtgatggagaagtgggaggtgacggaggaggtctgggtgctactaaggttgttagactttgtaggcagaaggtggcagagccttgggttggtccctcaagccctttcttggcaaccttccccagggctcccatgtggactgcatgggtgctggagagagccgaccagtttgtggccagcctcctgtctgtgtttctctagctgcttctgcctctgccccagggctctcttattactgggtttgagcggggtacctaccacccccaattccccactccttggttcctagacactgttcactgtcagttgtggaagacagagttcactgagtagtgagcagtgcacagcttaaggaagggcttcaggtcttactcagagggcctgctcattttacagtcttccagtttagggtctagtagatgaacaggagcttgggaagctcacattgctctctgagaggttcagggacaggggcattcctgtccttctcacgacccgttcttagactttctccctttttggcctcttccatctcttaagtctgaatgcccttttttgtactgcagtgatgaaggcacccttagaatgggcagtggctgtgagccagtcaggacacgtggctgggtcccaggtttgtctacagaactgggttttcaactttactcggaccattttcttccttgtcttttcttccactatcagcccctctgtttctctctgcctctttttttttgatgaatgttagaagtcacttaaagtacataacatactgcctaccctcagtaatcacatattaagccaatgaacagaggaggcttggtgcaagtgctttgtcctaaggcaaagttcatggaagcacagatgggcaaagatctcttgggcatctagtagcaccttttggtaacactccatctgtgctcagtgatttcagggtggtttgcagaggtagacctttgctgtgtagcacacttatgcatatcttttgtatatgagtgatacattttatcatgttcatcagtcattttaacttcactgaagcaccttgcaccctgctcttccatttgcctctgtattccattctgttcccactcacttttcttccccattttggatctttctttctttctttctttctttctttctttctttctttcttttttttttttttggttttggaggcagggtcttgctatgcagtctgaactggctttgatcctcctacctgtccccacagtgtgagctgtcacatcctcgcacctggatgaaacaatggccatctggagtgtgtcctgccacctaccacagtgctttcctttctggctgcaggcttggagcacttgtggctctgtacacagctagcttatttcagacctggtcttttgtctggtctttgtggacacccttactttgatgtctgtgggggctgtgcctcagctctggctttgtagccagtgggggctggaatctggcatttgggtcttactttggcatacagatcactaatgagcctttcccttagagaagtgtccaaagcgtgtgaagttctgatgtctaggtgtgactgtgtccttctcaggacctgtcctgctttggcagagcacacacccttgagccacatctttggtctgtgcatggttcccgagccttacctaccaggctcatctcatctcctcttgatggagtccaccaaggacatgaccctcttcattcatcatctctgaagatgcctcaggccaggcagcgatgccttctagccacaggtgctctgcagcctgagctttttgtagacaagttaaacttgcccgtgtttcacaggaaaagctcagtaacttggagatcaactcgtttgcacagggcccaatgttgggttttaggttgaggctggaaggtacattgttgttggtgctactgctgaggtctgtgatcccacctgtctctcacttcagcttgcaggtctcgcccctgctgatcagatccctgtctactgagagccctgggctgcatcttacttgttcatcacttagagcccgacctt

SEQ ID NO: 23571 - DNA, 1064 bp, Mus musculus
agctgtggctacttgtcctagcttaggccttttggaccccagagcctccccactgcactgtcttatggctgtcttgtcccctccggttcagcagtagactgctgaaacctaacctttggggcaggtcttgcttagacatttgttcagtgatacagatgcccatgctcgggtcagcatggattcaggggggaaagcagcgaaggtgacattgcctggccttgttgggctctgtaggtggccagagtctgacctcacaactgtgcttccagcactgcctccccgaggacctcaccgcctcacctctgctgcccactgcactttgccccaaagccaggatggctccccgaggccaggttccatgggactgaaagtttcttccggaggctttgtctgcctgttcccttgtatagccctcagatgttcctggaatctttgtgttggtggcactggtttggcttatccgagcagctctgccctgggtctgagcagttgggaggaagccgtagggatggatggctgaggagaaagctgctgcgagtgatcgaaatgaggtctctagggaaggactgatcttgcacggtgcaggggaaaagttgaaagttgcttcagggagcatgcttgctagcttgctcttctcagtgatggatttcatcacctcacagcaacagcttgaggaagaaggatgtactgtggttcctagtttcagagatttcggtctccgtggtggcttggcccccattgctgttgagctagtcacaatagggaaggctcagtgaatcatttcctggcagccaggaagcaagaagggaaaagagggggcaggaataagaccatcaagtcatgaagtcattgatgtttgttgtgatcattattttggggggtggggcgttagggacaaagtctcaacatgtaaccttggctggcctggagcttgctttgtagaccaggctggccttgaactcagagatctgcctgcctctgcctcctgagtgctgggattagaggtgtgcgccaccgccacacccgaccccagtcagtgtattcattcatagattagggcagcc

SEQ ID NO: 23572 - DNA, 1214 bp, Mus musculus
ctgaaggcattgtgggcctggcctgctaacactctctctcattgctctctcctgcccatctatctgcatgtggctgctctgtctagctgcgcggtggtcccgagtgccggctgtgtaagtgagcatgcccatcccatgcctctcgcagtccacatgctgtgcctggctgcgccccctggctgctctgcatggctgtgtggggctctggtgctactgacagctactgaggcaatccttggacacagtgaggggtcgagatgggggattgggtgggggtgctatgggagtaggcttccggtagagcagccgcgcttccggtagagcagccgcctcgggctggccttccctccagccaggcaggctggggcagggctggaagtccaggatcctggcaggtgaggctgggaagcgaggtaccatctctctgccttgtgtgtctgcctgtgtgctactgcgttcctgtgagcaccgctgcatgtccacagcacatgtagtctccattgctgctgtggtgtgctctcctgtgcagggagactctcttcctgttaccgtgttctgttgccttgcacctcctgtgggtgtgagccccgcctggtgtttgtcttccgtgttcatggacctgtcacgtcttgtgccactgccagcctttaccatgactccgccgtgcccgaaactggcctgggttgctctgggtctcttcagacttgagagcagtatgcggggagtggtgaagatattgttcaaattttatagtccagagcatctgtggatggaacccacgcccagaggctgtgttagaggctggcagggtggggcaagcagcttccgtccatgagaaaagtttcctttggtgaactgcccttggggcctccatggagcgcagtgtgtggggacagtcttactccttagaatccagtcagtttgagaatcccccagagcaaggcactggtcctgacctgacccaggatgtttgtgttttcaaaaagaatgaccacaggatattcctccagccctagacctcttggctctgctgccctctctgtccactccgactttattttccatccctcacctggccctcacccactctccctccgcaggctcttcagcagcctcggtgagctgagcaccatctcagcgcagcgcagcccggggggcccgggcggaggggcctcctactcggtgcggcccagcggccggtaccccgtggcgag

SEQ ID NO: 23573 - DNA, 2409 bp, Mus musculus
tctaagcattacacatacctatatttgtctattggtttgaagggagaagaaagtgggtcgaagcccaaatggttatatttagaagatacctcagataataaccattgctttgcatacagttttatttaccagtgccatgtcaatatcagataagttcttacatgaaacatctagtcttttagatatctgaaagtgcttgatacatttaaaggtacaggtaatagaataatattttttgtatatagtttttttaaactggagaaatgctgtgtgtagaagtagaattgttaacccgcctctgagaacagtgtaccggctgtgcttgttcagtggatcaaggaggtgggagggaaggaactgcaaaaagattccatttgtgtgctagacatttctagcttacccatccccctgtgtgttgtgtgcatctcatgtaactttgctatgctgtatatattgtacatactggacaaacgagtcctatgatatctagtctctaggtattaaagaggttgccaatgtatgacaaaagtagttagtaaactcacacattctgtatactctgttagttcatagcaaggttgtcttctgaagagttgtgaaagtgtatcatccaagtgacgggtgcctatgtcacgggacacaagatgggctgaaggggaagaaaggtcggagaccagaatgtcctcaccagaagacacttggagatctaactagttacatgtgcgtggtttcagtactactatgtatataggggacaaattcatgtcctcatctgaaacatctagtccttctaggtgtttagaagtgcacaaagtatgttaaaagtagacatagtaaataatacgtgttgtagattctgtttaaactcatggtgaagtgttgtcttttggaactagaaagagaaactgcttctgagcaatgcagccttgcttgtgcaggtctaggagggaggaagaaagaaaatgaatgaagagcctaatgctgatgcaagtttggtaatacaaggtgtcttagtcagggtttctattcctgcacaaacatcatgaccaagaagcagttggggaggaaagggtttattcagcttacacttccatactgctgttcatcaccaaggaagtcaggactggaactcaagcaggtcaggaagcaggagctgatgcagaggccatggagggatgttctttactggcttgcctcccctggcttgctcagcctgctctcttatagaaccaaaactaccagcccagagatggcaccacccacaaggggcctttcccccttgatcactaattgagaaaatgccttacagttggatctcatggaggcatttcctcaaccgaagctcctttctctgtgataactccagctgtgtcaagttgacacaaaactagccagtacacaaggttatccattgttgcttatatctgtgcatcttactttgcaatgtatagaaaacataggtccaaatttgcagcacccagtcttcctagactgtaaaggtgccagtgtgtgacaaagtagagttagtgaaaagacatatttatagattatgttaaaatttgtaggaaaaaaccttaaaaccacttaggaagtgttaatattccacaaaaacatgacagatgtatacacatgtcccctgggggggagagaactggaagaggggctggaccagaaccttgctgtttagaaggcagtctgagatggcatggtgtattcttggttatcaaaatccctgtgtagtgtggggtttttaattggtgaatattcacaatgtggggaaagcatggtacatactgtataatctcaattacccaagtgtgcgtacgcttgcaggatctagaacaacacatcgagctgagctgcttgtgactgggtgactttgttcttgctttcttgtttcctgtaatgcatatactaaaaaaaaataaacaaaagcttctttaaagaaaaaaaaaaagaaaagaaaagtaagaatgaccatggaaaatggttctaaatatttatttggaacaattaatgtgaaaaatttttaaatgtgagtttttaaatttaaaatatttcagtccgtatctaatgacaagacatagaaaactcataccattctgatcaaaatgtaatctatcactccatgcttgtactgttttctgagtcttcgccgactgctaaatttatcacggccacttaggtggaccattctctgaggcactccaacagctgcactctctgcattgctctcttttttcttcagtttgaaatagttaagagagatttagaccctgaaacttctagcagtctggatgacctctgaaaatgtaattaataaaagcctctcaactcattatttcttcttcttcttctttttcttcttcttcttcttcttcttcttcttcttcttcttcttcttcttct

SEQ ID NO: 23574 - DNA, 2772 bp, Mus musculus
aataggcattacacattttatgtgtggaaaagagtatttcagagacatgaagttgtcaaatatttattagttccagcctacatttttgctggttgggctatagctgactctttaaaggctaagtcaattttctggaatttaatgttttttgtatgcttggttgcttctacagttcctcagaaactactagaattccgttacttcattctaccatacattatttataggcttaacatacctctgccacccatatctagactcgtttgtgaactgggttgctatacagttgttaattttgtaactttttatatctttctgaacaagacttttcagtggccaaatagtcaggacatccaaaggtttatgtggtagtggtaggaataatttgaactttaaaagactgtttctacaacaagtaactgggtaaatagaagtggaatttcttttgagtaaatccagggaagtgagtagaattaagtttgagactagcctaaaagctctgaatagtaggaataaagttgcttgcagttgtcgtgagagtcttttcagcgtttggggaacttttctgtgtgtgtatagatttagggggctgggtaagctgtgcagggcttgaacttactcaccaactctcttttgtaaagaacagcaagtaagttgaaaaccacttacaaataaatgacccagcagtatttctgagtgaaattgccagatattgtcgtacccacagctccgatcttagaatagatgcacatatgtaacaaatagtgcattggaggctttgggctaagagacaggtgttttaatttagggcatagaagtgatgatagcatttgaactaattccttatttgcagtttatgcaggccaaagataaactgtgttgattataatactttttatggattatcttctgaaacaatgccctgttagttatccaggctcctacacaaaaccagccacaaaccttctggcttcagggtttctcctcacatttgtataagggcacctaaactcaagtgttggcaacgctcacaggagctgagagtccattgtccctgtttgccccactccagcactgcttagaggggccttgcttttggacaggtccctccagtctgtctgtgtctcataggactgtctccactggcttcttgtgcagttaatgccattgggtttagggatcctctgattcagggtagcgttatctagagacccttgatattatctagaaaatgtttaaagtaaggccccattcataggtctcacatcattttggtgtggagtgggagggggagggggtgtatgtgataagatgcccttgatgagagcttttaagtaaaagtttgtttttaattgagaaacaacaaaaaagccaaatggccaaggtcatgtaatttacagttgtccctattattcaaaaccagaagaactcaaaaggtgagagaagtcattggtttagtttcattttataatttagtgagcagtactaggtgtgactctggggtttgctttgtttcgctttcagttctgtgctactgttataaactatgtttctgctttaaattttaaaaagaattatcaagtatttttttattaggcgtaattgactttgttggctagttagtgctcctaaggggcttagtggttaaaggcttgggccaccccttgcagggacccccgggggggttcctggctcctagggcagcacaaccacttacacatccacctctagggcacagagtgccgcctctggctctgcagtctcccgtgctcacctgcataaaacctccacccatgcgcatttaagttagaaatgctaacaggtcattgtagaccatatcacccgctgaaggggttgtgggctctgcattctccaccacgcttccagtaggatcttttaaagccttcgtgagaacgcccgtcttttgcctgagctgctctgcgctcagtactcagtttcagcagctctactttatgtgaacatccacaggcctagcctcctctcccagatctgactttgtgtgcagtgcagtgcgtttgcttacatttgtgctttctgtggatctgtgctttccccttatggctgcatctccccaaatgatgtggaagtagtggtttatatttacacttagtaccttatcttggaagaggaatttctggtttcatagacatctctgtttgtcctgttacaagatgcccactataagcaatgccgcttacttctagggaatggtttagggtacgatgtttccagtgtggactggactgactgggcgttatgatcatcacctttgtctagagacgacagaagggattcacagctttcatttataattcctagagactgaacatatcttttaggtccagttcaaactgtattcagataaaatcatgtttattgtcttagagcaattagaaagtcttaatgtacataatatttttcatagaggaaattaaataagatgtagaaaaaaatgtccttgatttttggctccagaataaaaagacaaattgttgaaggacggttgtttgttcctaatctcaaatgagaatgttaggtctgaactccagttagtacctggtgtgactcctactgtgtttcaacagggattcatgctgtactccacatccatgaagcccataaacatgctatgtgatgtatattgagtaaactggtattgaatggcgttttcaatatagaaggaagcagatattctagaaaagtaccttataaccaacttaatcttaggaagtaaattgtgttttataataa

SEQ ID NO: 23575 - DNA, 1847 bp, Mus musculus
aagttcttacagtcacttgaaagcattgttcgttatccattgctttaaatgtagatcagaggtcagcaaatagtttttaactcacaaaaatacaccttttctttttaattatgtagtcttttcaggagaataacccccccccccccaaataagttttttatttactgaaaatatttcatcgggaaagcttcagtgacttgagagagagtagatagaacatagtgtcttttcagggggtttcgcaacctgccaatttaaatgtggatttactgcagctaatctttatattctttggtaagtcaagttcagaaatctcttgaagtattctgcctttcatatattttgtttctgaaataaagtggacattttgctgttgttatcctgtttttgaaattgagttatacaaccaaaccaaaggtggtataaaatttcagtgtactggcaatgcagtagtatttatcttacatacatttgtagttctttgtcaatacaaaaacgtctttgggtttcccctgtagtgatgaacaggaaagtagtgtgtaataaaacttgtaatgaaatgtatactaggtgatgacagtgtgctacgctttaatgtattcctgtaatgtaactttttctactagtctagagtaaactttttatagttttgtattgttttgaaccacaaagatttataattcgcctgtgttaattattgttcgttgttcacgaaggggctcatgatccaggctagcctggcattcgcaatgtagccaagagtgaccctgaactcctgattcctttttgcctctccctctggactgctgcagcacgcctcctttgtgtggctagggatcacacttaggacctaaagctgctaggcaagcactctgccagctgggccgcatcctcggccctgcttgttgtactgtgaccggaaatgtttcctgggttacatgaagtgaagggaaatacgcaaccacaagtcatttgttcacgattgtgtctcagatgacgtgacctagcataccctgccgtggaactgttgtttaacctcacggatttggggtttgtttctgatagtggtaaaaggtttgaaagcaacctgtaccatctacatgtctcactgtttctcagttctcggtgataactaccacacacggagaaactgaggagagagagtgtgcgtttgtctaatattagagactaagcagaaaaaggttatttttctaatgttacaaagtagctatgtgagctcgggtttatgactaggcatcctgacaagaacctgagctcttagctgctgctgattgaccggtgggaaaggacactaaatctaccttcatttctgtaacattttagaaaaatggaaaatagaactccactattcttctaggtcagacagttgaggcacatacaaactatctcttccagagcagacaatctttcatctcccatgtgtcatcactgcctcagattgtgagaacacaaaaaatctacatcgcaggctgaagttgacagccctatttacgaggaagcaaagatctttgatatccaatagagatgtagttgcttacaacttaatttctcaaaagaactttggtaataaatggttgttttaaactgatctgtgatttttaaatctttcttgaaagaacttgatctttattttaaatatgtgaagatatgttttaaatgttttttaaggttttgcattttgttacattaaaaactgcagatgtttgactctgaaattgtgattcatgtcatttaaactcttgaatgaacctatttataagaataaaagcttttaaaataattgttgaatatattttattggtaaattaattcatattttgtaatat

SEQ ID NO: 23576 - DNA, 1236 bp, Mus musculus
cttccatatgcaggagtttacaatgtgcaggcctaggaagaaggtgggttgtggtctaagaaggaagtagagtaaatacttagaataacagctgagttactcccatatacaggaatctacaatggcctagggagaaggtggattataaaatagattaaaattggaactatgggcctccccgtgacccggaagttgtacggctacgcgactttccctcccacaaaccctcgcgcccttcctttcctacttgggcccggcagaatggctcccgcaaagaagggtggcgagaagaagaagggccgttctgccatcaacgaggtggtgacccgagaatacaccatcaacattcacaagcgcatccatggagtgggcttcaagaagcgtgctcctcgggcactcaaagaaattcggaagtttgccatgaaggaaatggggacaccagatgtgcgcattgacaccaggctcaataaagccgtctgggccaagggaataaggaacgttccatatcgcatccgagtacgcttgtccagaaaacgtaatgaggatgaggattccccaaacaagctctacacgctggtaacttacgtgcctgttaccacattcaaaaatctacagacggtcaacgtggatgagaactaacctgctcgtgtcaaataaagttgcagaactgccaaaaaaaaaaaaaaaaaaaaaaaaaattggaactatggcaagggaataaagcccttgaccctggcttctaagaataagctgaccttaggtagggctgatttttattccagttgtaaacactgatttttatcccagttgtaaacactgcctggttcttgttagcttttatgtaatgcatttctctgttttgtgtaaagagtccttatgtatcagatgaccttaatgtatcacctaacttctttgttttcttctgtaatataattctgatgctcgctttgagaaatcacattcagatccaacactctctcttgtgttcctgtctgtttgtcacttgctgactcctgagtaccgggaccctgatttctactgcgggctgagggcccgactgagtccagcccacggcactttactttgcattttatttatatttattttattctgtggtgtgaacgttttgcctgcatatatatgtgtgtgtgtgcctggtgttcactggaggccagaagcagtcatcagatcagaatgtacatagtaggcttataatgggaacttattctcaaatgt

SEQ ID NO: 23577 - DNA, 1099 bp, Mus musculus
ctggggcatctggttggtcttaagtccttagctgagggcaccctgtttctcctgtctcctggcctgaatctttagtatctgggaggcttctgtgtgctcctcctacacccgttatagtcactgagagtacagtgccagcgactcacttctgcagctgttgctcagtctgcctgccccaaggcctttccagccgaggtcaccaagtcagagctggtgattgcacaacacacccgctgcctgtcgatttcagtatcttgtgctcttccatactgagttttgacaagctagtcactccccttttctttaaaaccccatttctttttgtgaggtgtgctggactatgttagctttggtcccttcgaggtttctgtgtatcttgctacctttctggctgcttgaggtcttggacctccagttgttctctaattatctcatccactgtctttctaaaatattacaatcttttttttttaaagaagatttatttatcatgtatacagtgttctgcctacatgtatgtctgcaggctagaagagggcatcagatctcattacagatggtcatgatccaccatgtggttgttgggaattgaactcaggacctctggaagagcaaccagtgctcttaacctctgagccctctttccagctcttaaaatacaaaattcttgaagctggctctatggtgtcccccaacaacacagttgtatattagatatagaacaatgatgttacatttattcttctcttacagattgcatccctactgtagattcccctctctccactcctcccagtccctcctcccaattacccctcccacatatcactcttcctctgtttcccttcagaaaagcctaactacccacccccggatatcaactaaacgtggcataacaagttacaataagcctaggcacaaaccctcatatcaggactggataaagcgatccagtaggaggtaggttccaagaccaagcaaaagaatcagagaccgccgttcccactgctaggagtcccacaagaataccaagctatacaatcatagcatatatgctcagatccatactggctctgtgattcacttcagtccctgtgag

SEQ ID NO: 23578 - DNA, 1209 bp, Mus musculus
ctggatatggtctctacagtttctccctcccctttgttgggcatttcaactaatctcatccttgttaggtcctgggagcctcttgctttcctggcatctgggacttgctggtggctacctctagttccccatcccccattgccacacacctctgttcaaattcctgaccctctgtatatcatccctgtctcctcccatacctgattctgccccctctttttctccctccccttcctctcttcctcccaagtccttcctaccctctatctcctgtattttgttcccccttctaaggactgaagcacccacattttggtcttcttgagcatcatatggcctatgaattggtattcaaattgtccaaattctcttgggtattccaagcttttgggctaatgtccacttatcagtgagtgcataccatgtgtgttcttttgtgactgggctacatcactcagagtgatattttctagttccatccatttgcttaagaatttcatgaattcggatgtgagggcgatctggctgcgacatctgtcaccccattgatcgccagggttgattcggctgatctggctggctaggcgggtgtccccttcctccctcaccgctccatgtgcgtccctcccgaagctgcgcgctcggtcgaagaggacgaccttccccgaatagaggaggaccggtcttcggtcaagggtatacgagtagctgcgctcccctgctagaacctccaaacaagctctcaagaatttcatgaattcatcatttttaatagctgagtaataccccattgtgtagatgtaccacattttctgtatccattcctctgtggaaggacatctgggttctttccagctcctggctattataaataaggctactatgaacatagtggaacatatgtccttattacatattggagcatcttctgggtatatgcccaggagggtatagttgggtcctcaggtaatactatgtccaattctctgaggaactaacagatttccagaagggttgtaccagcttgcaatcccaccagcaatggaagagtgttcctctttctccacatcctcgccagcatctgctgtcacctgagttttggatcttagccacactgactggtttgaggtgaaatctcagggttgttttgatttgcacttccctgatgactaaggatgttgaacatttctttaggtgcttcttggccat

SEQ ID NO: 23579 - DNA, 2537 bp, Mus musculus
atgaaggaacagtatcggttgtgatggtcctgtatcctctgggaatattcggaagacgggatcagtacagttgttccagcttctgtagttcaccagagacagactgagaaggtctaaaataccatcaaaaggatctgcgcccaggggaggaattgttaactagctcagtactcagacaggttgagggagcagcagccagggttccttggcagaacgccatcgtaaaggcagcccctgtggacggtgtgcagtgtagctcgttaggggggaccgtgagggggaaccttatccgttggctgacgtgatatgagagaacttgccaaagtcagctgtcctgcatctcctacacctaggaaggagtctttaagacaatttttaaatgaagagattaaaaacttacatcaaagtagagtagggctatacctcaatattcagagtgcttgctttatgtggtcagggcccggcagtacagaaaataatggaagatgagaagaggtaagagcctcgtgcagcggctctcactggtcagtctgtcacccgtcagggtcttgctacatttacttcatttattcctttcttatgttaaagtctccggcaggcatcgttctgtgtccctgcagtgagtgctttggtacttacaagtgactagagcaactatatcatccccagcaagagcagcagctggcctttggttccagctcctccccagtccttaacccatttccctgcgtgtcttagctacgcatgggacatggtgattctgctttaaatgagttcctcagaaggatccgatatcagctagtttaggaagcatggaaattattacgctatctttaaggtggaagttaggatgtcacagttattggcacaattgctaaattgtaagtgctgttttggatagaggaagcagtggggtttttgacagagggattcatatgagtaagtcccttcagatgccattttctcagtagctgaagactcagccccacgtgttccactgtgattgactgaggctgtttaaagaaaggatttgaaaatgcaccaaacttcatttgtatgaaaagagtttggaaaaactctagaaagtgttttaagaaaatgcagttttccttcatgaagacgtgctcatgacctacgccacgcctgtcagtgtaatgaggagaacagatggggactggcatggactcccctctttgtgggcttgggaggtgtgctgactgcagtgccaaagaggtgaggcctggaaggggtgactggaggaacgcgtggagctcctcagccatgccagtgttgatggagcccggttttaccgcacacgggctcccccgaggctgggagcattctggtttctccggtgtagatttgttgatggtatgtgggaggaacagatgccaaggaagaggaagtagagaagaaaaggaagatggaaatgagtagtcaaggaagagggaaagagagagagggttaagagaatggcggaaggcagagtgagaggaagatggaaggatagtggggagacaggtgcacgtggaggaaactgcggaaacatggggtcccctgcctaggtcagtgctcgctgtgcactgccagaaccagccttgtatgagccatcgatgctaggcatgtttcttggtcaccttgttcactggtcctttagtggtagttgtcttttttttttctttccctgtggaaacacatattttccattttaatgtcctttagaggaggtctgtgaagggaactgcattgaaatgtctaaatcgcccactggttttccctagcatgataatgagaggccagtctggccatttgtttgtttgtctgtttgttgtttttaagtctaaaagatatttccagcttttatatgaatatctcctctcagggagtactgaaatgttataaaataatccttagcttgtggcgtgacctggaatggtggctgggacaagggttacgtctgctttttcctcagcggggatactttcagctgaaccgttttcagtggactcaagaggacgggagacggtagacatagtaaaagaaaaaccttaaagaatcgtcactgtcagacagagtggcgcagtcattaccagcacttggtgccagcacccacatggtggtccacagctctctgtaactccagtgccaagggatccaacacactcttctaacctctgtggacaccagacacaggtggtgcacataactccacacaggcaacacatatatataacctaaaagcagtaaaaaatactcagtgccctcttcagttgcttgtagtaaatagcacaagcacagccaacctctttgagatgtttttagaaagatggttgagctgtcttttcaaaaatgtttttggttttttggaataaagaagaaaaatagagtgtgcaatatgtcaaatgtggggccagttatccatttattaagtataatttcaagtgtcttaaagtaataatcgccttactgcattttaatattcaatggaggtagaccaaggtgactggttttacagtagtcatctttttctacattgc

SEQ ID NO: 23580 - DNA, 1205 bp, Mus musculus
cctgcttctttcgctacacttgtccacagctcagagccgggcaatctgtaaagaggaaccagcatccatctcaaggctcggcgtgaaggccgggagagcgccagcgctcagctccgcttccgggtgcgctgcggaggcggagccttggccgggcgttggggcgtggcccggaggcgggacaataccaggcaggggctgtggtttgaaacagaggcggggcctgcgccggatgtgggaggggctgtgagcggggcggggcatggcagggctaggggcgtgtcgtgtggggtgctgggcttgggcggcatgggaccgagtgggacctggcggggattcgggcggaggggcggagcggggaggggcgggaaccaggctggtcacgctgcggctgcgcgttgcgattcttcgtagttcgcccgggcgggcgcggcggcggcggcggtgacggcggtgacggcggcagcggcggtggcggcagcgcgggccgggatgcggcgctacctgcgggtcgtagggctgtgcctggcctgcggcttctgctcgctgctgtacgccttcagccagctcgcggtgtccttggaggaaggagctgccgggggccgcaggccgcaggccgcggtagtttcctggctggcggacggtggacgcggcacggggagaggcgcgggcagcgcgggcccgggccggacgggcaggtatgagccgcattgccgggagtggaggtctgggagggccggacgcgccgctccatcaccgagcactggctggctggcttcagattcagtgttagaccagttagaaattgaatcgctttgcaactttctgaaaggttcgttggaagtaagtggtgtcccacaaaatcctaattacactgcggctagtgggattccctcctgtttccatggagtcgaagctgagtaatttgagaatcaggctggcgccctagttgagccctccacctcccaggtgtctaaattttccgcctaaatcttagctttttatcagtagccgtagctaaagaaatctggatgtggcataaagcgagctgtgaatttttattttgaaaatattcgtttttttggaaacgtaaaggaagttcagaaacatgagtgatacttaatatgcttatatctatgggaggagtaaggtatgaagaaatcactttaaaaaaaaagaaatgaatatttataacacagcataatgag

SEQ ID NO: 23581 - DNA, 1182 bp, Mus musculus
acatagttaggcctttcttatacattaaatttaccttagggatggaaaaacgctcttccagaggccccgggcatgactccttgttccggcctgattgtgtgcagagggagtgtggggtgggaggcaacaagctcacacgtggagcacagatatacatgcagataaataacactggtacataatacaaaaaaatgcatattttaaaaaagatttaccttagtgaatgtcaaacaaaattaaagataaaaagtaataatcagtgtaatgtttgctgtatcctaatacagttctcattgtattatttattcctatttatcatggtttttacactggcccttgttgggttcttgaagttctatgtaaatgaaattgttagtgacgggtgtgcccttcatgtgtgaattgctacttacaggaattctgggttgggtcttatgtttctgttgttattgttttatttatttatttatttatttatttatttatttatttattatatgtaaatacactgtagctgtcttcagacactccagaagagggaatcagatctcattacagatggttgtgagccaccatgtggttgctgggatttgaactccggacctttggaagagcagtcgggtgctcttacccactgagccatctcaccagcccctgttgttattgttattttgaaacgttctctcctggtgtagctctgttcctctggcttttgcagttctccgggctcagccttaggttaaagggcctggcactttctcagttgtttctgcaggagtgaaagggggtatggttgctctcaatgcacagtgcttcctgctgttagaggcctttaagaacactaacgaagacatctcttcatttcccataggcgttagacaaacccagcaggctaactgagaaggaacttgctgaggctgaaagcaagtgggctaatgaaacactagagaagtcagacgaaagtaacttggctgaaatgaatgagtttgaggtatgctttaatttcccctctgtgtttcacacctgaatgttttgtctgggttttaaactgatggaagtcgtacgtggtaccacacacctgtgatcccatgctgtaggagatgcagtgcaggcagaggtcatcatcagatggtcagggtcctcatcagagcgtctttgaggccagcctgctgttcatgggtt

SEQ ID NO: 23582 - DNA, 1132 bp, Mus musculus
cagacagtgactgccatgtgagtggttggaactatccttaacctcgggagtacttggtattcttagctgctgagccatctctccaaccactaatgtagtagggctttaaaacctatatctttatggttttctgaatttcataggcatctgttttgcttccttttcatttttaattttactaatttgggttttccttcctttctcttgtttaatctggcaaagcatttgtcactttttaattttttttcatagaaccagctctttattcttttagtttgtgtctcacaacaaattgagaaaagtagcagtcatgtcctctggccttcctcatacacgctcattatgtatcatggcagtatacattttcttaaaattgattaaatagcatttccttttaatataatcttctcttagtgaccgtatacacagtcccaaatgctctatgtccttcaagaaaataaccgaggacttcctctgttttcaaggcgggatccacggcacccttatttattgaccagacagaagaacccgagtcaaacacagtagatggtacagaactgtatgaagacagccagctcagcaaccgctctaaagccattgcctcgaaaaccaaagagattgagcaggtgagaatgtcgtcctccacaggcacggccgctctgttctgtgacgtgaatgtttgcactgaataaatagagtgattgtcttttccacttgaaactccagaattccactgaatgtgtgtagaggccagaggacagcctcaggtgttccgcgtgtctcttcttttctgagacagggttctgtttagttcagaaccaatgaagtggctacccaggaagacccagagtacactggtctctgtctctgggtctttcggttcctttgtgtttcctgttggggtctcatattgtagccttggctaatatggaactaaagccaccttcagactcactgcagtcttgctgcctcagtttccccaatgctaggtttttcgtttgagccaccgtgtcagcatttttttttccctgtaaattcacttcatgtggtggcctccttgtgtttctttactgtaagagagacttcccaagggcaggacttgtgctgcctagtggtttgtctctaccacctc

SEQ ID NO: 23583 - DNA, 1196 bp, Mus musculus
gtcacaaccagtcaactcatccaacaaacatctgtaaggacgccgcgcatctgtctgagggaagcactttgcctacaaatatttaaacaaagccgccaaacaaaaaaatcacgcacgcacagatgtgtacgctacatccatgtatatataaacacacatgtacatgcgttgtgtgttctttaataaatatacttttatttcaaaatatgcaaactttatcactagcaattagatacttactgcccactaattgtgtatttcctctacactaaatgtgtgtgtgtgtgtgtgtctatacacactgggtgttgatggatctgaacacacagaggatggcagtcagaggacagctctgtggaactggttctcttcttccgccttacatgggctcacagaactgaattcaggatgtcaaatgtgtaataggatttgactgcttaaaaacagtgatttaggggctggagagatggctcagcagttaagagcactgactgctcttccaaaggtcctgagttcaattcccagcaaccacatggtggctcacaaccatctgtaacaggatctggcgccctcttctggagtgtctgaagacagctacagtgtacttacacataataaataaatcttaaaaaaaaaaaaacagcgatttaaggactcaataaatttatgttgctaaattttactaaactcattatcatgatcttgaaattaattaacaaagggaggtgtgatggtgtgagttacaaaacctgatgcaggagaaccatgcctcagttttaggccaacctgaactatagaacaggttcaaatccagcctgagacccagagcacacagggagggagggagggagggagggagggagggagggaggggagggaggaagggagggaggctgactgaccagttccaagaaaattaaaacattttacaaaatgatatgacacaaagtacaatatataaaacccatatctgtgatccggtaaggagctgcctgccaagcctgagggcctgagtttgagctcatatggtaggagagaaacaactgctctggattccacacaagcatgtatgcatggatacatacatatcacactcacacacacacacagttatgaaattggcttgttagcaataaaatacacacacacacacacacacacacacacacacacacttttataatgatcacatctat

SEQ ID NO: 23584 - DNA, 1265 bp, Mus musculus
ggatatccctaaaccacatacagattatacttaagtagaaatagaagaatggttaattttaatgagccctaaaatagatgtgtgaagatttgtattatgccattttgaaaatttaaaactaattgacgacatgttttttgttttgtttgttttcttaaattccccaagtgagaacacttgtacgttttggcattgagtctttccatcccttttctgcgcacactccccttctgagcgtgtgctgcgcaatgccggtcacttcagtaataccacaagcgattttccttcttcccttccactaattctcagctctttaaatcaagttattaacaagcatacgtataaaatttgaggagcttccaaggcaaaaaaaaaaaatgttcacttggtagaaacattcatttaaaaagagaatcttactgataaattatttaagtgaaggcccagccagtcatcctcttccttccactcacactgggccttcgaagctgtgtccagcttgccgtccgcgctgttctgccaggctccacagtgttaaatgtttccttcatctttgtttttttttaaatgccttttgacatctaaaattcatgtgtactagagtatgttttataaaatgtttttgattctacggagacatgtttgtaagttatccattgtttttcaatagacctgattcatatgataagttctcattgcctcaccataaggccttgatgatcaatatggggaaagcagatactgtaaatgcaaaataaagcatccgatactaagtaataaattcgtctcctctcgtttttcctggttcctgtgactgaagtgtaagcgttttcatctgtgcctgcacgatgactctagcagtcagctcaccactcgacagccaggtagaagtcggaggatcgaggcgctgttaacttggacggtttctggaattttgatgttacagaagccagtcctcatagtgcctggcccagtgacactaagtaattacagagctgaacttacgaggctgaatgtcttcttcctgagctgtcatcactcctgcacagcagtaaccgggctctctgtaccagtctggttcacagcttggcatgctataggtattggtgcttgtcagcctaaagctgacttcaccttcaagtgaaacttgagaaataggattcattcagactgagaggtgtgaggagctcagaaggaaaggttggtatgtccctttgtggccaaagtcagttttcactgctgtgataggatttctctttttaatc

SEQ ID NO: 23585 - DNA, 1226 bp, Mus musculus
ccagaataccagagtggaagctccccgtgtaacatacaccatccgggatgaaagtgagattagccccgagactgaggaagatggcttccctgacagatacctagagtgcagagtgtggcaaagccttcacggagagctcgaaactaaagcaacattttctggttcacaccggagagaagccgtatcagtgcacgttcgaaggctgtgggaagcgcttctccctggatttcaacttgcgcacccacatccgcatccacaccggggagaggcactttgtgtgtccttttgatggctgcgagaagagctttattcagtcaaataaccagaagattcacatcctaacccacgcaaaggcagggaagaaatgctgaaggtggagacagattgtcctcaggctgggtagtcttaatgacagaggcactggggatacacgcattatgtacagattgttatttgtagggatagattttatggctaaaataattttgcaactctagaaggcatgcttgtattttgtatttacttcattatacagttttaagacctctttttttggtattccatggcatagttccaacaggaaagtcaatggtgaaagcataatccttactatatgagctattgaaggggatggggacttttgcatacgtcggaaaatcagttatttttaactatgcagttcctaattgcctagcttttacctttagaaatatgcttcatggtaaatttgataatcctaaagaatggccaactttggctgtagtcaacaaatgaatacatatttctaaattttatgttttgatttttgtttttctcattgtaccaaactatattaatcatagttaaatgtgaatagttacaaaaaagttgatccatctgaagattttagatgtttcaaaataaaaggaaataaaacactaaaaaaaaatctagggtcaaacataatctcaattgtagaaaaagcagattggtgtatttctattttgtctttcaatgcaggaaataggagagagtctagcagctaaggacatacaaaactaataccacctgggcagggaaagagacactccctgtctgtgatgcccagctaggagacatgggcaccttggaacagtactcaaagatgggaagatacaccatgattcttctatgctttgatccctctaatcacctgtagccagcacatcaaataagctgagtctgaagccacttagcaaaggatcctg

SEQ ID NO: 23586 - DNA, 2469 bp, Mus musculus
ggcgccggcgtacagtgcggcagttgtgaaggttccctgacgttgtttaaccccggtggtgccttcctctcttgcagattgagatagacaatggggatgagctgactgcggatttcctgtacgatgaagtccaccccaagcagcatgcacataagcagagttttgctaaaccgaaaggtcctgcgggaaagagggggatccgaagattgattaggggcccagcggaagcagaagccactactgactagaactgtcgtattaaatgttgcaatatagttttgtaaagtttccagcttttagtacaaggagaactgaaatcattccatgttgatagagttgggaggaaaattgtactttttgaaaaatagcacttttcacttctatgtattttttaaattaatgctatagaagactcatgatttttattttttagttaaaactagacaaggtttcaacatagtgatgtttggttttgtcacactgttttcataacgtgttgattccacactttcacataatcttcaatatttcccataggtgggccagttccaccaagcataaggtcttgctctgtagaactctgtagtgaggtctaacgttccctatgaagggaagcgaacgacgaacaaccctgagatactcacacctgtcgagtgtgttaaggagcctgggaggaggcgggcagctgattgctttgagcatgctcaggaagggctgtctgccgcggtggagaaaggcaaactgcagcagggcttcctgtccctcctctccattgtagtagcatcagatctcagaaacgaagttcacactgaagctcgaaaggtaccagacagtgcaggcttcccatcccatcccccgcccccctgcactggaagactcgcgtccagtaaggtctttgcagaactttcgagctatctatttccaaagtgagtccagagggctgacgccagacgttcatgttcgaaagccaaggatcgctcaaaaaaaaacaaaactaaagaaaaatgttggaagtttcaaggggtttttttttttttttttttggttttgtgttttgtttttgtttttgtttttctctttgaaaccatgtatcttaaagcaaattgtcctgttgcttgggagcaagtgttcagatctaaaattattgatttctactacttagtaggctgacacagataatacttagcccagggatcttgtttcagtgaataatgtctcagaacacgggttgtctgaagctttgtgttttcagttacaacctagagagtttagagcctcaagagttctttgttacttgaaatagagggagttagaacacttggtgatttcatctgctaaacctgctgcagagccataactgagaagttctgaagtggaccatcgtgtccaggacctggaagtcctcgacctgaacttcatgctgcacaagataatgtcagtaatgtacatttcatggtatgaaatatgaagcacccattgcagagccttattatctaatacacacgcctttcagaaattcagcgtgtattcacatagaccataagaggaattacaggctgatggaaattttttaaaatagatttgattattgtgtgttttgtttgtttacaaatacgtagactttactacttacatatgcaggacagtcgacagtgacgtcacacttgtttacgagaggtaaactttttagttgtacgtgtgtacagttgtcacacgtgccatagagtgctgcactgagagtcctggagccctgtctagaccatcaccacagctgccacttcaagcagagggagcactacgtgtcctggatccagagccagtgggggactgttctgaggcatcacgtgcaacgatgctctgaagcctagtacactacatcgaagtcaatgcacattccagaatatagatgtgatcctgtaaccctactaacgattaaaccaatgattgctgagaatcacgtatgcatttgttttagggtataactcattgtttacactatgttttaggtgacaatagatgtgaataacatccccaataaatttatatagcagtgaaaaattacatgtcttctgtggacattttataagtgcattttatatcaataaaatttttctctttgagttgtgtatgttggctttctggtacattttaagtgcttggataattttgcacagtccaatacctgctgattctatgtgatgatttcattagactgcttaattttacaaaattttaactagttgaaaacctcggcaagaacggttatgagcaccgagtgcttaatgtagattaaagttgctctacagaaatgtagcaaggatgaaaaatacatctagttgctgagttccctctatgataaaaagcaccgccttgagatagtggtgggtgcctgaatttccagcacgttccagaacagctttaggtacgcagaccctgtcttgtctcccccacctcatccctcaggacaat

SEQ ID NO: 23587 - DNA, 1120 bp, Mus musculus
cagaaaagtagggtttgagtctaaagcatgtttgacgatcaccacacagactctgttggagctctttgtgagaacggaaggtgtccctaagacaattgtctttcactggtatatattatagcagtgaataatcattctgtctgtctgtctatctatctatctatctatctatctatctatctatctatctatctattatctatctacatacctatctatctacctatcatccttctctgtcaatcctagaagtaatatagaaatgcttttgatttagagaaccttggatgattttatctgattggggaactcttgcttttctgtgtactgaggaattgtcttgtttttaggaaaacttactaaaatgtgaaatgcttatttttttaaaaagcctgctacataaagttctgggaaagagaaatacttgatctcgaatcttaaatgctttttttaaaaaattagatttgaatgcacgcaaagtatgaatattttgtttctttatggaagacctgtggaaagggttttgaagatttgcatggggaggattattttgcagagttatcaatatctaaataatttttgaaaaaaaacaataaaggtgtttaagcagtgtgtgtctaatttctaactcaaatcattctgttaggagaaatcagtccctttgtgaccctgaagcaggccagaattttatgtgggccatgtcttaagtgcattttgccacatgtagatgaatgtgtatatcttccacagtattgggattcactgaatgaaataaattcacaagggttagtgatttcaatgattaaaagaaaagaatggttggtaaatgtgtgttttcataattatttatgaggaagatgagagaatgagggaggacagaggagaggacatatcttaggcagtctttggatgccttccatccagctgccttcaccaggctcaggagattacggctgcaattccacactgctcgtcccccttgccgcctcagcttttgcaatccatttcctcacactgaagctaatgggaacttaataaaatgcaagtgtaagcacgttaataaaaatccatcactcttcaagtatttatgagttacctgatatgagtgatgtgagtggaa

SEQ ID NO: 23588 - DNA, 1139 bp, Mus musculus
aatagttacctgagatatagtctgacatagcaacctgttaatgtccttcttttctctaagcagagtgagttcccacaaaggaacatcttatggttggtacactgatacatcttttgcatgtagcgtagggtccggcatattgtaggtactggctctcatgagatgtttgaagtgagcatgcactctctctctctttattttcttaggcttgatgattgaccccagagtgtacgtctgcttgtcaagtgctctaccaatgaactctttcttcctttttgtaaaaacgtgtttgtttatttgttctgtgtgtgaatatgtatatacctacatgagtttatgtgtactgtgtcctgaaggacaaaagagggcatctgcttcccctagaattagagttacaggcagttgtgagctgtcagggggtatcaggtgtgcctttctaatccacacactgacactgtaacttatctgtttctcaggtttaggcaccatcctttggtgccagcatttagtttgctttcatcccctcctgccccttgcttctcagttctcatttttttgccagctgtaatcatattgtaattgtactgtaatttggatgagatcaatatccagtgtttactttattgcaactgtggaatcttctccacagatgaaccgtttaatatagtttgatttacttttgcctctcatggttaggttgcacggccaatattgacttttttttcattgttaatctttgatatagttatgaataattcaacctcaaattctataccagttgtaaatctctcttcgatataaccagccacacagggattctgtcaaggtcatctttggaggaagagcctctggaaccttccattgctctcagggcagagaatggtttccacttagcaccttcctgccagctcctttaggctctgtcttgtaggagggccttgctatgtgttgtctttcctgttggttgagtgttccatggacacatttcccagggcctcacagaggaaggctggagttgcagagatggaagagacacgtctgaaaatgccttcctcttcctggattttaactgatgaccttgcactcaaggatgtttctccagctagttcttgacaagttctatgcatcagactctgatc

SEQ ID NO: 23589 - DNA, 1235 bp, Mus musculus
ctgattcctcaagcattttggggtgattctgtcaggcctcttctcccacaccatccctttatccacaccatggctgtgctccatgaacacagatggaggactggctgggtttccaaagtactgactctgtgtgtgtgtgtgtgtgtgtgtgtgtgtgtttctgcacgcctctgtgtgtgcacacatctatgtgtgcattcacaaagacacacgcccactgtctaattgtggttgctggctacgtttttattataatatactctagcagaggccctactagattgtgtcactggttaaactattgacagcccttcagcccatattgttagcatctgtcaccccacttatatatcaccccccccacgaagtactgtacataatgtccacagcctaatgtgcacaaaagaaagaagagaggccaccctggtaggtgacaccaagcaggagtgtgccgtgaagtcacttgagctaaaagctggcggttccataaataagcacagctgacattgttgtgctgtgccagagcatctgctattgaagagcaattttaatttattttgatataaatggaacttgtgtgcagaacagcatggggaatgaggcaagctacactatgcgtattcctgcggcatatctcagagtagctcaattcagggggaaagttaccttgtcagaaaaacaaagatttctcctcatggttggagtctttcttcctccctgaagtatatctcgggtgattctgttaaaagatagcattgagttaaatgataccaggaaaatttaatctattgaaatctggcatgagaccaaatcttattgtcttacctcccggctgacacacacacacacacacacacacacacacacacacacacacacagattcttcacatcacagacattgagagagctggctcaggtagggaaaaagccccgaactgttttcttgctttacccaaatcttgtttgttagtttgtagtctcactgcaactaaaccgtctatgtccagaggactactattaaaaatcactttgagccaaaacacatgcctgttcttgggcttcagttaatgattggcctaacgtggatacaatttcccctttgtccctgcaagccgtttcatataccagagtcaaagcctccaattaaagctctttggggaaggtgcatgtagttctaaataggcttttgtcccagtacacttctgcctggcatagacacgggctcataactgg

SEQ ID NO: 23590 - DNA, 1600 bp, Mus musculus
ggatcatcgccgagaggataggaggaacggttgacaacagcgtgcggccaaaactcgaatgagcgggagctttaggcctggagaagcactttaaagagaattagctgtcagacgtgtgtgaagcactagagaggatggcattggaactcctaggcaggcggagtcttgcccatgcccatttctgcctgtgtcatcttccagtttcagcaagcagtgtggaaactggagaacagaaaactgatcaggcagagcctaaaaccacctacctggaggtcctgaacatgctccctcttttgataaattggaattttagtaacaggaaaaaaagccctgaggtgtgcccaagttctccccgggacttcgcttttctgacctcacgtgtgcagagctccttttctgtgcttaattttgcattttgccaaatctatcccagacctattttgtccggacagcaccatcaccaaagaccaggcagacctcagccttaatcgcctctgtgttatcaacaatagccagctcaggattgagtttggatgctgtgttaggtcccaggtaggctcaagagttcacagtatttcagtgtcttactgtacactccaaggaaggagactccgctgcgtatgaaacagcttctgtatcatttcagcctgtatttccacctccaagaaatactcgtcttagattggcatgaagatggagggtattgaatgaagaagcctgtccctgttactccacggtgacatttgctctctagcaatactcccagcatgctctgggtctgaccaatgttgactggctttcagatcttaagggtatataagatgaaaaggtagcagcccttgttgatctgaacggttaatttatctcttcttggtagatgataatcaaatgattgtaactgtctcgtcctcagcatcatgggccgggaagcccatccacttcatgagaacggacttagcagatgcagaagggtggcactaccaatcaccaagcgccttctgccttgctcgctgaaaaaggctggtggcctgacgacactgggcgtagtcagagcaacagccagctacccaatcactagccatatcctgtgatccctctgtggcagatgtcactcactgggaaccctactgacttctctgcttgccacggtgaccagcttccttgcccagctccattcgttgcctgctaactcgtttgtaatcacagctgggctggagacaagtctaccaagattgttgccctttgaggaaggaaaccctgggttgaatttgagccccaagcctcctctcaagccatcagggggttatgggaaaggctggtttatctgctggtggcttgctgcgaagcctcagcttcctagtgccttgccctccctgttgcttggctgagcagtctctctgcagcctgtgctccgcttctcctccagtccatctggaggagacatggcgatacctcgcacccttgactgatcacagaggtcagtgctgggtgaagaagggaggacctgcctcacactgtttggggatcgggccgctgctgactggatgggtgtggaatgcctcggtgcctaggaaccaagccaaggaaagtgagcggtttt

SEQ ID NO: 23591 - DNA, 1149 bp, Mus musculus
aatcaacatgattaatcaaagcagtgttctgggcttttgagtagcccagggggtcagtgtgggagtatttcccctcctcccttgtcctgggagtccagagcccgccatacagtgtctatctgtgctgagataaaaatgactaccttcctccctgagggatgctctcattgcacagctgaaaccaagtgccactccttgcccctacccccagattgccctggagtgccctgctccctctgttacctcttttccagagcctgtgctcacttcctaaggacaggaaagtactcccactccataccatagaaagaggaaattttcccttcctttctttgtagacacaaagaaaaatgtcaaataaaaagtgcatttcttcatctatattccccagccaagaactcccttcacaaagtagaaagtaccactatggacagaagaaggaggaaaaaaaaaaaaaaaaaaaaaaaaaaaacttccttttctgaaaggagcactcatggcatctgatgctaccagaatgctgaatgacagcaaggttgctgtgagctgtaggttcccaatggcgtcagtgtcattcctatgaggcctgtgccaagttggtgatggataggaacaggggacaccttcggtggcagtgaggtagaccccaggcccaggaaaaccaagggcatgactgtggccacccacctgtctagcatgagccactagagaagttccatccttttgtaatgcctttgcattttaatggattaatgtggtagacccagtactcaggggatttttccttaaatgctcctcggatgttttaggtattccgttagaagtagaagaccacaatttttcttgaaattgaaagaggccgtctggtaatgagtttgtcaaggtttcccctttgcagggcacgtgggtcttgagtttcataggacatccgtttgtgatggggcagagcggggtgagttggtctcacaggtcttgtgtgctccttgtgttcgttcctacaatggttgagaagtggagacagtgcagagctcagctgaaaagggactcgtgatgcttcccatacactgtgtccccggtgtaatgtttgtaactgatgtctgttaatttctatgcattttaatattttttaattaatgagcattttaataa

SEQ ID NO: 23592 - DNA, 1221 bp, Mus musculus
ctggagggacagttttttctttacaatggatataacttttaaagaatcggacgtgcttttaaagatttatttttaattctgtgtgtgtgtgtgtgtgtgtgtgtgtttgtgtgtacgtacgcacacagaagagtagtgcccacaaaggccacaagaggaagccagatctcctgacctggagaccaagtagttgtgagcccctctacaagggtgcccagaactgggccctctggaagaatacaatatagagtcttgatttctaagccttcttttcagctaccaaaaaataagttttggttttgtgttgctagggatcaaacttagggcctcatatgtgctcttaccagctaaaatctctctagctaaagttgtgtatttttaatgaagagacactgaatgtttgaagctcaattagaacgattgttatttagtactaacatctagtactgtgatttatgatgaaacaatttttatcaaacacgatatattgaaatgtagctttatttttttaaagctatataatattaaggattaagggttcattaattgcatttctactatttgttcttttagctttaggatcattctcttctgtctttggagaagagtggcgagagaagactgatagagactttgttaaggtaattcacaaaccgaaatgctgacccatggaatatgttctgccaggtcatcgtagagtctgacgggctggctctgagctagtgcacgccactacctttatctttaacagaattgctcccatgcagcctatgtagaggttgtgactggataagaaattgtttaaggtctctaacgaacagaaatgaaattcctgtgttctttagtttatttataagataaggaatatgtaataatagcagaaatatttaaagttttaaatccctcagattaatttaaggaaattagtttagccacagctttctatgcttggtactgttggagcatggttttgtcttcatcagatagtgttcctttttgatagcttgtggttggaccttggtatttttcctcttcacagaatgcaatttttgtccttaagtcagcatgtttcggctatacattttgtgaaattaatgatgtagtagcctttgacctcccaagttttattttattacaatttggactctgcatccatgtttaaaagatttgtgtgtgaatgcacatgaaaattgtagactttggggtcttgtctcagtactt

SEQ ID NO: 23593 - DNA, 1143 bp, Mus musculus
ccacctcgaaagctgggcattaatgacatcgaaggccagcgggttctgcagatcgcagtgatcttgcggaacctctcctttgaggagagcaatgttaagctcttggcagctaatcgcacctgtctgcgtttcctgttgctctctgcacacagtcattttatttcattaaggcagctaggcctggacaccttagggaatatcgcagctgaggtaagcacgtggcagatccttaacatcgcctttctcttatccacattgattttaaaatttgctactatgattttaaaatgttgcattctgttcctgcctgtatttgccagattttaaatggttatatatatatatatttgtagctgaaaggtggggcagaagcctatttttatggaaaaacaatttggaatgatacttgaagttcggtggtaactgatcccagtgacacaacaatgttgctcgtttttctgacatttgaagtggggagcttgggcaaaagcatggtgcactgactgagtcctccctccttccttccttccttccttcctccagcttttactggaccctgtggatttcagaaccactcatctgatgtttcacactgttacaaaatgcctgatgtcaagggataggtttttaaagatgaggggtaagaactcaaatattttgttactgcatgtgaacaaactatcatttatttccagcacaaaaatgtttgtttttgcaggcatggaaattttgggaaatctctgcaaagcagaggataacggtgttttgatttgtgaatatgtggatcaagattcctatagagagataatttgtcacctcactctgcccgatgtgctgctggtgacctcaaccctggaggtgctgtacatgctcactgaaatgggggacgtggcctgcacaaagatcgcgaaagtggagaagagcataggtaagatgatcagcgctttatacactttgctttccagttttaatttctttcatttttttgtgacagggtcttatgtagcccaacctggcctcacgttcactgtttatccaaagatagtccctcagccccactgtgtcctgagtgctgtgatcacaggtgggagcaaccacctgtttggctcagtgctggggatcaaacccaggttttgtgcatcc

SEQ ID NO: 23594 - DNA, 1161 bp, Mus musculus
acaacttaatcccaacactcaggaaacagaaacaggcagatctctgcatttgatgccagcctggtctacatagcaagttccaggccaaccacagcttcataatgaaaccctgtttcttaaagggaggggggtggggccattatagagtggagtgtgcagtcgttcctgcctgtaatcctagcactcagggatgaggcagtagaattgccaagggatcgagcccagcctgtgctgggacatctgtcttaaagaaaagaagaaccaaatttgattgtgtattttctaaggttaatatagtgagagctgtaaaacttctggagttacttttttttttaaactagtaattatttattaagtaatcactaaaactacttagaagtaatatttagaaaatgaattttatctttaattttgaacattgttcttgaagtcatgccatttcataatttagtaagtaatataaataacaaatagaaatgaacttactgtgtatgtgtgtgtgtgcgtgcgcgcggtgtatgcatgacgtgtgtgtgtgtgtgtgtgtgtgtgtgtgtgtgtgtgtgtgtgaaccaggaacttgccatctcggctaaactgccggagagctccccgagatcccccgtcctgcgagtgacaccggcctgctctgcatttatgtgggtcaagtccatttccttgtgttggtgcagcaagcacttagcacactgagccatctcctagccccaggactaactcactttaccccgtttgtgatgctgggtgtgaagcagagggagggctttgcattcaccgagcaggtacagggactgcttctatagatgttggacaaaatcgaatgtttctttctttccgtcagcaagagctgagccaaagccctttgccttcagtcactcagaactcgaagccttgggcactgattttaataggaaagtagttttcatttcttaagagaacagagattccattttcatagcttaatataattatgttagctctttttattttattaaagataattgtatttgttaatttcatatacagggttttggtatggccatgcgtcttcttcatagcctgggggttgttcaagcaaagccagtgcttatcaagcttacagctccacacagcagtggcacatgtatcttgaccaatggcttt

SEQ ID NO: 23595 - DNA, 1197 bp, Mus musculus
gtgaggtttggtcctgcttgagactgcatggggctcctgtctgctgtcagtcactgtgggttcatatgttcagctgctctgctgtgtctggaggacaccgtttccctgcagccatccgtcccctctggtctgcccctcttctgtagtgatccctgagctgtaggagtagaggatgtgacacagctgccccatttaggatccatcagcccagtgtctcgttctctgcactttggccagtttgtgagtctccctgtaaatccccatctattgcacatatacgcttcagtgatgagggtttagagacgccctagtctgtgggtgtaatgggaagacattgagaaatcagttaaatactatgtccaatagtaatagtctctcccctagggccagtggcctgtccaaccacaggttcttagccaacactgataccagtgtaggtttcatcttgaggaacaggacttaaattcaagcagaaaggggtcggttattaccgtgatacccatgacactgttgctcactgagacattgctttctcgcatgttagatggataggtagaatcccctagtgaaactggttaccttggcctgcttgtctttgccttgctggttagtaattagaggcctattcaggtcagatgtttcaggcattgaactcagaacctcaggcgtggcagcaagagtgcttacccactgagccatctcgctgacccttcttcataatatcatttcatagcttgggaatctagcctgcaatttactaatattgattgattggaagattatgcatagaatacagacaattaccaaccgttactatctctttgtttgctttgcttctccgagtggagtcctggctatcacttccttgcctggttctggctctgcctcccagctgctgggattaaaggattcaccaccaacctggatattactcatctcctaaccctcgtttgttttcaaaaattttgccagcatgacaaaattatagtttcagaaatactgaatataaaaatatgccttagttcatgccttgtaatacatttctgcatattaaggtatgtcaggagaaaatcgagcctttagtttagacgcgtggacgcaggtggggatctctggtgcttaactctacaagtctgaaaaatgatgtttcaaagcccattcttagtataaagtggcgttgagaatgtgcctggtgcc

SEQ ID NO: 23596 - DNA, 2435 bp, Mus musculus
gaaattcatacaatcctgaatgtagatagataaatgcgctgtgtagcattctgtggatacaaaccctgaccggctaaagtgtcacctgagtgtgaggtgcagcagttggtcttattttactcatcagtgaatcatattagttgatggctagcttgagcctcctctttctacaaagctgtactagtgtcggcttgggtgtgggactatatgtctttatcttagttgtataatctgtggtaagaaatctcaacgatgaccctggagactgacaatgtgtgtttccttttgttttctagattgttaaagagacatgaaaacaacttatcagtgctcgccattagtaacatggaagcttcctctacccttgccaaatgcctttatgaacttaattttacagttcagagtaaagaacaagaaaaagactcagaaatgctgtagtgaatcctaccccactgacacagtggggtctcaaagtcaaatacatttcacatactgttactgaagaaagcaccaagtcttaatggagcagagaccatagaatgaattattttgtgtcctccatgatgctgagaggaaacttcgtattctgatctctgaacgaatccctttcttttctgttaaaaaaaaaaaatctaaaaaggaaaaaaaaaaaaaaaaaaacaaaaactgctgtgggattgtcaaccagcttatctgcaggatgtctcggatctggccaatcctgatggaaactggtgtgatcagaattctgtaccatccacattggaatatacatggaatagtgtaaaacctacgtgagcagatgaaatagaagcattaaatatttttatctatatccaaaaaggagcacatttttatatttacagaaccatttaagctggtttgaataacgacagagtttgagcacacctatcccccagcttcagaggggccaccaatatctagctgtggattgtgtgttttgtttagaatcagtagcttggttttcttacttgagccaatatattttcacttatttattatcataaaaatttaccagtctgaatagatcttgtaaatatttgtgaatagaatgaacactgttcataccactgcagccactggagatacatcctgtggtgtcctagaagcattatcggtaggctctaaagttttctagactttgctgtcaactgtaagtaattgtgatatattctacgcagtggatggatattctttaaatctgtgtaaatacttctgcaaaggtactgatgctgtaaagtcaaacagttttgtggaactgtgattttttttttcctccttttttggtttccttggcccccacttgggtttggtggggttttgtttttgttttgttttgtattatacaccttgtagaactcattttgctggctgaaagagtatggaataatatatctcatatgtcatttttgtagaagagaaactatttggatttcctttttgttggtttggttttccctaacacgtgtccgctgtacgcattcgtcacgtgcaagctcagcttgtgcagggttttttgtatttgtaaattggtttaaatacatggaattttatacaggttttctcctgtgttatatatgcattatgtgcaggtatgatattttcttcactactttttctatcttaatatagtgtggaattttattgtattattcttccattcttaatactgtaccacattcctgctcagaaactgctcacttccttaaattgtcttttcccccaagcgtgaaatgtatccacttataactgcctattgcctgttctattagcatccaaaaatgtggaaggcctcccaaccaccatttctgctgtgtccttaggatgtgcagtaaaaaaatatagacctgacagtttatgttatagaatggctttatttactttggtgactgtttatagtttttaaataaaagactgaacattttcttgagtcctttatttctgagtatgcttaagacattctaaaatttaaagtctagctgaaggcaaggtcaaacggtcacctacttactttatactttgtgattgtagagaacagaaaggtgcatcatgtgataggacaccatggtcacggtaggaaggagaccaggagaccaaatgttttgtttacagtagtatgagtagtagccccagagagcgagagacagttagggctcggttgccttactgtgtgtcccgcatctatctgactgagagctttgtttaccattcgactctaggtttcagtttaactaattcaggggcagcttcttggcaatgagcttcagtctggacagttcaaatatcttgattaatttagtaccaaaaagtaatttctccccaggggtctctgtgctctcagctctaactgtaagaaatgtgtggcgacacccagaacttggtattctcaggttggtggcgtttgacttcttcgc

SEQ ID NO: 23597 - DNA, 1184 bp, Mus musculus
tgcagttacagttttcccgttggtatcaaatagctgagaagatgttcccataatacggggatagagcaggataaacactcagtgaggcctacccattcactgacaagcacagtggtctctgtgagactgtactttctagagtgcaggcaacctcgttctcagttctgcataatgcattccagccagctttgaaaggaaggcgaattttgtgatttttaacccatagtgattgcactaggtaaataataggctttgttaggttatgcttatagtccttaagcatttccaaaaagtttttgatcttcttttctacatttctgtcatttatgatgcaatattttacatttttaattaaagtctgtgtgaacttatgatggcagatgtgtggaagacagttgtatacatccgcggctcaccttgttcctttcagttcaggttcagtggtgcacacttctggtcctgctttgacatttgtgtgtcagatgctgtctgtcctcttcttctgcagcagtgctctgcctgcattgttctactgacccctgggagtaaatggcagtttaagttgtgttttatactgtttagctcttgcaaagcaagttttaaagtttaggggaaagtaggcgttgtgtgaactgttaaggccccgtgctctggcagagctccactcttgctgaagttctctgttctgtatctggtagggcaccgggtcgagtgcttcagaatcctcatttctaatatattctactattagaatatactctggattagaaatacattagaaatgtattcttactgagttagaaaacgcatactttgtgttaaaaaataccattgcttttacattcttggtttctcattttttttcttagaaatccacattcgttttgcacgtatataaacttaacacagtttgggagttgcaggttcctcttgatcatgactcagtatcaacttgacctttggcaccatgggccctttaacttggtagtcacgttgacccatgtttcaggttgtagaaatgcccagtagtacttactcattattttaacattccagaggctttgcagttgtttgttgctgttttggtgatgaccactacatcttcgccattctcttccttcaaatggccatggtgtgtttgctgaccgtccctgcccacgccccacccccagacatgtggcctc

SEQ ID NO: 23598 - DNA, 1345 bp, Mus musculus
tacaaagagatcgtgcggaaggcagtggacaaagtaagtgcggctacagcgtgagtgctgtacatgggaacaagcggcttgtctgttgggttttcatagtgccatctttttggcattgagcatgacccccaccccccttgttttctaggtttgtcatagtaagagtggagaagtaaactctaccaaagtggccaatctggttaaggcgtacgtagacaagtacagatactcgcggaagaaagctctggaagaaccggggtctacagaaaaaacctaggctgaccgggagcactgcccaggacactgtggagatgtttggagactgcactgcagcgtgcgcccttactgaatcacacacaactgtgatggaaatctggttttgataaaattattttttttattgtaggatatgttttgttcaaaatatagctgtgcactgcaacttctatatctaaccctaaactccaataaaacaaattccagggaaaaccaagggtgtaatgggatgtgcgtgtttatcaggagtgtgctctcacgtggatgctgaatgatggaggacagcggactgcataagccagaaacctgtacgggtgctggctgtggaagacgtgtctgtctctatctatgtacaatagtttattctgtcaggctgaaaaagtatggtctttaggaccttgcccctctaactatagaaacttaaacagtgtactgctattagatatatctgatattaatagaacatgccaagtgcaggtcccaaatgcgtatttgtgaagcacacatctgagtaaatggcttagatggaaagcaagtcatcatgagtaaaaattagcctcaaacctgccggtgctcctcacctctttgtcaccaggtaaaggtcacactgtgtgttgcttttgttgtcttctctcctaacctaggaaaaaataaattagtggtttaatttgctacattacaactttgccatttcaaggctttgttgaatttagaagactaacttgggggaaaaaaaccaaaactatgttctttcattataccttctatttatcagtggtagtaaattatttgtgccaactggaaacatgctacttggtggtgaccttcctttctgggggactagcatagattacatgacctgctttggcagctccgggttgcttttcttctgtcatggtgtcagtgaaattcttctcacacttcagaagttccctaatggggctggcgagatggctcgccaggtaagagcactaactgcgcttccaaaggtactcagttcaaatcccagcaaccacatggtggctcacacccaaccgtaatgagatctgacgccctcttctggtgcgtc

SEQ ID NO: 23599 - DNA, 3447 bp, Mus musculus
gtacctgccaccatgctcctggggaagaaagaaaatctgttttctgcattgcttcgcttgttctcatactgctccagagttctgtcctcctcgttcaggcagctgaccacaggtcctagacaggaaaaagggtaaaaacccacagccgcctctaccctttgccctaacgcctcccatgtcacaagaaatgaccacctttgtagctctgtttgtactgtttaaaaaatacatcagtttagtttgcaagctgcaccccccccccttgctggtgtcccccttatcctgtaacagttcagttttacatttgcaaagtgaatccaaaaacgcactaactctgggatgtgttgcgatttttgtttgtttgtttggacctctggattttgtgttggtaaaactaatgtattatttgcagcatatttatttgcaggaagcacattgctgttgatctctgtgatatgtgggtttctttttttttttaaaccctctttgtgtacctgagtttgtttgaatataagggatcttactgtcatttgttaggtaccactgagtaattccatagtttctgtggtaattcactgtagagtggactgttctcgctctcgttcagaataactggcagccaaaacattacctgtatcacagatgttaagtagcactcaacagcacagtcaaatgtaacaggtacttttctgctaaattagtagactcaagcatagtaggccttcgccgagggaaaccgagtttcccttcagcacacaggctctccacactgttgacccagggccagtttcatactttgggtttagcactgttctctggttcttgtaacacagaatactgtagattcctagattagtgttgcttgttagaagtagagtttgcagagtgtgtgcaggtaagaaaacctactcttttaggcctggactaggcctggtcacagggagaccatattccaaagctctgtaacccggaatggatttttcttcattggattagatgtgggggttaggcccccaggcagctggaaaagaatgtggagctgtaatggagtgacaggactgtggaagagccaagttcccagagagactggaggtggggtatgttggaatcactaggaatacccccactgcatctctgccacgggtcacctgctgggtagtggggtcagggctccaccacagtggcctgtagcaaagcccccccccccaagactagagaggctaagttcaaaaccctgagtgtaggtggtggtcaaagaagaggagttcttagggctcccctccttgcctgcagttttaactttatagctctcccaggtaccagctttggggccagcacacggcactctcattgtctcccgtgctggtaaccatggcttcactgcttggtgatcaggtgaaaagtacaaaggctctcgctccttcctgagtacttatggaccctgctgagggacataagggcgtcagggtggcttgcagaggactaaggtctgtggtgggatgcctcactataacaataattatgccaagcattcaagccctcaagctggtgtttctcaaactgtgcaccctcaaggcagcagcatgaacctcatctacagacttaaccagcaaagtgtcagcctcaccagactcagtggataaatcgagctgtcctcagcaagtctcaggtctagcctccaggtgagacctgtgatttcaagcttgggtaccactctaagctttctccggtcagcccatcctcggaaggcgattggttcccggggtgaggaatgagagccaggtagggtaggaaaggaccccagccagtgtgtgcaggttcaggaaagggagggcgtcgtgtgcagcccctactacctgtgttctttcctgctgccaatgcattgcagagttgtgagtggatcttgggggtgctcacactttagggaacccagcccgaggcactagtcttattttcttgcagctgcgaagattccaattgaggctttcagaaaatgtaggtaaatttttaaaaatgccttttgtaaatgcggtcctgaaggcactgctgagttttcaggggaccgtgtccatggtggggtagaattcagtcccggcgctgcaaaatagaaaatattgatacgcggagtgttctagtaccaggtctgtactgctgagggagcttcgaggggagccgagcctggtccgtcttgggagtacagtgtgaagcgacatcgttggactagggcagcgtggggaggtgtgatcgtctgtgtggtttatacttgagagcagagcctccattagtccgattagaaccagcgaggctttgagaatggtactgcctattcaagggagcatccaggcactcttagtttgcaatgttacaatgtttctctctcaggaccgcaggtctgagactccttctgaaacagaaagttgtcctctaaaacgcagtgaattgctggtaatactaaaagacttagggcttcaggtggggttggggttaatgactgaaagcaatgctaagtctgaaggggtgggtccgtggggaacaaagctgctttccaagggacgcaggtgttttaggactttcccgaggaagaaccacaaagcaccgggcctatctgtacacaggcttgaagaatctatgcagcagaggctcactttaggaatccttcctttgtatgtaaatatgttgtaaatacataggaggctgtatatttttgcaggtgaaatagaggtcactagtattctgcatataagaaatccatgttctcagatatgttagtggatttgtttgggaggtagaagaattttaccttctttcccatagttctgtcaatgtaaatctggagtctaaaaccttaattgtttggggggaaataaaaagaactgtctggggaaaaaactactctgattccttatgctggtactactatctgttgtctaaatgctacagataaagatgatttaggggaaaaaatcattgtcatatagaaacagacgtgcccaaaataagaatttttctctgcattacgttttttcactgttaacgttgatgctattgcatagagtttgtgaaaatcaaagttagggagggtttggttttgttttttttttccaaaatggaattgctgtttcccaaactttgggatccttgaagggagagctgaacattaatatgagcacgtatttgaaggagaacatgtgttatttttaagcctttgaaggtcttgcatgtctgccttttagtgttgatgccaacctagactgtctcgtctgtttcccccctcccccacacacttaaatcatactcgtcggtacgcagtgcagtctctagagtccagtgtgtcttagatccccatctgactcagtacatgtagcacaccactattttactaatgtaaaaaccttgtaagtgatttcgggtgggcatccaaagtgaaccacaggtaacaaaacctgc

SEQ ID NO: 23600 - DNA, 1177 bp, Mus musculus
cctccaacttacagtcatcctgcctcagtttcctaagtgctaaggttacagatatgtgctgccatgcctggcttgacctatactgtatgttgacccatgtcttcagattttcgccaaaacaggagaggaacagctgcttgtatttatggtgtatatggtggtgtgggtgtgtgggtgtgtgtggggctctagcagcttcttcaaggaaattaaacacactcagcatattttcagcccaccctcccatttcctctggcttcttggaatattggcagcgcctctgggggattctggtgtgaactagattgatcttgtctttctcttcaggttcctccagctatctatgtctcttctccctccagaatggacctgttttgtgtgtgtgtgtgtgtgtgtgtgtgtatgttagcacaatttattagtaagtaaattaatacagtagaacaaagtcctgttggtgactccactggggagctggagtaaatccttgtatccaatctatcattctagaaagatcaatgatttaattatgctggtctagggatacttgatgtagccggttgcctttgaatttctgaacaaagctaaggattggataaacggtgcttagtgttgaagggatcgggttccccggatgaagccatgagaaatcattttattcgatatgatacatacactcgaagagctaaagaggcacatctaactcccgaggcggaggctcaggaggactggagtataaagactcagaagttcctcacagagcatgaaactttgtagcttcagaacaaggaagcactgacttgtttaaaggccagctgcccctgcagctgctccgagccagccagcagttggcagcctcaggtatcagctgctccggggccctgatccagctcactggccagcagggaaggggcctcccaggctgccgggcttccatagagcctcagctgggaaggctccttcctgtcgccgtggggctgggcgtggagctcttcactgggtctggaaacttcttggtgtgctttctttttcttggatacgttttgggttcagtttttggactagcataatggctgcctttaccatgtgccgtacctaattcaataaaactcaaaggagttctgctctctcagaagaaaaccattaccttttgtattttactgaatttggggtcctt

SEQ ID NO: 23601 - DNA, 1177 bp, Mus musculus
ggggcttgaactcagatacttaggagcaagtgtcttaacttgctgagccatctttctggcccttagcatatcattttaaacatgggttcataaaaacattgtgtatgttgtttgctgctaacttggggtttcatttttcatttttaaaagggtttagttttagttctatttattggttgactgattgattgttgattgtgtcttagtacgctgtcactctccagacacaccagaagagggcaccggatcccattacagatggttgtgagccaccatgtggttgctggggattgaacttaggacctctggaagagcagtcaatgctctaaccactgaacccatctctccagccccataacttgaggtttctataattgtgagctaaaggttatgggatgtgacttactctgtagtagataaatcgagggaaatgtgtaaaagccataaaatttagagataaggttcatgtttttatgtgtccagtagcaacgtctgaaagtgtcatttcttcattatttgttcgcttttcacggcgcttcgtgtatcagtgacactacctcccattcgtttaataactctttattctgctgtttcaggggtctcaggcatctgtatttgctgctgtctgctactaaagagcctcagaacggaagaaatttgggttgacttttgactgcggacaccgaatatgatgcatttcaaaagtggcctcgagctaacggagctgcagaacatgacggtgcccgaagatgacaacgtcagcaacgactctaatgacttcacagaagtagaaaacggccagataaataggtgagcgtcttcccctaagtgccacccggggaaggaatggctgtagaaagccgttctttcaggaatttgggtgaactcttcgttcactaaaattatgctctgtttgaagatgcgatatgaatttcttctgcagcatctgttgcacgtcgtctggaatggcagatgaggggaatataagagtaatttattcatctcaaatctctcagtcgagtctaataaaaaaatgtataaatacattggaccccaaccagccaacacgtctcaaagccttatgcctgtgaattagactgactggaaatttaccacatctcatacctaaacgagtgttgtaaccattgccccacattttaattaagaaaccaaccaa

SEQ ID NO: 23602 - DNA, 1217 bp, Mus musculus
cgcatccgctcgcactgcccttcctggatgctcggtgtccgccagccgcggtcgccttgcggtctggtagcccaggggggaagaggagcaagaaggcgcggcgaccagcggcatgtgacccgcactgctctaccgcacacagctcaactccgccggcgcgcgggcatggagggatgatggtctgaaaggccgcgctcccgtccccaaactgccgaagagaaagggcgacgcgcctcgcaggagccaatgagtcaggttggagcccctccgcgccgggcgtgtgaatgtaagtgctggcgggcagagtgtgggtggggggaaactgatgcaaccagccctgggaggaggaggaggaggaggaggaggaggaggaggaggaggaggaggaggaggaggaggaggaggaggtggtggtggaaaaggaggaggaggaggagagctgtggccacgccactcttcctgaaggtcgccggtaacccggccttttaccttcctccgaaacccgccacgcggatcctccccgcccagtcttacagacctggggccacctttccctagctagtccttgacacaaaaaaggacatctaactgccggggacggcctggaagggcggacactttggtggcgcctttccctttatttctcgaggtaaggtgcttttggagggcagagggagcggcgacttggagggaaggggagtttgaacaggaagggaaggaggtaactcagacagcctccatgtctcgtggacacgggcagagcgtcgcggcgcctttctagaaggcaggagtccggtgcccttccctgaacgcagggactccagataccgccgtggcgtacagtaccttactttgtagacctggttttatggtgatggagtgtgccaccagatctggtgtcactttcgcgaattaggaaccaagcatgcgatgtaaggggcataaggtacaccgaggagtgaatcagtctgcatcttgggactggccggcagcggagcctcggagaccggctccccagcgcggtaaacaggtgcacgttggctgcacctccacgggctcggcccctgtctccgttccggttagtgggatgatgctggcagtgactcactttcctctccctctctggaggctctctcccgaatgaagagccagtgataggctacttcctctagagcctggtccggtggggcgggagaacaaaaggccactgcttgcgc

SEQ ID NO: 23603 - DNA, 2673 bp, Mus musculus
agaaggtttcagcaatacaggatttctgtgctacaagaaacacaggaatggtttgatgactttaagaacagtcaggtgaaattagagtatttgtaagtgttgtgatgtgaactcttggggccttactgatgagtcttctctgcctcctgcaggctctgtgttttctcctgagtggcatagtggtgatgattggaagcatgggcttgattgtgctggattgggtccacgatgcctccgctgcaggtgggcactaacagctcccctcacgctggatggtccatccgcctgcctaccgtgttgagtcgactcagcctgctcagtctcacctgatgcgtcccggtcacttccttttgaagtgcagtctactcgctggttcttctggattcagaataagtgaacttttctttctctttggttttttgtttttgtttttgttttttttttttaagaagctatctgtgtgttagggaatggatagtacgacaaaaccacgagccttgggttaagggaagtgacaagtttattccattccagagaatggacgaacttttaactttttatcaaagccacatgtttggctgtctcattgtttaacttggatattttatgattttacttgaatgtgcctaacggaaccattcgatgtgagaaacacttcttaatttacagcaaagtattgaaataagcattgagaaaatacacttattttttgtaccaaaaaatactttaaaagacctcagaagcactattttactttgaagaaattgcatttttgaactttactcagaaccagttgtcaataaactccatcaaacaatttcattgatatttaaaaatgaatattagtattatgaaattatttgccttttttgtgggcattataagccaaatacttttttacccaaaaatcattttcgggaaaaatgttacaaaaaattgcaccatggattagcatggttttgtttttgttcattcagattcatttgaaggatagttggtcgttgctgcaccaagtcaggtgaactccgttcatcgctttctttgcctccaaataattggttcattacaactaaaatgtttatgtcttcaattagtctgggaaacagtgccgagatttctgtaggaaatgaaataactgattttgaggtaccaaatagtgcaattgggtaagacagggtttattcagttgcatcggtctccagagttacagtgtcagctctgggtcgtgctttttgggcccatcctttaaaaccttgcttccaaaagtgaaaacgggcgtttgatggcaataggccaaaactgtccaatagagagcagaacttccaaaggctcatctactggaagcgtggtttacttgacaacacgcagctcagtggtgctcctgctgtgttggcagtccaggctgcaccatgcaggtacactgcaggccctcctcagaaaggtttctcatgcagcaagcttcctaaaaactcgaactggatcatcatctcattgaatgagatgcagaatcaatttgtttacatcgaacaaatgatcagctaggggaggcgggacaagctgcctgtcctcggtgtctggtccagccgcatgcttacctttccatttcaattccagttaaacgtgaagacattacttggaagcttggctttaagagcacatttactgtctgttaacggtgtatggtgaacatatttttaaataatgaggtactttgctcatcaagcgtattgtctaaggtctaattaatatacataattccattaagtggtggagggaagcaagtagaatcgtcaattggttatctggctcttgaaactacatgttttgagtttgaggcaggggccagaagaaatgtgacacacatggtttttgttacagtcttgtattgtatatgtgactgaattcataggcaaggtatgtctgccattaaagactcttgcagactggaagacgtctggtagtgctacatacattgggtacaaccaatggtcagttctgtcccaagatgaaacccctggggactgtgtagacgcaaaggcagtgagaagacactcccccatgctgcttacttgtcatcaagtccagaacctcacctgctcgtcaaagactctgcacctccgcttgaagtcctggaaagagtcctggctaccatatgccaggggatgctgagaggcaggcatcctgagaggtgccatgacaaccaggatcctgttcacagccgatcagtgtggagagacttcccaaacctcctgtgagggagcaaggttccaaatgaatttcaggccaaattccaaagcttggggctgttttacccgccttgaggttcctgaactgaattctcagccttgagcagtcttcagtattaaaaccactgtcccgtcacctcaattcacatcgctgtcttccatggaacgtttcaataactgtactgttatttatagagcagcattaatccattaaagctaacctatttttcaatatttatgataaactgtacatatattgtccatatgtatttgtaaatagattgtatatactgttggaattgggttcaagtgtatatattcccctaagtttcttaactgcattttgatgaattcacattatatatgtctccaaattacttgtacagagaattcaatcttaagaaattgacattgtgtataatactaa

SEQ ID NO: 23604 - DNA, 1159 bp, Mus musculus
gcacagagcggctttgttccctgtgcctagtatcaagctttaagaagtgttttatgttaggaatcagctggcagccttcccagagcagagagtggcgtagaagctccatgaagcaaatggtcacaaaatcggtggtgtctcaaataagggatgctttttttttttccttcccccatcaaagctgtccttttcgcatgcggtgcgtgtggtggccgagttaggtgtgtgccgtccgttcactcttggcttttttctctctccccattcaggttgtggtatctgaacggtgactatctggtccttctggtgtcccttgtcctcattcttccattgtcactgctgagaaatctaggtaagcagacatggttctgacggctgtgagccctcagcagctgctagcattctcccaggaacgaccgaaggctctcagcacctgctcttgggggtggcagcagggcacacacaccccgtttaaagcccccaactgttaacactccatacatggctctagtgtctcgtgttctctgtccatccctgtttgattaaagcggcccttgttcccttccaggatacttggggtacaccagcggcctctctctgctctgtatgatatttttcctgatcgtggtaggtagtgggtttgtttgtttgtttctttcttttaggaaatacatcttaaagctttgtcaaactgctcagtcttgctcacaaatgtgtgaactatgttttcaggtgatttgcaagaagtttcagatcccttgccccgtggaagctgctttggtggccaacgaaactgtgaacggcacctttacccaggcagcgttggcgttggcattcaatagcaccgcagacgatgcttgcaggccacgctatttcatcttcaactcgcaggtaacttggcggcagtcctgttttctggaaagaaatgttgacaggaggataaaaggataccctgcgtagcagggatgtaaaaatgtctcaagacaaattgaggctggatgataggtgggttttaggggggaaaaaactggagaactagcgaagtttcatgttctagcttagacaaaggcagcaggcaaaataatgtgcctcggggcacatctcgggggtagagggtcagatacagatagatcataggtgctgaactgttacaggatgg

SEQ ID NO: 23605 - DNA, 1099 bp, Mus musculus
gggatagcgcttaaaactgaccggttaaggccagcctttccagaaggtattgttaattgtaaaatagatgggttttataagttgacggtctcgccctagaacctgtgacataaggaaaagaaggttggaggtgtataaggtgtggtggtatttacctagcccagatcatatttgtctaagagcaagtgagtcataattttctggatgctaaagagcaaattcactttttaaaaagtctttccggatacataggattggtgcctgacttctaagtaagagtctactaatttttttttaagttagttggctgaacctccagaagtcatgttttggagggttacccatttgggggtcacttacccgtggttgatatgatggaagagtggtagactagaggtcagcactaggctgcttggcttgcctggcatgcagattgatttctgagttcgattccccgggccatcagagcagtagtaagagggggggaaaaaaggctgtttccaaatacaaaagcatgtatgtgtttgagtgtgtagttctgtgttgagattttcaaactgcctgtagatcatggctgacacagtttgtgtggaggcgcctctgacttcaccataacctctgcaccaatgggaagtgcacacactcgacagctgtccctttttgtgacagttgagaaattttggttagttgatggggatctagcactcaaatgactttctcccggcataataaaaaaaaatgtttgagagaaaagctctgctttgtcagaccccacacagatgttaaagtctggctttgggtaactagaagcatcaagatgaagatttgggggggtccttgcaaaaaaaaacgtgcgtggccttggtacagaacatcctgaaatttcaggttttgttgggaatttgaacggccggaatcaaagttaaatatttggaaccctttcccggctcttgccagaaaaactgggaacaatttttgaaattctaccaatgtggtcattggtaactctgtttcgtaactgaaagtaaaactgaacggtgtcacccttgagctctggggagtccactctaacagcttactctggtgctgtagtaaccat

SEQ ID NO: 23606 - DNA, 2688 bp, Mus musculus
ctgaattgcaggctttggtcttccttgtgactggaattattttcatgatgggaagcatggcgctcattatactcgactggatctacaacccgccgaatcccaatcaccactaatcccggggagacgcgtctccactggaaacagctgaaattgtctgaaggacattttagttgtcttgattgggatgttagtctgaggaattagcaagattccaaagacgtttttctagctctatcatgggatacttgtggaagagaaaattatgggttttgttgggaatggttttgttgggaatggtgaaggatgcattaaaaattctgtggcacacattttaacccaggccgtgcagtgcagtgtgtgatgcccgagttgtgtttgcagcagctgtgcaagctgaagcctgttggctgcgtgtgttggtcagcagacaatagcctgtccccccatggtcactccacttctctccacccccagattaacaggtaattctactctcagaacatcagacaaagacctcctggttggcgaagctatcatcagttacggccatctctcactctacaccaacactaagggtcggttgactagctgaggcagggggatatcttgggagctgtccctgtgaggatcatgaatgacggttgccagtatagagtacttcatttcaatactcaaggaatagtttgcccaacctgcttattacaccgagttagtgaattttcattctttttattttttggtatggcaaatgttcaaacatctcactaaacatagaggggggttatttagtttatcatgaaacaactaccaaaaagtaatggtttttaacatctgccttttcatgttgtttctgatatctttgttccactttgtctttgaacaaggcttcccctctcgtcttccgttctcactcttcgtaattttcagaagaccacagtccgtgtggagacacactacccagtattgtttgatacatctctatttgataaacattcagtgcaggaaactgtgattttgctatatgtttgtgtacataatctcattctgcagttatcagaacgttgacatatgggacattggatttttattttttacatatgtaggtttttttttcttcacagacaaaatgtttatatcatcagggtggggcagggaattaagctggtgggctcaaaaatccatgggtacttatctgtccattggagacatctaaaaattaaagtcaaagttgtgcatagttcagtaatgctcttcactgtttacaagactataatcatctcagcaaagtagcgaaggaagggtttgtaaataattttcagtgctaacaatggtctttgaatttaacatgtctagaatagggtttagttcattttagtttacatcggaacttggtgacattcatttgccattaatagaacatcgtgtggttaggaataaatgcaccaacatgacccaaaaccacattgctcacatccatggacgcttacacgggatggagttcagactccgcccactgcctagaatctctggcattgacttctttttttcaattactggttgtatattttacatttcagtaaaaagccaagtctgaaatgcaagtatcctacaggtagtgatagtactgtcacaccaaagcagtttttcaacagtgtgcctaagaaacatatatttgtttactgtgtcattttctggaccttaagactatacaatggtgtgctttgtgatagaaattgagcattactagaaactaccataacttcggagttattatcatttgggagggaaaaaaatcaccaaataggatctttaagatgtctttctattttcattcatccaagaaataaatcaagatagaaagcagaaagggtgtgctgcaaatattaaatatattttatctgaacatattaaatgtgaatataaaagattaatccaaaaatattggaaacctgtgaaatctgtacgtatttcgaatctttacacttagagcagctaacctggaagtatccacttgtgtagttagatattcaagagcaatatcacagtgccaaagacttcattcacacagcaccgatcatttgtgtggccgttttcaggattagagttcacacagactccagggcagatactcagaataccgttttctggtaaatttaacccatttgtaaacagatacaaattttattttcttacatcatttataagacggttcaatgtactggggggattttttttattacagactgtgtattggtatataataaataaacttttcaaatgatgtggctatgatcttctttcgtgagttatttgtatatgacacaaaatcagaagtgtgcatactgcgtgtcttaaatcaacgcgtgtccaccgtgcacatgcagaaagaataactttcctcatctcctgaggataaagagcacagcaaagcctccatcttacacattctgttgctgctgttacaaattactgcacacttagtggtgcagacacatccagaagatccaaagccagacacgctatcacatgtctgtgatccagccctgggaacctgaagcggcagaattgtcaattgaagtcaccctgggccgcactgtaaaaggcacgatctcaaaaagttttacctcatagttaaggaagccggcagtcctcaaatcaaggttctggtggctctgcctctttccggag

SEQ ID NO: 23607 - DNA, 1175 bp, Mus musculus
aatttgttggttgtaccttagaactacaggctaactgggttatttcagtgactagaagtgaagtaaaccagggcaggcggaggggatagcttgaggggctttttttgaaggctcctattcgaactgtgcctgcgtggccgtctccagagactggtgtgggcttgccgactggaggtctattggctctgagatttttgttgtgggacctccttgaacgatagcagctgccttataaagagggtctcacccttcctaggatctggctcctcacccttggggatcgtgcccactaggtgctacccgagttgctggaagtgtgcctatgaccccccgcccgccggaggtggtgggggaacacgggttcagggtttaaaatagactcgctggtctcttgatagttggtagttgaatttcctgactgtaagcatgctcccgttgttaaattgccttacggcgagcagatcagcatgctcccggagtgcgaactctaaggcttggggactctaaggagtcccaagagcctggagcaaagtgagaatttgatttagagccgagactgcttcccacatggtgggatcggggatccgccacacccaacagctcgtaggcgccgaaaccccgcggtagggtgggggtcgcgggcatgaatggaggacttcagaggagagggaaactgaccgtggagtagttgggaggagacaacttggtcaaccagaaggaactccttttgccttgaggcactgagcagggacagacagctgaaaaggcgtaggtggctcttcagggtatcagttcctggggacggaccctcgtggggatcggtctgaggttcccgtggagggatcggtctggggttcccatggagggaccctcgtggggattggtctggggttcccgtgaagggaccctcttggagatcgggttggggttcccgtggagggaccctcgcggggatcgggctggggttcccgtggagggaccctcgtggggatcgggctggggttcccgtggaaggaccctcacggggatcgggctggggttcccgtggagggaccctcgcggggatcgggttggggttcccgtggagagaccctcgcggggatcgggctggggttcccgtggagggaccctcgcggggatcgggttggggttcctgtgaaccgatcctcgcgggg

SEQ ID NO: 23608 - DNA, 1509 bp, Mus musculus
aacattcccacccagagggaggaaggaggtttatggctaaagataaccacaagctcagaacacaaaaggaatgagagttacaagacacaggaggctcccccgctcataatgcagcaagcaataaatcatgatgggaagagtccttgggagctgcctgcaagttgggcttagacattagcgctcagaccagcaggatgactcaaggaaggaccgaagcctgtcttagatgataagggagactctggtgagtggaaggcggagccacaggctgccaacctcagtgaaggtggcgtatgatgaagagcacattgctctgtgcagccaccaaatgccaggcaggctcctctgcacaccgcagcccctctacgttttgaccatgtcaaaactgtagtctgcttaactatgaattgggggaaaaccgcaatacctgccctaccgagtgtctctgtatcaggtgctaataattaattacctgttccgttcccctccccttctcttcctcctcctcctcctttcttcttttcctccaatagaacaaacttccataaagccaatagctcaaatgccgggttttctcagcctgaggcccactgtagacgccttgcttcatcttatccaaatagctcattcttgattcctgaattagcaaagaccccaaacttgacatgagataaccaagccggataagacgacttctggggcacacgcccgtgctgtgttcaccttattgtccgaagatgggatgccaagggctgctgtagccaccagctgccatgaggaaaatgagtggatcagcagagaatgccaccctcaaaagaacagggaccctcaattgtcgagcaaaagcagagttagagggcacactcgtgctgacgatgagtcacactcatataatctaatcattgttttgtctttttcatcctcataggacttgaatcctgggcattagcaggacagttgggagcctgaaagatatttgaataaggggctggcgaaatggctcagtggttaagagcgccgactgctcttctgaaggtcccgagttcaaatcccagcaaccacatggtggctcacaaccatccgtaacgaaatctgatgccctcttctggagtgtctgaagacagctacagtgtacttacatataataaataaataaatattaaaaaaaaaaaaacagcaagctttagctagagaaagtagccaaggagctaaagggatctgcaaccctataggtggaacaacattatgagctaaccagtaccccggagctcttgactctagctgcatatatatcaaaagatggcctagtcggccatcactggaaagagaggcccattggacttgcaaactttatatgccccagtacaggggaattccagggccaaaaagggggagtgggtgggcaggggagtgggggtgggtggatatgggggacttttggtatagcattggaaatgtaaatgagttaaatacctaataaaaaatggaaaaaaaaagatatttgaataa

SEQ ID NO: 23609 - DNA, 1223 bp, Mus musculus
ttacagtacatagcaagagaccaaacctcgacagggaagggaaaggctggcatcctcatggcagtcaggggaggaattcgacacccaggaaatgattttacaaagttctgaccacttgacagactgacttcaggagagacagaagctaaggcagtgatggcagagatgctcctttgactgaacagtgtggccatgcatatctcttgctctccattaaacccagacctcgcttcactttcctgaagaaggacccctttgtttctctcccagtgtggccacactgaataaatctgcctttgctttctattcactgttgcttgcttgcttgcttgtgtgtgtacttgaagtgcaagcatgtctgtgcaacctgtatacgcacacacgcatgcatgcatgcatatatgcatgcatgcagttacactagcatgcacatatatgtgtgcacccactatactgggcttttttcctcagtagatctgtatacatttgtttgtttgtttgtttgtttgttttgagacaggctcactctatactcctgtagcctggaacttctgtgtacacgacataactctcagacatctacctacctctgcctcccaagtgctaggatcaaagccacacacttctccattggcctctacaatttttttctcagtccctcactgaacctggagctcagcagtggctgtcctggctgcccagcagactgcctctttattctttatatgggtcctggcattgaattccgctgctcatgtttgcttagcgtccactatatcaggcaagccgcctctccagtccattacctttttaactgctgtgttgtgagcacgttgccaaatctatcaactttctaggaggccagagcctagattttgagcccagaatctgcagtaacaattctgcctcactccaaactggaagaccgttgatgggatgctgtcgaagagatgtcctagtcgatataaactaaaccaaaaccagcacatctcttttccttagacacatgctgtaagggttctgctaacagccccagcctttcgtggtgattagggcagtctatgtgcttctccctgatcgaagaagcatgattccagttcaagtggtacacgtaactaagacaaactacctgatgcctctaactcgagccatggtggcatgcgtttggaaacaccgagtgctcgttttcatatctaatccccagtctcgggttagagaaagtt

SEQ ID NO: 23610 - DNA, 1192 bp, Mus musculus
agcttgggttattttgtaacaattatcattggcataagcattagtggcaagggtgacatcagtcccagcttgaaaggcagttcctggcaggtagctgcaaagctggcctctctgtaagcacacagttcgttgtgaaagcctactgcagtccttgtacatgttcgtagtatggcagtcttctcttgtggaggttatgtgtgcataagatgtcttcccgaatgcttccctccattttgtttttagtttggtctaagtgactccatttttattttgataacttcagtgttctactctgatttagatatcatggtttatttctcttccttgccttgtttccagttctcagtgactatcttattatctccacaggcagtgaacaagacgtgtggtctgaagatacacaacaccgagacaggactgtgtggtgctcacatgccacgagcagagttcaaacagcatccaagccctaaagaccagagccatggaccaatatggtggatggcatgtgtgcgcttgttccagaagtgctactcatcatggaggcaaatcctgtgaggacgtggaagacttcacctggtttctccgctttcctcccggtgacacgggggatacttcgggcagatactgaactgtctgctgccatttacagccacagttacatgggattgtttgttccttccctgggcttctacctcttccttgactggaacagaagctaggtgcttagataaacctggtcaaatattttaaatcaggattctctttttttctcagcctaagagcttaagtggctatttatgtagttttataaataaaaaaaaaatttttttaacatcctgatcataccatagccattttaaagaggagaagagacattttaaagagctatgtgtgctgcattagactactgaagaaaaaaaatagacccaaggaattaacatttctgaggaatctcagagagaagttttgtaaaaaaaaaaaaaaaaaaaaaaagtatttaattgcaatccaggctttctaccctgcctttgatcatttagtttctggaaaaaagactcacatatcctttttatttgtcataagcctttatcagcactaatgttgggcagagatctaccctctatgctattaagatctatttcctattgataaccccagagctattactctgtttcatttgggctgctcttaa

SEQ ID NO: 23611 - DNA, 1147 bp, Mus musculus
ctcagcaagcagagcctgtcctgcccgcccccctaccccccatggtatcttggttccaaagaagtgtcatctggtatgtttatgtctgaggctggccttgaaccactgatcctcccgtattgtattacaggtttgtttgcaccaccgcacctggcttatattacaattatcagtgaccttcctccccctacctccttttcctttttggtattttaagaaaaggtcttactatgtagaccaggctggtctaagagcttagggttatcctcctgcttccaagagctagcattacatagtcctatgatatactaccaagcccagtttctcagtgattgtgagctaagaggacaaataacgtttaactcaggttttgttttgttttttttccccttttctttctttctctctgttgtttttgtttgtttgggttttttgtttgttgacttgcttgtatgtgtcttttgagacagtgtctcatgttcaccaggctggcttcagactcactctgtagccacagatgaccctgaacttctgatcttcctacctctctacctcccaagccctgagattgcagcttctgcctccacccctggtgatgtggtaacgggatccaactcttggctctgcgtgttctccgtgagcactgtcagccgagcagcatctgcagccctgtgtgtgcgattcctcattaacgcctcatttgctgcctcgtgatgatgagctgatgttgttgatctttctttttgaatttgttgagacagggtctctttgcgtaaccttggctgtccccagagctcactaagtagaccaggctggcctctaactcatagatacctgcctgtctgtcaagtgctgggaataaaggctccctgcaaaactttttttgattacaatgtttacgtgattaatgggtaaagacaggtgagtgttttcacctgttctatgagaactcactgttctccctattttcttaattgatacttgggaccacttaaaaccacaagctgcatagccttaacattttaatttgttagttgggccctgttgtctctttcctttaataccaacacacttgagaggcagaggcagccgatctctttgagttctttaaggccagcctagtctatatagtgaattccaggagggg

SEQ ID NO: 23612 - DNA, 1862 bp, Mus musculus
tgtgcgccaccactgcccagctatttatttactttagaggagatgtaatatttgtctttctgagccagaggcgtgtcttcctcttctgagtctctttcttcacattcatttgttcattgagacaagcttccccatgtagcattggcccatctggaactgactagacatggctagcctctgagggttctgcctgcctcagcctcccaaatgctaggattaaagacgggccatcaccaggcacggctgcctgcatgaaggcgaaggccttactttttgagataggttctcttactgaatctgaagcctgccattttggcaaggcaagcaagctgacaggtaaactgggatctgcttgtccgttctggggatttgagcagcctgcccagttcttccatctccccagtcaagtgcttggatcattaacatattaaaaatggtttgagcttcaagaaatggtaattggtggagatgacagggaactatgaggcccatcagaaactaaacgtaagcaaccgcatctgcatgttaatttgtcttaagtggttacaggtggtgctggcctcttggctggctggagcctgggcagcccagagtgcccaatagttaaatgagatcgcagatgtaggagggcttcctgctcctgccctctcccctccctacctcctccttccagccctcaggctcagccttcgggaagcctgcagtgttcctccctcctcgccatgggggtcggggtgggggagaagggcggcaccctcaggcggcagctccctacagtacttcccctatctttcttaatgcttgctgctctgcctaagggtgagtccctcccagcgctctctcttctgttctagcagttcccagacccagcttgtgcaaaagagggagctaagaggcacaccgcaggcaccatggtccgcctgttggcctccgaagtacagcagctactccacaacaagtttgtggtcgtccttggggactctgtgcatagggcggtgtacaaggacctggtgctcctgctgcagaaggattgcctgctcactaacaagcagctcaggaccaagggggagctgagctttgagaaggaccagctgaagatgggaggcgagctggataccctgcacaaccgcacggactaccgcgaggtgcgcgagttctgctctgaccaccatctggtgcgcttctacttcctcacgcgggtctactctgagtacatggagagcgtcctagaggagctccaatccggcaatcacgccccagatgtgatcattatgaactcttgcctctgggacgtctccaggtatgggcggaattccttgagtagctacaagcagaacctggaaaacttgtttgggcgcatggaccaggtgctgcccaagtcgtgcctgctagtgtggaacactgctatgcctttgggtgacaagatcaaggcggccttcctcccacagaagtgtaagggccagtacccccggatctcggtagccaccctgaaaaggaaagtgacccaagccaatctctatagccatgcggaagcaacaaagcactatttcgatgtgctggacttaaatttccacttccggcaagccagaaagcacctgcagggagatggcgtgcactggaatgagcatgcgcaccgcaagctctcctacctgctgctggcccacatggccgatgcatggggtgtggagttgccccagagagactcatgggagcctgattttgaggcgtgggaaagttcaggccaggtagaggaaaggcagccccaagacaacctaggacctcaggtgtttgccccttctccacattgtccttttagaccacctccccttctcccatcccctggcttgcccataaggccccca

SEQ ID NO: 23613 - DNA, 1176 bp, Mus musculus
agttcttctgacctccacgagaccccctcccaacaagtaaacgtaataagtgattaaagtaatacagacagaagtggacagttagccagggagagggcttggcagtggcaaaagccgtgcaggcttgctgacctgaggttagtccctgcaacccacgtagagcaggattcggtgatgcaggtgtgaaccccagccctctgatagcagctagtctgacagtacggcagctagtctgacagcacggcagctagtctgacagcacggcagctagtctgacagtacggcagcagcaacaagagaggctgccgcctatttggtgcttacttggtaatagggaaggttatttattaaactggaaaaccactctgcatagcccctaccaacttcgtaaacgcgatttggcaaatctggactggattatccagccgttgcacgcctggagagtgcttagagtttcacattggactctcatgcagtgctggcccctctcttcccttgctgtacttttccctcacccacagaacgcattctgtcaggaggatcctgtctgtctgtcaggagggtcctgtcctggctgtctgcacttcccctccctccccccatggactgcctggcagcctgcctgtcctgcccttcctgctcttggcagttgacctttcacctttgtaactaattcccacctttaggtacctgggaaggcaaagagttttattgtttgtgttctcagacatagtatgttcctaagtctgtctgggtgacaaattgaattttaacttttaactgggatgttagctggaagaacatagcagtctttttaaatttgtgaccttaagatgggaaaacttttaatatgttgattaaagaatcaattttaattgttttagaaagcactcaagaaggtttttattgaagaaactggcaatttgatagagactgttgatgcaccagatagttctgccactgtccctgagagtgatcgagcaacggcagctgtgggcactggaaccaagaagaatccaagcgagggcgtctctctgcctgcaggggataggccaagagctaaagtgttgaaaatagaagcagtcagtgacacttcagccccacagtgagtatagtccctgtccctgtccctgtctctataacgacggtcaccgcactggcagtctgcttactgag

SEQ ID NO: 23614 - DNA, 1177 bp, Mus musculus
ggtgaccccaaccataaaattattttgttgctacttcataactataatcctgctactcttatggatcataatataattatctgatatgtgatttcccccaaaggggtatcgatacacagtttgagaaccgctggattaaggcattctgatattgctagaattaagtccaatcaacacctcacctgattttcttttctctgccatatcttggctccccagtaaaacatgactggaccttccaggaccgagatgcccaattctacaggttccctggaccggagcccgagcctacaggaactcaagatgtggaagaggagcttgttgaggctatggccctcctgtcccagcgagggcctgatgccctactcaccgtggcgctccggaagccgtgagtgaagagcctgcttctgctcccattcccacatggccttcagttcagattccatagactctctgattcatcttggggaaaggacctaggcagtagaggctcagcccccacatcccagaccatctctcctattcctgagggtgtagggccagaggatctaaaggccctacccactggcagaggatgtggattttggacagaaagaggtcaggattcaaagtctagtccaaccagctagctactcactgggtgacttgggcctctccagccagcttccttcctcttctgtcaagtgaggatcaccatgctcatgtcctcgtgagagtggaatgaaacagtccacagacagtgcttagcacagtgcccgtccctggggctcacccacaaagcctgctattgataaccattggcttgactgattgctgtggagtggccagttggccccaggccccagcgggcaggtggcgtggcatggcgcctccctggctccggtccacgattctcagggcttcctctgctcctgcagcccaggtcagcgtacggatgaagaactggacctgatctttgaagagctgctgcatatcaaggcggtggcacacctttctaactcggtcagtacacacaactggcttgttcttcagccagaccccttcctactgctagatgggaagtgggggaggggaggaaggagggaggagggaagtttcctccccttgtctatggctatgaggaagacctttgtctaaggtcttcttttttaaattacagtttttaaattgttttatt

SEQ ID NO: 23615 - DNA, 2160 bp, Mus musculus
ggaactccagaaccatggcagagtatatgggcccgttcagtttctcagaaatctgtctggtccccttttggggaagatatagagctgttaaagggatactgccaatctgcccaatctgcccgttagcccagctagagggcagcttagacctttccaaatagatctattttcttagccctctgagggatctctgtaagtagggccacgacaatgaattcaatgggtaggattggaactatggctagtgacaggggctgggacaggcttccttgctaccccagacttcattgaagctgtgtgtgggggaggcatcaaaggtctggtcaagagaggaatctttagtacagatctccatcccctgttccccaccctgttaccctgaagtgtcgggtagccaaactcaccggtccttagggaattgacaattggctccttccctaagcagcacagttggacagaatccagcgtccgtccgtcctaccttcccatccagagtttgtttcccatgagggtgctagcgccagccaaccattcccatgtgtcgcatatgcacacatgaccacacacaccagagcaggactcctcggatgaggctagacttgaggaccacaggaaacacacccctgcacttagaagggctttgggatcgggggcaacctggtgggggcaagtgggagctctccatctgtactgagtctccaaccttgcccctcactgcacaagaccaccctgaccgtgaggacctcctccctgcaccagatcctaactctgacctttcaccttctctctctcctgaaggaactcttctgagtggacatgggcccaaggccttacctaagcggagagggagggcaggggctgctactcttctctgtaaccttctctgatgggttgtcactttgcacgtctactcttccacttgggcactgcccccagctctctgccttacctgtgttatgggcacttaagcagaaatacagcggccattttaaccagcctcagggtgtttctttgggggggtgggcggttttgagaggggacaagagtgggcaagatgggggctctagctgtctgatcatctccctaagtttggggctactagacggtattcctcatctctggtcccctatggggagaccaccagctgagatctcctttgctctcccagttctgtcccagccagggttaggatgcccacagactcaacatccctgcagattccatctccccaccctaagccaaggtagatgggaaagggaatctttctttttctaccccagccagactacttggggctccaagttgaccaggatgtgtggattcagaagcagaaaggcaggagctagcacctctctcacgctgggtacacttgtcctggcctgtgtttgcctcaccctggcctttacagtgtaaaaacaccatgggactttagagcagggaaggataaggaacagtgtcacttctagagccttctgctggtagacgctcctactgatagaggaggtaaagactactgacctcccggctaggcctggcttaagccaggcgtgcctgcgtcacaaccttttgcggtgtcttagcaacctgaacctgagatcttattcccgaatcccacagggcccaatgtgcagggctcagcctggggccatctcccttttcacctgggttggtgagcatgtatttggagtggtttcttcctgcatgtattagccaaggaaggacaagggactagagggtctgagttaggtccagacttgtcccctttccccagcccatcacaggatgctgggtgcacacccactccactgacgatgtcccaccaacatccaggaggcgttctcccaaggactttaaagcaaataaaacatatattgttcagaagtttgtttttttttttcacttttttcttttttacaaaaacatgcatacatagacaaggtacggtggggttgtgggaagacacacacacatataccctcttgcacgcactcatacacacacatacacacaaatactctttcttggtcccagacctaaacctcaaaagcctcgaagacttctggggtggcctcccctcccccatgtctgtctactctcccatcttgttcccctcagccaagctagtcctatgtggggcagcagccagagctgaggggtggg

SEQ ID NO: 23616 - DNA, 1113 bp, Mus musculus
gtcccccacacaggcattccccaaagttctgaagacagtcctctgttcccagcatccctgtgctctggcgggagtcacactgaatgaaggactgtggtggctgttaggtggctgctccctagtttggtaaggctgaagccacaggcctcaggtatgggaaaaccaccttgggttctcctaagccctgtgtcatcaagggagtgacctcaggaagccagtacaccagaactggggatgtctaaggcctctcgtgggccaggaatatgttgccagtggaggctcatactcgactggaatgatttcttgggtagctaccaggcattgtttactgcgggcgacatctggatgcacagttgccctctcagagtgcttagtaactggagggccacagaaggcctcgcagtacacttctctcgtgtgacacccctttgtgacgtcccacaagctctttccttgcccagtgggagccccttccaaaggaggtgatttcctgagtgttggtggggaaatggaaccttgggctagacaggtctgcatactgtcccctctctggccctggctgggtggctccaggccctcaccctgaccctcactgggataacaaatagcaatcattagcatccgaggcaggctggctcggagctgaggggggttttgttacacgaacaaacgcaccacaactcttaaggttgtaacttctatggtcgtgtcaggctgctggctgagtttctaaactttctcattggtggtttgcaggggatcttacccttccctgttggtgccagaccccatggagagctgtggtgctctgtgaggggaaggcctctgggggggggggagttcccccctctcttgtattctcatcctttcccttccatagggccacctcctaccctgaagcagccccacctcccagcatctctgcatccctggctgctcagcctggccagctggctatgctggcacagaccctggtctgctggtgagctataaatagctcctgcacccacggccttggcaaggtgctcctggcgtgggtgcagaggacactggagaagaggcagctgagcctgctgtccttgccagaccaggcccacagctggctggcgtagg

SEQ ID NO: 23617 - DNA, 1214 bp, Mus musculus
ctggcttctgcgggtactgcatgcatgtggtgaacagacatatgaaggcaaaacactcatatatgtaaaaatctttttttaaaaaaattagttctgggaattgcaagagtgagcttctttgtaaatgatgcaagcattgctatattcaacccctgcagtccttcagggtcagggtcaacttcacccatcccatagtgtcttcatggtcttcattgctatgcctcaagctgtggaaacactcccctgcctcactgcagtgctgtcttctgatggaccacttcctggattgggtccatctctgcagggaccaagggaaggtggcagatgctgggaaaagtagtatcctgtgaccacactccacaggccctctgtgtctggatgtctccttgcccctaatcctgcctgtgcaagagtgaacatgaggatgttcccaaacaggagcctctaatttacctgaggaccttcgttcccaccccagaacaggctgaattcctaccctgaaaggcccttgtgggctgggggttgggctatgtgatggtaggaaatgtagactggatggtccaaagctagtctggaaacaccttcacacaccaggtaaacacaggtgctgcatggcagctgggcagtggtggcgcacgcctttaatcccagcacttgggaggcagaggcaggcagatttctaagttcaagaccagcctggtctacagagtgagttccaggacagccagggctatacagagaaaccctgtatagaaaaaaaaaaaaagaaagaaagaaagaaagaaagaaagaaagaaagaaagaaagaaagaaagaaaggaagaaggaaggaaagaaggaaaagtgctacatagctaaaatataaatgtttaacttaaatgtttggtattctttaagtgtcaaaataagtgatcattatggaaaaaattggaaatttagaactcttcaccattacaactgctttttaaaaataccaatctttcaatgattagcacttgtaaatgttttaattcaccactactaagggttctgcatcgtcctcaaataagagaaacaaattttccctctcccatagcccttggggctagaagaacaagcctgtgcagtagaagaccagagaactcagaggctttatttgagcatcagagctatcagttgctaactaaggggaccctggcttgtcttccctgtatcccacttgctcacctcagcct

SEQ ID NO: 23618 - DNA, 3839 bp, Mus musculus
cactacacaagccctggcagaccctaaagtctcgagcagtccgttccttacaagcagggctgcatgtgcgagcacgcacgtgctgtgggagggcccccagaagtactgagcgcagcagccgggccccagcttcagtgctgcctgcttctgaccaagaagaaggaccttggcggttagcatcacacgccagagtaggatgaatacaggtctaggtggtctgtggctagttagtttaaatatgcttctagcctcagagagttttatatacatatatgcctatatgtgtgtatacatacatatatacacacacacacacaatgtgaaatatatatttcacagggatatgtttttaaaagttaaaaaaaaaaaaaagactgaatgtgtttaccatttagtctgtaggtttattttcatctttcaaattccagcacacagtgatcccagcaagccctgtgtatcgggcctttgtagatttcctaagagtgttttgagacctggatgaatctggtttaggagtaaaggttatcaaggtaaatgatgctgtcagctgaagatggggtgaattagacaggtaaacttgaggtttttaaactgctctttgttgttgtttgtagcacctctccccctgcccatctcagagctcctgaggtgagatggtgaggggacacagtgccagtgtcgttttgtacttaagttccacaacagggacgtttttctactttgtgtatggtggccggtagttttctatgcagtcttctccccgattccctgcgcccagccctgccagcactgtgctctctctccttgggcttatttggaaattttactctgttttataccaatcttgtttagtacatttttctatgttttaccacaagtcacaatttgaaaacaacaactattttttttactactccattgttaaatgaatgttaccgtctccactccagcagcctgtgcccctcttgcctccccctgcatgttggggatgagggccactgtccatgtgtgtctccttctctcgctgcctctccttccccctctcctccctttctttttctcttggtttcccataggaaataaatagctttctatatgagttgcgggccctttcacagtctcttttagaaaactggcgtgcagactcagcacaggactcaaggatgttgtctgcttctcagtccttaatgtatttaggtgacagcttacacggtggcagtgtgactacttagtctaaaggcgtccctctcaggcttttctcactgttgtctgaggctcatcacaggatacgtttctgtgtttattgtttgttcctttagacaatatctgctatatcttcctcagagactttttgtatggaccaaagcaacaaatatttattgccatgaatacaagaatatgagacatgcaacagaagcactttgtaaaataggtagaattgttgagccagtctggagttggctcccttctccaatgcagtttaaacgtcccaggtaaaagctagtgatcctaagaccactgtccaccccggagcaagaggataagtcagactgggacggggtggcctcatgggaaccaagtacagacttgtagactgtccttagagtcagccaacaggagcaggacaagtgtcggaaacttcaagagggaactctgatgaccaagactgaagctgtttttgtatttcatggccaagggtatgctacagactatgcctgttgttttccatctgtctctttttcccctgacaacatctccctgatgctgataatcatctccctcccctgtaaaaggaatatgtgaaggatgatagcttagcagttacagacttttcaacaaaacccccagtcctccagcagtcatccctggagtgtacccagagaaaatgacactgcttctgcccttttgagaacatgtgctatgatgtatggaagctggctacatccatttgatcacttgagacccactgtgacccccaggagtcctgtgtagggttcagtgtgagtacttgaacatagatagcctagagactcgctgtcagttcactcttctgtgtgtgaggagtacgtcctcctattctttagactgccctcagcactgctttagcatttagtggttcaaggggacagcagatcaccaccacctggtttatacacccatggtatgaacaatcattactggatggaaagagagagagagagagagagagagagttcgttaaagagctgctttttgtttaaatcttaacctctgatctttctgtgtcatcctccaagctctgaaagaaggtcagagtaaaaacggcggacattgtgtttcgttctgtcttcccttgctctactctcgtgcccaatgccaggtggagtgaggtgctctgcgttactgtcgaaggtcagtgtcagcaccgccttggttgtagcatcaaggctgcacgagccttgctaaatgcagcatgcctagatgtgccctggccttgtgtctgggctggggaatggctgatgatgatgtggtgacgctagagactgccttcccctcgacagagccagctgctaggaagggctaatgtgggagaatggtccccaagagcacaggctccattctgctcaggcattcagtctaatccttgtccaagtacccactcagtgtgtgtgcacccagggctgattaaagctctccctggtcacactaccttaaaatctcttgtctggacttctgtagtcctgatgatagaatggcctaacttctccctgtttgtcttgtctgccttctcatagggggcacagcatggagatgccaaggccaggaggctgggttggtgctgtttttctagccaagagtgcaagcgtctatattctcatctgaaaagaacaaggcagggctcgttctatgaaacatttcttaagaagaatagtgttgtgagggtgtgaggagaattggttatttgtcataacttccaaacactgtaggctcagagcagccattccgacctcaaacagggctctttaacagaagcaccgtcctcatcagtaggtcatgttgccatttggggctctcgggctacaccccaagaggcttatcagaacatctttttaaccccttaggtagttcctcctccgtcctttttattgacagggatatcccttgcacattcagatgatggcttcctttctctttgtcttgtcctgtaaaggcactgccttacctgtaactcacggggaatcctctgtctgaagacttgataagtgtgagaggtcaagccctggacttgggagccctggagggtgagaaaggtgggttaacaaaggaagtaaaagccacctgtcctcagggtcttacagtctgtaagtttatagtttgcctgatttggaaggctaagcaaacacagatacaccttgtcaagaaagaatgcgggctcattagcacacagttcagaatgaagctggagtggaggaaaggactgaggtggagatgtgtcagggatgatctcgcctttatctgtatatgtgactccctaggttttttttttttaattgatttatttaaaataaattctgtggattttgcttctgtgctttgactgggaactccctggactcaatactatatttgtgtgtctctgagactgtcctgtctcctcgtatataggagggtatgaaatatgtatgtatgtatgtatgtatgtatgtatgtatgtgtatatatgtgtgtgtatgtatatgtatgtatatattttcttaacatagatagttactcccccccacaaactgtctgctgatccaaactgtacctgtgattggatcttcattatggtctgggtttctgaatccaccccttaacca

SEQ ID NO: 23619 - DNA, 1275 bp, Mus musculus
gcactcaaggggttattcagcattctaatttacaagtcttatttttgtactccttatcatctgagtgattaaataattgcttctgactttctggtttcctagtcaataccttctcagcactgttagcccaccgtggttttccacagcatgctatctctgaaagctgagtctgcttgtcatctcccacgcacagtcattaatgcatgatatttccctatcttcaggactgctagagctttggcagaaaatctgagatctacatgccgatttgagaagtgtgtttaagatcttttctctctctcccttacagacagttcaagaagaagagaaggagatctacagacagctgctgcagatggtcacagggaagcagttctgtgtagcgaaacccaccacacattttccgttacgcctgtgagtcacgaacgcatctttcgtatgaacgtaactgtacagtttgctacttgatattgaaactgcactcttcttttactaggtctcggtgtcttagttccaataagaactctttgaaagactcgctgttgagaaacggaaactcttgtgcatctcatgtcattggttctgatacgtcatcctctggatctgccagcattttaactgcacaggagcagttgtcccacagtgcacattccctgtcatctggtaccccagatgttgcctttggatccaaagactctgatcctcaccatcacctcgctgcacctcatcagccaaatagcttaccagcatcaaatacacagtccgaaggtaaataatactaacagccaggtaactcttcattggatctgttgtaggcaaaactgtagtacatataactcagtacataatagattttaattgaatacatgtgatccaggtagctaagccgtgctaacaccaagcccaggtcagattcgttcctctcttccctcctttctcttccctctccccctctcttgctctttaaaggatgctcctttctcctacgcacccatgacttgctatactatttgatttatttctaaagggctcttactatgtatgtgccctgcctgcttggcacttgctatgtggtaggctggccttgaactcgtgccagtcctccccagagagctgggattacaggatcctctaccatgctaggctaaatgttttaacttcctgagaagagtcaaagctcactcagcccagctgcttcagggattgctttttgtttctcttactttataatgcacgtgggaggttctctgcagttctgtggactctcaaacatta

SEQ ID NO: 23620 - DNA, 1213 bp, Mus musculus
cttcttacccatcatcctgggttttttttttttttaatattaaatttcttgtacttaagacattaaaagttctctttgggggaaatttcattattttcaaaacaaactatagggctggtgagatggctcactggttaagagcactgactgctcttccgaaggtcctgagttcaaatcccagcaaccacatgatggctcacaaccacccataatgagatttgactgcctcttctggagtgtctgaagacagctacagtgtacttacatataacaataaatctaaaaaagaaaaattaaaacgataaatcaggctggattttattcttgtgtaggttttgagctgcttgttagatgctctcagtcaattctaaatggagcagtgtcttcacatgctaggaaggagtggtattatttgtctgtataattcctctctgagaacagtgttttaggggaaaagattgcctcacaggaaagtgttgttgaagggctgtgtcttgctctaatctgactcttcccctagatgacacagctgatggggtgaagatggacgctggggaggtgaccttagtgaaccacggctccactttcagaacccaccgcccgccacagtcaggctttccagaggagcagcttctgctttctgaccagcaggttagaatccttcttctcctttaagtaactaattgttttcctcactataaatgttcatctgagacagtttgaataccacactaaaaactccaagcatgtgaactttttacaattataattttagtggtggatttcttcttggattaagaaagttaagacaaaacatggtgtgatggtttgtatatgctcggtccagagaatggcactattagaaggtgtggctctgttggagtaggtgtgtcactgtgggtgtgggctttaagaccctcatcctagctgcctggaagtcagttttctactagcagccttcagatgaagatgtagaactctcagctcctcctgcaccatgcctgcctggatgctgccatgttcccaccttgataatagactaaacctctgaacctgcaagccagccccaaatatataatgtcctttataagacttaccttggttatgatgtctgttcacagcagtaaaaccctaactaagacagaaattggtacatggactggggcattgctgtgataggcctgaccatgcttttgtttagaagaatgtggat

SEQ ID NO: 23621 - DNA, 1070 bp, Mus musculus
accatgtggattctggggttcaaactcagttcatctcacttagcgatgcctttgttcactgtaaaacatgtgtgatgctgggcgtggtggcgcacgcctttaatcccagcactcgggaggcagaggcaggcgggtttctgagttccaggccagcctggtctacactgttagttccaggacagcctgggttatacagagaaaccctgtcttgaaaaacaaaaaacaaacaaacaaaaagaacctgtgtgatactttacagttgattggtattgatcttgagtagtgtgttatgcagtcattgttagcatctttttcctccctcggtttaaacagactctgtccctgttaagcctcccccttgactctcggtggtcgctctttcacttcatgactttcctagtggaaatgagctaagagaggctcttactgttgttgatcttgttcactgatctaagcgggggggggggggggggtagagttaccttgagctttggtgaacattgtcagttgtagcttattgatgtcctagatgctgctgacggactcttctcttttccccaggacttggatgttgtgggtgatggcatgccatgcccgccgtcgccattgctctttgatccttcgctaactcttgaagatcattcagtcacagaaagtgccggagacgcagtgggtatctttaacaatgactgtcagctaggctccctcatgtagtgaccaggccaggcgttggctagcatgaattccagggagtatcgtgattcccaagtagagagcaaaagtgcccaagatgccataaaatggaaatacccgctttaataaaacaccacaacccaaagcaacttgagtagaaaaggacttattccaccccttacttcaagccgcagtccgtcaccggggaagtcagctgggaagctggaggcaggagctgatagagaggcataaaacaacttcttttgcttttgaatgcttgtcggtactaattttccagatgaaccgcagaactcctaatggttcttaatcctcaagagggggcatccgtttgtttgagtgaaaggtgatagatacat

SEQ ID NO: 23622 - DNA, 1066 bp, Mus musculus
tggctggctctctcctgattccagtttattttgtctgcgccacagtgcagggcacagttgggtgggtttttcctcctcagtgctccgaccctcacagagcccagaagtgctgggcttggacagctgtaatagctgcagtggtgactgaggtggtaggtcataaccttagggcttcttaagtcatttgcgtagcatgcttgaggttgcagctaccactccagaaagcttcattgctaggagctaagttagttgaactggggatttagcttggtgttggagcatatgtgtgtgactcaggatttattccctagtactaccaaaacacttgatgtttgaatcaggttcccactatgtagccccctggttgtcctggaacatgctgtgtagaccaggcctctcagatttgtctctgccttggctaagattgatacattgaccacagtgcctagttaaagcatgagtgttcattaatgctgccaagggctcctccaattcctgtgccatcaagaagaaagatgaactggagtgtgtggccaagtctaaccactgatttcccagctgctgcctaataaactgtcctttggaacaattccaaaaaaaaaaaaaaaaagcatgagtgtctttcctccttacctctgagggatagactctaaggtacctgaaggagccctgaaactttgtaggtatcatcatgcaggtgttatatgcttatgaataagccagttatggccatataaagttaatgtaagctatttacaatttagagataattcctggttaagggacagactgctctttatatcactgtactgtgtggagaggtagttttaggattaggattaactccattctgtatatataaggtttcatggttacagtattggtggttgggtttgttaaatgttacattttccactttgtacgaattgactttccttgtataactgaataatatcatagttatatgtttttttggggggtttatttgtatttgttttctcaattttaggctcacaccactcgttccagtcagaggtgcttagcctttgtggatgatgtgcgctgc

SEQ ID NO: 23623 - DNA, 1213 bp, Mus musculus
atactcatgctaggaaaagggagaaacaaaaccatcttgagattggaattcctgttttattctcctgagatgggagaacttaagcagtctatgcaacccatcagatggtgagaaatagctttctaccattccactgagctctcagtgaccctcatacgtcctcaaatgtcttggcattgattgaggtttcgatcttgatgtttaggaagcattctcgctgcaccacactgtcatttctttcttactcctcagtggatggaaacttggaagaagagtggtactgtgatggtacctgatggagtggtccaaattcccagttgtttcctaagtgggtgagctctccgttttagtattctaaagatgttaacgtgaacttggcaatggaaaggggaaggaaaataatatttaataaaaatcagtgtctacgctttccctttatgagtgtgtattcctggttgtatgaagagaaactcatgggttttgtgttgccatgtgaatgtcgagagggatgcttgacagcatgttaattgaagccagagcaagtatgtctgccgtcaggtaatctggagatgccagtgtatgctgagggagtgattagctgatggctataatgaagtcacttacaaagcagaaaggctgtctggccggccgaagaacccaaggaaagcagtgcagcagcctcactcacgtaggtgtgatttagggttctgaactggaaactgatctgtattacctgactttccacaactgtccattttcttatcagaccaaagaacaaaaagaaaaaaaaaacatgaaaaagcgaagtaacacacctttaccggtttatgtcactcaggtacaatttcgtggggaggtttaggtttgttttgttttgttttgttttgtctgatttttgtactgctcagcatattattctgctgtcgcctctgtcctccgtggggcacctcagttttgggtgctactcctgggatctctactgctgttaggtgaatgatgataggatggaagtgaccattatcataagggctctttgtaaaaaaaaaaaaacttgaaaaactcaaaaaaattttaaagaaggatattgtatacattttatagtctggctatcagtttgatatcttgctgtcaagtatgtttctcaatctgtatttatccatcccatcaataaacgttaatgataaaatacctgatccttgtttgtatgttccgt

SEQ ID NO: 23624 - DNA, 1165 bp, Mus musculus
agagattcttaaagtccttttaaaaaagtggatcaggaatcctgttatgggccttgattgttccagacattagaagtaaatatatttgatgaaggaaatcttgaaaaaatactgactagataaaaattgtaagccaagctttctgactgaaaaatgctacctagccacagatcattgctgttatttggttcattgcatgagtgtgtatgtgtgtgtatatatgtatacacatatatatgtgtgtgtgtgtgtatgtgtacacacacatatatgtgggttttggggggtatggataagatggtgctatgaaaataatttgtctcttgttttaattaatgaagcttctgtcatgccaagtagtctttagggagaagtcagaatcttttcattaaaagtcatagggaaacagaagttgtacgggtgctgcttgccaaggacagactagaaaagacactgaggcagttactagtgctgacacactggcccaacggagagagaatgtatgggaaggaatatgtcttacttacggtgactttgtggttcttaatctgcatgtttgagttgtctgcagcgcctgccgttgctgtgcacaacaaggagctccttgctgataaaccagtgatatttcttgatgtgtaacttttgaagtaacatttctttcttggtatttcctgtgttgtgcaagatagatgtgtcatcatgattactaactttaggcttggtatttgttgagattttgttttccatcctgaccttcccaaacggaaaagtaccttttagtttgcatctttgtctgtgatgatttgatttggggacgtggactgtttttttaatcactctcattaatgtcacgtgttttctaatcacatgcaatcccttagcacaaaggttgtcatatttggtgtcatagcatttcttcacagtaaacctgttgttaagtttcctagaactctgtagtggactagaaataactgcttactagagtcttctaaagagctacttcatgctgtagtctggtcttctactgtagctcaacactgagtttgattagttgagaccttactatattagttccttctggtactgtctatagatagatgcagtgtctgcttctaagtcagtgcgtaggtcctgaactccctcgtgggctctgcatgaacttctg

SEQ ID NO: 23625 - DNA, 1926 bp, Mus musculus
aggaggccgccacactgacctgaggtctcagtgtgctcgaatgctcacttgctgcctgctggcaggggccatggaacatctctatcccttgtattgccaaatagcaaaagggtcagggttccaaaaaagatgacctgaccccaaacctggcctcctaagtctggcactagggaggtcctgtgtgtttgtgtaattgtgtgggcctgtgtgttgtgtgtgtatgtgtgtctgtctgtctgtctgtctgtctttgaggtctccatgtgtcctcatgctccagttcctcagctcttcaccggggactgcctctctcccgtgggcctctgtcttctggcgttaaggccaagtttcctgtgccaagggatggagagtaatacccaggttgcacaggaggttgggtggtgtttggtagtaaaatgataacggtctggggagaggagtccttttttgtgccaaatccctaagtgccatttgggggccacatatctgcactatgactgtccccctgcctagggcagggacccaagcacctgcttaatctctagtgttccttggaacttgaactgttggaggtttgtgggtagaggtgcaggcatttcctgggttcctgggcttgtctcttgggggcatggtgtgctttctgactggggtagtgtgggatccctctctgaggaccccgatgttggtactaggggatgggaacctaggaacttggaactgggctgccccaagccttcggcctgaatctaccatggctagactctagccccggctcccaatcttcacgaagcctgcaagggttgtactctgtcctcgcctgcccttgcctgcctctgacccttgcagcctccctgactctggtctgagttagctggtgccttggtttctctgtctgcatctagttaagccagaggcattacgcctccatgtcgactgatgatcttagacgtgggcaggaaaggcagaggagagtttcaggaggtgcggaaggggcaggctgtactttggcccttcctcaagcttctgccacccattctctgcagaggcctgggttctggtttggtactgctttcctggaaatctccatgtaccaatcggtggaccactgggcgcttgattagccaaggcagaggagaggaagatcagctggtccaggcagaaaatttcctctgtctccccgagccatatcctagccttggataggaagggactactagacgccattggggcaggtgtgaggtatataagccaaagcagggagaccttggctttgggtctgcttcttgccaggtgggaggggcttgtccacaccctggctccccgtaccacagtgccagccagtcatgtccctctctgagttaccgtagccactctcctcaccatttggggaggaagtcagggcacgggaggcaatgggctctggttttataatgtaaccactgtcggagtgggggagggtgacgtaccatgtatttcagtgaaatatttaatatatttaaatatcaataaaatcaaactctttgtataaaaaaaaaaaaaagaaaagccctgttctctgcagctgtttgggtgcagggttgggggtcagaaagtgacaaaccctggtaaagcaagcaagctcctctcccaggagtctctgggcctctctcatctgtgatctaacagcttcctgtggttttgtgcctgtcaggataaagctgcagcctcctcagacagcatgactgctctaggcctttcagcatcctgagggcaaatgtctcaccccaggtgtttgctctgacccctgccgtgcattaggtctagacctctggtgttgccattatagcccttcacttctctcacaccaagatctagcttcatgaggaatctcacacaggactcatggccttgggataactcccttgcctcctcacacccaggatgcaa

SEQ ID NO: 23626 - DNA, 1855 bp, Mus musculus
ataacgcctgtacactgcatggcggcaaaggccaggagcagcgagaatttgcattgtccaacctcaaggctggagccaaggatattttggtggctacagatgtggctggccgtggtattgatatccaagatgtgtctatggttgtcaactatgatatggccaaaaatattgaaggtgagttgctgagagggttaggagagactgcttatattctctctcagagtcagggtgcactgggagcctctgctttagtctggagtgacatcccagtgtcaaggctgacccttgatggtgtggagagtggtgctggctaggagagccttagtgttgtatgcgacaagtcggcagtggggtggaggatgggcagagtcgcgagcactctggctttaccgggtgtagacagcaggaggtgggtggcttgcctgtggagtggagtggggtggaggtctctgtagaccagacgactggcttggtcccgagtgacatcctctgttccccagattacattcacagaattggccgcacaggaagagcgggcaagagtggcgtagccatcaccttcctcaccaaggaggactcagcggtgttctatgaactgaagcaggccatcctggagagcccagtgtcgtcctgccctccagagctggcaaaccacccagatgcccagcacaaacctggcaccatcctcaccaagaagcgcagggaagagaccatctttgcttgacacagcgcctgactggagtagaagccatctctggagctggtgcctgctctcaggcccttgtgtcccttcccaggctctttcttggacatgggcttaggaagtagtcaggtcccgggtctggaagcctgtgaggggctccatgggcacgggaaggtggtgtaggaggcagaggggcgcagttacatcaggctcggcccagctctgcccctgcagccttgccgtcctcgtcctggctgtggggcggctgcctagcaccaccctgtccccagcctgaacaaacacctggtcacccggaggggacttccttagcacatatgtgtgactgtgtactgctgtagttgccctgagtgacccagggatcgggcatcatgaggattgtgaaccttggactctgtcactctgacagctgctttcccatttggcatttaaagcaggttgggcgcctttggaactgcgcagcccgatgccacgggcgctgtgcactctaggcatccctccctagggattttttttttttttttttttttttttttttttttttttttagatatggggacaggatgagctggctgtgcccatcattaagtcagtggaatttctgttttctattctctgagaagataagtttgtatgttctgagaataaacacaaatattaaagctgtgtcagccccgagctccattctcctctctgggaaacaagtcaggaccgcagcgttagctgaggaagtgaaaggaagacctggcctcctggccagcccgtttatccctgtgcaccacgcggggcacgtgggaggcatggcagcaggatggccgtgtgtgcctctctcctgcttttctgtggagctagggcgaaagggagccgctgaaactgcactggagccgatgcgccgggtcctggattcccttgctcatggggtgggtgcagccgagttgggtctgaaggaccatagatgggtcctccgtctctgccacaggcccaaccttgccccttaaagggaggcaagtgtgtgagtgagttcaagtctcagctgcttgtggagccctctggcctgaggtgggcagtgggaagctttgactctgtcgcttcctcgcgtctcagagcaagtcccttgtgtactgccaactgcct

SEQ ID NO: 23627 - DNA, 1176 bp, Mus musculus
taacctccaatcatgtcttcttcagagcaagactccgcaaacttcgcaaaaaggaggccaagcaacgctgggatgaccgccattggtcccagaagaagttggatgagatgacggacagggactggcggatcttccgtgaagattacagcatcaccaccaaaggtggcaagatccccaatcccatccggtcctggaaagattcgtctctgccccctcatatcctggaagtcattgataagtgtggctacaaggtaaaggggcagactgacccagagcttccgctggctcctcctacgttctaggactgcaaatgtagttgggactggagagctctgttccttcaccatccttcgtcttctctgcccacagcaccaaacttaactatgcctgtcactttgtggtggaaatgtgggcctttagggcttgtgtttttccttgggccccctttcctatgtgtctcgggtatatggtgggagcatgctttgcccgctgggttagctctatcccagatggtgtgattctctacccattacttttattctgggccactgtaggagccaacacctatccagcgtcaggccattcccattgggctgcagaatcgtgacatcattggtgtagctgagactggcagtggcaagacagcagccttcctcatcccattgctagtctggatcaccacacttcccaagattgacaggtaggctcagctcgccatcagttgggtgcattgctgggtacgacataaggcaaactagaatcagtagctgttttgtttgtcgtctgttgagagaaccttatatgccctgggttatcttgtagtctgatttttacatgggatcaccaacctgcccattcccatagttgctctaagagtaactttgtcttgttcctgcttgtggtcaatgagaccaaagcttatggagatgtgggataccccatttaccacaggatcgaagagtcagaccagggcccttatgccatcatcctggctcctacccgtgagttggctcagcagattgaggaagaaaccatcaagttcggaaagccactcggtatccgcactgtggctgtcatcggtggcatctccagagaagaccaaggcttccggctacgcatgggctgtgaggttagtttctcaaatgagctctaattaattacactaatatatactaa

SEQ ID NO: 23628 - DNA, 1199 bp, Mus musculus
ggaatctgctgccattggagacacgctccacatacactacacggtgaggggcttgggggtccggggcgtggcctgggaggggcggcgcccggctgaaacacgtcagctttggcttggacacgtggcaagctatcctagagaacttgagtcctaggatcagcccgcacgtgggggcgtcctctcgcctgcttctctttcttccttgttttctgccgattcctctccagcgctgagaaaagaaggatagagagagctccaagaagcgccagccccgtggggcttcctgttccttcttgcccatggtggtggtgggtggaaggagatggggacaggacacaagtttgttaaaggggttgcttccttccgggtggtcccaaattgtgggaagaatggtgggtttagacccaccatttttttttgtcttcagggcagtttggtagatggacgcattattgacacttctctgaccagagatcctctggtcatagaactcggccaaaagcaggtgattccaggtatgtgccccgtgcctctgacctctccctagcctaagcccttgcttgcttgccggctgtattgctctggaacagccgctagaatgaaaaggatcccaaggctctcccgctacctcagactccacttctaacactcttcttgccccacacatcactgcggcagagagtctgagaagtggagctaagctcatttgatgacggggagcctttgattttcctcttgggtactgtggggaagatatgtagcttctagttcagttttgccttcttcctcaaggtctggagcagagccttttggacatgtgtgtggggtgagtatctgaaggccggggcctgactgctcctttttccgggtagaaggtttctctgtcatcccttctccagtggcaggacgttgtagagtaaagggcccctgacttcatactggagaggtgcaggttaatgggaaccccccccccagggcatctctccagctgtcagttttgttgggggaggctgagtgctgtggggagattggtgactttgctgatccacctgtcaggtggagaatttcatattttggtgtcgctatctgaggaggggggtaaggcacttcagatgggctgaggctgccagctcacccccctcctgcctgcaatccctgttccttccctcagagagaagcgaagagcagtcattccttct

SEQ ID NO: 23629 - DNA, 4725 bp, Mus musculus
gtagtagagcgagccttgctcctgctgctgaatcacacacacttagaaccctgctcttccctatctaattccctggccctgcagttctggaactactgggcctggagcagttccttcagatcttgatctgggtttcctgagataacgagaaggtggccatatatgcgcctctgacagatgggtgcgctttgtagagccttgacagatgctgaggtatctctctgtgtgtgttcctttgtgctgcaggatttgccgaatgctatgaatgctgctgagatcacagacaagctggggctgcactccctgcgtcaccgcaattggtacattcaggccacctgtgctaccagcggggacgggctgtatgaaggcttggactggctggccaatcagctcaaaaacaagaagtgagagccaggcagccctctctgactaccccacccactcctgacacacacctgctgtctccttaccccaattttcccttcttcctcttgaaagtggccaaggtcctgggtatcatgtccacatgcccagcaagcgccttgccttcctcctcctcctcctcctccctcctccctcctccctccctgtacactgacacggtcagcccccaactgctgtcctgatgatgaatcattccaatttactggatttaaaacagaatgaagctgttacggtttcgtggggtggtccccattggtttcaggaggaagagtggggtgttctctgtttgctgtttggcactggttgctgtgctcttggcatctgagtcccttccctgtgtccctggccactctcctccctgtcttcctttccttctgaaccctctcctattctacatggacattgcacgggcctctctgtgtgtgcgtgcatgtgtgcgcctgtatatatgtgtatagagagatatatatgtagggtcaggggagggagcacagcgcagctcagggcttacagccgggacactgcgcactggaacctgtcccctgcccttctgtgttggtgagataaggggatgtgggtgggtcccgttgttttcctctctgcaggtggcattcctggatgttgggatacatgatgggcgccttcggccatctgtcttacctttccttctccactatgatgagcacacgaagtggcattggtctctgggtgactgttcctaaggagctgccgtgctactctgcctcattagtagcccactcacgctatcagtctagagtgttgtattgatcctcccccaccgtcctcagatctgctcctcaggaactcagagggaggtgggttagtgggacctgcatgtagaggtggacagtggtcggggaaggcctagttttccatcttactgtcataaggaggagaaggtaaggcatggagcagtcctgttcctgccttctggtctgtcagagatctttccccttagtagttctgctggcctgatgaggactgaccaagtggagtaacgagaagccatggactgggggtaacatagccgacctcagtatcaactccctgttcttcagttctctgtctagttcaggaccaggaaagatgagtttctgttgtcctcgatgtcctgtccccctccttcctggcagctttccccagtcctcaccctgtcctgaataggtctgtggggttggagtagatgccgtaggaccctgcatggctgagcctggaactgtgatcttcagggccctccctccctccatcctctgcttgttcagctgctgctgcaggtctgtagagggcgcctattccagaagatctgacctgggtcctgacttgtcactgcactgaagctgtggctgttctgtgggctcctgtgtgtgctggctgcgccctgagctccaaaacagctgcccataacctctctgctaaggtcaggaccctgggctctctgcagcttggccaagggactcttcccagaggcctgttctgagttcctccactcagtggccaggtttcttgccacctttgtctatagcaggcagataggttccccagcctaccgtcagctgagctgtgcgaggttccaggatgtctctcagtgcaagtagtgctgtgataccccagacaccatgtgagcgtgtgctctagacctggtgtgtgtgagtgtgtgtgtgtgtgtgtgtgtgtgtgtaagtgtgagtgtgtgtgagtgtgtgtgtgtgtgagtgtgagtgtgagtgtgtgtgtgtgtgtatgtgtgtgtgtgtgtgtgtgtgtgtgtgtgtgagtgtgtgtgtgtgtgtgtgtgtgtgtgagtgtgtgtgtgtgttctctacatgggggtgccagggattctgttccattttaaatgggttccttccattccctgcattcctctctttactgttcctgcgtccccctctgtcgacctcactctctctgccgtttctaagcccctaccccctcctttctgttgctgctgtgagcgcctgtttgccttctccgttcactcaccactttgcctgtttggttttggttttgtcttctgtttgattttctgctctatctttgctttgagattggtgaggactttgccttttgctctgccacactttctgaccttcctgcttagatgctagttccagataggttttgtacattgcagacatgagtccactcctgcaccccttaccagagcttatttttctccacctcctgggaccaacctgaggctgagcaggctaaagcagccttgaatgttgccttggtgcatgctgctccagacacatccagcagggagcagtagcaccttggtaacatccctggctttgtggggaggtgggggtgctttctacattccctaatccatctttagggttgggtgtttcatcccatttctgtgaactccctctcttgcttttctcaagctggttttattttttatcttgttctacctttctttctggggacttccccttccctccacctccagagtttgtggtgttacagtggtatctgcagttctgaagtgggtttttttctttttgctttctctggaatgtagactgtacatgtttaataacttgccttctctatccttgctcaaaaatgtgggataatgcaatgactgtgccctggttggaaattaaacttgttttacgcagctctggcgcagccctttgtccttgagcaacactgcggcagtagggagctgtgtggtcctttccacaccgttccttttctctgcagaggtgggaagacacacctcagcgcgtggagtcatggcggaacgcaggtttattgggactgcggttatggttccttcttccctcacaccctgaaggaagtctaaacgaatcaagtgctagcatgtgggggctctatgactgaccaactcctaaagagctctgtcctcaatttacctgtatttaccacctgttgacagactttcagggcagcggttctcaacttgtgggttgtgacccctttgagggtcacatatcagatatcctgcatatcaaacatttacatcatgattcataacagtagcaaagttacagtaagcacagggtaaacatctgggcagcatagaaaatggtaaatatctgggcagtatagttttgttttttgtttttttgggtttttttctagacagggtttctctgtatagcctcgaactcagaaatccgcctgcctctgcctcccaagtgctggaattaaaacgcgtgcgccaccacgctgactcatctgggcaggacagtaaacatggggtaaacatctgggcaggacagtaaacacggggtaaacatctgggcaggacagtaaacacggggtaaacatctggacaggacagtaaactggatgccttcctcagcataaagcagccaggtgcacgaggctgtgtggatcctgttgccaggcagctaactcgaagggatgtcttgggtgcatctttagtaaagcttacattcccgttcctgttccattgctctggtgtctccggctgtcactgaagacaccgttccacacagaggaaaggcgtggtgccgccctcagtaagcagggaaacctctccttcccttgctgcagagcttgagtcccacatcctgccatggactgtttaatctgcactcactgcccctcctttctcccgggacaggtttccttttcctccagttaccgtcaccctctcaggaaccattgctttttgtccatttctctgacttctgaacctcaacccatcaccaaccccgtgtcttcaacattactttccctgaaagtctggctctttgcctcctcctggctcctccaggcttctcctgctaataagttaggagtatctttctctggtgctttgtttatttgttaataaatagatcactttctgagctgtattttgttgctttgttgttgttttgagataagatctcagtatagcccaagcagacttcagacttgtttgtttctgtgttttaagagagggtttctttgtgcagccctggctgtcctggagcttgattcgtagaccatggcatccttgtactcaggtccaccagtttctgcttcctgagtactgggataacggcctgagccacgtcagctgccaccacctgcttgctgacctcagacttgctactctcctctgctggattacaggtgtgtgccagcaagcgtagccttggctgtaatacagtgataatagaggccaggtgtggcagtgcatacctgtaataccagcactcaggaggcagaggcaggaagatctctgaaggc

SEQ ID NO: 23630 - DNA, 2627 bp, Mus musculus
agttccaggaggggacagacaggagcagccgctgggcatctcaggtttgagggggatatgggccgggactacccagaagtgtcagggagcagggaggggtgtgcggccgggcctcacagccctgctgcctccaccgacctcgctggcccaattcaaggctgcaaagagacttgactaagcttgacaatcccaaaggccgggtcccacacctggccctgcctgccgggtcctgcccctaccctcacccccatccccttcctctatctgtctctgtctccctcttttcctctgtgtttctgtctctctatgggttgtgtttccttgttttccactctgacaaatgcaacatgatgggaaagaggcagccagatgcccaggagggcaagccgggcaagccgggcaaggagaccccgcacccacacctacctcatttaagtgttggattttttgctgttttgaaatgtgagaccctctccgagccccctactgccctgactctctcccccacctcactgccctcgtctgagtgggtggaaggggggtaggagaaggacaacaacaacaataacaacaacaaaaatccatctttgtttttaattatgggcgtgggatggcggctgaggcaaatggtgatgaagattgggggtgactggtccctagttgctctaggacctccttctccatctggacatggaggcaggaggggcgtgctaaacctaggaccaggatctcgctctcctgttttcccagcctcatcccgagcccatctgccctccagcccctggacggggtgtggggggtagggtgagggctatccctgagcggcgtgcccatacccagtgaggccgggtgtggtccagagctctcacttgccctcagtcaccaaactgctgctggtctggtgggaatgggtggtgatgtgggggtggggagcttagtgtcagcgcggggagggtggggggtatttatctatttatacatgggattgtacatagtcttgtggggcatgggggagccggccggaggtgagagccctcccctctccccctacccccggggagagcaaatgtaaaactactaatttttgtgctttatatattctatataaatatatctattttctttttacaaaaccagtttataaatggtaggggggtgtggggcggacacatggagctccccttgtgggggggccccctccattacccaacctaccgccctttcctccccccccctccccaccccctggctgtgactgctgtaaggtgggggtatagagagaagctgggtgattcttacccgggttgtatagttggactatgttataacgcacaaagtgagctggccccagggggagccagagggtgatggtgcccttatcttcctttcccttcctttccccccccaagcttgtgctgcagacgaacctcttcctgcgggtagcggtagggtagagggtgtgtgaggcctcagacccctctctggtggagcgaggggatgaaatgacgcttctatgcagttctctcctaggggctgtgggcagagggcattttgtaattactattttcaagaatcagattatctggattgtagagatgggctggatggtggcaaatgggcaggcctgctggaggggtagggcggttgctgttgtgattttaggtttttgttttgttttaaatttgggggattgtggattgatgggggtagggagatttttgggttttttttttttttttttttttttttctggccttttttttttcttttcttttcttttttttttttttaaagctgcttcctcaactgtttcaagctgcaaatgtttgagaataacaactcccccacactcccacggaaaccattgtaattagactagacagtgggaacctgggcttgctgtccccaaagccacagagctgaacggtctaggcattaggtgggggagatggtctcctgtgagtcaggctctggttggggtttgggccctagaactgggaaaggagaaggggcagactttgtaagcatatgctaggtatccgatagtcctgtagaatttagtgaagaaaccttatacagtttttaatttttatataaactataactcagacccacgctacaaggttggaattttggttgttgttggttttttttttttttttaaagtaccctgcctgtataattgcatcagaatcccacccccaaccccgccccctgtgtttgtattttgggttggtttacacttgcactcaattttcagtttctccctttttaccttctaccttcacctccaggaccctccccctttaaaaaaaaataaatcgctgacaagtgtgaacccgtgaagaactttcttttgtgttgtgtgtatcctgtacagcaaggttggtccttcgtgacaacggatgaaatggttcccttttttaaagcgctctctcttcctccacccccagcgcccctgtccttggcatgttttgtatcagcgatcattctgaactgtacataatttatgttgcgagaggcaaagggcaagttttggattttgcttcttcaaagtttgtttttaaacgataaataaaaaaagaacattttaaatacaagtgcctctgtcccatgaccctcgccgt

SEQ ID NO: 23631 - DNA, 1105 bp, Mus musculus
tggggaagacctccaagagtgtggcattgagcatggtttgacaggagggtgtagacagtctgaggtgggagagcgggctcagtgtaggggaatgggtgcctcttccctctctgtacctaaccctgtcctgggtgctgtctgctccccagggtgtccagaagggtcccagtagggagttgctgcctgttcaagctgagacccagatgcctctactccacttgcacagcacagcagcaggcacttgtagcacttgctgatagcacattcctagggaggaggcgggcaaggtctgctcggtctgtcgtgtcatggactgtatcaccccccccaggccccataccttgaacagcaccagcatgtctaaggcgtatcagagcaccttcacaggcgagaccaacaccccgtacagcaagcagtttgtgcactccaagtcatctcagtaccggcgcctgcgcaccgagtggaagaacaatgtgtatctggctcgttcgcgtatccagggcctcggcctctatgcagccaaggacctggagaagcacacgatggtcatcgagtacatcggcaccatcattcgcaatgaggtggccaatcggcgggagaaaatctatgaggagcaggtactgtggggtggctggggctgctgtggtggaggggccaccctcggcctaggagcctggggacaggtttgaatccaggaggcagttggaaaaccgtgcaggagggagaagacaggagaaattgggccggtcatgtcagctaagcctgctgccgggtttgcttgctaacctaggttcctccttctcaactgtctttctagaaccgcggtatttacatgtttcggataaacaacgagcatgtgattgacgccacgttgaccggaggccctgccaggtgagcgtaaggacttaagtgtctctggtggccatgtgggtgtcacctgttgtctctgacactgactctgtcctgccatccaggtacattaaccactcctgtgcccctaactgtgtagcggaggtcgtgacgtttgacaaggaggacaaaattattatcatctccagccggcgaatccccaaaggagaggaggtaagaggagagccctgaccct

SEQ ID NO: 23632 - DNA, 1124 bp, Mus musculus
gcctctgcctcccaagtgctgagattagtgtgtgtgtccttgtgtctgtactgatgatgaataaggcagcaggaagtaggttttagtgagcatatattgtgtgtcacagttgagctagtcaagtgattcatacaggttgttctgtccactgcgacccagaaggtaagccttgccattacgtgagtgtacacagacacacagtgactgagtctcgggagacttgggtgtttggcttaagttccatagccattgctcaaacttcaacatactctattcaactgaaagtatgtctgtccgttcagtaagaactgtggctcctgctcggtccctgggccctgtgcttatctcagtattacaggctctgtcactcccctccacattgaaactgctctaggaaatgaggtgtgagtcctgaagagccacgggaactgatggccatgtggcgggaagtggagcttaggatggggcttggcaaatgttaccctaaagggtgctgtctgtctcacatctagctgtgtggaaccgcatcattgagcctgtggctgccatgagaaaagaagccgacatgctgagactcttccccgagtacctgaaaggcgaagaactctttgggctgacagtgcatgcagtgcttcgcatagctgaatcggtaagcaagcggcaaggagctggggccaaggtgggaatacttactggtcccgtgccagaggagtaaggcagccatccctgtgtccacagctacctggggtggagagctgtcagaattatttattccgctacgggcgccaccctctgatggagttaccgctcatgatcaaccccaccggctgtgccagatcagaaccgaaaatcctcacacactataaacggtgagcttgtgcggctaggccatgggctggaggtgtggtaggacctggctgccttctgagggtttgagatgcagatcagagttctttccaggaacctggggagtcgcccttagccctgattagaggcacacaaatttcctggggtaccccttacctcttccctaatcagggaaacaggacagagttctcttgggcaccctgggaatggctgctggggaggttcttggtcgacagtggtgaaacgtatatgggagc

SEQ ID NO: 23633 - DNA, 2015 bp, Mus musculus
gttccaggccttccctcacaaaagccttcagccctgccagcccccgagctgaacaacagcctccatcagacgccccatgccaagggccccgccctagcctctggcttggagctggtcagccgcccaccgtcaaacactgaacttagtcgtccccctctggccttggaggctgggaagttgccttgtgaggaccctgagctggatgacgactttgatgcccacaaggccctggaggatgatgaagagcttgctcacttgggtctgggtgtggatgtggccaagggtgatgatgagctgggcaccctggaaaacctggagacgaatgacccccacctggatgacctcctcaatggagatgaatttgacctgctagcgtacactgaccctgagcttgatactggggacaagaaggacatcttcaatgagcacctaaggctggtggagtcagcaaatgagaaggctgagcgagaagccctgctgcggggggtggagccagtgtccttgggccccgaggagcggcctccacctgccccagataactctgagcctcgcttaacatctgtgctccccgaggtgaagcccaaagtggaggagggaggacgccatccttctccttgccagttcaccattaatacccccaaggtggagccagcccctcctgccacttccctcagcctgggtctgaagccaggacagactgtgatgggcacccgggacactcgaggaggagtgggtacaggatcgttccccagcagtgggcacacggctgagaagggcccctttggggccacaggaggaacaccagctcacttgctgaaccccagctcactgagtggcccagctgcatcctctcttctggaaaagtttgagctagaaagtggggccctaaccttacccagtgggcatgcagcagctggggatgaactggacaaaatggagagctcattggtagctagcgagttgccccttctcattgaggacctactagagcacgagaagaaggagctacagaagaagcaacagctttcagcacagactgtgctgcctgcccagcagcagcagcagcagcagcagcagcagcagcagcagcagcagcagcataccctccttcccacaccaggccctgcccaggcactgcctttgccacatgagcctgggccaccacagcagcttgctctaggtattggaagtacccggcagccaggcttgggccagtcgatggtgcccatccagccaccagctcatgcccttcagcagcgcctggccccatccgtggctatggtgtctaaccaagggcatatgctaagtgggcagcaagcagggcagacaggcctggtaccccagcagagttcacagccagtgttggcacagaagcccatgagtgccatgccagcgtccatgtgcatgaagccccagcagctggcgatgcagcagcagcagctggcgaatagtttcttcccagacacaggtaacttcacatcggcgtgtacgcgtgatgctgctcatcaccaggtgggcactgactctaggtaagggaggtgggacaccgaggacgttggctgaacagcaaagcactgtaagcagaaagtcagagcttttgagagggagatggctggatgcctgagtagcagaggttttatatctggttaaatttgggacttggagagaagtacaaggatatgcaatcccggtgcgagaaaggttgcaggaaaagctgtggagagcagggaatggtagggcagagagtgggctctgctcttgtctcagttggtcgtagtgaggaacgtctcaaactgagggcatcagtgaggaggtactgtgtcagatgctgtttgccactacgtgctcgatttcatcttaacagactcatgcaatgggtctggttggttttggttatagaagaggaaactgagacatgaaaaagttaagtaacctgtctgagattgtacaagtaggggttggatctgaacttcatggcattaacatttcatgagagtgagattagtcctttacaa

SEQ ID NO: 23634 - DNA, 1669 bp, Mus musculus
tggtctagccgatgtaaacaaatcatgaagctctggagaaaggttccagccgctgacaaagccccctacctggtaagagcacgggcgagcttcaggcctggcatggaagcgttttagtggcttacctcaggtccttgttctcctgtcatcccctgcgcagcggggtgaggagggactgagctctggggaggcagtttgatagggagacgggagctgggcttgaggtggacttctaagccctgtgtcctgtcctgtgtccctcagcaaaaggccaaagataaccgggctgctcaccgcatcagcaaggtgcagaaggtgagtgggcggccttcctaggactggggacgcaggtcgtgccttcagtcagcagcctgactgctccacttgctctctctgtagcaggctgagagccagatcagcaagcaagccaagatgggcgacatagcccgtaagactgatcgaccggccctccatctccgtattccctcccagccaggggcactgggcagtccgccccctgctgcggcccccaccattttccttggcagccccaccacccctgctggcttgtctacctctgcggacgggttcctgaagccaccagcgggcacagtacccggccctgactcacctggtgagctcttcctcaagctcccgccccaggtgcccgcccaagtgccttcgcaggacccctttggactggcccctgcctacgccccggagccccgcttctctgcggcaccacccacttatcctccttacccaagccccactggagcccctgcccagcccccaatgctgggtaccacaactcgacctgggactggccagccaggggaatttcatactaccccaccgggtacccccagacaccagccttccacgcctgaccccttcctcaaacctcgctgcccctcattggacaacctggctgtgcctgagagcccaggggtagcaggaggcaaggcttctgagcctctgctctcacccccaccttttggggagtcccggaagtccctagaagtgaagaaggaagagcttggggcatcctctcctggctatggtcccccaaacctgggctgtgttgactcaccctctgctggcccccacctgggtggcctggagttaaaggcacctgatgtcttcaaagcccccctaacccctcgggcatctcaggtagagccccagagcccgggcctgggcttgcgggcccaggagccaccccctgcccaggctttggccccttcacctcccagccacccagatgtctttcgttctggcccataccccgacccctatgcccagcccccattgactcctcggccccaaccaccaccccctgagagctgctgtgccccgcctccccgatcactgccctctgaccctttctccagagtgcccgctagtcctcagtcccagtccagttcccagtccccactgaccccacgtcccctgtcggctgaggctttctgcccatcccctgtaacccctcgcttccagtcccctgacccttattctcgtccaccctcacgacctcagtcccgtgatccctttgccccattgcataagccaccccggccccagccccctgaagttgcctttaaggctgggcccctagcccacactccactgggagctgggggcttcccagcagccctgccctctggcc

SEQ ID NO: 23635 - DNA, 1219 bp, Mus musculus
tgcaggaagccttctttggaaaggacctgctggacctgagtcggaaggccctgtttgcagttggggtgggccggccaggctttggactgggagcctcaaagccccgggccgatggaggttcggataggaaggagcttatgacggccatgcacaaaggttagtttataaagatgaagtgctctggggtgtccagcttaccttctgcctcgtagttggcaaagatgtctggaggtgggatgggggggtgggcggagggctccattctgggtgtcgggcgtcaccagtctctgactggagtggggctgttgctcacaggagatgatggcccggatgttgcagatgaggagtcccatgggcctgagggcacggctgatttaccaggtgaggactgctggggggattgggtctcattttggtcttgcttgttatcagtaggctctgcctgcccctgagcactcccagagttggcgcctgggcactgttcttggggtttgtgttggcctgagtggtgtgtgcctccataccactgatggtagccttcttctggtattctagggcttgaggatgggggtgtaaaggcatccccagtgcccagtgaccccgagaagccgggcaccccaggtgaaggagtgcttagctctgacttagacaggattcccacagaaggtgaggctcgcacagtgtgctgggtgtgagggtcctgcatgggaaggaagggcccatctgtggagtagatctgtgctgctctgttgggagagtcctgcttaccctccttggccatggcctgtagacctgtggggtcagctcagcagcgtgtgcaccccgtcattctcccacagaactacccaaaatggagtccaaggacctgcagcagctctttaaggatgtcctgggctcagaacgagagcagcatttgggttgtgggactcctggtctagaaggtggccgaacatcactgcagaggccctttctccaaggtacttaaggcagggggtggttccaagtctgccatagctggccttgctacctgattagatcggcagcttctgtttctctgatcctgttgctcttgtaggcggcctcgctttgggcagtctcccctccagcagcccgatggactcctacccaggcctctgccagtcgcccttcttggattctaggttggtatctgcgcttaactttcttgggtggcccctgtcgtctccctccgtgtgggcac

SEQ ID NO: 23636 - DNA, 1042 bp, Mus musculus
ctcgaacaaaccaaaccaaacagataacagaaccaaaccatggtatgttctggaaccagagcggagaatggacactggagctccacatgtacaaatagatagcgttgtctttaacttaaggtataatcaatccgtcctttgggtttttctaaaaactaccaattcattagttaatgcacgagtaacatttattagcttgttttagtaacaggttctaaaaggtgaaggaacctgagggaaacgaaccttgttctgtcgtcagtttggtccttccttaccaacagctgtgttgttcactcagtggggctgtggttggggatttctgttcagcccagctcctggaagcctctggagaggttttgctgtttggtgttaagagtgctctgtccaaacccggctggccggctgctcagaggtctgccctcagccgtgtaagctcttcgaatccctccccgacacagctgaggcatctcctgttctccaccagatcaccaaggtgatgctgctgaagggctggcgttgtgtggagtgtatcgtgtgtgaggtgtgcggccaggcctccgacccttcgcgcctgctgctctgtgatgactgtgacattagctaccatacatactgcctggatcccccactgctcactgtgcccaagggtggctggaagtgcaagtggtaaggagaagcagcctgggctccgacgggaggtggtgaatggcctcagatacagttagcagtaaaagagaccagcccgctgggctgctgctcagtgggggcgcccgcctctgggatcctaggttgggtgctgaaggtctttctgcttctactaggtgtgtgtcgtgtatgcagtgtggggccgcctcccctggcttccactgtgaatggcagaatagttacacacattgcgggccatgtgccagcctggtgacctgtcctgtctgtcatgctccctatgtggaggaagacctgctaatccagtgtcgccactgtgaacggtgagggcatcccttctccttaggtcgactccgggtgctgctgtgagctggct

SEQ ID NO: 23637 - DNA, 1153 bp, Mus musculus
tagctgactgctatgcatagaggaggtaaacggttcacccaggtcaactgggaccaaaaacgtggtacttggaaggaaggcactgctcggttttgctcttctcccatggtggctgttcttagaggcgaggttggtttggtcattactcacttagtacttgtcgatacttggaaacttgacttcttttctgtccccgagtgggacacctgggtcatttttataaagctgttagacgcttcatttgtcatctttccctccaagcctgtgggcccagcacacgcagtcctccctgtaatgggtcccttccatcacttagggtcggagcagcagtttcccaggacgacgccggcctcgtggaggagcagcgcatggaggccgagggagaggacgggcccgactgaagtcgaccacttcttccgttgagacactggtagtaaggacaggctccgcacccccaagtctcaccccttaagcatgcctcacacactccttaagagttaagcacgcttagaatcctgtcagtccgatgtttgctagcaagggcctgactacttggctctgaggattcttgaaacctctactgttgggtcccagtaggggaatctgagtggtctgcctcttacttaggccttagcttagccaggcatgcacacctctcctctgcataggggaaagagggcggcttagctgaggcagactttccttcctcactctctataactctctgcttattaaggtggctgatattgatagttctcctagcaaggaggaggaggaggaagacgatgacaccatgcaaaataccgtggttctcttctctaacacagacaagtttgttctaatgcaggtactgtatggagttaggatggcccagctttagcagtgagagaggcatactgagtgcactcttgcttccccctacccctgccccgtgtgtgtgcgtgcatgtgtgtgcacgctcatgtgtgcgtgtgtgtgtgtgtgtgtgcgcgcgcgcgcgcgtgcacgtgcacgtgtgtgtacgctcgtgtatatgcgcgtgtgcacgctcatgtatgtgtgtgtgtgcgtgtgtgtgcttgctcatgagcttacttggctgagaaggtggatgggaacaatcagggccccagtttgcttgttgcgatggctg

SEQ ID NO: 23638 - DNA, 1184 bp, Mus musculus
catctcgtcttttcccaccatttgaagagtctcccctatctcctccacctgaggactctcctctgtccccacctccagaggcatcacggctgtccccaccccctgaggactcccccatgtctcccccacctgaagactcacctatgtcccccccacctgaggtgtcccgcttcttgcccctgcctgtcctgtcacatctgtcgcctctgcctgaggtatcacggctgtccccaccacctgaggaatctcccctgtccccaccacccgaggactctcctgcctcacctccacctgaagcctcccgactgtccccaccacccgaggactctcctgcctcacctcctcctgaagcctcccgactgtcccgtccccgggaagactcacctgcttcaccaccaccagaggactcactcgtgtccttgccgatggaggagtcaccgctgtcgccactgcctgaggagctgagactctgccctcagcccgaggaaccatacttgtctcctcagcctgaggagccccgactctgtccccagcctgaggagctgccgctgtccccacagtctgaggagccatgcctgtcccctgtgcttgtagaaccaggcccgtcttctcagcctgaggagccacacctgtcccctgtgcctcaggagccacacctgtcccctcagcctgaggagccacacctgtcccctcagcctcagcagttgcacctgtctcctcattctgaggagccctgcctgtcccccatgcctgaggagccatgcctgtccccacagcctgaggaactaaatggacctcctcagcctgcagagcctcctgaggaaccaagccagagctctgcacctaaggagctgtccttgttttccccaagtggggaaccacctttaccccccatgcttggagagccagccctgtctgagcctggggaaccacctctatccccacttcccgaggagctgcccttgtccctgtcgggggagccagtcttgtcacctcagctgatgccaccaggtaaggcggtattagtgttctgttcctctgggggcagtctgaacacgttatggcacatctaatctcagagcctcttcttctctcctccccagatcctcttcctcctccactctcacccattatcccagctgcagcccctccagccttgtctcctttgggggagttagagtacc

SEQ ID NO: 23639 - DNA, 1265 bp, Mus musculus
tacgtgctggctctgcttcactcagtagctgacctataccttcctcccctttctccggcagaggaggctcgctgtgcagtgtgtgaggggccagggcagctgtgtgacttgctcttctgtaccagctgtgggcatcactatcatggagcctgtctggacactgctctgactgcccgcaagcgtgccagttggcagtgccctgaatgcaaagtgtgccaatcgtgcaggtaagagtgtagccatatgccaagtgtggacagaaaatgaggctaggaaggatcccacaatgtgtcctgtgccctctaggaaacctgggaatgattctaaaatgttggtgtgtgagacatgtgacaaagggtatcatactttctgcttaaaaccgcctatggaggacctgcctgctcactcgtggaaatgtaaggtgagtatctttagatgccactgcctttagcatctctacagtggtcttgagtttaatgggtcacatgcatgcctctgtctccagctgaggtttgactagagtctgtcttgctttctcgctcccctagacatgccggctatgtcgggcctgtggggccggctcagcagaactgaatcccaactctgagtggtttgagaactattcactctgtcaccgctgtcataaagcccagggaagccagcctgtcacgtctgttgccgagcagcacccagctgtctgtagcaggtaagtggtgtcaactgagattggggcggggcattgggagcggtgagcctggaggggccatgttaaacaggcagccagtcagcagtgcagtccacctcgttgatggagttgttagctggagagagccacagtgcctgctcccctgtgccctctgcagattgtcccccccagagcctggtgagatccccattgatgcgccggatgctctgtacgttgcatgccaagggcagccaaagggtgggcatgtgacctctatgcaacccaaggaactggcgcccctgcaatgtgaagccaaaccactaggtgagtaggacatgaaggtccctgaaattaatccttggttctgtggcaagagtcagcttttgctttgcctcagaccctgcacgttctgtagaggtagatctgaactaggtagggagatgatatgttgtgtctgcagggagagcagggacccaacttgaagcccagttggaggctcccctgcatgaggagatgccactgctgcccccgcctgaggagtcacccctgtctccaccacctgaagagtcacccacatctc

SEQ ID NO: 23640 - DNA, 1099 bp, Mus musculus
gtctgctcgggataatcaggtgctgaacttaaagattggacccaggggcaaggctaaccgtgttttcctacatgctgattggtggtggggatagttaggaagcgctgtttgccttggggctggatagtatcggctctgacccaactgattgactgctgatcttattccttatagctaactcaagatgtcttcatcaaagtcatccaggagattgcccgggtggagaattcttatggacgacaagaccgccgatgctatcttatgtgaactcttggcatggaataactgccctgtttctgccgcagacattgtctaacccgcagcagtggggcagaccctcaggatataactgctatggttgccaactatgtcccctgtcctctgggcacacagtatggcactcttatttttgcacactcatcccaggttctggtagcctggatgttaatgtttacaaaggggcaagatgtctcagggaccctggcttctaactccttggttttctaaaccaatttttacagtctgtacagtagggatatgagtcttgtgcattgattacccaggacccaccctcctgggtaggttttgggtgttggttgggtaagggtgtttggttccttggcagttctgaagtagaactgtctgctggggtaacaatgtatatttccaaataaactgagaaatcttttgttgacgtttgtgtctggagagagctgaggactggtggcttcagtatttagtattcactcttgtctttctcctcactaaggaccccaccctaagacttaaccactcgccttttttcatctattttgatgtttcttttttgtttgttatattttttttttttaacttcaccaagatctgttgggctgccccacccatctaagtttgtgggtcctgaagatccccttaactacagatatactgccctctagtggctaaatgccatatgccatccgactagctgttgtcctgagaccatgacatttgctgtgtcccctcatttctaatgatgtcaaggagagtagaggtggagactaaaagtgtgtgataacccatgagaattgagaaaagaatgtgcttggcgtacatgtga

SEQ ID NO: 23641 - DNA, 1146 bp, Mus musculus
acctgctgggtgactttggacgcttcaactggctaggcaatttctacatcgtgttcctctacaacgcagcctttgctggcctcaccacactctgtctggtgaagaccttcacggcagctgtgagggcagagctgatccgagcctttggtaagggcatatggagcccgggttggctgctggggagttcattttgcagcaggggtggccccagcagagaagaggttgtgctccgtgtttataggtcacccattgttcatcctgcccctcctcactgcctacctctcttttccttctcttttccagggctggacagactgccactgcctgtctctgggtttccccgggcttctaggaagaagcagcatcaatgacctccagctgggggctgagaaggagagaactgggcagtgcctaggcctggcggtgagccccagggggctgcacctcaggacctggaacctgagagtaggtgacagaggggacggaccatctgcactgttgcttaatctgagccagagtttgggacccggctggcctcctgccttttcagatgtagctgtggcctgagcatccatctggtggagctgggggactcgctctagttcctggacccaaatacgtttacacatctatctgcctcaatcctgttccaggccatgcctgaagccatgtttacatgatttgatgtgcaatagggtgggtgggacttggggggactgggccaggggtaggttctggagacaggtcttccttgcctctggcccagaagagccgaagcactgtgctatcctgtggagggctttggaccactggagagaccaagggtgctgggaggaggcggctgcacccacgagcaataaaattgatcccagggttttcttggttcttttgtaaagagcttgtccctgtgtctatctgagttccttgttccaaccagtcctgagccattctcagccattcctttctctctggagccatcgatctggtgtccggccagacagttctgcagagggctgccattctgcctacagctttacttaaagtgggttacctctgctgggagtagcaacccacccctctaaccactcaggaagcaggggcaggcaggtgtatgatttttgtgaggccagcctagtctacagtgca

SEQ ID NO: 23642 - DNA, 1135 bp, Mus musculus
tacttgtatgtgtgtgtgtgtgctttccctgtctatgggccacatctgtgaagtgcctacagaaaccagaagaagtcactggatcctctggaactggagttacaggtggtggtaagctggcttatgggtgccaggaactgaacctgggtcctttagaagagcagccagctcttaaattgtcttaaccactgagccactccctccccccttgtacctcctaagacttactctttagagtttgtaatttgagctccagagactaagtcagggtcactgccttgggttcatggatttgtatagtgagtttgaggccaatcagggctatagagaaagatgttgtcttaacaaaagaaaaggggccggagagatggctcagccgagagcatggactgcttcttaggggacctgggttcaatttctagcactcacatgggaccccacaattgtatataatgctagttccaggggatccattggaccaggcatgtgtgtggttcacatatctgtaaaggaaaagaaaaatactggctcttcaattagccgtgtgcatttaatcagctgtagtcctcttaaagtggaaaagactgtcacctcttctgtaggctgaagttccaaactgagagactgtgtacacattcaacatacagaggaccccttgtatacagtgacttagaagataagtaatcagccaggcttggtagcacacagttttaatccagcattcaggaggcagaggcaggtggatctcttgagttccagcccagccagggggttttaatactagtgaggcctgttttaaaatatataaataatagatgataaatagttgtaaagcctggctgttcgtgaagtctttccacgtcaccatcctggttctcctaggatcacaggtataggccaccatccctggcctcccatcttagaattgagaagtttcattgtaatatctgccttgcctaaggagggagaggatctggctacacttcaccactggtcacctgcatcagatggcagctgtcctcttgtataagtgaggatccttagtgcactcactgctccatctgtaactctgggccagctgtcccacctgtgctacttgactgtaggtgtctgagatgtgttcttgtctagaccc

SEQ ID NO: 23643 - DNA, 1609 bp, Mus musculus
cacaggctgaccagtgcacaggtctccagggcttcttggttttccacagctttggtgggggaactggctctggcttcacctccctgctgatggagcggctctctgtggattacggaaagaagtccaagctggagttctccatttacccagccccccaggtttccactgctgtggttgagccctacaattccatcctcaccacccacaccaccctggagcactctgattgtgccttcatggtagacaatgaggccatctatgacatctgtcgtagaaacctcgacattgagcgcccaacctacaccaaccttaaccgccttattagccagattgtgtcttccatcactgcttccctcagatttgatggggccctgaatgttgatctgacagaattccagaccaacctggtaccctaccctcgcatccacttccctctggccacttatgcccctgtcatctctgctgagaaagcctaccatgagcagctttctgtagcagagatcaccaatgcctgctttgagccagccaaccagatggtgaaatgtgaccctcgccatggtaaatacatggcttgctgcctgctataccgtggtgatgtggttcccaaagatgtcaatgctgccattgccaccatcaagaccaagcgcagcatccagtttgtagactggtgccccactggcttcaaggttggcattaattaccagcctcccactgtggtacccggtggtgacctggccaaggtgcagagagctgtgtgcatgctgagcaacaccacagccattgctgaggcctgggctcgcctagatcacaagtttgatctgatgtatgccaagcgtgcctttgtgcactggtatgtgggtgagggcatggaggagggtgagttctctgaggcccgtgaggacatggctgccctagagaaggattatgaggaggttggtgtggattctgtggaaggcgagggggaggaagaaggagaggagtactaagtccattccttgagccccctgtgtcgtcaaactgctccagtattagttgcaggcactgatgcttctgtgctgtttccattctgtgatcatgtcttctccatgttgtacctcttaagttttccatgatgtctcaaagtaaaagctttaagaaaagagttttgtttctggatactttgtttcagatcctgtagctcagatgagcctaggcctgcctcgctaattgcaatcccctgtgatagtcattataggtaaccgctcagctgattcattgcctcttgggtactaggggagcactagactgagaaagtctgtatggcatgggagctttgcttgactccacgctacctaaaatacttgccaagatgtcaagtgatccttaaggctggttgtgcacttacttccattgaggccaggctgacacagggcatggagggtgtgttgtttgaactgcaaatatcttgagagtggtatgaattccaattagccctgattccagtttgaggattggggtctaccaaaaggcatgaagtctaagagtttttgtcccttactgctaaggtaaagtctacaggggtgacagttaactggtcatttcctactaggaaagagccaaaggaagagta

SEQ ID NO: 23644 - DNA, 1195 bp, Mus musculus
gagatcaccaatgcctgctttgagccagccaaccagatggtgaaatgtgaccctcgccatggtaaatacatggcttgctgcctgctgtaccgtggtgatgtggttcccaaagatgtcaatgctgccattgccaccatcaagaccaagcgtaccatccagtttgtggactggtgccccactggcttcaaggttggcattaactaccagcctcccactgtggtacccggtggtgacctggccaaggtgcagagagctgtgtgcatgctgagcaacaccacagccattgctgaggcctgggctcgcctagatcacaagtttgatctgatgtatgccaagcgtgcctttgtgcactggtatgtgggtgagggcatggaggagggtgagttctctgaggcccgtgaggacatggctgccctagagaaggattatgaggaggttggtgtggattctgtggaaggcgagggggaggaagaaggagaggaatactaaattaaatgtcacaaggtgctgcttccacagggatgtttattgtgttccaacacagaaagttgtggtctgatcagttaatttgtatgtggcaatgtgtgctttcatacagttactgacttatgaatgattgatttgacagagacccaagctgcccatttcacttatgggttttaaataaaatactccctgtcttaaaagttgtcttgtgttctatatttgagtgtgtgccagctttcatgctttggctgaaataaataccacgacctcagaggaaagggtttattctaccttactgtctgtccatcaagcggggctggggcaggagctgaaaggggcaaagagggaatggcacctcctggcttgagccacgctgtgctctgtctgcagtttatctgacccaggaccacctgctcaggggtggtgccacccactggggacccaaccttcccacactaatcattaatgaagaaaatgatgctcccaaagacctaattacagactagtgtgatggaggcacatcttcccatgtgactgcacattgtgtgaagttgacaggttaccaccacattatatggaaattatgtactatataaaaaagattttgtggtgtaggcctgtcgtatcaacagttgggaagcagaggcaggaggattaaaaggtcacatactatataacaaactgcagaccagcttgggctacgtgagac

SEQ ID NO: 23645 - DNA, 1132 bp, Mus musculus
gcgtcagatcccctaagccagcctagtttttagtgttacttcaacggcatatttatatttagcccagttaagaaaaaatgtccgtaaaaaatttttttttcaatttaaagctagagtaaactaccaacagcgggtttttttctctcccttcccctctcccccccctctctctctctccttccttccttccttccttccttccttccttccttccttccttccttcgataaagggtttctttgtagctctggctgtaatagaactcaccctgtagaccaggatggtctggaactcagagctctgcctgcctctgctacctgagctgagatgaaaggcaaaccacttggcttgcactttggtttttgagtgtcttatgctcatgccagtcttgaaatcattatgtggccaaacatgaccttcaactaaaaccaagatccttctgtctccactacccaagagctagggttattcacctggttaacaatgtattagttcagttttcaagaaaaaaatgggtgaggctatcaaaccctgggctctggaggcagcggcaggagtatcttctgagttctggtcagccagcacaatgagacccggtctcaaaagcaaacaaagttaccaggaactcagcccggcttggaggagagtggctagttctctagactttggaggctgagacagggagggggattgctcatcatgagtttggggctccttagtccctagtgagtcccaggctagagcgggctacagagtgaataatttcggtaaaaggaacctccctgctaaataagttttaactatttgagagaccatttacctagcctgcacctggtcagctgacaatagaaatttaaaagaaaggctggagagatggctcagctaagagcaccaactgctcttccaaaggttctgaattcaaatcccagcaaccacatggtggctcacaaccatccttaatgagatctgatgccctcttctggtgtgtctgaagatagctacagtgtacttacatataagaaataaatctaaaaaaaaaaaatttttttttttttaaagaaaaccccatcccagtattgtttaaggtctatggaagctttggggaagtgaggtgcacagccctcaggtagcg

SEQ ID NO: 23646 - DNA, 1196 bp, Mus musculus
ttgtgtcttccatcactgcttccctcagatttgatggggccctgaatgttgatctgacagaattccagaccaacctggtaccctaccctcgcatccacttccctctggccacttatgcccctgtcatctctgctgagaaagcctaccatgagcagcttacagtagcagagatcaccaatgcctgctttgagccagccaaccagatggtgaaatgtgaccctcgccatggtaaatacatggcttgctgcctgctgtaccgtggtgatgtggttcccaaagatgtcaatgctgccattgccaccatcaagaccaagcgtaccatccagtttgtggactggtgccccactggcttcaaggttggcattaactaccagcctcccactgtggtacccggtggtgacctggccaaggtgcagagagctgtgtgcatgctgagcaacaccacagccattgctgaggcctgggctcgcctagatcacaagtttgatctgatgtatgccaagcgtgcctttgtgcactggtatgtgggtgagggcatggaggagggtgagttctctgaggcccgtgaggacatggctgccctagagaaggattatgaggaggttggggcagatagtgctgaaggagacgatgagggtgaggaatattaactcatgtgctgccattctatacttctgtggtctcatctttgtctttgtgtgtgctctaactgtcctaaactgtcaataaaggtgtttccgttgtaagttgcaaactggcatctggttcatagcttttccccttcccctttgagattgcatcttgctagtccaagatggcttcctgcccctacacctctatgagtgctgccatgatatgacagccatcactgtccctaactgaatcatggattcatgactcattgagtgtgcccagttgagactagtgattagttgaccattttcaagtacccactaggtgctgtgttctgtgcttactgattaaaaacaaatgtgtattttgggctggagagatggctcagcaattaagagcactgactgcttttccagaggtcctgagttcaattcccagcatccacatggtggtaatgggatccgatgccctcttatgtgtctaaagacagctacagcagtgtactctccccgccccccccccggccccccatcctgagacagggtttctctgtatagccctgg

SEQ ID NO: 23647 - DNA, 1101 bp, Mus musculus
actatactgccttacccagcactttctaactttaaaaatatagaaataaaaattattactatttgtgtgtgtgtgtgtgagagagagagagagacagagacagagagagacacagagaggaagaacacagataagtaccaggtggcttatgtggaggtcagaggacaacttggagagtcagttttctccttcaccatgggctctggagattgacctcagattcccacgctattgcaaatgtttctagtcactgactgtctcttggtcccttttatttctataaatgctctgtgttttaaatttcaaaattaagttttcatgtggtgctactatttttctacttactattcctggcatgacggttggatgcgttcttcctgacattaagcagtgatcatattgtgaactgcactggcactattattcaccctgctgtagtctgctgcccggtgacctgcctgtgccctcttttgcagataaacgcggtacgtgcgatagttcccaataagagcaacaatgagatcatcctggtcttgcagcactttgacaactgtgtggacaaaacagtgcaagcgttcatggaaggtaacgccagttccctcagtgtagactctggaacctgagccgcagcgcagtctccggacggcgctgcatactgtggtcttctgttagctagggtactcctttcattcccaagctatagaaaactggaagagatgctaagaaaactcctttgctgtcagatatgttctccccctccccaaatcaagaaactgtgcagctgacagactgtgggatttgaatggaattggataaagtaattgaagacgctattgcaaaggaggaagtcaagtggcccacgaacacagaccagttcaagacccagcattgatttccaagctccattatgagttagtttggttctggcaggggactcaaatgttatgagttcagtttccttacatttctatatgctagatagaaaaaagtaacagccttgtccaactccttagatttatagagttaataagtgcttcttaaaattctttccatataacttgtttgaaaaaactttactctgaagctgttttgcctttgaac

SEQ ID NO: 23648 - DNA, 1220 bp, Mus musculus
ttgactctcccctgccctacaatgtgtgttctgttccggggaagactgacaaatctgcttgtctttagctttctttctactgtccttttgcactggtcacttcagagtccactcagaagtgttaccgtcccaaagttgtattggtattgcagcaggtgagaggagcagaaaagaaaggacagcacagggggagggagggaagactctaaaaggtccatggtcatttccattcatcccatccctctgtcttccctgggtaactgagtaaaatgggccagggtttgaattctgtccagaagtctccatacagttagctttctatcatgtaacttttcccatatgagtatttgatacctgctgccttccaccaaggtaaaggatctctattttacatgtttctattaccgattatactcaagagaatttacacaaacaaatgagtgcaaacagtattttaggtagtatccaaaaatccaccaaggttagggatgagatggtgtcatcaaagcacttcaggtggagggccaccctgtctagacagttggggagtttgagaaagagaaaacctaggctgtcgagatggcttagtggcttaagtgcttgctgcaatggcagaaggattggagttcagatccccagaacatacaaaatgctcagctccttgtaattctagcctttagtgcagagactggatcaccagagtatgacagctagtgagactggctttatcagtgagctccgagtttggttgggagacctggctctccccaaggaatagggtaaaagattgatgaaggataaaggataattcctaacatcagctttgggcctctgcatgctcatgtgcctcccatgtcctcagacattatgaaatggggaaagaaagaaagctcacttccaaaatgtagcacactggattggaaaggcaggcactctcagaagcccagtaaacattcacagaggtacaagcgactgccaagtggtgtgcttggtcctaagaggacagagtgtgtgggtgtgcgggtgtgggtgctcgggtgtgcggtaatgtgaaagtaaaacagagtgaactttggatcatcttgaataaaatgagagaaatctaacaattcctgtacagaaagttaactaggaagccctggcctcaggatgggccagatgtggaactgcctgtagcgaaaggctttggatggtagatgaagagaaaaaagtatttattt

SEQ ID NO: 23649 - DNA, 1181 bp, Mus musculus
cagcttctgcttagggagaaaaacagccctttagccacatcctcaccttttacagagtgtttgagctgggctcagaggttaagagcactgactgatcttccagaggtcctgagttcaattcccagcaattacatggtggctcacagctatctgtaatgggatccagtgccctcgtgtgtctgaagaagtgtactcataccaaaaataaataatttaagaaaaaaaaatgtgtttgagccaggcgtgggcacacctcgaatcccagcccctggggggcagaggcaggaggatctcttgagttctaagctaatatagtctacagaataagtttcagggtagccagggctacatagtggcaccctgtctcaaaaacaaaatcaaacaatataagactgtctgtctgtttgtgtctacgtctatgcccagaggccagatgaagtcaaccagcattttattcatccctcactgccaaatttactagacatagggcctctcattgaacctggaggtaggctggcagacagcaagccctaatgatcgccttcatagcactagtgttacaaccatgcacagttgtgtgtgtgtgtgtctgactgtctctgtgtatgtgtgtttgtatatattatgctggcatccaaactcaggtactcatgcagcaagtgctcttacccactgaggcatctcttcagccaccaaaagacattatatatatattttttccatgtatttaagtttgtctgcatgtacatctgtgcatcatgcctgtgcctggtactcatggaggcctactggagtgtgtcagatccctggaactgggggtatccacacatgtgagccatcatgtgggtgctgggaaattgaacccagatccttgctcctggaagcagctgtcttgagtgctgagggatgtctcctcctgccccaccccaggtatttttgaacaggtaataaaaccatatagttggcatattcataaggcataaaatgacatactgtggaaagtctcttccttctgtgccaggaaggatctagcctttgctgctgttggaagatgggtggtgttgagcactgggtgggagagccgctctcaaactctagtccataaagtgacaagagagtgtcttttgtatcttatacaataaagcttcgccccaccttgcctccctcagcttagcagcaca

SEQ ID NO: 23650 - DNA, 1205 bp, Mus musculus
aagaatccaaggtgcgttgattccctcattatatctaaagatcctgattcgtctttgcaggtcctttagccaggacctcttctgctggagaagtgaccaggctccacttttaatgttcacagcctagtgagggaacaggcattcctggtccatctccttcctaaaggaaatgaactgtggtggcttggatggggcttggatgttaacttccttcatctcttaggaccaaagccctggtcttggagctgctggcagctgtgtgtttggtgcggggaggtcatgaaatcatcctggctgcctttgacaatttcaaagaggttggtctcttctgcatgctcgtgtgtgtgtgtgtgtgtgtgtgtgtgtgtgtgtgtgtgtgtgtgtgtgtatttaagaggagaaggggggtactaggtatatccaatttactgggatctctagtgactttaactgctgagcagcctgcttcagactgagactacaacaaaagccaaagcaaaactgaagtcttttagatcttgttccaggacacctcccagtttccagttaatgaggctctggatagagtgcagactgtggttggagacatggctcagtagtcagagcccttgctgatcttgcagaggccttgagttcagtttccagtatccaaatggtggctcataactgtctttagttccagttccagaggatttggtgcccccttctggcctccataggaacagcacacacattcatatacattcatagcggcaaaacacaatcttcttttctttttccttttcattccttcttctccttctcctctctcttctctcttctctctcttctctcctctctcttctctcctctctcttctctctctctcctctctcttctctctctcctctctctcctctctctcctctctctcctctctctctctctctctctctctctctatctctctctctctctgtctctcagcacaagctccactcctcacccactggagtgcagcctgggcatcttcactttataagactcctcaggtggctctgctgccatgagcctgtgggtgggatccaaagcaagagcaagtatatcctcagggaagaaggctgttagggaggggagagaactcctgtatggaattttcccatccctagatctacgtctgaaacccagtttgcttgaactcgggattcctcaacatccaggcacag

SEQ ID NO: 23651 - DNA, 2339 bp, Mus musculus
gtttataaacctaattttggaataccaggcagtgaacgcagagctgtagaggtgacaggcttgctggttctgtgtgggctgggcccagggaagctgtgcagttggctctcccagctgctgcccctgatgtcctgtcctgggtgcagccgggagggttggaagggctccctcatgatgagcgctcctcatctctccacacccttggccgatgctcactcatgggtttgtacgtcagaggggaaactacctagctgattttcttcatttgtaggacaagaagaaagaaaagaagtgaccaactggccgtcagcctttcccagctcaccttctcccccccacccccccacccctgtttctttgcacacatcacaggtgtcgtgttctatgataatgaaagcatcaggaaagcttttgtacttagtggttttctctattttgaaattttttgatcaaaaactgattagtgaatatagtttggagtttggcttcgtgtcctgggttcttccccgtcccttttctgtcagcccatcacagccacctgctctgctcagacagccaggcaccagaagtgagagcagaagtctgcatcctgccgagccgccgcagacggagccccgctgctgactggaccctctctggccctgtggttcggttctcacagttccagtgagactgggcagcgtgtttgcctgtcctgaggtgccaggcctgcagagagtggactctggtgggtgcttccttcctctgctgcctaactgagtctggcacaggctttctgccttgccatgaggaggaggtgtagacttgtgagtgctctctccgctctgagtggccctcggggaaccacctgctttccatctgtggggtggggcgctcgctccgagtatgtgtggcaaggtggaggccacaatgccaaggttccctagtgtgtttttctttgttggttcttaaaattatcaacctttgttacggatgggcctccactaggtggctgtgggtaaagtcttggggggaggataggaaaggagaccggctgagcctcagggctaattgtactgagtaaggactgcagctcccggtgaccgcgaggagtcggtgaggtgggactggtgactctcagaagctcctcggtgcacttttgtctcggcagagctgggagggagcaggcgctcgcggaagcacgtcacttactgggtttgttcacctgtttccagcaagttttggtcttttgggcagaagcctgttgaccaactgtgggccaccacagtctgcacagaaaggtggcacccggagtggttgtggccctcactaccaagccacgggcagcccatttccagtaggatggcggtttggatttctttgctcagagccaatgcagttgacacagtggctgctgggttactgtcccatgagactgtactggacgggtgcagccagagtggcgcagtgcactaaggtgccggccgccctgcctgcccggtgcctcccactgacctgagcttactaagggatggcagcagctccccagaaaaaaacgacactgcgagccctcgggacatgactgagttccacctcctgaagccagactccacctcttgtgcttttttgcttgggaaaaaggagtttttctttagaaacagtgccaagaatgatataaactacttttaactaagatgcctaacaggcttttaacacaggtgtccatctccactctgtccccggtctctgtcccagctcaggctgcgttctctaactcatactgtgaagacaaccgtgtttttgattaaaaaaaatatatctacatagtcttaatttgtaaaaaataaagaaaattccttaacctttgctggtgtctcagtgttaaatcaggggcatgctgggttagggttggcacagttgtcgttgctagtgggagctgactgggcccagtgtgctccatggagaaagcaaggcgcccacttaggcctcccgctccagagtcccaccatgccactagtgttgagaccctctctatccagccccggcctcctccagagccctctgctcagcctggcctttgctggggttgtctgtggtggtggctgctaaagttaggatgtgcaccagccacgggacttggggcagagggttactcaccctgcaagtacttgtgttcacttccggtggctgggctcctcctcaggagcaccggtgagtgtgcgcctgagatgacttcagtctgctcaccccgttcagctgacacacaaccatggttagccgtagtgtagattgtagattagaccagggtgccatggaggagggagggtacttacagaaaatgctgagagtctaactcaaag

SEQ ID NO: 23652 - DNA, 1143 bp, Mus musculus
acttgcttttcccctcctcgctgagcctccacgaccgtgtggctgtggtcaaaggcacatatgagccagaggaggactgggaagatcatagagaggagcggaagaagaccatcgagctgacggcacactgaccggcaccgggcaggggccagtccctcagcccctggaccactggagaaaaggaagacgaagagtttggagcacctctccctagcatcctctcagctggagaggcagcattggatccccatgccgcacacggggatgggatgggagcagaagcccatgatgggacacttgggtgtgggccagggacagggcctctttggaattaggcagaacgactgccacagctcagacctcagagattgtgaaggcagtgccaagctcacagcagttcaggaccatcccagaaaggggtgatagccctgtttatctctccaacccagtatctcatgtgccaaagccttcccccaggtagacagaggggacattgcctgagagctcttcaggagagagatagatggttcgtcgagtgccatcttatttatttctggttaagatggggcggaggatgggggggacgctgctggtattcgggttgggcgtttcccaataaaccaccaatcttcatattgtgccttcatctccctccaaaagcctcttgggacagtggccagtcacatctcccacttgcgatgtcacaccctcactcatgctcacttgagactaccaagaaaaccaggagacaagacctcagaaaaggaagaaaagctgaagctcaggaaggctgagaggaccggagagctggcaggaggagagatcaaatgtagagaccgaaggatacagaaacagcacaagagacccggagagggccaagggctaggaatagggtccacgtcagagtcacgcgtccctcccaaccatcccttcagctatgtcaagtccgccacttgaggagcacctgagtgtgccaggcggagtggagaagtgagccagccacagctccttgggattcctaagggatgactggccagagcttcccaagagtcctcacccggagcttccttttctgggtctcctggtgttgccaagaggcagtgtgcagggggcgggggtggggggaggatgttcagacattca

SEQ ID NO: 23653 - DNA, 1685 bp, Mus musculus
tgtcaagtaacagtataattgtctattcagtatttttcatagaatatgttttttaaagaattcatgtgcgtgtataatgtgtgtgtaccagggcacccacttggagaacttgcagttctttccttccacctccatgtgggctctcagggatggctctcaggtcgtcaggtgcatatagtaattgcctttcttctggtgtcactcaccagcctgtagaacacttttctgattcattttctctaatttatttctagatttgggaacaagagcaagtctgccaccaacttaggtcaacagggcaaatttttccctgctccgtacctcaagtaaagctgtgtctgcctgtgtttactgcacgagacacccctgtctgctcttcagcctcctgtgtaatgactacttttagcattttccagactttaaataaagttgaacgcgtatgagagtttgagtgttgcatagctccctcccacctggacacttagcacctttactagttgtcgggagctttaaaataggagatctttaccagggccgaaggggaaatgggtataagttggggctcttagggggaggggagaggagatccctttggcttaaagccaaatactgctcatgaaatgactttgctgtggtgtcacttagacaatgacagaaactgtacctcttaggtaacgtcttagttatctcaggacaggataaagagctgcgcagcggccccttctcagaacacaggcctcttcctccttcggggactgacaagaagcttggagccctcagcgggatgggccgggccactgatctgaggatgcttcacttctgtctgggttaagctgagaaagtgccacaggctctgatctcacacagcgtgctgtttctagccagcctctgcctggattttgcagtcaaagtcaggttgatctgaagccgaattcgttctgatgcctgacccccttgtttgtccagtggagcccatttaaaaagtcagctagcagttcagaagacaattttcatatagcaagaaagttagctgcttctgtctttggtgaagtttttctgtgaaacagatctatatatgtgaacattggcttttttggttagcattttccagtgttcaaaatggcttccttccctgggatgttttctgacccatactaacccttacctgtaacatgtatctggaatattatgtggaaaaaataaatagctttttcaaagtgaaagtgatgttggttttcttgtccttcagcctcttcctgatgatctctttccaatcagtgttttcagtctcttgtttgcacctcccagctgaacctgaagtaaacctggagaactttgtcctcctcctcgttgtctgtttttctaaactgaagccctagatttgttatcttcttgtttgaaggaagcgttttaggaaaaaaaaaaaaagaaaagaaaaagaaagaaagaaagaaaaaaatatatatataaaaaaactttttaaaccagtctttagggatcagaatggtgcagatttaaaggaaaaaattgccgctggctggctgcctggaacacccttcactgctggaagtgactctggcgtgagccaggatgattaactgagggcacctgcacttggagctcagaagctggtgagcagaatgtatctaagattgaacacaaacagttgcaggcttaatatgtag

SEQ ID NO: 23654 - DNA, 1203 bp, Mus musculus
aggtatgaggattcatgcactggagcacgagaaacgtctctgcagcctccagagaacagccactcctacgttctgcagcacgggtcggggaagggctcctaaggatccacccctaactgaggagggattggcagttggccttttgtctttttttcttcatcttcctcctcttcttttttttgagacagggcttcattttgtagcccgggttggttttgagctcacagagatccagttgcctttgtctcctaggtacttgaattaaagcatgtcaccatgttcaccagagcactgctatgattaaaatgaagaaaacaagacctattttacagtttttgttgttgctattgttgttgtggtggtgggaattattatattagcatgtgtgatgggcctaaaatgttgtttcatacacactgtgcgcttgatgcatgtggttgacaataactgttattcatattattctatgcttctgccctgttgtatcttcaggttattaagcctgaatcttgtgttccgtgtggaaagcggatcaagtttggcaagctgtctctgaagtgtcgagactgtcgtttggtctcccatccagaatgtcgggaccgatgtccccttccctgcatcccccccctggtggggacaccggttaagattggagaggtaagtatcatggcagccaaccaccatttgtctgtaaaaggcatagtgtcaggtttttattttaaaattattgatcttaaaaaaaaaaaaaaaaaaaaaaaaaaaaaagccaggcatggtggcacacgcctttaatcccagcatttaggaggcagaggcaggcggatttctgagttcgaggctggcctggtctacagagtgagttccaggacagccagggctatacagagaaaccctgtctcgaaagaaaaccaaaaaaaataaaataataataataataaatatatatataaaattattgatctcaaataaaatttccctccatgaaaaatgaatagaaatagtaaaatgtcagaatgttgtttggacctttctacagcaggtcgtcgtcgtcgtcgtcgtcgtccccccccccccccccccgctcctaggaagatctcacacatgcacagtagccattcttatagcctacccctggctcctaccatttaactttacagtcgtgaactcaaagctgttcttgtcctcgatcttacctggtgaatt

SEQ ID NO: 23655 - DNA, 1119 bp, Mus musculus
gttatacctgaatttgctgtttaactctggctcagcaatatgtgactgtgaaggaggttgtttttattttatgtgactgtcctggtgtgtgacagctaccccaaaggtatccctctttgattgccttctgttcaggagctttcagcattggtgacatctggagccaggtgactaatgcgtcacatactccatagcagatgccctggttaggccaaaagtgcatgacctattgaatcaggcattgctttccactaagctgctgtccgcagtgaacaacagggtttgttcctggtcattttcagatgtgtttgaccatatagtccagcaagactttatatttgggatgaagctaactataggacctatttatttgagcagctatatctttgctatttggattattgaagtttttacctgtcctcagttgaattcatccaggttgtgaaggacttcgaggacttccgaaagaagtatcaaagaaccaaccaggagctggagaaattcaaagacctattgttgaaagcagagactgggcggagcgccctggacgtgaagctgaagcatgcccgtaatcaagtggacgtggagatcaagcggaggcagcgcgctgaggcagagtgtgcaaagctggtgtgcattgctttgcttatcaaactggtgatggggtgggaagacgtggtttggtgaggtttctgctgaacatgcagacccagtttctcttctacatgaagagctcacttgacatctggcatgtgattagagatgaaactgaagcctgtgacttcagtttcatagattgaaactttcagtcttttcgtttgaaaatttattttctcctttaggcttgaaacagtttttcactagacaggtttcaaatgagagtttaaagaattaaaacaaagcagccaaagatgtaaagttggtgaaatgtgtgcctggcatgcacagagccttggactccagaacaagaagagaattctagaatacttatctaatacaatttatttgctattcttggactgcagagatggctcagtggttaagagcgctgactgctcttccgaaggtcctgagctcaattcccagcaaccacatggtggctcacaaccatccataatg

SEQ ID NO: 23656 - DNA, 1106 bp, Mus musculus
tatctggggtcccccatagtctgggaagcttgcagaccattctctcgacccgagctgacccccccctccaagcctctatgttttaatgactgtcatcttggatggtccctcgttcaagccacctttggagcctgcatgtcagggaagtcttcccttggacaagcagtgacctccggttaaggattttgaatggacataattggaggggccctatatgcgccttcatctcaggacaatgacagagtcttgtctcctctttcctccctctaggatccccttggcaagcatggaactgaagaccgaggaggaggaggtgggtggtgtccagccggtgagcatccaggcttttgccagcagctccacgctgcacggtcttgcccacatcttctcctatgagcggctgtctctgaagcgggcactgtgggccctgtgtttcctgggttcgctggccgtcctgctgtgtgtgtgcactgagcgtgtgcagtactacttctgctaccaccacgtcaccaagctcgacgaggtggctgcctcccagctcaccttccctgccgtcactctctgcaacctcaatgagtttcgctttagccaagtctccaagaatgacctgtaccatgctggggaactgctggccctgctcaacaacaggtgggcagctcccatccacccctccgcatgacttgtggagtaacaccgtccttagcccaccaaaagtcaaacagctctgccctctagcattcctttaaacctgccgctcaaggcggaggggctgagatcatgccagtaccagttacctacacacaatctctgattccagcttaggtcaaaacagctctgtccccacccagcctgagctaggagatgttagctctttccccagagagcatcacctacctcctggtactatcctccttgcctcacttagggaatgggacggaccaccttttttttttttttttttttttttcctttttttttttgagacagggtttctctgtatagccctggctgtcctggaactcactttgtagaccaggcttgcctcaaactcagaaatctgctgcctctgcctcccgaatgctgggattaaaggcgtgcgccactac

SEQ ID NO: 23657 - DNA, 1122 bp, Mus musculus
agccttaacataccctctaccttgctccacctatcccagtgccctttgcctggctgactgtggcctccctgagggaagtgactgctggagaggtagctcctacccaggaatggaggacactaagcggagagagttacagacgggaggtggggagggaggctggggattggtgactccctcttgcagctgggcggtgggtacccacagccagaagccggagccctgactcagtggcctttctttcttcggggtgcccagggcccagtcctcaccttgatgcccaggcccaccgcttgcattttctggtgagtcagggcgtggtcacatgaggaaagagattggcctagagcagaagttgaaagacgtgctgttgtgtgtccctaccctaagggggccacaaggtgaggtagagggcctcctcaaccagacacccttcccaggccagctctccaatctcattcctggccttctctgtccccactgtctcttggtctctaatcccaaaacaggacttatgggcagatcacctgtgtacgttggcctggagccagagagcaaggctttggcatctttgagacctcttggttctcaagagttgtttagagatcagaactccccagaaagaaacagggcaaagctgagaaatgtacactggctgggggggcagcaggaggggctctgggtgacgcatgcctctggtctaataaactgggtttcaaccatctcttcagtgttggttttctgtttgttgtttggtttgttttgagacagggtttctctgtgtagccctggctgtcctggaacggctctgtagtccaggctggcctcgaactctcacagagatcctcctgcctcccaaaatgctgggattaaaagcctgagctgccattatcctgcccagtgctgtttttagttgcaaactgtgggtgttacctttagaatggagcttgccttgagagccacacaactagagtaagggaatttgagtggtagcccggtgtggtggttatacctgtaattccagcaggtaggagatggagcagctatcttccattacacagtgagtttaacgctagattgggctacaccagaccctacatacttgatcaggtaaacactgat

SEQ ID NO: 23658 - DNA, 1930 bp, Mus musculus
attccttgggccctgtgctgcctgcctcagtgtacctgtcttggtcttgcttgaggcattccaggggacttggcttcaggacagtgtcacaatgaagagggtgtcacatttctgtctcacagtcacctgttatcccgtcctgtaccccagtcgtcccccgtcccgtcgtgtccccccctcaccccaccccgcctcagctcctccccatcaggctcctgtgtgcctctacctccctatcctacataggacctctagatagtgttagagaaccacagagtgggggcctcctgaggtcaggtggtcttgagggagaccagctacactgatcctgcccttgtcaggagacctaggccttgggagctatccctgtctgagcctcaggcctagggcagtctgtaagctagctgaccttggccctcccggtagcttgacttcttccctcccctccgcaggttggggcagaggctcctttacctctggcagtaaaggagcctgggcttcactgagccccgggttggtcccctgccctctggacttaacctgctgtctcagtgtcctctgaccccttaggggtccatgtcagtattggagtgtgtgttgaattgttgctccctcccacacactcccgtagccgcccagtttaggatttccctacacctgccctaacccacgcttttgggttggggatcttgcctttccttgtcattcccagcagagactgttccttcctgctgttagaggagtggcttgtttattcactccaccctgccccctcctgtaaatggagaaacaggcctgaaatcaaacgggtaaagccctaggccatccctgtcttcctgtcccatgtctgcccagttgaatcccactggtggcttcccgggcactgaggagtaaaagcgcctagggctggagaataggtctgaaatgggtttgtgactccccaccccctgccctgccctcaaagcttcagacccctcagggagcagcaggatgtgggatcgaggccccttgggacagatgctttgaatcttccagggaagcctccgattcttccaggtttgtcacccggagttagcatgtcccaggctcgcagacaacactgcagggtgggagacagctgggcacagggggattctgttgagcatgggctctgaacccacagaactgacaaagcccctgcttccccacccccacctcaggctcctgcgagcagtgctcctgcacccttcccagcctgttctgtactggggacagcagtcttctccctgtcctcccatgtcctatatccacccctccccttggaaggtcctccccacagtgacactggacagccctggggcagctgagccccagcctggcttctggctggaagcgcgatgaggagacttagcactccacagtgtccctggtggtaactgttcttattaactgattgtgttttgttttgttttgttttgttttcatggaccaaaattttttttgtactgtctccttaactgatgtcacccagttttaataaaagacttctaaagagcaggtccctgctgtctggaggggtcactgtgggtgcctgctgtctggagaggccactgtgggtccctgctgtgtggaagggtcactgtgagtccctgctgtatggaggggtcactgtgggtgcctgttgtctagagaggtcactgtgggtccctgcagtctggaggggtcgctgtgggtccccactgtccggggagtcactactgtagtgccatcagggttaggctgcccagggctctcttacttgagagatgtttcttgaacactggtgatctccagttgtactgggctctgggggtctggggaaatgagtcttttccccggggactctaggtcgtatcagaggcttgtgacctcagcaatgcccttgggatagtccctcccacctccatcatga

SEQ ID NO: 23659 - DNA, 1152 bp, Mus musculus
cactgtagctgtcttcagacactccagaagagggcatcagatctcattacgggtggttgtgagccaccatgtggttgctgggatttgaacttcggaccttcggaagagcagtcgggtgctcttacccactgagccatctcaccagccccatgcttaactcttttaagagcagccacacaggagtcaccagcataggatgcatccgtgaagatgaaaataaggaatggctctccgggaaggaggagaggcctatcctgcagaccaactccaatctgtctttgtaggggaagacatgccatctgccaagcagctagccgatatcggctacaagaccttctctgcctcgatgatgctcctcactgtgtatgggggttacctctgcagtgtacgagcctaccgttacctccagctgcgcagtgccaggcgccaggctgcagaagagcagaagacctcaggagtcctgtagagcagcgaggcgtgaggcctgcggcctgaaatggaaaagattttcctgcatgtcaaccctggcaagaactaggcccccatgcctttcaaacctgctgggctaaaatgccttggtttctgtagtgctactagcttgtgccgttctgacagtttatggaggccatcaagtaaatgggaatgtgagggtgaggtttattacagagattaaatattttgctttgtttgtgttttagtggttctgtgtacccagagagtaaatggatcatagaggtgtggctttgagttctctaaaagcttggtctctctctttctttcctgttttgtttgttcaagacagggtctatatagccctcgctgtcctgggactctataaaagactaggctagcctgaactaagagagatcagatcctcttgcctctgcctcccaagtgttgggattaaaggcctgcaccatcatgcctggcagtatctttcctactgccgtaaagaaaccataaaaagttacctcacggaagcatttatttggggcatatagtctcagaggggtccatgaccaccaccgtggtgggaagcgtggcagcaggccagcagccatggccctagagaagtggagaacttacatctgatccacaggcacaaggcaaagagctaactggaaatggcgggtttttaaaacctcaaaacca

SEQ ID NO: 23660 - DNA, 2160 bp, Mus musculus
gcctttctggtatagaatggcataaatgaaagcaaaacaggaagcaggcaaactctgttcacaatcacagccagtgacacagaagcatttaagtcagtgtcaccgaacctagaaacaggtacacgagtgggctttcctaggctctgagactcatctgccccgtgagtcctagaaacaggtacacgagtgggctttcctaggctctgagatccacctgccccgtgagtatgaaacgtagcgtgtgtactgcatttggtcctgtccccctcaggtgtctaaggatgaccgcagtgatgtagagagcagctcagaggaagaagatgagacaacccacaaaaacaacctctctggcagcagctctagcaatggtgccaactgcatgaacggctacatgggaggcagccacttggctgaagagcaggggacttgtaaagccactggcaacctacattttagggcctccccacatctacactcctgtgactagagggactgcaaggcactgaggagaatcaaagaaatatttttgtgttttaaagaaactctgccgttttgtatttaatgccctctggtcctttcagtaaggttattggctctgtgtttgtgtggtttttgtgtgtgattatacatgtgtattgtgcatataaatgagtttcattgactcggttggggcacaattctggattactagtcattgtctggtcacttctgagcccacctcaagtccagccctggctgcatcttgaattaagctgtctccagaccatctgtgacctcgtcccatggctcttgagactctgggttcctgatcacttaaataagtgctgtcaccagactcagctccaggacttgaaaattgttcttttggaggaggaagtaatatttcacctgatggaacactacccaggatcaacatagctcctagctacatgtccccttcctatcacctgctagtggcagggacaactacataccctgctgcttatttaatggtatgcagggagggggagggtaggagaggatgagctgagatttggagagcagcagccactggttgcgctgttaatgattttatactattgcttattcttctgtgattaaattgtttcaaccctctactgtctgtctctttagtaactatccctgctaccactttggctgcctgtgcttacagacatgtactgtaacgaagttttccatgggctgaaactgctcttgcagaggatccagggttggtctctagcaccgataaagagcagctcaaaactgcccgtaactccagttttggggatctgtctgtacgctcctctggctccacaatcacctgtatggatgtgtatatagttacatacactcagacctacacataaaataaaacaaacccttttaaattattattatttctaattcaagaggttcttggacatccaaatttttcttttatgcattctaagaggaatctgacagaacatctatatctttgggctgtatgttttaaagtagacatatttaattggtgtgctggctagttttgtgtcaatttggcacaagttatagtcattttggaagagggaaccttagttgagaaaatttcccaactagattggccagtgggcaagcctatagagcattttcttaactgatggttgatgggctgttggtcctaggttttatgagaaaacggcctgagcaagccatgaggagcaagctaagagcagtacccctccatggcctctgcatcagctccggcatccaggttcctgcccagacttccttctgtgatggacagtgctgtagaaatataagccaaataaacccttaacctaagttgccttagttaatggtgttttgtcctagtaatagtgaccctgagacatggtcacagcagcactgctcagcaaacagtcatggaccagagaaaaggagtttgctgagaagccagggctcgtcagggtgcctgttctcatcttgtaccacagagcctgccacttcatatttgaacatgccataaatgaatgagtccaccatgtcttcttagttctgtctttaaacctgtggacaaacttgtcctaatccagatttttctcatggtaaatatattccagaatacttttctgcttagtgatcatttaaattacagagatatttctagaggctgtg

SEQ ID NO: 23661 - DNA, 1139 bp, Mus musculus
gtatgacttacattttataaaactacatctgacagaaacaatttaaaggtgaaaccttggttttggctcccagtttcagagagtttccttccatcctgcagggaaggtgtggcagttgctcagttcatggcagtaggtgtagtggaagccaactacgtcactgagccaggaggcagggaatgtgcccggagagccgtcagcctggcatagcctttggatggcagtcccctcttacctcctgccagctgggccctgccattcctaacagtttcacagcctcccaagatactgctgccagctgggcaaaggcgtccaaagcatgagcctgtagacatttcacatttataccaaagcatctaataactattgaagagttcctcagggttaacttggcctgcaaacccaagaaagaaagacttaattaaacctgaaagcctaaaatagttgcaataagatgaattcttgctgggtagaggcacatgcctttaatcccagccagcattcaggaggcagagacaggtgaatttctgagttcaagacccacctacagagtgggttccaggatatacagagaaaccctgtcttgaaaaacagaacagcaaccaaacagatgaattgctcagctaataggtagttctctggcagttttaagattaattttagttgtgtgtgtgtgtctgtctgtctgtctgtccgtccgtccgtccatgcgttgagttcaggtgcccacagaggccagaagagggtgccttggagctagagttaacaaatagttgagagccacctggcagaggtgctcttaagcactgggacacaggttaagaccctggggatggcagcacactggtcggcttgcacggcctgccctgtgctgcctgccatctccatctctccatccctaggacttcctgatgatgtttattcatcatatgattggcattatgctcaccactttctcctacgtcaacaacatggtgcgagtgggagcactcatcttctgtctgcatgacttcgcagaccccttactggaagtaagagcccatcctggcattcatgaatcctttctcccttttttgatatgtgactttctccccaactcatttttttatctttcacctaggctgccaagatggccaatt

SEQ ID NO: 23662 - DNA, 2812 bp, Mus musculus
tcgaacctcttccatcaagagccccaaggcctcttcgccatctctcaggaaaggttggagcgagtccgagcagagtgaggagtttggaggagggatagcgacgatggaaaggaaacaaacggaaaatgccagaccctctggggagaaagagaatgtgggaaaatcacgctggcagggcgaggaagtgccgaggagcaaggaccgtagttcttttgagctggagagtgagaattttatggaaaatggagcaaacatagctgaagatgacaaccatgtccacgcacagcagtccccgttagaacccgaggctccgggttggtctggctttgtagacaccacggctgctaaagaattcactacccagaatcaaaaatcccaagatgtcgggttctgggagggagaagtggtccgagagctgtctgtggaggaacagataaagagaaaccggtactatgatgaggacgaggatgaagaatgaccggccgccatggttctggccttagattttggttagcaactcactgccctttatcaagtggtgcgcagaaacaggcagcttggcgccaagggtcattcatgtgggagcaactttggaaatgaattcccgctagcaaaacagggcaaaaacaagcaaaaacaaaacagacaaacaaactcacccaaaaccaattctaagcgcattgtcaaaacaccagtgatcttttaagcctggtgtggtggtaaacacctttaatcccagcactccactcgggaggcagaggcagaggcaggtgggtctctctgagttccaggacagccagggctacaaagagaaaccttgcctcaaaacaaacaaacaaacaaatccctccattttttcagggaagggctaagtagggatttctctcactgatgctgcctgccatccactgcattccccaaatcaagattggtgtggttagatatttagaggcttgttttcacactacagagaccattgtggaattagagacacacacaacacatttaggagcccacctcatgaccagaggcactttagtataaagggcacagtgtagctattttaccaatttcattttttagtactcaattgctgaaaatcaaatatttagtctttcaagcttttgaaatgcattctcttcctctggtagatagggaaagcttactgtctttcatcctacatcctgtatttttaatcactgaggcacaaaacagcaacctttggccaagtgaaaggcgctggttactgaagccggagcagcagtgttcaatccccaaaacctacgtaaaggtgagagagcagactgcacagagctgtccacacgtgcccatcatcaacaataagaaacaagttaaaaaaaaaaatacaaccaacctcacaaacacctgcgagacagagaaccaacctatatactttggtgtttggagagacggacattgtacccagataatcagtggcgaatgccagtgtgtctccctgcactctgggtgtttgccatctcttctggtggtttctcgcactttgcggaaagctgcagtgttgctgtaagaccttttggatcacgcttcaccatgctccaagtaaaacaacctgagatcagagctgggaagcctcaggtcgaggcgaatcttggctctgaaatgtattgatttttaggccagataattcttccagggttgcattaaatcacttttaggtctgtcttcttaggccgtgtcctactttgattcattgtagtgataaaacactgggcaggagcaactcagaggggaagggtttgtctccactcacaggccacgggtcacacacaggccacgcgcgcacgcagcatggtcaagggaagcgaggccagaacccagaggcaagagctgatgcagaccgtgtgggaacactgcttgctgacttcatctctgtggcttactcaactggttttcttacaccacccagggccacctggccaggggtgacactgctcacaacaaaaacagacaaggcccacaggtgcatcggttagaggcggttcatcagctgagtcccacatccaggtgactctgtgtgaggctggtaaacccagaggaggatagatggttttctctggtattaaggctttagaatattataaacgagtgcagttcttgtatgtaactgatattccaaatgatgtgtatggcggggtgggcttaaggtagtggcctctttgcatttgtagagatttagctcagttttagagatgtaaaataatctgtttccttatggccttgtttagcctaaaacatttttattcaataaagcttttaatttacatttccagtgtccacactgctcttattcccgtctcctccacactgctcttattcccgtctctttacacagggtctctcggaacctgcttctattgagcagcttttagggggaaaatgctgtgagttcatttgaccactagatggcaatgtagaaccgaattgtgcacttttcatctaccctaaagacttttttgggagttggggggctgcaagtaatttggcaagaaaattagtgtgtgcattcaaaatgaactgtttgttttaccaattcaaattccagtggcggattttactgtttaccgcattccgcatttactaatttaccttatgattgtgtctgacacaaaacaggattttcagccatctctgctgaagacgcacgctcttcgctctgggtgtgagcgcgtttggttgatttcttctatagaatcaacttctccaagtgtttcctgctgccattgattcgtggtttcaataatagcctgaaaaccaaaggtggtggtggtcc

SEQ ID NO: 23663 - DNA, 1183 bp, Mus musculus
catacagagggataaaaaatatctgaggaaggtgaagctttttttaaaactccagctaacagcacactaggccaaagtagcacctaccctttcttcctgagggtggtgactgcagctccttctattggtgggagctcaactccagagtccgccaggattggctaaccacccttgcccgctaactattaactatgttggatttaaaatgaagaggaggaagaggaagaggaagaggaagaggaagaagaagaagaagaagaagaagaagaagaagaagttgtttctcacatattgaattcagaaggtccagctgcagaacaagccccaaggatatttggggctctgaatttgatctttaagctaaaggaaataggaagcaggaatggggcaaggggcggggatgtgtctcttacctccgacacactggctttcagtaattcccagatatttgaatggcagaatctggctgaaggccatcataacagaaggtgatgttccacgtctgtgtttgaaatactctatgaacctaagtgtcttgagtatatttctagtcctaaaattataatttaaaactttatttatatgttttttttttttttgagactttgagacagggtttctctgtatagccctggctgtcctggaactcactttgtagaccaggctgtcctcgaactcagaaatccgcctgcctctgcctcccaggtgctgggattaaaggtgtgcaccaccaccgcctggcatgttttgttttttgtaaggcaggatctcctataacctgctatatttgtagagtgtacccttgaattcctgatcccctgggctctgtcgggattaattacaggtgtgtgccaccacgctcgggctaatttgtaactataaccaaaggtctatccacattatgagacataaagtgttgagatttcaggaattacaaaacacttgattcaaaaatctgtgcccagtgtctgcagcatagctcagcatgctgcgcttgcctggtgtgtgcaaggacctaggtttgatctccagcacgaaagagacaaatcatgctacagcctacacacacgtcctgggagtgtgtgagggcggaggcctgggctccctccatgggtggcttgccagccagtggaaggacagctacaggggtctaccaggcattgcaataaaacatggctgggta

SEQ ID NO: 23664 - DNA, 1121 bp, Mus musculus
cagtggtcagtgttcctgcgtgtagggagagacagtaggggggaaaggaaagaaggaaggaactaacaaagaagaagagacagagacagaaaccctgtggacctggcagagcctagcttgggcttcactctgagattttgattcaatctctcccaggatgttattccaaagaggggatgatttcactccaaatgtgactttggaaccaacttaagttcagaaaaaggccaactaatgtttgcacagtagggtcagtgatacaacgatggaattggactgggacctcagagatcatctgttctgacctccttttacaggaaaccttaccccaaggatcctgactcctctgacagaggtcacacggacttggggaaagcagcccaggagtgtgatctgctgatctgcgctcttgctttgctcacccagctgcccatccctgagtgctgggggtcctgtcctaaatattctctccctttctctagcccacaggtgtctcagagtctgtagacaagatggaatcgactccatttaatagacgccagtggacttccctgtcattgagagtaacagccaaagagctttctcttgtcaacaagaacaagtcatccgcaattgtggaaatattctccaagtaagtgctatctcggtccaaaaggaccgtctgccttgagcagatttaccacctgtcaggaaaattggtgaagtgatgtcaactggccggactgagcacccccgggctttatgcaccctacaggtcactggagaggaaacaatggtaccagtcagaaggcacctcccccatctttgaatttttatttaactgagggaaaaaaaagttataaacacaaaaaaagatacttgtaagagccgggcatggtggagcacacctagcactcaggaggcagaggcagggggatcgccatgagttccaggccagcctgttctacagaatgagtctaggacaaccaggaggactgttacacagagaagccctgtctagaaaagcaaaaagaaagaaaaggaaggaaggaaggaaggaaggaaggagcaaaaaaaaaaaagaaaagaaaaagaaaagaaaagaaaaaagatacttgtaaagtaaaatgttaccaaattca

SEQ ID NO: 23665 - DNA, 1235 bp, Mus musculus
tctcgggtgatcttttatgacctgcaattttcagatcaaagtgtgtttttaaaagctataaattatatttcatgtttaaagaagatatgtgaaattaccatagttatatgtctaacaagctaatttgggtttcttttttttttttaagttttctttttacattaacttatcttgcatgtacatgtatgtggacacatgtggagtcagagaacagcttttggtgtgaactctctccttccaccgcgtgggctctgtggagaactcacgccaccaggcttagagccatcttgcccagcccctgactggggtttctgaaatgcaagagctccctacactgaggcacattccggcccggcccgaccctttctttcgctggtgatttgacagaaataagttgagcctgcagcgcccccacattccacagccacgcttctcttttgtttgtgctggaagccatcatgtttccagcctcacctcctaaatgaacaggagttgattttctttctgaacctcgggtcctttctatacagatgacccagccactgaaatacaccgtgacagtatttctgcatgtgttactgtgaggatgaaacacatctgtatgtgggattccattaaaacgacacagatccgtactccagcaataggatgaggagcacagagtctctgggctctgcagtgagtacaggttcagccagaatgtcagagtcgaaccctgtaaaccctataaacgagaaaacaaataaggaaacacaaaacaaaacagaacagaacttggccaagcctgtactctcaacactccgcaggcagagggaggctccaggccaggcagggctatgtagcaataacctgccttaaaaaaaaaaaaaaaaaaaaaaaaaaaaaatctgagttctaggccaacctgggctacagagaaagtttctggacagcgagggctacacagagaagcccagtctcaaaaaacagaaagaaaaaaaaatagcttgcaagatgctagggattgggttttttgtttgttttgttttgttgtttggttttttgagataggctctcaactagcccaggctggcctcaaactcgctgtgtagctgaggatagctagatggcctaaacttttgtttatttagtgtgtgttggggtgggggtggggtattcataaatgctacagcttgtgtccggaggtcagtggacagctttgtgaagtcagctctctccttccaggagagactctg

SEQ ID NO: 23666 - DNA, 1193 bp, Mus musculus
cacacctttaatcccagcactcgggaggcagaggcaggcggatttctgagttcgaggtcggcctggtctacaaagtgagttccaggacagccagggctacacagagaaaccctgtcttgaaaaaccaaaaaaaaaaaaaaagagagagacaaacctctagaagattgctggggtctttaactgtgctttctataggaaggtaaaacactccattgcagactgtgcacagtaacctcaaggtgcgctaagtcacttaacacaggctcttgaggcttctagtaacaaattagtggctttatgtagtttctgctttattatcgaggttgaggttttttggtaaatggtacctttagagggatcgtcccaatgttctgttctgtggctgggtgtaaaaggtctgggagtcaaaaacatctttaggatttatttttatctttgactatgtgtacacctggggtggggcagttgcgcatgggaatacgggtgcccaaagaggccaaaagcatcagatttccccagatctagatttataggctgtttcaggctgcctgatgtgggtactgggaatggagcctggggcctctggaaggaagagcttaaaggttcttaaccactgagcatctctccagactcaaattatttggtgactgaatgaaaacttgtttttcattaaaagtagggggggtctcacccaacaagagtgcaactactagcatgtgctatgacgtcctatcactttaaaacattttggggagctgttttgttctccatactggggtactccagccgcacggcatctgactcacgtgcacacacaactttttaaaaggtatgagttgttcatctggtggtatataagtaagatcatgccacttacctgagtggcgcacacctttaatcccagcactcgagaggcagaggcaggcagatctcagtgagttcaaggccagcctggtctacagagtgagttctaggccaggccagggctacacagagaaaccctgtcttgaaaaaacaaaaacaaagacaaaaaaaaaaaaccaaaacaaaacaaaacccaaaacacttattttgcagcctttttgtctcttgtaatatgggacaggtgacacaacttctcccaagttgaaaatcccacaaccttggaagcatcaatgagggctcagctcggtggttcctgatggttacctcag

SEQ ID NO: 23667 - DNA, 1151 bp, Mus musculus
tcaggagacagaggcaggtggatttctgagtctgaggctagcctgacctacatagtaagtttcagaacagccaaaactaagaccctatctcaaaaaataaataagtcaaagaaaaatgtaaaactgtaaaagtgggctcacatagtaaaaacctaactgcttgctgtatatgagacagttaaagaaagaacactgaaagaccaagtcctgaggctggctcacaacttagaggccagcctggggtacacaggaaggccctgtcagaaggagaggttgcggaagaacaaagacataatagccagatgtatattttgagaagcaaaagttctctattcctaatgtcagacaaggccgaatttaatgtaaaaaggcatgagatgagacaggtgatcttgtactgtaggtaaaagctgcacttaagatgcaggtcaagctccctaaacctgaagtggtgtttgttgctcttgttgaatcccaaaccggctcccgacatgggactagcgaatgaacgaatgatgctcactggatccggagaccccaaagaggaagaggaggaggaagaattagtggaccccctaacaacagtgagagagcactgtgaacagctggagaagtgtgtaaaggcccgggaacgactagagttgtgtgataagcgcgtgtcttcccgatcacagtcagaagagggctgtacagaggagcgctttgacttcctgcatgcacgcgaccactgtgtggcccacaagctctttaaagacttgagtaaatatgcagattcgcctgccttggccttgtcactgggaatcagggacagttccttattgtggttttgaacatttgtttctgatgcagtaagctctgagaccctcactgatttgggcaggtagcttctcttctgtgtaattagcagtgatttcatcctaataaactgatttgcaaacttgaaaaaaaaagatacggatcaaacagctacaaatatccaagcaacagtaacactgcagcaacctgcagacagagactaggaacatgggaagacagaataatggctttaaccatatctctctgtctaagttcaaagatacataacaaataacaaataataataacaaaataacaacaaatcaaagaaccacaaaaatcttgaaagcagggaa

SEQ ID NO: 23668 - DNA, 1134 bp, Mus musculus
atttaatgaaatgtatttatgaatgtttagcttatatatgtatatgattatttttttatgccttacaggaaagtcagtaatttcaagtactacatgtgtcttgaatgtagtatatcatttatataatttcctacacgattagtttgggtctgtaataagtgcctgattaactcactggccttggacagttaacctcattgaggttattttctttatccacagaatagaaatcacaaaaagtaataaccagtgacttttcagaaaaggaattaagcaaacatttgggtacatagagtgctaccttatccacaatgatcaaaacgtctcccttcagacattaacttaagccattggacttttccccaactggcaccattctttgacatttttttaggagatataattcgagttatttcctgttcacattctgtgccttttcttgaaaacaggccatacagaactttcagaagatatgtgtaaggaatatgaagtaatgtattctccatcttgtgaaaccacaaggaatactgcagatgttgaagagtcagctgatggaatgatcttaggaccggaagacctgagttaccaactctatgatgtttctggtaacctttgttgttctattgctaaaatgagaacttagtgtctttagctctccgtcatttccgtaaacatgacattggtcagtttgttttcttttttgaaaagaagcttatgtcaaacaagtgttaggtacttattaaaattattgttggctagtacccagataaaatttgtagttgagaaagaatctttgtttaaaaaaaatgtcctgttaaagaaaaatgtgattaatcccagcactggggaggcagaggcagatggatttctgagttcgaggccaacctggtctacagagtgagttccaggacagccagggctacacagagaaaccctgtctcaaaaaaccaaaaaaaacaaaaacaaaaacaaaacaaaacaaaaaaacataaaaaaagaaaagtgtgaaattatcaggagaaataggtttctcagttgattagttaagattattattacaagtttaaccaagttttctgtgtgtgtgtatatgtatgtatgtatgtatgtatgtatgtatgtatgtgtatgtat

SEQ ID NO: 23669 - DNA, 2533 bp, Mus musculus
ttaaagagctttgaaaacactgcataatccgtgtaacccagaattattatttctttgtaacttattattcagcttggcgagcgcttttgatttggcagattgataacatggtatatttacttagttggaaacaattatttctacatacttttaaaaaaatatctgctagatgaaacatacaataaaactacctgtactaaaatttgggagaactttaggtcctttaaaaagtattaatcattattagcaacatctatgataaaagtgtttattctggtttacttagaaatgataaacatttaaagtgttaacatcttatgaatgcagtgaattaatagaataaacattttgcaaaaaatcacttgataaggattagaaactttatttttgcacttaaaatgaaaaataactttgttttctctaaatgtgtcacagatgtagtttccgatttcttgctactttgtgtgactttctgataatccattactacaggttggtttttttgaacagttcttcccttgaaaccagggccgtagacagaccccatgagtgttacaacactgagctatacctccaacttctaaaggtctgactgaaatccaagaaaaatttcctcttaaagcaagtatattcttggttttttttttctccaaatactgagtgtagagtttttttaaagcataggatttttatttcaattttcctcagtatttctaaacagctcccatttgatgggggtgtatgtggggaggggtaatgaatgtgaatgtgtaatatatatttgcagtgtgtatttggccgttattttattgcagcgtgtgtaaatgatgcctgtgagttatgtgaaaccggcttttccccatcatcattactcaagtcaattgggtgggtgttcattgtacttcaactatttattggttctgtagatgggggaattttaaacgtcagagtgtgttcttcaccttatggcttgcttcattgaaggccaagagtagataacgtgatgcttattgtgtcctacagtagtgcatcgtggttcccactgcatgaagagagcagaactcacacaagttcatcatgttgtgcttcatagagaaggtgcttagaggggctggcatggcaaaaccttctcatctctgtcttgatgatatctagtctttaatctgaatactcactctcagttttgccaaagactcagtggcgtttaaaagcgttctatctacgttcttacccacctatgttttggagacagatgaaaccttccagggataggggtttgttgtcttacctgcatatctttacatataatcaaatgatatgcagaattttaatttatttttagttcctaaagttaaggtagcttcaatattatttcacattcctttttctctttaaattgccagatttgcttttcaaagacttaggggcagaattaagttagtatctttcacttagagtaaagagaacaagacaatattatttaagagttaggagcactttgtctagttctgttagttatgtatggccttaataatcagtctcttggcttaagtgttcactggtttcactttgacacagttgaacagcactggggttcagttcctgatgcttgtgttggcaatatatattaaccatattttaagagtatcattctggctttttatggaaaagatgaaaatcaaacagtatattccttttgagggtttttttaatacgtaaatatatataaatataatatatgatggattttttctaattttttatatttccttacaatttggtgactattactctaactttagactctttggcatatactaagtagctagtctgggctttaaaaatatgcatggacatttcagtttgttttagctgaatgaggacattttgaattctcttaaaagtcacctgattattaaataacaatgtttatttttaaaactaacaatgtgttgtgtcttattacacattacacagtcctaaaggtgcggctctgatgtctgtgagctgtgggccaagtattctgttttcagttctatagcacagaacagtgattagaaatgtaaagagatacccacatcaactttctgtttttgtttttccaactgattcaggtgtccattgaatgacgtatctcttaaatgttgggggagtggtgtgtcagaaccagttacctggcttctgttttgtccatagcttagatttgttccgttgtcaaaactgtccccccccccaaattgtgtgacacatattcatgcataaactgttaaaacgagcatctttgtatttgtattgttttcaacattgccaaggtgctatgggaaattaaaattacaaaattagaaaaaaataaaattattgaaaaacaggtctggtttcttttttccaggtggtgtgcatctattgctgtttgtatttttcaggaatttatatgttgccccttctggttctgtcatagaactaaagcagagttctatgggttcttgtgggttttatgtgtgggaggcgggtattttatttgtaagatacccac

SEQ ID NO: 23670 - DNA, 1195 bp, Mus musculus
ctttaggacacatctaattatctccttagaattaactccagtgtggtgtagagacagagctccctgtgggcacaaatgcttgctgggctccgccctctcgtcagcccttcactcctggttgtgcaatcagtcttcatcgttctctgaaattacccttgacttcttctgtttccatctttggtttatcttaattgatctgaatcaaaagataagtaaaaccacctaagcctccacttggcatttttaacaatctgagcaccaagagttcacccctcagaagttacagccctgcctgagtgcaaatgtccatgtgcttaactttccagatatccacacggaagcagtccaagctgctctggcaaaacacaaagaacagaaaatggctttgccaatgcccaccaagaggcggtccacatttgtccagtctcctgcggatgcctgcacacctccgggtaggtgtatcacccttccactttgagagtgactgcatgggcatttggaaatactccttttcctttctgtgacctagaactgcctacacatcaaataaacctaaggagtgcactctgaagggagctggtgagcagccataacaaggccctctaagacctatacagactgcctcctcctgagcctgactcacttagtaagcacgggcacaggcccttttttgaggaattttggatgttttgtgtctccaaatgcaattgatagtcatagatttaacctattagtctcctcaattgatgttttatctcaacagccagcataggagtgggtggacttgggacagaaatctttatgctgttagagattttaggagcatgataatacaaatttgatacagatctaaaaaaatagacatctgttaatatattcttatatttttaaagtgtttttttctatgtgaggttcaaaagtaagtgggaaatagatatccctccctctccacttaccagacttggaatttattcctcccaatgtaaagtttctttcctgttcacaatgttttgccaagctgggcagtggtggtacactcctttaatccccgcacttgggaggcagaggcaggtggatttctgagttcgaggccagcctggtctacagagtgagttccaggacacccaggactatacagagaaaccctgtcttgaaaaaaataaaacagaatgttttgccaaatttattagaagaa

SEQ ID NO: 23671 - DNA, 1313 bp, Mus musculus
atttctgtggtatcaccgagaacatgttagcagtctgtcagacctgagctctggcatgtgcgacagcacgttactaaagcagttacatgcatgttgcgctaccctcatctggtatagagacctgcatttttacctaaccttctagactcctgaaagggagttaaatgaattcacatgaaggggtcgcctgagtcccgcagttccccgctctgtactgtattttgccatttcccgtagtcaggtgttctgcagggtctcttcacatgaagctgccaagcgtgagtcagcccataagcaaagtcaaataacccacgtgaggactgctttgtgtgtctaactctcagttataagcattctgaccagtgtttaaacgtgtaaataagaacacacatagttaactaaagaaccaggcagtcccctgcttaactgcagcctggatagctgagctgctgctgagggcacgccgtgcgcgacggctgacctggcagcgtagagtgggatgatctaaaactaaagctgcctgtgcttgtttgtaaagcttatactcccagaattagcctgagctgctaagaattcctcaacccattcctctaagctgaaaagcactcttgtcagaatttagacctaactaagattcatcagttcctaacctactctgcagaactgcaacagttcgctcaggccagtgttgaaactttcacaccctgagtgactacgggagaactgccagcttccgcttctctgtgctctgtgtctgcggtttacatatagatcgtccccctggaaactgaggcatgagctcttcctcagaagtctgtgagggtgaatgctaaaggctgggaagggagtgggctagccagctcatggaacgtaggccgcatacgcacatcttaccagtaaccagtgtggttgccagagtggtcaggctgctctgagacagggaagtctgatctccgcaggaaactcttgtgaagtaactggtgcctgaggtgcactcaagtgtgggactgagcttggcttctggctcagtttccattttttggtctgaaacttcatgtatttgaatatagttaaattttattatttttttcttacagaaatatttttaaaaattaaagaaaatctcaagtgaaaaagaattaacctgttaaatcagaatggttctctttgacccgttctggtctattgtgtaaatatttatttagactattttgataatacatattatttaccccactgtaacatcctgtaaactaaatgcgtttttaagcaatttttaagacttgtaattaccctaaaaataaggtttatta

SEQ ID NO: 23672 - DNA, 1547 bp, Mus musculus
tcacgccatgagggagatgttggggtatacaggaagggcagagtgacatcccctctcaggactgagtcctttacaaaggaaatggcttgtgtattttgaaagtcttaaaactaattgtttttcttttttttttcttttctttctttcttttttttttttttgaaacagggtcttttgatatattctaagctatcctccttcccctccttggttacaggtgtactctgccatgtgtagctcttaaaacggcccatggtacctactaagcagagcaaggcctgggtatcaaacagttctgtgttaacagttcctaaattctaaggtccttgaatttgaaggaaagacctttaggccaactctgtcttggctgataactcttacaatgcacgttactaacttggtgtcgctacccaggacacattgtctacagtaaatggaatgtgagccacatctgtactctaaactttcctaataactgtgttaaacaagaacaacaaaaaaaggtctcattgtgtagccctagctgcttataactcgctctgtagacctggctggtgtcaaactggagatcctccttcctctgcctcgggagggctggggctaaaggcacacagcaccaaacccagctaagtacagcgtctaaacatttcttaaagcatatgatattggttttaatatatttaccaaaagtactattgcttggatataaaatcactgagctgtttccggttctctctaagtttgggaatcctatgtgtatttagttctgactagtcgtttgaggtctcggtggcagagcctggctagtgactaccatgttggtcagtgcagcctgctatcactccttcaagcacagttctgaacccagtccatccatccagtgggccagctcccagacagccattcccaggtcatcttctttaagacagtgctagagtagaacacggggcctgtgcataacaaacgccctacttctaagctcgtccttagtagcccaggctggtctagaacctctggtcttcctttctctgtcccgagtactgaaattgcagcagacaccttcatgccttgcccaggcttctagtcttttcctccttctggtaatgactacttctttttttttttttattttctgttgcttttctttgagtccatccccccaaagtcagcctttactagtagaggaacaagacctgagcgctgtccctggggaacctcactagtcattcctttcccttgatggggcttgtgatggacccaaggtctacctcagacttgagtctgtttccccttgatagcatcatggttctggccttttccacattcaatggaagcttcatggttgttctgacagtgaaagcagtcctggagatcccattattaataaaacaaaaaggcctgcagagattcctgaccactgatcatgcggccaggaagggggaccaagagtaaaccccatcttaattacaagagaaaatttttttctttttctcgtgtgtgtgtgtgtgtgtgtgtgtgtgtgtgtgtgtgtgtgtgtgtgtgtggag

SEQ ID NO: 23673 - DNA, 1209 bp, Mus musculus
ttctaatctggaaacctgtgaagcctcagcccttgagagggcccgagatggatcagggagttctagctgcacacaccccgagcgcctgagccctcagaatgcccaccatgcacacagagactccattctccccaggaccaagtcctctgctgttggggaccatggcctgtctcctcaccttagtccctgggcgtttgcttattggtctcctggaatctcaaagggcctgaggccttaggctcctttaaggtctctgtctcaggcatggtgctcaatatcttggccaaataagttacttcccttgaatatccaggaattttaaactaaagcaatgagttgtctgtcaccttgccctggaactccagcgtaacctgccttagtgttccttgtgttgtctgctttgatgtaaaaccacaggtgtgtcgaggcagaggctgcagtcctctgtgcgcacagtaggcctttgctttaccattcaacagttctgacttaggcatgtgtagatgggtccttagattcgtcccgaggaagagactgcaaagacacatgaagatttctgatcctaaaatgctgttttgtttacttcctgtcaagatatcaacccctgtccaattcaaactatagtactgtgtaattatgtataaaggtttttttatttatttgaaattaggttagatatacatttttaaatttaacatctggctggacagtgttctattaactcattgaatgtgtttcctttgtcttgtgttaataaatattgatgcttgattatgtttaattcttaaaccttgggtggagctgggtggtgttgggatagaagcacaggccttctgctaagcatttgctctaacctgagccacgccccctttcctggattgattgaacacaacttgagactgtaaggtgagaaggtgactctacagccaactaaggagtgtgctccagaacaggcacaactaaggtcactgggtcaagggacagcaaacccttcatttggattttgcaagccaagaaagtggttgtcagaaattttatttttttaaccttggggtgtcttttcaaatttgggggggggttgtttgttttttttttttttaagatttatttatttattctgcctgcgtgccagaagagagcaccagatttcattacagatggtgtgagccaccatgtggttgctgggaattgaactcaggacctcaggaa

SEQ ID NO: 23674 - DNA, 1392 bp, Mus musculus
aaaccctgtctcgaaaaaacaataacaaaaaaaaggcgtgccccaccacgccgggcttagatagaaagtcttaggctacatgagatactgtatacccagtactcaaaaaaatcctgagcccttagatatttcattattgcccaagatttctgtggcaacatcagcaattatcataaagtgcccatagattccaaaatgtgtaccttttataatttattatatataaatctcgggtagtatgtctaaactataaaattttgtaaagacattgctattttattccagtttttgtttgtttgtttgtttgcttgcttgcttttctagtttacccagtcagtaattcagcctgcattcaaacctatttttttaaatgttcttttgtttgttttatgtccttctttgaattagtgaattatatagccttatgactacttcctctctttggttaaagttgccattgccccaaacggagccttacagttggccagtccaagcacggatggagtgcaggcactgcagacattaaccatgacaaattcaagcagtactcagcaggggacgatcctccagtatgcacagacctctgacggacagcagatactcgtcccgagcaaccaggtggttgtacagagtaagtgtgcttccatatctacaaatgggcccaaggcctttcaaggcacttcatgaataacttcacttttggctctacagctgcatcaggagatatgcagacctaccagatccgtaccacgccgtctgccacgtctctcccgcagaccgtggtgatgacttctcctgtgactcttgcatctcagacaacaaagacagatgaccctcaactaagaagagaaatacgactgatgaaaaacaggtaagtaggagagcatattccacagtaggtaatatttcagccacataccacctcattagataataggaagggccaggcagtggtggcacacacctttaatcccagcactcgggaggcagaggcaggcggatttctgagtttgaggccagcctggtctacagattgagttccaggacagccagggctatacagagaaaccctgtctcaaaaaaaccccaataaataaataataataataggaaggagtaggtttgcatcggctttggtttactgtgtggtgggctatgtccagtggaatgtatgagtattgttgattccagtaggcacatgggtattagtcatcccagtgacgtcattgttcagtctttgcattaaatggcttatgatatagaattcttcagttttactacatcctttgatataattgcattgccaagtgaccgagagatgatatagctcagtgattaagagcattgactgttctcgcagaggacccacattcaattcccagcacccacatg

SEQ ID NO: 23675 - DNA, 1132 bp, Mus musculus
gccattttctatgttgtttcttactgaatcaaaaccaaatcagagcagctttgaactctccctccaaagggaccaaaggtctctcataggccttggaaaaggaagcagtgggggagacttacagcttgcaaaccgaataaataaatcccagaaaatgggaaatccacggctgactaacacaggaacacctccttccctcccccaacccggtaagaaggaatcagaacccacttgctatcctggtgttactagtctgctttggctgccacctgtgctctggccagtggctctctgtcctttggctcagggttttgccaatggctgctgcattgtcctgcacgccacagctcgtataagtgcacctgacacaccagcgtcatcacagaactccacagaacagatgggaattctctgtttaatttcccatcttatctagcacatactttgctgaatataattaccgtaggcagtagaaggccactatagttagggaaatgggtacagtacgtggggaaccctaaaagtaatgcacgagagtagttaccaaggactcggggtgcgggggggagggattcttctgatcaaatatcactggtcctgagtgggtgtggtggttcagccttagtcccagcactcaggaggcagaggcagaggggcagagagagaggcagagagagaggcagagagacagaggcagagacaggtagatatccttgagtacagcctggtctacagatcaagttccaggaccgccagggctacacaaagaaaccctgtattgaagaagaagaaaaaaattccactggtcctgaaacaaaaccatggatatcattgtgttcatacagagagcaagtctgggtgggcccaagggtttcagctgcatttgtatgtatggatctaaacaaatgtatatttttcaagatgattttgcagaagttctattttaaatgttgatcaataaattcatattcatttaataaatgaaaataaatggtttctatatatgcctgcttggctgcatttgtgtcttagtgtctctgagaaggaaactcccacttagaagattaaggtatttgagtgtagagatgtgtttttctacagccaagttgtatatacaatggatgagggatgt

SEQ ID NO: 23676 - DNA, 2828 bp, Mus musculus
ggaaacactgatgtgtgtgtgtgtgtgtgtgtatatgtgtgtgtgtgtgtgtgttaaggtctttgtttccttttgtttttgtgaaatagcatcttgctattaaatactaggttgcctaaaactcactatgtagcttaggctgtgctcaaacctacagcaatccttctgacctaagctcctgagtgctgggattccaggcacgtctaccatgcctggctctcatgtatgcttaagatgagttttgttgggggtcagggtggggggtagggggtcttaccctgtagcattaggcagcaccttgaaaaggtggcccttgagctgttttaaacactaagtttctaaatagctgcccaagggcagtagcttgtttttagtcaaaagaaacgcaaccagactgtcgccatccttgaattatagaatgagactgctgcctttgaagtcagggtttttgtttggtgcattttgtttgtttttcaagagttttttcgtggctgtcctggaacttactctgtagaccaggatggcttcgaactcacagagatcctcctgcctctgcctctgcctctacctcccgagtgctaggattagaggcagacacctccactgccctgctggttcaggatttttttttttttatttctacttcggaatttctcagtggaaagaaaaaaaaggtagggcataagtggtgggtgtggacagatgatggctcacctgcagtgcaggttttccttaaggaatggagcttagcagggagggcttcatctttagccctgaggttagtaacttccctgctaatatcaagccttcctgatatgttgaatcttgagcacacacagtccctgaatctttctcttctgagagagtgctgcctgcagaagactgtagcactcgtggactgacttttatgaggctctggactcggaacgagtcacagagctaactgcactactcccaaaagtacccttcaccaaatcatgtctctggcgctgccattccacgcccaagataactcagaaggcaatctcaggagctctggacccaaaccttgcaaagtcagtaggtgtcactggtgtgaagtcctctcccggcaaggtgggcctgggctgtatcctaacagcccttcctcggagagaaagcctgctgaggccagactgcgaagctctggagtcttcagcaccgaactgctgccctcagttcagctacttctgacctgtcacgggggagacgtgattctgtcacatcaaatgctgtctgtctgctggagaggagtgacacaagagtgtgtgatcattgtcttggtggcagcgggagctagagctgcttcgaaggatgtcctctctgacgctttccctgtggcgagcgggccgacaaatggcctttgctgtctgtgcctctgtagcgctcctgctagcatttctcacagtcagaggctcagcctgcatagatctttatgaggcatacattatcaatcgctgtgtttcactcacccacagctaatccaacaaaaccaggtcacgggtccctcccagcagcattcccaacctgtggttgccacccatctgcaaccctatattcgaagacatttacctcatgatttgtaacagtagcaagattagttacaaagtagcaaaattattattgggtgtgacccccagcatgaggagctgacttaaaagagtggcagcttccggaaggtggggaacccctgcactacagggtcctcctcccccctgcccccctcccccactgttcccgaaggctagaagctgagcttttgaacctgtgcagtgcttgagggccaggctgacggcagcagaattccttgcatagatgctctagtgatgtctgcatttgtacagggatggggtggggcgagcagagtgtatccagattcgccatacttaaagagtccagcctgaagctgcttgggatcgcgcccagggctctgcctcgtgtgttctaggcaaggctccgttgcacatctcacttcctgccccagaattctgttgtgttatacttgtttacaatgatagaaggtttcgttgtgtgatacggtctcttctgactctctgactacaatatttacagtgtcaaaagattaaaaatgttccctattcacttgattgtcactgaaaacggtacttcaacagtacagtaacctgtaaacatttcacgccccccacgcaactctgctaccggcattatatttgtgagccatctttgtgcattctctgaattggtccttgttcttatgtgacctgaaatagttgtcccctcagtgcactgggagctgacaggccggggagtagcggcagcttgtcttgtgagatcctgccaggtcggcagcaagtggcttcaaggaggctttagtgaactttttacagcttgtgaacgtgctgtgattaaaccagagcttcccgctttcctgtttggttttctttcctgtttggtctttaacaccgaaaacactttatgatggagccttaacaactgaaataaagacctgccagtcgccatcaggagggacacactttaagttccaagcgtcggtgcttggctccctaagggacagagaaggaaatggattcattaccccagaaagtctggattagccgtagacaccaagaggggcccagatagcttcaaatgtgccaccgccaccaagcctccctcacgcctggcttcgcgcttaatgcccacgtggtgggaagggagaagctgctctcagtggctgtctctgcccaccacaggtgctccttggcacttgcatactcaccccacacaggtacacaacaaatcacatttttttcagtctaaatgaaaat

SEQ ID NO: 23677 - DNA, 1099 bp, Mus musculus
cagtataagctcattttaagtgagtgggatggagggattggccacattatcaggaactcaccccagttaaaatgggatctgtttatttctgtttagttccgacgagatatcaccaagtgtctcttcgttggcctcatctccattccaccctttgccaactacctggtctttttgctaatgtgagtatatactaccagcagcttgaaactatacatttagaagagtttattgtattattattttcatgtatatggatgtcttgtctgcatatatgtctgcaccacatgtgtacctggtgctctcggtgaccagaagagtgtatcagattctttagaactgcagttacaggtgtgggtgctgggaattgaacccaggtcccctagaagagcagccagtgctcttaacctctgaaccatctctccagctatgaaagtacagatttttttttgtaaagattaaaaatcattttgtctggtgtagtcccagtgcttgggagttggagcataagatcagaagttcaaggccagcctggattatagaatgagttaaaggctaaccagagctacatgaaacctttctcaagcaaataaaaaacaaaagccgagaaaactattcatttttagttacatttttatcttttatttttatgtatatgtggttgtatgaacataattatatgcattacaggatcctgtggagcagaagagggcattgggtcccctggaattggagttatagatggctgtaagccaccgtgtagctgctgggaattgaacctgggtcctatgaaagagcagacagtgttcttaaccccagctcccaagaaaatcatttaaaaattttttcatttctgaagttcagaggtcatcaaacttcctgcttcagtcttttcattattccaagttttttttttaaaaaaacttagatttatttattttattctagtctatggctgtgagtgttttgcctgcaggcgtgtatatgcaccatgtaagggcctacagattgttgtatgccatcatgtggtgctgagaagtgaacctggttctggggtcctctgtctgtaaggacaaaatgtgctgttaactgctgagccgtc

SEQ ID NO: 23678 - DNA, 1099 bp, Mus musculus
cccttaaattttgttgagatgaacaaagataatgttaaagattctgtattaaatttgaatttatgtgtgtttttgaagtatttaataaagcttagatttttttatagagagtttttggttcttgttgctgttgtccattaaaaccaacctgtaatgtggtttctaatttcttttggtctgaaacaagtttaaaaccttgaaacctgaaaattcctcacagtggtgcaaaatcagcttgacatattaggccgagcactccctcacccaacatcccattttgaggtgacatttctagtttcgtcacgttccaaggactggttcccagtcattgcagttgctgcctctatccttggcaagtcactgttggctgccgtccccttcccctgtcccagtggcaaatgggagaggtaaactaggaaggcagcctgtgttgtgagacctcctactctggctggcttagcacttgttacacagctcaggctggttctgaactcacgcctcagcctcacacgtgcagagaggaaagatatcgacaccatgcctagacttggacttgcttccaaatacatgaatctctgaggcacaaatgatgcatataattctattagtatattggctataaattacatgacttagggggccagagagatggctcagtggttaagaggacctgggttcaactcccagcacccacatggtggctcacagtcatctataactccagttctaggggacctgatcctgtctcctatccccaaggggaccaggcacatgtggtatatagatatacacccatacacataaaagagtaaaaagttaaaaaacctagatgtcctaatttttacctgaaattactttttattagagtagccttcaaaatcacagaagtgaatttatataccattatagttttagattttgtttggttttgttgttgttgtttgaaatagggtttcctggctaccctggaacgtgatttgtaggccagactcaccttgaactcatagatccacctgcctctgcctcttgagtgctgggattaaaagcatgtgccaccactgcctggcttttttttttttttttgttttaaaggctaggc

SEQ ID NO: 23679 - DNA, 1580 bp, Mus musculus
gcagcccctccctaaagcattctgaggtaaggaggtatccattcttcaaatgaatgtgagtgaagcagcccaaggctcttccttaattcctctggagtgatgctgtgccatgctggtctttgcttctagtaataaaacatcaaattaggtttggagggaactttgatcttcctaagaattaaagttgccaaattattctgattggtctttaatctccttaagtttttgatttatcttacttggtaaatgaaatgcattagctgtctgccttttccttcccatcctctgcccagcctgtccactgtccctgctcctccaccccctcccatcactatccatagaatcagtggtgcaggaccgaaagccagactcagccccttgtctccctgcacctgtcccacttgacattttttaactcatctttcataaggatcctctgaagccccctgtgtgacctgagcacagactccatttcttcaggttttgtatatctccaggcaaggtgaagggtacccttcggacccgcctcataaaccatctctgcatcaccatgaacccagactagctgtggtgccagaaacctgaacttaaacaacagttctcagtgcaaactgtcctaggaaaatttaaagatgacaggcaggggagaagatgcatatcaaaagcttggctttaaagtctaagggagttttagatcaaaaactagctatcacttcctgagtgtctcatgtagccactcaggctcccaggagtttcctgaggtaggttagtagggtcacgtgaatgcctcactatgacatgacttgagtccagtgagatctcattaggattaatatttcagggatccttaatattttgatttgttttccgagattggattttattttatctgctatttcagttcatctaaatcttgtgttctgtacatgtgatgtttgactgtaccatcgactgttatggaagttcagcgttgtatgtctctctacactgtggtgcacttaacttgtggattttttatactaaaaatgtagaataaagactattttgaagatttgaataaagtgatgaagttgcattacacctcacgccagcattctttacttagcatgtgctcagatggcttcctttatatggcaggtctttaacatcccacccagaaaccagctagtgctcccattgctgtttcttcaatacgtctttgaagtaaatgtaggtgtgtcaggctaggcttgactgctctcctgggttccactagagatgatcctggactcacaactgtaatccagtactcacggggcagaggcaggccgatctgtgagttagaggccagcctagtctacccagagaaaccctgtctcaagggtaaaaaaaagaaaagagctttacagatgggattgaatgccaggtctttcttggctccatctatattatacacagggatctgggagattgtggcccttgccagaattgagaacaaacccacttatttctcatgtgtttccagtgatgcttgtctgggacaaacctgggttgtcctcattgccaactcctgaatagttttgagaactgtagaacttcca

SEQ ID NO: 23680 - DNA, 1190 bp, Mus musculus
gcctgagagttggattttgaagccctgtggccaccaaggcaggatgttcttcttgcaacaacactggtcccattttctttcttccatatcagtggagagaccaggaggtcacatgctacttggcccaaggcttttgtcctctcctagagacgagcctcgaaagcagcctgagagtgtgtcctgcagaggaactggaagggcagagagcctctcttgttagcagatctttgaagcaaaccctcttgatgtgtatacacagagtgccttcatcctatgtcatttgcacagttatctatggaggagacagggagaaaggagccatccattgagaaggttgagagtgaggtggagtatatagttcagggaaaggctctgagtttgaccccttagcaccacagaaaacagaaaaggagtccaggagagaaaggcaggcagagagaggcagagagggacatagggaggcagagggcttttctgcgattgcacagctgataggtggctcaagctggggttgagtccccatctttggtgctgtaccagggttccttccggcacataaaaacactaaacagcgagctgccagccatgccatttcctgaccccctctctgatcattctggctgtctgtcctccagaaagactggtagcgagatgggagaccacattgagatcctggcctgttagtgtggaaagaagttcatgagctgagacagctggtgagcctcaagcccaggtcccctttgttctaagctatagacaaggagagtaataggctgaagcaggagctaggcatgaaggcacaggtctgcagcctcggtgctcagagactaaagcagcaaggtcttaagctccaaggacagcctgggcttcaaaatttgacctttcctcaaaggcaattaaaaaacagcatggagaatatgcaggggactgccttgcagcccctgaactaaggcagcccccctccccttttacacttactcctcagcagaaactagataggtgttttgtccaaggtcacctggcaagatgtttagcagttccaagcttagacccaagataaggctaatcagagtcgtggcaagtctgaggggtcagggacagcgtgcagttgcctggagggctgatctcatctgcttgcctgagtgccctgtgcagagctgacccgaggatgccagcctttctacaatcaa

SEQ ID NO: 23681 - DNA, 1193 bp, Mus musculus
cctgaaagtcagaataggagcaacaagctaagccacagtagcataggcccgctcaggtgtgctggggaggacagagggggagggggagggtcagatggttccctgtcagactggactggaccagagctcctgtgtgtgctaggctgaggctgggcattttacccacgggaatttgctcttccgaggcgctcccctcccccgggcgctctgacctctagtttacaggagaattaactgaccttctagggcaagattttaaaggaggttacatcgaagcacactggaaactgcaatttaggtcagattctgttgggggagtcgtttggtttatataaatacatacatctctcccccccccccccgaagtcacctgtgtcaaatccacaaatctatttggaaatcacaaacattttaatgttgttctggcttttgtgttatcctgttgccaccaaggacaaagaggggctgactggactcattttatttccttttgtcaaaaggaaaaaaggaaaatgcccggtgttccaaacggaaacgtttgccacatagaaccagagccacatggggggcacagtgggccagaactggagcggactgggcggtaagttctgggacattgcgtcctgggtgccacgcaccggcagacacagctaaggaaagaggcgtcctctgtctctaacatcctgggtagaagtttattgaccatggttgacgttcacacgagaccatctactgtacattaacatgaatgtgtccaatatcatattcattctacttttttgaactatttgctaagttctgtctgttcccggtcctttctagatgttccctctgatgtaaactcagcacctctctccttccttgtctcctggcgttcttcttactctttgtctctgctttgatgctgtgtccttcggaaagccttctgatattctctgtggctgacgctgggcacttgtactgtagagatctttagcttcccatcacagtccacatcattcaacgttgttatcgtcgtctctcctgctggaccgttggctccaaagcctcaaagtccccactctgcctctaaaaaattatcctagcccacttaaaattatgtaaaagatgaatgtgagccttggacacagtgaaaatttctggatctctctggactgcacagtcccagaacacaccaccctgggtgtgttttt

SEQ ID NO: 23682 - DNA, 1159 bp, Mus musculus
ttccacaagccacagggaaacaaaatcggtgagtgtctttaaagtatgtgacagagtcgcacagggaaaggacacagaagactctgaaagtcttctccagggcagagtgagtctgtttttctgagtttccgtgctcatgaggcgtaacttacaacagggcttaaagttgaagcttaaaattaagcaaaacctgttagctctctgagagattgcttgtttcatcagtaaagtgcttgcacatggctgtgacagttaaaaaaaaaatgagcccaggtaaaaagtctgggtattatggcgcctacttgtgaatccgttctcaggaggtagagaccgatccaggtggttcctggcaggtgtggagactgtggtgggagtgagcagggctttgagtgaggagagctttggggtttgaacaaggagacctctgggggttagtagaggaagatgtgattcaactcgggcttgtttttaatttattcatgtatttatattccatatgccaccccctccctgtccttccatcacaggggtcctcccctctgcccctctccttcacctgtgacccttactcctgaagactgtttcaggagcactggagggcaaaggtgaagcgggtcacccagtgagagaaggcagtggcttgctgagtgtggggacatgctcaggttctggacacattcggaatatcagctgaggtccgtgtggatgctgggtgtgggaggacttgaacatgctgctgcagaggtttgggctagcacacagtaaaccttggctggtctcagaaatctgaacgtgggcctgggtaccccaaactgcactctttagagactggtctcggctacgttagactgtgtcagaggcttggttttccgtattgtagccttgtaatgtgggcattactttgagtatcctaaaataatcttgtttaaggattttcatgttagttcaggcgctaactttctgtgctgtgtttaactgctgcgattgtttgccatgccaggtccgctccatggtgagtgacttcgccgtgttcctcaccatcttcaccatggtggtccttgactttctgattggcgtcccgtcgccaaagcttcaggttcccaatgtgttcaaggtgagtggacctcggtgatcttcaagcctgagggtacactgatct

SEQ ID NO: 23683 - DNA, 1164 bp, Mus musculus
catacatattcatatagacacatacacatgcacacattctagatttctttgtccttttatgtgatcctttgttgttatttaatgtctctttgtatccctagtaattttccttgctttgaagtttatactatctgattctattaatataaccattccagatctctgatgattcacagtttcgtgatatttattgtacactctttttatttaaaaaaaaaatctttttactttgaagtaatttcagactcgcaagaaagtttcaaaaatagtacagagggttccttcatgccgtcatttatgtaaccatcatacgtttatgaaaaccaaggtgttcacatggatggaatgctgtattattaagttgtgaactaatgagcttttctgtcccagggtccagtcacacaataagcaccctcttcagttttcgcctgcttgtcaccgtgattatgtggggtttctcgtgggcagcatattgttcgttctttttttttttctgtacttcagcctgtctgcccatttctatgtctcacttttcaatatggtgagtgtgcttccgcccatgtgccccaccctcctcatgaagtgtaggtgcgtgatgtggctgttggcctcatgttacacagcacagctctagaatttactcatctttcttacctgaaaatgtgcactctgtgactaatacagccacatgacaatctctattctactctattctaatcatttatatttgaagtaattatgaatatttaattttggtatattagcctgttgtttgtttgtttgtttgtttttgtttattctgtgttcgtttcctttttcttcttttgggatacacacacacagacacacatacacatacacgcatgcacacacatgcacatacaacatacatacatatacacacacattaatttatatgcaatgttttagattttcctatttgcttgttccttagttttttgagacagggtttttctgtgtagccttcactacccttgaactcgtcccatagaccacgccggctttgaactcatagacccgtctgcctctgcctcccaacttttaatgtacccttttttataatttccttagcattgcactaggaattatcatgcatacatttaaatgttcagtcggcctaaaattaccatttactgctttgaa

SEQ ID NO: 23684 - DNA, 1151 bp, Mus musculus
agtagagtcacaaagcagcatgcgtttagggtccacccatgtcatgtaaggtgtcaggctgttctttctattgtaaacagatgccatgttgtctgtccctggacactgggatgctttcagttttacgtgattatgtgaaatgttgctgtagtgctaggctttgtttaatttttttggttttggacagttgggttctgttttctgatggcgatggaaactgaatcccaatgcactgaatttatgcatttgtttcatttgatgtgaagtgggggaaaaaaaaaaaggctcgtttggtttggctcacggtggtgcttccagagcgctgggcaccggcttgtgctgagtcctgctctctttggttgcttttacctcttttacatttctctgccctgatggtgaatcaaaaccaagcaatgactaatagatttttttttttttaatttctgccacttcatgtccatcccaggactgacattttcccagtgttctgtgtgtctccaagggctcaataaaagctctgacttgttctagttctctgcaatgcccttcactgaggctcgctgtcaacactgtaagattgtttcttctaacagtctgctaatggcagcttgctacacatagaccccctgaggtccacagagcaggattttgactcatctgtcattcaaagagactactgatagcctgagggggagattcagacacagttggtgaattttgttactttgttcctgactcctgcttaaacacccaatctccctccctctgtgggaaggcatatttttggctggcccttttctctttgtgcggtgccatctgtcacaggggtcattgcttagaacctggcttcttcccggctggagcaggtggtcacagccagtggctattgacagagttgggcctttggagcttaccagtgtgccccccacccccctatgctgtgagtgtggttgttacccttcagaggaagaagagaaagctgaataatgcaaagctgattttgaattgttgatttattcttgtgttccaactacttgactcttcttgtctgtctgtctgtctgtctgtctgtctgtctgtcagcctgttccgctggaccctcagaccgggttgaaagaatgcacagaacacaaagaaagcagtgtctttgg

SEQ ID NO: 23685 - DNA, 1142 bp, Mus musculus
agatttttcacatgggcgctgggggtcaaactaggtcatctccctagttctggcttcagaacttttctcacaggtaaactccctggatactgttctaacaatccagttttatagatgccccacgtcacatgtagatgtgtacatgtacatgtggagacatgtagaatggctcaccgcacactcctgtttgtggtaggggtaagtgagttgctggatcagctcagctgtctctgtcttctgtccagcagtctcagcaaaggtggcagttcctgctcaggtggggctgctccagtttggtgacaacagatagcacattgccaaatcactgttcagttttgatcatagagcagcagctctcagccttcctaatgctgtgaccctttaatgcagttcctcatgctgtggtcacccctgactgtaaagctagttttgtctctactttataattactttgtaatttgtgtctgctatgaatcataatgtaaatagctgtgcttttgaatggtcttcggtgacccctgtgaaagggtgaaggacccaaagggcgagaaccaccctgataaagactaggctgtgatggtatgggaagggaaaggtcagaaatgtgcgagcccttattgccttggctgtggaagatctcgaaactgttggatgtatctcatttttcttcctcacaagtaatgataggcagagtattgcaggggaaaggagcacacagtgtaggggtgagagagtgcgggggtgagggtgtgcaggggtgagagagtgcaggggtgagggtgtgcaggggtgagagagtgcaggggtgagggtgtgcaggggtgagagagtgcggggggtgagggtgtgcaggggtaagagagttcaggagtgagggtgtgcaggggtgagagtgcaggggtgagggtgtacaggggtgagagagtacaagggtgagggtgtgtaggggtgagagagtgcaggggtgagggtgtgcaggggtgagagtgcaggggtgagggtgtacaggggtgagagagtacaagggtgagggtgtgcaggggtgagagagtgcaggggtgagggtgtgcaggggtgagagtgcaggggtgagggtttgcaggggtgagagtgaagaggtaagagtgcaggggtgagggagt

SEQ ID NO: 23686 - DNA, 1114 bp, Mus musculus
cataacttgtatataagaccctttcttcccccctgttttcaaacccccacccagtgataccattacaagttaactttggtttgattctgcaggtatataacagagtttgtaaacctaggcaatgtttcagctctacgcactttcagggtactgagggctttgaaaactatttcggtaatcccaggtaagacggcccgggcttggtgtcaggtgttgggttagggccctgacgtgacgtattgtacttttttttgttttgttgtggttttgtgtgtgtgtttttttttttcctttggtgtttgtgtctgtacccgtgtttgtcatttgtgtctgtgtgtgacctccctcactacagatatgtgacagagtttgtggacctgggcaatgtctcagcgctgagaacattcagggttctccgagctttgaaaactatctctgtaattccaggtgagcgaattcgtgcacaagaccagtcttgccacgctcctacttcctcccattcgtaatgtctgccacatttgaacctgggatcggcacatctgatatgccttgtctcgctctgcatgcttccccctgagaagaattctctggaatggccctttggtcctgaggcagacgtctcggaccttgcttgccgggcatgcggctctcattccatccatgcgtttgaaataaaaaataaaaaaagcacatgcttataaacccttaggccctcacagcacccgaggagaggtgtaccggggtgggctgtgcctctgtatgtggaccactcgaatcatggcctcatggaattacagtgtctttaatatccacccccattccactgcttgtgatttcagacttcccgtagcatgttctgccaacagcatgttatccaaagacttgtacttttactggtgttatacgaatgtaatcattttagtcaaggagcaacttgcccagttaactagtcaggtcagactagttaaagtggagaaggcttggaagtcagtgagacagattttaagttaccgtctcccatattttgcaagtgtctgcttcggtagagtgagacctggtaggtgtctcctgggagcagactcaggggtctcaggggtcgctctcaagtgcaaac

SEQ ID NO: 23687 - DNA, 1117 bp, Mus musculus
tgttaggatcctgcctgtcatctttgtgctgcagacagtctccaggtagactgcgcactggttcaggtcagcaatgtggggctcatcctagctccagagctactactggcactggccattccctgcctacaaaggaaatggaccctccccgcagaagttcttctagtcattgtgttaaggaaaagaataatggaagactgtcctaccctggcagaggctagggtagctatttggagctatcatggaggaaagagagggtattacaagaagtatggttccaaatgccacaaagggttctaccgtcagggagagtgatggttgggctttcaaggtggaagttatcatctgacagggagagaggggattatggggccagagccatgtcaaggatgctcttgggagagacagtccctggtggtgcttattcactgcgtttcttttgttaatgtagtgactcattaaattctcaaatggtttcttgtcaaccaggataagagagcttgtccctgtcggaaatcccatgttggcagagctgaggaggggcagctgaggggtgtggaatgtgtgtatttatctgtattcttttccataggttccattaagtttgtctggcttaatttaatgggagcttctgggagctgcagactgtaaagggcgagggtaaggctcttgtcacctcttcaggctcctctccttccaacgggacctcttcctcccccatcccctcagcccctcccttctccaacctgcgtgtgtgttctgccgccttcccttcctccttctctcttccctttgtggttttcttccgcctctctcaaccacctttccttccaggtcgtttgagtcaagttgaagtaggctgaagtaggcagccggtggtacccacttccgctgctgggggggtcccccgcctgttaaatcagtgctagggggtttattctaacactctggaacctctgttttctttttcttttcttttctttttttttttttttctcttctgtttttgtgtaggtctctttagtcagccttatagctaatgccctgggctactcggaactaggtgccataaagtcccttaggaccctaagagctttgagacccttaagagccttat

SEQ ID NO: 23688 - DNA, 2554 bp, Mus musculus
actggccatacccgacatgagttggcaccagggcctaaggaactcctgctctctctccccgcaacctttgtctcttgtcctctgagcgacatcctcctttcccattctactttctcagtattggcttagtttttcttctcatggttgtgtcactgacccctccccatgctgtctctgttccttttcagctcttccttctggtccccatccatcaccttctgtgcttgtctctgtctcctggaccctgtgctttaaccctccctctctcattgttctgattcacaccacagcgactcttggcggaagttcttttggcccagaggctgagaaggggggtgggggacagggagccccaaccccctccgtactttacccacctgaaatcttggggccttagggggtgggacaaggattaaaaaaccacccaaagaaggcttccccccccctttttggtttgttcatttttgaggggaagtcccagaaatgtaggttgcttaatattttaggcctcttatttttgtaagatgtgtaggatttgctgtttttcgttttattttgacaactcaggaagaaactgacctcagaaagaatgttagagtttggctgctctcctgttacccccaaccccgtccctggggagcagattctcccagaccagagagatttggggctaatgaggaaagaccagacccgagccccagactgctgtccctgggatagacgcagaatgtatctaggggctttctccccaggcccagcttgcaagcaagaggatggggcagaggctccagggggtgctgcttgctgccttcttaccattcttccccgtgggccccagtcctcagcttccggtggtctgtgaaccttgcagagagttggggtgctcttgtccattcagctgggcagaaggttctcaggccatctgactggaagcaggttctgtcagaggtgctcaataacaggctaagaggattgcctctggcgtgaacgtggtctagccacaagtctggctggacacaacattgactactaggagccaggcaccctgtgacgagacagagcactgccctggaaagggttctgtgtctctgtgtggggtgtctacttgtccccatggagctctgggtctaaactgagggcctggagggaactgggtgctttcctgtgacgttagtccagacttctctgcaaaccacatccctcctgctccttctcttgataaggctctttggtcccctcaggccatttcacactctttggtgcaaagaaggtacaccccctatctttgtcccaccttagcccccctaccccttgcccctacagctcctagatcccttcatgttctagatgctgagaataccatgagagacatggcaggagcaggggcagggtgctgagggcaggtgtgaggagtgtgaacaggagagctactatgtctccttcatccttgttctctccaagcctctctctggagccagccgaccaagtacagggcttgatgcttcagagcaagtggcccagggtgatactgcagatgatcctcggtggggcctagagtaagggagttctctcaggtctggggtgggggtggggataccggtgcaggaaagtggggggggggtgggctgggttaggagtacatggacccaccgctggggtccccacacttcctttgctgggctctttctgttcccggtttggaagctttgcacaagaagacagcccccggctgcagcacctacctcacgagcatggggcaggatggcagggcgggtctagccctagcaatgttggggggcataccaaagaatccagggatggagcgcaggggagggcacaccggccctccactccctctgctaacattgggttgggatcctctctcggttgtaacccatttctacctcattttgctgtgtgttgtacatggacatatttatctcctatctgatgatgttctgcagttgtggcctgtctacctcagaagacactgtattttaaaagaagatattacacagtattaaagttatgatgtgtggcatccagaggatttcttgtgggtagtgggatatggggagtgttggctacttgggtctgtcagtctcctggctgtggttctgagtgtttctgttccttgggactggaagaggaagaggggctcccaagagcagggcagtagccctgggtgagcatgatgagggtcatatttgtcttccacagggtggagggcaaggtttggagacatctgaagccaagtcctgcgggccacatgagatcttttgcccatttccaccctgctgttcagtcctggttatcactcacggtaagaagccgttgcgggaaaaatgttgtgggaaataataaaaagaagaaggaggaggaggaggaggaggaaagaaagaaaagaaaaaaaaagagagaaagaaagaaaagaaaccaccaagttcctgagctccaaccacttactctctgccctccaattctccatcaaggccagagctcccgagttacctttgctgctatgccagccccatgcaacgactgtccaccccac

SEQ ID NO: 23689 - DNA, 1158 bp, Mus musculus
cactgcagggtgtcactggcaggggactacatgagccgcttgccaagcatgccagctgctggcacagctttcaactgggagggatcacagtgccccatcaaggttgggctgctcccctccgtctgatgtgtggcttggaagcgctaagagccccttgggaagtgagcttaggaaggtgttgagcggcccagtgagaaagtgaatgagcagggatcaaggacctggtgttcctgaatgacccagtccatagggctgcacttgctctggaggggacattcccctggcttgccacaccaagaaaacactgcagcagccgtgctgccttcagtttcaaaccgtggacagctttagaattcacctgtgagctggaggtgggcaggagttcacagtgaagagctgagctcacactcactgtttgtttctgttacttattacagtactgtagcttcgagttggggccttgtgcatgctaggtgggcactctagcactgggttttatctccacacccaccaagcctactttatactggctagtcctggactcccaggcagcatcgggataaagaacagggctcaggaatcatgcagcaggagagtggctccctgcaggaattgggagacagaggcctgccttcttctgttctcttcagggcctggcacacctagaccagtgacaagattagtcattgacacaaggaagagaccgtggtttaccgtttgaccccttgatagattcctaccttctgtggtgacgcagcaacataccaccatcctgtttggatctcagtcgtgttcgagagagcatcagccatgctccctgagagcatcagccatgctctctgagatttctcccacatcaacaaggttttcatacttggagccagagttaatctctctcgaaaacatttttcacattgattgattgattggttgtgtgtctgtgtctctgcacacatgcggaagtcgggagacaacttggaggaattggttctcttcctaccatgtggggttccggggtggaactccgggttgtcaggcttagcagcaagcacccttacccactgaactgtctcgccagcccctagaggtctcttaagtctcagcctcacactaggggtgagaggtaggggaggccagctccagtgttgcctgacacag

SEQ ID NO: 23690 - DNA, 1126 bp, Mus musculus
aaataacacaaataatggcaataacacataacactactactactaataataataaagacaccacggcctgagtgacttccagagcggtttgctctgtgctcgtggtccagatggtcacagcctgtgatgctgaaacagggccaggagctgagagctcctatcttgagctacaagcagaaggatggcttgtgacctctgaaaccccaaagagtgccccagtgatatactttgtttagcaagaccctacctcctaggctttccaaagagccacccactgagggtcaggcagtcaaaggcccaagacagttgtggaggagcatctcaagcaaaccaccacacacacctgggtaagggagtaagcctgagagagaggtgctctctgtcctccctggaggctgccagagatgtggaggcaggaagtggcactgtgtgtagcacataccttcttccttattgcatagtgttccttctatgtggcccttgtctgtgttctctgcagataatggcacctggacccagctgtggcttgtctctgactatcacgagcatggctcactgtttgattatctgaaccgctacacagtgaccattgagggaatgattaagctagccttgtctgcagccagtggtttggcacacctgcatatggagattgtgggcactcaaggtgagtatcgaactcagccagggagcaggaagcttgagacaaaaggcctgtccatccccatgtcctcctcactgaggcagttgggaacaaacgctgggaatggtagtttcgtgtgaggaacagagcccctaactgggttggctttcctcattggctgtcattagccctcccctaggaagagccatagatgaaggcttggcagctgttaatgcatggcacaggtgtttgctaaggaacagcatgaaggaatgaaactaagaagcgagaccagcacaccaggagcaggagtgcaacaatctcatgccaaggttgggcactgccttgcacagctcacggtggcaagatgcggtgcccacctgtccgcatcctggatgaggaaacaggctttgcacttggttgtactgttgcctccagatcctgatgtgattgttggtgcttggttgacctgggcagcagctc

SEQ ID NO: 23691 - DNA, 3456 bp, Mus musculus
ttctccccttgcacctctgccccttaaggaagggaaggcctaggaaaaaagcctcaacgcatcacggggtggatctgacctgacgaataggcaggcagcgaagatgagccagtgccagcggccaaggcttctgtgggtctctcactgcgggtctctcactctgggtctctcacaggccttgcgagtgatgggaaagatgatgcgggagtgctggtacgccaatggtgctgcccgtctgacagctctgcgcatcaagaagactctgtcccagctaagcgtgcaggaagatgtgaagatttaagctgttcctctgcctacacaaagaacctgggcagtgaggatgactgcagccaccgtgcaagcgtcgtggaggcctacctcttgtttctgcccggccctctggccagagccctggcctgcaagagggacagagcctgggagacgcgcactcccgttgggtttgagacagacactttttatatttacctcctgatggcatggagactctgagcaaatcatgtagacaactcaatgccacaactcaaactgcttgcagtgggaagtacagagagcccagtgcatctggcgtgttgccaggagcggtgaagggtgctgggctcgcccaggagcggcccccataccttgtggtccactgggctgcaggttttcctccagggaccagtcaactggcatcaagatattgagaggaaccggaagtttcctccctccttcccgtaggcagtcctgagccacaccatcccttctcatggacatccggagggactgcccctagagacacaacctgctgcctgtctgtccagccaagtgcgcatgtgccgaggtgtgtcccacattgtgcctggtctgtgccacgcccgtgtgtgtgtgtgtgtgtgtgagtgagtgtgtgtgtgtacacttaacctgcttgagctttctgtgcatgtgtaggccagggtgtggtggccatactgtctctgagtgctgctgcttctcagtgagcagcatgtagttaacctggtgccctcctaggtgtctcctgtccccagaccccatcagtcagggaggttctgtcttctcagcaggctgcttgcccaccctgtgtcacaggccctcctcttccatttcagaccagaaccaaagctggcccacttgtccatggtaggagaagcttttgggtcaaaatgagggggacttgatgagcagagagagaatgtaggtggaagtcttgggtgctgtgtttcagcatcagccatgggaaatgagccagcccaagggcatcttccttgacagctgtgaggaagggccgaggaatccgaagccagagcttgggactcagattggaatgtaacatctgtttatgtcccaccccagattctgcaaactgcagtgtatatttttggtggtgggtttggggtgggaagggatgggttgcagggcgtggggagggaggctggggtgggagggaggcatctgcatgggcttcttgtactggattctctgatcagggtagagaagaggcaaggcttgcatccacttcagggtccctactgaggagagtgagcggtccgagctgaatatggtgtttaacctaagtttagtatttaatgaattctagaagcctggctgtgggtggtgatttggtcagcatatcttaggtatataataactttgaagccataactttttaactggagtggtttattttaattcagtttattttattttattttggggggagggtcaggattttaactttaatattgttaagttttgtaaaaggagaaccatctctgtgacaattacctcttagtctgtttgtttttaaagaaatccctaaaacaaacaaaacacaaaaattctccagactcaaacgcacatagttcagtcactggaaacgcttgtctttgcacctgagcctgatcccgctgagcagtgagggctgcttttccccatgggggcttgctgtctcgtactccctgcaccctcggccccatcccgtgagcacctcggccctctgcacattgcccggctggttggaccctttccagatacttgctcagcaaatgtgggctgcgagcctgctgagcgctggcccgggaggatctcctcagggtggggcaggcttgggcgctgctctgctcctctaccactggagggaatggaatcatgcgatgggcgagcacctgctgtggagaccagaagtgctcatggctggtcctgagagccttgatgagctaggatcactgttcttaaagaccactgaaactggaagggggacctgtatccccttgggaagagaagcccctggcaagcagtgggtcctggagactgggttcattgtgagcctttcctgccaggggaggcatgagtctttgcagggaaactgtctcctccagcttctcctgccttggtctccccatattcttagcctttctatttatttcctggtgtataactttccttgctttaaagggatcttcctttaattccttgggccaatttactggccattgaacagtgtcccttgagtcccaactgtgtctctggggaacctccttacccacccctgctgacctcccacttcccaccctgcagctgagtatccgtgattacaggcgattgaactgtagagtcctctctgcctctgtacctgccagcagcagcctcacagtgacccccacgccactggacaactcccaggagacctgtgcgctccgtgcagctcagctcagccgcctctcaggaagcctggagcaggtctgggggaccccccccccatcactctttacattaagctgagagttgggagaagctgtgctttggctccctgaggccaccctgatccacggggcacccgcacctctgcgttctggattcacagaccaagtctaaagcccgttcgttcctgagttgccgtcaaggcccctgaacggtactctcggtacttctgtttgttttttgtacaatttattagaaaggactgtaaaatagccacttagacactttacctctccagtatgcaaatgtaaatatattgtaatataggaaatttttgttttaatataagaatgagcctgtccagtttctgctgtacattattaaagttttattcacagaactgctctgatcccgtctgccttccatatgtaatgactgcctggggcttggccgaagtggggcctgggtcccctgcgtgctgcacttgagcagaacatgttctctgctgacctggacaattaggtcttctgggactggctttgtgtggtcttttagcattttggtctgttttttctaaaaaaagatttttgattctgggtagtcatgggccactccctgtccatggcaatgtaagagactccggttttgcttccctctcctcgactgaagtgtgatgcttgagctgtggggtgcttaggagactgaggcgagtctgcatgctttagctggaatttt

SEQ ID NO: 23692 - DNA, 1139 bp, Mus musculus
tgcatttttggtattaaaggatagctcttggagtagggtgagccagggcttgaagtttaggaagcgggcgaagggtctgcaaggtgcttggttttggtaggtagtgggcgcttgtttaggaggtttccccgctaggatctccagtgtgaggcactctgtactctgggtttgggtgttgattgccgggtagggggttgtctgagcatggactgggaaaaggtactcagagcttcggcgttgctgggatccatccaagtacaagtaagattggatttccacgggtctccttcccgggctctcagccccctttcccagtgtttacttaatacttcataggctgtacttagattttctgattcccttaccgaactttctttctgaaccgtgctggaagacctgggggttgctgaaggaaatggctagctaggttggctgggtaatggttgtgttagactaagttgtcagagtatctagaaacctaggagctgtagcctggtgcagctactgaaagccgcacgtggagcctgggtggaagttgctcacgatagagtctcgatgtagtactgactaggggggagaccccttctgtcatcagacagacttgtataccccagtggtcttttgagtctgttaggtagggtgcagcctgcgggcttggtcacctaacaggtgttgccaggacctgccccaagccggattctcccactccctctttcaaccccgcctcttcctcctccttgagacacccccaccccctcaggaggctagatgcagatctgtatcttgtgttgcggactatcggcctgaagctgggtagattggtgggggttgatccggatgtaggatgtccaagtggagaaacaggatttgaatggagctggaacaaacgcccagtcctgactggctgccacccttcttcctccacccccaacccatcccttcccaggcttcttgcaaacagaggcagaagtggccatatttctttctttctcccaggtgctgtatgccctagggacttgacacggggcaggcggggtgggaactggttggggggggggtgctgttttatgggaagtcgtatgcctagccagcggtggagctgtcctggctaggcacccaggggtggtgtggggaatggg

SEQ ID NO: 23693 - DNA, 1273 bp, Mus musculus
ggcctcagagaatcagaaccctctaaggccatggcctgctcatctctcgtgtcttccccaggatgcactgaggaactcaggtggtgatggcctgggccagatgtccttggaattctatcagaagaaaaagtctcgatggcctttttcggatgagtgcatcccctgggaggtgtggactgtcaaggtgcacgtggtagccttggccacagagcaggagcggcagatatgcagggagaaggtgggcgagaagctgtgcgagaagatcattaacatcgtggaggtgatgagccggcatgagtacctgcccaagatgcccacgcagtcagaggtggacaacgtgtttgacacgggcctgcgggacgtgcagccctacctctacaagatctcctttcagatcaccgaggccctgggcacctcagtcaccaccaccatgcgcaggctcatcaaagacacccttgccctgtaggtcttgctggagccttaatggcagctccttaatggttctgggagcgtgttgctgggatctcggggctctggaacctgcactagatccttggtgagacttgaagagaagctcgtggtgtccttgttttgtggttgccagcctctggtgaccctgtcacctttgcagtggtctggtcctggatgcagcctttccacctgctctggtggggttcaagttctacactgtactgtactgtaggggtgctgaataaagttgaggtgtgagtttgtctcagctctcttggcctgtgtcctgccctgaaacatgaatactttgtggcattctcctgaggacacacatgtatgttgagggcattattcaaagatatgaggaggagtgagcttatgcagtagaagacaggttaaagctgatgtagcctgagctctgttagacattcatatgcatagctgttacccagccagatgtgaccctgacttgtcccgtggatgggggcagtgggtggtttgtctgtatagagcacacagagaatggtttagcatgggtatgtaagcgaaggcaggacatgggtttgttgtgtcccgtgacactgctctggttggcccgcccctcgctgttccagggatgcttgggaacaagctcatttctacacaggtcttaactagacaggggtgtctgcacaggcccgtccacacaggcctatcaatctacacaggggtgtccacacaggcctatcaatctacacaggggtgtccacacaggcctatccacacagccccatccacacagccccgtctacacaggcctatc

SEQ ID NO: 23694 - DNA, 1127 bp, Mus musculus
ttgcttcagtggcacagccttgttttgacttggcttggtgttggcatgaatctctggctctaatcttatatgcatgtggatctgtgggagttggtttgaaggattttgctttttcaagacaggattactctgtgtagccctggctatgctaagactcactctctaggctggactagccttgaactcagatgtaaaggtgtgtgccaccaccttccagcatgtgctttttaatacagaatctcttttttatagtagtgactggtctggggttcactgtgaatattgggctggtctcagactttgagccagcctctacactatgactgctggattttgggttgttttgagatggtcttagcctgtaacccgggctggatttgctcacatttatcctactgtctcagttactcaggtgctctgccatgcttggcttcttaatttccttttgtctgctcttctgtcctagtgtcaacaacttggcatagtaacgatgatgacgtgtacagggcgcctccaattgaccgttccatccttcccactgctccacgggctgctcgggaacccaatattgaccggagccgtcttcccaagtcgccaccctacactgctttcctagggaatctgccctatgatgtgacagaagactccattaaggatttctttagaggattaaatgtaagtgtctttttgtgtcaaactgtgggatattgaggataaaagctaaataaaccgattgtgggatgggccacagaggaaggcaacagagtccaagatgcaaagaataccttaattaattttgttttaagggttaaattactatgacttgaacagtgtgggctatagagtaatttgtcttctgcccctctacccatttttctcccaggttcttatatgttctttggagaaattactttttgtttgggttggtttgtttgtttttaaccctgtttttttgtttgtttgtttgtttctttattctctcagatcagcgctgtacgcttaccacgggaacccagcaatccagacaggttgaaaggtttcggctacgcagaatttgaggacctggattctctgctcagtgctctgagtctcaatgaagaggtaaagaaattaagaggtggggtgag

SEQ ID NO: 23695 - DNA, 1105 bp, Mus musculus
cgtgtggatgttgctgatcaagcacaggataaaggtaagaaaactggtagaacttcccagtttggtgtagtggtcctagggaggtagtgaggctagaatcagttctcagcctgctttgttccatggtaactttaggcagtattaaaggagatttgcctcagtcgaagggactactactgatacctaatgagtataatccagattcatcctatctccttccgatttcaaaccacctactatccttgggctgtaaatttataattagatttgctacctaggagcttgagctttagtgtgatatagataaacattaattaaaatacatttgaggaaaagaatagatcggttacctggagagagcaacctcaaggcctggccttgggatgccagtgcaatagaaaccgtaggtgggatgtgagggaccatgtgagaagtaagtggtgtcttgggtgagctaacttgtttggttttctgtctacagacagggatgaccgttcttttggtcgagatagaaatcgggattctgacaaaacagacacagactggagggcccgtcccaccacagacagttttgatgactacccacctagaagaggcgatgatagctttggagacagtaagttcaggttttttaattgtttcttgggtctgtttgataatggaacgttagaagttggggaacaacttataaagtctggtttctatggagttttttggggggagttattttgataataagaattgttgacaaatgcagataagaaatttgataagttcctaattttaaaaaatattaacagaaagtacaggcatttctctttgaacacaattgtttataaagaataactgaggcagaagaggtagtagcttggtctcaaatgttaaagtcctatcaaacaagcagtgggatcctaagttggattcctagtctccctggtaagaagacagatgtggtgcagtgagggtggtagctctagagcctactgacttgtcagtgggtctatctacttcaggtcacagagagaccctgacgccaagcaagaacaacacagacctacatacacacagacatgaaacctacagcaaaaagctgatgcttatttaa

SEQ ID NO: 23696 - DNA, 1205 bp, Mus musculus
tgcccagcatcccaagtggtagtgtggtcctatgaattaaatctagagccgcatgtgtgttaggcaagcattctgccgagtgagctccattcctagcacccatcagggattgtttttttcttttaaagaaataaatactaaaacatttaagttggtacaaatggtttgtggctgtagtcagaatagaactccaattggtctagtgagctgccacacttgttacctgttttcttttctttctagagtatcgagatcgttacgattcagaccggtatcgggatgggtatagggacggatatcgggacggcccacgcagagacatggaccgctatgggggccgggatcgctatgatgaccgaggcagcagagactatgaccgaggtagtcatgataataatactcagttgaaaaacacttctcaagaattttctattttgctcccccccccctttctgtgtgaccacaatttgagatctgttattaggctatgactccaggataggcagtggcagaagggcatttggaagtgggtaccggagagatgatgactacagaggaggtggggaccgctatgaagaccgctatgacagacgggatgatcggtcgtggagctccagggatgactactctcgggatgattataggcgtgatgacagaggtactcatctctttcttcatggagcagaaaactagaaagttgtttctcagttgtaaaggaggtggcagagcacagtagacctgggtgtggatggcagcgtggagacagaatgttttcatcttggatgctgctccatagccatcttcagttaacatttaatgaactgtagaaaaggagaagacacagccttctgttgccctatcagtgaggaaaatgagagtcccagccagtcattatcactgattctatgaatggtgagattagttttcagaggtcaactctgagtattgtgcccctagttaccgaaacaaagcactgttacaatcagctctaacaagggctaagaataaacagcagccacctaggctaagtgtggcgacaccatctgaatgttagtttttttctacctttgatcaggatgaaaattggtcttgttaggtaacactgcttgattaaatttaagtctattttgaaagtactttgataatttgaaaagtgaaagaaattggactactaagaatttcatacaaaagtgtaagaactagat

SEQ ID NO: 23697 - DNA, 1070 bp, Mus musculus
ttgtccccatgtaaaggcctctgctgagctggagttgggcagtggttcctgggctttggtcctgagtcccattcaccacaagagcgtgttattcccagttacggctgtcctaatacatagacaagttgtaacacccccccccccacctccccgaaaaaagtgttcattccttccaaataaagacaagattgctgttctttcagatagctttttccccttttccagaaagcacttttctccaggtggcctggaagccattggtttatgtgtaactgtagctatcaggaaccagttagtgtctgtctgctgctgatggaaaagaatgtgatgcccctattcccctgctgctacagtccaggtgggctctgtacagcgagctcctcttcccccacagatacacgaaggagagagagtgagaagtctctagaaaatgaaaccctcaataaagaagaagactgtcactctccaacctctaagcctcctaaacctgaccagcctctaaaggtaatgccagcccctccaccaaaggagaatgcgtgggtgaagcgaagctctaaccctcctgcccgatctcagagctcagacacagagcagccgtcccctacaaggtgagtaggcctgtaacagcagctgcttagtggaggtgccctgagggagtgtgtgctgcagaggaggttgcctcctgtataattcatatactgttgtctcaacagtatctgttttcttgatttttgttaaccagttgacatgagtttggtggattaagatcagctatgatgggaatatttaccatagaaatatgtagacatgctttgccctgggacatactgtcagtgtaaccttgctcactcaagtgattcttaaatttttccaagagaagactccagctaagcatgttggatttccaaagcatatggcccttaagtgtagaagacaacagtctttcctgtattttaatattgtagtgtggaatgaaaaggcagcctggtacatttggaaaatggtgtaagcttgtgttgtctttcctgtaaaaactgatggctgattgcttgctgctttattccagtggt

SEQ ID NO: 23698 - DNA, 2640 bp, Mus musculus
taaagtagttcttggctttctcaagcattgccaggtttaccactgtgaataaactagagtcacggttagatttgcagaatctaaaaataatgcactatcccagcaacactattgaatacctattgtgtctctgcaggaaggatggcaaaaaagatcaagactccagatctgcgcctgagccaaagaaacctgaggagaacccagcctctgtaagtgccatgtgcctttcctcttagttttgcgtctgactccttttgtctccagtgagcacacttaaggtggggttaccttcctcggctctcggaaagaggatgtgtgcggccgtccactcgtgcccctgaccctccctgctctcgcagaggaacgggtgtggtctgggctcccatccatgatccgtcctctcctgttacagaagttcagctctgcaagcaagtacgctgctctgtctgtggatggcgaggatgaggatgagggcgacgactgcactgagtaggacctccgcaccctgtgctttctcctagtctccaccccggaacattcaagagcaaatcaaacctctatccagacaagacaaaataaactcaccatctcctgaagacctttctaaactttttttttaatgaaatgaaattcttttgcatgctgctgcagccttttaaagtattgaagtaactggagaatcaccattgtagccagagacgtggctaccgcttttgaatggggaagttgtgtctgacaataccaagcagttactgtgtgactagtgcctggggctccattcagcagaattgcagtgacagagaggcagtcacatcagttaggcagtagaaaaaggtgcaaagcagaagtgagatttctactttctaattcttatcctgagatggcacctgtgaatacccaaacattacctgaatttacctgaataaatttcccatccttagaaaggtagctctagtctcaagctgttttagtctccaggaggctgccagcccctctactttagttctgacttcaatggggccagcctaagggggaattgttttatttttttaccccccaagggggtagttgggagtgagtctacggggcactaacaagtagttcccgcttggggaccaagatgaacggaaactcaatcgtggtttggaaagctttggggaggtgactaattatattttatacccggtagtgagggaaacagtgtgacctccagtaaacacatacatagaatggtcatttctggatgaggaagcacttaacaggtagtgagaaggcctggctttgccccttctaaactctcctttctagaggttgaaatatacccatattattttgaaaaccttgtcactctggtcatctcatggtctccatgacacttagcctcccagagctgtctgtgagtcacacacctcccacagacactgtatcttagccacaaaaagccatggcctgaggactcgctgcttttctcaagcaagccagtgagttttctctgtgctatctttgatttctgcctgctcctgcagctttcagcctcaactgatgggcttgggtggtgaataggggtgtgtaaatggggtgagttggaggtcttcagccttgaatgggatgtaaggtttctataaatctccctcactggagccccacgctggtgcttgtttataatgtatgtgaccctgactggttttctgcttaggagggttggcttctttactcccctcaagaataaaggataatgcaaagaacgattgagcaaggtcctggtttctcttgcaacactgtagcttgacctgtctgctttgatgtgcacctttgtaggggtcagctccaaagatggcgagcctccctgttgtgggtagtcaggtacctgcagacagaggataccttggtcctaggcctgctgtgcaggagcactgatgtcccgtgctgcagcagtaggcacagcaaatcgcttctccggtggatttgattggctagtagctaggaagtgggcttttgcagatacccacagttgaatgggtttttttaaaccattgttgtagacaatgagaaggtagtttgccctcttcatgtctatttcccttccagatagttgcatccgaagacagctgttttgtcccactctcctactttgctcctctgttaaaataaaaacaggggttgacttatgtcccgctcctgaatacatgtaaaatttgtacaaaaatatcttctatgaaaatgatttgtaatctgtagacattacttgggagatgtcttgagatgtaaaatcccatcctttgggttgagggtttttttgtttttctccaaataaatccagtctttaaagttgatggttaatgttgcagtttatcgctctttccccccccccccccatgcctctcctttccccaccccttccttccgtttcgcacagcagtatgtgagctgttgcaggacagtgggtaggctcaccaacagtggagatggacctctgtgcatggagcccaggcagggttcgccgtcctggttgacttactccaacccccagtgtttgcctccttgcagtccatgaagccacgtggtgggcttgcctagcaagctgttgggcactgatacagggaaccacctcaagagatatttcagacttaagggagcttt

SEQ ID NO: 23699 - DNA, 1195 bp, Mus musculus
gctgctttccacagcactgcagtgactcctaaagcccatgtttaggaagttgtgggtttggggcttcatgtctgagtcaccccagtatccccagagaaggggccagagcgcaccctcttctccacatcctagggaggtgccaggcccatcctcatccgctctccccacccccactccaggtcttcttcactcggaatggcaagatcatcgggaagaaggatgctgttgtgccgtctggaggtttctttcctaccattggcatgctcagttgtggggagaaagtgaaagtagacctgcaccccttgagtggctagtggggtcaccagtccatctgccctctccgtctgcattttctctcacagcaggccctgggagggcatccccagtttctgtcagctcaggctgcacctctctgtctctgggcctgagagcagtggtgggcccagagggcagtattgatatgaatgggaggagccccttgatcgggttaatcggtcctggatcttctttcacctcgctgggcgttgagcaaactgggaggtataagcccacctgctgacctgattggtatggtgctctgccgagggtgagggtcgagtagaggcagtctgtccctgtctaccacagctccccgaattctcttcatcccctctcctcatgtaagccagttgctgctgtctccccctggctgggctagggggcctgtcttggccatctctcctttcactggctgctgtcctaaaacacatctagggtctccattgttttctgagagatggtcccaccctcaacccacagcagaaagcctgaacttggcttcctgcctgctcacacgcaactgtgtgtgtgtgtgagagagagaggggctgtgtggtagcgtgggacttcagcctttgctgccatctccttgtctgcactcttcttcaaagcacctctagccctggctccccaggatggagccaaggcaccggggcatgtgttgtattgtggctgtttgcccagagcagcagcttggccccttctttctcttcacctacccaccccccaccctgtgccccagcttgctgcttgtgccagttgacgtttctgctccagtgtttgattctagtgtctatatagaccccccaaccagcccccctcttcccgtttcctgagctcctccatcccatcaacagggagagaagcagccggagct

SEQ ID NO: 23700 - DNA, 1142 bp, Mus musculus
ccttccaaactggcatcactctataaattcgtggtccctgagttcatcccctgagacacagtggaataaacacacatttgccatatctccttcatcagaaggccactgacatcacaacagcagaacgtttaatctggaaaaataaggcagaagagaaagagataaggcttcagctgtcaataattacgcatgatgggataggaggcaggagagtagcccagctggacactgggagccatgaactgggccacagaactggttgtgtaacccggacaggtgccgtgtatctttgaaactcagctccctctataaggcttgtagacttaccctgaacaagtgtgagggtgagcagtgcattttaagtgcagaaggtggtgtacggtaagtcatggagtagggcccatgtttttgtttgcttttgctgggtcttccgtgtggtaggcaagctctgatggccaccctagcccagtttgcttgtttaattagtctctcgacctttgtactcttcgccactgttggggcaggggagctagcccggtgcctgtgaaggactgaccctccctcccacatcccggccagtgctcccacctccccagactgagtgtactcataaaacatctaagcatcccttggatccgagtctctagccagtgaggccagtgagtgctgacagtagattgtgtttgagcagttcctctcaggaaggtggttgtattccagatccactcgccctctcctggggctccttcgacctcagcgtctgtcggcctctctcctcaccccttcctctgagtaccacaaaaaatcagctccctgggatcttgaggtggcctccctgcctcccatagcatctctggctggctctagccaggctgtccccatttgtgggtctcaggctgttcccacttgtgggccctccacttggatgaacacctgtaggcggtccttcatcagctctcactcagctctttcctcttgcatccataattgtcctggggcatatcatttttttcagtcaccaaggcctggaactccagggtcaactttgattcttccatttccttcaacagagattttgtaagcatcttgtgtatgaccagagaatgaccaaacctggtttcttctgcctgcccttattcagg

SEQ ID NO: 23701 - DNA, 2080 bp, Mus musculus
ccttttcttatctcctcaagaagagcggtgttgtgtcacgggtgttcccatggtttgtgtggcactggggcctgatgggatcagctcaagtgccttgtggaggacttgggttccgtagcccatttggctcttttttctgggaagttggtcttggttgtggtttgtggctacctcgcttgtccttgactctagaacccaggcacagttgagcagggggttgtgggtatcagagtatgctgtccttttgtgtcctcttagaacaaggatagtccaaagttttgttaactatgagaaaaacagaaattgggacagtccttatgggacttgtgtgatggagccctctccctgtcagaatcctctgcctgttcaagtagaggagatggaggtctggtctggtctggtcttcagtctcagagaaccgaccttggctccctcctgatagcatccctgcagagtgggggggggggggtgcttcagaggaaggattgcaggaagacacctaatgtctgctttattcttgaccttactctgttataacacccttctatcttgtctacccctggaaaggtgattggattagtgtgtgtgtctgatttgtgaatgcttgtgtttctttgcttggaaggggtgaaaattgttgactgaaattcattcggccaccaacttggaggacagaaaaacgtagggcagccttcccacccagacctgaaggacgtctgcctcccttgttcttgctgagaacaggggaacagaggggcttgtttcagaagaatgttgagggttttttctcattgttgttaggttgatttaaccgtgtactgatcagagtgtttctaagccagggcttctgaacatgtactttctaaagtgagataacttctgctaaagaaaggattcttaagggagaccttggggtttcattgagcactccaggacccctgaggcctacttcaggtgtaatctttgggttacacctgagcacacaactccagctgtgggtaggaatctgagctggccgcctccaggaagaagttttgacttgcaaatgagagccaggcagcaacctaccttaagacctcttccagtgtattgggagatggtccaccacaacttaaggggagaagggagaatgtctcagccttcagttttcctctgatagcacctgagaggaggtctgaagaggacagcctgccgtgtgttctggctccctgctgtccctctaacgtgctgtaaagcctgcgcctctgaccttcgtccgccgtgtggcccctgggcatccatgttcgtgatgcacagaccctttgctgttagagggttctgctgggctgggatttttctgtcactgggaaagaggatacgctgagaaagatatcctcccagaaatgcttttgaaagtggaatccctccctgccactcgtagatgatctgttcgtgctgaaagttggcagagtggcctgtgcctctgcaagtatgaatgtgtttcctgggtcagagcaggccctgcagacagtggcgttctgcctaggtgggagctgagagaagtgagagagaactggatgtgtacagacagcccacccagaaccacactgccaaggccaggtgtgagaggctcagaagctggcagtgggtaaggacagacaggctctggggtggagagtaatacaacagccaagagcctgggcagaagccacatctctaccctgggggaatgcacagacagctgcaaaggctcctgagcctgatgcccccctctgctggggtgggttgttagcactggacagatgtctcaggtgtgtgtagaaggggaaatgagaaggtgggtgctcagacatcagaatgtggatgtgggtttggtagggagagtaataccggtccttggatggactcctgcaccaggccgtcccatcccacccttgctggtgcctgcccttcccatccgtccctgacagcctcttgtcatttagctactgattgtacttcatggcttgacatagagggttagagaagtggggtgaccacactttgagccctctccccaggttccttctgcccctgctgtggccctgggcttttatcttca

SEQ ID NO: 23702 - DNA, 2059 bp, Mus musculus
agaggtctgagctagccagggctcctgtctctaaaaacagcaaagaggaagcttgaaaaatggagacaggcagtgcaggttaggtgaagttcaaggcagggctggagcacctagggagcaccacaggagaagggagagggtgaagtcagtacccagaagtgacaggtctgagctaggagcacctgggaggacctgcacccatgcgtttctgatcctctgcgcacttctgctctcccaatcctcttcgtgtctctctgtaggagcagaaagggctataaccctgaagatggagattccaggcccgatgccacccctgatccgagagatgctggagaacccggagatgtttgaggacgactcctcgaagcctggcccccaccccaaggcttccagtgaggacgaagctccagggggccagggcaaaaggggccaaagtccccaacctgaccaggggccctgacctaccccgttgtggggttgggccccaggcagcagactgaccatttcccagataccgccagtgactgggggaggacctgccccgcccactctccacccttttaatgagctcgttattttgccaaagtttctaggggtgcctgtgttcatccctgtcctgttctaactggctccctctacagtcccgcgggactgctgcacacctaccagaagagctggagaaggggcgagcctgggtctagactctaaaatctcagcactgcctttcggattcaggccacaggctcccgacgcaagaggaagccccgccttcccatagccttttcctctgccaggtgcttgggcctctgggagcaaacaggaacactagagaccaaaaggggggccccccccgagggagggctgagcccacccttgtgccccaccctgagcgcctgactctgtgtgatgaatctgccgcgctcagtgcccccggtgccccatcctaatcctcctgccgggtgtaggggcaggctggggcctgcgtttctagggtggggcctgagggggaagggagaatgtgagcccgagcccgtctgtacctctgctgaagtacagcactcatcctgggccctccattatataagcctctcccttacttctgtctcgtgccttggcctcccgccctcatctcagccatcaggcagggccctcctacactacagaggggccaggggtccctctcctagtgccttctacccttgatccccccagagcagcttggccccggggaggggagatgctgcttagctgatcccaccttgacccagaggaagcctctatttatttattagcttttgtttacaccctggaaatgaccccttcctccaggggtcttgggagggggagcccagggcctctgtgaccccttcctttctttccccaagcccccagtttatatttagctgccaaataagattcctgcaggctcccccatttctctggggggttagggtgctgtcccctcccctctgtttacatctcctaccccgctgttcgcatattgctgagttttctatttttgcaaaataaagtgatggaaactcaatccgggtgtggatccctctaaagttggagaggtgacctgcagacctggaggaggaactgggcccagtggtggagctgctaacgaactttgtagttttcttggggaagcagaatactgatgtggcaagggagggctacaagccacccgagccaccctgagtggcctctcccagtcaccaatgagttcttgccattgctgggatcctatgggttcatgctacacctagatgtgtgtttgcctgggatcctgtgggttcatgctattctgaggtgtgtattcgtccgctctgggcagcaatctgagctgccatttgttttgcaagttgtccctgggcctggaagacctgcacacttaagctacagtgtttttagagtttgcttgtttgagaaagggcctcactgtaactcagcctggccaccaagcctcaactcctgagtgctggatcataggcctgaggcaccactcttggctcagtgttgaactgactcttgagggacctctgcccctctacag

SEQ ID NO: 23703 - DNA, 1177 bp, Mus musculus
cgtttgcaaatttgtggtgcctgccaagataaatgcttgcacagatgtatgtctgagcaagcgcgtgcgccgctcagctagtagacgtatgtgtatgtgtatgtgctccactcccagctctgctcatcttggtgcccggcccctttcgctctccaggccccacccccatccctctaggctttgcttttacaaaaggtctccacagagctagctgcctaggcaccctaagtgaggcagactgaggcagaggctacagcttcgccttcgcgccccgcccagttcttttcccttgctggggatccccctcctccccgcccatcccttaccccccatgcatctcagcgccctacgctagccctccccctcccccctccaggagcggggcgctgcggggggaggagggggaatgggctgcgggtccttggtgttctagcacccagtttctctccaagccgggtcgcgatgtacgactgcatggaatcgtttgtcccgggtccgcgacggctgtatggggcggccgggcccggggccggcttactacgcagagccactggcagctcctgcttcgccggacttgagtcttttgcctgggcacagcctgccagtctacaatgtaggtattcgagctcggagatcgggtgttgggtgcacgagaggttggtgcttacaatttccttgtgtaaagtttgggaccagggcacaagagggtattctggtcctttctatatgaggtactggccctttaaacacgagggcctccagagtccgtctcctttgcgtgtgtgctgcagtgtttggagtatatgtggtttttatggtggatgtttagctagggcttcggttgatgcccctccagagtccttgggtgagagaccgatgtatgttgctagtgtgtcctccagtccttagtctcggagggctatggcacccagcactgtgggcagcgtttgtaaagtccatgctggaagttgggagtgttaaaaaaaaaatgcagagcgtgtgaatccctggcttgtacagacctaggagacgtgggtgtggagtagggggtctctccacgcactgtgacattccgcctaggttggcagatgttcgtggcccaatgtggggatgtttgttgcttgaggccgagagggcgtgtgccttgcgtggctgcgggggcgtttttggaaagtgc

SEQ ID NO: 23704 - DNA, 1099 bp, Mus musculus
cagggtctcactatgtagttttgtctggccttcaactgactttgtagacaagtctggccatgaagtctcagaggcctgtctcccttgcctactggaattacagatgcctagctagtgacttgttttatagatgacagtagtatttaccgctggagctataaaggggcggggggggggggctcatatttttaaatgataaggaagtcctgtagaagggaaacttacgaagttcctttaattttgtccctgatgagcttgtgtcaaagggtcagataagagtagggtgtattctttcctgtcagactctgcccaaagctctggaaggaagtttaaggaccctgtcactgtcagcttttttttttttttttttaaggctgaaaggaaagtacatgtgaaaggttgttagttggcttaaaactgtgtagcaaatgaatggtaaacagatgaaacctgcctcttgccaggctgtgaccctcacctgacacacagtgcttatgccttatggtttctcacacacttgtggtttagtctctagtcttgctcctctgtcccaagctctgccccaggagacagaccagggtgagagcatttagactctgcagtctgatccatctgtgggttcctatggttccgatgagatgctaactccccacatgtgcgctgtattgagcctgtacagtgagctaactgatcctttgcatagtagttcatgctagtgttcctaccacttgggaggctgagctgtgcaatcaagattacaaggtcattctaagatgcatagcaacttggaacccagcctgggctatgtagcaagacccttactcaaaaaacaaacaaacaaacaaacaaacaaacaaacaaacaaacaaactgaggtcaagtagcatagacatcccaacactcacggagtatgggtaggagggtcaggagttcaaggccatctttagctatgaagcaaattgaaggccagtctgggctctctcaaaaacaaacaaacaaacaaacaaacaaacaaacaaagcaagctgggcactggtagtgtgtgtctttaataccagcagagacaggaagatctcttaagttcaagtctagcctggtc

SEQ ID NO: 23705 - DNA, 1201 bp, Mus musculus
tagatggttatgagccaacatatggttactggccattgaatctctggaagagcagatgatactcttaaccattgagccatttctccagccctattaataattttatttttaatgtgtattgaatattttgcctgaatatatgtatgtgtaccacatgtgtgtctggagcccatgtaggtcaactgaggttatcaaatctcttggagaaggagttacaggcagttgtaagctgccatgtgggtgataggaactgaatttaggtcttctgcaagagaagcaagtgctcataactgctgagccatctctccagacccgtcgttatttattattttattattatattatttttccctttgccttaatttttattatttttttaagacagggaattactatataccacaggctgacatagaacttactttgtaaaccaggctggcctcaaactctgaaatctgtttgcctctgctccccaagtgctgggattaagtttgtgtgtcaccatatctgtcagttaattaattgataaattaattgagatggaatctcattgtatgggcctgactgtcctagaactggctttgtagtccaggctggccttgaactctgtcagtttctgcctcctgagtgagtgctggacccagcaatgttttaaagaaaaactggattatactggactggagggagaggttggtggtcaaggacatacactgctcttccagaatacctaagttcaatctctagtgtccatgcacagaggttcgaccacctgtctgtcattccactgccagcaatgtggcttatacacctggacacataacttaaaaataaacatatcatattattcatttttttgctgtgtgtgtgtgtctgtgtatgagtgtggtgctggagattgaactcccggtcttttatatgctcagcaagtgcttggccacatcccagccttgacgtgatttttaaaaataacttacttattttatgatcattggttgtattttacctgcatatgcatgtatgtgtgtattgttagagtccaggagtcaccctacaaaccagaggaacattgatgtcagtcagacagggatagtttattgaacacatactccaagactcatcaatcagggccatagctcagactcgagagctaaaagcaacaagggtgaactctatccagggtcagtttatatagggaagaaac

SEQ ID NO: 23706 - DNA, 1165 bp, Mus musculus
caggaacacgtgacagacagcgcggcagataaactacaactcccagagcgccacgcggccggcctgcgttacgctttctcgctgattggtcactagggatatttgaaaggaggtgctggcgcggaaaacgaagcgtgcccacccggtgcttggtggagctcgggctggaggacgctgctaggccggtgaggaacggcagcttcgagggaattaaggcacggagggtctggtgagcgcgcgctcaagccgcggtaagtgacattcccattgctgacctgggaagaaacggggcgtttctgcggaggctcggcggcccccgaaagggtgtgctcggcgcccaggaccctgtggagacccctgcggtggcctggtgggacactgaggacaaggagcgtcctggaggaaggaacagtggacttgtcagtttgtaacgggagcccagtttatatcggcctctccccgcataggatttctggtgggattctttgcctgcttcatcctttgaatcctcctacaactttcaatcccttctttcctccagttatttccattacaacccttcgcaggcttctacaaaccatttcgttgtatctagacttttgccatgaggaacttcaaaggagtcaacttcgccactctgctctgcagcaaggaggagacccagcagctgctgcctgacttgaaggtgggaccctttatggctcaggacacacctagtttctgagattatctgtgtttttttccttttccttttttctttttttccgagacagagtttctctgtatagctctggctgtcctggaacttactttgtagtccaggctggcctcgaactcagaaatccacctgtctctgcctccctagcgctgggattaaaggcttgcgccaccacgcccggcttccttttcctttttatttattgtttttatttttatttaaaaaattatttttccgccgggcaatggtggcacatgtctttaatcccagcacttgagaggcacaggcaggtgaatttctgagttcgaagccagcctggtctatagagtgagttccaggacagccagggctacacagagaaaccctgtctttgaaaaaaaaaatttttttttcccctagggctactaatgtgatcatctcctaaggacactctggtttatgttctcc

SEQ ID NO: 23707 - DNA, 1195 bp, Mus musculus
tctgagtacaccattgctctcttcagacaccagaagagggcatcggatcccattacagatggttatgagccaccgtgtggttgctaggatttgaactcaggacctctggaagagcagtcagtgctcttaactgctgagccatctctctagctcctttcctttcctttcctttcctttcctttttttttttgtttttttgttttttgttttttgtttttgatacagggtcttattcttttttcttttccttcttttacttttggtgttctcctaagccagttccaatcctagcttcacattagaatcatctgagtgaacttcagggacattctagtgtaatgcttgcctcatgttaattacgtcagatccttgccctagatctcaggcatctacgtgttctaaaaatcctttacccacccgttccccgggccattctttacacagccagagtaaaaggcagtgccttcagaatgggttgaaatgatgggttggctgcattggtaagtgacatgggtcgtacaggggccttggactgtatctcaagtaagggtcaaggagctgagggataaagatggagctatggccttgggtgggtgtcactgtggcaaacagtagagggcactagcctgggtagtggggctcctgtggcagcctgggcaggaacagctgtagtagaaagcagtggatggtacagggccctcatcttgagtataactggctaggaaggaggaagaaagaagaagagaggctctgcatttcggtcacaaccagacagtcccatttgccaagaaagaatcacaggagttagaacaggtccttcagcttgtggatgttgaccttagagggactctagaattggagggtactagaagcctagttctcaggaattattgagaggcaggagggccacctgctatctctcctccatgtgttgactgactgcttgctcgctgtgctgtgcacaacagtggcttcatgttccagctttctcctgtctctgatcagctacataggtgcttcaggctgcatgtggagagtttgaagaaactgggtaaacaggcccagggctgcaagatggtgaccttatggctggcagctctgaaaccctacagtctggaacacatggtcgagccagtcactttctgggttcgagtcaaaatggatgcatccagggcaggagacaaggagctacaac

SEQ ID NO: 23708 - DNA, 1142 bp, Mus musculus
ggtcatttggggggttgtggcagtttgttagtggtgctcaaagaagaaatcaggttcaaaaatatcttagtctctctctttctcttcctccttccctcccctctatcctttctctcctatgtagtgacagggtagaaaccaggatcataaaggtggggaacaaagaacccacaaagtagcaaaggccagctacaccccgcttaagtgtatctttctacagctctgccttggatgctgtccaggaagccctgcagcttctggagtccgtgagtcctgaggcccaggagcaggatcgacttctggatgataaagcacaggccttgttatggctttacatctgtaccttagaggccaagatgcaggaagtatgtggaactgagtccagccgggctgctcccaccaagctggtaccagtcctgggttttgtttcaatctctcttctttcccaaccagggtattgagcgggatcggagagcccaggcccctagtaacttggaggaatttgaagtcaatgacctgaactatgaagataaactgcaggaagatcgttttctgtatagtagcattgccttcaatctggctgctgatgcaggtgagggcagtcagccgtgtgtgtggcacaggcatcttggaggcttcctgagcgtatacataacaaatgccaccagtgtgccacaggctgggtttgtgctggatatgtggggcagtgaggaagaaggcaggcacaaaggcacggcatggtatgaagatggccaggtggggaaagtggtcaccttcttccgatttacagctcagtccaaatgcctggaccaggccctgactctgtggaaagaagtgctcaccaaggggcgagccccagctgtgcggtgtctccagcagactgcagcctccctgcaaatcctagcggccgtctatcagttggtggcaaaggtaatgggatggctggatgggatggctctgccacagggttaaactagaacccaagcaccctcacctttgacctgtgtacatgcagagaagccgagtggcttgagtatggactttgctgggtgtggtgctgtacgcttgcaacactagcacttgggaggctgaggaaggggaattatgagttacaggccagcttgcattatatggtgatatcc

SEQ ID NO: 23709 - DNA, 1168 bp, Mus musculus
atatattacatattatacttttatataacatgtattcagtgccatattttatataatatataacgtgttataaaatacatatttatagataaatacaataacaaagtcaaaggttgggcaatgtgccatatggacaatctaatgtgcatttgaagaggtctgaggagcaggctacaaggagagtggagccattaacagtgaactggagcccagagatgactgagtttctgtcagtgacctgggcctcatggcagctaaaaggggttactgctgggtggaaaggggagaacccaggccatggctctgaaacagcacttggtgatggaagtgcgagagggcatcgacctctgggctggacttagagggtgtgagcacccgcagtgagtgctgggatcaaaggcagcaagtgttctcacagtcatcagccccccctcccccaatgcatttgtttgtttactgttttctcaccacatccttttgtttatccctggcagaccctcctctggctgcgcccaggtgttgtctcaccctgggcacacaccagtcactagcttggcttgggcccccaatggggggtggctgctctcagcctcacctgtagatgctgttattctggtgagttggttcccacccctcagacaagagccttccttacctggtggtagaaagtgtgaggcagtgtggttgttgtttgtcttcagagtttcagctgagctctgccagctatcactgtgatcttaaacataggtctttatgtcgagtagtctggtttcttgctgcttccccttctctggggatttgtgtacataaatgggtagcccaccatgagttgcttgataatcttttgagtttctgtactgagttccctctatctcaggtatgggacgtttcaacagagacttgtgtcccccttccttggttccgaggaggaggggttaccaatctgctgtggtccccagatggcagcaaagtcctggctactactccttctgccgtctttaggtgagtaggcgaaaagctaggggagtgagggaagaacccagagaagggcacttcacttcccggccagtccaggggtggagcctgaaggccctgctgtaatctggctttctttggtttagagtctgggaggcccagatgtggacttgtgaggcgtggccaactcttt

SEQ ID NO: 23710 - DNA, 1204 bp, Mus musculus
ttgttgtttggttggttggttggttggtttggttttggttctctgagacagggtttctctgtgtagccctggctgtcctggaactcactctgtagaccaggctggcctcaaactcagaaatttgcctgcctctgcctcccaagtgctgggattcgaggcgtgagccaccactgcctagctagaaacagcttttacaaaacactatgccagtggctttcttctacttctctcttcaaaccaccaaactttgaggtaaaaggcaagaaaaggcatgccttagcacaacccccaaagctcatgagacaaaggaagagagtggctgcaaactggctaaatcctagcacaaggagaggcaggccttaggtagactgggctgtaataaggaggaggagtcagtggacattttaattactactgttccaatccaaaaattctaaccacctcttgccaggtgtggtgcatgtatgtatataattccagcctgaaagtgggagcttggaggtagctcaagcaggaggattaaggaatgcaagccattcctggttgtttagcaagactgagactgccggtagtggtggcgcacgccggtaggatttgctgaaggaggcagaggcaggaggatcacgagttcgaggccagcctgggctacacattttggggctggtgagatggctcagtgggtaagagcacccgattgctcttccgaaggtccggagttcaaatcccagcaaccacatggtggctcacaaccatccgtaacaaaatctgactccctcttctggagtgtctgaagacagcgacagtgtacctatatataataaataaaataaaatcttaaaaaataaaaaaaaaaaaaaaaaaaaaaaaaagactgagactgtccccaggtgtacacttatatatatatatatttatttatttcatgtatgtgagtacactgttgctctcttcagacacaccagaagagggcatcaaatcccattacacatggttgtgagccatcatgtagttgctgggatttgaactcaggacctctggaagagcagtcagtgctcttaaccgctgaaccatctctccagcccgaggttttatctttacacatgagtattttgtctgagtgtatatgcaatatgtgcctgatgcctgcaaatgccagagagagttgaatctcctgaaactagagttatagagggttgtcagccac

SEQ ID NO: 23711 - DNA, 1244 bp, Mus musculus
acagagacacacacacagatcttgaagaaatggtgtgttatgagctagtgagatggctcagcaggtaaaggcacttgctgtcaaggctgacagcctgaggttggttactggaacccatgtggtagaaagaaagccgattgccaaaagttgtcctttgatttagacaagcatcctacacatatcactcatggaagaactgtagttaaaagttagagccgggcagttggtggcacacgctttttttgttttgttttgttttttgtttttttgagacagggtttctctgtatagccctggctgtcctggaactcactgtatagaccaggctggcctcgaactcagaaatccacctgcctcttcctcctgagtgctgggattaaaagtgtgctccacgggaaaaaaaaaaaaaagagccagtcgtggctgactctgttgtgaaatttcggtagctatttagtcctgccttttcacctttctccttgtctttttatttcaggtgatcatggaactcaacttggtcttcatggatctggtggtgatgggatacatgatgagacagcaggtggagaaggagagaatagctctgatctccaaccccaagctggacgcaggactcgtcgggaagcatgtacatgcccctattgcaaagacagtgagggaaggtgagttcattttcttgattatagaatttttcttttactttttttttctttcttataaaaatatgaggaaaaaatgataggagaggactggagagatggttcagtggttaagagcactgacagttcttccagaggtcctgagttcaattcccagcaaccacatgatggctcacaaccatctgtaatggtatcccaagttgtcttctgttgtgtctgaagagaaagagagtgacagttgtagtcacacgtgtctgtaatcccatgttttgtgacagacttttcctgaggaggtataataagtacatgtgtcttttttttttttttttttagttttttgagacatggtttctctgtatagccctggctgtcctggaactcactttgtagaccaggctggcctccaactaagaaatccacctgcttctgcctgtcaagtgctgggattaaaggtgtgccaccacacctggcacatgtgtctatttaaccccacatagggagtatataaataaaatgagggttttgagataaagttaagaacaggactatgacttctccaaggtgtagttgaggggaaggttttta

SEQ ID NO: 23712 - DNA, 1662 bp, Mus musculus
tttgttattttatttgggatcagctccttgcactcctttcctgacttaatccttgtctccctttcctcacacgatcacttcctgtgttgtttttgacagtgattcctggattaggcacttgtgttaatattttaaagactttagttccagcaacagagtggaaaagcctgaagtatagtctgatgcttgaagtagctatggagggagtgttcaaaatactactgacgcaagcaccttagtgctggagagtcaaaaccatctcccttttttagctgttctaaacatcagaaatcagaagtctttctgtggaattgtacaagaggccctttgaaggagatatacttccaaaatggtcaaatagtaggcagcagctttcagtatgaaaaagatgttctcagaaaaggaaataactcttagtcttgggttcagaagttagtggaattattcggatttcagtatcattgtcttccaaatagctataagcctcaatgtatgggcttctgagttcacactctgaaaggaagtacacttcctcttttgaacatttctgtagttccttcctattactgttttaatgttaaggagcatcagccagtgaacctgtttggattttccatcctgtagagtgcaaaacttgtgccagtggcaaaagtggttctttaaaaaaaaaaaaaagtcccccttaactcttccttagatatacttgggtggttcctaagggaaagggaagcacacaatcatgggaacgatagcccagaacaaaaagaaatcttgtcttaccactgtggattataggagaaactgggagaaattatcctgctttctctatggcctgattccagaagagactgatccaaacattttatcggcagggaaactcagtgcgtttggcactgagacttaaatgcaaccagaattgtcctcaaggcccagccattaaagcattgtctctctagaccttgtgctatcttgtcagagagcttttcactgtgaggaagtatgggagtggttgagtgtatgtgtgagatctgttaggttggggataggttttctgttagccaatatttaaagagacctgcaataaaaaattaccctgatctgatagagaaactaaattgtttttgtatgactgcgtgtgaatgtatttgtgcctgtatatatctacatgcagatgagaacttatatttgaaattgttggaaaataaattcagatcaaaacgcctttcaggtccagtatctagaaattggtcataaaacttgggtatgttcctaaggtcagttctctgcttatgctaaatcggttaacagttatggggttggggggatatcctagtgcactttctaaagaagaaactatttttgtgtttgaaaatgaaatcaacatccaaatctatagtggattccttattctaacttctctatcttggctacaaatagattatagtgttattatacattttatgtaaattccatctaaactaggttcttgataagtttatggtattgttagcttgaaatactaacattagtttattccatttggtcctttctatgcagacttaatactgttatcaagactcaggaaatatttcaagggactgtccccaaatcacatgttattaatgttgacgtaaaagttatctgtcctcagccaccatcaca

SEQ ID NO: 23713 - DNA, 3002 bp, Mus musculus
ttttctaaagttaagagactacattcctctagtcagggtctcatgactgaaaaataacctttccccaaacttttggccttcagaatttaacataactggcatgcatattgattctgaaattcttttcattacatttttgttgtttggggttttttgtttgttttgtctcattgagacagggttttactctgtagcccaggctagcctggaattcactgttaactcagactggcctggaattttgaataatttttttgccttctaagtgttgggattacaagtatatgtcactatgtccagccttcatgatttttcacttaatttttaaaaaaaatgacggcaccttgcaaagtggtgggtgaccaccaatataatcttgttttttgttttgaaataggtctttctaggtacccttggctgatctgaatttatatgtagtccaggatgcagcgatctgtccaccttggcctttcaagtgttaggggttacaggtgtgtgccaccacatctagcagaaatagtaatcttaaagcattcatttccttgtcctaggctgcccatttgtactcatttacaaactatttgactgtgtcatctttttcctagaaaggaccaactcaccatcttccttcagggacctcctaacaggcacccttcggggtgctattcaaaacgcaatataatggttctttctcagcttggtctcagaataaatagaccctttaatcacagaaaatatagactgaagtatgggatgaaggtgttataatttggggagggtgggagactaaagctgtaaattactatggctgatttatttctactatatacatatattttttgcttttgtatatcctatatagaaaactaagcattgtatttttttaacaaatctgagaaagcactatgaactgcaggtgtttgactttcagaatatattttgtattgttaatacttcacattatgtgaatactggacgctgcagatctttgtaggccgcaataaaattggacactttttgaggggttctttggaggtgctaatcaggcctctgttacactttgaaggagccctggtgctacatgattaacgtttcattcaattttaagtgccctaatgtctttttggaccttgggatcagttgagaagtgatttagagatcaggtaccgagggagtgaggatagtgtgcctgcctcagctaagggcctctttcatggttttactttccatagacaaagttgggtagcctcttggggttgaaagcagaaatgttggaaatctcagagtttcatcttctcttagaagagccagtaacttacaaggataaaggtagcagcagttactttgggagaggagggcatggcacttttccaacccggaaaacattgctttgaaagctgctgataaagcatgggcaggttattagtttggtttagaagactgtgcgtctcttggctctgctccggggtacagatctcatctaggaggatgagtagaagctttgaggttgagctgtttcttgtctttgtctgccttccttaaataacatcccccaaaaagacattaagcagcctttacgttcctactccctcttcagacttggctcatgtgttgtaggttgaagactgggaagagagaagaggggcagtcttcggctccattccttccctaagtcatctctgttcaaacttccacacactcagaaggatttctccacagcactcatgtgagagagaagctgcttctttttttccaatttgccccttctttatcaaacagcccaaccttccttgtcttgggattcatctgtccttcagctcctctaagtctcagctcgtggaggtagaggagcctggcaaattaggctggggctacagatagagaagacttgaggtacatctgcttggttgtgtgctttcctatatcttgccttcaggaatcacactgtgccttctccactagggaactgattctatctacacagcttttccagtaactgctcttgaaaattgtgggtaatggcagttcttcatacttctgatgactcttttctcccaataacatcctaatatcccttacctagctaaagactaggcacaaagtcagaatatgttgataatggtctgaggaagccaaaggcagctgccctagggcctgcttccctctcccaagtctgtcatctctgggcagaggagtagtgctccaatctggtgcctaaaaccagtttatctttcttaatactggcaataaccagtctctgtaccactgttgcctttaaaccttttaatctcacgatgtttgttgtgggttccaatccagttatcaccagggctgtgagggtaaatacttctaaacagtcacttaccttgttctctgccctcactcttgagtatgtatgatgttaatctcttgtcttcctgttccttttgtatcttcctcgtctctctccccctaattttgtccctgggtgttttggggatctcagtatctctttctctatatctctatctcaatctctctgccttttgtacaaagattagtttcaatgtagtctgtagctcctttgtaaaccaattaaaatttttttaataaatcatgtctctggtgtattgagagtgttgggaatggggtgtgtgtggtaacttcctattttgaatccaacaaatgttgcagctacctacactatattgtgctcccatacattttaatgaatgcattttactctacacttaaccttagacgagggctcaggaagggaacagtgcactctgactgcacagaatgtggaggacttcgggttccgtagttcatgcctatggacccagcactgggaagactgagtaggatgaagtagtgtgaatttgagaggccagattggtgtatataggaagttctaggccagtttagaatctgtctcaaaaataaagcagaaaagagggtggacactgagtgctgagtttcagagctcaactataaagtacttctgagttgtgcatgatgcc

SEQ ID NO: 23714 - DNA, 1163 bp, Mus musculus
gtaaccagaggtcatctgggtctgatgatgtgtcctttccccttgcagcactcctcctcttcctcctcctcttccagcagtgactctgactgaacgcagggcctggagcctcctcccctccagcctcaccagctccactctcccaccaagcttcagctgtcatcctcgtacggagtgaggggcattagccctctgctccctgccccactcctacctgtgccttcccctgctgttctgtcccggctgtcaagggctagctagcaaaagcaaagcggccttcttgatctgatcgtagctgatgaggtcagtggggggaactgtcttttgaagatggcaagacctctgagctaaatggggagcaccattttaagatctgcaccatgtgatttttttttttcttccactttcttttgtaacacttgtgacttgggtttgtgacagtttgtgatgaaaaacctctacttttgtaatggcggcacatgagagtgatttaatggcaactgtgttcccggcagggcttttggatctcagtaactgtcgagctgctggaaagtgcagtctctttacttggtgagctcttttgggacccgacttattccttagttcagtatgttatctttgatggctctaagtccaaataaaagttcttcttccaggttctactcacctgtgccattaccttgactgggctagttttgttactcttggtcatactctttaaagtacgtcacttttttatttttatttttttaattcctctgagagtctcacatcacccaggcttcatatatgtgtgtgaatatatgcatatatatgtatgtgtgtatatgcatatatatgtatatatgtgtgtgcatatatatgtgtatatgtatatatatgtacacacatatatgtgtgtatacatatacataagcatatatacatatgcatatatacatatacacatacacatacacacacacacacacacacacacacacacacacatatatatatatatatatatatatatatatatatatatggtgactttgatatacagatccttatgtctccacatttggagtgctgggatcacaagcttcagccaccacacgttgtttatgggcttgaaccaagacctgtgcctcctagtcacggactttatctggagctacgtc

SEQ ID NO: 23715 - DNA, 1161 bp, Mus musculus
ccggcttgctggcggggcgggtgagcgcggctccccgcgggggtcaggcgctggcgcagacacacgaggaggcgctgcttgtccggcccctccccctgggtcgcagcgcccccccctgaccgaaccgtttattcaccccctttcccagtcaagggaaagggggggggctttttttttttaagtggaaaatgcttggatgacccgggcgggggaggggagtggggagctgcagagttaaagggtaggcggactccctgttaccgagttactctgacgttctctcgggtaacgaattttgaaattacaaaatgcctgccgctataaaccagaccgagctatttatagaggggtaattgactgcaggattaacagctggattcccaggatggggtacacttagattgacctactcaggagaggaattgacaggtttctcagattacttacatgacttggagttaaaaaaaatacatcttcgtgctttacttaagaaatgaatttgtagctaggttttcagtttctttgccttttgaacttgtataactgtatttctaaggtgattaatataacagtggggaagtggaactaacagttttatactgtatgagggggtgttaatcttgcagactcagtgaacaagcattgtttttccataaatgagatgttgatttgtgaggtttttttttttttgacagcaattaactgttttctggaaatagggaactgatgtgctttagggatgcatttatgtaatcacttacatcctgaagtaaccagaagatagtttgcattatatagagtggtgtgacagtcactttaaagtgctttaaacatacttaaagtatggacttgggattcagagtttggaggccagcctggtgttaatagttacattcagtactgggcaacatagtgaggccctgtctcaaaaaaacaaaacaaaaaacccaacagtatgtgtattgtgtgtgtttatggcaaagtgaaaactgactggttttatgaagggacaaaattagttgtaggaggagagaaatcattgatactgatttgaagggatgaatacttgccatgctattggagaaatttcagggcttgagactcttggaactgtcagtgtttggtgttaaagtattaaaaacaaaaatatcaaaaaccaaa

SEQ ID NO: 23716 - DNA, 1338 bp, Mus musculus
tagattttctcttcattatgatgaactctgaatttcttaacactggattttctccattgcaggaagttggcagtatcatcggaaaggtaagacagtttcacttcagcattaattcctgtttagtcagtctgggctgaaatagcaattggaacttatgtttgacttttctttcttacagaaaggagaatctgttaagaagatgcgcgaggaggtaagatgcaaggaacattgggattgataaccttggaaaaacctgaaaaagtttgtgagattacagggggaagagctcagaaaaggaaagcattttctagttagtttgtaataataatagtatgatagaaatgagttttgtgtcaagtcctaaaaacgtaaggcacatgcaataggttgaagacaagtagagcagtattaggaatgcttttgtgtagcatttgttatctaggacagactattctgtacaattttagttctttttatctattaaaactacttgtttttctttctagagtggtgcacgtatcaacatctcagaagggaattgtcctgagagaattatcactttggctggaccgactaatgccatcttcaaagcctttgctatgatcattgacaaactggaagaggtttgttgtacctttatgattgcctcctcctcccataccaggcaataaaaaaaataaagttcatgttaagtaattgggctatataccctcagttgactttttttttaatataattttattctatgttcattagtgttttatctgagtgtatgtttatggaaggtgtgtcagaacctctggaactgtagttgcagactccaggtgtgagccattacatgactggtgggaaatgaacctggttcttttggaagagcagttaccactcttttttttttttaaagaatttttttttttatatgtaagtacattgcagctgtcttcagacacaccaggagagagggagtcagatgtcattacgcatggttgtaagccaccatgtggttgctgggatttgaactcagaacctttggaagagcagtcagtgctcttaaccgctgagccatctctccagccccccagttatcacttttagcaccaagtcatctcttcacacacacacttttagtatggtttttagtatttttattttttgacataagggtctcgttttgtaaatctggcactactgtgagtccttcagcacgtctgggataggctcctgagtgctgagattacatggaaatatgcattaccttttctaattttgccatttacagtgtttttagtaattgtttcacaggtatgctattgctttctttacagttgaatgaactta

SEQ ID NO: 23717 - DNA, 1191 bp, Mus musculus
tctgttttgtgagcaaaattcccagtcctgttttaggccaatagtccccctagttaccttacagctggtgtttcctgctagtcagtgtggctctcttattggaaaaggtggttatagttctgtgtctaatggcctgtgtctgtactggcctgtatctgcagatttttttttttcttggtttttccagacagggtttctctgtatagccctggctgtcctggaactcactttgtagaccagactggcctcgaactcagaaatccgcctgcctctgcctcccaaatgctgggattaaaggcatgtgccaccatgcccggcatagatctttttttttccttctctttgtgagtgctgaactataagcaatgcttatatatgcttatatatgcttatatttgggtgcaaattgtgatcttcatagtttggtatggttatggtacatgcatgtccaagagtaagtgattattttatggaaggctttcaagtatagatatgctatttatccttttggtgttctaagcagttttcttttttaacaggacataagcagctctatgaccaatagtacagctgccagtagacccccggttaccttacggctggtggttcctgctagtcagtgtggctctcttattggaaaaggtggttgcaagatcaaggaaataagagaggttggtgtttatttgttttcaaatatctctttgctttttttgtttttatttttagccttgattggcctgactatgtagacaaggatctctatgagaaccacctaccctctgtttcctgaatgtgtgcaccattgttgtgtctggccagcagatcacaacatgggttctagcctggaaaggcattttggaaacctggaagagaagaggggctaggtggcgagagaaagaaatgcagctaagacaggcattctgatcaaagctcaattttactgttctgcacgcaattataaagcaggggaagggggcccgattcccgccaattaatcttggggtccaatagcagggtgaccacgtgcacagctccgaacagcaaagcggcaggttccagcagtgggcatggcaaaatgattgagcgggaagctccacccctgagcaaacaggtttcaggctgggggaggggagactacataccattacaccccataccaaattgtgttacagctagaaaaggttagcattt

SEQ ID NO: 23718 - DNA, 1101 bp, Mus musculus
ttggggattgatggtagtagtagcaggtttgtaatcttaggacataagagacttgagaagggaaactccaaggccagtttactgtgggcagtttaagagaccatatctgagaaatacaagctggattaataccaggatttggagacagacaaggtcagaatggtctgtgcagtaaattccaggccagccagggatatatggtgaaaatcccctcaattaaaaaacaaacaagaacaacaacaacaaaaaagtgggattaaaaagaatgttcatatactgttgtacagtagtttgcttagcatgtatgtggccctaggtttaacccctagtactgcttccacaggacacctacctccgcaatcatgattaacatcccatgaagactatagtgtggtgatattgaagttaattttaaaaaatcataaattttattttgtggtgtccaggattgatatctaaggcctcacagatgctaggtggatgttcctttactgagctacatcccagtacactattctgtatccccgtcctctgtttccccccacccccttttcattttaaaggtgaggtttgctatgttactagcctatactagaaccttatatacatttactagtaatcttgcctcagtctctcaagtacctagcctggctcagtaatgtaagaatatgagtgttacttagaatttctttttttttttttttttttttttttaagatttacttatttattatatgtaagtacactgtagctgtcttcagacactccagaagagggagtcagatcttgttatggatggttgtgagccaccatgtggttgctgggatttgaactcctgaccttcggaagagcagtcgggtgctcttacccactgagccatctcaccagcccccatacttagaatttcatacgttaatacaatctcccagttttcatgacatatagttgctgttcttttttgagacaaggcctcactgtttagccatggctggcctggaattcagagatgtctggctatgtatttagttctccctccccacatgttttttttttttttaaatttttaaatttttatttatttaatttttcaaggcagggtta

SEQ ID NO: 23719 - DNA, 1162 bp, Mus musculus
gtagtgtgagaacaccagagcattctctcaatgcctcgtttacctttaacagttagagttgtgtgagaagattgataaatgtcatgataatagtagtgtattttcatggttagtgttttcttgataaatgtcatgataatagtgtattttcatggttagtgttttcttgagtaataataggtaaagcagtttttaaagtattgaaattcaggttaaaatagtgatctttgtaactagggcctaccctatttaaaaacatctatgcttaactagttatatttatttgtattttgtctgaaaaccatttgagaggggaaagcatcaacttggagttaattccacattttattgaaatataatgaaagtgaagaagtttatgtcttgctgagagctttcacaagtggtcatattgcagtgttatatattgagatgtgttagatctttgttttagcattagctttgttttaacaggtttgtcagagctgtcataaatattggggcaagagaagcagcagctcaatcagtcattgtagacaggagggttagcctcaggagtcatcctcttcccatggaactctaggttcttcagtgctgtgtcacccatcaacctccgcacgacagtctgtccttccttatcttcattccaaacctcactcctctccctttgtacctctttgcttccctccctccctccctccctttattcagttaactgccctctaaaagcttacagcttcttctatctatcagttgccctcttatgggtcattcccatggacctttttataaatagaccagttcatacagtgtccagagatggacctgtatcttttgttgtaaagtgggctctgtaggggttcaagttaatcctacagtgaccaagacctggcatcagctcacttttactgaaaataacccaattgtgcagtgtcatctgcctctaggtaactttttttttttaattcactgattacagctcgtttcaaatctgtgttgtgagctcctttttaaaggaaacaagaaaaaaaaaataagcaacttttttttttttttttggtgtgaatttcatgctggtgacaaggtgccggattgacagccctggagactgaaatcctctatttatccacaggacaggtacagcacaggcagcgacagtgcgagc

SEQ ID NO: 23720 - DNA, 1155 bp, Mus musculus
attataataaagttagtgtctcagttaagccacagttaacatgttacggaattactgctctttaatactagataatgcaaatgtaatctgaagcacaaaaacaaatttgaaattcttgtcagtatcataaggtaacggtggaaaaatgaattcacacttttttgacaccccaacagcgaaggcattgttgatttatttgtagctatctcacttgatttcaatattgctctggttaatttgtcatggagtggaggctacattgtggggatagaaacaaaagctaattcttgggatgagaaactggcttggagtatgccttgatttgtagttaatcaggcattgaagtgggaccttcaggttttaaaatccaaggttttaatagcagtataccaaaaggattgtagagtgcaaatttaggtacaaattgtagaaattggtaaatagtatttgtgtttgtttcgctgtgcaactcttaatttgtttttgttttgtttctcaagttgattggctgcataatcgggcgtcaaggcgccaaaatcaatgagatccgtcagatgtctggggcgcagatcaaaattgcaaacccagtggaaggatctactgatcggcaggttaccatcactggatctgctgccagcattagcctggctcagtatctaatcaatgtcaggtaagaatctcttcactgtgtcacataacagggagggagagggttgccatataacaagtatgggttttttatttccccataagttctgctttttttctgtctttaatgtagcagagaaaacaagcagattggagtaagttttcatggggttgtttttgggaagtggaaatatatgcctgtggtatatagtatatgcctgtgctgaataggacagagctctagtaataacaggctcactgaaacacacttgggttttgcttgttttcacacatcatgtagacagatcatttcatttttgaatttggagttcaaagcaccttgaatttttaaggataatgagatatctaagtagcttcttagaaatagctgtcatcattctgcagacatttttcaaatgacaagtatgttctgtttgtgagaaaatcaagccgactaggagtagtgctccagatgcattcatagtttttatcccattgctcacccta

SEQ ID NO: 23721 - DNA, 2554 bp, Mus musculus
ccacaggttttggattttgaagagtgagctaaggaactgaattgaagctttgatacttgtttttttgttggtatttgtcctaaaattataagcttgaaaacaataattcaatttttcactatagttcctattcttgctcctccctttaagtattgttaaaattacataatatctttaaatgttaggctcccaacacaaagttccttcacattggtgggctgttctagtgtaaacacgacaggatcaactccttgaagcctaatgttctctagaaatgctttcagtttgcaaagagtaaaacgtgaagagacagtgtcaccaacttaacatcatttgttatgttcttctgagaacacctcaggaaccttggttgtagtggtgttacataaacaaccttgtgcactatggtactagctaatctaagaaaccttgaaataccttggtgtgatgaattgtagctaggtaagctgacttattcttctttgtgttttacaggctttcctcggagacaggtggcatggggagcagctagaacagagcagacccatccataatcctgctgttcaccacccatgatccatctgtgtagtttctgaacagtcagcgactccaggttttaaaatagtttgtaaattttcagtttctacacactttatcatccactcatgattttttaattaaagtgttttaattcctttctctgttcagcagttacgctgagatatccatatttagttttataagcttctcccccttttgttttttggtttttgtttttgtttggctcatgaatttttgtttgtcatggaaatgtaagagtggattattaatacatttcagtttagttctgtaatgtcaggaatttttcaaaaaaaaaaattaaaagatggactggagctttttctttgtgaatagaaactggatgccacagtgacttacgtgggtgttgttcctgtctgatgttatttttataccttttaacttccagagagccctgattcagtttcaatagaattaatggactttcttcccttttttaccactccaatttttttaatttgccctcaatcacctccccctccatgatactgggtagcctctgaaaacttgtttacggagattgacaattacacttaccctaggattgtagagcagctggtgcatttatggagctgggcaggaactcgtggatagtaaggatagtaaacttgggaatggctgccccttgttctaccttgcatactttaaagttctagtaattgttcatttagttttctccataggtgttttgagacctccttgttctgaaatcatttagaaaagtttacctgctatcatttatgttaacttagaaaataacttgtccaaattcctcagataaaatcttaaatccaagttgaaaccatgtattataccactctactcattcaccaagaaaaccctcgacagttgggcctgcatggagtggttatatttcaaggttgttcacaggggttacaatatgacagtccccacccctaccaggcaccaagataacagtggggactaacagcaccccagttcttcagcctgagccatcacatgctgttagtcgtctggcccaaagccagggtttgggcagagaaacaggaacaaagaaatgagttacattgccacctgagaaacctcagagggatgacccagccttagtttctttccctcctcccaagtgcaaaatgtgtaaacagtaaacggaaaataaaagtgcagttttaagtgaatcctctacctgcccctccagtgttcagggatagacagtatagagacaagcctggcttttctattgcctacttgcttgttcaacataaggaatggggtgaagcaagaaggggccagcttcctttctttatagctctagggtagtactcggagtcattcatttccacagctgccagtgtccccagaacttattcggtaattggtcaggggcgtcgttcactctcaagcctggcttaaggctaagaaagccccatctatctgttgattatgtggcgcatatatattatttatataaatatttctctatgtacaaggaataagagtgtctttcatggaggaagggaggctgggggccgcaaggcatcaatgctgttggagttgtccaattcagtgctgtcacagtctgagtcttcaggattggggccctgtgaagagtagaaatgcagtgaggtgggggagccttggggacccttcttttacattaacagtggagttttttttttttttttaaatctgttcataggtccaaggcactatgctagattccttttaggataccttgatgactactgtcatcaaagctgccacacaaattaaacatcaggcactatatgctcggaaccattaattctcaactactacttacatggatatttgttttaatggttatggaataatgatttttagattctcaaatgactgggtttctgatcccagttcacttttcagtgtctggtggttgcaactcaaacttacctggccatcctggtgttgcatgggcaaggagctggcttca

SEQ ID NO: 23722 - DNA, 1189 bp, Mus musculus
tgaatcccagcactctggatgcctatgcagaaggaccaaaattcagggtctgcctggactatataacaaaactgttcaaagtcaaaagaaaaaggggaaaaagtattgtcttagggttttactgctgtgaacagataccatgaccaaggcaagtcttataaagcacaacatttaattgggccgcttacaggttcagaggttcagtccattgtcatcaaggtgggagcagggcagcatcttggcaggcatagtgcaggaggagctgagagttgtacatcttcatctgaaggctgctagtgggagactggcttccaggcagctagatgagggtcttaaagcccacacccacagtgacacacctactccaacagggccacaccttctaaaagtgcctctcccagggaagagcatatacaaaccatcacaagtattcttctttactgggcaacaggtctctccagctcagcccacccctagcactgggggacggcgacggcgtacagtggatgaagatccagatgagcggcggcagcggtttttagagcgaaacagagctgcagcctctcgatgccggcaaaagcggaaactgtgggtgtcctccctggaaaagaaggcagaagaacttacttctcagaacattcagctgagtgtgagtggtactgggtgactgttgtgattgtggagtctggcaagaggctgaacctgaacagtgcagctgcagagcagagaacaggcattctgtacttaggttagatccagaagtatgaccagaagtgtaaagagtcccataatagtcagaattgaaacctttcccttagcaattgagaaggggactgtctccttccagatttgccactagcacaagacccatttggaatttgaggttataaactcagagtgctcaccagttggaagtctacagaaaaggcaagaatatacccatctggatgaaggaaatcaggttaagcaccctggggtatgctctctcaaatcatcgacagaacctgactgaattagagaacacctaatgaaaaatgtgtttactcaggctggagagagagctcagtggttaagagtaccaaatgtgccagacggtggtggcgcacgcctttaatcccagcacttgggaggcagaggctttcggatttctgagttcaaggccagcctggtctacaaagtgagttccagg

SEQ ID NO: 23723 - DNA, 1197 bp, Mus musculus
aatagttaaccacataagcacaaggacctgagtttggatctccagcacctaggtaaaaagctgggtatggcctacaacccctgttcaaagggagtggtgaggagacatgcctaggctgggaaaaggaagagacagagacagctggagcttgctggtaagatcctactacagagagattctgactgaaggcaataaggcagacagctatagagggggacagctgatgtttacacacccatatatcatacacacacaatttctttaaaatgtggcttatgatggtggtggtagttttttggtgctagagactgaacttagggccttcaatatgccaagcaatgggttctactactgagatacattcccagtctttccctattttatttaatctgaaaaactgtgttgtttctacataagttacaaataaaatctgaccagcctagtgcataaagtttacttgttcagctcagaaagaacactgcacccataggacaactagtgagcaattcaactcaaaggcaagttaggtttttcaaggagactatggaagagagtattgccacagaggcccaaaccacaagcccaacaaccaacttttaagttaaatcttggcttatgttaagacttccttagaatagcacttcttgccgggcagtggtggcgtacacttttaatcccagaacttgggaggcagaggcaggagggatctctgagttccaggccagcctggtctacagagtgagttctaggacagccagggctacacagagaaatcctgtctcaagcaaaacaaaacaaaacaaaacaaaacaagaataacacttcttaggaagaatgacaatactgaaaagcaaaaaatttctgcaaagcctgttttcaaatatatgggaacatttaggattaaagttggcaaaggatgagaaaaagcaacatttttataaatttgtaatgagttttgtcctaaacacaacatttgaaaggctagtatactaaccttgggtttagtgagctttcctaaacatccgtctacaaagttacacaaataaaatgtttctcttctcatatagcaattctgttttgtttggacacagggtctcatttagtccaggatggactctccaaggacaaccctgatccctcccatacctcctacattcattgattacaggcatgtgtgggtctacacccagtttatgt

SEQ ID NO: 23724 - DNA, 1346 bp, Mus musculus
ctgctcagcaagcttgctggtcaactacttatttcatagagattttcctaaatgcttagaaccaataagtctctcagtctttgccaagggactcggtgcttgctgaggcatgctttcaacccccagccaggcagtttatgatactccttcacttcctgctgggatggagcctggagttgaatcaatggtaagaaagtaagaagccctctggtctttcctaactacacacagtcctgagtattcacatacctaatgtatgtgtacattctagattcccaggaacaccttaagactctccaaaaccctacacagacaccagactctctaactttttcttgtgtgtatgttagttaccttatcttttgccccagttgttatctactatcacagaatgctgccacattaaacagttacctcttgttgtttagacaaatgtctctgacatgcccagcatggccccagttgaataagggaataaagaaaagacagctttttctcttctccattcctccgccatcgtgcgcgctattcttgattcggcttctcgccatgtcttctcacaagactttccgaatcaagcgattcctggccaagaaacaaaagcaaaatcgccctattcctcagtggatccggatgaaaactggcaacaaaatcaggtacaactctaagagaagacactggaggagaacgaagctgggtctgtaaggattcacacaatggcaagactgaggatttatactgaattgtcatcaatcagtcctaccagatggatttcaacatttaaacctggagacttttcgtgtcttgaattaggatgtttgtccagtaataaaatatagaacctttcaaaaaaaaaaaaagaaaaagaaaagacaaacagaccttcagaaaatatggaatcttgtggattgggttcactgataaggaagcttgggtgcttattatatacagttgaactgagaaatagatttattgtatgtagctgaacaaggaggaagactgtcacacgcagctaaacaaggaagctgggcttatggcatacaactagatcaagggggcaggtttagctaatctcaatagtagcaatttctataggggagctttcttcaggtggtaaatatctgggggtagaaatcaatggaggacatttctgcacacactatcaacacaagcaaatggaccagcagaaggctttgccattcttctgagctgggatggggaaggttttaccattttacaatgggtctgaggctatggggtccttaacctggctgtgtacctctgtttattcagaacttcctctgttccccacagtccccaaacaaaaaatatgttctctgcaagct

SEQ ID NO: 23725 - DNA, 1152 bp, Mus musculus
ggagcgtttccggcacctacagcagcgggcctgctgattctctcttcccgctggcgttcacggtcacggccggccggaggctggaccggcgtaatttacgaggcgggaggagaatctacccttaaaggggctacgggcagcagaggcccagctcaacccgtttcccaggctggtgacaatgaaggagggggcgctgcagtcccccacccaactcctttctctctatcccctacccgccccccaacatcgccctttgtctcaggatccgctgcctccgcctccgggccagctagccaccgagtacggggccagagctgaagagggaggggctcatccccagactcagttggaggccaaagacaaggctttttattcacaaatcctttcagccttcagccccagacccaacgttatgaggctggccggctctggaaagaacagtccagataacccaccagccctcctgcaccctgtttttactctttccaccagcttcctgtctgctgcctcacttctgtgggaacacaggatcgagaagtaggggatgggcagagctaagtgcagcttgagcagtgtgaaaccgcccactgaggtgaagagaggcttcccaactctccaaggacaagccacagaatactgggttctcccaatagcacgtggcttcaagtttgtttacaggattgtgcagagacacaagcaaactgttgggtccaaatctctctccctactaaacttgcaagcaggcagcttcttggtctttccatttggctcaatagagaggaaatacaatcacatgccttgatcctccattgggcacctgacacatctcccctcccactacacatgttcatctatgttcaagttcccacaaagcatctccactccagctgtccacacaatctcctgtgacagggccatgggaatggagtactacccttctccctgtttgtatccccttgtgcagcacttccaatgactggtggtctctagattcaagctccaccactctgatttgattcctgaagcctggtaggaaagagactagaacaccccaaaaggaaggaggcaaagttatgcaatattctctttcctttgctttaaacttgacttctgtgagcttctttgtcaatatttgtcttgttgattgtgtct

SEQ ID NO: 23726 - DNA, 1924 bp, Mus musculus
gatcaggagtccgaggccgccttcagctacatattgagttcaaggccagcttggaacacattagtctctgtctcaaaaataagtaagtaaataagtaataaaaaagtgaacttcttcagggagcccagagctgtctgagaagctgtatctgagggagacttctgtgtgtctagactaggaaggatctagattttcatctctccctttttttgctccctataaggcctttgaacttaaaaaaaaatgtatctatttattttggtttttcgaggcagggtttctctgtgttgcccttactgtcctagaactcactttgtagaccgggttggcctcaaactcagagaacttatatttttaaaaaaaatccctctgttttgtttctgttcacgttgtctatctgtttttaaatttcgaaacaaggtctcattgtgttggcctgtaactcattattatagaccagctccgctttgacctcacaagaaatctgcctacctctgcctcctgagtgctgggattaaaaggatgtgccaccctgcctgacctgcttatgaacaacctctctaagcactaagatcctttaaaaaaaagagggtgtgctgcctcctagcactggtgtgaggtgtgaggatcgactgagataacactgcagagtgctttgcaaaaggctgacatatggtcctcactacacactctttctgctcacctcccttcgaggtggggttatatcaatgcactacaagggaatttcccgtctgctctgaagacctttgcctataaccctgctcgcttgctggagaatgaccaatgttacgagaaacttagcctctgacttttcagactaagcattaaagactcctaagccttgtgttgggtctctcctctcttcctacacttcattggtgggagaatgattttaggttatctcctcccttttcttacctattcactgtctgaaaaaacttttctcaggtagcttgaggaggggggacagagacctctgattgccctagccaagctgcaggggttttggtaggggcctgccctgaagttcatcaggtactagggcaactgttgggaacaatgaggagctggtgtctcatctgtctctttaatggttggttggatgaatctgtggtaagggctgggaagtgagccacagtgagagcagcaggtcttagggccatcttaatgaagatacatggtctctctatctcctgggatacaagtcatctccagcattctaaaaattagtatatttctatctcagctccagagagggagactaaacctttgaggattccccagtgatagaagtgttgtaattattcatgttgggggtctcagagcattccagaatttgttgaactttgactcaggatggaggccaaccctccagaaagaccagccgtatgtattgagggttggggcttagcctgaatgccagaatgggacaaggatagagattaagttcagccacatggcccatgatctcgaccagttatacctccacagtgaccctagccagctctcttggacacttgagtttccactaagcttgctggctggtgcacacatgtatatctgtgtttctttttgggtatttggtgctggtttgtgtattcattcattcattcattcattcatgtgctctgtgtgtcattttggagttctgggcatcaagcccagaattttgtgaatgggaagcatgcactcttctatcactgagctacatcccttgatttgtatttgtgataaattgtaataaataaataaacaaacacagtgttttcccccctgagttttgttttgcaaattactgaagccgaagggtttctgagaactcttggtcagaacatgcagctggtatctgaagtgaaataagtcatattgggagccctccctaagctagacttcaggaagtcac

SEQ ID NO: 23727 - DNA, 1078 bp, Mus musculus
ctgaaagtgagattttctagtgcatacttctgtgctagcctccctacttggtcttaatggctgaccttgggcaagtctttcctttcaatgcctcagttccccatctgtcaaatggggtgataatactgacctacctcatggggtgttgtgaggcattacagatcagagctgatcaactcctttaggattgcctgtggaggataccttcagtcgaagtttttttagccctcactgagctacttccaagtttggaagtacttagtgaccttggtgagtttctgtccccaatcccttaacccctcatcaatgctgctagttcagatgttgacagtgttttgtgaatgttggagtcttgatcatccagtctaacttgggatgctgtgagggaaggcacttgtgggctctgtgtcttgcatcacaaagagacttagaaattcaagagccttgggttagggaatcttgaggcaggagtgctacttcatgtctttctctgcaggcaggagttaaggtcctattctcatggatgacttgtgctgattgtcttggtagtgtggattgatattgttgcttccattttccaggctgacctaggacaggtcgtccactgaactcttcatgctccgatgcctctgccctctcatagaagccagacggctcaagcaacataacactcccttcccctaccaaaaagagctacattgtattttgtttttttctagaaataggtataccatttcagaattgagcattggtcctcaaggcttcttttcagttcactgtgtgtggaatctgtcacctcttttcagtgtataccatctgacccactgaggacatcttggacacttgtttgcccacctgagggttcaagagcctttcttgctctgtctcagtatagggactaaggcatccccagattcttcatgataggtttccttttcccctacttgaccttctattggtacccatgaaaaagcacaaggtcctagctccctgtagatacacactccagttctgttgggtagactctactcctaacaggggtcctagagggttctctggaggatgggaaaggaacagt

SEQ ID NO: 23728 - DNA, 1084 bp, Mus musculus
gccatcagtattaatcggaaaatctaataggaaactattaccaagaaattaggccaaattgaatgcaatgaactttttatcatctttttttggtaatgttcttggtgttggcaactgtgaccctaacagctggtccaagcccagattgctaatttcacttttaaagagcctaggctggccctagtgcttgtagtactcctgcctcagccttaaatactgggattatgaggggatgtgtgcattcctgtttgtgtgggtgggtaggagagaattgaactcagggccttgtacattttagacaagtgctcaaccactgagctgtattcctagttcagagtgttttgtttgttagggaagtttccagagagactgaatctgagctaacattgctgaaacaccaaccttgaattttctcatcatggatttgtccagtctaatcagatcagtgggatatacaggtatatattaaagtcatagagtgtccctggtgaacattgttgctgtatcatccgttgagtgcttgtgtatagagctctgtactggctgctgtgaaggctgtgggaggaagacagtgtcctgctttgaaattctttgagaactaaaaagatagtttccttgtatgacaacaggaagaagatgcaagccagtgttttcctgtttgcagtaacgctaggatttgatcctgaacagcctggcagtgtgcctgatcccagtagttctaagataggaacaaaatgatttcccactggaattctaagggatggggaagatatctttgttttcctttctgtgttacaagttatatctctggtagtaggagaagccatcagtatgtccttaagatgtttgtaaagatgctaccacctttgggtgagatgagtcaggcagtggaaaagttgctgtcctttgggtgtcacaggaggaatgccaggcagtagtagagggaattgtgcctaggagtctacactgtgccctgcagccctgctgcacttcaggtgctcagtgctaatcttacttaggaaggccatgctcctttctggaacttggattacccactacaagactgagaatcagtgtcttttgt

SEQ ID NO: 23729 - DNA, 1184 bp, Mus musculus
agagtgaaaatgagcttgtgtggtgtctgtagtgctgatgagattgagtggattagagggatggagtgcccaggtgattctcttgagactcctggggtgctaaagacttgtgggggtcccttccttttttttttttttttttttttttttggtttttcgagacagggtttctctgtatagccctggctgtcctggaactcactttgtagatcaggctggcctcgaactcagaaatccacctgcctctgccttccgagtactgggagtaaaagcgtgcaccaccatgcccggcgtgggggtcccttcttaatcatttgcaaggaataccagaaaagatgactacatcttattgcaaaagtatctcttaacattgctgtctctgattgacctaggtcggtattatatttcttgagttgtaaggatttttctgaactgaagacaaatgataccaggtgatactaacaaaggcgatgatttgttgttctgaaaaacaggtttggtttggtttggtttttccttgatttctacaagctctaatctctcctgtcctatttatagcaaagcaatgatatcgctcggggctttgagagaggactggaaccagaaaagatcatcggagcaacagattcctgcggtgacttaatgttcttaatgaaatggtgagaggaattgtgcttcactttacagttgtatttttgctacgaagaaagagtgtaaaattgagaattcctaaatttaatccttaaccaactccagtgtcagtattaagtgggaatttatggtttggaatgaatttgtgacattctcaagctttggtattgtgttataataaccatatttgggtaaaaaaatttggggtagaaaaattgtattactactacctaaatatctatttgtatagaactaaatcatttatgtaagatcatgagtctatgactacgggataagagctaagtaaagcttccatcactgagggtcagggtcaccgaatgatagagaaattaatttccacaaaaggcatcaaacttaatgctaaataaagcataaattactttatcagagatagtgacttatagaagaaagtggaatacgctcatccttctgctgtcctttcctgacagggtctcatgtagctcaggctgtccttgaactcaataaggagtccagaatattaaattcctatc

SEQ ID NO: 23730 - DNA, 1177 bp, Mus musculus
ttttgtttttgagacagggtttctctgtatagccctggctgtcctagaactcactttgtagaccaggctgaccttgaactcagaaatctgcctgcatcttcctcccaagtgctgggatgaaaggtgtgtgctaccacgcccatcgaggaaaaagattttggttcctttaattgaaagtttcccacatttctctttgagttcctggctcagaagtagatacagaaatggtcaggaataacgcccatgttattttctctttgggaatataaaattaaagagttaaataattattctacttaaaaattttgatctcttcagctgaagagaagttgttgttagagaaatgtggattgacccattttaaagttaaatttgtaaccttgtcttataattgtagatcaaaaagaagggtaagtgactcactggtgttgtatcctctgttccatcaagaagtgacgttttaaccctcaggtagattgaaccatttcatctttccccctttcaggaacctggtggccatactccttcaggtggatcaacaggcacacgacatgggaaagaagaccaagaggacagccgacagctcttcttcagaggatgaggaggaatatgtggtggaaaaggtgttggacaggcgcatggttaaggggcaagtggaatatctgttgaagtggaaaggcttttctgagtaagtgctttctttttcagtctttagaactctgtagaggtagaaaactttgatttacttgcccatgagccacagtctgtctttttcccagttacatactttcatgagaatcaagagaggcagcagaccacatagtctccctattgtggagctgatattttattgttcttattttgaggggtactttaaggaattggttgggaacacagtcttgggagccagatatcctgggaccagattcttgttccaccccgtaagatacaggtgaagacattgattaatttcttttattattatgacttaacattttttgttgttgttgttgttttgtttgtttattttttatgttttttgagacagggtttttctgtgtagccttggctgtcctggaactccctcagtggaccaggctgactttgaactcaggagatcagcctgccaagtgttgggattaaaggcatgcaccactatacagagctaaattttttt

SEQ ID NO: 23731 - DNA, 1332 bp, Mus musculus
ggactttttttaacagaaccattgatactacgttggcacaaagtattaaaacaaaacattgtcttaattctacaggtggctatggcggttccagcagcagcagtagctatggcagtggcaggaggttctaattacatacagccaggtaagtgcctcctttgtgtgtgtttgctaaatgttataattgaacccagtaacccaaatgtagctgagcagtacaacatagttaacattataatttcagtaaaatggtggatgttaagttaatatgcagttcagcaaaatttgtgggaaacaacttgctctattggattgtagccttgagtcttaatgtgttttagattaacaactttattccatattgttcaacaggaaacaaagcttagcaggagaggagagccagagaagtgacagggaagctacaggttacaacagatttgtgaactcagccaagcacagtggtggcagggcctagctgctacaaagaagacatgttttagacaatactcatgtgtgtgggcaaaaactccaggactgtatttgtgactaattgtataacaggttattttagtttctgttctgtggaaagtgtaaagcattccaacaaaaggttttactgtagacctttttcacccatgctgttgattgctaaatgtaatagtctgatcatgacgctgaataaatgtgtctttttttttttttttttaaatgtgctgtgtaaagttagtctattctgaagccatcttggtaaacttccccaacagtgtgaagttagaattccttcagggtggtgccaagttccatttggaatttatttatggttgcttgggtggagaagccattgtcttcaaaaaccttgatgtcgttaaactgccagttactattgtaacttttaatgagtttcaccattgaaagggtcatccaagcaaggtcacaatttggttataaaatggttgttggcacaccctatgcaatatcaaaattgaataacggtatcagataaaataacagatgggaatgaagcttatgtatccattatcatgtgtactcaataaacgatttaattctcttgaatggaatgacaactgtatggatttgggactggcagagatttggactttccctacccaatgcccctggtaaatgctcattgtttgttaccacagtgcaagttcaaagctctgccagcagagaggccaactgctggttaatgccacctataagtccagagattagcattgttggggcatcttaactgataattagtaagaactcttaattgccctaacccataggctgtagtgaaggaaaactgcagtttaactgggttgt

SEQ ID NO: 23732 - DNA, 1332 bp, Mus musculus; identical to SEQ ID NO: 23731

SEQ ID NO: 23733 - DNA, 1332 bp, Mus musculus; identical to SEQ ID NO: 23731

SEQ ID NO: 23734 - DNA, 1099 bp, Mus musculus
gcacttggtttttctggagatgaatcgtttaaatttaatgccctattaatcttaaaggaagtggatacatttctatttgtgatgatacgttttggcccttaaattttatttaaccttcctttgacccattttcttaaaagtaatggctcaaagtaatattagataacatttccccaaaatggtgggagggtgggtgggttgctaatgggagggggtgggactagtttaatgatgggaattggcctcataaaaggttagttctaaatgttgtttgcttttctaggaaggaatctgctatgaggcttaactgctgtcataaaatttgtttaaaaaattctgcagaagttgctggccaaaaggtgagtttttgtgactacttcggtaagctgtacatagaaaccaggagatgttagggaggaatctagatggagcccaccactgtctatgtgaaactgcatcactctctctcttctcctttacaggaacatccttaagacagcagcctttattctgggccactgtactccactcactgccatgcagttgggttttagctgtactgctaaaaaatcattcaattttgtgaatggcttactttggtttttttttttaaataaactttttaattaactcctgtttcttgtcttcctttgtgacttagcaacattgagttagaatccacattaaaatctataaacagcctggtcatggtggcaaacacctccagtcccaacacttggaaacccaagcatctactttccttggagttaggggtgggatctgtatagttttcacctggagaattttacctctagcttgttctttactgcctccatctttaaaagaaactgatagcccaaactttgagacccaagtgatgaaggacacaaagacctttgcctgtttttttctttcttgaggttagaaagggtttcacagtttaacctggctgtcctgtctggaattgaaggtgttcacccagccttttttttttttcaaatatggtcttgctatgtgatcttgactggcctaaaatctccctgcctgtacatatttcaaagtaaacggaacgataaggcagatttttggtttttttcaa

SEQ ID NO: 23735 - DNA, 1099 bp, Mus musculus; identical to SEQ ID NO: 23734

SEQ ID NO: 23736 - DNA, 1192 bp, Mus musculus
tatgagggtattaggaactgaacttaagtcctcttcgagaggcaggaggattttgagttcgaagctagcttgagcacatggtaagaccctgtgccaaaaaagaaagcagcaagcaaaaattaaagaaatcgctaaatctatgctgagctgaagagcgtactgtacctggatagtactgaaaagctgctcttagagaggacatgctactaagccgcctccaagtttcctcctcttgcatttctgtttgctggtttggtagaacctctgggatcaaacatgttctggcctcacctccacaaagcacacaactgtacaatgttgagaagaggaaagggaagatctagagggccaagaaatgagtcaaaatctaccttggtctgggcatttctaggtgacaatagattccttccttgaggtactttacagtggatcctgcttgaattaaagcaccagccttgggagatggagagatggctcaggggataagaagagcatttgctttcttgcagaggacctgggctggctttaactgcagcatccatatggagtggttcataaccacctgcagcaccgtcttctgaccttgggcctcaggcaagcatgtgatgcacacacatgcaggcaaacagtcataaaaataaatactgagaaaagcagtgcagccttagttcatagttggatttaccaaatcttcttccagtcctttgtctctcagttcccatcctgtttttggtctcagttccctctgctgctcttttagctggctctcccgttctcagttgttagtggagagcaatctgcaggttgccattctccatgaataacctgaaatcttaataccttacactttccttcagcctttactttttatttcccccaccctcaaagctgaattactgtagcagttcagatccttaaaaactttgtacagaggtatttttttttcttcctgttttcaagttttaatttctgagtgtgtttccagtgttttacagattagacctcaattccatacattgtctcactttaatattttttcctaaaactgacaaaatcctgatttccacttctcattcaaatatcaggccatctaaagtgcaccaggatgtatatgcatctagaggaggaagctgcaggacacattggcgactcaaaggttgacattgtttcagtggcctttgcttcctgaatc

SEQ ID NO: 23737 - DNA, 1607 bp, Mus musculus
cctcaaaacccacatctgctgtgacttcttatccaggcccccaacttatgtccttagggtcatcttggagaaccacaatggattcttctgtctctatactttctggggttctttcccctccctctcatgagagtaaagtccccagcagatttgagtgagtcaggggaaacaccctcttcctacttacacttgtctcgcccaccccccattctctccttggtttcttggccctttactgtggctgtacttcagatcatcaaagcaagagaaagaatgtgctgagtgttttcttccctgtgccttaagggccctcatcccagcagcccatatagccagcaaatggaggactcctaacttcagcacaagtgggtttggagtggcagaggccatactttctttgcctcagcttctctccttcctgctgccctatcctctgccttagaagaaatgggaacagcttgtagggaagggacaagctgcagaggaacagtgatttaaaggcccttggagctagtcccctcagcctcaactttgatctggcctttagcctcaaagctgctgtacctgcacatggtcctgagaacatctctctaggcctgtaccacacctctctgcctgtagaacctgtgagatcattgcctgtggcctctgtcaccctggagcaaagccagaccttggaacccaaactactttagtccctagaaaagtttctgctcagaactgaggatggaaagagccgtaatgacgttggccttgccgtgttccttctcctcagcgccacactcacatatttctctgctttggttctacaatctgttgttgagttccccctctctgcatcagtcttccctggaaatggaggacctggtgcagtacctttcctctgaggcttggattcccgttcttgggtgtaatgttgctccctgatcccatatccctgtgaaaatgacttaggaaaaaacgtttctgagcaagcattctggcccatgcactggctgaagtgggcagactggaggcggcctctgcaagaaatggagtcaggcgaagtccaccttgtacgctgctgtgcggcttaggaataaagtgaatctcttccaaactgcctttgtgtgatggctctgttcctcccttttttggcagctattcctgttcctccagccaccacccccacgcccccgcaccccacctcttataatatttcttcctttctacctcagagactccccagcagtcccccctacccctaatttacagggctgtttgcctccttggcatctctagtcccctcgcctggaaattggcgccaggggtggggtggggatggtattttctcagtgggagactcagggaactgagttctcccccacacacccccaaagccagctgcctgctcccgcctcagccattagtaacccggagacgcgcacctgcgtggaggctctcctccagcccctgctcccttcccgcacctcccactcctccgaaacggcgctgagcgggttatttatcggagcctgcgctgctccagaaggtcaggacggtggtgtaaataacctcttctcgccatttccccatccctccagagcctgctcccctcccccttctct

SEQ ID NO: 23738 - DNA, 1128 bp, Mus musculus
aggaccactcagaaggaagtatggcccagtgcttagcaatggccctgcctctggggattactctttgctgaaagctcacagcccactacccactgcaccacagcacatctccagcaggaggcaccgagatggcgtggctgggaagcccaaccctctactgagccggcacaagaagcctaggggcgctgcagagctggcggtgaggcctggatgctggggaaatgggctatgggaggacccaggaaagcttgaaagggatctgggcaagccggcagagcttgggcttgctgaactactggtccgacctctgtccccatctttctgcctgctgcagggcacgctgactttctcaaaggagctgcccaagtccctggccggtggcctgctccccagccccctagcggtggctgcggtgatggccgctgcagcaggatctccgctgtccctgcgtccagctccagctgcacctcttctgcagggaccaccgatcacacaccctctactccaccctgccccaggacccatccgaactgcgcacggacccatcctcttctccccctactgacctcaaccctgaacccctcccattgaatcccccacctccagccgggacccaggtctccgggctcccagcccgcccctcttcccggcgctccctgaatggtctctccttccccccaccccgaggtacggggttccaggaaaggggaggggtagcgggggaggggggcttcagaagggggggaacaccccagatctcagggaaccccgccccctgcccttccctctcccctagaaaagaggggggccgtctcacccccgagccccctcggagacaccccctcccaaaagccatgtccatccaacccttcccctccaaacctagcacaaaacggggttcacaagccatggtcggggcccggggggagaacatggattttcttggcaataagcggactctgggactccggctcccctaccccaaactaaagcgcttccgtgaacaaccccatcctcccgcaggaggaggggaacaggcgggatcctgggtccctcgtaagcactttggttttaccgcctgcaacctcactgtgcccgccccgcaccatgccccagccccgggtccag

SEQ ID NO: 23739 - DNA, 1147 bp, Mus musculus
tgcctctcatttggcagaaagttcctggagctctggctgagttgactttaatgtgatttccttatgacctcgtttccctcttcaacatacttactcaccattttcatctgatagtctgatcctccaagttgggcaggtagggctgctgggtttgtctagaggccctgcccttaccctcttcttacccccttccccacttacttttctctggcccagtgggagaggatatgccccaactcataggacacactcaagatttgtatggtattagagttctccagcccaccctactgggatggatagtgggtgtacctctgctacccaaggatatatggctgcagctgagatgttcaggtagagaagtctgtatgtatacaaaacctctcaaatggggtggaaagaaaaggggtgcttgactaaaaccgaattattcttttgttttgttaggaatagaactctgataagtataagagttaaaaagtattttgtactcatttgtgtgtatatatgtccaaacagtagtgcatgtgtgctctgaggacaacttgcaggagctgattctccttctaccacgcgggtcctagagatcaaactcaggtcttcaggcttagtagcaagtgtctttaccagctgagttagctctctggcccaagtctaaacattctttttcttttttctttttaattaattaattttttattttattttacatgcattggtgttttgcctgcatgtatgtctgtgtgagagtgtcagaccttggagttacagatggttgtgagctgccttgtgggtactgagaattgaacctaggttctctggaagaaaatccagtgctcctaactgtggttccatttttccagccccagtccaagtattcttagctaagtcttagacttcaatgaatatacagaggtatattttaaaactatgacaaaatagatttatttatttagagagaggttctcatgtgtcctgggctggtcttgaacttgatatataatcatggatgactttgatttttctggttctcctgcctctacctctacagtgctattattccaggcatatatcaccatacccagtttattttaaaatttactttaatgtggtacatgggcttagaaatatagacacaggcattcct

SEQ ID NO: 23740 - DNA, 1184 bp, Mus musculus
ggtgactccagcttcagctctgacaggcatgggcctctccgaccttcatcactattctaggataatgttggcgggcagagatgatcaatcatcatattaaaccataatgagcttataatcctcccgctggagctgctattgtctcctgcacattcattaggacgattatctcctctccttcttttccaaatgtgttcagcaaatgtccagcctgctccttctgcaacagagcagcacaggcacccacttctctttcaagggctcttggtccatcttgccttaactccattccccactgtggcaaggggaaagtgtcctcccgaggtatcatggccagcgtactctcctatctactgtgggtaaaaagtgtatcttccctgttcttaccgtgcctgcttttccttgtgtgtctccacagcccagatcagaggggcaatccagatcacctgacagccaagtaaaacagactcacatgggttttccctcctacaccattaaggggggcggttttctacctcctaatgggtgggactaacttaacccctaatccccttgtcagtctgagtacagctgttgctccaggcagggacttctcttgtagatcttaaatttcacatacctcattaggtcagagggccaagagtagggatccttgagggaatacaggctgtttcaacttagcccttttctgcactaattagaatttcaagtgtcacagagcctttagatagcactaactgggtttagtaactttgtggcagaaagcagttaaccccgtccttcattcacacagtcattgccagggaggctggagtaacagatcagatgtgtcacaggtcctgagtagttggaatgggaaaatataattagccagttgattaattagggtcgtgcccatgcttccattatgaaaaggaagcaattgttgttggctttcagcaaaaccatccagctttcattaaaccaacttgatagctgttttgggattgtgcgtggatgtttgctttttatttcttcagacctggggttagccgatacttccttcacttgacacacataatcaacaaacatttttgttagtaacaactgtctgctctttaggatagatgcaacagagactctagcttcatgcttcagctaattgtccttccttcctatgaagaggacattatatgcaaaggggt

SEQ ID NO: 23741 - DNA, 1156 bp, Mus musculus
acgctgggtctagcaggctccaggaaggaaaacgactgcaaggagacaggcctggagcctactgggaaactgacttcactgaggtgaaaccggctaggtatggaaataaatatctcctagtttttatagacaccttctcgggatgggtcaaagcattccccaccaagaaagaaacggctaatgtggtagtcaagaagatacttgaagaaatccttccccgctttgggatacctaaggtaatagggtcagacaacagacctgccttcgtctcccaggtaagtcagggattggccagacaactggggacaaattggaaattacattgtgcatacagaccccagagtttaggacaggtagaaaggatgaacagaacgctaaaggagactctgactaaaatagccttagaatccggcggaagcgaatggacagccgttctcccttatgccttgttcagggttcggaatacacctggaccccttggcctaactccatttgaattaatgtatggggcgccccccacccatttttatgaccataggagataagaatcgcccggatgtgtctttctctccttcttctagtctttggctcaattaaaagctctcgaaatagtaagaaaagaggtctgggaacagctaaaagaaacctatgttgctggtgacacacaggtactgcaccagtttgaaataggagatgcagtcctggtgaaaagacaccgagcaggaaacctagaacagaggtggaagggaccctacttggtgctactgacaacgcccactgcggtcaaagtggaaggaatccccacttgggtccacgcatcccacgtcaagagagcaccccctggagtcagccatgatgagtggactttggagaaaactactaacccttttaagttgtgcctacttcgtatgagccatcccaaaggacttcaacccccacagtcctgttcaacaaatgtgggaggtactcaatgagggggggtagggctgtatggacaatcgccaaggtacaccctctgtggacttggtggcctgatcttttccctgatatctgtaagttggctataggagcccctcctggatgggacttggaagggtactctgacattcagagggcacctttaacaccccttccatatgtagaaaaacattcgaga

SEQ ID NO: 23742 - DNA, 1251 bp, Mus musculus
aagagaagagattgagcagattgaaaataagagacggttgaaagtgaattgaactggctgactgagaagactgtgggtggcagctgagccagaagaagctgagctgagccagaaaagatgatggttaggagacagaaaaaagaggaggatcacaaacagtttataggaagaagaggccccatcccctgctggtctacacggatttcttggctgttaacttcccacagactctccaggacgggcgcctctctcatttgggatatctttctttttaatctactgttttcattttgtgaaattagcctttgggtgtttcgagaatggctttatgaactaaagccatctgctaatattgtgtttcttgtcttttcctccaacgtttttacgagccgtcgaagatggggtacttctcatccagtgtggttttgcttgtggccatttccagtgtgtttgaatttggacccgttgctgggagagaccttgccatcagagataacagcatttgggaccagaaagaacctgccgtacgcgatcggtctttccagttcgtgccttccgtggggatacagaacagtaagtcgcttaataaaacttgctgtctgaatggagggacttgcatcctggggtccttctgtgcctgccctccttccttctatggacgcaactgtgaacatgatgctcgcaaagagcactgtgggtctatcctccatggcacctggctgcccaagaagtgttccctgtgcagatgctggcacggccagctccactgtcttcctcagacctttctacctggctgtgatggtcacgtgatggaccaggacctcaaagcatccaggactctgtgtcaaacgccgtctgtgatgaccacttttatgctagctggcgcctgcctttttctagatatgaaagtttaggtgtcatgtgaattccatgccagtgccatagcaaagatgtcatttatcttgatgctcacagtgaatccctaatgttacccctcaaaacactaactaggccttagctctgcatggcccctcctctttctggatgttctggctgtaaaaactatggcgtgtgtgccaagcactgtaacaccgagttacattcctagcctaaaagctactctaagaatgtgctgtctgccatagcctgagtttctttttttggtttttcgagacagggtttctctgtgtagccctggctgtcctggaactcactttgtagaccaggctggcctcgaactcagaaatccgc

SEQ ID NO: 23743 - DNA, 1515 bp, Mus musculus
gcgttaccctgtactggggcatataaagtttgcaagtccaatgggcctctctttccagtgatggccgactaggccatcttttgatacatatgcagctagagtcaagagctccgggatactggttagttcattatgttgttccgcctatagggttacagatccctttagctccttgggtactttctctagctcctccattgggagccctgtgatccatccattagctgactgtgagcatccacttctgtgtttgctaggccccggcatagtctcaggcctgtgtttcttgatagaagtaactctcttacttttcttcctaagacttttaaaccgttctgaaggttattaagtcccaatgtgcaactggaagaaaattcagagtggatgaaaacagctaaattatctttaagcagggaggtggtggtgtctaccttaaatcaggcaaaggcaggcatatttctgagttccaggacagacagacctatacagagaaaccctgtctcagggagaaaaaagagagagagagaagaaaaactattatcttaaaagaaaattaatggaccaggcattgtggcagatggctttaatcccagccctcaggaggtagggataggaggatctcagagttcaaggccagcctagtctatgtagtgaacccctgtctcaaaaaggaaaaagcatcctgcgagggagttgaggaagtaatgagggtctgtgcagagggagcagcagaaaagtgactaagactggggaaacagaatggattatttgattgatgtttacaaaggtgctgggaatttaaaagctaagttctttagccaagcacagtggtgcacactattaaggtcagctctcaggaggctacaacaggatgactactgagagctcgtgtccaacctgggctatgtactgagtaccaggtcaacaaagactgaatggcaagaccctcacagaaaactcaaacacctgagtctcttctgcaaaagtatgaaggctttcttcaagctatacagttgtggaagaaagaaagtgtttattattgtagtagtaaaccagattataaaaaccacgtattgtcaagtcagtttttataatatattgttcatgaatatgcacagtaaaaatgggaactatggtgaaaaaaaaaaaaagaagagtccacaagtagccaaaagaaagaaaggaagaaagagaaaccatgagactgcacacacaaccctacacttcctacatttaacaatcatgtgcacactgtactttccacctttcttccttaatctccacggcttcccgctaacccacaaactgtatcaagaaagaggaagcatagcttcagcaagcagttaacatctaacccagcacagcataaccaagtgacctaggtccacagcaactgtacttacaatatagacaggtgataggctacatatccaggagactttccttatcgacacctagcacctccccacatcctagtcaggagatctaattcctctaattcccagtgctaattgt

SEQ ID NO: 23744 - DNA, 1115 bp, Mus musculus
ttgccccctcctagaggccactgtttcagctgatccacagttgagactgtatgccctgtatgtcaaggtcagatttggctggtttctccacatttaggatgtaaagcatcattctgtcagggagttgggcgtcttaatggctttcagggctcttcagccctctgtcagagatgctttgaattgtatagaaaggtagtctcgagttttcacctaaccctgggatatagtggttgatagacagcagtaagagcattagcttcctactcttgcttctcaagggaggaactgctatggtgcctcatgggctctaatgtttgggtgaaggctgaagagttgaaggacagggagtaaaactggaaaagagcccccttactcatgagagttggcaccaaaagaaatgagaaaatggctgatagaaaggttggaagttgttaccttttttatttgtttttgcctctaaagaaataccaaagaagttgagtttatgcttcgggtcctgctgtacatctttttgttttgtttttcaggacagggtttttctgtggagctctagctgtcctgggcctggctctgtagaccaggctagcctcaactcaagacatctgcctgcctctgccttgagttgctgggattaaaagtgtgcgccaccactgcccagccttgctgtacatcttaacatggaattcacaatttacctctcagtgtttgtggttttctgcattctccagactttgaaagaccactcacaaaagattagggaaaaagaggacttttacaaaaactattactacatgtgcgagtagttaaatagcctttgatattggtattggtgattggtatgcagaaaaaatgaaaaactgttatgtcagttactgtgaaatatttttagttatttccttatcgtgtgcttgttcctaaaaacattggttgtatgttattttcaagctgttctgcctctaagacgttgaagaaaaagctgtggtgtttgggctacctttattgtgatggccttcttatcctcctaataatattgccaagtagggtagattccacacgattgctcttaacccttggtattagcaaatcatataggtgctaataacgaatattggata

SEQ ID NO: 23745 - DNA, 1176 bp, Mus musculus
gctaacctgacctgaatttgtgattgcacaaagataacctcttacacaccgtagccccacaatccatctgagactgggcttgggcccaagctaagcctggatctcggggcctctcattcacctcaccccctcctaccgaaagctccggcccccccagcgtctgtgtgttcccgccatccgtgatcgactccagagtggtccggtctctgctttcggaatcaccgtgtccctcagggaccattctactgctccgactgaacatatcaacaggcggggcactcaccaccgagacccagccagaggaaccggaaacggctgcttgtagaagctcaggaatagcctctcagttgccaggtgcgattcaggtcctcgggaagctgctcaattggtccattaaggagggaccgccgcctcgggagtacgctggccaatcaggatgcaggatggatggggggggtcgcttccggcggtttccctgcagctactgcgtggggagcatgggagcgtgggagtgttgtggtggcctccgcctcctttgtcgcgtctcggctgggcgtggcttcacgctgcttctgccgggttgggcgaggttgtcggtactccggggctggtgagtgtggctgtttcagagctgttttggagaaagaagccgtcagctcagattctcaaaggagcttgagggcgaagtggaaaggcctggcagcggagttggagactctccactcgaagtgttgtccaaacgtggggacttaaggagcccttcctttccccagatggcgtccacgctccccacatcggatgagcaggtgaattgtgtcgctattttcctacaggtgtcctgacctggcggcagttagacgcgcaggtcctgaggcgcctcctcagatagccctttgaccaagctgtcttacgtttcttggcttaccgacttcctcatttcagaatcatcaggtggaggagagccctagcaggggtctataacaatttctcaaagttatcttgctgaaatgcgtctccaaatggcagattcctgggcttcacacctgttgaataatgataattaaaacccaggtgaattttacaccaaaagctctatgggtttacaggaacagtaaacttaggagagaactagagctttaggtggtggtggtcgtgatgtgtgtgtgtgtgtgtgta

SEQ ID NO: 23746 - DNA, 2015 bp, Mus musculus
ccagactggcctcgaacttagaaatccacctgcctctgcctccttgagtgctgggattaaaggcgtgtgccaccacacccggcatgagacagagtttcttgtggaacttgcagctcattgatttaactggaccaactagtgagcctcagagatcctcttgtctctgtctccccaactgcaaaccaggttttttgtacgggttcatgtttgtatagcaatcatttttccaaccaagcaatctctccagcccctgagtggctttttttctttttaatgtttttaagtatcttgagaatttgagggcattggatcctctagtactagaggagcaggcagttgtgccatgtatatgcagagaatttgacccatgtcctttggaaagagcaacaaatggtcgtaaccagtgagctacctcccaaggccctgaacaaagttttttctttttcctttcttgttttttgttaaaatgatggatttacatgatttgaatattggaaagttacaggaagatcaagtaactcctactcggggctccagttactcagcttcactttacaagaggcaccaagtgatctgtggtccatgcctgccactctgacaccagtactgtcaccagtgcatctctatgtggcattctccaaagtcctacatggactttccatgctgacaacttttacaggaagataagattctgctttgatgcaacaattttgattgctgagagctgggatcccaggccgagagaacagagaattgcagatctggaagagacttggatgctgcagcatccacatagaggcttgatacacatccagatgtgaatcttgacagtgtttatatttgtataaagtcccaggagagcttggtagccactgataaaactgggctggagaagacctcatgttttggtataccctggctcagctaaatcccataggccagatagtgaggtaggtaagcatcctaaagtgccttcacatgccatactctcttcccctcaggctctcctttttacctggagtccttgccctgcctccatgccctggcaccacccaatggcctggcaggtgtgtctacattcactgggaaagggcttgccaggcttctctgctcctgctccttcagctccttcctacaagatggactgaattttgctgaaaacgtggacattttgaccctgaagacacaggaaccttagaataaagaggcacagcaaggagaatgtcagtttttgtttaggaatgccctaaagaagtatagatggaagcgttcttactcctccatgaaaggctggaaacggggaagagaaagaggggctggcccttcacaagaatttaaagcttcaggaatcagtcctctgcatagacagttagatggacagttccctgttcccagtgttctgcccacttcttccgtccagaaggaccatcctgcctgttgaatcctggcatgctccacatagcgaccacactgggagctgggccaaggacaggtagctgttggcttctggattccttccatgcttatcctctagaagctgaaacttcaaggcctgggctaatgcagacaggaggtggctgagctctgtgttgacatctttgctactgtggacccatgggacctggccttgggagtagcagctggtgcctgtggtccttcagcctctgcggcagaggcttctgtcagtaccatgaattgtgcttgcagcagacatctcaagtttccagcatcccttcccttgtgccctcaagtgtttgctgtcacagtcctgcccagaattgctgcagtatgacaggagcccttcagggtgtccacagcccctcactgtgccaggctgatgaaaaacagctttattgacaggcctcattactgagtgcttcctccctcagcgtcctccctcagcatctcctggctcagggctctcaggctgtagagccagccaaaggctgcctggcctcagagggggaagggtccccacaaaggaatagcaaggcagtaaagtatccccctccctc

SEQ ID NO: 23747 - DNA, 1188 bp, Mus musculus
tttttgttgttgttttgcggcagggtctccctctgggttccagggtagtatgaatattttggaagtcccaagtctcagcttccaaagtcccggagttacaaatgtgagcttcaacccccagcttgtggttataagcaggtggagttttgttgtgtgtttggctcaggctttcctagacattgaggaaattcttttgcctaaactcagttttgaactagacctggcatctccattaatcttttgtttttccagacagccctaactgtcctggaacagtttctgtaggccaggctggccttggatttaggtatcccctgcctctggcccctgagtgctgggattaaaggcgtgcgccaccctgccctgcatgccctacccccaccccaagcatttttaagaggatatacatacaatgtatgatcttttgcaactgacttcttagtacaagatttcaagattcacctctttccttctttattatatctaaatactgtatccattcatccattagtaggcaattgggttgggttgtggtaattaatcctgttttgtgtggacataaatttcacttctgatacaattaggtccaggattgagggtcatgctgtaactgtggttaacattttgaggaactaccacactttccccacaagatactgcttcatattaggtccctaccaagacgtgtgtgaggtgaaagttccagtccccccaccacctcctgccaacacatttcatgtttccggtctcgtggctatgaagtgttactgtagtgtgtttgatacctgacggctcctgctgagtgccttttatatatcttttatgtagtttagtggccatttggagaaatgcttgccctgtcctttgtttatttataattatattgtttttttctttcatttacttattgtgtgtgcgcatgtgcatatgccacagtgtacatgcagaggtcaggagacagcagtgggcgttggttctttcctttccctgtgtggttcccaggaactgaactgaagttatcagccttgggggttggcaccactgctcactcacctacatctccctagcttacactgtctctattgttgaggtaggaaattgagatgagtatgctagcttgagcatactctgggctgccagttgtctccgctgtcactacatgccaggataggagcctgctcactggca

SEQ ID NO: 23748 - DNA, 1202 bp, Mus musculus
gtcctcatttaaaatgcaaagtccaggcttagccgaccctgcatagatcctaaattctgtctgagatagagccttggaacctgcatcctgcatacaaactacatacaactgctagatgtaagttgatattcacctaaatgggcgactgattccaggggacccttctgataactggccctcctgtacacttgagggcatcaggtagacctgagctataacagaagctgccaacacagtttcccaggctgctcctggttgtgagcttagccctgtcctagctgtgcatgtgtaggatggtttgggagattatgtgtcggtgacaataaccacccagtcactagctattcaacttctttcaggaaccccagctaccattggagctgcccaagcaaggagagccgagtccacggcggccacctgcttcccagagcagccttcctgtgagccacagccccaagatccggctgctgtcctccagccagagggagcgtcaagcccttcaggaccttgtggacttggcagtggaagggctgagctctagcccacagcccgggagtcggggcgtacccacaggtgggacactgggcaggttgttgggcctgccccgtggaatctgaggccagtgacactagagcatggtccgctgggaggctctgctctccgttcagtggagagtgtgctaaggcacttttatactttgcctcagggatgaagatgatgcagaacatttgagtcttaacgatttcacattcctaaagttagcccaggacagagcttcctaggctaatctggctgttttataatcctcctacttccctgtgatggagatgggtaaaaacaattgggggagagttgctttaagtaaagatgtccttaaataacatgtgtacagccaaacctaggttcatcctgcctgcttgggagatgatatccttttgatctacaaatccttctcttagggttggacctggtacctagcagccttccgctgacggggtttgtccttccatgtaagaagaccctgaagaaggatgacagtgcctcagtaagtacaaaggctgctgggccacagtgacttggtggctctgccctggctctgtggtgtttgtcagatgtatactttgacacacgtgatggagctgagagccccaggacgtctgtctcttttcttgggtcattgccacaacgtcttctgccattgc

SEQ ID NO: 23749 - DNA, 1141 bp, Mus musculus
tctaataaattgtaattctgttttgggggcatataagactagtttgaggtcccctgttgggtatgggttggggaggctgccctatcctctccagagcacttatggattccagcagagccaacacgggaggagttgtgtccattcttctcacccctggggctcatcatccatgcggccagggaggtgctaccctcggtccttccttccttcccttatctggtgggctcagctggtgccacccggtcatatgctttcatttctcccagaaaccatccatgtttgatgtgagcagggagctgggctccagcgtggcactgtatagccgcaaggtcctcatccagaccaaggctgcagacatcctgcccaagtggctgcgcttcattcgaggtactgctgctgacacccaggctctgcactgtggacggtgacccaggattccaagtggcatggccatgtgtcctcatgctgcccactgcatttgcttccgctgtgtcctagaccctcctcacccagcaggacaggcaaggagttctttcagggttggaagtttggcctgagctgtgctgggcctgagttatagttgagtaaggagtgtaagcagcatttactttcatagcacaaggaccagccctctccaagacaagcttatgactttctccttttcttttgagacaaggtcttctacacagcccaggcctcggtctccgagatctgggattacatagtagcttagttagtactttggagttgaatgctgggatgtgtttggtgtgtgccagtcttgccctgagagggttttaccctgggactgctgtactgcccactgcccctgagcaggactgaggagcagcgccccctgctcttcctgctcctcctttaccacccatggaggtttccgttggtgcaggggttctaatgttcctgtcttctcaggtgtggtggatagtgaggacattcccctgaacctcagcagagagctcctgcaggagagtgcgctcatccggtaagcccagactgcaaatagcagggcactcctgtggtggctggccttgacttgattctgccccgggtgtgcttttcagaagccaagaccaaagggtgaagagagacctgagggcaggatccctccctgaccttctag

SEQ ID NO: 23750 - DNA, 1097 bp, Mus musculus
gatgagctactctccccttcgaaggtctctgtcctatcaccatcccctgggagagtaggagctagcagaagagcagtggtgcagaactcagagcagaggcttgctgcaggagagaggactgatggccccatggaagagttgcagctgctccagcgggctgctggacccaacagttgtgaccactgcctccattgttttgaatagaagaacccccagaggatggatcagagccaggcaggcgtgtggccagggtgtactgctcatgagagttgcatgatcagctgccaacttgttgactcagcacctttccgaaattggttggttttatggtttggggctgaggatggaacccacaaatgagttaaactgcactctagccctgaggtgttttcagtggtaagtcctccaaccaacccttcaggtcttctctggtgttgtggactgacaggactggactctccaatgagcttgtggtgtactttgaaccctagccatgagcacagagggaagacattgggattcctggtcctgtccatgtgctttggcctagctacacagggtctgtgtgtgacaatatctctttcttcaggacactggcattgggatgacacaggaggagctggtgtccaaccttggcacaattgccagatcggggtcaaaggtaggtacagcccagaacccctcctcccttctaggataggcactgtgggaccatagagaggtgtctgctagcagtcttgtgctgtacagaggtggaagtcactttgctcagagctgtagtgtagtgaacagacgagttgaagcctgcctgtccaaatccaggaggattcatccattcacccttcaagttaggcctcacccacccacccactcagcagaggcggccacttttcccaagcagcatttgatcttgagccactctgcctacaggtgcagtgggtttgaggacagccagctattaggggccattttattgtcagaatatatgctgggaagacaagatgtctgtcttgggatcctaagcagggtccattctggcctaaggcagaggccagaggtgtgcactgcctcctggttcctgtgtgctttttctgttt

SEQ ID NO: 23751 - DNA, 1227 bp, Mus musculus
tgtagaccaggttggccttgaattcagaaatccacctgcctctgcctcccaagtgctgggattaaagatgtgcgccaccactgcccagctctttcacaggtttcttaaagtctcagttcacatgtaagtccaggcttcactgaccatcctgaaaggaaaggttagctccagagtatttgttgaagagataccaccgaccatgggagacagggtattgtgtcattaggtcatcagctgccgccattacagactcggcagtcaggtctcagtcagtgccattcgttcatctccctacctcttgctcctattccctaggtgttcatacgagagctcatctccaatgccagtgatgccttggagaaactgcggcacaagctggtgtgtgaaggccaggtgctgccagaaatggagattcaccttcagacggatgccaagaagggcactattaccattcaggtacttctgtcctgacagtacccagctctttgtcaagaaacagccggggtgaccagacatggggaggactgcattctagttctggctggactccagtgatagctgactgtttccttcctgttctgagcactcttgcggtcactcactaacccaccttaggatcttagagtcccaggcagaagggaagggaatttagagttactcaaaaggctatggctttggtctctcaagagtgagaactgtggcagtcctggggatttaacccagggcctgtgatgtgctaaacaggccctctgtcactgagttggatctacccttgccttaagaaagtcaagtttaccacttctttctctgtttttaaaagatttatttatgtgtgtgtgtgtgtgtgtgtgtgtgtgtgtgtacacgcatgcatacatgctcatggcaacatgcaatcaagtgctcctttagctcttccattaatgcctgtgatactttcaagtgaattgtgtgtgtggtgtgaagtcttaaggatcccatcccatcgcatcatcttggaaccgtggtcagaaatgtactagctgttgtgtgcatggaccctttgtgttctgtcagctgtatccctgcccttaggtgcctagaacatgctgcctttgctagtgcagctttataaataatctcaaatagccagtgtacgttctccaactagttcttttgaaaagcatcccaggttctctccctttctgtcagtttgtcatgtcatatgaaacttgggacatttccatt

SEQ ID NO: 23752 - DNA, 3060 bp, Mus musculus
tttttgtttttgtttttcttttttttgttgttgttttgggtttttgttttgtttgtttttttgttttgttttgtttttctcctccccctcccctttcatgtttttggactttttgtactgaaaattcaggcatttgggctctttttattaagcctagatgggactgtgactcccaagtgtggaagggcagactgatgtttaaagaaacaatacaaagaatatatttttttgttaaaaaccagttggtttaaatatctggtgtctctctctctcagctttttttttctctctctctctctctctcttttttatttttatttttttctgttttgttttgggggtggggggttgtttggactttttgtcgtcattgctggtgactcatgcctttttttaacgggaaaaacaagttcattatattcatattttttatttgtattttcaagacttaaacatttatgtttaaaagtgagaagaaaaataatactcagaaactggttccagaaataatgcatcttataatgtgtcccgataacgagctgatgttgcgggaagatttttttctatagtgaactctgtgggcatctccaagtattacccctggatgataggaattgactccggcgtgcacacatgtacacacccacacacatctatctatacatgctggcttaagccaacctcttgtcttgcagatgtagaaattgttgctttgtttctctgataaaactggttttagacaaaaatagggatgatcactctcttagaccatgctaatgttaatagagaagaagcattcttttctttcttctatgtgaaacttgaaatgaggaaaagcaattctagtgtaaatcatgcaagcgctataattactataaataagaaaattcaagaagattcaatcactgtatagaatggtaacgtaccaactcatttcttatatcatattgttaaataaactgtgtgcaacagacaaaaagggtggtccttcttgaattcatgtacatggtattaacacttagtgttcggggtttttttttttttgttatgaaaatgctgttttcaacattgtatttggactatgcatgtgtttttttccccattgtatataaagtatcgcttaaaattgatataaattactgaagtttttaacatgtattctgttctttaagatccctgtaagaatgtttaaggtttttatttatttatatatatttttggagtctgttctttgtaagacatggttctgattgtttgctcagagtggagagattggggctacagtcatagctgcagtgcaagtggcagctgagcactgtcccagactgtggccactgagggaggaaaggggagctccttgcacagacagtgaggggcagctcaggaccaccttgcatatttagtactcacaggtgaatgtcacccatgccaggaaggactatcaccactgggtcagaaacagctctttgcctccagcccactcttcctgtcctcctctttgttggtcagctgcccctgtggggagggctcctgcctttttttttcagaccccccttctctacccagatcccacaatcaatgcaaagggtgctccagggacttgaggtggttcctgacctcccctccccaaaagttcagcctgccccatgtggcctcattagggccttgcaggcctggtgccaccctgggggctgctacttgatggtcttacccactcatggagtcatggagttacaggtaccttcctgagcaggggatggtagctcctgaatactgtaaatgtcactctcagaggaggaccactgacgggggactgttacccctagtctgctgctcccagggaatttttttttttaaatacctgtcttccaacaaaagagtggtctagatgggggtggggggctgctaaatttagaaatcatgacccaaatagccttccttttggccttttaagttcacaaaagtattttcaaaattcccagtgcttggaagtctaaacttgaagctattcgagattagagttttcaatgtagaattttgaatcttgaaatttaatgctgtggataagaccaggtaaggaatagaccatcctctaacatccccaactaagccctgtcccaagtcctccagaggtgatgctcgtctttgctcaacttgatgggtccttgcacattttggctctcttcagaattccctttgctgccaattgggaagtcccaagccatgtgttcaaacaagaagaggaactggagcctcagaggagctgctctcagccccactcaggaggtggcacttgacaatgtgtagccttttaatgtgggcactggggacatccttttcaggctatcctgaaattcaaagctttgtaccaacctccttggactctgcatcctatgcaattgtccatttggatgtcaaaggatgtggctgagagtgggctgtggatattatccctattttgtcctaaggaaatttctgtaagagctggagtgcccagacactgtgtctcatgctgtatacttaagaggaaaagaaaaaagtcctatatttgtgatcaaaaagagggaacttgaaatgtgctggtgtttataataaaagctggtaaaactgcttggattcaaagatggttccgattggctaatggtccccttagccttagctcaactaccagtcagtgactgaagatcctagtatacttaaattcatttgaggctctaagaaacactagcatttaggaactgaatattacattcacagataacatgctgttttcctacattgttggagtgcaaagatgttttggtttctattaaatggggctagcatggtgtggtagcccacacctttcatcagagaagagccagaggcaggtgggtttaaggccttcctgatgtacataggaaatgtcagagttacatagggagagaattatcttatggggaagtggtaaggatgggttttgaatcaactagattgttgatgcatgacaaaataagctggtatttaaaaacgaaaggggatatacacttctaattaagctgattgtgtgttggtggccac

SEQ ID NO: 23753 - DNA, 1153 bp, Mus musculus
ctgcctcccgagtgctgggattaaaggcgtgcgccaccacgctcaactgattttttttttttttttaaaacaaagagttggtccttttctcattattgtttaatgtttcctctttctgaatttgaaaaaaaaatttttttcttgttttacctccctaaatagtgtttcattactggtttaatactactcttaagacatgctagtagtctgtgtgaaatgtttccttaggttaagattataacaacatgacagttggagagctgttacgttttcttagattctcatttccatttctgcttaatttctagattttggatcattgtttgacttggaaaatgaccttcctgatgagctgatccccaatggagaattaagccttttaaacagtgggaaccttgttccagatgctgcgtccaaacataaacaactgtcagagcttcttagaggaggcagcggctctagcatcaacccagggataggcaatgtgagtgccagcagccctgtgcaacagggccttggtggccaggctcaggggcagccgaacagtacaaacatggccagcttaggtgccatgggcaagagccctctgaaccaaggagactcatcaacacccaacctgcccaaacaggcagccagcacctctgggcccactccccctgcctcccaagcactgaatccacaagcacaaaagcaagtagggctggtgaccagtagtcctgccacatcacagactggacctgggatctgcatgaatgctaacttcaaccagacccacccaggccttctcaatagtaactctggccatagcttaatgaatcaggctcaacaagggcaagctcaagtcatgaatggatctcttggggctgctggaagaggaaggggagctggaatgccctaccctgctccagccatgcagggggccacaagcagtgtgctggcggagaccttgacacaggtttccccacaaatggctggccatgctggactaaatacagcacaggcaggaggcatgaccaaggtaagtgagctgaagtgcttgaatgtttcttgaatgatgatgggcatttactttcaagacacagggcagcatgggtctatgtggcttcttattttcccttctcttgaaagtttcacatgtccatgaaagaaacag

SEQ ID NO: 23754 - DNA, 1150 bp, Mus musculus
tgtatgtgatattaggcctctattggatgtgtaattgtagaaatctttcccattctgtaggctgccagtttgtctggatgacaatgtcttttgccatacaggagcttttcaattttatgaggtcttatttattaattgttgaacttgatgtctattctaatggtgttctgttcagaaagtctttcctgcaccattgagttcaaggctattccccactttctcttctatcaggttcagtgtatctggttttatgttgaggtctctgatccatttggagttgagttttgtgcaggatgatagagatggagttatgtgggtttttgtacatgtagccatccagtttgactagcaccttttattatagatgctgtctttttcccccagtgcttatttctgatgactttataaaaaagcaggtgtctattggtatgtggattaatgtttggaccttcaatttgactccattgatcacatttctgtatttctgtcagtaccatgctgtttttattactgtattgtgctgtagtacaatttgaagttgggggtagccctcacccaattgcttcttggaggatatctgtcagacctgctctgtcctgtgctttaacatcatttaaaaagatcatgccttcctattagtctcaagcttagccttaagagaacagctcgtacttttatgctgaaatgtgtaccactgctttgatagtcgcggagcttttgcatagtctactttccctgagtagtcctctgagacagagtcctgcgtgggttttccttagcttgctgatgagcttcgaccttcttgaatgggtctgacccaggatacttcatacacagtcagaatgggatgtggaaggcttggaagtaagcaaagtgccctcgctcttttaatttctaggcagtttaatgaaggactgtagttgtcctagaagaactattgggatcttttctggttcccttagatagcaagactatttttgagttctgtgtctaaaagttgaattcctattaaacttactgttaggaaatacattatctctagtgacatttccccactattaagaatacttgaatattatctatagtgacccccccccatgttttgtttctattaatcaaagagaatgtttagttgaagcattgctaagag

SEQ ID NO: 23755 - DNA, 1199 bp, Mus musculus
ggctatagaagggagcagggctggaagcaagccccctcctggcatctctagggtacctgggcccacattcctgtggcccacaaatgggcttctccgcctccaacactgggcagtttcaggggctcatctgcacgcaggccaagatttcatatgctcaccagacacaaagcttacaaaccaggcctcaggaatctcaaagccgtgttttcatcccgaccccacacagaagggtcttccagccaagagtgaagatgtttgtctcagaagctgacccatttgagggagatgtttaaccatctgaggatgcatttatttatttatttatttatttatcaaaacatgtgtattatggggagggggcactgggtagttttggtggagggaagcagtcagggagtgggcagggcagtttgcaaaggacacagccgaccaatgacaagatgtccctctatgtttcatgtctcatccactgtggcccatggtgccacccagggtgctgttccctcttgtggggatccagagtaaaactggctcggcgccaggtgggattctgcaaaccttttgtccgttccacccactgttggactgcacgggctggcttgtggtgggatttaattctgttggtcaattcaaactcttgaagggggtttcttacggggcaccgagggacagagccatctgttttgccaaaggaaatgcagacagcctgtcacagatgaaatttgagttcctggctgctaaccttgcttgtaattaaattgtgttcttccatgatgaatctcaagttgatgctggaaggagctcaagctacagctgccccgccaccatcatttttccaggtcatgctgatgtgtagctcatgagacaactgaagaccatctctgtgcctattggaggtcttcatgccatgccctgtgtgtggtgtgttctttcactggtaaacttcactgtatagctttcacatctgagttaagcccggttttcactcctccctgaagatggacagaacctgcttatgctagcaaggtgacatcttagctttagtcagctacttccccagagacacctgggatggccacccatgcagcaaagccatgccaggacccagagtattcttagtgactggaagatttcctgtcccagttggctccctgttggtcttccaactagaagaacagataagttgtgacaatacctct

SEQ ID NO: 23756 - DNA, 1178 bp, Mus musculus
agtgagtagtgactgctttctgaacagtctgtaagaatagtgagctatggagagctcagagtgctggattctagtgctcacaggttccagatgtccagaaattctcagaatacaccccaaatttccaaatatatcttcaccactcactatgatgtagacacatatacatgcacatgccataaacacacacatcttctccccccccgccccccatcatttgggaaccaggtttcagccagcaccccttaatattcctaagtatttcttaaaaacaagcattctttccatacgtccaacaagcatccaccttccctagtcaggaaggcaacattgccatcgtgcagtacctaagcctcaggcccctgcatactgtgccagttgctgttttgagaaatgtccatcagagccgatccatgctcccagttgtcacagctctttagcttcttccttcatctttgtcctttcatgacttggacattttggaagacaactggctagttattttgtgcgacagccattagtttaggtttgctcatgactagatttaggatgtgcagagaagaatgctgcagagaggcgatgtgaatccagccctgctgatgtagtgtttgttatttctagatctgtcatgtttcattacttggggcagaattgatgagtttttttccatcataaaattaattggttatcatttacaatttggttaaaaagtagtactctataagggaaacaaacatttgtaactgttagaattgtgtttctcattaggcctttagctatctttgtttccttggatgcatcagttagtatggtagttaccaaacagtgatgttctaattgcactatctcatctatatttgttagctgtcgttctgctctaagagagtgagtatgcctgcctccctacctccctgtcttcccctccctccctccctctatctgcccccccccccccagtttgtagtcattgggtttatgtaatcctttactatcaacatttgctttcaagctccgactgtcctggtgggagctcgttcatgctgtgtccttttagtgtgtccctgccatccttgaagactcctttactttttgacaaaatactttctgggctcttcatgaatgtttcttcactccagctctggaattggcctttgctgcagtaagccttggtttcctat

SEQ ID NO: 23757 - DNA, 1227 bp, Mus musculus
agggagagagagaatgtgtgttctgagtgtgtgtgtgtgtgtgtgtgtgtgtgtgtgtgtgtgtgtgtattgcagggcagccttaggtactagtccttgctcctatctagtggagaaaatactactacagctttgtacactctacattgtggacactgtagagtgcttagcaagacttagaggacctgcattcaggcctcactacaaaagaaccaaaaccaaaccaaagcaaacagtagcccacctgcagcctctgctcagtgaactccctagccattcctagcaaagccctgtggccttctctgcccttccagtttgttttgtgtaggtgtttgggatatagtctggcatggaacagtatccattactgagctaagtctttaacacagagggggctttggcaggaactagaatgggcaatggaggagagccagtcaggacactgggcctgaggatgtgaacttgagctgacagcctctggcctgctgtgttcctgtggctggaaggcaaggagagcagcttgggctgtggtaggaaagcacaggactaggggtatggaaaaggtgaactgacttcatttattcaggcgagctgcaagctttacatagacgtctcaagaagtatatttatcttgagtaattttgtacttgtggtaactctttgtcatttatgtacataaacccatcattatacactcacttatccccccccccccttgggggaacaaagcttcaggttatttgttttacataatttccaggattttaatgtaatgttgttaaattctgttcagttgctttttccttccaaagcaggaaaaaatgctatacagaaatcagcttttcagtcatttgttttcatatttgatttatttgagaaatagtagcttacttttttttaaaatgtgatctagagaggaagaaaacctatagtcatctgatatatttttttgtatacagattttaaaataacattgtatcacaaaagctctgatttaagtaaatgttgtttatgagtgatccagttaactttacattattaagtgtgactacttgaaagtgcaggtggcactgtattttgtgactctttgtgactgagttcttatctccagaagtgtctaaggtcatctgtgttcctttttgtcatgtcagggcactgcttgatagttggggtgggggctgtgtctgacaggggagcgctgttacagaattatcacagttgtgagat

SEQ ID NO: 23758 - DNA, 1202 bp, Mus musculus
gtgtgtgtgtatgtatatgtgactgtgtatgtgactgtgtgtatatgtgtttataactccatgtatgtatgtgtgtatgtgactgtgtgtatatgtgtttataactgtgtatatatgtgtgtgtgattgtgtgactgcatgtgtgtacctggatggcccacctaggattgagatcgaggaagaggcattcaaagagcaatgccctgtcagctcctggctttgcaggtatgtcttagccttaatctcacaggtattggcaatatttaatgccagttccccctcagtgacgtgacacaaagcttgggctttttctaataaaaagaaattgttctctagaagatcataaaggtgacaaggaggagacaacagaaaggaaagagactagtggcctagaactgtatgcagagaaggtgtgatcagtaggtcttgtcctaagggaaaattctcaggcataaaaagggactttccctgtacctgcttgcaatctggtatgtagtctgtttgtctacactgtgtataggatccacagtgtagaaaagagtgtttatagagtatttcctttgtgccagaaactgggcttcagccctgtaaacaaaacacacatctaacaaagatgggctgatcctcttacctgtgtgtcctgaggctttatatgcgcagggaggtcgctggctggcagagttcagaaagcaaacgtcgtcacactgcttggaatcgattctgggcttgctacaggatggccttgggcaaatgattaaactgcatttcagtctccttactcataaaatggagacactgtcagtctctcccttacaaaattgtggtagggaatcaatgactcggacatggaatgtgcttgacttgacataggacaaaaccaactgacactactcagtaaactttagtcatcatttctatcgttagtcatatctcaccgatgagagtgactgtcagagtggccagaatgaaggcatgtgtaaatgagagagctaaacttctacccagtgcccagctccctgtttggctcaggctgggttatctgttcaggattacattaggttacgctgactctgactccaagcctttttcaaactggagaagatttgattgagtttctaagtggtcattcagtacttcgaatcatttttttttaagtttgtttatgtatttacttggtgtgtgtgtgtgtgtgtttagaggac

SEQ ID NO: 23759 - DNA, 2898 bp, Mus musculus
gacctgaaccaggtgattgagaacaggctagagaacaagatcgcttttattcgacagcatgccatccgagtccgaattcatgcccttttagttgaccgctatctgcagacttacaaggacaaaatgaccttcttcagtgatggggaactggtctttaaggacattgtggaagatcctgataaattctatattttcaagaccatcctggcaaagaccaatgtcagcaagtttgaccttcccaaccgtgaggcttataaggacttctttggcatcaaccccatttccaatttcaaactcctctctcagcagtgctcctacatggggggttgcttcctggagaagattgaacgagccatcacccaggagctccccagccttctgggtagcattgggcttgggaagaatccaggtgctcctaactgtgataaaacaggctgtggtgagaccccaaagaatcgctacaagaagcactagtttctgtgtagctattcttgggtccccactggtgaataagcttgtgtcctaactgtctcagaagtcctggcttgttaaccctttgagccatactggtgacaatcagtctgcattggagatttgggagttcattgaggctggtgaatcagggaaggttctagggaggagagtggtaactgtgaattatagtgtgcttgtcatattgcttcagttagaaggccttgacacaggccaagccagtctacaaggcttcctttgctttttctgggtcctgtcttagagagacagagagcagctaaattctaatgaataataagataacgagggtcaaataagctaaactcagtggaaaattcctgagtaatagagggttctcaggtctgtgtcaactcctcacacatacatcttctgtttgatccctgtccctccttggctccctcctaagcttgggttgattttcagaagtggacagactcttgagtctaatcttcataaattttgagcccaaccttggaatcttctccatgttttcccaaggggtggggcatccagaaaactaaaacatgagttttcaaattaggatgttgatctgccaccccaagtataatttcattgatgtcccagttggagagcttagatacttagttgtccctaaaaggagagtgagcgggtgatgtactcaggtactttccctccttatgtgacttacatgaaggtcctggaagcactcccggggttaattggtttgcggtgtatctttgtatgttgcatgtctttgaaagctcagatcacagaggtgttgggtttcagagaggacaatggagaccttgctcctagtccttggaggcttctctggacagacattctcccaagtttcaggggaagctgtgtccacagcttctttgtgggagcacttgatagaggacatgtctcttctggttcccagaaccatggtttctcttttcctttcttctccattccctgatgcattaatacttccaactgagaaaaagtccctgaatcagaaccagtaccagccttggcattggcactggtgccagataagacctgaggttcaggttcaacctgaacttctgcagatgcccactgaatgcagtcaggacagccaggaccttcaaacaccagtgaatgtgcacttgagggcgtcagacttgagggcacagagagaggactccagagagtcttgcatggcacacatacattgccaccttgaagtgcaggggagtgagaggctctgggaggatgaagagatttttgatggagcgggcaaggtgaagttcagcctgccttgagggctttctctgagcacagccagctgcttttttgggagcaagctctcccgggggccttagttgtgaggcatgggttgggatccgccagcaccagggtgtcatctagaacagaaggaaagtaggttggagagctgagccagtcattcctcctaaggatcaagtaggtagcataagcagtaatcaatggagactacatagagaacttcaatttaggagtttgtgtttctctgaattcctggcagtctggtgccccctcctaagggaggctactgctctggctcaatgtagggcccaggatctgccacaaatcaaaagccccagagctgccaggacaccgtttccaaggagtgagtttctcccgtcacagttattcatggctagggcagatgagctgcaatctgtcttggatttttcttcccaaactcctcccctcttctctctatcatgtgctctctggagagactgtctttcccacccttctccttcatgcccctcatgcctgtgggttttgtgtggcaaatgtttttgcagaaaccagggaaaaggttgaactgtacggaccttgtcctggctgtcagtgcctgcatgcttggaggaaagcagatgacgtaaggccaattaattcttacaggatttgcatttgggggaagacaccttaccagtagtatcctccttttggatttttctccatctatttcttctctgtctccattttgctcctctcctgcccacaggccactgactgtcagtacaggtttttagcacgtatcctttgcccagctctgcagagatggattctgagcaagttctgactatgggcgtttcatcccaggagaagcatgggattcagagatgtctgtgcctgaacagtggctgacctttccagtgttctttccattctggtttcatcagggagaacgtctcaataaagttccaatctctcttcaacgccttggccttcttgattgtctccagccaagtgaatttcttagtttcctttcatcaagtagagtattctctctctctctctctctctctctctctctctctctctctctctctctctctctctctctctctccctccctccctccctccctctctttctctc

SEQ ID NO: 23760 - DNA, 1169 bp, Mus musculus
aagctcgtagtcgtcgacctcaaaggtcagatgtcgtgggttttcctatttgctagattgcagatcagggactatcaactaggattggtttccatttggcctatagtccttcatttgtaggcatttccaggtccttgacctatctgagactttaggtcaaggtagcaaatattctaggaagactcaagttcctaactcctggaccttagcccaagggccatctttagccccttctcccctaccctgaactaaataaccctgggcatgttgggagaggccactactgggctctgcttctctgcttggagcctaggacaacacccacagtagcccttgggggtctgggcttctttcccatcgtgtttgcccagttgccctagtgactgtgtgacccttctcccccgccctccacctcctgccgtgcctgcttgcacccaccatataaatagaggcgaggagcagctgggctctcttggcagtcaccatgaaggcgctgctcctgctctgctgtttcctggcctccctgctgctttcaggacaagcaggtacgccccctgcacaaatggcttccattgggcccctaatgtgcccaagtttttatccgagtggggggctgggctgatggcagaactttgcatctagctcgtataactgcccttctctcaggggcccgggacacagaggatgaggtgctagagagaagtgggagccagtgaggggttctaagaagaaatcagagcaaatggttctgaggtctagaccaggttcagagagaaacatgctggagagaggaccctccggagtcaggcatagaggaatctctgagatggataaaaatacatactcttggagctggaggttgtctgagttaccatcttggtgggagataggacagagactttgttttagctagtgacttaggtctgcatgtccatggacagagtgggacactgcagacaaagctgagaatcattttatgaacagtgggacagagttggaactgggatagggtagaactgaatggaaagctgagaactggtgactgtgttggaagcaactggacagaatgtggaggggaatggaggagagccttccgaggggcagggtctttcctccagaagggggctcagctctgcacaccatggctctcctttggcatctcaacattt

SEQ ID NO: 23761 - DNA, 1099 bp, Mus musculus
tgggattagatgctaattgatctggcatctacagttagagatcaggttggtaatattgaacaatgttttctaataatacccaacaattgttataaatagaagtatttcaactaagaggctcgatttgggtggaaccttggaaggcagcgaatgggtctgggaaaggcgctgagctggagcgaggacattccgaggcaggcgtgggcttcctgagcctggggccaagccctccaggagtctggggagggccgggaccggaaggtgggggcgtgtcagaggacggaagctcacccctaaaacgtcccctcccttgccccagaccaccactccccccccattgtagagcgcgccctctggcggtggagcaagttttatcccgccttccccatgaatgagaagctgcagcccgctgcgcgcgaagtcggaaagtaaggtagtgaaagaggcaagacaggacctggcagccaccaccagacctctaatggatattcggaccgcgctggcagcctgcctcagggccgctgctgttctggcttgcctccgcccttcccttccttcccacttgctctctcttcctatggcagccccaaacatccgaggtaccttgcgcacctgcctgtacccttcgcaatctaatttcctagcaccagtcagagtttgggccaggcagccacctgggtaaagacggagggaggaggctggcgggtggtcagagtcagccccaagttacttgtgggaaacagtggctatgacgcaagtttccagggggcccgggtcggctcgaaagggagcgcgccagagtggctctgctccgctccgtgcagtggcaattatgaaaatgcaaaagcctgaagcacacacccaaaagagccttccctttgctgctgcagccccgcccagcgcgtcctccaggatagcggtgcgcaaagaccccgcactgggcagtcctcaccggaccctggactgcacagactgggatcccgtgcggtggggctggcctttttttttttttttttttttttttttttctttttagctacgcttgccaacctgtcagctgatggacctcatcacccatagtggcgcatgtagctgggcc

SEQ ID NO: 23762 - DNA, 1254 bp, Mus musculus
cactcagtgcaacccatccttataggtgagaagccctacgtctgcccctatgagggctgcaacaagcgttactccaactccagtgaccgcttcaagcacacccgtacccactacgtagacaagccctactactgcaagatgcccggctgtcacaagcgttacacggaccccagttcactgcgcaaacacatcaaggcccatggccactttgtgtcacatgagcagcaggagctcctgcagctgcgcccaccccctaaaccaccactgcccactcctgacagtggctcctatgtcagcggggctcagatcatcatcccgaaccctgctgccctttttggaggccccagtctgcctggcctgccattacctctacctcctggcccccttgacctcagtgctctggcctgtggcaatggtggaggtgggggtgggggtattggccctgggctgccaggctctgttctgcccctcaatctggccaagaacccgctgttgccctcaccctttggggctggtggactaggcctgcctgtggtttctctcctgggtggctctgccggtagcaaggccgagggggagaagggtcgtgggtcagtacctgccagggtcctgggcctggaagatcacaagacgcccctggaaaggacggagcgcagccgctcccggccaagccctgatggactccctttgctcccaggcactgtactggacctgtccacaggcaactcagcagccagcagtccagaggtgttaactcctggctgggtggtcattccaccagggtctgtgctgctcaaaccagctgtggtaaactgaaactgggcaacccatctaccagctgtgacagcccagccacctaccgtgggctcatcccccgacgaacagaaactcttctgcgaaatagcaataatatcctactgccccagggccaagctgcagccccagacaagctgggtggcaaggtggcaaggatggtgctagaaggtctgtgctggcctcctggctccaaagtgaggacttggcttggacctgctgtccaagaagagccattctcttgggtgctaaggcctcaatcacttccatttccctagtctgtagtctgggtgaggcctttgcctgtcctcccaggacgctcagtcctgcctcttgctctggtgcgttcctctctatggccaccctggctgggcagggttccagtcctccctgccttacctacttgtcagctaggagcccccagtgatcatagataggccc

SEQ ID NO: 23763 - DNA, 1436 bp, Mus musculus
tctggtccacctctagagggagagcaagacagacactgctgccttctcctgcctgctgctatgacaaggtgcttctctgcttgcttagcagagaagcctgctctgccagcacttctctttcctgccagagggttggcaatactttccaaagaggaggggtagctgaccactcaaccttctccttggggatgtgcaggcaggtacaagggtcactgtgctgacctggcccggcttggcctggcctgagcagtgttactctgcagaagcttataaggcactagtctacaccacgtgggctctcaagcttgggacacagctacaggtttgggggcaccaagtaatgggatgcagggaagaagactcattggaaaggcgctttctagaaagcactgactgaagcccctgagtgttaagggaggctaggcagccaagcacagcattagcttgggaaaaagctagctagagaaaggcctggccatctggcagggttctttcctgactctagttgaacccttttcttggtgctgcctctcttgcccatgagctctgcccaagccagcgaccccagggcttgtgcaacaaaccaaggacattggaggactgtgtgctccatagctccaaaaggctagctgccccagcttgggcttcttgctgtcccctgtactatgctgcagtggctaagcccctcatgtccccatctgtagaacaagagagctgctgaggtgctagtgggtccttggctctgtggttcctctgagcagttctgtctagtctttttctcagactgcctttctgtttcagaagggtcacccttccctaacctacctgactgctggccttagaaccccagccctgatggggctcggctgtgctggctctccttgatggggctgtgagcaagttaaggagctggtctcctacctttgggtctgcctaggatccaagcaactcctggctctattagggtcctaggccttaagtccctggctgggggatttggtttgagactcaagccaaggagaagaacagagcactggacattagctcagcatgtgactcaagtgatagaccaggctcagaagggctggttacttcctgtcagtttgttgcacattccaggattcagtattttaacaggttctaagtgcctttctcttgtagtgtatggttttcctccttctggctccatggctgttagcatagagtttaaaaaaagagagataagctaatgactataacaatatattcctccatgggagaggaagtttatacagaaacaataaagtgagttgcaaagatggtttctgcacgtgccagggctgggacacctgcttttgttcgtgcctggttgttgacctcccaactagagctcccgaaagccgtctggagctttcacctcagcctaccacaggccaccttcattgtgaaagtgatcc

SEQ ID NO: 23764 - DNA, 1165 bp, Mus musculus
gcctccaggaatgtcagagtcttattgcattccccaggaggagctgggggggggggggagtgggagggggtgttcccaaccttaaagaagaactggccttctgcctttccccagccgcccccaaactgaggtggcctgaagaagcctcctcacacccagggagactggaatgaggaaaagcgggggaggcctgctgcctggacagcaggctgaggggttggggaaagcagccgggctgactctggaatgtggaaactgataaaaggaaggagggctagtcctcccaacgatgccagagcacccctactggcctgctgccgtcacgtgtacacacacaccctctgggccacactcctgcatatgtgtgtgtgtgtgcgcgcgcgtgcgcacgagcgcacacacacacctctcccttttccaaaagcacacacaaattccatagcagtgaggggagctggttttcttggcaacacaagggccttgggttccacagctctgggagaagggggcggggggctctaagggatctaaggtgactggttccttcacataagattaggacctgccagtggtcaagaatgactttaggcacttacccaagagaactgtgctgggggtggttaggtaggaaccacttcctgctgccaaatggagccccactttcctgggactccagttgaacctagccacaaaaatcctggctcttccttagtacttatcctaactaacccaggctggggatatctggaatggcagtgactctgtgtgtgtgtgtgtgtgtgtgtgtgtgtgtggtgtgtgttgtgttgtgtgtgtgtgtgtgttgtgtgtgtgttgtgtgtgtgtgtgtgtgtgtgtgtgtgtgtgtgcatgtacctaagcatgtgcctgactgtctgtctgcctgcctgcctgcatgcatgtctggctatctctcttggccccagggctatctgccagagaggacttgctcaggaaagtataagtcttacagtgtctgagaagcctcttgtactctctcttctcccaccacttccagagagtggtctccaaacactctgccacagtaaccttctgcgtagtgccctctttacccacagatctcaggtggctgttctggtgtgcaactctgaggcttggcaagttggggacaagcagcgtctgt

SEQ ID NO: 23765 - DNA, 1145 bp, Mus musculus
tctgcccagtgtggtggcgcacacctttgatcccagtacttgggaggcagaggcaggcggatttgtgagttcgaggccagcctcgaacagagtaagttacaggacaggcagggctatacagagaaaccctgtcttggaaaaaaaaaaaacaaaaaaacccctcaaaaacaaaagaaaagaactgaacccaaggatgtgcagaggcttaacgaatgccccagcactgatctctaacgtgattgtggtgtttgttgaaacagggtgtcactgtgcagcgccagctctcttcatactcatcctcttgccttagccttctcactggtgggatttcaccaccatgcccgacttctgtagagtgttttgcacttagtaaatcgacagacttgtttgacataagctgtgttgcctgtgtccctgagccttagaagactcagagctctctgactgctgtgttatctttcatcacaggtgttgagcgatgaagtgaagaggaagcagtatgacgcttacggctctgctggctttgaccctggcaccagcagctctgggcagggctactggagaggaggtccctctgttgaccccgaggagttgttcaggaagatctttggggagttctcatcttctccttttggtgatttccagaatgtgtttgatcagcctcaggaagtacgtttcttattctttatttttgtattttttgagagagggtcttacattctagccttggctgtcttagaactcactctgcagaccaggttggccttaaactcacagagatctgcctacctctgcctcccaagtgccaggattaaagacacgtgccatcatacccaatgttctttattttaaaggatcaacttttaggtttaagtgcagcacaagggtcttttttagtttttgtttctcagaaaggcagtggaatgatttaacgtcatccatttgacaggaaggaatacttggaaaatcctttaggtagtgatgaacatgtacattgtgatgtcattatcaatagctgcttactcagtagattgattcatctagagcaggggttctgaaactggattgtgacttcttcgggtggggcttgaatatgagatatcctatgaaccagctatttttattatgatttatagcagtagcga

SEQ ID NO: 23766 - DNA, 1468 bp, Mus musculus
tgaaccgccgagcaacagcaaaactatgtgacaacacttctccgcataaaggttatggtgccctaggcagtgacatatggcctcaggctggacaccgagacaggtggaaataccctgtccattggtagatgtcttgcttcttctggttcaggcagggaaaacacttggactcttcttgcagcactaaaactaacctggaatcgcatgtagtagagctgaaagaattaaagacccggcttacagcttcagatgaagctttaagctgcagtgttgtgaagtgattaattccctttctaccaaccccgtgggagttctacagtacggctgtcctgacacggctcttgtctaggaccagggcggcacatcccaccagcgccatcttcctggacagagtgagctgtcagtcactccccaggttttttttgtttttggggtttttttttttttgtaccaagtagctagaaagtgggacctagggccctgggaggacacctagcaacagcaggttccatttcacctcagatggcagcttgcctggcagtggacttagagtgttctagtctgatgtatgtggggtttcctgccctgttggaccaaagtttccatggtcctatgggatagccttcagcctctggagacccagagcttgcctgccagggcttggttctccatttccactgctgacatttgatttccagtgtatttaaattactccgtggtaaatttcattgtcttttcctgtgtaaatgttaaatgacaataccatcggtgaaggccctccacagtggacagagcaacttcctttccagcctctgctggtagcatgctgcagcttctgtgttaaaggtcctctggagctcgtgtaagacaggaagaacactttctctgtagtttctttcttttcatttataatttacaaaagtaaagcatttattagtgtctgatttaagaatgtaaagtgattctgtatcaatgtaaataagatgatctactacaaaagatatttaaaatcaaaattgtggtcatttcttctttgagagttcaaagtagcttctgtaggctgcccagcagagggcaacaggagagtcagctggcagcatctgccagtgcagacccctactctcatttccagagcaggccctttccctgagacagtgcttctatgtgagcttgagcccagctgagacatgtacacgtgctccctgtgccctttggtgactgttctgtttcccctaataatttttcagtctttgttttgctatgtagcccaggctggaactcctgatcccttgccttcacacacacacacacacacacacacacacacacacacacacacacacacacacacaccctgcacaagtactaggaccacagatgtaagccaccatgtctctaaaaacattctttgtaagtttttgtaaaggtagtagctggaaatgaacccaagacctcaggcatggtaggc

SEQ ID NO: 23767 - DNA, 1114 bp, Mus musculus
caaaccttaaatagctccttcttaatgtttcctttcaagaagtctttgacaaactgggtattttctgctcggtcatgtgcttccttggtcccttccttcaggagctcagaaaggtctgccattctgtgggggatgaactttgagtgagacagtagccctttccagttctccagaaaggactaaagggcaaaagacagtttaggtccaagatagagactggaagtaggagctgctcagacactatttcagtccagcatgagtaactgagctgagaacagggcgagatatgacaatctggcacaaaaactcagtggacatgaagtttactatggtctccacaaaagtgcctggattggtatctgttagtcagcacccaaatgaacgatgctttgcttctgtagccacctagtggctgaagaaccaaaacttacaatctatccaggaaagagctgcctttcctgtggctgggcctaggtgtgggaagatagctgagaggcagagatcttagttggcttctctatatctctctctctctctctctctctctctctctctctctctctctctctctgtctctctctgtctctctctgtctctgtctgtctgtctctcctttcctcctccctctctcccttcctcccttttcttttatctttgagacagggtttctgtgtaactctgactgtcctggaactcattctgtagaccaggaaggccttgaactcagagatccactgcgtccaccagttttatatttaacagaattactcaggataaagttacatcaacaaatggatatggaagaaaagtatcatcataagtacaatggaacctaggaaggacgactgtgaatctataaactccatctgttagcatgagaaaattttggttttcttgtggtctagtctctgcacactaatttttttagatcattttgtatcaccccatgtcctaataactggtttattagcaaatatagtaagatataagaaataacttagccagtgacaggactctactgagaagctaagaacaatgcgcagcaggggctagtatccaaacatctatacagctcagtgctgatgagcatttcctagtacatactgaatcaggc

SEQ ID NO: 23768 - DNA, 1283 bp, Mus musculus
tctctggaataagtgccagcctttttgccatagttgacttgcttccatattggagctcctcagtaggaacagctgtggcactgggctggggaccaggaagaagtcacaagtggtgggagtatcctagggacatgagtcgtgcccagggtataaacccaaacctggtcatttcttgaacagtctgtgaatatgcctgtgtggacgctgtatcctgctgctgtccctctcctggtctctcacactgcatggcctcctatcactgtgaattgtggcctggtcgcagtttgtagtttcattaaatggccctttcactcccctgccctgggcctctgctgtcttgcctggcttccttcttttctgagagacagggtgggactataggtagtctagtggcaggcaggagcccgggcctgggaaacaacacatttaagaacccaattacaccaaaccagaatttatatatatagacctgccctggggaaacccagctgttctgggccagggcattggtttctgccatttgcataattagatgtccaggctgcagaacctgagaactggagccccgtcttagcttagtaacttcttaacctatagctattgctctttcgtccttaaacaagacagcactactggactaagacctgatagtctgaagatgacacactgaagtctcggcactcagttcttggtaaatcaatcttctgaactgtgaaggtggtgggctcagtctctttgagtttccctgctgttctaccattttttcacacaaagacttttataggaatagattcctactaataaaaatgtttaacttcatatttctattttagaccatgcattgtttaaatctaagtatgtgcttttgaaataagaaacctcaaagattttgagttaggaaaaatcacaggtccaagcagatattaaggatctttatggtatttagcatgaatacatggaaatagaaggtgctaggaagttggcaaggagtgccatgaaagaggatgtccatttgtatgctgtttctgagggactctatcctatcccaggaaggagggaagtgtgtggcgtttgtttttagagtgttatggcaggcacaccagtcagctgagacacatcaggctaatagacttattagggagatcccggttatgcagaataagctctttagactatcaaaaggcctagaaaactgagccatcatcagctggcatgaccctttcccacaaaccctgtgtgtatgggcatctcactcccagcatggcaatgaccattccaagcac

SEQ ID NO: 23769 - DNA, 1208 bp, Mus musculus
ggggccagatgcagcccaagtgactcccagtaacttctgggcacgtctcctttgtagaggcagcaaaggccccaccagaagggtgctcaaccttccatctgtgctttctcccccacagatgtgcactcccgccaacacccctgccacgccccccaacttccctgatgccctcaccatgttctcccgtctcaaggcctctgaaagcttccacgggggtggcggcagcagcagcccaatggccacgtcggccacatcacccccaccgcacttcccccatgccactggcagctttgcaacacccagctggccaactgcagcctcacccccaggaggcccacagcaacaccagccgcagccgcccctgtggactccggcacccccttccccgacttcagactggcctcccctggctcctcaacaggccacctcagaaccaagggcccaccctgccatggaggcagagagataagggaggcccctcccccctcccggaggccagaaccccgtggggtgggggagaggatgtttctgtgggccccttcacccctcctctgtctgcacctctaaaccccagagccctggaggggagagactggactctagccaggcagtcttgtgccggcacgcacagctgcacgcacgcatgcaagttcacagcgcaggcacccccagctcgcctggatctgactccaagtggcttgggtgcctggtgggcagcaccttggagaccaagcagccatcccagcgaagacttacctgcctggccccaccacctggagtgtttcagagaatcacttggtggcagtcacgtggctgactcctgtcttgggccataggcctagatccctacccatgggaatgcagagccttctccgcatgtgtgcgtgcagctgtgtcttatgtatttatatgtatgtcgctcttcaaaagcaacctagtttatggggcagctggactttgcatgttagagtgagccccaagccccttggcccaccaccctgttgtctgaagggctctgtctcactccacctccttatctgccagcattgctgtttcctgcaaaggattatgggaaactccaggactcttctacccagctcctgcctgcaaaggttccctgcatgcctcttcccctgagcccaggggtacctggtccccatttcctactcctcttttaacaaaagagaaaagaattccaaaccaccacc

SEQ ID NO: 23770 - DNA, 1195 bp, Mus musculus
tcacatgtggcagtgctccaataaataggctcagctacccagttcatgtttaagatagctccttcctctccttccaggtcctggtgtgctttctggaagctgatataaatgaaagtatttccaagttagatctgcttagtgatttggctgaatagacagttccagctgttgtaaagacacggggttaagggcagtccttcctttctctgccggactggagctgggggaggccagggttcgcccctgcacgtgagcctgctactccccatgtggtgctcccccatggtgctcgaggggctccacgtgatcctgatgcctcctactccctttgccacagcttctaggggtgatggcacacttagacacaggacttgctctaggcagcatcaggcccacctcaggctcttacaaagccactgacacccatacgtttgtctccacagccttctgatgatgagaacagtgacaacagcagtgagtgtgtggtgtgcctgtcagacctgcgggacacactgatcctgccctgccgacacctgtgcctctgcacttcctgtgctgacacactgcggtaccaggccaacaactgccccatctgccggctgcgtgagcatactcagggttctgattgtggaatatgcagatttggggactgttattccctactgcatgaaacatggaaacaccatgagttttcatgcaaggcatggttgatcctttagggaaagattagaaagaagatagagaagtgtggtgacacttgaaccaagcaggttaagctttgaacagaatctgttgtcaaggttacctaggaactattcttaaaaaccttaaagtgaggtaaaagcagaacactgtggtgggtaggaagttggcaagtgatgctgggttgttgcccacattgtaggctctaaggaaactcacccaggctcatggctagtaaaccatcagaaatggcttctgcacttggcctcactgtctgcaagcagtgtgtggcagtggctgtccctgagagtcaagtgtgcaagtgtgtgtccatataatgtgtgagttagcactgtggtcatgagacaggctgtgcacacagaaagggaaagtacactgtctgtcccgggctcccagtgactcggctgaggtgggctggctgctccagccgaggtttctgaaggccttggtacccacctgtgataaaggagag

SEQ ID NO: 23771 - DNA, 1588 bp, Mus musculus
gccagagccagttgagagttagtgtgcctgaaggaagaagcttgggaaacagtgcgtttgtccttgatggaggggtgggcaggaggcaagtcttcaccttgaagttgaaggcaggtgggaacagatgagtgttagccagagggccagcatcagcctggtgcatatcacattttgcaggggtgctgccctgtcctgtaattcacagggtagtacttcctgtgtgagcattagtgagctctgcccttctctgccttgtgtgtgagagcctgaggagagagccctctccagagtgccacggcctgctcgctgttccctgacccctgccgacctatatccttctaagagaggctgcagtagaacacctacccacacccccactgccaccctgcttgggatccctggaggccatacttcccctagtctagggcagcattggttttcctgcctctggcatggctctgctctgcctggccctgagttctcctgttttcactaacccctcacactttccacttctgcaaggtgggagcagcaagctacgtaggaccttggtaacgatggggacagtggcttttgcagaccttaatgatcgctctggacatctgggtactgggatgtgtgctggagctggtggccgagggaatcctgagcaggctggcttccatcctgcaagggagcttttgataagagatggggcttgagtccttagaaggcggcatgatcgagacacagccgagcaggtctagggaggagaatgtcccatttctggggtttcatggcatgggcaaggagcctgtctggtccctcctcacttggctttgttcccacagagttctgacagtatcccacctggctatgagcccatctccttgcttgaggcactcaatggtctacgagctgtctccccggctatcccatcagctcccctctatgaggaaatcacctactcaggcatctcggacggtctttcccaggccagttgtccccttgctggacttgatcgaatcatggaaagtggcctacagaagggcaagacacagagcaagtctccagacaggtgaggccaatgtccaacctccctggtgagagccgggagagcaaggatggggaggagggcctgctgtgtgcgcgaggattgcgaggcttcgctgtggcttcacagaatgttacggtgcattttgttccttgataattgggacaccaaaggcccagcagcaggttagaatctgctataattggtcatagccagctctgcgcagagaaagtgctgggctgaggctcccagtgcacacgggccacaagtcacaccaattgtttgctgtcagtaaataattgtacaggcctgggccatgcatgtccttgcccagggagctgatctgaattttgggcagctggtcacttaagcatagctcaccaaagaaacagcagtgacagctgaggtgtgggcaggtagacctgtggttttttattagggtttctcttgctgtgattaaacaccatgaccaaaagcaagttggggaggaaagggttatttgacttacacttctgtgtctatggcatgaactcaaaacagggcaggaagctggag

SEQ ID NO: 23772 - DNA, 1150 bp, Mus musculus
ccccatccatgaggaggacgaggagaagctctcagaggactcggatgctcctctcccaccgagcggtgtggagctggtactgcgggagagcagctcccctgaggtgaggccctggccacctcacccaggcctccctccctgatcctgacctctccccagctctcgaggcagtgccgcacggatacacagccagacaagcagtgtccctgacccggctgcggtgccttgtggtggagtcactttgaagcttataggctcgccaacatgtgaagcgtagcttccagtgacatctttgcatccctgtggcatctgctgcccactgcccttagcttagtctcagtgatttggccgttttgacccgaggacatctgcatcaaaggcctttcctctttgtcttctagagtttcggaacagaggagggagatgagccgtccctaaagcaaggtgagccacttctcccaggtccaaccctgagcccttggcaagctttgggtcctggctagggatacacacctcccaccccaactcatgccgtcaggaacctggacaatcgatgtgcagagatggtaagggcgctgtgatacaggacagcacaggatgtgctggaagctccgcctgtgtgtgggagccatttgttgtgatggtttttggaatttctggctgtgtcttcctgatgagttgagggcagctgatacctccttacctccctatactggagggcttaatgggtagcctaggaggcttggggtcccccattctccttgccggccatgttgggtggtaaggagccccctcaagtctgcctctgcttagtccttgccatgttactgctgaacagaaaagtaaagcaagagtcagggctggcatctaggagaggcccaaggccacttgactcagacatggctctaacatgtttgttagaggcagtgaggcccacagaatgatattgtgcctcccaccccccatgtaactgctgctctattgtaccctacatcctgctgagaggtcctctcataagaggcccatctgcgggaggctgaccctcggtgtagtggggtggtaccctctaagagccacatggtcacttcagccttcctagcctggccttgtagttctattctctgcctcaggcagggcctcagcttcccac

SEQ ID NO: 23773 - DNA, 1181 bp, Mus musculus
agaaagctgagcagtccacaagagagctgcataccaggacaggggacagaggacacagtgacaagtgaaggaggcgtggcgaatgtcctctgcacagcaattgaaaggcttttgttttgttgtttcgtttcgttttttaaaccagagacagggtttctctgtgtagccctggctatctatcctgtaacaactccctctctagaccatgatgtcctggaactcaggagatctgcttgcttccgcctcctgagtgctgggattgaaggcatgtaccaccatgtctggcattttatttttttaatgttttattctcattttaagtatgagtcttgcctgcatgtatctctgtgcagaagttgcatgtttggtgcccacaaaggccagaacagagtgtccaatcctttggaactgggttgttggctgccatgtgggtactaggaatcaaatcagggtcttctggggaggagccagtgctcttaaccactgaaccttcactccagccctccaggacacaacagactgaaacattgatgggagcaggtgatctagggcctcccgtgactggtgcagatctgaactactgcttaaagccacaaccacagctgaggcaggaagaatgtatattataagtatgtttgggcttcagaccaagttcaaggccagcctgggggactttgtaaaataagaccctgactcaaaaagtaaagaggcctgggaatatagttcaatggtagagtgcctacctaggttcaatccccagtactgaattttgttttttaaaactatagttagactactgtgtgcaggtcccaggacattgctgcacatgttcctagggctccctgactctccaactccttcctcctactagggatagtaactccacagcctgagttgagttactgctcaagggaccctatgttatcactttagaagagcctggatggacaactgtccaggtagtagaccctctggctccaaagtcaggaatggcaggaatggcagacacaaaagtgcagcaaccatcagtggctctggactctgaatccagaaagcacccctcgggggattgggctcttctctgcagatctacccagccaagccaccaaaagtgtggaggaaaggtcacgtaccagcttactcctctataccaacagagcacgactcaggacccagggctg

SEQ ID NO: 23774 - DNA, 1849 bp, Mus musculus
tcaagggtccctaggtttctatgagatcacatctgctattcctgccagatggtatgtacctgggttatggggtggagggtgctaggtggtcctgcccctatgaggttctggtttgatgaacagatgcaagaccaccagtcaatcatgacccctccttcctctgctcccacctacaggatggtccacctccatggagacgccacacagccttggcaccaccagctccccctggcctctgctgagtggctctagtcctgagcctggagttgctgagctgaccccattctgaaagtctggcttagcgggcaacacagagccctcagcatcccaaacattgccaggaggcttccctggaccccagcgagaccctggcctctcttgtctgcacgcctcatgtggccactgggatttgagggtccacagtgaaccttgatcaaattgcacagtgggttgttcctccacacaccctcctttttttacggtcaatatatttgtaaatggtacaagatgaaggacaacaactgtctccatgggccacgtgccctagaaggactctccccaactgtcaaagctaatgctttgagcacttagcaaaccagcataagagaatctacccatggaatgttctggaaggtgggcagtccaggttacagttgatgaaggaaacagtgcctgtctgcctctcatgtgtgaccccaaggcagccaggctgtcactgctgctgtcacaggctgacaccttacagatgtcctgaccatgggtgaccctcctcggagcgtccagatcccctcctgctctgctctattacctactagtggtccctggcagctgtgggcaaggcctgggtagtcagactgttaacaccacagtccttagcagtggtcaatgtccagttcccccgcacaggtcctgcttcactcacatcctcacccgctgccaaggtggcggtttgtgcttgcagggcagcactgcccaccacctgccagggaggagcctgagcagcttccatagcagatccgttgccagttacctggcctgtaagcttcttactgattgattgtctaaggctcctgtcagagcccacctagaagcaggctcctagtgatactttgtttccaaggcagaagtggcccatgagtggccccagagcagaggtgccccaggcagtgcagctccctggtgggttggtagagggacctcagcttaaggaactgccctgccactcacccaggtgacagcctgtagcagtgcatggagacccctttaggctcagggctgctcgagctctgactctaaccctgctccttcctagcacagctctgcacatccatctctctctcttgctgaatgcacatatgtgcacacatgtcagcatgtgcatgctcactcccccacttctcacctgccaacatcctggcctctggccgtggcactggtgccagtactttgaaagatggggtgcagcctacacacttacctgtctcagactcacatgtactatcatctgatgtactctgattggctagtttgggttcatttttactgtatatttatagtaataaaatcatgcagcaatattctatgtgtgcctttgttctggcacagcactatgtaggcagcagcattgttggcttttggtgtagtgacaggacactagagtggtttctggcagaactcctgacaggttttgttgctgccttcatttgcttgtgtgagaggggcagtgagtgccccctccaaacatagacaatggtttattgctattttgttgcttgctgtgtctgaaactggacttggaatttggctcacctccactgggcaattgatgaatcttagcctctaggtgggc

SEQ ID NO: 23775 - DNA, 1153 bp, Mus musculus
ctggtgagacctgtcatcaggtgttttccattaccagaggaacccactttctgtgccagtcttgggcctgtgtggaggagcagcagcagtgatggcctagcaagagcccagggtctcagcagtgaagcctccatagaaagcaatgaggtaaaggtccctcttcctcctccggtgttgtagaaaatgggtgaatgtttaatgtgtgtctacacaatgcctggaggactctgaaccttgagtgtgggggccaaagctgcaggtaaatcatgatagatttcacaactcacccttgccatgggtgaagaaggccagaagtttagggccagacaagggctggttcccaacatacccctttcactgcaggattctgatcatgcccggaaaagctcggttcgaaaacaaaccaggagttatttgaagaataagagtcgtcacggcaacagtgatggtcattggccttccagcacagggcctgcttccattccagggtctgaaccccaaactgagaagtctccttactcaggaccccaggtgagaacatttgagaacctgtttaaagagatggcacttctgtaactatgggatgtggattttgggctcatttatgtgtatacatgacagccaggcatttttgagaggagagggtactggtttctccacaaggcatgggaactgattgggctcagaaaggatttttgatgagcggcaggccagctgtggggttggtctccttttcttttcatgggcaggggctgtccccttgctgtcctgctctctgggtctccttaggcttagggatgctcatgagctggggacacagtaatggcatatagcatatacttaacaaaaatgcagccacaccctcactgtagaccaccccagtgaagcagcatctctatgctcagagcagcagctcagggtgtgatgcacagcggggctgctccctaacagcctataaactgggctgtctctgcctgcagcctctcccaggcctagacctggaacatagtgcacctcttgctctacagcatgttactagatgtgctgggatctcaaggctggttctttgaggaaagtggtagagaagtaaccctggaacattttctctccatcctaagcaaccaagcatgggcagaaatggaaactggaaatt

SEQ ID NO: 23776 - DNA, 2383 bp, Mus musculus
caacatcctcggaagactgcattgagggctgtcaccttgactcctaacagcactgagcacttcacatgtctgcgtataaatagagccatgagggttgtgactgttccttcttcaggtggggctgtggcagaagcccacaggctaggccatctgctccacatcaagccagtattcatacccacatatctcaagctctaggtcctgcctgctaagcaacaggctagaaccatctggaaatggctccaggaatcagggctctaccacatagtagctctgtagctagagaccaacctctacctcttttatttttttttttcaggtatacaaaagagccaaggcactggaccagtctgacaatgatatgtctgccgtgtaccgagcctacatacactaagccttgcctgcccatctaccctcccatcttccctctgacctcccctcccagtgtggggtcagggttctgggactagctctggaccagtcacctgtctccatttccttttatacagactttgaaacttgcatcagcacagtacacagcagcaccctgtctccctgaggccctggccagggataagaggatctatctctcctggtggctgtgaagaagctcttgagctgggccttgattgaccctggagcaggaggttgtggattctctctgttcctctgtgttctctgtctctgtcacacacacacccaggatagaagctacccagaaactgctgcctggctgttcttgcaagcttagcccccttctggtcaagagactggagggactagaattgacagggagcactggaagctttcaacttccccaggacagagactggcccccactgggcccctgaaaggagaggcccctcagccatcatgaaccaacagattccctgaggaggctctgtggatcaccagctgaggaggattttcctgtagacactaccattacaccgcagctcccagagtgtctctgtgaactgaagagagaccagcatagccacatagacccctcttcagggggagcagagtctacagtcttctgtcctgagcctgttcctcccaggaggtttcatttggatttgcattccagcccaagggaaggggccgtaagggccttgggagcagtgaagtgtatgggcggctccttcctgtttccattacgccaggctcttgagctgggctacctgttcagcctgctctacacaggtcccctgcatgtccctcttccccttttccttccatggagatatttctgtcccatcctcttttgacccagccccagcctgatcaacaccaataataagcatttcctagatgagcatttcctaggctgggcttttgatgaggaaccttacttctgccagtggttccaagttctgggttttttgggacttgaagcatttctccttgaagaggggaccagagaggcttagaatgtcacacgagaggaatcacccgaggaagccttcctcctcatgagtttggattttcaaagccacgatttaacttttccatctgggataaggatctcaggacatgggcacggggcaggggatgcttgtggagttcagtgcaattgtccattcactgggatgctgaacagtttctgtctggacacagcctgtcttggtcctgggggctgggggtggggaagatgctgtaagaaaaccggttagtcaatgttgtcttaatattgttgacaattctgtaaagttcctttttatgactatttctgtttaagctatttcacctttcattttgaaaccctttccttttatggagaaaatgtgacactgtggaaatgcttgtaagaaagcccctactcccgcttttccttgaaatgacagatctaggtgattacggttgtgaatttttattttcactttgtttttaatgaacatttgtctttcagaataggattgtgtgataatgtttaaatggcaaaaaaacaaaacatgattttgtgcaattaacaaagctactgcaagaaaaaaaaataaaacatttcttggtaccataactgtatcattgtacccaaatgctagggggacctaggtaggagccaactcacctgattctttcccggtggaaccctgggcgggctccatctagccggacaatactggaataacttgatggacggccccgccgaccaatcagtggtggccaaagcccgggtccctgctgaaaaacagggattgaggcgggcggatagaaggcgaggcgtggcctatccgtctagccactcaccagccaggactagaagctacagccagtcgcttgaggcgtagccggcttgagggcggagcttgtgccctatttgccaatcggtcacgggaggaggcgaaaaaggggcgggcgttgcgcgccaagctcctgacta

SEQ ID NO: 23777 - DNA, 2383 bp, Mus musculus; identical to SEQ ID NO: 23776

SEQ ID NO: 23778 - DNA, 1196 bp, Mus musculus
tgttccttcctccatccttggagaagcaagaccaatcagaagctgtctttccttacaggtgattgtatccagagggggacgctttctggaagcaccagtctcagggaatcagcaactgtccaatgatgggatgttggtgatcttagcagccggagacaggggcttgtatgaggactgcagcagctgcttccaggcaatgggaaagacctccttctttttaggtaatatacctacctatacctatctggccatgttgggactaaaggcttgcaggtggggccgctacattggtgacagtgtcagtcccacatggcctcaccaggcttcctaaaagaaggcttcttttgccagacacaattagtacctggaaggaaaaagagccagtcctgtctaggacagatgaaagaggttttccaggtgcatgggtaaaggcaggtagagatgacctgtctgtagaatccttgggacatgacctttgccctgagcaggtgaagttggcaatgcagccaagatgatgctgattgtgaacatggtccaagggagcttcatggccaccattgctgaggggctcacgctggcccaagtgacaggccaatcacagcagacactcttggacatccttaatcagggacaattggccagcatctttctggaccagaagtgccaaagtaagtcacctttgactattcttgcaattttattttcattagagctgagcagctgggtcagaccatccaggaaagagtcctttcatgattcattgtttaaagagccccctttccagtcattccttgccccgttccaaagaggcccagagacacggtgaaaatggtatttgaggccccagagtaggccctgagtcttttggacatgggggaggacagggccgtgcccttaggaaatggtggaggtgagcctgatactcggcgggcaattttcatgtagatcttttaaacttctaatgaatggctttcccttctcagatatcctacaaggaaactttaaacctgacttctacctgaaatacattcagaaggatctccgcctggccattgcattgggtgatgcagtcaaccaccccactcccatggcagctgcagccaatgaggtaacttcacagcaagtggtccaggccctcgatccttgaatttcattgttatttctgtcttgctttcttagctttcttttcttcccac

SEQ ID NO: 23779 - DNA, 2558 bp, Mus musculus
tcaatggcctcctgcctgagaagtgctggtgctcatgcatgacacaggatgctgcaagtagcaatgcacacagctgctgtcgggggacattgctgcttctgtttcctgtgaagtttgtttatgctgtctaaaaggaattggagcacttaaagaatgatctgatttcacttattcttttccagatgcttcacagcttcatggtaaagggcctgttgtaccgaggaaattgtgaccactttggaggatggaactgaatgacataggtctaggaggaagcccaacatgtatgtctctgataacagacatttgctgtgctcttcatgcccactgcttttcttctggagcaggcgtgagtttgaaatggagcacttcttagcacttcagatgggcctccaaccaaggcagcttctgctgctcacaaagcgcttactgacctggtgctctaggcctcatggctttgtcgctggacgacatcaaggggcagctctgtgctgggaagtgtacctagactgtgttgggaagtatagtgtacatgtgtacctgtggcagatctgttggccactgggttctagatctgcctaactcctggcatttggtgtgtctcggagttccctactggtcagggtctcctggccacagtagaatccctggatggttgtgattccgtcccatcctcaggctgtgtactcaagaggacaatacccaggccagagccgcatgtgggggaccttgcaaaatactaagaacacataatgtgtgctccttgtaggggccagtttctcctcagaacatgacaatgaagctcttatagagaaaaagatctttatagattcaacaatcgtggtaggatttttaaagacacctatcttgggctgttttcgtcattaccattgaatgcgttggatagaatgggactgctcttcacacatcacattataggaagacttaattccagtgccttttggtggagcagactttgacaactcacacctatccattcagcccactgaatggatctgagatgaagatctttttttaaagctagtctgtatttaagacagttttatttaattgggttttttaatgactgcacaccataacctgtgccgtcttgacttgaaagtcatctgagcccccaagcccccccaaatcccaggttcccagctctgatttgtttttgtagagttgatgcaggtggactacagtggagcccctcagccctctgtgtctgagagcccaggggttctaagctacaggtagacattccactttgtcttactcttagaaatctctctctggcagagctgtaggacagttctctctgaagcatctgccacagagaacaggtctggggtgctggtgtcctctgcacagcgagcttctgtgtagacttaggagggatgtccagagggtctggagagtagacagaggacagagatagttgactacagagcttccatcatcaggctgtcacacttacccagtggctatttcatatggactcggagggctgtttcctatcctataaatctgcctcgcagtgggtttggctgactgcctagccagaccacatttggggaggtgatcagcactctcggtatgcaccctagggtgggtcaagtgtgcttttggttcctgcctcaagggtatggagctcagtagccctctattcctgtggaggtggccacctttccaccttactgggagcaggacctttgtcagctctttggtctggcctttgctctgactccttttgtatggaagaaccaattgttttcacattggccatgtggactccttatccttttattacatatatttttttgcaacttggatttccagtttgtttacagaatagtcttaggtagtagcaaaaagagccaaagaagagatttgtatagctgagctctaagccaagctgaggccgccagcaaagctgagcagtgggaactctccaggctcctctgcccgtcagacagcgggccctagcaccccacccctttggtgctccctcctccccatgtgccactgcttgtgcagctagagcaggatgccctcatctttaggaatctagtgatgcctcttgcctcagggaaatgtttctttgatggggagtttatgagatttcttttccttgtttatgctttatttgtggtaatgaacgagtgaatgactttaacagccatggccagggagacctatggcccggcttcagcagagggtggaggtagagcaagctcagtgggatgcaagggtttctttggtgggtgcaaggttctgagacttaaccaggcgtggccgtttcttaggtgtgagaggggcttttgtgccgcaactatgttggtgttagggggtggtgtggaaattgttaatcttgtataaagcaactcaataaattgttttgaggtttccaagatgtctttcctcattttttcattactattttatttgcaatattttatttattttattattcttcagtacataggagccctggtgttcatggaatgcccgcccattgtggctgagagccaaggttcaggctcatatgtaaagga

SEQ ID NO: 23780 - DNA, 1209 bp, Mus musculus
ctacagaggcgcctgggctctgtggctgtcaagagagagcagagggagaaccacctgaggcgctccatagtggtcatagaccctgacacaggtcgtgagctgtccccagaggaggctcaccgggctgggcttatcgactggaaaatgtttgtgaagctcagaagccaggagtgcgactgggaggagatatcagtgaaaggtcctaatggggagtcatcagtaattcatgacaggaagtcaggcaagaagttctccattgaggacgctcttcagagtggcaggctaaccgctgctcaatatgaccgctatgtcaacaaggatatgtccattcaggagctggcagtcttggtgtctgggcagaagtaggcccagcccttcttcctggcttttcttggagctggattatcttaaagatggagatggttaactcattctcagcaacttcctgggtgtcttctgctcccgagccttcatatagacttctgagctaagtgttttatccacattgtatcaggctgcttacagtgcagctactgtaataccagcagacactagctgggtagcatctctcagctcagcctcatccagtctgagtgagtgacctgctcccacctctgatgacttaataacctttctgcctctttcaactcaacaagactggtccactggggctgctgaccttccttcttgccattccatttttctgactgggatcaaactatcaacagtgcctgctcagtagtgacttttctcattgaacagggctctacactagaacatgtgtccagaatccacaatgcctggctcttggtgctagaataactagccaggatgtgccagaaagacaggcaccaacaacagtttgctagttctgaaaagatcttagtaatggatggtgtgctagccttactttcagtgccttagaagtcttcatcattatcgcattggcatttagatatacaaaagttgattgttcaccaaacaaatttctgcttctctgtatttcatgtattatgtaagaaaatgggaagtgatagggaactttatggcatgaaaataaaaatctggtggcttgactctaactcacagcaagtatgactcctttacatatgagcctgaaccttggctctcagccacaatgggcgggcattccatgaacaccagggctcctatgtactgaagaataataaaataaataaaatattgcaa

SEQ ID NO: 23781 - DNA, 1205 bp, Mus musculus
gtgcttgctttacatagcgcacaggcaaggaggacctcagctcagtccccagcactcacatcaaaagctgcgcatggcgggacacccccataattacttccactgctgaggagacaggatcacaaggagatcggtgaggcttgccagctggccagcctaattgacaagccccagttcctactaagagatgctgtctgcaaatcaaacagacaaggcagggctcaagagaggctcagtttataaagtgctcacacacaaccataaggactgagttcagatccctagcatccaggcttaaaaaaaaaaactaaaacccagcatggttgcactggtctataaatctgactttggataaagcctacttgctaattggtaagcactgttctcagtgagagacctgtcttagaagacaagaccgtgatctagagagaactgacactgacctctgacctccacatttacactcccaccaactccacctctcccttccactcaaaataaaatagatggctcccaaggaatactgagggtgacctctggtttctcatacatatacccacccatgtttgtgcacatacacacacacacaacccacagactgccagactggtgattgggctccagatggacaccccagggaggtgagccttctcagccgttcgcactgtcccagggcacatccttgacggaagagagctgtagggctgtggttgacccgggcaatcttgatctctgtagaacattaccaatgagctgctacagattgagccagagaagacgcagtgcacagccgagtgtgaagcctttgtgcaggccctcccggccagcggcaccgcacccttgctgaagacccgggtagaagacaccaaccagaaatatgagcgactagtatggttgctagaggcagcccaggagaagtaagtggcagatagacagtcggagggtggtcatggtagggtcaaggggccacctgacccctacacatacaatgttgccctgtgtccttagggtggacgtggccaaccgcctggagaacagtctgcagcggggcagggagctgctggcctcatacgagaacaggctgattcaggacgacacaatgcctgaaagtggtcatgtgttggacagcaagaggcaggagctggaggtaaacttaggatctgagggccatggggtcctttctttgggttcaggacatctgcctc

SEQ ID NO: 23782 - DNA, 1466 bp, Mus musculus
gccagtcattcaccttgccaggggaaaacatacatacccctgcctgccacgtgtccaaagatggaagctgtgctgccctttaaggagggtgggggccaagggagcacccgctgaggggtctatccttataaaactaacgtcctctcatttctgtccttaagtctgggtaagaactgcagtagcatctggcatggatgggaacactagctgtgcacatgcgcacataatctgagttccaataaaactttatttacaaaggcaggtgggcaggacccaacccgtccctgatagacacactaaaggcttccatcttaactgcatctgcaggggtgtgttgaggatgggaggggaaactgagagaatagcaggtggaggctagccattctctagggcagggctgtgggtgagtagatgaatccatcaagtgtcgagtgagcggaggggcaccactggacacgagcaaggaggccggggcctggtgcagggagctgagttccagttttcctgtttccctagatgcttttctcaaagttcccagaccctgctggaaagctaagccagttccggaagaaactgcaggagtcggggcagcaacgctgggatgagagctggcagcacactgtgctccctctgctcgctcactcacagatgacccccaggccccatccaccctgtggccacccttcctgccggggcttttgagtgccccctagtggtcataagcctgaggacagcagtgggcgacagctaggatctggctactgatctggcagctctcttctgttctgagcacttctgttacttccagtgtccctgccaacttctcagtccctgggtttttgtttctggacttgtcacatcccttgcgttctggttctgctgtgagctctgggatagcctgtgttcactgggtttggctgagcaaggctgaactgtctgacaggacagtcatacttaataaatgtatatatttatttgtacaatggaagtgtttgctctgagcctgtgtccactcgagatgagctgctgaggacaggcaccagcactcagcctgtgcttactgtacacttgtgctgttatttaacattcctgctcaacagaagcctttccgctttccgctttcccatgacagtcatttttcttttctcttctttccttttctttcctttttttttttggttttttgagacaggttttctctgtgtagccctggctgtcctggaactcactttgtagaccaggctggccttgaactcagaaatccacctgcctctgcgcgagtgctgggactaaaggcgtgcgccaccatacccggctagtcatctcatttttcaaatcaccttcaaacaccatggcgactggtcagcaccagcttcaggattacgatggctgaatgctcttcgtaagggaacagtttgccagtgtgagggggcacctcttcccagtagattccagcacggtctaga

SEQ ID NO: 23783 - DNA, 1183 bp, Mus musculus
accccataaagccaggcagctgagttagatcatagctgatctctgcttgtgccaactgacagggtaggcaggtgcagagaggcaaggaacccaacaggagaggtggccacagagagatcagtaagcaaaagtgcttacttaccatacgaacaagaagacccaagtttgaaccaccatttaaaacgctgggttgtggctgtaagtacctgtaattctagtgtcgtcaggggcagagacaggattgctggggcttagggaataaaggggaacatgggagcagaacctctgcctctacctttagaccaagcgtgcccacagatacacactcccatagagcatctacccgggcctggaaacctgtggccaagcaaatcagcttgaacacacagcacacctgtgtcaactgccctcctgagatctctgtactcttatctagaccgtgctggaatctactgggaagaggtgccccctcacactggcaaactgttcccttacgaagagcattcagccatcgtaatcctgaagctggtgctgaccagtcgccatggtgtttgaaggtgatttgaaaaatgagatgactagccgggtatggtggcgcacgcctttagtcccagcactcgcgcagaggcaggtggatttctgagttcaaggccagcctggtctacaaagtgagttccaggacagccagggctacacagagaaaacctgtctcaaaaaaccaaaaaaaaaaaggaaagaaaaggaaagaagagaaaagaaaaatgactgtcatgggaaagcggaaagcggaaaggcttctgttgagcaggaatgttaaataacagcacaagtgtacagtaagcacaggctgagtgctggtgcctgtcctcagcagctcatctcgagtggacacaggctcagagcaaacacttccattgtacaaataaatatatacatttattaagtatgactgtcctgtcagacagttcagccttgctcagccaaacccagtgaacacaggctatcccagagctcacagcagaaccagaacgcaagggatgtgacaagtccagaaacaaaaacccagggactgagaagttggcagggacactggaagtaacagaagtgctcagaacagaagagagctgccagatcagtagccagatcctagctgtcgcccactgctgtcctcaggcttatgacc

SEQ ID NO: 23784 - DNA, 1124 bp, Mus musculus
atttccttttccttaagaataatgtgggccttttctcagccacatgcacactgctcgagactctgatgactcttgcctgtctcagtcctgacactggactgtgaagttagcatcatatttcactttcctcacagtgccacacaattattttttgtacactgtgctctgagcacacagttgtagaaccaagcaaattctttcttgggagtatttattacatttatactgagcatgctcagacccttggtttaaaacaattccctcacatttgactggcctttcttcaaagccatctctgctgctgcagctcttaccatattctagtgaatttatttttctgttatttagtttggaccttaaaaaatactgatttcttttctaggaggtgaactgttcttaaataaatcaagttaaatgtgctttaaacaggagctgaggagttggctcagttggtaatacgcatgacctaagttcagttacctagaacccacataaaacaaccagggtatagcaatgcatctctatattcccttccttgggaagaggtgacagtaggatcctggcactttctggccagtcagtctagctgaactgttgaaccccaggttcactgaaatgcttaaatcaaaaagtaaggtgaagagggattgagagacacttgacgttggcctctagtttccacaggcatgtgcactgcacacacaaacacactgatacacacacctgttgtaaggaatactagaatgtatactggactgttagaaatgcacactggccacctgctgcagtcagacatgctttgcttcattttctagacacaagataaaacctagagaagcttgtgtgcttgtcatccagtgggactcagatcatttgattttgaaacgttggcagtcttcaacatggaggaattggtgtttctctgtaagaagagattgtttttacactcttctgaaatattgtttgattcatctagatcaaaagtgaagcttgacatgctaagcggagaaggtgacaggatgtgatccaggaggagctgtcctttgcagaagtgacccttaaattgtgcctttgtccctttctagtgatgtgacctttgtcaagcctcaggaggaccaagagtc

SEQ ID NO: 23785 - DNA, 1206 bp, Mus musculus
tgtggtttgctgtgtagaacagctaacagtaactttctgcgtgagacctgagccaggacaagcctcacttcactcttagacacatcccggaagcaccgtccagagcattcctcctcagtggctactgttcatgatgatagggagccactccgtagtgattccgtgggtccctttgaatagatctctgccaaaggtgcactttctccctaacccccttctttccctagtgttctacgatgatgacttaaccaacgctctgtttaacacactttcccgactggtccacagactgaaaaatgcctgcaccgccatcttctcagtggaaaaaaggtgagctgtgctgccctgcagctgcatccctccctcgatacagtcgtcactgtgcctgtcatacacctactgtgtgctggtgtcatacacctactgtgtgctggtgtcatatatctactgtgtgctgggctgggctctccactcatctccctccctgcagctgcattcctccctcgatgcagtcgtcactgtgcctgtcatacacctactgtgtgctggtgtcatacacctactgtgtgctgggctgggctctccactcatctccctccctgcagctacatcccccaatggatgcaggagtcactgtgcctgtcatacacctactgtgtgctagtgtcatacatctactgtgtgctgggcggggctctccgctcatctccctccctgtagctacatcccccgatggatgcaggagtcactgtgcctgtcatacacctactgtgtgctggtgtcacacatctactgtgtgctgggctgggctctccactcatctccctcccctcacttagtctctttaggcactattgtcaggcttccacacttacacacacacacataccctatcaacacactaacacacacaaatacagaaacacacatgtatgtaacacatgtgaagaaaaaaaaaaggatagacaagtgaagaggttcaattcaaggtaaaaaataattttacagattctggtgtccaaaggtacaaatggcggtgccggagaactctgtgtgtgctccttcccctctcccctccccctccccatacccctttacccctccccttctttcttctgttctctctctctctctctctcatctctcatctctcatctctgcctttgctcccagcatgttctgtgcccccctttgccacaacatctt

SEQ ID NO: 23786 - DNA, 1211 bp, Mus musculus
ttttagtaatttctttcctttaagaatttttcttttaattatttgtgtgtttatcactgtgcatataaggagattggaggacaacttttccaagttgcgttccttttagcatttgggtcttgtgggttaaattcaggttgtcaggcttgacagcaagcccctgcacgcactgagccatcctgctggtcctctctaaagtaagcagagcatgaacacaggtaacagtagactagacgtgccaaagtgtgtgtgtgtggaggggtcccaccacaggcctacacaaagagctacaggcaacatgggaactctgagagcaggagtcttcctcaggggagggcacacccagtgtgaagtgggcgaccctgaaaactggcacatgcaagcacagagtgagccggccgtgtttagaagcatatgcacggacacaacaatattaaggagaaacaggccacgaacttgaaagggcaagggaaggtttggagggaggaaagggaagggggaaggaagtacatgtaattctattgtaatctcaaaaaacccttaaaatgtgcatatcagattataaccattttcaatgtcctggacatgtagcatatccttgcgtttcgtagctgtcgatcgccgctggctagttccagcacttcactctcccagataggatgtaggcacttaggccatagctgtccctgccttcgtcctctccacctctgcctgtttgtaggcatcagttaatctgtctgaatttgttattctgacatccatgaagggaatcatgatatgtttcctcctgtgcttcccagtgctaacttggtggtgttcagagattaatacacttgagtcaatgaaagtgtttgtgggttagttctttgtgacttgactctggggtgcacttgaatgtgaatgtatatgtatgcttaccaactcagcaggtcagtggacatgatgggctatctcctccactcctcgatatgtgaataacactgaagtaaacagtaaacaagtgcttgtttttgtccctgctgaggatagagaaggacataaagaaactaagcttcttaagagcctgtaggtcctagtatcctccgaagccatgcttcagtgacctaacttcagtaggtcccacctaggattctttttagctttgtttttttcctaaggtacttaaaaaatgcatgtatttttatgtatatgggttttttttttctacttgt

SEQ ID NO: 23787 - DNA, 2983 bp, Mus musculus
atgttccggtggaaggcgacgaagtcacctataagatgtgctctatcccacccaagaacgagaagctgcaggctgtagaggtggtcatcacccacctggcaccagggaccaagcatgagacctggtctgggcacgtcatcagcaactagggacctgcaagaaccccttctcctgggcttgagggagactttgggggaaggaggagcagggccatcctggatagaacattctaccatacaagatggggcctcaaggcgggcgtggcccctctcaagcatttcctggagggaaggagttgcgggcaggcaaggggtgctctcagccaccagtgcagcctccagccattgcaacaagctctcactgtctgaaaagcattaaaagcatttgaaaaggagaggcacctgcggaggctgagtggcgagggtgcagtcccagcccaaggcacccgagtaggtcaaacgtgctattttcccaaatgccccctcagatcaagcctgtaaggactattcctcagatctactcggccccctgagggatgtcaccagccctatgaagacttcccatgacccaatgccctggtcggggaagcttcccaggggactttgcctcttggtgcctttgcagcaggtctgtctccaccttcaccttctgggaaagactctaatgcttaggatctctgctgtagcacagtaacctgggactgggcactggcaccactccggagaaggctgggcttttccacttggcctctagggatcaggcggcctccatgtggcattaaaagcctatcattaaagtagtgctgggggtggctgtgggggtggggaagagacctcagcaggaaggcccaagaggggagggtggtgctttatttaaaaacagaatccaggctagtggtgcatgcctgtaatctctgcacttggcaggttgaaacagcattctaggccagcctaggctacaatctgttaaaacaagggctggggatatagctcagtggtgatgagtgctttacttagcccagcgtgtgaaggagtctccgttccactgctagcataaaccctaggatgttgacactgacccactgaagaaaggcagcttcctttctgatggccttgtaaggataggtgttgaaggagaaatcaaaggtatattctctaagacatgcctaaggatcttttcccttcttccccagtgcttggggagcccagagccctggaaatgccaacagcacagagctatgacgaagcctcggcctgctttcttttttggtgtgtgtagagttggggtttggggaagacaggctcctgctgtatagcccaggctggccccaagctcttagcacctttcatgccttggcttcctatttgctggggtcacaggtgtgccttcactccctgatgctttcttttttaatagctcagacttccacagagccctgttttgcccctgcctgcaacactggagagctgtgtttcaaatgaattgatccctagactttttggtggttggctttagttatgattcaaaaatagaagtagttgggaaatgggttttgaaatgtagctgagagctcacgtgtcagaacagggacgcccattctacagtggtgactgccttgagggctgtcccccatcctaaaggtacaaaggttgtggctttcagacatagggtaaagtgtttaaaaatgagttgggtccccagaaaaagctaagatgcagtggtgcacacttaggtagtcccagaactgggcaggctgagccacaatgcctagggttggccatctagccagcctagcttatttggcgagtttgaggtcagagaacctatttttgtctttttaaaaaagtgcctagcacctaagaaacaaacaaaaacgtgttgtcttctggtttctacatgcatgagaacacaaaaaaatatgtggatacacttgttagggtcttgtgcagcggactccagtaccacccagctgaccatctttgttgttgagctgccgatggtcatttttctacttggtcaaacatggccttttccccacaccaggcttggtttactgcccagaggctctcttgaggccaaggaacagaagtctagacccatgcttgccatgacctaggaaggcggctccctgagaccgacaaccttctgataccccattgttcctagtggccaatacagctttgctttcactctggtatggttagactttgggcagcacatggttgacctgctagtgagccctgtcccccactgagctggcagactggcctctgaattcttctgccccacagaaccctttgtaaagggcttttcttgtatggtcacttcagcctgtagacttatcccggaactgcaaggtgttgggaaagacccctgtgatcagagagtgtcaacttatagataaggagggaccccagcatccagtgctggagactgatagactcccaaagctagatgtttgagcccataagccaactctttctcaataaagtttgttttgtgcaagatgaggtgactgtaaaaggttgtgtgtgtagttctgggaggtcagggtgcctgccgctcacatggcagacactcttacagtgtgcttctaactgacaaggtccctttattattccaacaccggaagctgagttctggaacaggcttgttaatgtggtggattatgggcaaatgccctgtggtggtacacgggatataggtaaatgtgagaagggccttgggtttcctgttgcagatgtttgaagggggccttgaggctctccagggaccatgtgggggagatgggagaggaggctacccctcatataggtcctgtggcccagctgccttggagcagaggaacagcaggttgctgatagggtaatgacaacccagggtgggtgactttaccaagggatggggcttttgatgtttctgtgattctcccagtggttggggaaatagccagcccatcaggcctgttccggtaaaggccagg

SEQ ID NO: 23788 - DNA, 1681 bp, Mus musculus
tgagtcttaatggtttgttctttgtccctgccaggtaacatgtctcatcctcggccttggctagggcttgaccacttcaacaaagccccaaagaggagtcgctacacttacctagaaaaggcaattaaaatccacaactgacttccttcccgtgtccaaggcgagggacagtgcgtgggtgtgtgccctttttaacagccgtagacctctggtgcacgtgcactctccccgaagtctccagcaagaggatttgctgctgatgttttattttgttgaggctgttcagtttggcttctctgtatctattgactgccctttttgagcaaaatgaaggtgtttttataaagcttggatgccaatgagagttcttttatggtaaccacaatgcaaggcagccatccgcagcatgggagaagaggttcctagggggtgagtccctggcagaagtccctggttggcgcaggcagcctggccacctgcccaggtcctgccaccagccctgcagctagtcaggctgatgagtaggctcgtccaatttcttccttcagttagactttcagtgatctgtgtgcatctgtaaaggcaaaccagagaaaacagccctagtcaatagtgttctcctcaccatgtccgatgctggcccttcctggggctcctctcctcagctgcctggaggctttttaataaccgtctctctttgtcagctagtactgtagcagcctgttcacgaagtggaagtggatgcactgagtgcggtcctggcagttaggggtcttttatacactgagaacattgtcagatacaattaaggtttactctgttgcccattggcaaatgtaatgatctgagcaggtgaaaagtcactctaggcttctgtgaggacagagtggacgagcgacaaaggagagagccttttagcaagggcgcatgctcgctaatggttagtacgctgttgactttgtaaaaaagataaaataaaaaaggaaaaatggaaaatgaaattgtatatttaatgaatgaaacctgtacaatttgccctgggaggaggccgttttctattgggtgagtgcgagtgaccctggccgacttggacactctgcgtagctttatttgagtcttctccttgtttccctttttgttggagctaatgccagctgcgtgtctagtttggagtgcagatagaaggagcaagccacacttctttcccacccccagtacttctgtttgtttctgtagcagcagtgtacaccaattctcctgtatattgcctttttgctggaaaatgttgtatgttgaataaaattttctataaaaattataatccgatgactgctgtggaagccgagggtgactgctcccctgggagctttgcgttgagccaggctttcagccgccacatgctttctcacctggccttttcctttgggtggcagtttttattttctttttgagacatggttttgccctacaggcctgaagcttgctgtgtagaccaggctgatcttgaacgcacagaggtccacctgcctccgcttcccaagtgttgggtttaaaggtgtgagctcggctcctggcttcccatttggagcttgaggggtaagggtttgtaaggtgtggtggcagttaggaggctgggggaggagcggcaagtcagcctgtgctacgcagacagaccctgaca

SEQ ID NO: 23789 - DNA, 1166 bp, Mus musculus
tgtcccacaccacacgtggttgccctcagtgtaactgctgacctgactgttgtctggtgtgttactccccaccccccaggagtcctttgtgttactgcctgacctcagtcctcatgctgctgtttgttgaatgacacatgctgattttagtgatgtcattgtattagttgttgctctgttgtcactgttccagggctgatgttaccgtgccccccatgcaggtgcattttctgcctggttccttgagtttcacacccactgattgtctatgcccagtcccatgctgccttaattgactaagcttataaatgtttcagggaagtacttgagtccctctcccttttctgccatctttcagcagggaaggtgcactggcctgtgtcactgtagtcagtggatggggaagttgctgttcatactctgctggatgtccttgtcacattgatatgtaatgtcacccaggctgcctgtgcttgtacttgagctttgttgatcatatcgactgacctattctttttgtttctttttaaagtatttgaatcatttgtggattatgtggcagtagaacaactagacggtgacaataaatacgatgctggggagcatggcctgcaggtaacttccttcccgagctgtctccggttctttacccaggcacggatcacactgggctgtgcgcttgcttgtgcttttgagattttgagcccataggcattttctctctttgaatggtctggaggatatttgtttggtgaagaggtgaaatgaaatatagtgaccctcctacctttgtctcctacattaccacttcaggttttttaggggttttttgagacagagttttaccatgtcaccctggctggcctgcaactcctgtctctgcccatcaaacactgggattaaacacggaccccatcacatccagcttcacctgtttgaatggtctgatgaggtgggaggatatttgtttggtgaagaggtgaaatgtttcattgacagaactagcagagtaggtgaaatgtgctgtgagggttgacagtttctgttttgtgcctcaccagaacatttcctgacctttgtatcagaaagtttcttggttattgttttgtttcattttttgatacaaggtttactctgtgtagccttgggtaaactggctttgtaga

SEQ ID NO: 23790 - DNA, 1081 bp, Mus musculus
tgaagtagtactttactgagtgcagagtacaaagacagttgcttcttttgagtaaggttgatcttgtgtattcttatgcgagttgatatttttattttacaggaagtgactgatcctgagaaaggattcatcgatgatgacaaagtcacctttgaagtttttgtacaggcagatgctccccatggagttgcgtaagtttttgtccagttaggttctcctgtactgttctgtgacacacgagaatatgcctaagagatgctaaccgtcttgagtttgcccctatactcaacatcatagttacctactttatacccttaccagtgggttttctaccagccagcactggttttccagtcacagtgttatctataaagaaaccagggccttcatgtgtgtggctgtttgcttttattttgaagactgcacaggtatgaaaacctgtcacaggaaatgtactggggactactgacaggtaggtccctttgtaggtgtgaggctcaactctgggctcttggccaggccctgggactgcagtcactcgtcctctctggtgttgtcagtgttcctttgtcagcatgctagatatgtagccggatcagaagtttgctgggaagaagtagtagttttctgtttagcagtagatttctctctgctgggtggtcacatgggttgaaaatatctgggacacagcttagactaccattttaagtagccattcagcataacaaagagttgctgcccttgaggtttaaaaatgcattctaaaacctgaaaatctacattcctgtcttctgcataaatgtatttctatagatttggtgatggggttgtctgccacgtcttatacacattaggcattcatatttttggggtgtgtgtgtgtgagagagagagagacagacagacagacagagagagagagagagagagagagagagagattgagatcgatcatcgatctgtagtcacatttgatgtaaaaggtagcccccggtgtcttgagtgctgacctttataaatgacagtggtgctgagaactgttaggagactgttaggtgaacgctgaaattgagtgtgagtg

SEQ ID NO: 23791 - DNA, 1109 bp, Mus musculus
aaagcttgctagaaaagcactcttacctagcacagcttatttcaacaacctttaattcctgcaaaactgaaacccctttgtagctgcaatctggattattttaccatatttgaattttagtggaataaaagcagcctaatgtttcacttactaatgtttcaggatgcttgtaatttagaaggatgtttgagagtggtttgttgggttggtattttgacataaattgtgtttaaaggcatttgtgataggatcagactactgccaggtgccattgaagagaattcttttaggatctgacacccccaaacttgtgtatgcatcagactggtcacgttccagatgaccaggatcaactaggaataggtccttgaggattcgtcaaggaagtgaatgatatgctctgcctatttcaacccatagctctcctaggtttatatgtgtgctgtttgttttgagacactgaatccctggctatcctcaaacatatccactgcctcttgggataaaggcatgtgcgaccatgcccagtttatggggtgtgtgtgtgtgtgtgcgcgtgtgcgcgtgtgtgtggtgtgagggagagcttggggggaaagagacagtgagaaacacatgttcatatgctatggtgaatgcatggagctcagaggacaactttgagagttggtccctccttccactgcatttcagaaggagtatgagagttcttgggcaagcactttaaatagggctgagctattgcactgtccacagcccttctgctcagtaacagagagaggtttgcatataaagcagtttttaaagaaatcaacagtatatgtcgagaagttgtattgtgacccttttaaacacaggcagcactgacagaatgcttgagaacttatgacatttgaagggtgatttgatgtcattgaggggaatagatataggtcaaagagattctgaagtacccatttctttttgccttgcagctcttatatgctcattgtttagaaaatttagactaggtaaatcaccaaaacgattctcgctggctcttacaaagcctttgtcatttgaaacctcattgctttgtcacctggctggcacttggggcacaaggcagt

SEQ ID NO: 23792 - DNA, 1189 bp, Mus musculus
gttttttagaagagtaataatactgagccagggaattgctgctcattcctcaagtggaatcctgggcagcaggtgtgtgtgttttcacagtggccggtggtgaatttcacctgcttcatacttgctcggaaccaatttggacttgagaaagttggaagaaggaaggttttcaggcatcgtgtgttggctgtatatgcatggccagcagggagttagatagatgacattgttagccagaagcagacctatggcagaggttgggaattgaagcttctttttttttttttttttttaaagatttatttatttattatatgtaagtacactgtagttgtcttcagatacaccagaagagggcaccagatctcattacgggtggttgtgagccaccatgtggttgctgggatttgaacttcagaccttcggaagagcagtcgggtgcccttacccactgagccatctcaccagcccccgaattgaagcttcttactgcaaagtcgtttacagagtttcttagggcagtatactgcaaggtatagtacacaaggtgatggatactcagaatagactagcaattacccaaacaggacgagaagagggatgaccaggagaagccctatcctgggaacaagagtgcttgcactagaaggaaaggtaggcagcaaggtgtctgttatcagagatgggactgtgtacccagcccacccacttttcctgtgttttctgaatggaattcttatttcttgctcaacccctgaggtgagggtggaggtcactgctgagacagagttgttggtagaggcccagatgtcctgtcaaactcatgctatcaactcacaggtgcttcagatctattggtgtttggaacctgggagccagcgggtgtggtgtcctagtttcaagctgatgggtgggccttcattcttttgggtgactgagaatggaaatttacggaggagagttgtgtgtggtttttaggcttgctgctgactagtaaaacctggtccttcgttctgatcccataccagtgctaagtaaggatccttgacattctcggctgggcaagcagaactgtaggctaggcatcagccccagaatatgctccctgggagggtctgttcctgatgaactgactgttgcttccacggtgctgaatcacatgtgcagggtggtttctcctgtggcgtag

SEQ ID NO: 23793 - DNA, 1134 bp, Mus musculus
ccaggttttctgcagctgagactggtctcgagtaagcttctgctctttctgcctctacctcccaagtgcttggactctcgattaatgaccaactaatcccggtattgatgtcctgtaatagggatatgcaatagaaaactaaatgtatggcaggactgtgtcttcctggtgcctggaaacccttgttcaggaggtcattggtactgccttgaggcaggctccaattggagtgcagtctgggcttgaggatcctgcacgcctgggtgctgggatcacccgctttgcaccaacacacagctgctttattgtagtgttactcctagtgactgaatactactgggtggcggtggcggtggcggggaagacaggtctcaccagacctctagacttaggagggagactatgttcttgctgggttcccacccacattctcctatcaggttttccaggcactatcttaagtgggacccttgttgggactttggctgtagtgtgtgtttgttctctttctttctttgtctctgtctctgtctctgtctgtctctctctctctctctctctctctctctctctcctctctggtttttcaagacagggtttctctatatagccctggctatcctggaactcactctgtagaccaggctggcctcgaactcagcacctggaaggcgctaggattgaaggtgtgtgccaccactgcccgcctggaatagctctccttatggtctgttactgccaagctgtctacctatgggactgttagacctgccctatgaaaaggaagggaagtgactcataataacaccaatcatagctgggcaggtggcacctgttgtcctgtctagcacttgggaggcagaggcagaagaatcacaagttctgagtagttatgggccaagtattgaaatttccatttggtctcccataaaacaccaagcaagacctcaagccatttgcatgtcgtgttcctaaagagcttggcaggtcatctgaggtaaggccctggaaaggaaccagtggatcctttgctgtacctgccttcatccagccctttgcagacctggcttggaaaatgaccatttcaggtgcctctggattttgcgagataagttttttgttttttgttttttt

SEQ ID NO: 23794 - DNA, 1147 bp, Mus musculus
ctggctctgtttgttttgaccttgagtgtcccacactctagaagggccccaaattgacctgtagcctgtgttgatgctgaccctgccgggcagggttgccatttcttttgatgttgtttgttttttgtttgttttgtttgtttgtttgtttgtttgtttttcctagacaaggtttctctgaagccctggctgccctggtactcactctgtagaccaggctggcctcgaactcagaaatccacctgcctctgcaccactacgcccggccagggctgccatttcttagttcccgggacacatgtagctttaggtttgcactcagaattgagtggaatgctaacgaaccttgcttgggctaaggaacaggctgccttgcagctcatttctcgtgttcatggtatagcagtaagcatggtgacatctgaacacgagtgtttcaacctttatcatgtgagtgacaaaactaggccgtttccctgaccagaaccttcagtttgggtccttcatgggctcatctcactctgatcccaccaggctggcagacgccagtttgggctacaaagtgatctttaggcgagccagggcttggcaagacccactcccaagaaaaagaaaaaatacctcccaaattcaccatgcaaggtggcacacacctttgatccccacagggaagcagaggcagttctaggatggcctaggctgctaagagaaaccctgtctcaacaaacaaacaaaaagcaaaacaaaatctcccaaattgacttcatcgaaaggcttgaccctgaccgttggcccaagtcctcattcctttcttgggcatgattaggtctgcttcctctgtggatactggagagaatttttcagagtaggtacaagaacaaggcctgtcaattctatatccactctgatgccttatctgccaggtatcaacatggcttccaggtaggtaaatatttcggttctgtagaaaaaaccccaatccaatgtttatgctgagtcatggcacctgccctctttgcaaaatgtgttttgcccgcagtatgatgatagggcagcccttccctcccctgcacttagcagctctaatgacaaatggacctctcccagtggttcccatctctgagtgttctgcctcttcaggcctcag

SEQ ID NO: 23795 - DNA, 1148 bp, Mus musculus
tgtctgggtgtgaagccactggccccagctcggcgggtggtggacaaggggtagtcctaggcaccaggttctcagccatcggacctggtgctgaaggaaggagagggccgggggagagggaggcgctgggtggttcccacgtgggtaagagaccttggtctggtcagtggctggagcgcaggaaggccttctaacgggaggttagatgcggctggttatgggaaagcctatcccattgttgaagcatagtgggccttgatgagcagagacagtctccgagctttgttgtaggaaggtagggagaaagaaggtagaaagagggaggctgtccatggccgcgtggaggggggtgggggggagggagagagaggagggctagagatgagagtaaggatggtgagagcttaaagagtgaggaggggccaagcagctccttttatagtgggctaggctatcttgctgttgccaggtaactgggggtggagtctagccagaatgccaggagcttgggactttgcctgacttatagacacagaatcatggagttggggactctgtggtgtcaggcacctgactctgggaacgtggctcgcttttccgtctcttgtagagttttctactgggttgccggagcaagcctcattcaaccaaaatagactgcctatcgtggcctccccctcccctcccctcccctcccctctctctctctctctctctctctctctctctctcttctctctgttatttgagactagagagatggctcagtaggaacgcctgcttctttcccagaggacctggatttggtttccagcacccacagcaggtggcttgcatccccaattctaaagaattagaattagagtcttctttgggactttcacacatgtgctgtacataaactcatgtagacacatacttatgtaaaaatgaacacataaatgcctaagaaagatgggtttactttcttctctgtgactgcctgtttgcctgtacacgtgctttttcggtttttgtttgtttgtttttggtttttcgagacagggtttctctgtatagccctggctgtcttggaactcactttgaagaccagagcatgttggatcccttggaactggagttgtagagggctctgagccagaactgaa

SEQ ID NO: 23796 - DNA, 1193 bp, Mus musculus
agacaccagaagaggaaatcaggttttgttacagatagtggtgagccaccatgtcgttgctgggatttgaattcaggacctctggaagagcagtccgtgctctttactgctgagccatctttgcagcccaagtcattgcctcctatcgttcatttattatcaatgagaaggctggggtgcgggctttggtggctcgcgcctttaatcccagcagagggattgggaggcagaggcaggcggatttctgagtttgaggacagcctggtctacacacaaaaatcctgtcgaggtttcaaatccccagtctagaggtcgaggtgcctatttaacatatcaaagccgacctggctaccggttctcccagcatccctcaggccctactgttacagggtatgactagcatcccctgctcgctattctaaacttttacagaccagaggctgggctgctcttccctatatgatccagccattttggttacctggtctcttcatctaccttttacgatactggcctattggtcggattcttctctgtcccctccccctgtcttcacatggcctggttcagtctagtcgcgttccctctggactctcccagatgcctctatctgtgttctccttctgtctacaataagctacctcctccccttcctcctcctccaccatacccgagaacaatatgtgccctatttatttttttcattcagtagctaaaagatggctcagttcggggctggagaaatggctcagggattatgaatgctggtgacgactcttccagagaaccatggttcaattcacagcacctactcagcaactcataactgtaacagttgttccaagggatctgatacccttacatagacatatatgcaggcagaccaccaatgaacataaaataaaaacaaaaaagatgggtcggtggttaagagcacttgctatcttacagtggatcctggttcaattcccaggacccacatgtggctcacaactgatggtgactccagttccagttccaggggatctgttgccctcttatgccctcctcaggcccaagacatgcagcaggtgctgcagggacacacacatataaaaacaaaatcaatcatcctttaatcccaacacatggaggcagagactggtttggggccagcctgggctacaaagtgagttccaggactgccagaggta

SEQ ID NO: 23797 - DNA, 1099 bp, Mus musculus
tgttgtttttgtttttcgagacagggtttctctgtgtagccctggctgtcctggaactcactttgtagaccaggttggccttgaacacagaaatcttcctgcctctgcctcccgagtgctgggattaaaggtgtgtgtcacctatagatgcacaattcactagcaaccaaaaagggacagttgtgatgccctagtagatgcttagagaggccggacttctggaagcggggagccacaggcccacaggaagttttttttatagtagcatcttttgttctgcatttcccgtgctctggggagtctactcatttttagatttctttttctttttctttttttttttcttgaaggtgctgagaaatgaacctaggatcccgttcatgctaagtaagtgcttgtaaaggtttgaatatgcttggccttcaggaagtggtactatgaggaggtgtggccttgttggaggaagtgcgtcactatgtaggcggactttgaggctccgcccagtagggatagaaggtattcctggctgtcctcagaccaggatttcgaactcttcctgcaccgtgtcttcctggacgctgtgatgcatcacgtcgtgacgatagtggacctctgaaactgtaagtcagccccatttaaatgttttttataagagttgccttgttcctggcgtctcgtcacggcaatgcaaccctaacccagaccgtgctctaccactgagtaacatcccagccccttaaaaaaaaaaaaaaaagtctcgccggtcggatgtggtggcgcacgcccttaatcccagcactcaggaggcagaggcagaggcagaggcagaggcaggcagatttctgagttcgaggccagcttggtctacagagttccaggacaaccaggggaacacagagaaaccctgtctcgaaaatcaaaaaacaaacaaaaaaagaaaaacgtctcattttgtttttgtccttttgtttttgtttttgttttgttttgttttggtacagggtctagtgtccattcctaacctcaaacttgatatgtagctaacaaaggccttggatttctgatcctcctgcctctacctcctgagtgttgggactat

SEQ ID NO: 23798 - DNA, 1212 bp, Mus musculus
taagtgataaagtagattatttggggtctttctggctctaaaaattgttctcctgcccacagggagtctatttctattgattgtatttttttcccctcctgggcttggatgggtgggaaattgctaaagcaatttcagaaaaattttcagaaaatatttaaattttatgtttgggtttcttttatcagtgaatctgggttaagtgtattcgaaggtatatgcttcgtggccagttttatgtacccttagcttactgtggtaggaagagcatagctatgtgtaggccacaatatcctgtgtaaccttgggcaatctgcttaagatctctaataccatctttgtaaaagtgatctcctttatatgagaaccaactagattgcttacctatccctctaatgatcctgtgtaaatgttcttgcttctgacagccacagctttttttccctttactgtagtaaattatagctatcactccatagggttaatcttgcctacatgtatggttatatatcatttgtgtgcattgcctgtggaggctagaaggcggctttggatttcatggaacttgagtaacagatggttgttagctactgtgtgggtgctggaaatcaatagaagccagtggttttaacctttgagctatctctctagcctctgctgtgtgtgtctcccccgtttattactaaatcttgagcttagttcctgtgaacaagctggagaagttggttctgagttgccctgttgaaactagtgctatttggagagccttagtctgaagccttcagggagtcatcatggagataggtgcaagggtgcatagtaggaaggcaggcacattccagagagagggaaggtttgttaactaaaactttactcatctgaaaactatttaagcttcattctcctaaaacagttggttgctaactctggtccacactgactcttaaaacgtaaagatgcttttattccagaaattatcttgatgacattcttgacttttatgctagacttaaacccattgggcttaaatcgttttaaaagtattgccattttagttagatttattgtcactgatgagaattattgctcttggcatttcaatttaagataccgtgttctcaatcttattttttgtgtgtgttgaaagtcagtgagctttgggagaaggatttgggcaaagtcaagacagtggaggctttttgtcacacttga

SEQ ID NO: 23799 - DNA, 2235 bp, Mus musculus
ttatttttattttttggtccatttcctgctgtattgagtatttttacttaaacagtattgccaggttcctacaattgtctaaaaccttgatctggcttgcaagccagatcttcaggcttccatttttgcagccacactgaaccacacatctggtttccatagtgatagtgtgtaatttctgattatcagattatgcccagttttcagttttcaaaacagttttcaaaactctggtgattgtgagatgtaaagaggtgctatggtggtcatgcaagtaatacgtaatatgaatcaatacacagaactctatcggattcactttgtgtgtgttagtgctctgaaaatagcaatattaaactgtccccagaataaccctgtaggcttcaactcagttttaagacaagtactacttcctatgccaggtacttaacttatggttaaacacagactgcattcaaagtgacctgaaaaacaggtcatgatctttgagagtgggcttcctttttggtttggtagtagtgagaggaaatggacggtgggagtagatatttattgtttaggttttttttgttgttgttgttggttttttttttttttgtttttttgtttttgcatttttatggatgccctactgtgtgtagttgtcatagtaggtggaagatgataaatatgttttatctgctactaatgtgaaagtaacttaaatagcaaaacccagcttttcctgtccctccatttctctcagaaatgcagtttggactttccttctggaaatgatgagatcgcatggaggttttctagatgttaggtagacccaaataaaagctctcagagtcctctttgggtaaatataagacctcttgtagctacaaccttttagagcatgtttcatctgcatttttactactttgaactgaatggtagtcttttttagaagactgatgtcagcctgccaggtactgtaattcattctatcctattatattatatatcaagtaggacagtgaaaaatgtttccttgcagacttgtagtccagtttcagtttcttctatttttatccttaataaccactgcaaatcagtgtaagggtttttctggtaattacagcactttgttaaaagtttgcaattttgtcagccattaataatacctttctgtgaagaaaccttactaagttaaccattactggctgagtgggatgtgaatggaatgttagaaatgttgtgtgaattgaagttctgtattcattatagatatagcccttatttaaaacagtgaagtccatattcagactaggaatgaaagtaaggtatttctcagtttgtgcaaaagtggagctttactttgtttatttgaaaagcaggaaaaattatagcaatctgtcattttaccttaaatggacaagcctgggcatcacaagtacttccaggcttccctgggatataccaagacatggagttcaattttgcttttctgtggttgtgagtatagatgctggaattggggtttgacggtgtgatggctgctgacaagaagccagaactcccattcctgagggacttgagactgaggaccacgtttcatctcccttcatgccgtgttctgtctcctctgtccaagttgactaaggatgttcttggttgtttggtttcagttggtgctctgaagctgaatctcagtgccctttactcgcagttgtcaaattttgataaaacgtgccattttctttggtaagagaaagcaggtctaatgtctgccagaacacaatttatatgccgaattattggctccattaaactttttaaaaactttagcactggttacttttttccattgcattcaatatgtagcacctcctcacctcatgagtagcgcttccttccctactgccgctcctgtcccttcctccctggcctgccagagtagaagaactgagaccggcccatcagtacaaagggaggtggtttttaatcttagcgtgagttagtctgatgaagttcagaatcttttggaagtttttattagttaagatgcagaacatcaaagatgaccacatactagtgtagtattaggcactgactttgacttttttactttctttttttttttttggacaggtctttttgtgtagttcatgctgacttctagcattcgatcctcctgtttcagttgcctaagtgctatggtttactggcatggtgcttgcttggccttttcagccgatcaagaacaga

SEQ ID NO: 23800 - DNA, 1112 bp, Mus musculus
cctttatccctgtagacagtttggggcctgcttccatggtcatgtgcatgtgcgtgagtgagtgtatgcgtgcgtgagtgtgtgcgtgcgtgagtgtgtgcgtgcgtatatgtgtatgtatgatttcctgtatccacatagaattcagaaactacaaatgaggaaaccatatttatttgttttttttttttaaggctgggttaactaatttaacatgaatgagtctgagttgtatccattttcctaaaaataatacaactttcttctttatggcagctaagaagttccatgcaatgggagattgcaagcttattagtttctggagacataatgtcctctgcaggctgatggttttaatgcctgctccccaggagatgaggctgttctgggatactctggaaactttaggtgggaggacctctctggagtatgcaggtcactctggcctctctgcttcctggtcagctgcaatgtctagaattctccaccatactcttcccactatgttctcctccatgtctgcctggctgtgatgggttgaaactctctgaagccatgagccaaagtgattctctcagcctgaaatttgtttccattgggtgtttgggtcagagtcagacaatgtgaatggagctaaggcaactgcactctgatgagtccaggaggaggtgagcaaggcatgtgctgcaggggtcggagggagcgcagatgagcatgggacatcactgtcgacagctgagtgtaacagaaggacaaacgtagctcttgtacttagttccctgtatctcagagtatgcattttatcagtgtcttcttggcatgataacaattactataaacctagtgttctgaaggtcagaaaggtctcactggataacatcaaaggggcctgagggatgagttctttctgagactctactggcagaagggtgactttggtttttctaggttctaaggcacctgatatcccactccctccagcagccctttgtcttctcccttctgtgtcccctttccaccctaaggacggcattgcaatggacctagccaatattcaaggttgtctccccacttcagattttacccaaattccacctgaaaagccctctttc

SEQ ID NO: 23801 - DNA, 1183 bp, Mus musculus
attctgtgttctttgctcatcaaattggatggatcttgcgatctctccaatgtcgaatgtggctgttgtgtgctgttctcacttgcttgggctaagatgtctcaaggaccagtttcatcctgcactagaaatgcttattagctaggatgagtgggacacagaagagatacccacttaaagcagtttagtcaatagcaatttatttctaaactaacataattcaataggaagtgcgtctgaaattgcttctagtggtcagctgtctgtcatttctttagggaggcttcctctcatggagccaagatggccccttccacaccgtcatccggttcctcatgccagtgtctaaagtaggtaatggtgtgtgaatcgctgatggctagatagccagtaaggtctggggccttcactgctggtcatcagcatagggcctgatgtttgaccccttctaatctggagctgcacactctgggacatcattgtctcagaaactctgagtggtttgtccacagactacttggggctcagtgagtgttccctgaaccccatcagctgtgcttctcctactgctctctagagtgtagttttcagttaaggagcctgccattttggacagtgttttctgtagggggttataccaagtgctgcaaagcattcaccagcttgctaggctctgtgcggtggataacagttgtgtctcctcaattgtgtcaatataacatgcccacagacatagcccagggttcagacacaactcaaatccctgtgattagagccatcgctctgtgactctccaggttctctctgggttcagtatgaagccagtaagccctgagctttcagcattctgtgctctgagctctccccttcttcactggttcaggtgagcaatatgaaggtgggcaagtctctggtatttacttgcctctcattctcagatgttgttgatttaagcagaaccagtctcatgtgagggacaccaacctggaacgttgttggggttaactctcttccccagtctatactggccttgcgccaacacagaaaactcattatgcacttctacagggacctgctggaggtgccagccaccttgttaattggctctcaacacaagtggaattggaaagaaccttatgtatgttaaaaggtaaaactagctttggtatgaagtagtgaaatt

SEQ ID NO: 23802 - DNA, 1145 bp, Mus musculus
ctggagaggatgtagagaaaaaggaacactcctccattgctggtgggattgcagagtggtacaaccactctggaaataaatctggaggttcctcagaaaattggaaatagatctacctgaagacccagctctaccactctgggcatatacccaacttgtaataaggacacatgcttcactatgctcatatcagccttatttataatagccagaagctggaaagaacccagatgtccctcaacagaggaatggatacataaaatatggtacatttatacaatggaatactactcagctattaagaacaatgaattcatgaaatcttaggcaaatggatggaactagaaaatatcatcctgtgtgaggtaatgcaatcacaaaagaacacacatggtatacactcactgacaagtggatattatcccagaaacttggaatacccaagatacaattacagatcaaataaaactcaaggagaaggaagaccagagtatggatacttcagtccttcttagaaaggagaacaaaatacccaagggaggagatacagagacaaagtgtggagcagagactgaaggaaggaccatccagagattgtcccacctggggatccatccaatatacagtcaccaaacccagacactatagtagatgtcaataagtgcttgctgacaggattctatattgctgtctcctgagaggctctgccagtgcctaacaaatgcagaggtggatgctatcagccaaccattggactgagcacaaggttcacaatggaggatctaaagaaaggactgaaggagctgaaggagtttgcagccccattggaggaacaatatgaaccaaccagtaaccccagagctcccagggactaaaccaccaatcaaagagtacacatggagggacccatggctccagctgcatatggagcagaggatgacatctttggacatcagtgggaggagagatccttggtcctgaaaaggctcgatttcccagtgtaagggaatgccaagatagggaagtgggagtgggtggattggtgagcagggaaatgggtgatgagataggggggttttggaggggaaaccaggaaaagcgataacatttgaaatgtaaataaagaaaatatataatttttaaaa

SEQ ID NO: 23803 - DNA, 1145 bp, Mus musculus
agtgttattaaaggttaatgtggaagtagtggagttttctctcttgcataagcctgcaaagagaactttgaaatcatgttgtgctcagcctgggtcagccatagctatataaatgatccaccatgcttttgggtatgtaatattatgctttccagtccatacctaagaatttttatgcataagataaaaaggataggagcatgaagtaagaaggagcagatttggggatcagctagactctggctcagagctgtttagattactgacaagtcagtgtctttagctaattacaaagttctctagatttaaggcatagacactcaacattccagggaggcagtgggatttacagaggacacccttgaaactcaaagcctcccgccacaagtgaactagataactcatcgtgaacatttccttcctccagaccttggagaagcatcggcaccagaggagtgaggagaaacacgcaggctgtgaagattttcttctgtcgttgtccctgctattctttacaaaatgctgcagaactcctgaagctcttgagtgcatgcccgtccccacgtgcatcccacagtggtgatttctccatcatttaagactgagctctaccatgtcctcccaaaagtctgaatgctgcaccctgtctatcaaggtgactttactttttttgtgtgtgtgtgtatgtgtgtgtgtgtgtgtgtgctagaggtcaggctcagatgtgtttccataggtaccattcaccttggttgacttcaaaacaggacctctttgttgaccagcggatggccatcccgacccagggatccagccaccctgcttccccaacagtgggattgcaagagcatgccaccacgcctgccttttagagcgagaattctggggactaaactcaggtccctgtacttgggagacaagttctttgtggacagagccacctctgcaggcccacattcttttggtttccactaaatcgacacacctattttcttgtttattgtcatttagtattgtatttgtttgtatattttttccactccaacattagaaagtgttcatccagagtagagatttcggtctgttaacctgaatccatagcctgttgtgagtaattagtgttgtaagacatagtttgagtcaat

SEQ ID NO: 23804 - DNA, 1193 bp, Mus musculus
tactcttcctgctactcttcctgccactcttcctgctactcttcctgccactcttcctgctactcttcctgccactcttcctgctactcttcctgctactcttcctgcctcttcattgtggcagctactgtagaatctattctctttatcttatagtctgccaagccaagaaacagaagaaaagacgagtcagaatgtacttcaaccctctatgccacatggctcctgctgaatttcacccttttaaatgacttgatgtgagaacagaaagggcagactgctggtgggactccttataggatttggtggtaacctgatcccatcaagcaaagggtaatagcaaaagttattctgagctgtgctctctagcttcctgcttgctatgccttatgttatttctaagcttttgattgtgttatgctacctgcgtgcattatactgactgaccttctctgtgcatgtttgtgggattatctcaggcatgactgtcttgaaacacattatctctgaactcccctccccgccacacactgcaggatcatgtatcgaccctctgtgatgaccacatcagcaatcttgtaatttcctattttctctttcaccagccattagaacacttactagaacaatttgtgaggcacagaggcctacagatatatttgttgtagacactaaccttctgatttccttgtgttcggcttatatttattttccttttccttaatttcctcatcccaattaatctgttactgttttaattcccttttttttgttggaaaagagaaacattagacagctgagcattttaacaatcacaatgtatataattgacagtctgtggtggtttatcttcgttatcaatttgattagattgaggaatgatcaggcaattagtgaaagcacatctctgtgtgtgcctgtgtgtgtgtgtgtgtgtgtgtgtgtgtgtgtgtgtgaatgttccagagacaattgaatcatgagtgctctaacctaataaatagttttatccatcaatgaactgaaagtttcaatagactcttgggaggtggtgaaattgtggaaacaggacctggttgaagcaagtgggcaagtgttttgtgttgtgagctgtatcttgtctaatagaagaaattaagccactaggggtctatccttagaacactcttttaccctggcctctttctgtatgc

SEQ ID NO: 23805 - DNA, 1164 bp, Mus musculus
agaatatatttctgccaatttcttgatacctgaagaaaattacttagtacaaccctttttctgattatcaaaatctttgcctgactgaattgactgattggaaagcttctttccctccctactccctgtgttttgtttttgttaggctgggtctcatagcacaggatgaccttgaggactatatgttcatttattggatggattcttagtggagttttgtgtgtgtgtatgatcaccatttctggatcaactgttgtgggtgcttcacttgcttgttctttgattgcctcttttgttttcttgtttttaatgactagaagtttttgcccatctctttcactcagtgtgtgcctgtctgacttggttcttcaccatggcttctcacaagaccttcaggatcaagcgattcctggccaagaaacaaaagcaaaatcgtcccattccacaatggattcagatgaaaactggcaataaaatcatgtacaactccaagcggagacattggagacgaaccaaattgggtctataaggaaccacacgtacttatgctgtaacttactgtagcgtttacagcgttaccgctgtctggacagctgagtgtgtttcttaggaatataagttttctttctgtgctttagtgagttcattcagcagttcagtaataaatatgtgaaaccttttgtttcgaaaaaaattgcttctgtgttacaacttactttgttttatggttcaggatcatctgcataatagacaagtattctatcagtgagcgatatcctggatcttgtttgtgtagtttggggttgagacaagtccagactgccctaaaactcacgatcttccttcctcggccttctaaatgattggaggactccaaacctaagtgatggaagtaaaaagaaacttatatgtcaagactcattttctctatcatttcatgtgacaattgaaattagattatttcttttttcaatcaataattgctctctggtcctttatctgtgtcttatttaacaaatgttaaaaagcagcttttgcctcaggaagcagtggcaggtggatctccgtgactttgtggatagcctggcctacaaagctagttcctagactgtttgtctccaaaataagtgacaccaactctcttggcacattgctgacttctct

SEQ ID NO: 23806 - DNA, 1108 bp, Mus musculus
gaaagaatagagacagagaaggagtttctgcattcttgggatcacaaaccagaccatgaaagctggcattcagaatgcctgcctaccaaaagtctcagcaaggcccagcaagctccacaggatgcttttcaagggtggctctgtggtgtgggtacggccaaaggtggggaaagccagtctttgggagcagactctttgtaggagtctgcccttccctcttcccctgcccactccactctgacagccacaggtggaatgatgagggcccaaatgtgggacatctatgctcagatattaaacctaagctcacgtaagaagtgggcaaagactggccctggtttgtctgtaagagacccagagtttcccaacccccctgccatgagctaggtcatcacactaatttgttgatgtttgctcctgtttgccttaaggatagtgacccttgcctgacgcagatgtcatgtttaggcattaagtgtccataggtcattccgtagggcatctagtacacgtcggttcacaaatctacttccaagaccctcagaatccttcattaaagggctgggcctgggtgtctgaatttctgatgagctccctgcaatatggttaaatgcactataactggaggtcagagccttagaaccggggggagcagagccaccttgtaaatgttatcaggctaatcacaatgagatggccccactgctagctacgtctcagcctccatcagctcttgctgcctcttccacagctgcttacatctgggacacttgtgccccattcccaggccatacaagcctggaaggtgggctggacagcctcctccctgacctacatgggaaggtctctccttttcttcccgcccttttttctaatgtggatgcttccattaatcctctgtttctggagccttggaagatctgtcttccattcattcatccacccatccatcattcaacatgaatgggtcatgtcacgtgttgggtgcaagggatactctttcaaaacaatccctcacgagactcacagtctagtgaagagcacacgccagaaaccaattagagaagctaccaaccacgatggaacatcagggattcaaaacctcggg

SEQ ID NO: 23807 - DNA, 2239 bp, Mus musculus
tcagtcacatgctgagaccctcatcagtccctgaagtggaacaggaccgagtgccacctgctaaccccagagttggcaggccacgtgtccagacacctgggcaatgggggacaggtggtaccatagccaccagatgctgacaggatttgaagtcactcattaagacactgtaatcacctatctgcctatttcctcgagatcaaaggtacgggcgctctgcatccaggtgccattcatcagaaaataaaaatgtctccttgaacctatcccttagggcctgcttcctggaatccaagggactaggaactctctgagtcacaggactcccaggaactgtttctgcctcatgtgataagcctagggagacacagaggggggatgacactgcctgtgcccacactggggtctccagctctgggaggtctccagtcatgctgggatcggtgtgggtgctttggctgggggccatcagagcccctggcaaagcctgtaagtcacccatgaggtgacggtgccttcaagacatccggtattgcccagggtcccaggcaaaccatcacctggcacgtctgaggcacagatgtaattgtcctcgtgatccgggactaagacgtagaactgagagctgctgagggaattcattccagatttccactgtactgtggtgtgacactggaatatgggcagccccctcccctatcctctccttcccctgtacacgtaaactcttggagtgtactggggtccctgtagggcagatgtgacctttccaaagctcgatgggtcccgagcaggccctaaatatcggggttctagcttggacttgttctgggtcaacttggaggactgggaaaggccacctaggcctggagcacaggtcaggagctgctttcccacaggtgctcaggcctctggcctgcacgtgctgctcacctagtgccggtggatgtccagcccttccagcctgggcttctcgaagtcacctgggaagtcctgcaaggcaagagaagccatgactgtcccaacaaagagcagactcactggggagacccacagccacaagtagccaaaaagaatcctccatccctcatttctgacaacttgacaattggcaattattaagacaattatccaagaaatatttcctagcttcaaaacaaaaacaaggctttgtcattctttcctcaattctgtggtgtgtgtgttcgtccatgtgcatgtatgtgcaggcatgtgcatcccatgatgtacctgtgggggacagaggacaactttgggggccttatttctctctttccaccttgtttttgaggcaggatctctcatctgtctctgtactgtatactccaagcttgttggcccaagaacttctctatctgccttcccatccagaatgctgggattagagatgcttgccccacacctggcttgtgtgcattcttgggatagaattcaggttgtcaggtttacacatccagtgcttttacacactgagccctctccctggccagttgtaggttttgctttaattacttgattttatgtgtatgttgcctgcatgaatgtatatgtgtagtgtgtgatgactgtggaagtcagaagagggtgtcggaatcctctggaactggagttacagataggtggctgagctgctgtatgggtgctgggaaaccgatctgggtcctctgcgggagcagcaaggtttcataattttagccccagtcttaaatatcacttaaaactaaacagtagtcacaaaatgtcagacactttgttgataggagctgtcaatttgttacagacagaatggtgggtgccatggggctagggacaaatagggagctagtgtctaaaggactgtgctcgggctggagagatggctcagtggttaagagcactgactgctcttccagaggtcctgagttcaattcctaggaaccacatggtggctcataaccatctataatggaatctgatgacctcttctggtgtgtctaaaaacagctgtggtgtactcatatacttaaaataaataaatacatctaaaaagaaaaaaaaaaaaaaggactgtgctcttgttgggaatgagaaggttctggggcatctgtgaaaggctgtccctagaactaattgacctggtgtgtgtgtgtgtgtgtgtgtgtgtgtgtgtgtgtgtgtgtgtgttttaacttgtttgtttaactaaaacagggtctcactaagtagccctccctgggct

SEQ ID NO: 23808 - DNA, 1202 bp, Mus musculus
agaggcgagagatgagagttggactctcattgagtctagccagacctaaagcctacatgcatgctactgtcctgtcttgtgctcacatttactggataggactggcacacaaactggggattactgtctcccagccccactcagttggagtggcaaggaagttgtagcccctcctgaagtgctgactcaggcagcactcctcaccttcctggctatttgctggctgtggactgggcaagctagcagtcaggagatcaaaggtcaaagtcaaaggtcatgagtcaaaggtcatatgagccttgaggacaggtcctggcaaatggcaggtgcccagtgaagtgacccaggcttcaacctgttggggacagaagcaggctctcccctgaaatatcatcttcctatgacatctccaggccatggtgcttcaaggcctgttctgtctctcttcctttccatttaacctagagtcaccatgcaatgccttcatgcagggcacctaaaaaacacctttaaaactccactctcctctgctttctgctctatccaggccatccgggtattcttcatgctgcgttccctgtcactgcagctgcgaggggaacctgagacccagttgccactgactcgggaggaggacctgatcaaaacagatgatgtcttggatctgagtgagttggccatcctgtctcgcactagtgggccaggggatacaggctttgctctgtcatttgacctgctgtgctgtgggagtgtgtgcagcatgcattctgcactgccgctgacccaggaccgagcagaagggcagtgctgggcagcagaaggtccagtgagagtgggccgcactgacatgagaacagcactggcctttctggtgttgtggattaaagagtttctaagtccagtggaaaaaagattctcttgatgccaaaaggaagcctataaaaaatacattatcaaaatgaaaaggcacaacaaacccagaagcacatcaccagtatttaggtaagaatgagggctttgcaaatcagaaaagcctgtgcccagcctataaccttgaactatgtattgaccattgtcttagagagtgtttctattgctgtgataaaaaaatcataaccaaaaccagcttaggtttatttagcttacacttccacatcacagtctgtcatcaaaagaagtcaggaaggcaggaactgaaactg

SEQ ID NO: 23809 - DNA, 1103 bp, Mus musculus
ctttcttctggggaggtgtgaggaagcacaaagtcacattttccatgacttgtttcttctttgaacccttgctaatctttttttttttttaagtgggtaaatctttgaaatgacactgtttcaagtttgggatctttgctgtaagtggcaggaaaggtgggcggtaatgttatggaaggtggaaagcctgccttttctaggtcatgtttcaagtacggagaagtcagacaggaaaggtcacacaagaaacaagacaggggctagagctgagctagcatgcttagagccccgagctccatcccctgctccacttaagccaagcatgtcagcaatccctgtaagcccagtacactgagaggcgaaggcaggaacgtcagttcaaggtcatcctctgggatgccggaagttcaaggccagccttggctccaggagatcctgtctcagaaatggtgttagggatcaagcttttaaggctttaaccccagactagccacatggtgcatgtcctgtctctaactccaggccctagactctctgatgagtccagcttggcacttctgtccaggccaacttgttccactcagatagcccagctgtgtgcagggcataggctgtccaagggaggcaagctgagcaattggctcagctcacagctctgccacagctttctgggccactgaaaaaaagagaagagctacaaacaggttagtggtgtggccatcaccagagctttgctatgggagtcactcacacagataccctggacatactttatcctcccaggaaaaccaagctaggtagttcctcccctcctccctcctcccccccccccctcaccatgtcacagctggccacacgccctcaccatgtcacagctggcttgtcttctctcagaccctagaccaagaaggacactgtcctatgggagaaatcagggccactggcacttttccaaatgaaagtagtcatcaattcactgtagaaaacaagaagaaagagagcagtactttttaaagagatatgtgtaaccatgccacaacctaaaagctcccagcagcttgcctccccttggtgcttgctgttctctaacctccattgttccc

SEQ ID NO: 23810 - DNA, 1967 bp, Mus musculus
gtccgctcaggtcacatgggtgagaaggccaagcctctgctctcgcgtgacctggatgacgtctgttccctgctcaggacaccacacagacgctgctccgagcaggcacgctcccttctctcttcatccaagaaagacccattagccagtgtccgtgacagaaatcaaaggatttaaggcacagaaagtcatcctcagatataatctgcttcccaagatgcaagtggatgcccaactggggcccagctgcaaaacaggtgaccaaaagcagaatcccaccctccccctccctcctccccctccctcctccccctccctcctgccccaccctttgctgcttccacgcagtatgaaaaccccatagttgtaggcatgtgccagcaaggaacagatctgtgccatcagcccctccctcctctgaactggccagccaggtcactactccaggctccgtggcgaggccctctatggcttcctacagatctggcctcacccagtttcagtacccaccaaaggcgagccacaagggtaccccatacattaccatctgctcatcattagaccctgacactctgctaagctaacttccctgcaggccccaatgctcagttttccaagagaaagcagtgctccctaggaaggtagtggaacccatgtggactggcttctctggtctttaaaagtgctccagtgggcatgctgtcaaagacaagatgttttctaaaacagaaggctgggtcaggaagtcaaccaatcttccttagaggcagccactccaaaggccctggcaaagtaggatgttctaggatgcttagcccctgggaagagaggaaagtgatggccactgggaacaagagctctgtggaccccacagccaaccttgggtgttttttgctcatttgcagggaggggtagacaaagaagcaggctagccctgtcttcagcacaactgtacactttgggttttgaaatgacaattgctagggtcagcataaatgttacacaattcaagtgactctctaccatgcagtgtggtctccagagaaaagcctacagccaccctaacccacataaacaggtcagccctatccttctgtgactagcctcctctttgcaatccggaaattttaaggaagggaaaagattgtgcccatggtgttcagcaaaccctgaaagggcaactgctgtgtaaaattcaccaacaataagcctgttcccacagctggctttaaggttgctcccagagggttcctgcaaccaggagcctagggcatacctccaagtgagcaaatgtggacttcctgtgagcagaactgtggcccattgctgatggagggatggggtcctggaggaagcaacaggacctcaggactctgaagaaggacactgtctcacctaggtgttggtggcattgggtacaacccagtcttcaggagtactctgctaacttggcaactgtgctctccagacagacctaaccagcaagaacctactgggtctctgtagaactgagggatctaaggtccagtaggtcccacagctcctgacctggaggtcccagagtcagcctccaaaatcattgctcccatctcccaggccatgcatgccacgtctgccctggtctccctcccttcttcaactgccccagggcagactagcagagctggcctctaacccatcacctcagctttgaccgtcaccatggcaacatgcagtgctgcctcctccctgttgaagtcttaggcaggtgggacacttcccacaggtcagactcagtgtggtggtgagcgccctctatggtggaagtggtgaagaggcttcacctgctactctacccaccaaacacttgcattggcaggagtaggctggctgcatcctaaggatggcattggctttctctgtggcctctgacgtgcagttgtaaataaggcatgggtaaaccaagtctgatcttttgtagatgcaat

SEQ ID NO: 23811 - DNA, 1184 bp, Mus musculus
tcaggtgatctagacctgcctccttcctgccctccaccccctagaaaaagcatcgaggccttgagcccagtttgtagctcaggccaacctcagatttcccatcttcctgcctctggttaactgggattgcaggcctgctcctccagcctgcttacatggacgccttaaaaaaaagattttatctttagttatgtgttcgtggggtgctttggagcccaagagagagtgttgataaataaactttaccagccccatgccaggtagctcacagcttcagtaactccctgtagttcctaggcatctgacgccgccttctggcccctggaaaaccctcacaacctagcatatagacttcaaataaatacttaaaaaaaaataagtcctaaaaaataaagagagccaggtggtggtagcgcacgcctttaatcccagggaggcagaagcaggcggatttctgagttcgaggccagcctggtctacaaagtgagttccaggacagccagggctacacagagaaaccctgtctcgaaaaacaaataaataaataaataaataaatagggtttaagaatagtagtaatgagggctggtgagatggctcagtgggtaagagtacccgactgctcttccaaaggtccggagttcaaatcccagcaaccacatggtggctcacaaaccatctgtaacaagatctgacgccctcttctggtgtgtctgaagacagctacagtgtacttacatataataaataaatcttaaaaaaaaaaaaaaaaaaacagtagtaatgaatggcactggggttggaccacggggtccccagggtctcacacacgccagagtagcactcgaccagctagcctcctctgacctttaaactgatggatgtctgttgtgctgggaggatggtgccctacaatcccacgtaaagactaccagctgattcatctttctgcatgactgccttcctgccagccagccagccagccagccagccagccagcagtagtcagtctctctggccttcccttcttccttccctcccctcctcaccctgccttccccaccctacctttttaggcagtgtctctagttcagactggccttgaacttgggctttcctggaactcattatgtagagcagatgagtttctgcctcctgagtgctgtgttaaaggtgctaacatt

SEQ ID NO: 23812 - DNA, 1207 bp, Mus musculus
taccccactaactgtgattgttaccccatttgcatctcctctgctgatttgccattggtgccagtctcaaaccccgaagccacgatttgccttatttttcactgtttggcttgatctattcccatccctgagacagagcctgccttaaagactggttttgtaatgacagacgtctctggcactcagaatcactttaatttcatagagttgggttttttatttttgtttttttttttcccaagtgcacagaagggctgctcacacccaccagacacatacagataaggtcacaagtactaaataaaaggctcacattccttcctgtctcagctcctggcctgtgaagggtctcctttctcatacagtttctgggaactccctttgttcataaacacagatgaaagttacttggcagggagacatttctagaataacttttgtaatcacgatacaccatttctccatttgctggtgtgtttttagttggttctgttttagtttttcacattcagtccagcttgttggccaggccagcctcgaactcctaggggatcctcagtcttcggctctcagacatgcagggccctagctgtgtgcctctacacccactgggccttttgttctgtttttctttgacagagaaacaaacaggtaatttcattgcctgcctatgtaggtttggtgtagttttgaaagccttgtctctgtggggtctctttgagggagttgggggacctctatttgagccctgcttcagtgccgagagattgggagtggaactccctgaaacatgatttcagtttttagagatgaccttctgtggtacggtcatcatggtctccaacatcaccagaccaagtagaaggatgtcaaagacaaattcagggctctttctagggtgaccactctgccgtgtataatattgtcccagtctggccagctttctaggaggccctggctccatcctaagtctacacaggatctgctgcaaataacagtgtacggagtcaacctgacccggaacagaagtctgcatgctggttaagatgcagcctagccattgcctgagctgttcatacaatgatccggaagtgctagccattatttttgcagtgaattatggataccatacatgactttgatatctgcttttaaacaaataaaatctttgatcactcagtgaacaatccagttcaccttttatgaa

SEQ ID NO: 23813 - DNA, 1159 bp, Mus musculus
tcaggaagccaccagtagctgccccttaaatataaagcccatacagccactgtggcctcactttctcaggcaccaactttcgatcacgtggggtctacctagctaatcttgtgtcttgcttgctgtggagtgccacagacacacacacacatgtacacacacacacacacacgacagtacccttgtttttaccctctgcccaccttccatacatctatctgttcatgctttttccatgcagtttcaagtcccaaggacctctcagacacagacagatcttgggtttgtttattgttatttattttgtttttgagatgtggtcttactatttaaccctgactggcctggaactttctatgtagaccaggcaggctttcaactcatagatctatctgcctgtggctccaggtgctggaattacagagatgtgtccccacagccagctgttttttcaatttctcttgatttactatcatcattagtgtgtgtgcatgtgtgtgtgagcatgtgtaagcgtgtgtatgggtgtgactgtgtgtgagtgatgtgtgtgagagtgtgtgtatatatgtgtgtgtgagtgtatgtgagtgtatgtgtgagtgactgtatttgagtatgtgtgtgtgtgtgtgagtgactgtatgtcagtgtatatgtataagtgagtgtatgtgtgtgtgagtgagtgtatatgagtgagtgtgtgtgtgagtgagtgtatatgagtgagtgtgtatgtgtgtgactgtatgagagtgtattgtatgtgtgagtgagtgtgtataagtgactgtgtgtgtgtgcatgtgtgtgcacatgctttgcatgtagtcacaggagtcagctctctggctctcatgacatccaaggactgaacttgggatgtcagatgccgtggcaagcagagcgtctcatttgagatcaggtctcatccccagcctctacctctctagtgctggggtgacatctgtgacacttgggactgacccagcactttgttcatgcttccttcaccaactgcagcacccagactctcttttaatctttatatacacaatgggtgggcactgttatcagctccattatatggatgaagaaactaagctcagagaagtttctggaacagtcccaatcacacagctacaggggagttaac

SEQ ID NO: 23814 - DNA, 1942 bp, Mus musculus
actggaatgggggttgggggtaggagtggctccctcccccccccccccccccgcacatccccacaccccaccttttcacaagtgagcttcctttcttctccagtgggtattgggttttactttgatccttggggctttgtagtcagagcttcctgacacagctctcaaggcactctgtgctatagaaggtcatttctattgtgcacatagcatttacaagagtcaccaagagttcaggttcagggcctggttctcacaggtaagggaaccagcaacatgtctccaggatatttcttatgtctataagcttgctcagatgttaatcccatcaccgtaagcattctgaaccattatgattaaacctgactatgctggtacccttggtgatgcagagagcagagagctccaggctagtctggagacagctttgaaaagcatgtgaaactaatccatttcctagaacccgagggaggagctgtagggaaggaacacttcttagcagtgtataccaatatggggttgggaggcagatgttaaacaccttagttacacagaggtagtcaaagatggactggccatggacagaggctgctaaggagttcttggatgtgtgttagtcctgggagcagtgactctgtaggtctaggaggggaacagaaggtatcaaaggatctacctggagttggctgaggcggaggggttttaccgattcccaccccacatccacctttctacctcctacgtcttgcagccagcagcctaaacactgctgattcttttctccatcatccatggatccaaggccagcttggatctacaccgaaatttgagctggttcatcgctgcagggtcagatgcaggccgcagcttgtactatgctgatgaagttggcttttcaaacagacatcaccacattcttatcagttacactttgggggagcttcctatcaccccctgttgccagggggtctttcaagtttgagtcagtccatccagagagggacgagtaagttcaggcactgtggggcattggtgaggtcatatggagaacgaacacctatagaactgttgaacaaccatgcaagtcttccctgtccttggctatcactggctacctttttaagtgtataccagagccgtacactccaatggttagtaagtcataacttctcttcagatttttttcccaatagtgtaactattgagggtcagggtcaggtcttctgatggttacgaagctagcctttcatcctggggagcttgcaggaactccgaggctaagccactgaagcaagaactgactttcctagatatatgttcaaatggactgtgctactgctgtgtctcaaagctaccagtgtgtgcaataagtggaagggatgccattcctgatcaataaatgctaaatgacattcgagttcattttgtagaccactgagaaagatctttatttacaataaatttcaataaaatttgcataactatattcccaatgtacagtcttcacctctggctccttcaaaagttagtctgtcctattctcatgcttcgtctctgaagccaaagtggagctggtggtggagggcggaggggtgtcaccaggtaactgagttgtacccatggacttggagtggttcggtcgagcctttcccagaggggctggttccttagccccaccttggccttccagctccctctccatagtggccacaaggatcttgagccatgtgtgctcggggaggggggttcctgaggctctagccagctcttggagctctcgcgccttctttaaatacagagcctgcagtttctggctgtggcgccggagtagcctgtgctgctgctccagggtccgctgccggcgcagcaggcggtgcccatccctgcgggcactaaggagcctgccctccacctgctcctgtgtacggcgtaggctgctcat

SEQ ID NO: 23815 - DNA, 1175 bp, Mus musculus
gtgggtgctaagtatcaaacctgggccctctggaaaagcagtcagtgctcttaagccatttctctgtcccccaagcatgtggtttatgttttatttttattattctgttttatgtatatggtattttgcctgcatgtatgtatggtatccagagaggccagaagaggcattgaatctcctggaacaggcgattgtgagctaccatgtagatgctgaaaactgaacccaggccctctgaaagagcagccagctatctctccacagcccccagctatgtttttttgttattgtgatttggtgtttttcctcctttgaaacagggtctatcttaactttggcttaatagaactcactgtgtagagcaagctggcctctgcctcccaagctctagaattaaaggtgtgtgccaccacacccaaatgaacatgtaagttttaaagcaagtggtgattggtttctctggattctgtgagtaatactcagctcagagaagctcattacacattgctttgaatttacaggttttctgagagactccctcttgaggttttaactctgcccagcagttttctctgttctagactttgtagcagatttgggagtggcttcagaatttaggcttcattcagattaggaagccatggtttcacagttcaaaactatggccagttaagttttgctgagctatgataaagacatgtttttagtgttcacgcactctccctatctcccgcttctacattatgagtcactgctaagacctccattggagggagttggaagaagggaagtttatagactagtgctgcttcactgaggcagagggctctgagatgtggcattggtggcaagggtgagattgttggtgtaagttaagacttttttacttacaggtttatttatacatttttcactatgtataattgtttgtttttgttagctttttaaaaaaggaaacttaaagaactttaataaaggaaacaaaaagcttctggtctgagattaatgagctctaaacaccttcatattgtcctggcactgcatttgcagtgatgcttaaagtcttagcgttcaaggctgccactttcagaggggttggtgtatgccattgtgtgtgttttcatggtgtgtgtctgtggcagtttctgtggaaaagagcagggatggatccccac

SEQ ID NO: 23816 - DNA, 1228 bp, Mus musculus
cctcgaacaaagcctttagagcttctgcctagtggatgcttcactctggcctctgggacagaatctgacaagctaagattaagatataacatcctgtaacaatagacaatggacctagattattataaacaccacgtggtgctctgtaactctccttagggtgtttagaggtcattacagccacctgaagacagggagagtgtctggatagttgagtctctcaggggacaaaaggtgaacccagtgatatgaaagtcacctcttgctcccatggtggctttcagcccacttgttgagactgtgtggagaggtgggctaagtgttggctttatggcccgtagtcatggcctctgggtgccttttcctcccttacagtgcagcttgacccggcctctggagtgcggtactagtctttcgctctgccttgtctaacacacctctacattattctgttatatttgtccttggcaggtcttccccagggaagtcatgaacttcacagctgagaacatctataagtgggcctcagaaaaccaggagaccctcttccgatggctacagcctcatggaggcaagagtctgctgttgaacaatgagctgaagaaaggaccagcactcttcctgttcataccgtttgatcccctagccgagagacatcctcttctagatgaggtaagaggcctagtgattctgacacctgtcaatagatctccttccacgttaaagggcactaactaatccatcatcacaaggagtcatcaggaatagttgctggggctcagtggcttttgcctgggaccgggattccccagcttctcttgtctattcgttgctccagtctggggtgaatagcagagaagggaaatgaacttgtttccccagagacctagtaaacagcacttcttcagatggctgcactgaccttcctgttgaggggcgatgggagctcaggcaagctggtaaagcctagggcctgccacttttggggacctcgccaggcacagctgcactgatgatgtgtgtctttctctaaaccttataggcaggtttccagagacagctgccctgcctggagtcttccctccctcctgccttgctttctgggatatccgttctctctagacatgagttcattttacacgtgaatcatttggaggcacttagagggagcaatagcaatcagcagagagcctgggattgctaaattggatttactaggctttttttt

SEQ ID NO: 23817 - DNA, 1227 bp, Mus musculus
cagagtttctttgtagctaacctgaccagagaaggccttgccattcagtggtattggatgtggagaaaaagaagggaccaggttacaggtgaggccaaatataacctgatttctaccaaagggagaaagtgattttagagaggaagtgactgatagtgaaacccaagaaagatacaaatacaatgatgttactggtctaatataaccagagtactggttaatactgatacaatatacccagaactacaaagaatgagaatctgaacctgtggggtttgctgccagggctctgtgctgccaattgtggtgggaaggtccgcttagggttgggggaacccagtgggaaggctgctgcactccttccctcaccccaggatctggctgaatggagaggaagttcaccacagcccacacacagccctcctcaggtggtcagatttagaaatgaaatgtggcagtatattcaccatccattcctggcatcacaagattttctatacttaagataacagctattcatcattcagctgacagtgcctatgtcaccaactgtactcttgcccctgcagcctggagtactcggatactttgaattcagcggttcaccccagcctcctggttacttgaccttcttcacctcagcactgcattcgttaaagaaaggtaaaacgaatgtgtattaagacattggcacattaagcagagatgtactgatttttatatgttttggcatatagtatctttatgattatattttctaatttgctagattccttttctcaatgtatttttaatgaatattaactctcgtttaacttcgattaataaagcattgtactgtaccaggtattttcttgctgggcatggtggtgcatgcctttaatcctagcacttaggagacagaggcaggtggatctctgtgggctccaggccagtttgctgtacatagggagaccatgcctaaaaataaataaattaataaaataatcaggtctattgtttattagatgtagcatattattatatagagtttgaccctctggcgccaaaccatgttctaagttttgtttggactgttgttatgttttatgtgaagtgacaggttttgatctgactcagtgcttacctggtcaatagttgagtatgctgtgccatataactcagggcctttccttcacagggtggtttccaaaggtcacaggtatgccacagaacatcatgagcctg

SEQ ID NO: 23818 - DNA, 1194 bp, Mus musculus
ttgcttttccctgaatgctctggatagatataggtcaactccccttaataaattatgttttctaaaagttgagtcacctgtaaatgtctcctataggaactgtactcatggtgctgtatacggtttcctcagacttgtgagcaatagagcagtagcagcagtgcctggagatcagtggcttttgttgactgtcgggctacaatgttgaaattttgggttgtgagcggtgagaccgtggagcgtgtcattatttactgcttccctaacccacacctgcagggacaatgcccagcatctgtactgtcccagccaggtgttgccttagcatggtgtattggtttctgttcagggcggtgacttgcaagctcttaatttcttactcaaaagaggcctttaaaaaaagtcttctctcttcttccgtacaaaagtgtaatggaagaaaataagtaagtggagaaattgtttgtgtttactcttttttagtcgagcaaaagacgtgataataccagcaaagccgcctgtcagctttttctcctcgagatctccggtccttgacctcttccaggggcagctggactatgctgaccatgtccgccaggattctgaggtggtggtgctgttcttctatgccccgtggtgtggccagtccatcgctgccagggcagaaattgagcaggcagccagccggctttctgatcaggtaatgtgtgctttcacccaagcggtgactgtcaagtctatattagagaagatggcctctcagagaaatgatgccagactggccgtgatatccaggcaaactccggggccttgtcaggtgcaaagcttgtgaagaaacaggaacaagaatcctggcatgaggtcaagtggcaagagtaagcttcagttctgtagcttcaggagatgtgtgcttgcccaggataccaggttgtgggatacagtgctgaagatagtagagaccaagaaccccagctctctcatgtccagcttatgtggcttgtaagccttttatgttgtaagtggcacacaggccatggtgaatgtgtggagttagcagacagcttgaaggagtcggtactcctctactatgtagccaactacttaaatgtttatacaggaaaaattcatgaataaaaagactaaatgttgccaggtgtggtgacacacacttttaatcccagcacttaggaggct

SEQ ID NO: 23819 - DNA, 1163 bp, Mus musculus
caaagtgagttccaggacagccagagctatacagagaaaccctgtctggaaaaacaaacaaacaaacaaacaaaaaaacacacaaaaaaaacaacaacaaaaaaattgcatgtataatttttttctagtactaattttaataaaatggcttttcagactagaacttgacattgtacgtatatatgtatagttttcaaagttggcagagcagtcagtattaaaatgttactttgtttttgtcttaggtgccttgtccacattttgagagagaccacagtaaaatattccaaaatacgttcttttcataaacaatgtcaatttgatatttgtcgacatgaagttcgttatggctgcgtgagggaagatgagtgcttctatgcccatagtcttattgaactgaaagtctggataatgcaaagtgaaagaggtatgtgtgtgtgtgggggggcggggggcttgttactgtccctgtgcaagggaggagtcggggtgtggtgaggacagaatagtagtaaggagaattacacttctcagccagctcattcgataacagtttggggctggtgagatggcttggtggggaaagacactcctgccaagcatgctgacctgagttggatcctttgagtccatgtgaaaggagaaagctgacctgtatcctgtcctctgagctccacttgcatgctcagacacaaagtaaataaagaatgtaagtatgcagttccatccctctggtggaattggtcttagggccgtgtgtactctaggcaaactcacaaccagtaagctttatctcctaccctctttgctgtttatgtcagttaggtcactactacattgtctggctgcccttgagctcactctgtaggcccagcagacctgatttggaatcctacctcagcttccttagtagctgatactataggatggggccaccttgcttggctactgtaatgtttgtttgtttgtatttttaaagaattgtctattttggatgtgttttcatgcagtttatgattaacacaaatttgtacatgcagcatggatttcatgagtaggggaaggattcctcagaagacaaagagctatgcctgttaaatactccatttaaaaaatgtgatgcaatgtatattcatccctgatgggtcaggcggcctgagacc

SEQ ID NO: 23820 - DNA, 1278 bp, Mus musculus
tgttctttattgttctagacttaatttcctctctttcttttttaagatgcaagaaaatatcacagggaaaactccaaaatcgaaatctgatccaagtacacctaagggtaagaaaaggaaggccttgctggctacagagactccagaagcctccgcccctgggacctcagggaagaagcaaaaaaaggatgttcaggaattcagaaagccagaggccagttccttctctactcccaggaaatctggaaagaaggcttccaacacacccagagacaaaaaaaccaaggcggcccactcaaactagaattagtgcattggcatgaaggacatcagagttaacctagagcttttcagaatagttagacagggtgtggtggcacactcacacactgtggaatgcagagataggcagatgtatgtgagtttgaggccagcctattttctacaaaagcatttggtcacctgggataaagcaggattcagtatttaaaggccagatttaagtcctgggctgatggtataacactttgccagcatatgcaatatcctggcttcagtacccaggactgtcaaacaaagcccacccaacaaaaggtactctgctgctggttccatcactgcctttttaacaaggagtctgggacttaaatggtttttgagaagtttctgtgggtgcctctgaatttaatatttctattgtacaaactaggggtttgagacaataaaatatttttaaattgttcagtgtatttgctgatggttctgtatgtttgcttttttaaaaattaaactattacatccccttctgtgtaaagtcgctgtactgttggtatttcacatctcacctgactacttttgtttttgttttttggggtttttttgttttgttttgttttgtttttttgagacagggtttctctgtatagctctggctgtcctggaactcactttgtagaccaggctggccttgaactcagaaatctgactgcctcccgagcgctgggattaaaggcgtgcaccaccacgcccagcacctgactagttttgaagacatgttggagcagctttccagttgggcaggtcagctaatttctgcaaacattccctgagtggttggtgagggattgaaacataaaaatcaactccagggggactggagaaatggctcagtggttaagagcactggctgctcttccaagggtcctgagttcaattcccagcaaccacatagacaaccatctgtaattgggtctgatgcccatttctggtatgcaggtg

SEQ ID NO: 23821 - DNA, 1151 bp, Mus musculus
aaacagggcagggaccaggaggcaggagctgacggctaaggccatggaggagtgagtacaagcattagtaaagtgctggactctgtcctagcacctgtggaggaggaggatattccacactttcagctagtcacaacctgactctgtctgagcggactctacacctgcagccccaagaaattatcctgatttgtccttacctccacctgactggttctcacctgtgtatactcaatggacgggatcgtgctccactctaacaaagccagaccctagctattcttgctttgacagaggcacctcctgctggaggaaggggcagaggcccagacttttattactgtatgtctgtgtctgtctctgtctctgtctctgtctctttcctttcctttcctttcctttcctttcctttcctttcctttcctttcctttcctttcctttcctttctctttctctttctctttctttctctttctctctctctctctctctctctctctctctttctttctttctttctttctaagacttattcatttactttatgcatgtgagtgcactgtagctgtacagatggctgtgagccttcatgaggttgttgggaattgacttttaggacctctgctcactccagtaagccctgctcacttcggtcaggcctgctcgctcaggcccaagagcccaagaatcactggcataggtgccttgggaatgacagctctagttattcaagaccagaattttaacctgctcagtaatgaagtagaccaagacatagcacctaaaggactccatcaggtgacttgtaaaaacaagtagtttccctagcagaaatggttttacagaaccattgaggactagattttaattaagaaggaaggacatttgttgtgctacctcaggtgaaaaatatttctatgccaataacgcagggatttatgggaaacattagatatggctcagaaaaacttaagctgtaagggcaaaggagcgagctgaggcttcttctgcttggaaccagtctcccttttcttggtccccattgcataccaccttttttttttttttttttaagatttatttatcatctaagtacactttagctgtcttcagatgcaccagaagagagcatcagatctcattaaggatg

SEQ ID NO: 23822 - DNA, 2394 bp, Mus musculus
tacaggaatttttttatttttcattttcttcttaggcatagttagtctttttcccccaggcagatgattctgagtgtgggagtgtgtctgcacatgttaaaaagacaactaccatattaataaaatattcaatttgaaccctttcggtatttgaattgcttttgaatactgttttttatcttaatgtaacattgttgcattagctttttaactgccaagtaattgaatacattttattacttggatttttctaaactctccctacccactcactttgaatggagcatttacaaacactgctcaagtttgtattaaaggaaggattttggttgagcccttatattgatggttaatgcatacataaacacctttatgcaactttaacactgctttactaactatgtctattggttatttcctgccaattagtatgatttcttaaagacagtaagttgtttgcaaattaataaaacagcattcctgtcacctttgtaagtaaagcttaatgaaactatatccctgtggacagctccattagcttgttacattagtggaattctgagtaaagcatgggagactggcaaaccctttgatttctctcagagctgcatgcatctagtatgaaaccctgtcagttccacaggttacccacattgtcaataacgttaaaggatgaagagccttgctgcttcgggccatttctcaatccaaagactaaatattttagtcatcacaaactgcgtacactaacataaacaggaatagaatcaagtacagaataggttttatctcaattatttcttaactgtaagctggaatttgctaaccatgatttggatgaaccacgtgcagcattgtggtgtggtggtttcagctcgaaggatgactttctactacagctatcatgcctgaaagtttttgtgagaatgaatgggaagtagaagaggtttgtcagaggcctcctttgtatggaatgtgcttccatttgtgagaatggcctcattgtgattgtccattatgattcctaagatatgttctgacgatatgtttaatggtctggtccgtccctgtaatcttgttctccagaaagaaaagccaactgtatttccagtcataaaccaaaatacaatgcaatgccaactgcaaagatgaatgagttggtgtctcaaggacagggctaaggttgtgcctacagcttctttgaactacacatatggctattaaattacataaaatttaaattttatgatgtctgcaaatatctgggcttttattttctgtgatatatggaagctctaatgagaacaaatccttcttatattgccatgctaataaggaaaaatattagcaaatgcttgagtcttaatttcgaaagatttcccttttgaaacaagttctgtctgctattagaacacttagactcttaggaatgttgtgtgcgtgctgccgaggttcttaagtcccagggcttggccagcacctatgaaaggcctacctctacaaggcaatagaaggacgaaggtaattcttaaaagttttcattggaattatatcacatcaacagaattaatcaacaccatacattttagggacttggaagtttgaaagagtatgtattatcatttcaacccatccattttaaagcgatggtcatatatcagcttgtcatttcagtaaggaggtaagatgtctgaagtgaacatgaaatgtgtgcagatgttggattgtgaaagagcagtacatttttgtgctatcattctgccttctccaagtttaaactttacgtggtttacaatgcaaaaggataatatattctggattctaaagagcttatgcttttcagctatacttaacataggcatgttagcatcatgatttggtttgccccattttacattaatgatcatcatatgacttttatgctaagttatttaatctttcaagtaaatacattgaattttaagagatggtatttaaaaacaatgtaattgtcatccttttcttactgtggaagaggaagtacagcattttgttgttgttaataaataatttgctatccagtagggggtcaggagggtatataaaaccaaaccatcagaagttgaactgagtgtatattgcctgaaatttaatgacaaagcaacatgtttataaatgattaaacacattttctccttgttttttattattaaaaatcttgaaatacacagtaattgcatgtaagaaactataaactgatgtcaagctatttcctgtaacaagataattcatttctgaaaccactagatctacttttacaatgtgggactttgaaagtttgattggacagttcctgtcatcagttgaagtactgcaaatattttggcttatacttgtaaccagatacagttttac

SEQ ID NO: 23823 - DNA, 1142 bp, Mus musculus
attttaattcagaaaaataattatcttgtgattcagtttgttcacttgctccattcagtctgctgactgctcatgtgctgctgcttctggtttatttactgcaccgtgtgtgggtgtttatgaatgtgtgcacctcctacatatgaacatgtgcgcctcctacatgcctggcaccttcagaggtcacaagaggacactggatctcctgggattggttgtgagctgtcatatagtgctgggaattgattccaggccctctgcaagagcaagtgcccttaatagctgagccatccctccagctccccacgtgcttctttgtgtggatgacaagatgagggccaccctgggttggacctgtgtgataggaatggagtgggtcaagttgctactctgaaccgttgccagggtgacaggaacctaagcaacacaggtcctcagtcctggaagccatgtttacgtaggagtgaccctgcagtcccctcttctgaatgtattttgaggtttgaggaagaacggtggtgtggagcacacactgcagcccagtgcaggagggactcagtgagactgcagttgccatgagaaggaaaggctttctttacctcattcctggtcttacccaagcatggttagggcaggtgttctggagcagctcacttcctggtggtcaggaagcagagagatggcacctggcttgtggtcctctctctttcctcattccccagcctcttggatggtgcctcctgaacttgagtggaacatactgagaggagtgtaccttgccagtctcctaggtgcctcctaatctgatacattgacattgaagatccacactcagtcacattttctgtatttgaaagttttttggcattctttcttactttctcaaggcgctatatgaaatgttactgtttttactgtcagtcaccctctttgtggttatagccgtttgcttgacttgcttttgacatgggactcatgtgctctctgagaaagaaccattgctatgctgggacagggatggccttttcattattttccctgggtttcaaacaggaaagggcaacatccccacttaacctgggtgaagtcacttgtctctttagtctgtcacagcagagtattggcagctgtaacctgttcaa

SEQ ID NO: 23824 - DNA, 1202 bp, Mus musculus
cagatactcctccctctgtgtgatttctgctggtctcacatgtgactctattccctgtctgtgtcatttgcatttaagctctgacttcatccagatctcctcctgtcttgcagggacatcaccccacctggagaaccgctgaacaagagcagcaggcccaaagcagtttcccgcttccctaagctgtcccgaggccaccccagggaggtgcgcaacgtggaacctcaaagtggtgacctctgacctcggtggactctcagcccccagccactttgtgctcaaccttgccatggcagctggccctggacaccttggcaggatgaccatgtccccacagagaacacacccttcctgctgccacatgccacccaattaaactggtcagttttagctgctgggtctctgtccttagagcaaagcattgctcactggacagacacagatggggactctgtcactaaccccagggtggccaaggatggttgtcacctcctccagttctgccaacagacagtgggtgccaggctgggcccagacccctggctgagatgcacaacacatggcagaaggatccttcggatgccacctgtgacgctttcccacgtgggaaccagaatgactgttatactcttgaatttcctgatgcaaatgcctgctgcagctggtggatggggtctgcttccctgtcctcttccccctagggtggttagacacccaacggtactgccacgtgcctggtatggatgtgatttctccatctagtggcccagcaaagcaattggcagtgacttggttcttgaggaacttatccttccctcttcttgctggcacaggaagcaccctacacacatacacatacatacatacatacacacaggaaacctgaggctgccccagcaaggacctccacccgccagcacagccctcagcagcagcctgaaaactctggcccaagaattggtggctgtgacctcatgtcactagtgatttggctctggacattgctgtggaaggctggccctataggctctcagacccagtgcagaactgaaaagagaatgattgtcctctgaacgtgtttagcaccaactgtcccctaacatctcagtgggagcaggatgctgtgtcctcacaagatgtagttctattgctctcgtctcagggtcccatcctagagttcagggctcacaggtatggagtgg

SEQ ID NO: 23825 - DNA, 1992 bp, Mus musculus
cgaagggctgaagctcaaagctagacctgggtgagtggtctggggaagcagagttttcctggcaccttggaaacttgggggaagtagtctagaaaccagagaggacttcagagtgcagggggggcctgaacagctccagttctggaggttaccttgggacagacaggtgggctgtgcacaggtgaggcagagcattcttgtcctccctcatggctaggggcaggagctgaggggagcagagaaaccctcttcagcttgctgggaaggagctacccaagaggcttctcagacctagaaagccaacatggttcctctcttgtctcctgagatgcttcaggcttcacacaaaggccacaccagagtgtgggctgggcatgcactttgcagttgggcaaactgaggcatgcagaaaggccctatggggctttggtagccccaagttcacctcctgagctgggggacccagcatggggctgcttcatattctatcatgttctgtacagacaggatcctgctacacctcccacagcagagtcctgagcaccagggctttgggacacctagcctaaacacgtgtcactaagagtctgagctctctcactgcaaacagcatatatagaaccatctttcacattcagcactggagcactggcagttaaagcaggaaggacagaagggagggagggagggagggagggagggaggaaggaaggaaggaaggaaggaaggaaggaaggaaggaaggaaggaaggaaggaaggaaggaaggaaggaaaaggaaggaaggcaggcaggcacccggacttgggaccttggttttctaggattaattatggggaacttgcccaattttgccataatgtgctataaaggctgggttccagggactttgtaagccctttggttgcttgacatctgcctcctacccagtctttttccccgtcttggggattgacactagggccttgcaagtgctggacaaaaactctccagtgagccacactctagccctgcccacactctgcttccacagaaacccagcaaactcttggttccaggttgcccatcttatacctcacaagagcatgttgggactcaggcggagcggtgcagggcagggtcaggtgatggaaggctgttcccacaatgctccccagatctgaggcctagagtgcagaggggagttcagagctgtgctcgcccggtctgatacaacctcaggtttacaggagactgcttcctaatcgtcccctgactgcggccttgccattcttgtggctgctaaaactctgtttctataagcgttcacatgtcctgagggcaagtcagtgtcctaggccttgattactgtgtcatctattcctgttccatctgtctgtgtaacctgtagacacaactggcccctgaggagtggctgggctctgtcctcccaggcccaccatcagactccctcacgttggccgcctacacctgcacctgcattcacccactcaatgtgctcagctgagggactcctgagagtgttctgccagcaggacgacgcaggagcaggcagtctcaccatggtgcccagccgctgcctgctctgttatctgggaagtatacaagaaggagcggtctcgtgcccatggcaataacagtcctgattgctcaacattcctgttagagacattgctacccactccagaggcacagcctggcctgggagctgtgacctccttatgaacaaggtctattgtaacaaacattctttaaactattgtgcattatttcactaaagatagtgttaagtgtttgctgtttaggttggttttgctacctttgcacaactgtagcactgtatatcttatctaatatttctgtgccaaaaagttcaggctctgttgctgtgatatgtggtctccattctacgtctaaagtcaagtctaggcagtgggtggggaggggagagagggcagcgtcagggctggagtggctgctgtgtggaggcct

SEQ ID NO: 23826 - DNA, 2829 bp, Mus musculus
gtctcttctttctaggaaactctcggcaatgttctcaggcttttctgcattattttctccttcctctttttccggtctcccagattccactttcctcttggggctctgtggaaagtgggctcacacctttgtagctggtgtggattctgactcattgccctggttctttttttcccccgttttccacttatcccattcactgtattgggggttagtgtgacttttggtgggcatcttaataaaaccattctgagcagttgtcgcttcgtgctactcaattttcgcctgttttctatcaaaggcccttagtcttacttaaggtctcagatgtacaaaaggcatttgctttaaatacttgtctgacccttcctgttaattaatcacacctgaatgagctcactctgcccgaggagtctggactgccgtacttaccataagatttcttcataagctgtaagatgtttcttctttctggtttagtgtgagtcttcaggaccttctgtttttgttcttgcttcatgcccctgtcgtctggttttggtacacacacacacacacacacacacacacacacacacacacctgagttcctaatggctgttagagacccactgtaaaatctgagcacaattgtaactgtatggttcctggatatgagcttggattgctattctttctagaatctcagatgtgtgctactcaggctcagaggtgtgctggagaactcctgggtccacaagttcgtgtgcatatgtgcactgagaattacactcaggccctcacatgctagtgacctacaccctccactactgagctcaagcctagctccatgactgttatacttggaaaaactttatgaacctgttgttactgagatgctgtgagaagagcagttgaggcgttccctgtcagtcagcactaatgctagcatcatccacagaattgtgaccatggaaatccttggcccctttaatgtctttttcctttccctgcaggtatcagagctgtgttctccgggcactaccacaggaatgccgggggaacctaccagaatcttgacatggtagtttcatctgctatcgggtgccagctgggcaaagacacccacgggctccgtgtggtggccatcactgcggagaagattgttcatcgttactacagtttagatgagctgagccagggtggggtcgaggaggacctgaaggagctgctgaaggagtgactggctcccacagagtccacccagccttcacaccatcaccttccattttgccagaataatctcagccccttatagaaatgtctgagcagaaaggcgggcttgtaaacagatgtgctttcacatcagtcaaactgctgggtcctacccttatttcaaaagagaactgcctttccttgataagacagctacgggtgttttctaattgtggtgtgagacttcccacgtgatgtttgggtgaattcttctcattgtgcagcttttaactctgcccttgaatctactgtttctgacttcaataaccacctactgccctcaatcccaactcagtacccaagagtgatcttaataattcctccaacatccccccaccccacccccagtcccagggccacataggtttgtcgtcattgtaacagatagcgtcatagccatcattgactgcaactttcaggactctcattactgctgatgctatgaacaccgtgcagggagtccacgccaggctgtttgcctttctgatgacaaacgtcacctcagacatgtgcagactctgttccagaagaccagaatggaagcagcaacttgaagaccctgtacagcccacatgtttccctgtgtgtattctcccgatgcaggcggcccaccccgttgtcagctatgacgtggcgggaaagctggtcttgacacagacctctcccaagaagaacacagaactgtgtcattgggtataatttacattataccatgttatttgccacttacataacactattcctggacagaaaagagtgtgagtttcttaaaatccttttcatcatggaattcgctcttctgcctcccctgggagctctgacctctgtggaatttgctctgtgtgccagccatcctggtgcctaagtaaccagggccactacatcctgccaaggaagttttacagtatcctgcagcgacactatagaatctgaaaccaactttaaaaacccactggttataaatgaaccgcaaagcccactaaattagaaaactttcttgttaaaaggttttagtcaatgtagcaaaaccatgagaaattaaataaaaagataattggatatgtaaattcataaggaacaaaagatacaagaagttaattattttatatattagtgacacaccagagcccattattaggaagcacaagaaaagtaatttttcaaaccagagtgatcttgcagtgcttggctgtgttcctatttgtttttgtttcttacagcagagtataagagatcaggagaggtccctggtcctaaaatgtataggcttgattcaatgacaagagaaagattagtcatagtgggctgaaggcatgccccttgtccaagctgcataaggaaaacgcagccttagaatggggacaaggatatgggatagagcaaaggaaacgaagtaagtgcttgtcctcaaaacacatacgtttccgagctgactcagaaacctagcatgtgctaaggatggcctggcgttgccagttttcaacagaacagcggtatccctgtggggcctgctgatgtggggagcaaaagtgtgtaatctatgtaactcagatagcaagacactattctgttctc

SEQ ID NO: 23827 - DNA, 1159 bp, Mus musculus
tggggagccgccctcacattcgccgttacaagatggcgctgacatcctgtgttctaagtggtaaacaaataatctgcgcatgtgccaagggtatttctccaccccatgtgctctgccttccccgtgacgacaactcggccgatgggctgcagccaatcagggagtaatacgtcctaggcggagaataattctccttaaaagggacggggtttcgccattctctctcttgcactctggctcctgaagatgtaagcgataaagctcttgcgctcttgcgctcttgctctggctcttgctctcttgcgctctggctcctaaagatgtaagcaatagagctcttgctctcttgctctctggctcctgaagatgtaagcaataaagttttgccgcagaagatccggtttgctgcgtctttcctggccggtcgcgagaacgcgtataagagagtataactttttttttccttcgaggcagggtttctctgtgtagccctggctgtcctggaactcactttgtagaccaggctaaatctgcctgcctctgcctcccgagtactgggactaaaggcgtgtgccaccacgcccggctggggtataacattttaattgtttgattttcttctttcactgctggaagctagagaatgctttctttgctgtacctccagaaaggctgtatcctgtgcttgccacatgctagtgtttggagcagttctttgggtggatccttttttggatgagaacatacagagatttgggagtttttgcatcaggccaggtgaatgaaaggccttggatcttattggctgaaggccatttctggtacagatactctggtctgtggtttccctgtccacgtgatatcattgcgcctaattcattcattcttcatctctttctcttcccctttgttttacctgacttgtttttcttttctttttttttttttaatcagatattttctttctttacatttcaaatgttattccctttcctggtttcccctccaaaaacaccctatcccatccttcctccctctgctcacccactccctcttccctgtgctgccattcccctacactggaccatctggccctctcaggaccaagggcctctcctcccattgatgtccaacaaggccatcctctgctacatatgca

SEQ ID NO: 23828 - DNA, 1125 bp, Mus musculus
gttcgaggccagcctggtctacagagtgagttccaggacagctagggctatacagagaatccctgtcttgaaaaaacaaaaagaacataatttgtggaaagctataataggatgaacttaaagtaatttctcagttattcttcactgtccatgcaccactgccctgcaaattatgttcttataagcactgataaatcagaactgtcataatttaagccaatttaagcatgataaagagtaacagtactgcacataaagccattctgtagatgtaaaatagtattttgtgggtggaagccagaggatgatatcaggtgtcttcttgtgttgcttctatcttatgttttgagacagggtctttcactgaaccctagggcctgctgatgtggctacattggctagccatcgaatgctaaaaaatttaaaagctgctatgtccagcttttagaaaaatattttatgcatatctgtatatgcctgatgatgtgtttgtgcaccatctgagtgtaggaacctatggagaccagaagagagtatcagatcccctacaacaggagctgcagttgcttgtgacccagatctctgccaaaagcagtgagtgttctttaccattgagccacctctccagctccatgctcagctgagtttttgtaggggaaggggcatgttcagggaggtggtggaggtgctgggcatcaaagtcagggcctcatgcttttatagcaaacattgtatccattgagccaacctaccagaaagacctggcttcattgcatatagtagtataggctgtgtgcttccagatacttagaacttggagtgaggtgtgcagccagccttgttgtcattacctgtcttctaagattaagggaaatttcagaatattggccccactgataacaattaaactgtagatgtacatggtgaggtgagcccacattctcagcaggtgtggctacacctagcctgggagcctctctgtcacacagtccaaggtgtcctctgagctgttagtaatgagaagtagctctgtgcttgtgacatggttaccaccatcggaatgttccctagcatagtgaggatgatggaactatagcgtttgaagggccaaatgatcagtagctg

SEQ ID NO: 23829 - DNA, 1142 bp, Mus musculus
tagttaaagtgtcttagaggtttgcttgcctatagccctatcttatggtaacattttctcaattggggttcttcctctcagatgactctagcttatatcaaattgacataaagctatctagaacatctataatgatttagtctgtgtagtcatgtgtaattatatttcttctttgtagaacaaattagccaagactcaagcagaagacttgatgttgtacaatctgctgccatagtttcagtaatggaaggagacttctagttgaaaaaattagacatttttacatgggtatccttagtttggctgtccaaaggggaggctggttctgattctaaaatgatttggatctttacagtccaactgtagagagccagttcaggaagcagtagtttaatgagttcacacatggaaagggggtctttacagtgtctgaatcccacatatgaaaaaacacagatactgatgactagcaaggaggaagagttgagctttgtgagccgtttagaactttaaatcagtctcagccagcaatctcaattttataatccaccttcgcatcttaattcatcttagtacaatagaaaactggaaaaagtggacagaaggaaatgagattagtgcagaaataattcaagaaatggaaaatagtaaaagtttgtactttgtcaccaactattagctgttctgacaaagaaaaagaaaattcaagttaccaaaatcaggaatgagtgtggagatagaggttctggcctgctaagcattgtatggtgacttaaagacgaaatcatcagaaagataaaataaccagaagaaattaaaccaaaaataacaaaaaccataaaacactgttacaagaaagacactcttaaaggaaagtggaaaggcatcccatggttggaaaaattaatataatgattactatataggcaatttttctgtagattcaacagaatactcttgggcttccttaaagatctgtgtttgaaaaaaatgggcaagccaaagttcccatgttaattcaagagacccataataaccaaaacaccttgaaaaagagttggaagatgcccattgttcagttttaaaacttaagggacaggcatggtgatgcacacctttattccccagtacttggtggcaga

SEQ ID NO: 23830 - DNA, 1179 bp, Mus musculus
ggacacaaaatcagaatacttggggtctttcaaaagttctgtatatggtacctttgttaaaatcaaaacaaaagaacaacaaaaaccatacttgcaattctattcttaactgaaatgcaaagagctcaggtatgcagacacaatgtgtgcacacatgttcacagcaactatacccacgacagcttaagtgttacaggaatctgcagtctatactgaacatggagtacttactattcagctacagaaaggaattatgtattgatatagaccaagtgtgggtgagggagagagaactcagccgttatgagcagctgctgctcttgcagaagaccccagtttagctcctcgcatccatgctcatggtagcctggggctctgacactctcttctggactctgcggggacctgtgctctcttcctctccctgcttcccttctcccatctctaactgcggacgagcctggaaaacacattatatgaaagaagccagacagaaagtgtgacatattattttacttataagaaatatccaccggtagtggtggcgcacgctggtaggatttgctgaaggaggcagaggcaggaggatcacgagttcgaggtcagcctgggctacacatttttgccaggcagtgatgacacctgcctttaatcccagcacttaggagcagaggcaggcagatttttgagtttgaggccagcctggtctacagagtgagttccaggacagccagggctacacagagaaaccctgtctttaaaacaaaacaaaacaaaaaaacaaaacaaaacaacaacaacaacaaaaaacaaaacaaaacaaacaaaaaaaagaaatatccagaacaggtgtactgctggctgccaggaaccacggggaagacatgggagcagctgctgctgctgctctttggttaagacattcctttgagcctacactgtggtaatcaatgtgtaacattgtaagtgtatacaatactactgaattgcttcctttaaaatggtcaacttaatgttaagtgaatttcactctaacacatttttttttttatatataatagagagtaacacaaaatatgctaagaaactaatttctctggattcaaatctccaatttcccacccactcctggtttgtctcctccccaccaacacaatttcattaaccattaatggggcg

SEQ ID NO: 23831 - DNA, 1145 bp, Mus musculus
atttctagcaaatatttctgatattgatactgatatccaagatagtccctacgccagacagaagcagtctaagagctagttgggtcttatttagcaaaatcgacacaccaattcacaacactgagccaggcagtcgaggtcgcactaatgaactagccaccatatctctgtttcctttggggagggagaaaaagcactcctccaaaggggaaactgaggctaagagaacgactgcgcaagtgaacgagcccactgacggagctgggattcgaactacggaaacagagacgccaggcaagctccgctcgggatctgcggacccgcctccgcgcctgcccacgggaactccaagcggcgccggcaactggcgctcgagctacgaggagccgggcggttgcactcggctcaggcgcgcactcgcgcccgtcaggcgagctcatgggagtggcgccagcatagaagctcgcgcggccgccacctcaacgcaggcgcggtggccaagtggtaaggcgtcggtctcgtaaaccgaagatcacgggttcgaaccccgtccgtgcctgccctctttccgtgtggatttaagaattttttaggtgagacccttttcaagagtgaccatgaaaggtccctcgtcttgagctttgagttgcaattttttcccagcacagctgtctggatagattgttttctttcagcttgattcaaacgaactccttttccgctcctctctcgctcaaggtgacggtgggtggtgtagccactgcaccccgtcggtcatgggagcttccacttcagggagaagtttgtggaatgcacgggttggacagaggtcgcaatctggaaggatcacctgcacatttgcggtaagagcttcgcagctaaatggaacctggctggcttcagggcacttcacgtttttctgattgttaaaatccaaggttacccgccgtaaagaaagaaccgctgttgccccacaccgactccacacccggagtcagctggagtccttctagtttgcgatttttaaaaggaaatccgtagaagtgggcatcgccttcgagaagagaggaaaccctgcccggacctggaacgattctggtttgaaaatgtaagcctctggcgcggagcctcctttcgcccctagc

SEQ ID NO: 23832 - DNA, 1789 bp, Mus musculus
atccagtctagacttggtgcttcagtacctatccagctgtgttgcgcaccccaccccatcaccccaccactgctgtacaaatggcagaagtacctctcatggaaactcaggctgttgctgctgtagcaaagagcttggcacttgctctaaactctcctcagccccttggtagctttaggtccctcacctctcagtgtgtgttcttgcatcgctatcctgggggacaatggtggctgcctagtgggcttttgtgaggtatgtgaatgaaatgcccagcttggttgccaacagaaaatgttgtatacacagcaggagaggtgcacgagcggttaccctgtctgtgagcagccagaggcagccagagcgggtcaggtggtgtgctgccctcccaaagcttccgagggtttccccttcgtgtgctgggtctgtccccaggtccagacctacctgtgtacagaagttatacacagcgtgttggtggttcgagtcaacagtgttcctctagtgactgtccatgtccttaatcggcttctcctttacccacaggaagtgtctcggatagccctgccgtgctctttgaagtccctgacacatggtagtggagtactgctgcgacagcccagcctacctgcttggaagccatactgtagacacttaaccagatatggcctgggggagttttggaaccagattgtttcctgcaaagctactttttactgttttggctgcatctattgtcccttttagtctaaactgacctttggcacacgtcgtggttgagggcttctgcaagcgtgtgtgttattaactaattacttcctgctccttgaaaacctgcctgccctggtgaatgttggcaagtccacccagggagtaagtcagctgtgaaccacgccaggagagccaacctccggggtgttctaggcagatttctgcagagcttctcctgcccgagatgtgccctgccatcctcccactgctgcccagaaacagcacacaggcttgtcttttcagtgggagattcctgtgctagctcaggctcatctcaacagatgcccaggctttgagagcttgttatttcaagtttctttccctcagataggagtgtgtcccgggtgtggtgacatgtgtgtgagaagctggctcttctgttcctacgcacagggttcacggtgcagcagcttctcctggtttttactgtatgtctttgtgtgtctgtatctgggtacatggtgtgtgtgtgtgtctgtctgtgtgtgtgtctgtgtgtgtgtgtatgtgtctgtctgtctgtctgtctgtctgtgacagcggcaggcctacagcatgcatcaagtcctcattcagacaggtttcagtggcagagcctcacttgctcctgcaggataccccacagcagacacttctggacatgtaatgcttttgtatcatgaaaataaaagtgaaaaagtaatttcaaaaagctgaaattaaagaaaatttcctagaactctgcctttaactgttctttggtgtgactgatgcacatcccctccatctggtcctcaccccaactccatcacggagttgcacacctccacatgcgaagcacttcctcactcacaaaactcctaactccttttccccagggtctgtgacaacagacctggtagaaataggagcctagcctctttaaggcttcagttaccccagctcagtttgtacactcagcagaagtggaaactggaaatatggagggagcaagccagggccattggctccaccaagtcttcagacttagaggttaggg

SEQ ID NO: 23833 - DNA, 1188 bp, Mus musculus
aattaaaaatcaagcactaatgaactggaggcagccttcattctgagcatacagcctgtatgttctgtgctgtgcgtgctctcctgtgatatagcatcctcatcaactgcctgaaacacttcaggttccaggttagcctgtgttctaactacactgttctcatgtacttacagttctctgttgacagagcatagtggattaattatgggaatgaagaggtcccattttcctattgttgtttatcagcacctggcacattaatacagctttgggttgtattgtgctagacaggcacatctatctcattagtatgtaaattgcttttgtcttaacaaataacaaaattatatgtatatcaaaatgtttgttttctttaaagaaagactctgtcttatatggatcaggctggccttgaattcacagaaattgcctgcctttacttctcaagagctgggattaaagacaagtgtcactctgtgtggctactaaagaattaatttagtttttttaatgtttcattagtaaacctatttaaaacttggatcccatgaagttggctcccctaaatcagtaggtttgtgtgtgtgtgtgtctgttttcaaatcaaatatatttgaaagttttaatttatattttggttctataagtggacattttgcgggggggttcgagacagggtttctctgtgtagccctggctgccctggaactcactttgtagaccaggctggtctcaaactcagaaatctgcctgcctctgcctcccgagtgctgggattaaaggcgtgtgccaccacacccggctaagtgaacatttttttttttttttttaaattaaagggtttttttattattattatttttttaagacttatttatctttattttttatgaatacactgtagccagaagaaggcattggatcctattacagatggttgtgagccaccatatggttgctgggaattgaactcgggacctctggaagagcagtcaatgctcttaaccactgagccatctctccagcccctaagtgaacattcttaaatggaactcttctgtaagaatatttttaaaataaaaatttgccaattatcagatctatacaaatccttacacaaaggttttctgtgtaatcctcagtaatgcaaacctttataagtattccattcttactgtcgatcttcaa

SEQ ID NO: 23834 - DNA, 1197 bp, Mus musculus
cccttgtttcttggaggcagagtctctctgaacatggagttcaaggttttctgtaagctggcagccagtaagcaagccccaaatgtcctcacatccccgcccctcagtgctggggctacaggggtgtcaagaaccatacctggcttttatgaagtacagaggatccaaactccagtcctcatgcgtggacagcgtgcatccttaaccactaagccatttttctagccccaactttattttaagatgaactattacagggggattgataaatttttatttaatttagccatgcacatgcttttaatacgggactgatgcaggaaaaaaatgtgagtttgaaggcagctagctataaccaggtgttgattgttagaggtaggggtgtgtccaaacgtaaagctcattcatcgacattacttgtattagtcaatcctatgatgactgggactctgttgtgtgttcttcttcaaggacctgagggagcccacgtggaagcagtggagagaattcctcgtcaagtactcctttcttccgtaccagctgatcgcggagtttgcctgggactggctggaggtccactactggacatctcgcttcctgatcgtcaatgccgtgctgctctctgttctggagttgttctctttttggaggatctggtcgagaagtgagctgaagtaagtgcctttcagtggtagatggttggtaaggaaataccaatgacgatggtccctttaaagtattttcagacctggcatgggggatgaggttgcctagcgcccccatcaggcagtctacagtgactccaacctcagagcatctagcatcctcttctggcctctgagggcactgcattcatatgcaaaaacctatacgcatatacatataactaaaataagtgaataaaaataaagtcttttaaaaaaattctaccttggctcctcaggctctgatttgagaaatactctttaaacagcaaataagaccgtgatttgtgtccaggaggtagtcttcatttcatatagtggtttggtttgttgattttctttggtttctttgttttattttgctagagatggggtctgtcttaggtttctaatgccgtgctaaaacactgtgatcaatgtcaataggaaagctagtgtggtggtgcactttttaaatctcagcccagggacctcagcactgagaggcagagac

SEQ ID NO: 23835 - DNA, 1965 bp, Mus musculus
agtgtttcctcggttgtgagaacaggtgacagggcagacccctcggcacccagcttacccaagcccaccgtccaccactcttctttcttttcaggacagtgccccagaggatgtggagccacttctggaaagtatcgacacaggggcttttcatggccatgttctggccgcttattcctcagtttgtctgcaactgtttattttactgggctctgtacttcaacccaattattaacattgatctggtggtcaaggaagtccgacggctggaaacccaagtgttatgatgggcagcaaggcccgagcgagcccgtgaatctacctgacaaccaagctgtgacattcaaagagacaagggactcgtttctacccctggtaatgcgaggtgctgcttctgtgtgtcaaggcttcaaccaggtccctcttcctctgactctggcaccatgccagctgactgctacccaggtcagattggactcatggtcaatacccagccagtcttcttacagggacttgagaggctcaggctactatgaccaatagaagtgaaagtcttggtcataatttggggtgacatgctgtcaaaaggctaatatagactgggtgtggtagtgcacaccttgaatctgagcactaggaaaacaggcaggtggatttttgagttcaagaccagagtggtctacagagtgagttctacaacagccagggctacatagaggaaccatgtctctaaaaaaaaaaaaaaagaaagaaagaaaaagaaaagaaaaaagaaagaaatcaaaacaaaacaaaaagaagaaaagataaaaaggaaggccattatggtcagtagccctaacctcactaactgacatactcccaaaccaggcttcttgggccaggtctgtcccatgagtcaaatttaggaaagcaaggataggttttgtcatagatatggatagttggacatacaaaataaagacctagaatccagtcatagtttctcactgaatagttggtaggtttcagaataaactcagagaaaacttcaggctaagagacagtgctgcgtagctgtgttgtttcctgttatgagcattggaaattgggttctccttctgtgagcatggagttgaatggaatgcccaccaggccgagtcttcttagatgactgagcactgcttgatgttgtgttttgaataatttaatctgtacaataaatacagtataggctgatcaaggagcattttgtaagctgccctcacactatataatggacaatctttattctgttctttagtataacagcaagtataattatgccgagtcctgccatcataagtatggagtaagctaaaggatgaccgttatgcccgtgtagacatagtgtactcagcagatgtagaatgtgagctcatcagccttggcctggctgaaacaggcttgcatccaacgtgagaccgacagacggacagacggacagacagaatgtatgggtgagagagagacagagacaatgggagagagacagaaggagagagtcagagagacttggtaattcattaactctttgtatctcagagtgaagatttgacttaaactttgcattgaaagtttggaaaattacttgaaataaaaaaagatttttatacaaatacaacctttatagagaaatctgattgctaaggaaatagaaggggaaacctacattgcttgatgtgttataacctagtcatgttgagtttccagctctgtgggatgttgaaccagggtggttgcttagagatttctacaggaagggacgagtctttcctagttttctcacagaaccccagggccacctgactttgtaagacagcagctttgtggctcaggcacactgtagtgacccctgctcttccttcccatgagtaggtaggggctggctgacaaaggtcattgtactggtactggcagtcataggtttgggagtgcccaggctag

SEQ ID NO: 23836 - DNA, 1213 bp, Mus musculus
ccagtctgtcaactccctttcttgtagaagctggctgtcattgctacctcttcaagtggtcttcaaatgggaaattatcacatgtcacataaatgcaaactataacccgtcctgcctccagcttacactcccctggcacttattctcatgtgcctctgagtctctgctctaacctcagtttccatacttcttccaggaccagcagagaacaaatgccaagaacttttgtgcaggtgtgacgaggagctggcttactgcctggcagggaccgagtaccacctgaaatacctcttcttcccctccattttatgtgagaaggactctcccaagtgcaattgacaggctcacatgtccctttgcacatggaaacgcacttcactttcagtgatcaccaacagcatgcaatttgtgcaggagagtcaccggaggccaagtgctaaagccacctgcgtttgctttctccttccattcaggaactcacaactatgagcctgtggagttgccagtctgatgaaggttcaaagtcctgggcctgttttatacaaatagcgctgtgttgggcgtggtatactttttgaaattcagcctttatgagaagctgtactatcttgtacctgctgcagggctgctggtcagatgtgggtgaacacctgcttaggcttggctgtggtaataacattgccacatgatacatctaagaattgtaactgtaataaaaaaatgttccctaactggctccttgtgtaagaggtaaattttatttcccggaagctgggtgtggtggcacactcctgggatgtctgctggggtgttctgctgaggttgaaaggtcagctgagcccaggaggctggtaccagtgtaggcaagagagactttctcaaagaaaaagaaaattctttcctgggctggtggtactgctgtgtgtcaaaacatttgtgaagcgtgtttaaggtcctgagtttgagtcccaacatttcaaggaaaaaattaaaaaaaaaatgtagaacaacagatcaaaccctaaaaactgaaatcgcaggccaggaaagatgctcagtggttagcagagcttcctgccctcccagggaacctgagtgcagtttctggcctgcatattgttcggctcaactgcttttgctctggttccaaagaatgtgacatatctggcttctgcaagtacgtgtctgcacatgcttacttgcacaagtgtgt

SEQ ID NO: 23837 - DNA, 1234 bp, Mus musculus
gtcacacttctcctgtggggactttggggggcggtaacttcgacaggagccagggttccaggagacatgagggaatgtctaccgtcccatgtaggtgaattatcatcactaggtattgggggttccacacctcagctcgactggagaccagactgtctgtgcatagcccattgccccacactattgttattatttcaattatcagtgcacttgacttcagtatctgcattggattcccttgcatgcctttagtataacctagatggctcctcacacctaatggccaagaaggtcattgggttgtccaggcagaaggcacaacccagacccaggaaggaagggaagatttccagggtagttggggctcagagttacaaggaggcaggcaggggtagataggcaaagtcagggagagtctgggcagttatgttcagctggtacaatttttctccgggactggtactgtgagggacagtgtgtccatcagaggacactagctccttgagaatctttgtcagatggcaaggctagcagaattcccgcttttacacagctatgatctgcccactctcaccttcaggtgctgctaccaccacgactgctgctactctcgggctcaggacgctggctgcagccctaagttagaccgctacccatggaagtgcatggaccatcacatcctgtgtggtgagtgccctatgccgtgtgacttccccaagtgcccactggacatcctgcagatcccaatggctcctgtacccttgtggtaaggtaccactgcttgtagctatccacagaccacataataacgtcatcgaacccttgtaacacacgtactcatgtaggtattcagtgtgtggaccaaaaggagagaaagatactaggtgtgaacaacctaaaagtccataggaggggattggcgatgtgttcatggtgcagccaaactgtagaatatactctaagctggacaaaggatgaggcagaaccatttgagagcctgactcaaacaaaatatcaacaataaaaccagccaactaaacaaacaaaagaaaattaaaaaaaaatctaaatatagagctggtgatactatgtaattttgtcccttacctccctggatctgagggtggagaccgaggccttcttccttccctaggtctactactgatccagcatgccaagtgctaggattacaagtatgctccacctagcctggaagtaagacacttacctttaa

SEQ ID NO: 23838 - DNA, 1187 bp, Mus musculus
aagctgcccgggctagcactgggcgcaaacgcagaaggttcagcaggtcgtcgtgcgcacgcgcagctcccttggcccgctccagtttcctggtgtggagcagaatgccgcttcccgccccgccccttgcgttgccatggagagtgtctaaagcccgcctgtggcagcgccctgggcctggtgtcctctggcggggtttgcgtggaagatgttgagcctctcggagcttccgcaaaagaacacagacttggcggagatgcagtccgggcccttgggtcgctgcagtcactttttttggctgggcgtcgccttcgacgcggtgggtgtggcagtgctgttcactggcgtcttcgccaacttgctgttctacgacatgctgctctatttgggttccatcatcatcttcgtcagtctcctgtggtggatctcctggtacaccggcaacatagaggcgctcccggaagaccccttgagggggacttcgccccgcgagagcggggtgcaccgtagcggcagccgtcgcttctcgctgacccttaggagcgtctccgacacctttcagcggattcgccggcgacggcggcggcgactccacccgcgggtcgtccagcggatcagtagcatcagctctacggacccggggcagctagaaaggaactgcgacgccagaacctcgggtggcagagcgttgttccgttcagcgaagcctgaggctgttctgaatcagtttagcagagtccagacctctaagagcctgcctctgggcattgtccacaccggtctttccatttgtacttctaggagtcaacctgtcttttcagtgacttcgcagacctaccctttggcgtctgacagcaattctcagatggcaatgtcctctgacagccatgtgtatttggactctcactctcaggagcactctaaaatcagtgtggcctctcagatctaccctctggaacgagaagaaagtcagagccacctcttggtgatccctgacagtttatctatggtacccgtgacctctcaaagccaaatcctgccctctgtatcttctgaaagctgtgtgcctttgggccctcactctcaggggcgctctaagatcagtgtggccactcagatctaccctctggaacgagaagaaagccagagccacttcttggtgatccctgacagtttatctatggtac

SEQ ID NO: 23839 - DNA, 1531 bp, Mus musculus
ttgctgtttaaatatatcatctaaataaaacgttttgtacaatgtaaaggtaagctttgaatgcataagaaaagttgggtgactctaaagtgaaaatgtgggacctgagctagctaatttactttctcttctcctctttctctttcctctcccctctcctcttctctttcttggtgctgtttttgtttgtttgtttgtttttgttctttgtttttgtgacaaagtcttcctatatagccttggctggcctggaattcactatgtagaccaggttggtctatgtagatcaggttggccttgaactcatagagatctgcctgtcttcctgtctttgcctcccaaatcctaggattaaaggtatgccctttctattaacagagacctcatgtagaccaagctggtctcagccctgatcctctcccttctacttccagagtggcaggattacaagtatgcactgccacccctagctgagcttattttttctttgccttttttttttttttctggggtggggtgtgtgtagggtctgatgcccttggacagaagagggcatatgatcctctggaaatgaagttagatagctgtaagcccccacgtaagtgctgggaatcaaacctggatcctttggaagcgcagcctgtgctcttaactgggcatccatctctccagttcctttttttttttttttttttttgcatttagttcaataatggaaagaactgaatattaggcagcagttattatcttcttacaacttcctccaacactcctttaagaaatgtatgtttttcttctctagaaatagacacatatattctgtgaatcttttgttattttgagataagagtctctacttagccttgggtatcctggaactcactgtttaggccaagttggcctggaaccaacttgcagaccagactgggcttgaactcacagagttctataaatctttacaggcattttggctacttgaattttatacagtttgaacaactgaattctataaataaatataatatttgatttataaataaatatatttataaatatataaaatatacccaatgacttatgtttctattaaaagagagagaagctgggcatggtaacacatgcctataatcctagcatttgggatgcagatgcaggatgattgttgaaagttcaatgtcaatcaaggcaacctgtctcaaaaaaaaaaaaaacaaaaaaacaaaaattaaaagtagggggcttgggccctagtggagtggctcagtgacagtgtttgcttgcctgatacaatagtgtgtatgtgtgtgtgtgtgcccatgtgcccacgtgtaaactatatatgagcaaaactaattttaaaagggaaaggctgggttggatgtggtggtgtacacctatagtctcagaattcatgaggtagaggaaggcagtatctctataatttggaggccagcctggtctacaaaagcaggttctaggccagccagggctacatagtgagaccctgtctcaaaagcagaagaaaaacaga

SEQ ID NO: 23840 - DNA, 1281 bp, Mus musculus
gtagcccagtctggccccagggtatcctaagtgctggggttataggtgtgggctgctacacctaatgtctaattcattgtagttcttgtgtcatggacagaatccatttcagaaaaccttttgcgttgaatgcttatacacacacaagaattcccagggaggctgcagatggagcttggtggcagtgcttgcttagcacccctaggtcctgtgtttgatcctcagcaccatagctgagtaaaagaaagttatcagaagttagtggtgtgttactaaggagaaatgctggtggggatggcgactagattgactaacttagcagatagagatttgacgactgcagtttagaaacttttctatttatgtttttacaataaaagttttgtaattgctgttttgcttatattctgaaactctgtgctgaattcacctttttatgtctcatgcttaggaatgttatgttcataacttattaaggataagtttatatttcccaactttgaggcgtgaaattctggagcttgttattgaaaagctactcaagttagatgtaagtatcaatcagatcacctatattttttcctctatttttatgggattttatgactacgtatttgtatgtggagaacagtccagatctttgcttccctctcgtcatacttttagaacttggcctgttttctgggaactgtagacagctcagtctggggttagggacaaggtgtgaacagtcatcaaaggcagaggtgcactgtgggaagtgctgtgagctggactgcctgacggggctctgtgtaggatgtgctgtgaggacggcccagaatgaaatgaaatgagattctgcatcgatttatgtttgaaaattcttatgtataatatatggaggaacaggtcaggctttgttttgtttataaagaaacaaaaagggaaaaggctgtaaaagatacatattccagtttggacaggtttagttgcaggtaggggctagttggagagtacttactgtggtagtttgaataggtatgaccctcatagactcatgtgtttaaattcttggcccatagggagtggcactattaggaactgtggcctgttggagtaggtgtggccttgttggaggaagtgtgtcggtatggggggcgggctttgaggtttcctttgctcaagctcagcccagggtgggatacagtttctttctgctgcctgcagatcaagatgtacaacttagggctggagagatggctcagtggttaagagcactaactgctcttccaaaagtcc

SEQ ID NO: 23841 - DNA, 1111 bp, Mus musculus
cagatgtgtaattggtgtaagttcttttgccattctgtggtcttccattttgtcctttgctgcacagaaggtttttaattccatgaagtctcatttattgttcttagtgcctgttctatcagtcttctcctgtgccaatgagttcaagattattctccactttctcttctattgcattcagtatatctggccttatattgaagccttgattcatttgtggttgagttttgtgcagggggattaatagggatttatttacattcttccccattcagccatgcagccatccagtttgacttggccagcataattgtagaaggtgctctttttcccagtgtatagtttttctttttggtcaaaaatcagctgaccagaggtatgtggccttcaatttgattccattgataaacatttctatttgtttgccaataccatgcagtttttattactagctctgtagaaccctttgagattggggatagtgatacctgcagttcttattattcaggattgttttagcgctctctctctctgtctctctctctctctctgtctctgtgtgtgtgtgtgtgtgtgtttccatatgaagctggaagttgcccttttaagttctgtggagaattgtgttggatctctaggattgctgttgtcactatatttgttctactgatccatgagcatgggagagctttccatcttgtagtattttcttcagcagtgtcttaaaagtttttattatgtgagtttttcatgtgcttggttagatttaccccaaggatttcttttttttttttttttttttaattttaattaaaggcatgtgctgccgccacccagcttcttttctaactttgtttctttgtttctttctttttctttttctctctctctcttttttttttttttttggtttttcgagacagggtttctctgtatagtcctggctgtcctggaactcactttgtatcccagtctggcctcaaactcagaaattcgcctgcctctgcctcccgagtgctgggactaaaggggtgcgccaccacgcccggcttttttttttttttttaaagatttatttattatgtatgtgagtacactgttgctgtcttca

SEQ ID NO: 23842 - DNA, 2569 bp, Mus musculus
tggctgtcctggaactcactttgtagaccaggctggcctccacctcctgagtgctgggattaaaggcgtgtgccaccacggctgagatctgagttcttgttgggtaggactttgcttgctccacaaacagaaagtgatcctagcagagtttcactacccagccatctgctcgttagccaccaagtacagatccctcaaatgttcactgtagagtctgctcttgttttgggatcctcaggcacacacagacttatatctagggggtttggttcattcctttcacatattggtccaagctcaggttgccaggcttggtggcaagcacgctctctccatcccatgaaaactttccagaccaacactatgatattctcactttgttctctccacaggaggtagtggaggatgaagatgatgactttttgaaaggcgaggtgccccagagtgacacagtgactggccttactccgagctcctttgatacccacttccaaagtccttccagtagtgtgggctcccctcctgtgctgtatataccaggccagtctccactcctcacaaggatctatgattgagctgcgcaattcttcccagggccctgtgaccctgtgttccaccccgaccccacactggactagtctatgcctcatgtgtccagcttccatgttggacttcgaccagcatctgaagggaaccaggttgtgtgtgcttgcagtttgctccctgttgacatagggaaaaactgagtgtcataggcagtatttcacagtggacatttcacagtatttcacagtcttgcctgtggcctgctggctgcatgctgtatcagccacaacctggcaagtggccttctgacaggtttctttttattagaaccacagttttgactttgttttggtaagctgtcctccaggatcagcactgcctgtgaatactttgaactgtctcctgcttacaggggtgtaatggtttcctttgactagaagtctatttgtgttgtggggtgcgtggggagagccaagcaggcaaagctgaacatttgggcttcactgagggacaccaagggctgcagaggagtcaggcgggaagagaggagtcggagaagcacacaaggtccttgtgcaggagtccccagagacctagctgcagctcaggccgactgaagcaggcctgggggtctgtcgagcattccacagcctgcacaacacggactcagccaggagagctgttttttttttttttttttttggtttcttgagacagggtttctctgtttagctctggctgtagaccagctggcctcaaactcagaaatccgcctgtctctgcctcccgagcactgggattaaaggtgtgcaccaccactgtctggctcaggaaagctgtttttacactgaacagccagccttgctctgtagcaggtgtgctcgaggactgtggacgttgacttcccttggatccttacatgtaaacttgcgtgtttgtgaaaatggccctttaagtatatttaattttttgccacatatttatttaaaggcgagcaatattttcttggtcacaatattttttagtggaattcctctcaaggtttttatactcctgtgtaataagactgatgcagagccctgaatttcattctgtctatgaatacctttttgaacaaagaaaattttattgatttaaaaagcttttatatgagacagacaagtccctgagttccaggccagccttggtggcaagtcactaggaaacttcaaggtctgtctcatctttattttactgtgtgcccctggctgtcctggaaatcactatattgctcaggctggcttcggactcagagatctatctgcttgcctccaacatttgagagcagagagtttgcaccaccacttcccggttcaaggttcttttaactgctaactgaaaatggaatgaaattgcatccatagatactgatgggatgccaggcttggaaagtagctagaatgtagaaggtatgttgacaaataagcctcttaggttacaaaggagtttggggggaaaaaaatatccattgtgaaaatgaaagtacagcctagctcacctggggcctccctgctcacaccaatgcaggtttcaataaagactcagccatgcttccgtgactactgtgttgaattttagccgcctgctcctaaagggagtgggatggttagaaacaggcattggttaagatgtttctcatgctttgaacaagcctatacacttcagagaaattgcgtgctatctgggcatggtgatacactttctgtaatttcagcatttggaggttgaagtaggaacatttttaagttagaaccagacatagtaagatgattttaacagctaaacattttgggaagaaattagtgaagtctccttggaaaacagagaattttctttttcgtattgaggatgaaaaccagggtcttacacatacatgcacccagaccagttgtcttagggtttttctgctgtgaacagacaccctgaccaaggggactcttataaaggacaacatttaattgggactggcttacaggttcagaag

SEQ ID NO: 23843 - DNA, 1195 bp, Mus musculus
gaaaggctctgaaaagacaagatggtggatgtgagaggaccaggctgacctctcattcaacatcagagtagccttgggctgcgtacacatttactgggctagtttcagtgtggtgtctgtacatctggggaaacacacactacattgcttactgcttcacctgtataaacagctgccaggatgtcactaatcccccactgccgtaaaggaaagagacactgccagtggcaacagatagtcactctcacccattgaggagaagcagccttagctggtctaacctttttttcttacagatgggaaccagggtgcagagacttaaggtttagccgacctgtaaactctcacctctaggatttgcttgtcatcttgctgcaaccagaaatccacttgtgggaatggcgtccaggaacacgggcctattcggagttgttctgtctttgcatcataaatgctaatcatctaaaagaaccatttccatgacaagctgtaaggacactgccctaccactgctataggctagttccaaggttgtctgtccccttagctgataagctgcgcacattgacctcccgtaacaacaaggctgccaccaccaaatgcttccctgtgcactgctgtgtttacttttgatggcaagcctacaagaagacaacatgctgtcctctcaaggggaagctgatggtgagaggtctcaggtcacatgtccagtgagcagcagcagggcctcagagccaggtaggtctgactaaagcctgaattcctcatggttacacagaataccacagctccttattaccaccccaagcaagtagtcatcatgtcacataaaagagttcacagtgcccaagacagacagctcatacctgccatcaaacactcaggaggctgaggctgacccagagaagagcactgtgggttccaggacagcctggatgacagtgaggccttgtctcacaaaaggaataaaagaaaggtctgggtcttttgcttttgttgctgtttgtctgtcttgtttttgagacagggactgactgtggtagaccaggctggcctttaaactttgggatcttcctgctttaaaagtgtgcaccgccaagccgggcgtggtggcacacacctttaatcccagcacttgggaggcagaggcaggcggatttctgagttcgaggacagccagggctacacagagaaa

SEQ ID NO: 23844 - DNA, 1099 bp, Mus musculus
taactatacatctgtgttcatcataccccacccacagtctcgtctgaagaaatacacactcttagatttgttactgctgtctgatgtttttaggtatgagcatgcgaatgatgatgacaccagtttgaaatctgatccagagggggaaaaaatacacactggacttctgaaaaagttaaatgaactggaatctgacctcacatttaaaataggtaagaactgcttttccaagtcactgtgaacttaagaagaccgtgtctgactggcttaaggaagctgctttgcatcaccatagaggtgggcgattctggttttaggaccagccagaggtgaagcgtctctcagagtaacgtcgccctccctctccagctctccagacttcccttcctctatcagagtgatcttcctcttcctagggacgaagcccctgtgacagtctgggcctccatctgctctgaggacttaggagctagccttgcatgtttcttccctcaggccctgagtacaaaagcatgaagagctgcatttacattggcatggcaagtgatgatgtggacgtttctgagctagtggagaccattgcagtcacagcccgggaaattgaggagaactcaagggtctgtaagactaatcagagtttcatgtctttcctgagttttgcaatgggacacgtgggactgtatgttcatttctttctttcccaaatgttggtcctatgctaagacctgtgatctaggggttatgccaggcattgggaatgctaggaggccttttcacagttgctgcctgcccccagtgacctcaccagacaatgtggggaaagagccagcagtgtgagcaagtactgtggctcaggatagctgagcttttgggaacttgctcaccgctgcagtatcctgaggcgagtcttcctaactaaaaggagctggtcctaaggacaaacagcacaagtgtgtcgggtggcaaggaagactagcctacagggctagaggacaggctccaaccaagccctgtctgagagcagacacacgaatgagcatgctgcagttcactttggggtaaggaagggatgaggagttttgagaaggccaaggagctg

SEQ ID NO: 23845 - DNA, 1192 bp, Mus musculus
cccctcagcatatatctaaaaaacttatttatcaaactacagagatacctgcttggccatattcattgctactctgttcaaaacaactaagagatgaaatcagtctaagtatcagctaatgattggataatgaaattatgatacacttacacaatggaattctattcagctgtaaagaagaattgctggctttctgccggcaggtctaggctgagaggagagaaccttgtccagccaaatccttcccgagctgaagaaggatgatgattgtctcagcccaaaacaaacacacccagggctgggagtctgtcaaagtagggactcgttttattctatcactcttttgttcatataggcttgaggaaggaagtgggcatttttggtgaggtgagatgacatagggggtggggaagagtgacaaagggtatggggtgagatgatgtatgggatggtatgagatgatgaggagtgtggggtgaccccacggggcctataagaaattgacatatcagcggtagctaggcagaggtaggctaaagcaggtcgtgtacggaagtgaacaagacaggtctctaaactccagcaaaggctcaggcttcctcaacaggcctcagtatctggccaaataaggcccaacatctcccccttttttttctttttatgagcagatcacatggctcctgtcttaagttgtcctccgcctgggaatcttatctgtctctggataccatgtagcactctggctcatggagagtgatccatgtcttaggtctgaggtcttacctgtcattggtcaagtggagagcctgagagggtcactcatattctgagggctaattatatgttggcttccttggctcttgggacttgagcctttgatactgaaccttgacctgatgaagcctaattacctctagacgctgttggaaggattgtgtgatcttgccccaccatgagagggaggagaaagaggaagggatcaaggaggggaagtaggtaaggcagaaagccatggaggccagtccacagtgggttgtcttgaaactcctcctctaagtcttcttggatcattgactctccaatcaatcttttggaggatcttcattgacactgacagggatatctccgttcttttttcttgataaatctgtggaggaagcagaaggagggctctcagggtttggaatttcct

SEQ ID NO: 23846 - DNA, 1336 bp, Mus musculus
cactggaggacagcatatacgggactctgtgcctttctctgggccaccttcctatgcttttcacagcagagcggcgatggtacactgcagtccatattcatcttccttcgcaggaaggaggcgagtgataagtccccagagaagtgacgagtctggacttccttcctaggactcagttctgtttcttcatcggtctcaatcactggcagcaggcctgcttcactgaccagttacgggctccatcatgaggacattccataggcccacttgatttgaaattatcaatgattattttaacttttatccaaacctttcccagtcattccagtctgaaaggcttattctctggtattttcacatctttaatgctttggttaaaaactataacagtgacatgtgacattttagaattattaatatttccattctaatatatggccaattgaatttaaaaaaaaaactccagtttagattgtatttctagcctaaactctcaggctgtttcctacacactgtgaaatctgattatcttttgttcttatagtaaatttctatgcatataaaattcagtcatgaaggttgaataatcagataatttataataacccagataatttataataattattgtgccaacattaaaattctgtaagtagatgtttttaatcttcaaaggaggagtagtgttggatatattctgtatagaataccttattgatactgtctactttttttaaagaaggatctcaggctgccgtggaactcactagataccccagcggggcctcagctctacaagtgctgagattacaggcatgaatcatcatgtcttactcttctgcttttatattatatatatccacatacaggtttttaaaattgatgtcttctagctttgagaagatacagttgaccaaatgcccttattcctggatatatgaaataaaataattggtttctgaatgaattacagcaaatgaaaattctagaaaacgaatcatttctttcctctctaaggaagaactctaattcacactagaccagtctacacagtttgtagcaaccctcctgcctctgcattctaaatatttggattacagacatgagccaccatgcctggctttgtgtgtatatgtggtatttaagtggaaccaggaccttacacaaacaagtgctctgccactggctgcatcccaggatcctaatagtagtcttttataattcagtgctttaaaattctttatctttacactttaaaatggacacaaaaattctcaactagtctttcacatttatttagtttgcctaatctcagccagagccttcaggtttcaga

SEQ ID NO: 23847 - DNA, 1158 bp, Mus musculus
tgattcggtccaggactccagctcagggaatggacctgctcataagtagatgtaagagccaaagttaaccaggaagttccacttgcccagggacaggataatttccgggaacactacagcaggtgtgcttgatcccgtgtaggtgggagggacataggcaggaaatacatcaggatgtgtgcttgtccctgattgagcctgatgggaaatgcactgacttatggattctgctgttttaagcccctacaaaacataaccgtatccactccctgggaccccagggtggacctgaccagggtctatcctagtcggtatttaattaattaaagccttgcttcagatttggctcaaaattgtggaactagtttttctcttgagaatctcagtattaaccacaattgaggcagattttccttcccatatctgtttatctaatccacatagtgcctcacaggcttgctccgaggctagtttcctacatgattttagtccaggtcaagttaaaagtagtaactggcacaattcttttcaaatttgcttttttttcccccttttttcttttgagacagggtctcaggctgcctgggaacttgataggtgactgaagtcagccttgcatatatgatcctgtttctactttctggcattgagattaaagcacactctcacatgtggtttataaggtgctggaaatgggctccaggctttggcccagctacgaaccaccccaactgagctagagccccagaccttttcctaatgtatcaccacttagtgcattcatagagtggggcaaacattagctgcctcattctgacacatttgttcaaccctaaagaaaactgctgggattacaggaaagagatcttctctatcctattgctaggttcatgactgacagcccaacaacaagtgatgataacaagagaaaaggttaagaatttatccatatgggttgaatatcccttatctggaacatctggaaccagaagtattttgaatgctgattttgaaatatttgcatatatttgcatatgcacaatgagatgtcctggtgatggggcccaagcctaaacactaaattcaatgtttcagatcttccatatacatacagacaaatcatttactaccatatttttagtgtatttctgtatcgat

SEQ ID NO: 23848 - DNA, 1103 bp, Mus musculus
agacagagacagggtagggtagggagaaggtgtgggatgtggagcatacagagggtggatggagcaaggggtggggaatggaatatggagtgtaggaaaataaattaaaaataaaattaaggcggggaatggtggcacatgcctttaatcccagcacttggtagtcagaggcaggtgaatttctgagttcgaggccagcctggtctacagagtgagttccaggacagccaaggtacacagagaaaccctgtctcaaaaaaacaaacaaacaacaacaacaaaaaaaaaaaaaaaaccaaaaaagcaaaaacaaaaaaccaaaaaaaaaaaattaaatttaaaaaaagaaattaacaagattgaagctgaagaccttgagtgcttgctttttgcccattgatcagataacattagaactatctgcactatctatgcagcatggggttattattatttttacctaacgatgtctctttttggtaatgagaagcatgtttttgaagaaaaaaaaaaggcctggtttttctcaatacacctttaatggtttttaaattgtttcatatctggtcaagttgagatttttaagaacttcatttttaatttgtaataaagtttacaacttgattttttcaacaaagtcaacaaactgcaagcatctgttaataaaggtcttaaatattaataataatagtaataataataatagtaatgaaagtgccccccatgggccagtcttagaggtgggccattcaagctggcagaaggtcttgagtttgccagagtagattttgtgaagactgagaaatgctcttctaaaattccttaaaatgatgaacagttcaagggggtggacggtggattactccaattctatcacgaagtccaggacaaagaagacagtgatcagaaaaagcaaaagtaagactggacattgaaaaatgtagacagaacatgtcaaagagactgacagaaaaaacaaacaaacaagatccccagccaaaaagaggccagaaagagctgaagcagccttcatcctccctagactgggagagcaggtctgcatccagtctctttcaagggtcacaagaagcacacaaaaccag

SEQ ID NO: 23849 - DNA, 2395 bp, Mus musculus
ttttaaacttttagataaacatgttcttcctttatttctcccacttatttgaaagaactcttccattaaggaatctgtaatatttcaccaaatttttctagactgttgtgaattgtggtggttgggaagaaattcgcagagatcactcagcaggaagtggcttgagtcccattgagcaatctccatcatttgtttaagcaaatggatttgtggttgttcgagaagccaagcatgcccatgagcctgtgggtcacacactggggaatgagtgagtggcaggagagccatttttaggctgacaggaaagttcctggcttctaggtgacttgttggtgtgccttgttttttatgtaactatgtctggttaaccagtgtagcttcatcccatttttttaaacatttgcatttggggattccatttaagagctttctagaaagttatttcatgcttcccttctctgtctgtcccagtttgataaggataaggttaaggagaggagatggcctcgatgtcatgtatttaaagtcagggtttaaatgacacattgtgtgttgagaggtggcaatggtaagagtctgatttttttaaactatgcattaaatgtataaattgtaaatcagctgaagtgcttcaagaggcgtgggttagatactattgccactaagaagagaccagagttctatctgtaatgtgaaggccaagtttgatcagcctatccttgttcttgcgatttaaaagttggctgtaaatctgggaagctctccatgtgaagatgtgtgtccatgttagttcatctggacgtctctcaatagtgtgtggtcttttctgtcacttctcactattggaagcgcgtttgggtttttgttttgtttttttgtggtgtctgatgttggcatttgagaaaagccagcctttgtgggcactgccttgtggaatggccttctctctgggtgcctgaggtatccacttatgagtggcctctcacccgtgttagagagacctgacatttacaatggattgtatctgttgggcgaaaaaggcaaatccattcatgagcagaaagaaactgttggcacacagtcttccactagttagatgacttctttggtgggaaatgtttataatttttttctagaaagccagaaaatggattctgatttcatagccagcattttgataaaaatgtcacaaaattaaaggctgtagagagattttttttttacaagttgatttttttttttttttttttttttttttttttttttttttgccaaaatcttttaaatgaagccattgattcccagttcttagtaatatgacctgccccggatgagctgcactggaaatgttgtgcaggcttgccactctttctgtgcaagcctgaaggtactttctgtgcaggcctggaagcacttctttctgaggcctgatagcacttcctctttaaggcctcatggcacttcctctgcgattttagtgcataggaagcaaaatggcacatgtgcaatttctttaaggcttttaagccgtataatagagttggtgttgagagtgtgagttgccttatttgcagatatcctatggctaagcctgcctgctcagacttcaggtttgcaagcatagagggattatggatttgaaaacactagatgccactaaagttacttggagtcatctcaaaggtcaggttctatgggcagcaaagaatagttgtgtacagtgaacgggtatgtgtttgccatttgctggagttgcccatatgtttggagtgtgtgtgactaacccttactatttaaagatgtgaagacttgattggaagcacgctgagtgtggtgtgcccacagtggccagtccaatcactatttcatcatccagaggcttagataatgatgctatgatgtatgcacgtggagatgatgagacactttttctgcgtggaaggatgtaccagattaaatttatctgttgaaaagacaaaagttatcaccagaatcccctttccatcttcccatcttatactgtttgcttttgatgaggcttgggggacaagtttttcttaactgtctactttgtttgaacatttttggggggtggagggggcggggaggttcaagtgctgtttgtgtgttgggaccaaacagttgtcaataaactttatgagcaatcatctgtaatgagtgcttttgtttgtgggtgggattataaaccagtctagtcagctcattttgggtgaccttggcttttcatctctccagaaatattatgcatttaagctggagttgtgggtagctcagttggaagagtgcttgcatggcactcacaaagccctgggttcagttcctggcaccatataaatcatctgtcatttcagcactctggaggtggaggcaagag

SEQ ID NO: 23850 - DNA, 1208 bp, Mus musculus
gggccgaggcggtaagggagatcattcatcagagggcattgcatcactctgggctgcagacaaaggccaactcgagacttggtggccttgacaacccacagtgctctatctaactccctactgaaccctgcccaggcattttacagctattagagtgtgtcacagagggctggtgagctggctcagtggggaggagcattgactgctcttccaaaggtcctgagttcaaatcccagcaaccacatggtggctcacaaccatccgtaacgagacctgatgccctcttctggtgtgtctgaagacagctacagtgtacttacatataagaaataaatcttaaaaaaaaaaaaaaagaatgtgtcacagagacagtgctccagcagctgcttctcaccagatacactggttaaagcctgctattctgccagcactgcccttttccttactctcacttacctttcatcccttcagctttccagattgctatgctgcggagtttggtgacctagaaattacgcaagacagccacaagggtgtccccttagagcacttcatcacctgcattccaggagtgaacattgccactgctcagaatggcgtcaaagtagtgaagtggattcacaacaagcccccacctcccaacactggtaggtgggccagggtcagagattgagccctaaactcccacctgtcttctgggaggacaggaggaagctgtgggtttgatttcaaacagcagcaccattttcaccagaatgtctcctccaatcttaaaactccccagatgttaaggacttggtagaacctgacttctgaagataccaaaattgggccagcatgctggctcagagaataaagacacccaccatgaagcctaaaaatcttaagtttgaacaccaggatacacatggtgggaggagagagccagctcccatgttcatgagtgtacacacgcacacaaacacacacgcacacaaacacagacactcgtccttttctttgactctaatgtgtcttccttcttcggcttgcacttctgtttaaaggtagaagagtaactggaagcctggcctgagtcagcagctctgggggaggcctggacagaagctccttcctaaaccttgtcctcctctctcagtcttaggctgctcggggcagactccacgggagactcagcctctctctgtgctgagtccacaaatcccctc

SEQ ID NO: 23851 - DNA, 1100 bp, Mus musculus
attttggtacataaaaaccaggcctctgaagccttgttacatcatgctaaccagctgatcagatttgaagagttcatttctgatctcccccctcggttaccactgaagattcctgtgagtgggtttctgttgcctttgctgttttctaggtagattttggagacagagagactgcctagtccaatggaaagcatcacagcctactgcagccttttgagcctctctcttatctcatttgttttgaggacttccaagcttgtggctttacttcagagataggcacttgccattgtccccagtgctagagatgctttttcatataaaatggatggaaaagtggaagaagcatcgttttgctcccaggtattatgggtaaagagcatggcaagagctcacattcttgtgtgtctgccttcagatacgcagaacaatcgtgcatctcgggcgattttttttttccctaagctaccagaagctgtgcttgtttcagtatgtatcttgtcgtgcatggggccactgggtgttgtaggatatgtatattaggagagtgtgaacacattcccaggctcaacattttctagaattgatttgggataaggatgattgccacagagctgagccatgtgtatactgcttgggggaatgcatgtgtaactctgaaagaaattctagcagtgataggaaagacttccattcttccattccaggagaatgacagtaatacattaaatgcacttttaatatataatttcataaaatcactttatggttgcaggtgtatcttataaacgattatgtccaacccagtacttgggacatatacctgtaatctcaacatttaaaagttagaagcagtgtctcacaagttccaggctaacctgggttgcatagctcctgttcagccagggctgcatcgtgagaccctgtctcaaaaacaagaagaaaggatggcatccagtgccatcacaggaggaggtgggcgttagtgttagtaccagatgccagcaagcccagggtctgtcctaatcaaaaccatgtgaaggaggttggaggacctagtccaggggataacattccagcctcctgcagcctttgagcct

SEQ ID NO: 23852 - DNA, 1166 bp, Mus musculus
ccactgagccatggcactggctcctttccacttgatttttcgtgtgagtctgtcactgtacctggagttgattggttttgctgggcagggtagccattaaactctaggaatctggccgtttcttcctcagcgctggagttacagttgcgtgcctgtcttttgtaaaagtgctgagatctgaattcaggtcctcatttttgtgtagcagatactttctcaaccttttcccaaactcagatcataggttctttttttttttttttttttctaaatcaaatttatgtggttacaatcgagcaagtttatcagattttcgaagactgcagttgtagtgagctgggatatccatgctgtcttttactctttgggagctgttgcaccatgaactatggtctcgtacttttaacattttaaaatgggtacttgtgcaaagaagtaacatagacattgactcatttttaacagggtggaagaaagagaaaagaaagatgaaagaatgttgaaccatattgtctggctatgtgatggaagggaaaggaactgagaacccttgcagcagaacacttggatggtttcaccaagataatgatgctaagccgtggctttggaaattctctggttgcttttctcgtcccgagcagacattgcctcttagttcccaaacggtaactatatgcaggacatggcacactgaatagatgatgagtacaggtggtctggacagtctctccagccagtttacgctctcgcactcaataagaacacgcttgctcaactcagtataccactctgagtggcagaggttttaagtgtttaaaattgggggaatttggctccttattaaagcctcaagtcccaaagcttgcatagtaaaatcaatgaaaagtataaaataaattgtatttaactatactttcttaagtggctttgaagataagttttctttatatagtccaggttggctttgaatttgtgatccttctgccttggcctcccaagtgcaggattacagataggtgtgactactgccccagtttagttttaagtcttataaattgaaaaggattgacaataaccttttgtccaagatttcttgggaatattttaaatatgttacttctttcttttcctttttggtggtgctgagtttgaactgagaatgaata

SEQ ID NO: 23853 - DNA, 1591 bp, Mus musculus
tcatccattaaatatggtttgctctgtctgaaggtcaggaaaacgcttggagtttgggaagccagcctcagagccagcatcaccagcgctaccatccgcccagggtgtggtcaagcttttgctttaggaccaatgagaactgcgccctcccctgtcttccttactttatagtcggcttttagtcgctttattttcaaggtagtttgagaaataagagccagtatcaccagcgttcactttgtgccgtgtagcctaaactgactacggctggtggtggtggccttggcatcatccctgtgatgtggctcagtccctagcagtgtgtgtcatggaaatgagctcacacacacacagacaccccgcacaaggcagctctaacgtatgatgccactggcttcctagagttttaatggcctccagaggtgttttgctcaggagctctctgcagcctgcttccagctgaagctgtcttctggaacattctcctggtgcttttacagcatgatcaaattgtatctaggactgggagattacagaggcaaaaaaaggctttattaaactatggtcatgtacctttgacactttaacgctgtctgcctcttaagtcagtgggagactatcctctatcgataaaccctgactcctgtttttcttgagatcccttccctgatgttggggtggcatgtgcatcaagacactggacaacttgcgttgcactggcctttgttacatcatccctaagaacagaacttcatccagccagctgggcttcattcagacaccatagagcaaccagggtggtaaagccggagatggagctcaccgccagacgcgccctcgggatgtggaaagaccagcacaggctctgcaaatgccagctcgtctctcatctctggggtgtagcgctgccccacacttcagtgcacaatgagaaaagcacactaataccagagcttggcacccttcactggctactaacttattttctagttgatgggtaaaactggcctagagttggacctagaacttttcgtgtgctactgacattacaaggtgattttaagctgctggctatttgttctccttagacataataacctggggaaagatggactttattttttataagaaataaaataaaaccaaaagaaatccctgctcaatagatgtgcgtcctttcatgtctgtgcacagggccatgaagtttgtttttaaccaagtaataaaataattgaacaaaaaaagtgttttgtgcattgtatatgtagttgtttgtgtggatttgtagaaacgagtacacatgtatgggaatcaagccaacatctggtgtctccctcaattgtatgtgtggtgtatgtaagtaaacaattgtatgtgtggtgtatgtaagtaaacaactgtatgtgtggtgtatgtaagtaaacaactgtgtggtgtatgtaagtaaacaactgtatgtgtggtatatgtaagtaaacaactgtatgtgtggtatatgtaagtaaacaactgtatgcgtggtgtatgtaagtaaacagttgtatgtgtggcgtatgtaaataaacaggtttgcacacatatgcacagagat

SEQ ID NO: 23854 - DNA, 1197 bp, Mus musculus
ggagcgctttggcccaagagctctctggattcacaaatggaagaacgcacgcgcacgagcgcttcagttacttttgatatgccttgactagttcagtggctgggcacttctaaacttcccccgtgactagcacacatgcccctctggtattcctgagttaacagctttctatttatttatttatttatttatttatttaggttttttgagacagggtttctctgtgtagctctggctgtcttggaactcactctgtagaccaggctggccttgaactcagaaatcttcctgcctctgtctcccaagtgctgggattaaaggcatgcaccaccactgcccggtgagttaacatcttttaaaatctatatttcatctctgctaccctgttaccttctggggaactcaccctatagggtcctcattcctttccgcctgcatggctggaaggtttttctcttgcagctcttgaatctgatcctcctccttcctagtcatggtgattctcgcctccctctcgcccgtctcagtctcctgccggagcagtctaaaagtcctgccctgtctccccattcagccaatggctgtacagcaattctttattattactcgaagccagctgaggacagggacccctcagtctagaggctttttgggagctcaaataagacagagctctgcatgtgatattaagcatacattctcataaaggatagtgattctgccatgctgaaggatctctaaagatagtatcactgtctgtttccctcagttttttatagctggctgtataatacctttaacactccagaggagagcaagaaaaaggaaaaaaaaaatgaaaaccgtgtcagttaggtgtgttggaattgagtgcccctaggatgaaatcatgacagtgctgtttcatatgaaatgttttagtgttttagattggtatgcttgctcatgcctatagtctgagaaactcaaggggctaaagcagaaaggcactgcttcaaaatataaaatagctggagctcagtggtggaacatttatttgccagagcttaattccccgtcactggtaggaggctcggggaggggcgaatgggaggttgatgatgggacatggctgagtttctgttcatcaggtttgcttttttcaaaatgtcatatatatggaagtctaaaggcgtttgatacttgcctcacttcacc

SEQ ID NO: 23855 - DNA, 1163 bp, Mus musculus
ttttaaaaaagcagaaagtataaaattgatatattaaaaatttacttgaatggtcagggagatggatcaagctgcaaaatacttgccagacaagtacaaaggcccaagtttgatcctctagactttctccctcaaaccaaaccaaaccaaaccaaaccaaaccaaaccaaaccaaaccaaaccaaaccaaaccaaaccaaaagttagaaattctctattgtattagatgtggcaaatgaggcagaaaaaggcaaatctctagggcttactgacttatctaacaagccaagttcgaagccagagagagaaagataccctatttcataatacaaggcagatgatatcccaaggagttacacctgagtttgagctctgaacactcactctctctctctctctctctctctctctctctctctctctcacacacacacacacacacctgtatattgcacccctgtgaacattcaacctgtgtattgcaaccctcatgcatacacacttatgtatcattccttgcccaacaagcacaagtccacatgcaaatgattgtaataaacattaaaaaaaaaagagagaatgcatttggtcataggatgttctgccagcctatgctgggagtgtcataaagtatgtgacctgtactatgtcaggttcccagagttatgccaggctttatgattctgtggtagagcagtagagtcaaaattgattatagaaaaccatcagagatgctagggagatggcttaatctataaaaggcccactgtgcaagcaggatggcctgagtttggatcctcattacccatgcaaaaagctgggcccagcagcacatgtctgtaacccccgtattggaagttagggcagagagctcactggctgactggttttaacgaaatcggtgagctccaggttcatgaaactatctgtcctgtctcaagaaatgagatgaaaagttattgaagaatacatcaaagtcaacctctggcctccgtgtgtgtgtgtgtgtgcatgtgcatccacaaattctcatacatgtacacacacacacacacacaaatcagaaaggataaggcacagatgcaaagacagacagcaacaagcttgagtctctagcaagtcaaggtcacagttgtgaagctaggggagatgggtgttgcagt

SEQ ID NO: 23856 - DNA, 1177 bp, Mus musculus
cacactgaagaacccatggctcttacctgttttcctcacagcccactgtacaaaatagctttagtgttgctacagtacagaagaaataaaagctaagacagtacaatgacttggcctggtttctggttataaagcctgtctctaaacctgtcctagtgggagagcaaagccccaagcatttagaggacttctgagagtccagccagtctggagattagtttaggtccatcctgatgcttctcagccatggacccaaagaggccacttggccttgttgtctccacctaaacacaagaaagagcattgcttgggtttatagatggcacacaggacacactagtgtcactgacattactgtatcttcagagttttggcccctggaggttatgagccatgtttagcttctctcagtataccccaggaggatgagatgagggatcagcactgatcatgtttctctcccacagaggttctatgtggcttcctcaagacaactgaagcgcctggagtctgtcagccgttcccctgtgtactcacacttcaatgagaccttgctgggagtcagtgtcatccgtgcttttgaggagcaggagcgcttcattcaccagagtgacctgaaagtagatgagaaccagaaggcctactaccccagcattgtggccaacaggtgggtgtagcgctcagtagagtagaggaaactagctgagtgcctagtccctcggcttccatggtgacacatgcctgcagaaggattaccatgagtttgaagtggccttgattacttagcaaattgcaggccagctaggctatagaatgagaccttgtctccaaaataaagcaatctaggatctggaaagatagcttggtggctaaaattgcttactgtgcaagtatgagaacccatatttgaggtgcagatgggggtggtctcaagagctcagtgcccaaccttggaataagcaccttgtttcttcttcatgttgaagttcatctcttgccaaaggactaattttatttatcattatttatttatcattattattgttattattttgtggttactctcaaaaccagggctttctgcatgtcaggccagtgatccaccactgagctcggcccctgtcccaagatacttatttgcaaatagcagtgccttctatagtttatggcatcttag

SEQ ID NO: 23857 - DNA, 1196 bp, Mus musculus
aatgaacaaaaaggagagaaagaaaacccctaaaaagttcctgtccttgttatgtcagtgatgtccccttcctgccatctggtcttcatgcacgctgacactgtcccctgcgttcagcacagctttcacaggacctgcttaagacacagccttgtgaagggacctaggcagacaggcttggaacccggccaggcaacactcccttcacaaggacttacaccttgcccctgctttctgtttcttcctgttcaaagctggggagggctcactcctcacataaggtctatgaatagttataagcagcaaaagtcaagagcagaagggatggtgcccacgggcaagaatctggtatcaaagacagccagagttccttatagggccagaagagaaccattcacaaatatcagtgatttctcccccctacttatgagcatcgtttcgtggagaaggatagtcccaagaatttgatgtctgggagaaggtactagattcagggagcagccatgcccagctctgcacttgatcctcagtctgaatacttcaaagtggtcctctaggttgtgtgagttacagaccaaagagagacccccatggttagcaagaacttgatgccagccacagttcatacttgctttgaattttggctctaatgtcagtcccagagaagcatcctttttctttaggtggcaatatatgtatttattttttgtaagttaataccattctttcactttaaagggcccagatttctcctgagagtctttttgtaatgacactggaaacatgactatttgaaaataatttgcagtaaagaaaaatatttcatttctttctaaacgaccattttatttttattttttattttttgggcacaaaggtctcaacctctactgtggaagaaccaggctaagacagctatgataccactgtcatcaatagtggcagggcaggactggagaggtggctcagcagttagtgcttgttcctcttacagagggataagtctcagttcccagcacctgtgttcagtgtcttacagttgcctatatctctagctccaaagggccagtgcctcttttgggcaaattaaaaataagaaagagatgggggagggcaaaggtaagagctgcctggagtctggcagtgaggcagaatggcaaagtccataaatacctgggcttgcgtcctactgtcgg

SEQ ID NO: 23858 - DNA, 1180 bp, Mus musculus
cagtgatccagcaggtgctctgaatgaaaaccaacaggactggacaataaactgggtggcggacctctgctgcagaggctgtggttcttcagggaggacttagaaatgtatctcaagatgagaggctggatggaaaagaaaggatggagatgaaagcaaaagaaaaaaattctctgaattccaaagttaaacaaaacttacataattaccattttatgacatgttgtaccctataatttattgatgaatataacttaagatattcttaatactatgaaagtccagaatcgctttccgagctgcctggggatggatccattcggcattgttcttcattcccatcgtaacttaaagggaaacttacacaatatccggagcccttgacgtcctgcagatgaagaaggaggatgtcctcaaattccttgctgcaggaacccagttaggtggcaccaccttgacttgcagatggagcagtacatctacaaaaggaaaagtgacagtatctacatcataaacctgaagaggacctgggagaagctgctgctcgcagcctgagctattgttgccattgagagccctgctgacgtcagcgtcatctcctccaggaacactggccagcgagctgtgctgaagtttgctgccgccacgggagccactccaattgaaggcagcttcacacctagggccttcactaaccagattcaagcagccttcagggagccacggcttctagtggtgaccgatcccagggctgaccaccagccactcacagaggctgtatgtcaacctgcccaccattgctctgtgtaacacaaattctcccctgtgctatgtggacattgccattccatgcaacaacaagagagctcactcagtgggtctgatgtggtggatgctggccagggaagtactctgcatactaggtattatctcccatgagcccccatgggaggttatgcctgatctttacttctacagagacccagaggagattgagaaggaggtgcaggctgctgctgagaaggctgtgaccaaagaggaattccagggtaaatggactccaccagctcctgagttcactgctgctcagcctgaggtggccgactggtctgaggctgtgcaggtaccctctgtgcccatccagcagttccccacagaagagaggagtgcacaggcagcc

SEQ ID NO: 23859 - DNA, 1257 bp, Mus musculus
ctcagcctcccaagtactagttcaggtgtacaccatgtccagcataagtggactcattttaaatgagctagtctaattatcaacaaacttcctttattcgtgttttgtgtgtgtgtgtgtgtgtgtgtgtgtgtgtgtgtgtgttgggtgcatgcagaggccttaggtggtatctggagtctctcttaattgttctttcactttatagtgtcagacagtgtttttaaatgaagcccagagctcactgatgcagctagacttgctaatcagcttgctatagaaatagatccccctgcctctgctttccaaggctggaattatagccttacctgttattttatgtgggttctgggaatcggatctccaacaagcattttcaaccattgagccatctcagcccctcaaagatgttctaaatatttaaccacatagaacatacacataacattttccatgtgtaattgattaaagtagacttaaatgaaatatactaatatttaatgattaaagattacattcaattgcattgacagtatagagtcattaccagttcttttctgccttgaaaatgtgtcttgtgatacttggagctagtaagtgttgggatgcttttgatagcctttggtagaatctggtactttggtctcatgttgtctttgtatatgccactgtgagagttctctcctccacccaaggctgtttgtcagagcccagcctatttaaaaaaaacccctttcttgtttaagggattgtggatcttagcataaatctatgagtcagttaacagatttccaaagcaaaatccattttgcatgtaacagttatatatgattatctaagattgatgaaattttagagttaatagagcctcttttaaataaaagcaaatcttcttttgtaaagtgactaggattgcaggaatgtggtataaatagactagaaatttgccttagaaacttgtttcaagagattttaaagtatgacccttgatgactatatgttaataaaagttaaaaagtaaaattcttgttccagtaggtccctgttatactttaatggctttaactatttgttattttcagaattggtaattttttattatttgttaatttaaaataaagttattgcacttgtttagggatctgtatatacttttctagaatttttgtaacaaacattgggtctgtcacaggcagtcttttgggtgtgaaaacaaaacctgtaattttacattgacctttataaaaactattttac

SEQ ID NO: 23860 - DNA, 1153 bp, Mus musculus
agaagcttgctaaggagagagctgggctttccaagttacctgatttaaaagatgctgaagcagttcagaaattcttccttgaaaagatacagcgtggtgaagagttattagcacaaggtgactacgagaagggtgtggaccacctgacaaatgcattgctgtgtgtggacagcctccgcagctgctgcaagtgttacagcagactcttcctccacagggttccggatgctcctgaccaagcttcagaccattagtcagagaactgtaagtgctcagagcttggctgacgatgatgtggaatgagccagataccaacataataaaatctcagtaaaataatttaacagttagcttggaagctggtcagctctgggggaataagggcaaattatgctgtcatgaactgtcccacacggacatctgccaaagcaaatgtgaactttggtagatccgttgtctgttctctttatttttccagtgaaaagtattttgatagagcttttcattttataaatacactgagttaacctaatatcatggatttccatttgttcttaagacatgcaattcaaatgtaaatatagtagagtattacttaggtagaaactcgtggtgattttaagattggaaaagaatctgaggaagagttgaataacacacattctaaagactagaacattttattgtatgttgtaaaattgggtagaaatttgtgtttgtgaaagctgcgcattaaaaccttacagagaccgtttctcgtttacttaaaaaaaaaagaaacagaagtgataaaacaaacacatacatatatatttgtacatgcatacatgtattatgtgtgtctgtgtgtgtgagagagagaaagagagagacagagagagaaaggaagggaggaaggaaaagagaggtagggagagaaagagagagatagataaagagaaagacacagaaagagagacagagagttagagatacagagagagaaataggattcattagtatggtttacaggctgtgatccagctagtccaacaatgaatttctcccaacaggaagtcctaaaattcataattggtccacaagttagacaatctcagctagtctttagtatacatttgaatcctgaagaagtaggctctacgatgagtgaatg

SEQ ID NO: 23861 - DNA, 1486 bp, Mus musculus
aaggcagagcttagaaaagactagacacctagtactttaaagaaatgtttgccggtttgccgtcctgatttacaggataagaaatgctctttagcagggttgataagatgggtcagtgggtaaagaagatacctaccactaagcctgatgagctaagttctatctctggaacctgtgtggtagaaggggagaactaacttgactttggaaagctgtcctttgacttccatttataaccagcccacaggcacacaaaaatgaataagataattgtatctcatatatatatatgcaaaatgaattgtctacagccaccaaaaagacaaagactttaagcggtggtttaacattaaagcatgtgtgcctgacagtaaagacaatctgtgacatttgtgttttctaggcaattaccaaggacatgtttgaagaagccctgcgagctttggctgatgatgatttcctaacagtgactgggaagactgtccgcctgctctgagctgcatggccctcggactagagtcactcactgttgttattgctgcaaaaggagtctgaaaggcagtattccactatataaacctcttctattcctggaatgtattttgttagtaaatgtatgttttcacctttttttaacattttaaattatcaacatatagtagagtttatattctcaatatgccatattttttaagcagcttgcttcttacctgtttgtacacagagagcctaagcccagttttggaggttttttttaatgtaggggctgtgcctttgttgtgttgcaatgctggggaggaaggtaagagtaccatgcatgctgtatgtagaggctatgtccttactgtgtggagcattgtgtgcttggtataactggcagccgtacatcctttactgtgatatgatgggctaatgatttttatagcacctggacttaactttctttacagagactttttcccataactattattagaacaaagatatgcttgaaaaattattaaatcaagttgccttctgttttttcctaatatgtaaaacattttcctaaataaatgatagaaaagtaatacttggtttaaaattatttctcattaagagcagaactttgctaaagactatattttttgaaatcataatagtgctggataggttataaaaaaatcaaggtatgaatttcattaatttttatagatccttagattattagtttcaaagccattgtagcattaaatcttgtgtaaatattacaataaatctctaaaccatttgaattatatgaagtaggcattaatgtaacttggaattctcacaggttgtgtttatagatctaaaaatgaacatttacatagcactcagatgttggtttggaaatatattccaaaggaaggagtggatgagttaggacatcaccaaaggccatggccagttacctaatctagttgtttcccttatgtgagttggtatatgaatccctgtgtagaag

SEQ ID NO: 23862 - DNA, 1219 bp, Mus musculus
aattatttgactaataaatttgctttgtttcttgtggtactagagatttaatgaaaggcctcccatgtgttaggcaagggctctatcactgaagtaccttcctatgtcctcaaaacagtagaaggagtttttatccaaatacaatatccaattgtatattgtatccatttctcagaagagagttataacttttttactttgctcttacctaggcaggactagggactggtcagctggagaaatggcagctttctgtgggaatatgtacagtacagttggctttaacaccttttttttttttttttttttttttttaaagatttatttatttattatatgtaagtacactgtagctgtcttcagacactccagaagagggagtcagatcttgttacggatggttgtgagccaccatgtggttgctgggatttgaactcctgacctttggaagagcagtcgggtgctcttacccactgagccatctcaccagccccgctttaacaccttttaagtcctatatgtaggtacgttttagtgtctcaactaagaagatggtatttttctcttgtcaggtttgatctcattttcctcatgctagaccctcaggatgaggcatatgaccggcgtctagctcatcacctggtttcattgtactaccaaagtgaggagcaagtggaggaggagttcctggacatggccgtgctgaaagactacattgcatatgcccatagtaccatcatgccccgactgagtgaggaggccagccaggctctcattgaggtaaccaggcttatgaaacataagtttgtaactctggatgagttatctgtttctcttaacttcacttggcttatttttaacaagtaagaagttatagaaatgttttgtcccattccggggtttctaccctgcctgtgatcatttggttcccagataaaagacactcaacctttatatttacgttaagccttaaacagcacaagagctgggaagatagctatcctctatgctattttgtctatttcccagccaataatcctactatataatttgccatgtttcatctgggctgctcttaactccaattagccaaccaacgtggccattatttcctgatttactaacccacggcaccttcttcctctcttcaccttctcccccttgtggttctctccccatcagaagcctagaaccctaagccccacctatgtctcttctg

SEQ ID NO: 23863 - DNA, 1145 bp, Mus musculus
tgagcaaagaaactggatatggtgtgtgaagaatctgtgggttataaatggcacggtccaggctgtttggtctaaggaaggggactagctgtggtcctaggctagatcttgggctttaaagaggatgcatagataggaggatcaggtagacttacccagatagtccctgacacaaattatactcacagtatcttaaattgctcttataaatagaccataatgtatgtgtgtgtgtatgtatgtgtatatatatgtatatatgtatatttttttcctttcctggactcttaaggctgtgttcatcatggaactgaactagaaaaagaaactaatgataacaatagctttgttgaaagagccatctaaaagtttaattttcagtgtatatttactttcatatgatggctgtaaactgcattagagattgtctctttaggtgacaaggcagctctatgaaccgcttgttatgcagctgatccactggttgactaacaataaaaaatttgaaagtcaagatactgttgccttattagaagccatactggtaagtagtatttggaattctgttctttcattccaattgactgcagaaatttagtgtacatttagttctttaggcaaagtaccttgttaacataccaaaatatagcctttagctatagaaactgttattgttggttttggagatagtaccgtatttattttgataagtgatgttcttaatatttatatttttagtccacattctgctttttaaatggctttaagttaaaaaattatatgcatgcatgctgggtggtggtggtacatgtctttaatcccagacttaaaaggcagaggcaggcagatctatatatatatggcataagaaagtatgaatgtgccaggcagtggtggctcacgcctttaattccagcacttgggaggcagaggcaggtggatttctgagttcgaggccagcctggtctacaaagtgaattccaggacagccaaggctatacagagaaatcctgtctcaaaaaaacaaacaaacaaacaaacaaacaaagcaaaaaacaaaaaagaaaaaagtatgaatgtgttttgtgtaaatattcttcatcaataacagtagtttgttttttaaatccatgatacagtataaa

SEQ ID NO: 23864 - DNA, 1198 bp, Mus musculus
aaggaaggaaggaaatagggcctaagcatttgcctagcagtataaggtccttagttctttccccagcggtgcatgaaaaaaaaaaaaatatatatatatatatatatgtgtgtgtgtgtgtgtgtgtgtgtgtctgtgtatgtgtatgtgtgtgtgtgtgtatgtgtatatatatatatatatatatatatacacacacacatatatattatacatatatatacatatatatgcatatatacacacataatacatatatgtacatatatatacagagagacatatatattattcaacattatataattatatatatataaaatgttagaactatattgaacctgggcatagtggcaaacacctataatcctagcaccagagaagcagaggcaggcagatctctatgatttaacctgtgataccttgattgtatccaaatattaatacattaaaaatgattgcgccttttacatttgtcagtttggtagaattacattcttggctacgtacgcattgaatgttggatagtatgttaatgacatgatcttttgtgtaggggatttccacctttgacatcattatgtttattggatctggtcgagtggcttttggctcactgtggaaggccccagacagaatgtcgacacaagtccatggaactcttttataaatttgttcctttactgccaggtatgtcctctctttttcttttttaattaaaagatcactaaagtggggaagggattagtacttttatggcagtggatgtgtggaatcaaagaacgactttgaagcctttcatctttggatgaatttcacaggttaggtttaggttggcaggccttgcagtgtgttccctcacttgctatgttgccttctttgcccagtaacttgattcttaacattctgccagcattaattggctatgggtttgccagtttgtagatggagacagttaaggacattctgattttgtataaatgaatattaccaataacatttccttcctcttctcttccccttcttcctccttcttgcttcctctccttcatcacccctctctcattggctttatagctcagattcctcctaccttgaactcacagtcctcctgcctcatctttcagagtgctggtatgacacatatgcaccaccctcgtatatagagacattttctcagttgatttactttcctttt

SEQ ID NO: 23865 - DNA, 1205 bp, Mus musculus
aggagcagagacttctgcatcttgatctgcatgcagcaggagactgtcatatttcctccaacaaggccacactttctaatagtgctacttcctttgagcctatggggaccattttctttcaaaccaccacaggaactaggggtatatatgcttagaatgcaaggaaaacttgaagctttgtttattttttttagttctatattaaagcatatcaaatatatttttatattaccaaatcattagtttcagttaaattgtgttattttatgctattgccccttaaatgagcttcttaaatccattgacatttaacagtggtattgcttgggttccttttcataggagcatcaagattccatgacccaggatgacatcatggagttagagatggatgagctcaatcaacatgaatgtatggctcccatgatagccctgattaagcacatgcagagaaatgtgattgcacctaagggagaagaggtattttctctgatagtatgctttctttcagtatctcactgatgtcactgtaggactaatttctcatactggttaagctatgctgcacattaaagagctggattctttcttcttcacatcgttctcatgttctttttttttttttttacatgaaagagtatttttattttttcctatacaccaccttaatgatgataccatgtacattttctcagctggcaaataagacacagagcaaaatttcccaatgttcgaagaatcatgagtagtcatctgtctttgggaggattcagtttcctttttttttttttttaaattaggtattttcttcatttacatttccagtgctatcccaaaagtcccccataccctcccctccccatccccctacccacccactcccacttcttggccctggcgtccccctgtactgaggcatataaagtttgcacgaccaatgggcctctctttccactgatggccgactaggccatcttctgattcatatgtagctagagacacgagctctggggggtactggttagttcataatgttgttccacctatagggttgcaaatccctttagctccttgggtactttctctagctcctccactgggggccctgtgatccatccaatagatgactgtgagcatccacttctgtgtttgctaggccctgacatagtctcacaagagacagctatatatcagggtcctttcag

SEQ ID NO: 23866 - DNA, 1175 bp, Mus musculus
ttattgaggctatcttttctctatatgatgcttgttactgaatttctctccctttgaaaacactgtgtgccttcatgcccatagctaataatcttttgagtaatacagacaagatgagatacttttataatcagttctcatcctggttggtttgtttttgcaaatttgacacaagctagggtcatctgagaggagagaacctcaattgagaaaatacttcacctaattggcctgtggggcattatcttgattaataattgataaaggagggcccagctcactgaggcttctgcctctgagtactaggattaaaaatttacttagcctaaacctggtaaaattttttataggataaaaagtaaacttgatcacggagaagtgattcacagttttattaacgccttagaccagctctccaatcctgacctgctcttcaaggtaagaaaacagcttttgacaataaaaatgaatgtggataggatttgtgtatagtctagcttcttgatttttttctttctctttttgcacaggactgggtttctgatacaaaagatgaactaggaaagaatcctgtgaataagaaaaatattgaaaagttgtatgaaaggatgtatgctgccttgggtgaccttcgtgctccaggcctggggccctttcggaggaggttcatacaggtacgggttgatacagctgcttgattaatcaaattaattatttgatagatacagtagcagtgtttgcatttgaattacttcctgcccattgtctcttactgtgatgagcttgctttaaagccgatgctctctgtaagatacagtaatcaaatgtttccattcaatgctgatgtcttgtcttagtcagggttttactgctgcgaacagacaccatgaccaaggtaactctcataaagggcaatgtttaattggggctggcttacaggttcagaggttcagtccattatcaaggcaggagcatggcagcatccagacagatgtgatgctggaggaactgagagttctacatcttcatccaaaggcagacaggagaagactggcttccaggcagctaggaagagggtcttaaagcccacactcacaggccacacctcctaatagtgcccctccctgggctaaggtattcaatccaccacagctggcaagggggtcagtagtaaa

SEQ ID NO: 23867 - DNA, 1242 bp, Mus musculus
acttccctaccttctcaagttctctctctctctctctccctcctctcttttctagcaaataggcacatttaaaaaaaatcaagccagaataaaacaaattgaaaaaataaaaacaccaatcaacaaacatacacatacggatacacacacatatgcaaaagactagtaatgtaaaatggacaaagcatcaggagacaaaatatctccaagagtgcccccgcacaaattttagatgcccctcctggtcccctttcactgtgtaggcacttctggacggctcccccggtccactctttcccgatggcagtgacaatcatggtaaccggccaaacatttgcagttctcaacacaccggccaagctaacgtgttgagttcaaaatgaccatcctacctatcttcagaaatagacgccgctatccagacacacaacccggaaatagcgtcatcaagctgcgcgtcaggccacacccctgcctactgggaaaagcggctcaacctcccgggaaaagcgcctgcaaaagcaaaagccaatcaagtgcagaagcagttggccacaaggcgcgtgcgcagtgacgtcctcagttgctctttactccccaagtttatgtatttcggggtcgggggacaggagtgcgtatccgtttaaaagcaaagctgtttagggaccgtcaacagaactggtaattacacgagatcgtgaatactcgtcatccaacaggcatttgctaagtacccggtatatgccaggtactattctggggtctgctacctaagccagcagtccaagtctgatcgtcaggcagtgatcagcttcccaccaccccaccccatgcctagcacactgccctgtgcacagtagacgttccgaacaagtcaagtaaccgactgtgtaaaggcctcttggaactctcgcctcggtgctggagctgttgacttgcagagactctgtccaacacagatcccttttcaggctatacgaatggcggcggcggcggctgctgctggtggtgctgcactcgcggtttccacaggattggagacagcaacgctgcagaagctggcgcttcggcggaagaaagtgctgggggccgaggagatggagctgtacgagctagctcaggctgctggcgccgccatcgaccccgatgtgttcaagtgagaaagcgggggtcgggactttgagctcatactccctacagataatgccggctttaggactcctcattcctgcatctgctact

SEQ ID NO: 23868 - DNA, 1253 bp, Mus musculus
ggacatatgtcctcaggacactgtgtgacacagacacatgctcagccatgttcatgctgctctattcacatcagtcaggaaatggaaccaacttaaatatccttcagttgacaaacagatgaggcactttcttatgtgcaaatttttatattttatatttttctctgcttcttccaaaggctcagtttaagaaaacagactttgtcaacagccggactgccaaagcctaccactctcttaaagactgatgaagtggggaaaaaaaaacctcaggaattccagtttcacagttctccacttaaaaataaaataagataaacaattaaaaaaacctcctcaaagaaaacacctatttttctactaactgacccaagaaacctcaaaaagcatgctttgtttatattcttttctattttcatccccaaatctagaaaatgaataatcagaatataattttgttaagtgtcctgaagacttccaccaggttgcaccagtatggaatcagttttaccctgtgcagataatgggcatcattattcaggcttatagtatgtgcaaactcgtgtgagtgtgcaccggaggaacacctgagaaagagtgtgtgaatgatgtttctatcctagttgctcatctgcatgtcacttccttaatgagccagaggtgtgtgttcactagtgttggacaggacagagatgaaggaataaagcattgatggcaaatcgctttgtctgtgaccttcgattgttcttgaccctgttgggttgctattctttgctttgccttttctttctctaacataaatgaatgtaaggcatgtatgtagactatagagctatgtggcagtaaggctgagaagcagtcatagaaaacataaagacagctggctacacataaagataagtgctggctctgaaatgtcatgttctccctcagcagtgtgtaaatggcattttttacatcaagaaatcattcacctgtagtgtcagcagtagctgtgactctctctagttacaatataatctaggcttttgtacccagcggaattggtaagagcactgtcattcagcaagggtctcagaggattgagaccagatgggcactgagagcagcttgttttaatgaagcatagtgtcaactttgtccaagcacaggactttatagctcatactctcatccctggtatcaggcaagggagctctagagacaaggcaggaagctcttatggcccgaaactgagaagtgacagcctacag

SEQ ID NO: 23869 - DNA, 1876 bp, Mus musculus
gactgacctggctttaaaagatggagcctggcaagttcctcacataatcaatgtatccacctatccttcatttttatagtcttaaaaaacaaacaaaactcttttgcagtttcaagaaatatataagatcttaaagactcatcaagatgtaggaacagactgtgtaattaatggctcctgagtctacactgccctggtgcattagaaattaaaaatactttgattctaaaaaagcctgaaaatttaatgacttcctgcattaaaaacaactattgggaactgttagtaacaatggctagtcctattagtctctaaatgatccaatgataacctaaatttctcttatttacaaatacagcaattgcaatccagatacacccttaaaatggggcacttaaattgggctccaagactcacagttaaatggaacctaaaattccactctttatccactggtaatagctactttagttccacgccaacagaatacattagactaatggtatgaaaacactagtggacctttattaaagaaaaacatctggacacacacatacatacacctaaaagcttatggacttcattcagggggttagggtaatgtttacaacctattttgtgaaaactgcctgtacaaatcgtcttttaaactaagcattgaaaagttttctcacctagctgggcagtggtggtgcaagcctttaatcccagcacttgggaggcagacgtgggtggaggatctctgagttcaaggccaccgtggttccagacaactagaactacagagaaaccttgtcttgaaaaacccaaaaaattgaaacctaagtagaaatccttgatgtatctagttgtctctgaccaaatgatacattcgttttataaatactaaaattcttttcaggttatggtcaggcatcttatgaaatactattagcaaggaaaacaagaacatgttatctttagtttatgatgcccactgagcaatctcaaaatcataaaagcagtttgatacagtaccggcttgacagtgagtacacactgcctaaatgtgttagcatactttaaaaaaataccctcttatccaactattaggtatcagtgacttaattttttaagaaagatgaccaccactgtagcctttttgaatttgtaaggacaaagaaatgcacctttatccaacatttcaaataaattttaaatggaagatgtttagcactacacactttgtacaaaggaaaacaagcaagaaacagggaaaggggaagcttcctttgtgtgcttttacactgatgtgttctgaaacatggagataatttctggcatatttataagacgactgtatgttctatgtaaataaaaatgctggtgtgcaattgccagtaagtgaattctttctgatgtgcttcaagaaaaggtataaatagctgtatctttcaaatatctgaatctacttcataatgtgacaatttaaattgcactgcaccaaaagttttacaccatttctcctattagataatcacacccaaggccttgttacatctccatgtctacagatgaagatggaaactccttccaagtaacccaaggatgagtgctcagaatgtgagcactacacttttctgcaaggcatccagaagccgatcaacagtttatgcttcaccctgtgtacactgggatggcgctatcttgatttttatagaaaccgttttggagaattaacttgcctcgtgtatacaaacctgaactagtttgacctcaaaacttcctatatctttgctattcttaatgatggtatacttggtgagatgctttttgtttcttaaatttaatttcttaaaatatctgctgtaccagatgctctcagccaaccattgga

SEQ ID NO: 23870 - DNA, 1231 bp, Mus musculus
agtcttcatgttcccttttcaatgctgtctcattagacttttagccccattgattttatctgtctgtttcatggttaaggctaagttattcctaactacctcaggcttaaatacgtttattgtttgaatagaattagcattcttacttatgcctacttatgaactatttattttaaaatggaacataaactttgctataatgtatcgtctgaaatttgaataacaaagttgcttattgaaggtttggaacttaaaattacacaggtacataatttttcccagtaataagaaattactttaaagctatcttaatgtcatgttttctttcttcatagtacaattttaactctggaaggtaaataaattagagttaattatcattgagcataaaatgttatttggagtatagtcatcaagtgtatgaaaatgtttcttatacttttgcaatattgtctgtataataaatttttcatatatagacttctcagggttaggttagcctgtcatattttttttttcacattaaccttattttgttttttataggtgcataacttagtggcaattgagctagcgtatatcaacacaaaacaccccgactttgctgatgcctgtgggctaatgaacaataatatagaggtgagtagggcatcatttttcagagagttggatcaggtgcgagtaagtttgtacaagagatgtggcatattactgctggttgtatgcctaggaaatatggtaaattcattacattgttctgttaattttagatctcagagtcacctgggacaattatttttactttctacttattaatcaaagaggatttattttaatgttaaagaatgttcttgttccttttcagtaactattatagttctttggattgaagtatataaaaccaagtgaatgcttttaattgagaatgttttgttttatttgtttcttggctctgcaagcgatgaaggaaacattcaaagaattacctaacttcataatttggaaaagtgtaggttcttcacagtaaagtgcccacccctttctttaacactcaaaaagcgaattaggcgtgatgtgttaagtggaggtccatataggctacactagcgagatagctaagaagttgagagcactagctgttctttcagaggacctgggttcaattcccagaactcatgcggcagctcacaaccatctgtaacaccaggtccaggggatctggcaccttctt

SEQ ID NO: 23871 - DNA, 1177 bp, Mus musculus
cctggaactcattctgtagaccaggctagcctcgaactcagaaattcgcctgcctctgcctcccaagtgctgggataaaggcatgcgccatcactgcccggcgactctatcccttcttataaacacaggatttcactatgtagtacagaccttgttaaccttttgtctaagtcttccatggttgtccataaaattggtgtgtcccaactcctggaggcatactcatacataacactctaacaatcattattcatctagctgttagctagcattttgactatagtagactcagattcacggtctcagcttccttacccgcccagttcaggtcgatacctgaaaccttctagaataggccttcgcgttccactcagcctgaactacatctcccggcagcctttgcgcgcccacctctgtcgtggcgcgtggcctgccgggagcgggctgggtgctggcccggcccaatgggtgcgggctcccgaggaaagggcggaggagaagaggaagcaagcgggctgtgggtcgagtccccattcattgcagtggcctgctgggttgggggtccagtgtttcgggggtcatggaggcgctgatcccggtcatcaataagctgcaggacgtcttcaacacagtgggtgcggacatcatccagctgcctcagatcgtcgtagtgggaacgcaggtaagatgaggccgcgattgcgaggcctggctcggccgcaggcctgcaggtgtcgccaggaggaggccggcagctcggcgctccgctctgctcccgggcgctcagcgggactgagtggccctgcagcctacagcccggcgcggcttggcccaagggcactcgggggacgcgcgggcgggcgtgtgggcggctgtcgcttccttccggccgctgaggacgcgacggactcaggagttgctgtgagcagacaggcagcaagctagtggtgagtcggtggcccacggagctattacaaagtaaaaataagattaaaagaaaatcccgggtgtagttggaggcctaaagttaggaaggagcaccatgactttggtgtttgtaattttgttactgtgacccaaatttggtataaggttctcaggccttatgtggggtattggcgataagtccaaattttgtatgaaagaatgttgaatagatatctagaatagcagagat

SEQ ID NO: 23872 - DNA, 1174 bp, Mus musculus
tcaagcaggtttattcaggaacacttagcattgcaatgcaggaacaggaatccctcgaacaacccagggtgtgccttaaataccctactgattcctccaattaccccagtcatgtaacggcagtccataggttcacagcaaatgacgacacctcaggcgagctgacaaggcatggcatctgcgaagtgcaggcggctgggatgtggctaagtctgagataatgaggaagtcaggcacaggtcataagacctggcagccatcccaggcaccatcttggggcggcagccacacccactcctcacactccaccacctacccacccactcacccctcaccaccctagcattcccctatgctgtcacatcaagcctttataggaccaagggcctccattcccattgatgccagataaagcaatcctctgctacatatgcagtgagagccatgggttcttccaagtgtactctttggttggtggtttagtccctgggagctctgggaaggtctggttggttgatactgttgttcttcctatggggttgcaaacccctttatctcctccagtcctttctataacttctccattggggtccccaagctcaatctgatggttgaccatacgtatctgtattggtcaggctctggcagagcctctcaggggacagctataccaggctcctgtcagcaagctgtgttggtgtctcatttgtcatgggtggttgggtgaaattctcacctttgtccttggtcactgcagacctcctgagaagcacaccagctgcagtgcttggacgagtatctcctaggctgttgatctggtctagtgtagaagtgggtagtatggaagatagagtgtggatggtcatggggtaggtcccatgtcagctgggctctgtgggtatcccagctggcttggctatttgggcagaattctcacctgtgtccttggttactgtgtacctccttggaagcatgcaggctgtagtgtttgggtgggtatccctctaatttttaatagtgagtaaaagcctcgtgttgtgtgtcatctgtagcagtaaatatttgaagtccactctattctcccagcaggtgtgttcacacctcccacccctaatagccctggattcaagtatgaaagacatgcacatataacctttatattttaatatgcctt

SEQ ID NO: 23873 - DNA, 2636 bp, Mus musculus
aatgagatctgcagccaggtgtccagcccaggcttgtggcttctcattgtacccaaggctgggagggtttggtctgtactaacacacaagctcgcagtcctgcttgactgctggcttcccaaagaggagacattggtcttgctgggaggcacagcaggagagtgacccactgccactgcactctaactgagtactaaggccactagggctttctagacctcgctttccccttgagcttcctggggaggtgaagtgaggtgtgtgtgtgtgtgtgtgtctttgtgtgcttagatttattgcagggaaaggtctaatccagaatcagtattcaggctttgtcatgttgtatcagtgccaaggtgaccctcaaggtcatgtaacttaagcaaagcttagcatttattttattcctgaaaacttaagtattttacttttttgtgtgttcgtggagacatttgcagtattaatgattttatttttcctaaatcgggatggaaacaaacttttccaggttatgttaataagccacttaagtgccttaaacagctttggtgtagatgagaattgctgggtccgtcatggatcctgataggcagacgtgttgaggttctcaaagaggctgcatttgttgtgggaaggcacactttcagccagcactctttctgggaaagtccttttgtgcgtctgggcacctcagaacttccttgaagtgatgggtaaaggctgtgactatgggcacctggggtgacactggcctccttgtccaccttggagtctggctggttcccagctgagagaaccttactgctcttggctagaagattgacacactcaatctctcttgaaactctcttaagtgtgtttgcagttatgttgattgagttgttgaagacagtgcttaggtgaggaacttgggcaagcccagcagtccaccatctttctcctgtgacttgtgtcctaacctgctagactctgtcctgacctgagcagcatgaaagacctccacatccctagagcagtgatggatacagtcaggcaaggaaaccaagtgagggttgggggggataccaagaatagaaggactaggaggccctcaacaagggccaagcgagtcaaggctgctctctgcagacactggcaggtccagagaataatggtggcttagcagaggctcagggaaggatcagtaggaagaagggtggctgtgaggtaggtccccatgaaggagacatagttcacctgtagagtgaaagccctagcaagacttgcagagctttgttcattgcacctaagccctctttgaaaagaagcaagggagctcatacttattcctctgaggcaagttcacttccagcagtaggagagcgagccagccaaatgcagctgggcacccacctgtatgcttgccatttacccattcccacagcagggatggaagagctggggccatgtagttgattccttgatcaagtctcctgataggaacgtgatcactcagatggctgcccacctaatagctaggtattgcttaacttgaaggcctgctgccttccggggggggggggggtgtcagaatccagcatcctcagtgccatctcaacacagggtgtggttgttggtccagcctgcctgtagcagtgaccttcatagagggagataaattgattttggttttctcccatttttgctaacctgatcattgctggtaagagtggaatttgggcctccttggtggtctggattcatactcgcatgtaaagatgtgccaaatatcaaggcctcagtgtaaagggaagcccctttcccaggcttgtctgagtgcctcccccacccttccccctgtctggcaatggtctgggaccaacatcaggcactgctccatcctgatctagtggccaaggaagaccacattctcctactgttgagggctggccttgagcgagttcctaggtacagagaactctttttgtctggactggagttgccagtaccaagcctacaagacttgttggccacctcctcctcagagtctcttcccaaaagaatcccctagccaggataatgggtggcttagtagaggctcagggaaggaacagggagaagggtggctgtgagctcaagtccccctctttgccaccatcacattgtgtgagcggaaccagtcactgcacctctcaggcctcagggaaaggcatggagggcatgcatagcattaccaggagctgccagagcacgggagcccatcctccaccagcagcagagaggggttaagtattattagtgtctattcttaaaattaagtgggctggaacagagctgagttacaggcgccagtgtcttacacagatacaaaagctgaagccgtcagcctgcctttgcaggtacagctgcctcccaaccaaggcctggaggcgttaagaggtgggagggcacaagcaggctttcaggagtgttgaagcaagggatctgcagcatagctttgggcgtctccagaactcatggtgagggaggcaccaacacctagaggtcttaaaagccctgcattcaccatgatctgtctgcccctgcccttttgggttcttctgcatgcagtgcccccctctcctgatgctaagttttggcatgggtgtcctggc

SEQ ID NO: 23874 - DNA, 1489 bp, Mus musculus
tttatttaaagctaaatagctttgacccacagcaccagctacaagagatttagaaacaattactaaaaattctacatgttttatcattactgtaggtccaacgactggttctttggttttctaaaatcaattcacccttaactttggcttttttctcttgatgtttatatttctctttccatttattactatacgtaacactttccacaaaatttagcttgtgttccctataggagcatcttgaaatattgttacattgaaataagctaatgatgtgaattttaacagacttctttaaaaagaaagtatatacctaagggatgaatgttggaaccatcacctaaggtggggagggaggacattcagcctaattttttttttaatttacaaaatggataagttgttccaggaatatagtgctgtccatgtaagttgatttccaactttataaaaactagttaaatgatataaacaatgagcattaggactttttctagctcaagtttgtaataattataaatctctaacattgaagatggactgaggcatacttcagaagttctaatttaataatttcaagatataaatgtaaagtaattatagtgactcagcatctgtcttgatttttgttgctatgataaaatgtcatgaccaaaagcaagttggagaggaaaagagtttatttcagcctacagttccacaattcagtttatcatcaaaccagaacagctcctcctgcccctgcctcctgagtactgagattaaaggtgtgtgccaccaccacctgatggcatctcttaagaaaaccaacttactggttttcattttgtgtcactgtttccaaagtttgatgctcaaactttcatctgtgcacactgctgcagagagctctattctgttactctgactttccccctttctgttgcagggttataccaagtccattgatatttggtctgtgggctgcatcctggcagagatgctatccaacaggcctatcttcccaggaaagcattaccttgaccagctgaatcacatcctgggtaagctctgaacatgatctggatttacgttagtcacctcaggctcactctagcatggttgctttgttttgttttcatgttctctactttaaaaatattaaagatctttttgtaaaaacttgtagtgtaaagtaaatacattaaatatagaatctctgttgccccgtaggtgatgtgtgcaatcttgacaattgacagctaatgttttgtctgataggtattcttggatctccatcacaggaagatctgaattgtataataaatttaaaagctagaaactatttgctttctctcccgcacaaaaataaggtgccatggaacaggttgttcccaaatgctgactccaaaggtaagacttgcttcattgatgttttttcttaaacttagctttagatttacttattgtattggctaaattatcaggctccagcttgaaaactgaacaa

SEQ ID NO: 23875 - DNA, 1229 bp, Mus musculus
aaaaaattaagttttctatgaactttgaagccgtgtgtgtgtggtgtgtgtgtgtgtgtgtgtgtgtgtgtgtgtgtgtgttttattggggagaaagagtttgggggagaatgaactgtagattggtcaaaatatatttttgagggtgcagaatgactgtggagtgaacctaagagaaacactttgttctgacagtgtgtgtgcatgcacattattgtgcatttgtatgaagttgtcatcagatgtcttcagttgctttttaatttctttgggtatgtgggtatggtgtatgagtatatgtatgcatggctgtatgggtgccctcatttatttatatacttctggagaccaaagatctatgttggttatcttcctgaatcactctctgtttccctggacctgcagcttaccatttcagctatgatgagtgaccagcaagcctctgggatctttttgtctctgcctccttgaactggtaatcactctgttgagcctggcttttttatgtagataatggagatccaaagggtctatgggtgtatagcaagcactttgctgagtagtataggaaatgtcaaagtttagtaggcaaaggggcttttgctccagtgctcattttctcctggctgtccattctcctttggcatctgtgatttccatgttgtcagtgcttatgttcacacagttccaaaggatttacaggtaaggctgaaaggttgcctacatcattaacaatactggctgcgctcacagaggactaccaaggttcaactttctgtatgcacacagtagctcacaaccatctgtagctctagtcccaggagatccatcttcttctgacctctgtggacactactcatatggtgcacaacatgcagccaacacacacaggattttttgtgttgtttgtttgtttgtttgtttgtttgtttgtttggcttggttcattttgttatgggttttttggtttgtttggggttttgttctgttttgttttgggggggcggggggttggggttttttggtttggtttttaagattttttttacgtacattggtgtcttgcctgtatgtatatctgtgtaaagatgccagatcccctggaagtggaattacaggctgtcatgagctgccatgtggatgctgggaattcaacctgggttctctacaccagcagtcagtattattaaccactaaaccatctctccagccccattcatatatagttt

SEQ ID NO: 23876 - DNA, 1191 bp, Mus musculus
ttcagactataagccagagttgtgttataaatcagtaaatcactcccttgaccatgacaacttgcgactggtaaatgttcattttgtcttaaagcccattgctgaagcgccattcaagtttgacatggagttggacgacttacctaaggagaagctcaaagaactcatttttgaagagactgctagattccagccaggatacagatcttaaattggtcaggtatctagaactttaactatacagttaaccctttatagcaagggagagatggtgtaagttaaaacatctctaggaggaaaaaagaattcagtttgtccccttccattgatagatcattcattctgattgcttcatggtgtgaaatgaggatgttaggcttcgtctttcacagattatgaggacatgaaataaagtggcagcccttagacactgtgacggtcgtgtgcattgtgggagtggacttttatggaagaaaataactcatgggaaggaatagctttgagtcatttattcccaaaaacttgattttacttcatatgacattttaaatattgagaaattctattgtgtaacttttgtggctttgggactgtgtggttgtttttttggttagttgtggtattaggaattgaatccaaggcctcttgcatgctaagcaagtgctgtaccactgagctacactcagtgtagatttgagaagagggagttaatgggggaagggaaagggggtaagaaggtaacggatgaatatgctcaaaatacattttacatgtatgaaaatgtcagtgaaacgcatcattatgtataattaatatatgctaataaaaacatttaaaaataaagatttgaaaggatagaattttattcactaaacactttgactgaggcacagatatagaagccattcaggacaaacactgatagaagtaagcctacggtatcctaggaagacagggcgtacgaaaggggaaaatcatagagactgtgcaaaagaccgccaggaaaggagaggaggcacagtacgggaagagagaaaaaaagaattcaaaacagtcccaaaaggaactagattttcaaggtgtggcttcatcttgaaaagattcggttggagtggagtagggcatacagtacataactcttgtgcttactggaagccttgggtgacaggtcccaatgctttcaaaagagag

SEQ ID NO: 23877 - DNA, 2279 bp, Mus musculus
tgattgctcttccagaggtcatgaattcaaatcccagcagccacatggtggctcacagccatccttaatgagaaacaaaaaacctatgggccagagggagcagggttggagcgaaagggaaggggagaaaaaaggaagaaaaaagaatgagggcagagactcagccttcaggacctcatgtgtcatgtgcgtgtgagagtgcagtgatctttgacaatctttttattcacattacatttttattttgctattttgtgctattgttgcttttattgttctgacatggctcaatccttactcctgagtttatctttgtttttcaggacaagggctcagaggactggacgagttcagatgtcggtgtccccccagttctttaccctggtcctgtcttcagcccgtctcagcttacccactcttgactcctttgagcctttcagaggggcagtttctggtagtagcagcttttatactttcacggaattccttcagtccagagagttctggcagcaggccgtgcagcagtgtgcactttcaatgcacttaactgcttactgttgtttagtcacgaactgctttctggtttgaaagatgcagtggttcctccctgttctgaatcctttctccatatcatgtgctgaaccatcagcctcatcagagggagagtctttccagacttgttccagttactggcacctcacttcacagtagggaggctaggacataaggcaccttaagtcagtgacagctccaaatttgcacttcatctgttggctagtaactgtctacctagacagtaggagcttgtgggtatccctggatggtattacaggctacaggggcaggggcttctgttgcaggagtcctttggggctattttcctgtgtatcatgttagtcctaaatttaaggtatgtactatttgcccagctttttaaaaatttgatcattgtttaaatgaaataggaaggaagcattgcaccagcagtatctgttgttctgcagattttatatggttacttgtatcgtaatggaggtggagctcttgccaaaatgttacatgctatccttagccagagagtgaaagtaacagctgtgcttgtcatttactgaaaggtggacacacacaaagctgtggaagtttccagaacagtagagagcaagctgacctagatgttcagggcagagctccatataaccttgaacagccacacagaaggctgtttgcgtaaccacattcactacctagggatttagctaaaaggaacactgcatctttaaatgagaaagtgtacagttcttctcctgcagcatgtcagcatctcgagctcacttttcagcagtgtaatgacttgtatgtaataaagccttgatgggctctcctcatgaagctctgctctgttgccaagttagagatgtttctggtactgctgagttaatgtcataaaaggctagcagtaactgttcgagctctcttttatttccttctctcctatattttgttcctgcactgtgtgctgtggagttgatggtgttatcccagtgcggtgcctccagaccccctcactgctctctgatgagaaatatgccttgttcaatacttactgtgctcttgcatgactgttaaggtttctgtgcagagaccaatgtccaagtgtcacatcctttgattgaacgaaatctgttgtgacctctgagttgtattccatgaagagaatgctacccagaagataatgtagaaaagataattatattgttaacttttcatttctcagctgtccttttgttttcttggtttttattttttattttgacatcaatggaaaatgggttctataaagactgcctgctagtatgaacagcaatgcaatgcacttgtaactcatggaaataaatgtacatctttatctttacacccatgataagattcagtgttgattttctctggattggtgtgtcctaagtaggcactcataatcaatttatggcttgtgcttcagacaaaaatgttcatgggccttactctacttctccccactccaccctaccccccatgcactgcccctcacagcagtttacgtatatggctgggaaaggtccttttcagctgcacatggtgccatgcatcgttaatcccagcattcagaagtcagaggcaggtggatctctgaatggaagcaggcctgatttgcatagggaggtccaagacagctggaactctataggtcctgtctcaaaaaaaacagagtcctccccgtctgcctctcagcagcaaatgaa

SEQ ID NO: 23878 - DNA, 1127 bp, Mus musculus
atctctgaggaatcacaaaggtagacacctacactgcatgccacatagtattcagaccacttagggagacttccatttgcttaggataatatttacattaatattagtagttaggtttgaacttttggtgacttctatactacggtaacacattcatatatgcatatgctttgggtccttcatactacttttatatttgtaaatcagtgttttggagcaattccaagtttaagggaaatatttttgtaaatgtgatggttttgaaaatctgagcaattcttttgcttacaagtttttttaaagcatttgtgctttaaaattgtgctagtgtttggaatatgataccctataacccagataagaaacataagaatggagtaaacgctgtcgcttgtcgtgctatgcccagcttggcgtgctggatcagcagtgggactccggagtccctagggtcacaccagctcacctgcagcttgttgcctttctgtgccgtccgcccgcccttcagagcactccagaaagttctgacatggctctgtatctgctctgtactgtggatgcctttttggtgttgtatcccaaactgcatagattatttaggataatgataagtttaaaaaattaatgttgaagaaagattttattaagaatttaaatgttttttcattatattgttaaacttgaacatttatctgtggcttatgtgatttggttaatatgtataaaaattgtaagaggtttatatttcatcttaattcttttgatgttgtaaacgtgcttttcaattcattatttgaatgtttatggcacctgacttgtaaaaagaattacaaaaaaaaaaatccttagaatcattacattgtctcactgtgttgccagggtaacagtgctgttcagtacagtttagtcattccatatagcatgccttctgactgaatttactggtcgctgctaatatagtagatcacaaactgctgctctgggtgactggaatctccatcaggtcttccaggtgattcttcagacactggttacagggaaggaaggcggcctcgcacccctccccatcactagccttcagtagccccagtgctaaggtaggtatcagatgtggccttttcacagca

SEQ ID NO: 23879 - DNA, 1151 bp, Mus musculus
agaaaaatttaaacagggcagagcagcagcagggagccctgcatggacagaggctgctggtgcctaactgtgttctcacactcttctcaggccactcacaagctactacaaggtggtgtcagaagcatcaggaccccagaagccctcggttctcagcgggctctgagaccctgatcctttgctcctagtggatgctgcaggaacgaacgtggctcgccgccgcccccacctccacccccaccctgggaaccttgctgtgtgacgacaggagctttattttatacctcccacagacacgccacagagggctgacagctttggctaggagacagggaggccaaggcgctctgtttgctcgagcttgctggtcctgctgttcttggtgaactccctgtgggttccacagcactgcagtcagccttgctcagcagccgacacctgtccccagggcaggcagctgtgtcctctcctgtcctccagcacagaggacagaccaccagggcttgcatttccatgggtcggttgtctatagcttaaatggtagtgttttagacagtaaagacacttggattttgaaaactgcctgatgagctcatcagaaaataaaggacttttgaggggaaaaaaaatctcatttctgatctcttcaaatacctgacagatgccatcaagaataagcattaaggtataaaaatactatgtatacagtaacaagacaacaaggaaataaaccacatttctaaagcaaagtggcgttcatgacctggtatcacctcccactgttctgaggaaacctctttaaaatagtcacagaatggtgctgtttacaaatgtaaggaggtgagacattcagtggtttaccagcatgcctggttgtggtcttgcatcacttaccctgaagccagctcatggtcagttcttttggtttatatttcacagaaggccaacgcaaaatccaaaaaaaccttgataaatggtttgtttatatccattactccccaatacaggtaagtcatatagagtactagcaaaaacgttccagtcagagctctcacaaaagataatacagagtgctcagttgaggggcagatagcatgcccagagcataaagtctaaatataatcttagtatatacagaagacttctccaag

SEQ ID NO: 23880 - DNA, 1186 bp, Mus musculus
acttagtacctttattaattattttaatattttgatgtgggtttgaatgccatggtacaaatgtgggcagaggacactttgaggagttggtcctctccctccactgtgggttccaggaatagagttcaggttttcaggcttgtgtgatattgaatgccatctcaatggttctgtacgcattttgaatttcagaagtcaggtgttgagagaagggttgactatgaagctcagtggtagagcacacacttaacacatataaggtctgggtttggtagctggcaccaacaagaaagttcagaccttgtagaaatacacagcagtctttattccacaccctccttattcagcccagtgactaccccttacatagtgatatttgtgtgtttataaatctgaggatctgctcacagcctggggcttacagatacatcagtgcaaccactgaactaatatcctagaagcctcaggagtcctggctgtgtcttggagacttcccagagagatctccatttctgtgtaagctgcagagggtcagttgtgcagagatctttctgttctgtccctgttgctcctgtcttggtagcctctgtgttacttcaccctttattaattattgttaattatatgtcttccagaaacttgatgggaagtccttgatcaagctgaacttcgcaaagaacagcgaaggtgaggatccctttaggacacagctccaggactggcccacagagaccccgagctcttactctcagcaacttcctttcctttcttctctctcttttttttttaaatatttatttaatgttgtatgagcatcttgttgctgacacagcagaagaggacatcagatcttattacagatggttgtgaacctccatgtagtcgctgggaattgaactaaacgacctctggaagagcagacagcgctcttaaccactgagccacctctccagtcctcctttcttctcttgtggttggaggctgaccatgggccgcacagtgctacccagtgttctacttcacagactcatcttcagcctccctctcttgtacctttctgacacttgcttttgcttttccagatgtcacatgacttctcaaaggtccaggtggtttaagtaaggatgggtggataaaggcagttagacagttgtgagctgctagtgccatggttgggcccctgtgc

SEQ ID NO: 23881 - DNA, 1375 bp, Mus musculus
gagatctgcctgcctataccttctgagtgctacgcttaaaggcgtgtgccgctgagcctagctagggcaggactcttggcttccattttcatagctgtgaatgctgaaggtcaggaaaaggagcagaggccccaggatactaggtgcaaatatgacggccagacatgcagctcaggggagcttgtgccctctgtgtgactgttcctataccttatactctcaggaggtgagtgcttttggggaagacggtgagggtgatgacctggacctgtggacagtccgatgttctgggcaacactgggagcgagaggccagtgtccgcttccagcacgtgggcacctctgtgttcctgtcggtcactggtgaacagtatggtaaccccatccgtgggcagcatgaggttcatggcatgcctagtgccaatgctcacaacacgtggaaggcaatggaaggaatcttcatcaagcctggagcagatctctccacgggtcacgatgaactctgagaaccagatgagtgatgggagggtggctgagtggcaatctcggggtcactcttgtgtaagactttgtttgtaggggccctcaagtgcctttatgattaaagaatgttggtctgggattatttttgctgtaaccctggggaagatctgaaggtgccagccatatctgtccaagttaccatctcacctgtctcaagcacctgctgaaatttttttttttttttttttttgagactgtctcactatgtatccttggcaggcctggaactcacagagagatccacctgcctctgtctcctgagtgctggtattaaaggtgtacaccaccacaactggccccaacctgttcaataaactcatttttattactaagtgtgagtgcatgagatgtgtttgttgccacctgtacctcagagcagctctctctagtcgcttctcatcttccacctttatgttggttccagagatcactctcagtttgccagcttcacacagtacacatagccatctcactgtcccaaaccttttctggatgcctgtctgtgcagtttaactctgcagtctaccatacagtgtcgtcagagccgccgacctcatttcccaggacttgaccttaggcaatttctctattgaagggccttggccgtaggcagggcccctgccaactgggatgggctcaaactctccagtcctctcatctcttactctcaggaacccattcttctggtggttgcagcagttttgaaacttatctttgactaaaggtctgttgaggattctgcctatctattgggaattaacacctcaggctcccagacttttgatggcaatggcacactcccccttactctgacctgcccatggtgcaggccc
